United States Patent Application Publication US 2005/0228172 A9 - sequence listing, part 130

SEQ ID NO: 609889 - DNA, 577 bp, Homo sapiens
tcaaagggctttgtaaactgcacagtctcataaaaggcattygcttttactaagaacccttcctagttatccaagtgtctagcctttaaagggaactcaaaagtctatttgtcttctcacccaaggagcagcctcttctattcaggattaccacaaaggcaaattgattgactaagccctcatccggccctaaccataggggctccaagttactttgtgggaaacaattagcccccttactctctgtgctacacacctgctacttaatcatcacacctggcatgaccattactttccaagagacatttatctcgcctaccccaattagttcattgagggcagcaaccttgtcagacatctctggcactccctttagtcctgcaggcctcaccagttgcctcatgcccctgcttaaaatacattattggctccccacttctcgtagggtaaagtccaaattccttagccctgggccctgtcttccttcttgctacactcttcctgaagactttcatgcactcaaaggctttaccctttaggtggtgactctcaaataaaacattgctagctatgactt

SEQ ID NO: 609890 - DNA, 577 bp, Homo sapiens
tcaaagggctttgtaaactgcacagtctcataaaaggcatttgcttttactaagaacccttcctagttatccaagtgtctagcctttaaagggaactcaaaagtctatttgtcttctcacccaaggagcagcctcttctattcaggattaccacaaaggcaaattgattgactaagccctcatccggccctaaccataggggctccaagttactttgtgggaaacaattagcccccttactctctgtgctacacacctgctacttaatcatcacacctggcatgaccattactttccaagagacatttatctcgcctaccccaattagttcattgagggcagcaaccttgtcagacatctctggcactccctttagtcctgcaggcctcaccagttgcctcatgcccctgcttaaaatacattattggctccccacttctcgtagggtaaagtccaaattccttagccctgggccctgtcttccttcttgctacactcttcctgaagactttcatscactcaaaggctttaccctttaggtggtgactctcaaataaaacattgctagctatgactt

SEQ ID NO: 609891 - DNA, 520 bp, Homo sapiens
ctcagttaactattcctaagagaaaccttgatattctggatatttgaaccctgagactaatccaggcacccttttctcctggtagcagcttgtgcaatgaggtacatttgggaagaatgtaagaaccttggaagtgcaaccttaccaaatcaccctacagtgaaggataatattacaagcttaaaaaacaatggcccagattcttcgggaattaagaagagtccaacaggtgcagttcaaaagaacagcactcctaagaatactgtaatttaaagayaggaaacaaaccaggtaccatttacaccaaacacaggatctggaaataacacagtgatctagtaggtgccacagccccaccagccaccagaagagctttctcagtgaaacaaatggcacatttcatgatgtctcccagcatgtgaaaatctgctctacaaccagacaacaagatacgagagtgtccaagggcacgtgctggaaggcaataatgggattgagcagacagcatttgaaccaagac

SEQ ID NO: 609892 - DNA, 586 bp, Homo sapiens
taataaacatatataagcatagaaaaggtacaataaaaatatggtattataagccgggcacggtgactcacgcttgtaatcccagaactttgggaggttgaggcgggtggatcacctgaggtcgggagtttgagaccagcctgaccaacatggagaaaccccgtctttaccaaaaaaaatataaaattagctggatgtggtggtgcatgcctgtaatcccagctactcaggaggctgaggcaggagaatcgcttgaacttggggtgtggaggttgcagtaagccaagatggcgccattgcactccagcctgggcaacaagagtgaaactccatctcmaaaaaaaaaaaacgtgttatgatcttatgggagcatcgttgtatatgctgtctgacattgatggaaacattgttttgtggtgcatgactgtatagggttaggtttctgtgagcttctgcttacaacattttcatcaaatgatcaatccataagcttgtttcatgtatgtttttgtttaaagacatcttctttaatatacatttttgattaattagcattgaactctcagccaatagccctgtagctcat

SEQ ID NO: 609893 - DNA, 616 bp, Homo sapiens
acctgtaaaaggagaggtgttgtttttgttgcttggtcatgacagcttgattcagttcaatagacatttgttgagcttctgcgtgtccttcctgccacaaaggatggaatcatgggctggacagagaagaattctgggcatggaggtcagtgacagctgcccgtaagtaggagagtgtaaatccatgagwcagggaagcacatcaaggactggaagcgagggctcagagtggttgctgaaagccatatgcttttgtgtagtacgaggcttgagcctgaaatctgttgcctagagatgattctgttctgttaggctgccagctcggtgcttttgccctgtggctcaacatcctagaaccgtaaatgctgtggaggtcagagagttggagatacagtgagctataacacatggcattcaagcaggggaaaaagtcagatggacatgtaactatgtaattatagtgtgtctccagtgttgtgtgattacaaaggagggagaaattgcttcctgttggaaagatgcccgaggcttcatgaaggaggagatgattgatgtgctgattggccgccaaactgcccctgcccttacctttccatctctgtaatttccacccagt

SEQ ID NO: 609894 - DNA, 616 bp, Homo sapiens
acctgtaaaaggagaggtgttgtttttgttgcttggtcatgacagcttgattcagttcaatagacatttgttgagcttctgcgtgtccttcctgccacaaaggatggaatcatgggctggacagagaagaattctgggcatggaggtcagtgacagctgcccgtaagtaggagagtgtaaatccatgagtcagggaagcacatcaaggactggaagcgagggctcagagtggttgctgaaagccatatgcttttgtgtagtacgaggcttgagcctgaaatctgttgcctagagatgattctgttctgttaggctgccagctcggtgcttttgccctgtggctcaacatcctagaaccgtaaatgctgtgraggtcagagagttggagatacagtgagctataacacatggcattcaagcaggggaaaaagtcagatggacatgtaactatgtaattatagtgtgtctccagtgttgtgtgattacaaaggagggagaaattgcttcctgttggaaagatgcccgaggcttcatgaaggaggagatgattgatgtgctgattggccgccaaactgcccctgcccttacctttccatctctgtaatttccacccagt

SEQ ID NO: 609895 - DNA, 616 bp, Homo sapiens
acctgtaaaaggagaggtgttgtttttgttgcttggtcatgacagcttgattcagttcaatagacatttgttgagcttctgcgtgtccttcctgccacaaaggatggaatcatgggctggacagagaagaattctgggcatggaggtcagtgacagctgcccgtaagtaggagagtgtaaatccatgagtcagggaagcacatcaaggactggaagcgagggctcagagtggttgctgaaagccatatgcttttgtgtagtacgaggcttgagcctgaaatctgttgcctagagatgattctgttctgttaggctgccagctcggtgcttttgccctgtggctcaacatcctagaaccgtaaatgctgtggaggtcagagagttggagatacagtgagctataacacatggcattcaagcaggggaaaaagtcagatggacatgtaactatgtaattatagtgtgtctccagtgttgtgtgattacaaaggagggagaaattgcttcctgttggaaagwtgcccgaggcttcatgaaggaggagatgattgatgtgctgattggccgccaaactgcccctgcccttacctttccatctctgtaatttccacccagt

SEQ ID NO: 609896 - DNA, 573 bp, Homo sapiens
aatccctgtcaacggaggtgttcaaagactgaatgactgtggagggaatgtgatcgagctgactccagcaggactgggaagatagctcrggggatctttaatgttctcacctcatgttcagcattaacacctgagatgactgtttaatattatgtagatactacgtgccagtgaggacagtgtttcccaaagtgtgacttgttagatgtttcccacagggtggtatgcttgatgattttctttggtaaggaatttactgttaaaatagtaaaaatacaattagtacaacaaatcacaatttcatggatatcattgcctgggatgaagctaacaaaacccatgccatagtaatggacatttaaactgtaaaaattacaggtgaggccctaagtggtaaccttgaacatttaagaccttcattgctaaattttagccttaaatgttttgaaggatgaatagtacaggtgacccagataaataatagggaatctgatctactgtagttctatgctatatctcagtgttcccccccaccaggggtacatcgtgaagcagatttgaatttgcttcaca

SEQ ID NO: 609897 - DNA, 550 bp, Homo sapiens
tcaggtcttgagttcaagaaatggaactaataccattattagagccagcatggtgcagtagatggtggcatggcatttggagtcagtcagatctggataagaggctcttccgtttaatgactgtgtgatcctaacctcgggaaaattatttaatccttttaagtctcagtttcctcatttgtaaaattgagttcacagtaatagttatttcataagatttttttcgagaattaagtaaaaatktaaaggatttgttgcataaaagccccttatagtatctagtataaaattaagaacccaataaatattaaccattatttttattgatgatggtggtggaggtggtgtctagtatgacccctcatcctcattctaccctactgaattgcagaaaggccttttacatataacccaattgcactgttcacttccccacctcaaacttactgcttgcccaattgaacttaactttattcagtttagattgggtcatttttccattattctgaggattgttagaatactgaccaagaattttatgcaaaagtga

SEQ ID NO: 609898 - DNA, 550 bp, Homo sapiens
tcaggtcttgagttcaagaaatggaactaataccattattagagccagcatggtgcagtagatggtggcatggcatttggagtcagtcagatctggataagaggctcttccgtttaatgactgtgtgatcctaacctcgggaaaattatttaatccttttaagtctcagtttcctcatttgtaaaattgagttcacagtaatagttatttcataagatttttttcgagaattaagtaaaaatgtaaaggatttgttgcataaaagccccttatagtatctagtataaaattaagaacccaataaatattaaccattatttttattgatgatggtggtggaggtggtgtctagtatgacccctcatcctcattctaccctactgaattgcagaaaggccttttacatataacccaattgcactgttcacttccccacctcaaacttactgcttgcccaattgaacttaactttattcagtttagattgrgtcatttttccattattctgaggattgttagaatactgaccaagaattttatgcaaaagtga

SEQ ID NO: 609899 - DNA, 537 bp, Homo sapiens
ggtcagggaacacttcctgggtgtgttttgctatgttcttttcatgatatagactggaaatgattgagaaggacactgttctagtggcttttagcaacctgactcatccaggacaatacctcttaccaacttagcacaacctctcaggctgacacactgcttttaggacagtgtttgaagacatggttcctagggggaaagggtgtctattaacaatgtaggttcctgaacccacccaagatctactgcatgagaatctctgaagagacatccaggaatctgcatttttaaccagcaatgtagatggttctgatgtacattagagattgagaagtgcggtcttaggaagtcatggtaaatgaaaatcatgcccagcttttactcctccttttkcagtcaggtagcaggctggctcagctaagaaaaatccctagatgaatatttatttctgcacagggaatgtttcctctcagagtaggcgggtgagtatgctgagtaggtcattccctgccattcctattgctgggcaggaaaccc

SEQ ID NO: 609900 - DNA, 456 bp, Homo sapiens
tgactttgactctggaagggtgacagggaagacaatttcagaagtaggctatgagctcgagtgtttttggcagtgcagggtgcttgtgtgggggtggaggaagagagcccttattctgccattccactgtgccctgacagggaagggaagggtttttctggggctgctggattacactaaacsctcttccaccccaggatccccataatttaaaatcacaccctctgctcattaaccaaacttagcaatgaagaataagaagagaagtaggtaggaagcaagggttagagtcagactggtgctctcaaagctttcattagctcgttcttgggcaagttttgcagagctcatcttataacttttaatttcgaagcaggccctcttctccctctcttcaggagtgttgagtgtgagctataggacagcaactttgctctcaggaagctgctcacctgg

SEQ ID NO: 609901 - DNA, 383 bp, Homo sapiens
gatgcatcccattaaaaaagtracgtttcgtgagtcagttaagacaacctcactgatgaccctggatcatcattgctctaattaaccttgtacttagatgtgccgcttgatgatattgtgtgtaaaaattaaagcataaacacttaaaagatgtggaggaaatacaccaaggatttgtcccatccagggtgtttacaagatcaactgccattttcaaatgcagagcaggctcagcctgaggaggacaggagttagacccctgtctatcctaatgttgttgaaatgcaaaccctttttggtcaaggaacaatgtcataataccttaggcacaagagcaactgtgtggaaatgggggctgggtccttccgctataatgaagcaca

SEQ ID NO: 609902 - DNA, 383 bp, Homo sapiens
gatgcatcccattaaaaaagtgacrtttcgtgagtcagttaagacaacctcactgatgaccctggatcatcattgctctaattaaccttgtacttagatgtgccgcttgatgatattgtgtgtaaaaattaaagcataaacacttaaaagatgtggaggaaatacaccaaggatttgtcccatccagggtgtttacaagatcaactgccattttcaaatgcagagcaggctcagcctgaggaggacaggagttagacccctgtctatcctaatgttgttgaaatgcaaaccctttttggtcaaggaacaatgtcataataccttaggcacaagagcaactgtgtggaaatgggggctgggtccttccgctataatgaagcaca

SEQ ID NO: 609903 - DNA, 578 bp, Homo sapiens
atgtgaacaccatttaagtctttctcaacattgcctattgtgtactcttcacgaaggaacatgtgtttcatgctatttttctgaaatactgcactaaaaccttggtaaggattatgttctctactaaagtcatgcttgaccttatcagtgtgaaagtttttttttttgacccagaaaacttactttttttactttttcaagacaatgtctttaaactttcagcacaattgcaatagtttaaccctcattattctcactcatattttacwtgatggaatatgttaaaatatcttggtgagaagaactgcaaaacactgctggaaaaaatcatagatgacagaaacaaatggaatagaatgaatcaatattgttaaaatggccatactgcctaaagtaatctacagattcaatgatattcctatgcaactaccaatatcgctcttcaaagaattagaaaaacctattctaaaattcatatggaaccaaaaaagaacccaaataaccaaagaaatcctaagcaaaaagaacaaagccagaggcattgcactattcgacttcaaactatgctctaaggctac

SEQ ID NO: 609904 - DNA, 605 bp, Homo sapiens
cctgaaacttctcctgggcccatcttgcacatcctcgtaaaatccaaacttaccaagaatctcctatcctatttatctgatcatcctgacatctgatgggctcctcatcctccaccatcacccaggtgatatctaatcaccctggcctgtcttcaatcagaatcttattaacggtttagctagaatcctcccttacatctgacacttcctcttagaaattttctatccatcaagcctctccttgctatgaattcccacttgtgcatgctgtattcagaattatatctacttctatactgaggtgtgttttcccttcttgcaatagctctgaaaaatatctgcttcaactgctttaactactatccagctgtagtttctcttgaaaacttcataacatataagctgagtaaaatcaagtcagttagcaaaacatagagaatctcagttttctcatgtattaaaaataaaaaagaataattgcaaagcattatagtgtagtttaaatgccattagatayatggaaataactattagagttaaatttatatcatccattaaaaatagtttccttactttgtttttaccatctaacatttcttaaaaat

SEQ ID NO: 609905 - DNA, 605 bp, Homo sapiens
attagcacttttctaccacccactccatttttcaatagttacagctccctacccttatcttatcagggttagtcatttgtcctttaaaaataattaggcacttagtcttttgtccacagatgatttctgaaggttaaaaaccaataaacatttacataaatctgtgtatataaatatttctcattgcaaaacccacaggaaagctaagaagcatttccttcttcaatttactagcctctataaggtccaaggtcaggacaagagtgttgctcacagtggagtgttcctaataccaaggacaaacaaaattttattttcttatrtttcattaattgttcccaagaataacacattttcccttgcctcatatgtagaccttgactttctattactcatgttttgttgtcgttttgttttgtgtgtttgtttttcctgacttttctaattttcaactattttatcttgtaagaaaaagaaacatttatgtatatataatatatatatacatcactagtatattccagctttttatataattactcgactgttcactagccaatgtcttttagatatgcattttagagccactgatgtttagtcttata

SEQ ID NO: 609906 - DNA, 437 bp, Homo sapiens
ccttacaccttgtacaaaaattaactcgagatgaattaaagacttaaacgtaagacctaaaaccataagaaccagggaagaaaacctaggcaataccattcaggacattgrcatgggcaaagacttcatgactaaaacaccgaaagcaatgtcaacaaaagccaaaattgacaaatggaatctaatttaactaaagagcttctgtaccatgcttttttgattgctatatagttgtatgaggttttgaggtcaggtagtatgatgccttcagctctgttatttttgattatcattgctttggctatgcaagatctttggtggctccataaaaattttagtatatttttttctgagaaaaaaatgtcattgaaattttggtaggaaatgcacggaatctacagatagcattgggtagtatggacattttaacaatgtaa

SEQ ID NO: 609907 - DNA, 646 bp, Homo sapiens
attcattaaaataactcaattgtgaaacagattaaacagcattctacaccatatattttatttcacttttaattatcacctttgatacactttaactcctatcagtaaatatgaatgggcacattttaaatgaagtctgtaagtaaagaaatatcaaccattaaagagaaaaatagaaatatgaagtacttgtttttgcttcactagaaataacatcaaaaacatgtttatatcatctttatcttttcaacagtctaatgcactgttgaccagagaagaatgaaatagttagaatttgatgtaaatgaatttttaacatattctatacaaattttaatcagttgcataaaatacaaaagaacagtaatctacatgtataaaatacaaacaagtcttaatattgtgaatgatgatattaaactaaaaataatattatgaatgatgatattaaatgaaagtacttggcaaagtcagtctctgtatcatttcagaatgcttttagcaacaagggaattgtagctgaatttgggatttcccaaactgcaktggcttacgcagtggaaagtgagcccctttcatacagaaagtctctaaaccttggtgcttctagtgttagatcagtgcctctgagttcatcaggaactca

SEQ ID NO: 609908 - DNA, 565 bp, Homo sapiens
acactttgtaaatcactgcaccaagttagaatgcaaatatggcttttgctagcaaattccttcagtgtgagtatgatgagcacttgctagtagcttaatatattttactcttctgcccttgtagagcataacatggtaactatgtggacctagtaacaataaagatacagtaaccataaagacacaataactaaataattgcagggcttgcttggcacccagaaatctaaacctaatactttctcttatttcttgacctaactttctagttctctatgtggttggcaasaaatcgaaaaagtccatgaaaggatgtaacatcctacaggaacatatgtagtgactgagtatagatcagcagtcctcacaattcagtgtgcatttgtatctgggccccatgaatttcaaatcagcagttctgggttgagggatgaggtatctgctctaataagcaccctagatgattctgatgtaggtgttgtttccaacatgctttgagacaatctgacttaaagattcaacagatgtttggttgcttcttccatgagaaaacaacaataacaaa

SEQ ID NO: 609909 - DNA, 574 bp, Homo sapiens
ttaaatttcatttaatgattaataaaataaatattgcactaaaaaagaatagcctgaaatactagtattagtcctattatctcagctcagggttgaaagtacttaaattattaataagacaaaacagtcatctaattgttttcttttcttgtatgacatttctgtaactacagaacaagaaagaaatgtcaattatatatcaatgagtaattcctgttaaagtgcatagtgaaaaataccaagtaagaaactacaaaagctaaaatgggttagcataatagtaagatactaaacctgatgcttttcaaaaaattgttaatttggagcaaatggacagaacacactgcatttmtaaacaacctaatcaatagtactcaaatatctactgcagtgttctaggaacattatttaaatcaaagaatgacatagaactatcaaggaactaacttattgaggaaatatacaacaaatagtaacaaaatgcacagatttaaaactatattaaacaaacaaaacacacagatttaaaattatattaaactatattaaattatattaaactatactaaattaa

SEQ ID NO: 609910 - DNA, 590 bp, Homo sapiens
ttgcattggataaagagtgaatctttgaatttcaaggtcatattcagctgaatataagctagagaaattggaacttatgaaggtggtgatgaatacatgagcttaaaaaggattggaaagggccaggcacggtggctcatgcctgtaatcccagcactttgggaggctgaggcaggaggatcacatgaggtcaggagttcaaaaccagactggccaacatggtgaaaccgtgtctctactaaaaatacaaaaattagccagtgagccgagattgtgccattgccctccagcctgggcaacacgaatgaaactccatctcaaaaaaaaaaaaaaaaaaggattggaaagaagagatatgaacttctctttttgcttccctgaagtagagaaagcagagcttaagaaacaatttatatggactatgtgttccaacttcctaaaaatcaccatataaaattctatgtaggaaataaaaataattgcagattaacacagtttatatattaatcacatcagtttataaatataatgcayacacatgaaaaacacacaaaaatgtgtgttctaataaagaaattagatagaacagt

SEQ ID NO: 609911 - DNA, 527 bp, Homo sapiens
ttcactaagtctgtctgtcatcatgaactacctattatgttttgttttctcccatttctctgagaacaggaatttttacatagggaaagacttaattatttgcttagagatttctgatgattcttgatgatgaagagaaaatrctttttgtattagttttctagggctgccataacaaaataccatggttggaggggtggaggacggggagttaaacaacagaaatgtatttcctcacagtctaaaaaagtctaaggtctaagaaagtctaaggtctacggaagtctaagtgttggcaaggttgttccctcctaagccttctcctcttcttcttggccatcctcccctgtatcctcacaggtcttccctctgtacatgtctgtgtcctaatttcctctttgtgtaaggacaccaatcaaattggattagggcccaccctaattacatcattttgatttcattacctccttaaaagccttatcttcaaaggcaatcatattgggggttaggactccaacataccctca

SEQ ID NO: 609912 - DNA, 536 bp, Homo sapiens
attgtttctttttaccaaccactagaagtttagtgagttccataagggcaggtatttttgccagctttgctcttggatataagcctaatgtatggatgaagtttctgccacctaaaaaataaatttaagtgagtggctacagatctttcaagttcactattttccccataattgtatattcttttaataacaagaaatgaaatacaataaaaatgcatgtaattataatttttgaattaagagataatgccaaacagtataaattagtaaaagagtagtgtatctgaaaaaattactgaaacatctccataataataataatgctaacatgtattgtttgcttatttagtgtctcatgtttcacttagaactttttttctctgttttagattaaggaaactttttcaaatccacagccartgagttgtacagttagaacacaatcctatatttctgatcccagaacctgagctggtaaatactcttccgttctgcctcatgtttaagaatttgttttcaagcttggttccaaataa

SEQ ID NO: 609913 - DNA, 496 bp, Homo sapiens
aattcaggactcaaaaagcagaatatattttaaagatttataatatttgacaggtttttcagtggatatattaaatctacagataattattgatttatttaacttatgcatttaccggcaattaatcttcttatctgtgttattatattacttatactgacaagagtcacctagcttattttacaaaacatrttattagagttactgaaataaaaagaaaatccacagaaaggtactatttcaaaacattgattacctgggttgcaaaaagaaatacatgtttgtggatagctagctggaaagaaacctgtatttgtggctttaacataactattctttaaagtactaaaataaacttgcttctttataccgtttctgtgcactgtctgagatgaaacttccttataatctacatttctcctcctgttacaatagtaggagtttatttttgaagtcatatatatgtctgtgtattccttttattatgatcactttg

SEQ ID NO: 609914 - DNA, 496 bp, Homo sapiens
aattcaggactcaaaaagcagaatatattttaaagatttataatatttgacaggtttttcagtggatatattaaatctacagataattattgatttatttaacttatgcatttaccggcaattaatcttcttatctgtgttattatattacttatactgacaagagtcacctagcttattttacaaaacatgttattagagttactgaaataaaaagaaaatccacagaaaggtactatttcaaaacattgattacctgggttgcaaaaagaaatacatgtttgtggatrgctagctggaaagaaacctgtatttgtggctttaacataactattctttaaagtactaaaataaacttgcttctttataccgtttctgtgcactgtctgagatgaaacttccttataatctacatttctcctcctgttacaatagtaggagtttatttttgaagtcatatatatgtctgtgtattccttttattatgatcactttg

SEQ ID NO: 609915 - DNA, 621 bp, Homo sapiens
ccccagggaagtgtagtttgtcagtggatggtttgcagcatgaatctaaccagggtatttttatttacaaaaaaaaaatttaaaaacctttgggctagaaatgaaaaacaaatcgcacacatacactgtgcttatacatgaagaatttcatttaatctgataatactgttcatagagcctatgctgacaagttttatgttkatgtaaaagtaatttcagtttttgccattgacagtaatggcaaaaactgcaattacttttgcatcaacttaatactatataaataaatctagaatatagctactttcctattaagaagtaaaactttttaaaaaatagcttatttcctaattaactttaatattcattctgtacttttatttttctaaaatatatattctatataaaaattctgcatatttctatgtacagtgcataaggaaataaatccatcatttcaaagagcatttgtttgcacagaaaatactaatattaaagatgtaacaagaaaatactactctaaatgtatgaaaaagaaaaactcatgaacaatatatttctcttaatgtagagtttgcagaaatacctattaactccaatttccaaatgtctattacttat

SEQ ID NO: 609916 - DNA, 621 bp, Homo sapiens
ccccagggaagtgtagtttgtcagtggatggtttgcagcatgaatctaaccagggtatttttatttacaaaaaaaaaatttaaaaacctttgggctagaaatgaaaaacaaatcgcacacatacactgtgcttatacatgaagaatttcatttaatctgataatactgttcatagagcctatgctgacaagttttatgtttatgtaaaagtaatttcagtttttgccattgacagtaatggcaaaaactgcaattacttttgcatcaacttaatactatataaataaatctagaatatagctactttcctattaagaagtaaaactttttaaaaaatagcttatttcctaattaactttaatattcattctgtacttttatttttctaaaatatatattctatataaaaattctgcatatttctatgtacagtgcataaggaaataaatmcatcatttcaaagagcatttgtttgcacagaaaatactaatattaaagatgtaacaagaaaatactactctaaatgtatgaaaaagaaaaactcatgaacaatatatttctcttaatgtagagtttgcagaaatacctattaactccaatttccaaatgtctattacttat

SEQ ID NO: 609917 - DNA, 517 bp, Homo sapiens
actgatttctttgaaattatatatcccctacatacccaaagtagtacggttccagtggctgatcatgttgcatacaatagaagcatttcaatgcatmatttatctaatctttcagactcattcttcagtattacaggaatggtatagcccttcaactttatgaccataggctagtattgaacacagatttcaatcagtcaatcaatcaatttgtttgattcaggaatttatgctaacatatgaaattacaatgcacaattcgatagataccaccctgtttaactctatattagccttattcctgtaacccttttgggatccttttccactaatactcccccaacttagctgataaacatggaacgatttcactgttcctttggtgtgtatgtatgttctttgggagccaaattcattttttttttcctctggaccatgttggagtttaacttttgttaaattttctggacctagtgattgttcttaaagaacacagagttctccttgcaaataaact

SEQ ID NO: 609918 - DNA, 517 bp, Homo sapiens
actgatttctttgaaattatatatcccctacatacccaaagtagtacggttccagtggctgatcatgttgcatacaatagaagcatttcaatgcatcatttatctaatctttcagactcattcttcagtattacaggaatggtatagcccttcaactttatgaccataggctagtattgaacacagatttcaatcagtcaatcaatcaatttgtttgattcaggaatttatgctaacatatgaaattacaatgcacaattcgatagatwccaccctgtttaactctatattagccttattcctgtaacccttttgggatccttttccactaatactcccccaacttagctgataaacatggaacgatttcactgttcctttggtgtgtatgtatgttctttgggagccaaattcattttttttttcctctggaccatgttggagtttaacttttgttaaattttctggacctagtgattgttcttaaagaacacagagttctccttgcaaataaact

SEQ ID NO: 609919 - DNA, 595 bp, Homo sapiens
gaaagggagatctgtttttagtggaaatgagtaagcaccttgctatgtctcccaaccttaaaacttttgactttgtgccagtatgtacttgaaaaggtccttgaggtggaagctaggcatagccaggaaaagaagtggtgcatttcggggaaccacggagagaaagggagaagaggtggattcacaactctgttaattcacatttaccattttaccacatttaacattttacaatgtttaaccatttttatgaaacaatatgatagaaagcacacacatatgtacatatactttgaggttactgttacaattacttatttattagataaaaagaacaataaagaactggaacttttgcattatayagattaaaagatacactattatacttgacaaattttgttcatgaatagattcttatttgaaaatttttggttagggataagttagaatacataactcagaaaatataacatgatttctaagtttgagtagattgtcaaagcaatcaaatatatagaagagtagttaatgatttttttcttaaatgtgcgataaaattactggggccatgaaacttaacaataacaaataa

SEQ ID NO: 609920 - DNA, 610 bp, Homo sapiens
attgaattgcacattctataggttctgacaaatgtatacaatatcatttatccaccactattgtattatacagaatagttacactacactaatattctttcgtatttcaccaatttacctcttgctccctcttactgaatctctgtcaaccactggacattttactgtccctatagttttatcttttctgtaaagtcatttggtcggaatcatatagtatgtagtattaaatattcccagattggcttctttcactttgcagtacccatttatggtgctccttgtcttttcatggctagtatcttatttctttttattagtgcgtaataacccacagtagagatgtaccacagtttaggtattcattcwtctattgaaggacactgtattactcagtgttctccagagaaacaatcaatagaatgtatgtgtttatcggcctgtctgcctgtctgttggtttctttatttactagaaagaatgggatcagcctaccatttaaatgtaaatctcatccaaaaacaccctcacagacacacccaaataatgtttgactaaatatctgtggaatccatgactccatgatccagtcaatttgacacagaaaaag

SEQ ID NO: 609921 - DNA, 610 bp, Homo sapiens
attgaattgcacattctataggttctgacaaatgtatacaatatcatttatccaccactattgtattatacagaatagttacactacactaatattctttcgtatttcaccaatttacctcttgctccctcttactgaatctctgtcaaccactggacattttactgtccctatagttttatcttttctgtaaagtcatttggtcggaatcatatagtatgtagtattaaatattcccagattggcttctttcactttgcagtacccatttatggtgctccttgtcttttcatggctagtatcttatttctttttattagtgcgtaataacccacagtagagatgtaccacagtttaggtattcattcatctattgaaggacactgtattactcagtgttctccagagaaacaatcaatagaatgtatgtgtttatcggcctgtckgcctgtctgttggtttctttatttactagaaagaatgggatcagcctaccatttaaatgtaaatctcatccaaaaacaccctcacagacacacccaaataatgtttgactaaatatctgtggaatccatgactccatgatccagtcaatttgacacagaaaaag

SEQ ID NO: 609922 - DNA, 610 bp, Homo sapiens
attgaattgcacattctataggttctgacaaatgtatacaatatcatttatccaccactattgtattatacagaatagttacactacactaatattctttcgtatttcaccaatttacctcttgctccctcttactgaatctctgtcaaccactggacattttactgtccctatagttttatcttttctgtaaagtcatttggtcggaatcatatagtatgtagtattaaatattcccagattggcttctttcactttgcagtacccatttatggtgctccttgtcttttcatggctagtatcttatttctttttattagtgcgtaataacccacagtagagatgtaccacagtttaggtattcattcatctattgaaggacactgtattactcagtgttctccagagaaacaatcaatagaatgtatgtgtttatcggcctgtctgcctgtctgttggtttctttatttactagaaagaatgggatcagcctascatttaaatgtaaatctcatccaaaaacaccctcacagacacacccaaataatgtttgactaaatatctgtggaatccatgactccatgatccagtcaatttgacacagaaaaag

SEQ ID NO: 609923 - DNA, 491 bp, Homo sapiens
gaaaaactgattaaaacactatgtaaataaaaaccaagattttagattgtgtttattctctgataaattgatcgtgtgactgggtcagctgagacatggcagttgttttctgctggtgtctctgtgatggccatctgccaacaaaggtaaccgcagagtcagtacagtgtgaaagtgtttcaataatcagatcttttacggctttttaaaaaatgaagacagtgtcttgacaatcttttaccagmactttgaatactaaatgattagaattttgctagctcttctaattcaataaaaaacaattttgttttactaagttcaattttgtgttgatttgcactgcttagtgttctgcagtgtggtagaggattttgcttattgcctaacactgctatgactaagaaaaataccgtgtgcagtgtctggaggctgctgatttttgagtcgtgtacattttttaaaataatactacatttaaacaatcacattgg

SEQ ID NO: 609924 - DNA, 482 bp, Homo sapiens
gttgaaaaactgattaaaacactatgtaaataaaaaccaagattttagattgtgtttattctctgataaattgatcgtgtgactgggtcagctgagacatggcagttgttttctgctggtgtctctgtgatggccatctgccaacaaaggtaaccgcagagtcagtacagtgtgaaagtgtttcaataatcagatcttttacggctttttaaaaaatgaagacagtgtcttgacaatcttttaccagaactttgaatactaaatgattagaattttgctagctcttctaattcaataaaaaacaattttgttttactaagttcaattttgtgttgatttgcactgcttagtgttctgcagtgtggtagaggattttgcttattgcctaacactgctatgactaagaaaaataccgtgtgcagygtctggaggctgctgatttttgagtcgtgtacattttttaaaataatactacatttaaa

SEQ ID NO: 609925 - DNA, 511 bp, Homo sapiens
atggataaatgtctgggccttgagtcagcaggcagggacactttgaccagcttatgagatggggagacttaggcaagggcctgaggtctgtcgtcctcccctgcaacccatgagccctatagcattgacccccgttcgctgtgctcctggatcttcgcgatggttttgtgttggcagggaattatagtgaaaagaaactgcccartcatttgacagcaagtaaacaatgggtcaaggattcaacttgtataatgtagacacaagtttctttaatacttgaacctaatgaatttttttttttccccaaacagaggaacttattcagggaccattcatgcagctttaatttcttcacttactttggaatatgagtgaaggagaaatgtttcacttgcaaaagagggattttacttattcccagagactgcaagattccctttgctttatcaaatagtgtgttttagctgcagttttgggttttggttttgatattaaaagccataagtgaatt

SEQ ID NO: 609926 - DNA, 618 bp, Homo sapiens
gggctgtttcagctcccttgagaacaaacctgctccagggaagaaagaaatcattcattacttcttcctctggttacctggtttgataagtatttgtcaattatttgaaaacgccttcttgttcaaacaggggcatctaaatttggcccagtgtcacacatactgggtcctagcattcaactagtgatttttctcatcacctttttcattgactaaacagccatcatctgagggattatgggtgttgtttgcctgtaaaatggacagtgggaaacatgcattcctggtgtgcaagaggaacctgcactgctgtggagctgtgaccagcatagtcagagcctcctggtgcttcattagtaaagtcaaattgtccattctattaataatacgctgctaaccaactgtcacagtagtcagtacatgcctctgtggcctggttaaatacatctttgtacactgtaaggtgactttttcccagccaactttgagtcctaaatygatagctatgtttatgtccatgattcattttttagaaggattgagaacaatgatattcagcatagagttgactgtggtccgtctgtttgggggacctcccctgcctcctgggggcttgct

SEQ ID NO: 609927 - DNA, 537 bp, Homo sapiens
tcctaaattgatagctatgtttatgtccatgattcattttttagaaggattgagaacaatgatattcagcatagagttgactgtggtccgtctgtttgggggacctcccctgcctcctgggggcttgctttctggcttatggagtgtgactagccgaggggcttagtagaggcagccttattgaggagctctgtgaccagcctgccaaccccattgcatatcctgggtcagaccagctcccaatagatctgcgaaaggccatttataggaccaagtacagagaacttcttcaagacagaaaaagacagaaaaacatcttcaagactgaaaaagggtttagcagtctactgtttcctctttgtgctttatatgtgtccygaacccagtggatgtgcagcaaagacccacttcggcttcatagacgcgctccttggaaatgatggaaaggtgcttgagcacgggaattctttggttgaacacccacttgcacatttggggtttcacatattctagttattttctttcacctttcactgg

SEQ ID NO: 609928 - DNA, 432 bp, Homo sapiens
acatttggggtttcacatattctagttattttctttcacctttcactggtaaaagccacctatgtggcttttggtggcttttatattgaaaagtatggaagttattgaagatgaagatgacatatgtttagagaactaagaaactaagaatcccrccataatactcattttagtgtaagaaagatattctgtgtttgtatctggcatgatttgtaggatgcagcatgtgggaaaactgcataatataaaaaggctctttataatgaagctctgtgtctataatatttctcctctgagtcctgaatgtttctggaaataatatgtaccttttctctttcaagttcaaggagtttcaattttgtttttgtctcttatcagatggaaattagggaggaacattaaatatcattattttatggataaactgaattc

SEQ ID NO: 609929 - DNA, 555 bp, Homo sapiens
catttatttatttatttatttatctatcgagacagagtctcgcatggtcgcccaggctagagtgcagtggcgcaatctcggctcactgcaacctccgcctcccaggttcaagggattctcctgcctcaccctcttgagtagctgggattataggtgagtgccaccgtgcctggctaacttttatatttttagtagagatggggtttcaccatgttggccaggctggtctcgaactcctgatctcaggtgatccgcctgcctcggcctcccaaagtgctgggattacaggagtgagccaccacacccagcctgattcagggtctttatgtaaaatatccataacatatctgttggattcaccctctggtacgtcagtggccagagagatgggagaagaatgatgggagacagttttttagcacttayaatgagaggcaatgttgtaaggacttggcagtagtaatactccccattttacaggtaaagcagctgaagccagatattaggtaacttgtgtgtgggggggccacacagcttgtaaatttcatttgatcc

SEQ ID NO: 609930 - DNA, 601 bp, Homo sapiens
ggtgtcttggctagtgagggattcatttttaaactctcagaaattagcagtattgagagtaagcggtttctttatatggtagtttgcctgtcctgggggaaaggaaagatgtagaggaagaaatgattaaggaaatgctatctcttggtaggtacctacctcttaaggtaggtaccttgcagtgtggctgttgatgaatttartgttgatctgattattaatactttgtgacagttttgatgaggtgctttggagtgatgaatccaagcagattcatccatttgggttgtacacttggtgtgggccctgtcaaacaggtgatccctgtatttctcttcttgaatttttcctgaattattttgatcacctcctcttccatttttctcagttctttctggaaatcctattacctagatgttcagtctcctggacaggtccagttttcatctttttttttttttttcctgctttctttctctgtgtttttgctctccttgctgggaggtttcctgggttctaccttgcaattattctaattaatattttaaaataaatttttattgaggtataaatgtatatatcttgagtccagagctcacag

SEQ ID NO: 609931 - DNA, 519 bp, Homo sapiens
tatcctgcctgcagtaccttcacaacatatcccagtttcaacctccctcttcatctacacctccaccctgctggtttgaacatcctcctttcttccctggattccctaacagccttctaactggtwtactatcttccaccattgccttactgtaatttcttctcaatttagcaaccaaagtgatcattcaaaaacatgtccaatcatgttattcctctacttagacctccccaaagcaccctgtcacatccagaggaaaggttaaagtcctcataatggcctgtagggctctggaccattcccctcatcaccacttgtttgacgttagctccctccctgtctgccttgtgctcattctgcttttgccagttggcagccttatcatctcttaatcatgttgagcatgttttcatctcaaagcatgtgtacttgcttttttttcctccagaatcacccttccctcagatatctgcaaggcctacatcttcaggtctctgctcaaatccacattacaagaag

SEQ ID NO: 609932 - DNA, 591 bp, Homo sapiens
gtggtgacaggtggttaaggagaaaagagataaatagatggaaagtagggcatttttaaggcagtgaaattttatattgtagtggtagatgcaagaaataatgcatttgtcaaarcaaaaaatctgtacaatacagagtatttgtactgtacaaatacactaatataaatgatgaacttcagttaaactaatgtattgatattggttcatcaattgtaataaatatattacactgagaaagaatgttaaaatagggcaaacggtgtggggtaggagttccagcctatggaagctttgcattttctgccaatttttttggtaaatcaaaaccttttccaagaaagactctgttaaaaacatttattcctctctgatattcctaacaaattgaggtcctgaatcattgcaaaggacacttgactctgtaatttatcctcatattttgtcatcaacaaaattccttcaataagaagaaaagtgttatggcttctatatagccataacaatattaaagttctttaacactttctagataaccttggtatgtttttaatactctcattttaagaatatggccagttttatggagtg

SEQ ID NO: 609933 - DNA, 591 bp, Homo sapiens
gtggtgacaggtggttaaggagaaaagagataaatagatggaaagtagggcatttttaaggcagtgaaattttatattgtagtggtagatgcaagaaataatgcatttgtcaaagcaaaaaatctgtacaatacagagtatttgtactgtacaaatacactaatataaatgatgaacttcagttaaactaatgtattgatattggttcatcaattgtaataaatatattacactgagaaaraatgttaaaatagggcaaacggtgtggggtaggagttccagcctatggaagctttgcattttctgccaatttttttggtaaatcaaaaccttttccaagaaagactctgttaaaaacatttattcctctctgatattcctaacaaattgaggtcctgaatcattgcaaaggacacttgactctgtaatttatcctcatattttgtcatcaacaaaattccttcaataagaagaaaagtgttatggcttctatatagccataacaatattaaagttctttaacactttctagataaccttggtatgtttttaatactctcattttaagaatatggccagttttatggagtg

SEQ ID NO: 609934 - DNA, 591 bp, Homo sapiens
gtggtgacaggtggttaaggagaaaagagataaatagatggaaagtagggcatttttaaggcagtgaaattttatattgtagtggtagatgcaagaaataatgcatttgtcaaagcaaaaaatctgtacaatacagagtatttgtactgtacaaatacactaatataaatgatgaacttcagttaaactaatgtattgatattggttcatcaattgtaataaatatattacactgagaaagaatgttaaaatagggcaaacggtgtggggtaggagttccagcctatggaagctytgcattttctgccaatttttttggtaaatcaaaaccttttccaagaaagactctgttaaaaacatttattcctctctgatattcctaacaaattgaggtcctgaatcattgcaaaggacacttgactctgtaatttatcctcatattttgtcatcaacaaaattccttcaataagaagaaaagtgttatggcttctatatagccataacaatattaaagttctttaacactttctagataaccttggtatgtttttaatactctcattttaagaatatggccagttttatggagtg

SEQ ID NO: 609935 - DNA, 603 bp, Homo sapiens
tgatattggttcatcaattgtaataaatatattacactgagaaagaatgttaaaatagggcaaacggtgtggggtaggagttccagcctatggaagctttgcattttctgccaatttttttggtaaatcaaaaccttttccaagaaagactctgttaaaaacatttattcctctctgatattcctaacaaattgaggtcctgaatcattgcaaaggacacttgactctgtaatttatcctcatattttgtcatcaacaaaattccttcaataagaagaaaagtgttatggcttctatatagccataacaatattaaagttctttaacactttctagataaccttggtatgtttttaatactctcattttaagaatatggccagttttatggagtgcagataggtttatttctcaaaatttgctaatgtcagactttastcatgttaattaaaggtaaaacattgttgtactggattaaaatgtttttaatgctgtatgaaaactctagattttattttgggaatccatagtattcatagaacattaaaaataagctgaataaaaaacataatatcacccaacttcgggttaataacagtattg

SEQ ID NO: 609936 - DNA, 452 bp, Homo sapiens
ttctcaaaatttgctaatgtcagactttactcatgttaattaaaggtaaaacattgttgtactggattaaaatgtttttaatgctgtatgaaaactctagattttattttgggaatccatagtattcatagaacattaaaaataagctgaataaaaaacataatatcacccaacttcgggttaataacagtattggaaggatatgttgatagagagacagctatttatttgctctaacttgaatttagggaagtcatcraattcatgtatttaaattctagtaatccttaagaggaaaataagtttgcacctgtgcagtgctatagaaagataaaagaatatttggaaaaggagtcatcaaaacttccaaaaaagtcatataaatttagatgataaagcatacaagctttaaagtaataaacacaattcaatctttagaccatcacctggga

SEQ ID NO: 609937 - DNA, 452 bp, Homo sapiens
ttctcaaaatttgctaatgtcagactttactcatgttaattaaaggtaaaacattgttgtactggattaaaatgtttttaatgctgtatgaaaactctagattttattttgggaatccatagtattcatagaacattaaaaataagctgaataaaaaacataatatcacccaacttcgggttaataacagtattggaaggatatgttgatagagagacagctatttatttgctctaacttgaatttagggaagtcatcaaattcatgtatttaaattctagtaatccttaagaggaaaataagtttgcacctgtgcagtgctrtagaaagataaaagaatatttggaaaaggagtcatcaaaacttccaaaaaagtcatataaatttagatgataaagcatacaagctttaaagtaataaacacaattcaatctttagaccatcacctggga

SEQ ID NO: 609938 - DNA, 452 bp, Homo sapiens
ttctcaaaatttgctaatgtcagactttactcatgttaattaaaggtaaaacattgttgtactggattaaaatgtttttaatgctgtatgaaaactctagattttattttgggaatccatagtattcatagaacattaaaaataagctgaataaaaaacataatatcacccaacttcgggttaataacagtattggaaggatatgttgatagagagacagctatttatttgctctaacttgaatttagggaagtcatcaaattcatgtatttaaattctagtaatccttaagaggaaaataagtttgcacctgtgcagtgctatagaaagataaaagaatatttggaaaaggagtcatcaaaacttccaaaaaagtcrtataaatttagatgataaagcatacaagctttaaagtaataaacacaattcaatctttagaccatcacctggga

SEQ ID NO: 609939 - DNA, 607 bp, Homo sapiens
gtaaatgaataaacttcttaaaaatgaaataaaatgcatgaagatattttcctagtgctataatcgctaacggaaaaaaaacggaaaatgtgttagcaagcgaccaaattagggtgtggaacaggaaatagctgttaactgataaggtgcgtgaaggcttctctgtgacgatatcacttataatttaagtgatgataaaaatgatgtggctaataaaaacatttcagaagagcagtaacaacaattcccttttctgtagtaacactggcatatctaaaagaagagagaaaagtcaaatgtgtctgagttrttgtgaaccctgaagagttaggtaagagacagagcaagtaagagccacatgataattatatacgggaaagagtttgaaaaagttcaaagaagagtcactggatgattgtattaaatgatgcttaattaccatttgctaaataaacaaacaaatggaaactgctcagacacaatcacttttgcagccttgtatcttaccaatactttgatacttcattagagagttttctgataatagtttaaaaaaaccacttggaaagtttttgtggcacccttggcaagaaaacatattggatta

SEQ ID NO: 609940 - DNA, 617 bp, Homo sapiens
ggtggggccgttttacagtcaaagggggttgttctctggcgggcaagggtsggggggtcacaagttgctcagtgggggagcttttgagccaggatgagccaggagaaggaatttcacaagataatgtcatcagttaaggcagggactgactattttcacttcttttgtgattcttcacttgctttgggccatctggacgtatacgtgtgcaggtcacaggggatacaatggcttagcttgggctcaaaggcctgacagatgacacgtcctgtaaaggatttttgctggagaaataatatgaggggatatctgaataaagggatagaattgaatgtatgaaaaggaagtaaaatacgagttaatattcaagttattctttcttccagtttcctattcactattgattaaatgactcagagaagtcacaggctaacatgtagatttgtgtctagtagagatgcaaataatttgcacctagttgagcaaataactctggagatagtagtttatagttccatagacatttggcagttgctttttagaaaacccagcaatttttcttcttacaagtattttagcttctcaaatgctctttgaaccagcaataacattacgct

SEQ ID NO: 609941 - DNA, 617 bp, Homo sapiens
ggtggggccgttttacagtcaaagggggttgttctctggcgggcaagggtcggggggtcacaagttgctcagtgggggagcttttgagccaggatgagccaggagaaggaatttcacaagataatgtcatcagttaaggcagggactgrctattttcacttcttttgtgattcttcacttgctttgggccatctggacgtatacgtgtgcaggtcacaggggatacaatggcttagcttgggctcaaaggcctgacagatgacacgtcctgtaaaggatttttgctggagaaataatatgaggggatatctgaataaagggatagaattgaatgtatgaaaaggaagtaaaatacgagttaatattcaagttattctttcttccagtttcctattcactattgattaaatgactcagagaagtcacaggctaacatgtagatttgtgtctagtagagatgcaaataatttgcacctagttgagcaaataactctggagatagtagtttatagttccatagacatttggcagttgctttttagaaaacccagcaatttttcttcttacaagtattttagcttctcaaatgctctttgaaccagcaataacattacgct

SEQ ID NO: 609942 - DNA, 593 bp, Homo sapiens
tttccaagaggctgaggcacatggaaagcatctaatctgccaccttgaaaaaaattaatattttaatattttattttgttaataaatagtttcattctcagcttaattgttttaagggaatatcttttatataataaaattttggtccttgtaattacaactaaggcattatgttaactaaggagagcagcaaaatagtaatccaaggtttcgtcttacttttctcaattcttttacttgaattgaatagtatggagcaaaacttattaaattattttattattataaagttttattagaaaaatattttaagtcatccagtrcattcaaaagcaaaaagttagtataaatattacaataattaaatagcggtactcatagacgtttgcttctggtttacataacatactgggagaaaattaaacatatgctgtgctctcataaacaaaacaattccggaagatgttgccaatttaggagagaacacaaatactcaaaggctttaaatgtcacatttaaaatcaggtattataaacattaacaaacttaaaaggagaattgtgtacatagaatgtattatgtataaactaatt

SEQ ID NO: 609943 - DNA, 534 bp, Homo sapiens
agaacacaaatactcaaaggctttaaatgtcacatttaaaatcaggtattataaacattaacaaacttaaaaggagaattgtgtacatagaatgtattatgtataaactaattaaaacacttaaaagaattatagaaaatggcacgttattatagattccaattttgaccactgtacattaacataagtatacagatgttctctacaagtttatttagaataatttttaaaatattaaagatttatatacagcaaaaagctattgggtaaattttaattctccacattttaaattgttatctatactctttaaggccrtctttatctatgaaaataaaatgcatgaacataggagtggtacagcataggaagacttgtcattttctttgttgtcttattttacattataaagtttctttagtagaaaaaccaaaaatcaaggtttttgttcaaccaaactgtagatctgtcaggcttcatcagattttttgtttccaaaaaggatgtatttcttcctttgaaagaatatgccag

SEQ ID NO: 609944 - DNA, 534 bp, Homo sapiens
agaacacaaatactcaaaggctttaaatgtcacatttaaaatcaggtattataaacattaacaaacttaaaaggagaattgtgtacatagaatgtattatgtataaactaattaaaacacttaaaagaattatagaaaatggcacgttattatagattccaattttgaccactgtacattaacataagtatacagatgttctctacaagtttatttagaataatttttaaaatattaaagatttatatacagcaaaaagctattgggtaaattttaattctccacattttaaattgttatctatactctttaaggccgtctttatctatgaaaataaaatgcatgaacataggagtggtacagcataggaagacttgtcattttctttgttgtcttattttacattataaagtttctttagtagaaaaaccaaaaatcraggtttttgttcaaccaaactgtagatctgtcaggcttcatcagattttttgtttccaaaaaggatgtatttcttcctttgaaagaatatgccag

SEQ ID NO: 609945 - DNA, 648 bp, Homo sapiens
atatggatttatttcctctcagttacctcctgcctctgaagctaatgttctgtccatataatcccagtatcatataaaatagttttgtagggagaaatggttgacttaaattgacactagacttgatgatcttagagtactcattcacttaaagatattattttatgattacattacaatttagaaatatagttactagattgacgaatcatcagtgatccagatacatcttaaataaggtaactttttagtctgttgatgcaagcaagaaatagtacattggctgaaaattggtgaaacactaaagtacaagaacaggattcagaaagcttttaaaatgtgatgatccagtgatccaaggttggctctactaggcacatgtttcctaactgaattattcttatcaaacttatctcttgtagaattatgtcaagtaagatttggagattgagtttatgatatgagtataaacagcctatggmtgactcttgcctatgtattttctttatattctggaaatggcttctttattactttatctgaaatgctacctattgaagcttctgattttcaatttttcaattactcaatcttctaaaacaggggtgtccaatcttttggcttccctgtgccacgttggaagaagaa

SEQ ID NO: 609946 - DNA, 608 bp, Homo sapiens
aggtctttaacatgccctggagacatttttcccattgtcttggctgttaacattctgctccacattactcaaaaacatttctgcagctagcttgcattcctccccagaaratgcatttttcttttctactacatggtcgggctgcaaattttcctaacttatatgctctgtttcccttttaaacataagttccagtttcaacccatctctttgtgaatgcataagactgaagactttgaaaatcaaccaggtcacctggtaaatcctttgctgcttagaaatttctttcaccagataccctaaatcacctctctcaaggtcgacgttccacatatttctagggcaagggcaaaaatgccaccagtctctttgttaaagaatagcatgagtgacctttactccaattcccaataagttcctcatctccatctgagaccacctcagcctggactgcattgttcacatcactctcagcattttggtcaaaactatttaatatgtctctagaaagttccaagctttcccatcttcctatcttatcctgagccctctaaactgttctaacctctgcccattacccaattccaaagttgcttcaacattttcaa

SEQ ID NO: 609947 - DNA, 589 bp, Homo sapiens
aggcactgtgttactggtttatatatttactatattatatatttttatcattattttagtgtccttctyctacttacataaaagttaactgtaaagcagtttcagacaagacctttacggaggtattccaggagaaggcattgttattctagaagaagataactctatgcatgttactgccccagaatgccttcctgtgggacaaaatgtacaggtagaaaacagtgacattgatgctcttgactctgtgcaggcctaatttgtgtcctagtttttgacaaaatttttaaaagaactgctgaaagaaatcacaggaaagaaataatgggaaagcattccatactcatggattggaagaatcaatatccttaaaatggccatgttgtgcaaagtaatatacagattcactattatccctatcaaactaccaatgtaatttttcacagaaatacaaaaaaaaagctattttaaaattcatatagaattttaaaagtgctggaatatccaaagcagtcctaagcaaaagaaagttggaggcatcaaattagctgactttatagtacagggctatagtaaccaaaacagcatg

SEQ ID NO: 609948 - DNA, 641 bp, Homo sapiens
tacagattgacaacttttcccttttatgaatgttttctattgttggttcataatactgaactgaaacacagcataagtcatgcctgaacaaatgttacctagcaaacttttatttgccataagatatctcacagcattcttgtgagatatcttagaaacattagacatctcttcaacaccatgctggatggtcattgtgaagagtgaaataaccaacaaaagaacaacgtgcatagtgggaaactacatgaaccataaagaaccacttgtatacagcatgggacttgaaccagaagtcagaatgccacattgttctacctgaactatgaagattcatgttaagtaaytcaaatttttggcagctctgtgaatgtctgtgaatgattttgaagtgtcctaattattaatattagggttagaattcacttttagcaagtaggaaagtttacaaatgcaggatacatcaataatgaatatcagctcttcaaaatacatgcctatcaattaaatcttactctgaccagaattacccattggaaggagaggtctgagccatgatcagtctcttaaaaatatttcatcaaaaacagagacatttctctttatattataaagttcttatatatggccattacgaactc

SEQ ID NO: 609949 - DNA, 641 bp, Homo sapiens
tacagattgacaacttttcccttttatgaatgttttctattgttggttcataatactgaactgaaacacagcataagtcatgcctgaacaaatgttacctagcaaacttttatttgccataagatatctcacagcattcttgtgagatatcttagaaacattagacatctcttcaacaccatgctggatggtcattgtgaagagtgaaataaccaacaaaagaacaacgtgcatagtgggaaactacatgaaccataaagaaccacttgtatacagcatgggacttgaaccagaagtcagaatgccacattgttctacctgaactatgaagattcatgttaagtaactcaaatttttggcagctctgtgaatgtctgtgaatgattttgaagtgtcctaattattaatattagggttagaattcacttttagcaagtaggaaagtttacaaatgcaggatacatcaataatgaatatcagctcttcaaaatacatgcctatcaattaaatcttactctgaycagaattacccattggaaggagaggtctgagccatgatcagtctcttaaaaatatttcatcaaaaacagagacatttctctttatattataaagttcttatatatggccattacgaactc

SEQ ID NO: 609950 - DNA, 589 bp, Homo sapiens
aggcactgtgttactggtttatatatttactatattatatatttttatcattattttagtgtccttcttctacttacataaaagttaactgtaaagcagtttcagacaagacctttacggaggtattccaggagaaggcattgttattctagaagaagataactctatgcatgttactgccccagaatgccttcctgtgggacaaaatgtacaggtagaaaacagtgacattgatgctcttgactctgtgcaggcctaatttgtgtcctagtttttgacaaaatttttaaaagaactgctgaaagaaatcacaggaaagaaataatgggaaagcattccatactcatggattggaagaawcaatatccttaaaatggccatgttgtgcaaagtaatatacagattcactattatccctatcaaactaccaatgtaatttttcacagaaatacaaaaaaaaagctattttaaaattcatatagaattttaaaagtgctggaatatccaaagcagtcctaagcaaaagaaagttggaggcatcaaattagctgactttatagtacagggctatagtaaccaaaacagcatg

SEQ ID NO: 609951 - DNA, 589 bp, Homo sapiens
aggcactgtgttactggtttatatatttactatattatatatttttatcattattttagtgtccttcttctacttacataaaagttaactgtaaagcagtttcagacaagacctttacggaggtattccaggagaaggcattgttattctagaagaagataactctatgcatgttactgccccagaatgccttcctgtgggacaaaatgtacaggtagaaaacagtgacattgatgctcttgactctgtgcaggcctaatttgtgtcctagtttttgacaaaatttttaaaagaactgctgaaagaaatcacaggaaagaaataatgggaaagcattccatactcatggattggaagaatcaatatccttaaaatggccatgttgtgcaaagtaatatacagattcactattatccctatcaaactaccaatgtaatttttcacagaaatacaaaaaaaaagctattttaaaattcatatagaattttaaaagtgctggaatatccaaarcagtcctaagcaaaagaaagttggaggcatcaaattagctgactttatagtacagggctatagtaaccaaaacagcatg

SEQ ID NO: 609952 - DNA, 589 bp, Homo sapiens
aggcactgtgttactggtttatatatttactatattatatatttttatcattattttagtgtccttcttctacttacataaaagttaactgtaaagcagtttcagacaagacctttacggaggtattccaggagaaggcattgttattctagaagaagataactctatgcatgttactgccccagaatgccttcctgtgggacaaaatgtacaggtagaaaacagtgacattgatgctcttgactctgtgcaggcctaatttgtgtcctagtttttgacaaaatttttaaaagaactgctgaaagaaatcacaggaaagaaataatgggaaagcattccatactcatggattggaagaatcaatatccttaaaatggccatgttgtgcaaagtaatatacagattcactattatccctatcaaactaccaatgtaatttttcacagaaatacaaaaaaaaagctattttaaaattcatatagaattttaaaagtgctggaatatccaaagcagtcctaagcaaaagaaagttggaggcatcamattagctgactttatagtacagggctatagtaaccaaaacagcatg

SEQ ID NO: 609953 - DNA, 619 bp, Homo sapiens
ataaattttctactatgtgggggtttggtaccccaactcctgcattgytcaaaggttacctgcagttagatttgtgtttagaatcatgccgacttatgtattagtctgttttcacgctgctataaagattctacctgagactgggtaatttatgaagaaaagaggtttcattgactcacagttgcacatggcttgggagacctcaagaaacttacaatcatggtggaaggcaaagagaaagcaaggcacatcttacaaggcagcaggagagagagagaaagagagaggaaagggaagtgccacacctttaaaccatcagatcgcatgagaaatgactcactatcacaagaagagcgtggagaaaactacccccatgatccaatcacttcccactaggtccctcccttgacacatggggattacaatttgagatgagatttgggtagggacacagagccaaatcatatcaacatatttatagcttttaaatccactcgaatttcttaacactaagttcttttagatggttctatggataatatcatggcgaataaaaagtagaagcaactttttttctgcctaccccaaattaattaaaatattagagattagaggagac

SEQ ID NO: 609954 - DNA, 619 bp, Homo sapiens
ataaattttctactatgtgggggtttggtaccccaactcctgcattgctcaaaggttacctgcagttagatttgtgtttagaatcatgccgacttatgtattagtctgttttcacgctgctataaagattctacctgagactgggtaatttatgaagaaaagaggtttcattgactcacagttgcacatggcttgggagacctcaagaaacttacaatcatggtggaaggcaaagagaaagcaaggcacatcttacaaggcagcaggagagagagagaaagagagaggaaagggaagtgccacacctttaaaccatcagatcgcatgagaaatgactcactatcacaagaagagcgtggagaaaactacccccatgatccaatcacttcccactaggtccctcccttgacacatggggattacaatttgagatgagatttgggtagggacacagagccaaatcatatcaacatatttatagcttttaaatccactcgaatttyttaacactaagttcttttagatggttctatggataatatcatggcgaataaaaagtagaagcaactttttttctgcctaccccaaattaattaaaatattagagattagaggagac

SEQ ID NO: 609955 - DNA, 451 bp, Homo sapiens
aggttaaaaaaacacacacacacacatgaaaactgttttctcatagactttacatgccggtggggagacaaaaacattaaactaattaagacctgtattttgttagatgatgacataaagtatgaatgaaaattgtaaaagcagatggtaacagccagtacaagggtgactgcaattttaaataacacagccaaggaaagcctcacttagaagataaaatgaaaatcaaacacgcaaacaaaaraaaaacagatcacgagaaaatatttataaaacctatcttacagaaacctcttacacctcaatatgaagataaacagtacaatcaaatataggcaaatgacataaagggacatctcacaaatgaacttatgcaaataataatgacatgaaaagatacccaatatcattagtcaacagggaactagaaatcaaaacgacagtaagatgc

SEQ ID NO: 609956 - DNA, 586 bp, Homo sapiens
ataaggtctagaatgtaaataagagaggttaaaaaaacacacacacacacatgaaaactgttttctcatagactttacatgccggtggggagacaaaaacattaaactaattaagacctgtattttgttagatgatgacataaagtatgaatgaaaattgtaaaagcagatggtaacagccagtacaagggtgactgcaattttaaataacacagccaaggaaagcctcacttagaagataaaatgaaaatcaaacacgcaaacaaaagaaaaacagatcacgagaaaatatttataaaacctatcttacagaaacctcttacacctcaataygaagataaacagtacaatcaaatataggcaaatgacataaagggacatctcacaaatgaacttatgcaaataataatgacatgaaaagatacccaatatcattagtcaacagggaactagaaatcaaaacgacagtaagatgccattttacacgctctagaatggctataagacacacagaaaaaacgttgtatggatataaagaaaaaggaatcctcatccattgctgatagcaatgtaaaacgatgcagcc

SEQ ID NO: 609957 - DNA, 462 bp, Homo sapiens
tgccctttagtcaggttactatttaaattaagtataattaattagttttctcaatgacattagcacatttcaagtgttcaatagccatatgtggctagaggctatgctataggcaatacaaatacaggacatttttatgactgaggtaactcttattagctagtgctattagggagaccaaggggacartggtgaagtgagctagtgatgagattcaaaatataatctgaatacagaatatgtgatgcatcgtttataggcatgagacgagattggtgtcaagcaaaactcaaagtttaggcttaaggtaaagggagaatggagttgctataaactgaaattgggaagacaatagaggaacagattgaggatagggcattaggttataaatttgtccttagtcatatacattttaaaatacctattagatacccaaaaatataaagatcaattaggtagata

SEQ ID NO: 609958 - DNA, 462 bp, Homo sapiens
tgccctttagtcaggttactatttaaattaagtataattaattagttttctcaatgacattagcacatttcaagtgttcaatagccatatgtggctagaggctatgctataggcaatacaaatacaggacatttttatgactgaggtaactcttattagctagtgctattagggagaccaaggggacagtggtgaagtgagctagtgatgagattcaaaatataatctgaatacagaatatgtgatgcatcgtttataggcatgagaygagattggtgtcaagcaaaactcaaagtttaggcttaaggtaaagggagaatggagttgctataaactgaaattgggaagacaatagaggaacagattgaggatagggcattaggttataaatttgtccttagtcatatacattttaaaatacctattagatacccaaaaatataaagatcaattaggtagata

SEQ ID NO: 609959 - DNA, 462 bp, Homo sapiens
tgccctttagtcaggttactatttaaattaagtataattaattagttttctcaatgacattagcacatttcaagtgttcaatagccatatgtggctagaggctatgctataggcaatacaaatacaggacatttttatgactgaggtaactcttattagctagtgctattagggagaccaaggggacagtggtgaagtgagctagtgatgagattcaaaatataatctgaatacagaatatgtgatgcatcgtttataggcatgagacgagattggtgtcaagcaaaactcaaagtttwggcttaaggtaaagggagaatggagttgctataaactgaaattgggaagacaatagaggaacagattgaggatagggcattaggttataaatttgtccttagtcatatacattttaaaatacctattagatacccaaaaatataaagatcaattaggtagata

SEQ ID NO: 609960 - DNA, 608 bp, Homo sapiens
gggagggacccagtgggaggtaatttaatcataggrgtgggtaccatcatgcttttcttttctaagaatagtgagtgagttctcatgagagctgatggttttataaggggcttttcccccttttgcttggcacttctccttcctgctgccccatgaatgatgtgtttgcttccccttctaccccgattgtgattgtaagtcttcttagccctcccccaccatgctgaactgtgagtcaattaaacctctttcctttaaaaattacctagtccagggtatgtatgtattagcagtgtgagaatggactaataaaatatcccagataaaataaatcattctaccaaaaagacacatatactcgtgtgttcatcacagcactgtacacaatagcaaagacatggaatcaatcgagatgctccccaacactggactggataaagaaaatgtggtacatgtacagcatgaaatactatgcagccatcagaaaaatcatttccttttcagcaacatgaatgtatctggaggccattactctaagcaaattaatgcagaaagagaaaaccaaatgagacagccaggtgggaggggatccccagaaatactcaaac

SEQ ID NO: 609961 - DNA, 401 bp, Homo sapiens
agcacaatgggtgagataaaaatcttagtggcctttctttcaattttctattctattgttgtaggttggatatatgtatctggtataaaatgtatagttaatgtgaataattatttgaagcataaaaataaaatcaatatatgcgcatttcctaatactaatgttattgaaattatgatgaacctggggaagatgataataaaaatctcctagaatatcacyacttttcttagttgctcaaaatgaaagtaaatgttttattttgaatgatcttttgttcatctctgtcctttacattagaaggtaatgcattcattagaagctttctcttatttatctccaaaactactttctccttctcttcacataggataagtcaataaagggtgagaataaatcct

SEQ ID NO: 609962 - DNA, 603 bp, Homo sapiens
gttttttttcaagaaaagcaagttcaaaatcaaatgtctaactggctataaatcattctgcaaaagatgtgcatggtaaaattgtaatttatagttcaatatctccctctgctgttggcaaatactagtgaaaatcatttaagcatgtgcctatrtaaatgatataatactttcattcttttaaaacactaaacctcattaaaatgtttataatctttttctctgtctttggaaattgtgaatcctagattatatttaagaaaacattttattattttgaaatgtatacaaaactgttaaaagttaatttatggtgaataatttatataataaatttacccttccaaaatcagtctatttcataaagctgtttcaggtcaatacatggcctattaattgtcactggaatgctaacacttttttctattatatgattgaaaattatttaaaaattactttaaatttcataggttttcaggataggataaactatgactaaatatatcttttttcaatatctttattagtaaatttacagctctaaatttagtattgaatactatttcataataacaaataatacaaaccacaaatacaaaaagt

SEQ ID NO: 609963 - DNA, 549 bp, Homo sapiens
ggaaaaagaattttaaaaaaagatcttaattttttttctaaactttatcaattttttgtggctataatttaaaaatcttctcattttatgtttgttttaaactaaaatctaaggaaaagtgagatataggtatagatatggatatgcataattcaggagagaaaagaacagtttgtattatgttaaatgttatttaaatcaacgaatggatattttgtgagaaaaaaaattttaaataatgcagaatcctcaaaagttttttaaarcaacactgtaccagagttttgttttaccattgattatacagactgatagacaatttaggttgcaaatgatacttttaaatgtaggcaggctctcaagcactttaatctacataggcttattttaaatatgttaagtgattgttagtgatttcctaatttgcttgccaaattcaagaatttatttagtgcctgtaattaaagaaaaatatgtagagacactgagaaatcaacataaggcaaatcaggatttgttatagataaatttaaggatctcagatattat

SEQ ID NO: 609964 - DNA, 623 bp, Homo sapiens
agattcttagaatcactaagatacagggtttgcctgtaagatgacccctcatcagtgtccagaccctgagagcaggacatacttcctctaaacctgaacacctttgcctggctgtgtccctgggtccctttgcctggctgtgtgtaagcatcacccttggagacacctgcaggactgacagtggccaacaagtgccaagcctggtatcctcttacttggaagactcaaatctacaccaacaaattatttcattccgtagtaggagcagggagaaacgagaatgcaggtcacaagaaaacataaagctaacttcagagatacagaagttagggaggattaaaaagtcaaagccttcttctcatacttggtatctctacacaattttcctcttttcactgaatatacaagatggtctctggattcagacttactgycttctctgaaaatttcttagagaactgaatttttacttttaccacaaggcactagagaggaactatacctttttttccagccactttaatgtcttctctttgctgtacttgtaatatttcttgttgtctatttctggattaccttaaaagaaaaaaaagactcagcacaatgaattaaaaaaaaaataa

SEQ ID NO: 609965 - DNA, 529 bp, Homo sapiens
actctcaataaggtttatagattagataatagcactatatctatgtacatttactgagtttgattgttgtactgtagttatttaagagaatttttaaggacaagaaggcatcacatttgcaatatactaacaatttcaagaaaaaaagtataaatctagatataaagagaaggatagacactatatggtaaaatgtcracatttggggaatatggataaatactacatgggaattctttgtactattcttgtaagccttttgcaagtttgaaattatgtcaaagtaaaaaagattctgttgattgctctgaaaagaccatagggaatcttacataataagaccgtaaagaccatgtttatccatggccagctgaaatacagctgcagcccaggcctctgtaatgttatgaattttgttagttataatcagggcattatcagtacatttttaatgtctttatcttgttagagactaatactgaaatatttatggatgaaattgtgagaaacctggtaattgctttaaaac

SEQ ID NO: 609966 - DNA, 631 bp, Homo sapiens
atacaatactaattttacatgtaattaaaactaacaatttcttttcatttatagaacatactctgatgacctttgaggttggtggcaggataggacattagcttataattgtgctttgatttgcaatgaaaaattgaaatgactattcctttcctctctattcgaattaaagcatgaaacattactgccctctcctgatatattttggtagaacacctcctagaaggaattttgacctgaaaccaaattttaaaaatcattctacccactagaaatgaacattttccttcacgaatttatatcaatttaattttaaaaataattatttcacatgtctttttaaaattaaaaatggtgcattaatcttttgaaatccagatataaattaatgagccagaaaatgttgggaaaataatgatggytgttaatatcatgcatttatatgacatgttcaaagagtacttaatggaatttttctcatttagtctcacatcatctccaggaggaagtaaatcattatattttatttgtttaacttgttaggtctgttgttgcagctcataattggtttttcaagtgcaagttgtaggcctttaatttggatgcttttgtgactgagttatgtttcttc

SEQ ID NO: 609967 - DNA, 633 bp, Homo sapiens
ttctcagctttctggatagttcaactgacattggaagtgtcatcaagatagaaacagaagtttgagaagcatgggtgagaaagtttccatatttatttggggcattttgattttaagcaaaaggctatagagatggagaggtttagttggtatttggttatgtaaatattaagccccacagagcaatgtgggctacacttcagtaagaaggaaagttatcagcttctgggctgcagtagaagccatggaaggaaatgggatcagcaagggcacagggagctgagggaagggcagaagacagagagctgatgggctgaggagatgcaagaggcagggaagaaggcagaggagggccagggtgcaagggcaggatggatgcagagatgaagtcatgggaacagtgaatgggaggcatttcaagaatcaggragtgaccaagagcagctgagagtcactaaagacagagctgtaagtgtccactggatttattgatgagtattttagtccattctcacacagctataaggaaatacccaagactgggtaattttgaaaggagcaaggtttaattgactcacagttccacatggttggggaggcctcaggaaacttagaatcatggcgacaagcaaa

SEQ ID NO: 609968 - DNA, 607 bp, Homo sapiens
aaactaaaacaaaacacagcaaaaaagcactcaagtaatttaagtacaaaagataatataaaatrcaattacaaaatacgtacataagagaattggctaaagctattatcaaatggaaatttagatcagtaagtgttttatttttaagaatacatttagagcagtaagtgttttatttttaagaatattttactcaatttaactgagtaaagtggcattcaattcaatattgttacaaagagaatagtaaaagaaaattaaacgaaagatgaagaattcacataaataaagataccaattcactaacaaacagaataggtactgatatgttcaagaagtgtatctttgataatacaaataaaactaagaaacctttcaagtctaatcaagggatgaaaataaagataaaatagaaataaaatgttaacaatgaggaagagaatctagacaaattaagggttttaaaatgagacaatattatacacaactctataataatctaatcctataaacaagctatttttagagaataggaactatcaaaattgacgcaaagtaaccatgacagataaataaacatgaaagaaattgaaaaagtttgaaaatt

SEQ ID NO: 609969 - DNA, 514 bp, Homo sapiens
taagcaccaataaaatgggaaaaatatccccagaacatgtcagagaccttcacggcagcccttcccatcacaggctggaggcctagaagggaaaaatggtttcctgggctcccctgctgtgttcaaccttgaggctttgtgacctgcattctagccacttcagctgtggctaaaaggggccaacgtacagcagctcaggccattgcttcagagggtgcaatcccccagccttggtagcttacatgtggtgttgagcctgtgggtacacagaagttaagaactgaggtttgggaacctccacctaaatttcaaaggatgtatggaaaagcttggmtgtctagacagaagtttgctgcaggggcagggctctcatggagaatctctgctaggccagtgtggaagggaaatgtggggttggggtgcccacacagagtccccactggggcactgcctagtggagctgtgagaagaggaccacctttctccagaccccagaacggtagatccactgaca

SEQ ID NO: 609970 - DNA, 607 bp, Homo sapiens
aaactaaaacaaaacacagcaaaaaagcactcaagtaatttaagtacaaaagataatataaaatacaattacaaaatacgtacataagagaattggctaaagctattatcaaatggaaatttagatcagtaagtgttttatttttaagaatacatttagagcagtaagtgttttatttttaagaatattttactcaatttaactgagtaaagtggcattcaattcaatattgttacaaagagaatagtaaaagaaaattaaacgaaagatgaagaattcacataaataaagataccaattcactaacaaacagaataggtactgatatgttcaagaagtgtatctttgataatacaaataaaactaaraaacctttcaagtctaatcaagggatgaaaataaagataaaatagaaataaaatgttaacaatgaggaagagaatctagacaaattaagggttttaaaatgagacaatattatacacaactctataataatctaatcctataaacaagctatttttagagaataggaactatcaaaattgacgcaaagtaaccatgacagataaataaacatgaaagaaattgaaaaagtttgaaaatt

SEQ ID NO: 609971 - DNA, 607 bp, Homo sapiens
aaactaaaacaaaacacagcaaaaaagcactcaagtaatttaagtacaaaagataatataaaatacaattacaaaatacgtacataagagaattggctaaagctattatcaaatggaaatttagatcagtaagtgttttatttttaagaatacatttagagcagtaagtgttttatttttaagaatattttactcaatttaactgagtaaagtggcattcaattcaatattgttacaaagagaatagtaaaagaaaattaaacgaaagatgaagaattcacataaataaagataccaattcactaacaaacagaataggtactgatatgttcaagaagtgtatctttgataatacaaataaaactaagaaacctttcaagtctaatcaagggatgaaaataaagataaaatagaaataaaatgttaacaatgaggaagagaatctagacaaattaagggttttaaaatgagacaatattatacacaactctataataatctaatcctataaacaagctatttttagagaatakgaactatcaaaattgacgcaaagtaaccatgacagataaataaacatgaaagaaattgaaaaagtttgaaaatt

SEQ ID NO: 609972 - DNA, 568 bp, Homo sapiens
aagaacacatggatacaggaaagggaacatcacacaccggggcctgttgtggggtggggggaggggggagggatagcattaggagacatacctaatgtaaatgactagttaatgggtgcagcacaccatggcacatgtatacatatgtaacaaacctgcatattgtgcacatgtaccctagaacttaaagtttttatatatatatatgtatatatatatatacatatatatatgtataaaaaactgacaaatcttttaaaaaaaaaagaaaagaaaactggatgccattgaaggcttttgatcctgggacagttgatttaaattgtgttttatgaatataaatctgagggtggtttataacaaacaggaaacaaaacataaaagccttcaaggtaatgaagatgctcttacaaaagtccacttgagaaatttaagagtcaatgaagaaggaraaaagacaaatccaaaagttagataagcagaagaatgggtgtaaatcagctcctgagagtgaggcagcaaggagttcagtaggaggatacaagaaggagtgcagtcagtgagaaaa

SEQ ID NO: 609973 - DNA, 568 bp, Homo sapiens
tctcaccttttaaaattttcctttttatttattttagttttctcagaaacaaacactcatatggactgacttacaagyggaaaccatgtctttgtctcaggtggcagcaaggcaagagagtggatcctcgtgccattacccaccagacccagggcttatatgccataggaaaagggcatctgtgcttccaaagggatgtgtaggacaattgtttaagggcaggatttatatgtgctctacacaaggaacaagggataaattggaaatcttagagactttttgagaactgaagttaaccagaagtcaacatggtggattagcatccaagatggagttgctttaggcccacgctccaccctgtaatctgactcttacaatctcacgtgctctcctcttccccagtggaccttgagcctttagggatggtgcttgatattgtatagcatcagcagcagtgcattagcgatggaaacagtgggattccaactgagggagattcacgggatctgatgaatcctcactacagaataccgtgatttcagttttttcacaagaggtacataacata

SEQ ID NO: 609974 - DNA, 483 bp, Homo sapiens
gcttccaaagggatgtgtaggacaattgtttaagggcaggatttatatgtgctctacacaaggaacaagggataaattggaaatcttagagactttttgagaactgaagttaaccagaagtcaacatggtggattagcatccaagatggagttgctttaggcccacgctccaccctgtaatctgactcttacaatctcacgtgctctcctcttccccagtggaccttgagcctttagggatggtgcttgatattgtatagcatcagcagcagtgcattagcgatggaaacagtgggattccaactgagggagattcacgggatctgatgaatcctcactacagaataccgtgatttcagttttttcasaagaggtacataacataatgagatacataacattactaacttgaatagtagaaatataatgcacacaagtacagaacaacaaaaacaaaaaagaacctattccattaggcagcca

SEQ ID NO: 609975 - DNA, 653 bp, Homo sapiens
tgcattagcgatggaaacagtgggattccaactgagggagattcacgggatctgatgaatcctcactacagaataccgtgatttcagttttttcacaagaggtacataacataatgagatacataacattactaacttgaatagtagaaatataatgcacacaagtacagaacaacaaaaacaaaaaagaacctattccattaggcagccaactaaaagcatcatgaagaaaattaaaacctgattcttctttagagacttaagtgattcagaattcagcccaaattataggcaaatataaaaactcaaaaataatggtcaggactagaatctaaatttttcttccttcagttttctcatttctaccaaggataaatcacaataagactaatttatttgcaagtaaattttagtctcattatattcagcctgattatttgtayagagtgcagcaagaatagtgattggccatatacgctccttttaagttggctttgctggaagttttataaagaattttgaatttggcttttcaaaagccttgaggtcagaagccaggccaaggatttgccaacaaacagattataatatctgtacagttttctttcttcttgaggactcacaatatcttgagattcctgggcctgttagaa

SEQ ID NO: 609976 - DNA, 645 bp, Homo sapiens
tcttactgaattttatccaaataactgtattgccataaaatcaaggtactcatgaatactttccaaatttggggaaatcaggtaaagagaaaggtgaattttgctcatagaagtccactttcccaatttctctaagctgtacagagctcaacagaaaaaaaaatacatattttctttacttttcttccatcagagtagcagcctccaaacaggatgctgaccactcactccagagctgctagccacaagacaagcagctcttcttcagtcagtcaggagttttctgttgggccctataggatccagctgcttctcatacagctccagagtcagtcctagggaaaaagaggcaccctgctcatgagtatctccttctaactccccaggcagcaaggtcctacacaaaccagcttcaccttatcacagaacaattctgggcactgccatcaccatcatagtgcctctgtgacaccaccccagacagcatggatatctcagatgtcatgatcattctatgtccttcagtctcaggggtagactcagttaatgtcccatcacaaggcagtaaatgtccctcaagtggaaattctccagcccagagacccagtagtcctcaytgggaggtgcccacagatctttggcata

SEQ ID NO: 609977 - DNA, 255 bp, Homo sapiens
agacctgggccctgatctagtgtaattaggtccaagtttgaggaaagggaactgtagaccaatgttagtggccaaaacagataaatgcaggctttggagtcaaagagacctgggatgaaatctagcactgcagttatacaaccaaattattttttcttattttcaaaacagtaacaacaatctttacctgaattcttatcttacaawcttgctatgtgatcaaaagggatttgtgcaaagcaggtggcatagtgc

SEQ ID NO: 609978 - DNA, 549 bp, Homo sapiens
tccaaacattcttttgctgtcattcaggcacttgacagaagttcacatgagtgcattttcagagattctgatcaaacaaaccctagaaaatcaaaagatgaagctaccggtgttcaatgcgtggcagagaaataattgaattatagacagcagctttgtaaaaggcagaggtggtttcaacagaagacattgcttctatttacaaaaagacattctaaarggcagtttatttttcttacagctttcttcatattactgctaatgtttatgtttcaagaatattgttctttttcccaataggggaatcttcatctgattatttgtgtaaaaaataagtcctatgtagtttggacaaaagcatgacatttcagattgggacccataagctcattgcagaacacaggcctgcaattgaaagtcacgacttcattcataaagaaaggaggcagctttctctggaacattcttcatctcaacacttctttcacactcacttctagagattctctgctttatgtttttttgtttgtttgttttttgtttttgttt

SEQ ID NO: 609979 - DNA, 458 bp, Homo sapiens
gtcttcctccaacagtcttccttcctcacagtctctggcctccagaagcctggctctccctctgaattcccatctcattgccagtttattcagccagtcaactgtaatcccacrttgttggggctactaccaaaattcccaattgtgtctcttccctcttaaaaaaaatggtaagcaatatgggaggcaaggccttgcctgtatgacttgatgttctactcaccaacagtcttatagaataagcaaatcctaagcacacagagaagacactcattcaaatgcagctcatcgctgttgccaaagtaactaccaaagagtgagttagtcacatcataggtgcttaataaatatagacagtgaataaataaatctgtggtgaagatttacttaagttactgtgtttggagttggcaccaatactgatgaattttatggttaatgttaaagttttaaagcag

SEQ ID NO: 609980 - DNA, 458 bp, Homo sapiens
gtcttcctccaacagtcttccttcctcacagtctctggcctccagaagcctggctctccctctgaattcccatctcattgccagtttattcagccagtcaactgtaatcccacattgttggggctactaccaaaattcccaattgtgtctcttccctcttaaaaaaaatggtaagcaatatgggaggcaaggccttgcctgtatgacttgatgttctactcaccaacagtcttatagaataagcaaatcctaagcacacagagaagacactcaytcaaatgcagctcatcgctgttgccaaagtaactaccaaagagtgagttagtcacatcataggtgcttaataaatatagacagtgaataaataaatctgtggtgaagatttacttaagttactgtgtttggagttggcaccaatactgatgaattttatggttaatgttaaagttttaaagcag

SEQ ID NO: 609981 - DNA, 547 bp, Homo sapiens
taggtatccttcaatccaatcaagttggcacctattattaaccatcacatgatttatctataagaaacaaattctaggccaggcgcggtggctcaggcctgtaatctcagtactttgggaggccgaggtgggtggatcacaaggtcaggaggtcgagaccagcctgaccaacatggtgaaaccctttctgtacaaaaaatacaaaaatgagcggggcgtgaaggcacgtgcctgtaatcccagctactcaggaggctgagccaggagaatcacttgaacccaggaggcagaggttgcagtgagccgagatcgtgccactgcacttcagcctgggcgacagagcgaaactccgcctcaaaaaataaataaataaataaataaataaayaaacaaattctattgttttaccagtgatctaggagctgttaagttcagtgtcaaggaatactaattgtaaaccaatcaatactaagaacaaaaagagatacaggaggacttgtacaaggaactgagactgagctcagtgaagacgccattaaccagacca

SEQ ID NO: 609982 - DNA, 563 bp, Homo sapiens
taatacacactaataatgagaatatttcaccatatttataggacctgcccatgctcaaagggaacaggttgaacaaggaatgtatatgagtggggaagaatcttgggtgccatcttagaatatgaagaacatctcttgttccgttgaaaaaaggcaaaactgttgtactcatctataaaatggacataataatactktaactcatatgagtgttgtgcagattaagtaacataaagcatgcatttaccaaagcactcagcaacatgatcatgctcagtgtaactgattagaaaggacactgttcaacccaccaagaaacctagtattgcttcatattcctgctggaccacagtttaacatatttcacggccacaattccatcttgcctttcacccttcttcccaggactgcccaggtggacaaaaaataaaaaggtgccatggaacacttgcagtcaccaactgtcatttgaaactatcataggttaaatgtaggcatttaaaatttggcaggaggtaagatggaaaggagcaccagaagtcatattccaaatatttaacaag

SEQ ID NO: 609983 - DNA, 495 bp, Homo sapiens
aaataactgtgggcaatatactaaacagtaacactgatttacaaaatgtggacccctcagtgccatttcacagaggaaaataacaaaaataaatataaggagaacataataggtaatgttctcaacaaggaacacacaaatcccctcacatggcttcttgagcaatgatgtgaataaaaccagtgctgagstagctagcactcaacacgaagacacacagacatctatgagagatccgacttgtttacaccctcctgtaacgtaaattcatgtggaacacttaaattattccaaattcctaaatgtgcttcatgaaactccttaggcacccttcccatttatgagagtaatctaacctgaaaagtaaaagcattttgccatactggttagttcatagtgataaaagagaaaggagttgcaatttttattcctttcccaggtgactgccagtctccacttggagtccctggtacttggtaacttatcagagtagga

SEQ ID NO: 609984 - DNA, 495 bp, Homo sapiens
aaataactgtgggcaatatactaaacagtaacactgatttacaaaatgtggacccctcagtgccatttcacagaggaaaataacaaaaataaatataaggagaacataataggtaatgttctcaacaaggaacacacaaatcccctcacatggcttcttgagcaatgatgtgaataaaaccagtgctgaggtagctagcactcaacacgaagacacacagacatctatgagagatccgacttgtttacaccctcctgtaacgtaaattcatgtggaacacttaaattattccaaattcctaaatgtgcttcatgaaactccttaggcacccttcccatttatgagagtaatctaacctgaaaagtaaaagcattttgccatactggttagttcatagtkataaaagagaaaggagttgcaatttttattcctttcccaggtgactgccagtctccacttggagtccctggtacttggtaacttatcagagtagga

SEQ ID NO: 609985 - DNA, 638 bp, Homo sapiens
tcagtgcatatattactcatgaataggagctgcttgatcctgactacagataaaatacgaactcagatgaagatattgatgtggtggcttygaataagcagcctgtgttttattcctggctatgtccttttgacaaataaaataaattgtaagatgactaaatgacagaataatgttcattaataatacatcctcctcagtaaactcatcttgataaatattatgagcttttggaattctactgttgttccaagcatgcagcagaagaaagataagaataaattattgttgttcacctttgcaggtagacatttgactggttattttccaaggtgacataaatcacagtatcctttgatcttccatcagaaagaaagaaagtggattacaaatatttatgtagagtctaatgtcgcaggtggaatggctgtgaaatattgagacctacataataagtagcaaaactttagggatgttgagagacttgatacccatctcagcttttccagtttctccagcaaacaaaattgatgcaggaaaagcaatgtagatgtataaaaagtgattttcttactcatggggaaatcaacccattcttgctttttatcatcaacttaataactaaaaatttaaataag

SEQ ID NO: 609986 - DNA, 571 bp, Homo sapiens
gctcgcttttatccttgctgctcctgtgcctggaagggcttccttgtattcatcatttcttaacgaatttttactccatttcaataaaacatttcatgttcttggaagcctttcctagcttggaaaccttgagtattccctcttgtggcctcctatagagaggacgtttgatgaatgtatgaatgaagtggattgtcattattgtaaaaatattaaagaaaggagccaatagtattagaataatttgttaggattgttgctgggttttaacccccttaaatgtgcttgttgtttgccgagggctagctaatgtagctggagttgtgaaccaggggtgtgttcttgttgtttcttgcttgtttcctgtcttccccactgcatgtctctgtttatttgcccattatggacattctatgtaagtggaatcatacaatatgttgtcttttctaactgtttttttcccttagcacaatattttcaagctttcttgatgttgtatcacatattagtacttcattcktttttatggctgaataatatttcattctgtgagtctgtcacagttttttta

SEQ ID NO: 609987 - DNA, 620 bp, Homo sapiens
taattttttatggaagaaagaaaaatattttcataaatttagtgtagacttagtgtactgtttaaagtctgctatagyggatagtaatgccctaagtcttcacattcattctccactcattctctcacttgctcatccagagcaacttccagacctgcaagttgcattcattgtgagtgccctttacaggtgtaccatttaaaaaaattttagaccaatttttactgtagcttttctacattatatttagatatacaaataccattgggttgtaattgcctgcagtatctaatacagtaacatattgcacatgtttgtagcctaggatcaaaaggtagtgccagataacttagatatgtaggaggctatatcatctaggtttgtgtaagtaaactctatgatgttcacacaatgatgaaatcacctaacaatgtatgtctcaggatgtatctttgtcattatgtgattcatgactattgttattaactatagtcttcatcatgttgtataatagatcccttgaacatattccttgtatctaactgaatttttttaccatttgacgaacatctccctgactatctctgctgcaggtgcaccactccagaccctaatagcaa

SEQ ID NO: 609988 - DNA, 620 bp, Homo sapiens
taattttttatggaagaaagaaaaatattttcataaatttagtgtagacttagtgtactgtttaaagtctgctatagtggatagtaatgccctaagtcttcacattcattctccactcattctctcacttrctcatccagagcaacttccagacctgcaagttgcattcattgtgagtgccctttacaggtgtaccatttaaaaaaattttagaccaatttttactgtagcttttctacattatatttagatatacaaataccattgggttgtaattgcctgcagtatctaatacagtaacatattgcacatgtttgtagcctaggatcaaaaggtagtgccagataacttagatatgtaggaggctatatcatctaggtttgtgtaagtaaactctatgatgttcacacaatgatgaaatcacctaacaatgtatgtctcaggatgtatctttgtcattatgtgattcatgactattgttattaactatagtcttcatcatgttgtataatagatcccttgaacatattccttgtatctaactgaatttttttaccatttgacgaacatctccctgactatctctgctgcaggtgcaccactccagaccctaatagcaa

SEQ ID NO: 609989 - DNA, 568 bp, Homo sapiens
ctgcttctccccgtgccataggcgtttccattcttgcaggaaaatgataatgcaagtgcaaattccactcacttttattggtatgacaataaattattctttctaaacacttagcaaaatgacgaaaagcagtattccttaaaatataggttttcattttctcaatatattttgaactgactaaagttctttacaaagacaagaggatcagaaggttccacttacccgtgttttagcgtttgtttgragataatgccaaccaaaaggtggaaaactaaaaccaccattgctttacataagaggtacacactgccccccacccccaaaaaaaaacacagctttgaaagttgggagaaacactgcagtcttcattgtaaatataaagtgataatttaggtgaggaaggaacggtaaggagggaaggggaatgagtcctttctccccatcaagtcagccagcattggaatagtctctaattctggcggaatattttctttgtcatgttcatctattcttattacaggagaatgatttcagtgcctagtatttattagtgtaagtgtgtaac

SEQ ID NO: 609990 - DNA, 577 bp, Homo sapiens
tgattacctttagattgaaagaaagtcatgacccctattgaaaacagacagacaaatgtcggtataggatctgttgaggaacagagggagtaacagtggggaatgcctcaatgctattttgcctttcagcagagatgggcagaagagatttgaaaaagggttcatttttatagatgtatgtaggtatttgtatacgtgtgtatgtgagttcacccacacatgtatgtatgtgtattaataacccactgacctcaaagtaagagagaaataggatttacccagtatttacccaagaatccccatcatccttatcccaggattctgcagtcagcaaaccaggctttttaacactctccaatcatgaggtatttaaagarctccatgatttgttttgtatttaacgctgcaataaccattctcagataaacatgtttgagggcttcttgagatacatttttctaaggaaagtttatgggttaatagagctttaattgttttgggtatatatttccaattttccctaccaacatttctgcaaaaggcacagagcaatccagctgtacacatgcatgcctgc

SEQ ID NO: 609991 - DNA, 617 bp, Homo sapiens
tgtaaaaattgcctagaaaatatgcaaatgggccgggcatggtggctcacacctataatcccaatactttgggaggccgaggtgggcagatcacaaggtcaggagatcragaccatcctcgccaacatggtgaaaccccatctctactaaaattacaaaaattagctgggcgtggtggcacgcacctgtagtcccagctgctcaggaggctgaggcaagagaatcgcttgaacccgggaggcagaggttgccgtgagccgcgatcatgccactgcattccagcctggcgacagagcgagactctgtctcaaaaataaataaataaataaatagaaaatatgcaagtggtgttgaaaccagacagtggtaaagttggaaaaatttagtggagcatgatagaaaaagtccagatcaccttgaacaggcagttcacagatacagtagtcccctctcatctgtgtgggatacattacagcatcccccggtggatactaaaccccgtcaaacgctatgtatagttagtaccaagccctttgtatactatattttttcagtctgataaccaaaacagctactaagtgactaacaggaggttggtatatacagtgtggacatgc

SEQ ID NO: 609992 - DNA, 617 bp, Homo sapiens
tgtaaaaattgcctagaaaatatgcaaatgggccgggcatggtggctcacacctataatcccaatactttgggaggccgaggtgggcagatcacaaggtcaggagatcaagaccatcctcgccaacatggtgaaaccccatctctactaaaattacaaaaattagctgggcgtggtggcacgcacctgtagtcccagctgctcaggaggctgaggcaagagaatcgcttgaacccgggaggcagaggttgccgtgagccgcgatcatgccactgcattccagcctggcgacagagcgagactctgtctcaaaaataaataaataartaaatagaaaatatgcaagtggtgttgaaaccagacagtggtaaagttggaaaaatttagtggagcatgatagaaaaagtccagatcaccttgaacaggcagttcacagatacagtagtcccctctcatctgtgtgggatacattacagcatcccccggtggatactaaaccccgtcaaacgctatgtatagttagtaccaagccctttgtatactatattttttcagtctgataaccaaaacagctactaagtgactaacaggaggttggtatatacagtgtggacatgc

SEQ ID NO: 609993 - DNA, 507 bp, Homo sapiens
ttgttgttgttttggcctagcttcagagtcacaaataaatttttgtgatttgataatagtcttgcagttatttttctattgtatttccctgaaattcttttttgagttgcaaattgctgtggtaatgcttccattttgtattgttccctgtttgttatttgaaactcctgctagcagtacctcctgatgctttmcagaacaaaaacttaatttttaaaataatgctttactatgcaacctaactatttggtctgaactatacctaagtatagtattataagttaattttgcaaccaaatatttttgaagataaatattgatgaaaataagtataaattttagtgtttggtccttgaaaatggaccatgatattaggtaagattctaatatcaaggttaggtttgagatgataagattgattatttatgtgtaaagtagtcaccccatggcccaggatggtcttattttgtcaaaaatatgaacagcgattccattgtgcagtgcacc

SEQ ID NO: 609994 - DNA, 187 bp, Homo sapiens
tatacatctatcctattagttctgtccctctagagagccctgactaacacaacttttaactctccgtaacagatagttgggtattagaggagyggccaggattacaggtataaatttgcaaattgtaagcttagagataatgtttgaaatctcgggactggataaagtcacctggggatcatgtgcg

SEQ ID NO: 609995 - DNA, 594 bp, Homo sapiens
accccaaatcattacaatagtaatatcaaggatcactgatcacagatccctgtaacaaatataataataataaagcttgaaatactgtgagagttacaaaaatgtgatgcagagacacaaaatgaacacatgctgttggaaaaatggtttcaatagacttgcttaactcagggtttccataaaccttagacttgtaaaaaatgcactatgtatgaagctcaataaaaggaagcacaataaaaaaaggtatactcrtacttgatataattttattttaaaaactttgttaagacttgttttgtggcttgccaactgttctatcctgaagattgttccatgtgcactggagaagaacatctattctgttgcctttgaatgtagagttctttatatatctgttaggtgcattttgcctaaagtgcagctcagtctcggtatttccttcttaactttctatctgggtgatctggccattgttaaaagtcaagtattgaagtcacttactattaccatattatttatttctcccttcatgcccattaacatttgctctatatatttaggtgctccaatgttggatgtacatatatttat

SEQ ID NO: 609996 - DNA, 582 bp, Homo sapiens
taatggaatttccttatatgacttgacacttttctcttgccgctttcacagttttatctttgtctttggacagtttaattatagagttcctcagtgagaatttcctttggttgaatctgttggggtatcttttagtttcatgtatctggatgtccatttcttttccaagacttgagaagttttcagtaattgttccaccaagtaaactttctgtccttatttttgtctcttttcctgtaacatccataatttgacagtttatttgtttaacagtgtcctatagaccctataggacgtctttacttctttttattctatttgtttttattgcctctgactgggtcatttcaaagattatttctttttgcttgatctagcttgatgttgaagctctctgttgtgttttgtttttgtttttgtttttgtttttkttttgagacagagacttggtctgtcacccaggctggagtgcagtggcacgatcttggctcattgcaagctctgcctcctgggttcatgccattctcctgcctcagcatcccaagtggctgggactacaggcatccaccaccaagcctggtt

SEQ ID NO: 609997 - DNA, 541 bp, Homo sapiens
aaagtgagccgcaccagggagggaaatcgcaaagtgccttttaccttctctcttaatcctgaatggtaagaaagtcttctttcctaacacattaatagtttcagccgtggtattttaggtaagctatgaaagattggaaagtgttttctgtcragaagaaataattatccctttcaaaaaattgtatattccaaacatcttctctctttgttaggttattgaaagtctgctatttaaatagttatttcctgttacttattaactcagaaaattttctatatggttatatttgggaagatttatttaaaagttttcttttagagttaacatcaataatctgcatgttttctacagtggaggtgttaatgttgaaacataagagaatgaacatactcagcgaatggaaatcttaacatctaatccaaaaaagaaaacatctggaataaacaccttaatgaaaactttcattttcgacttttgtgtggtttcctgagcgtgattccctgatctaagagactttcttatgcgagggagagaacta

SEQ ID NO: 609998 - DNA, 541 bp, Homo sapiens
aaagtgagccgcaccagggagggaaatcgcaaagtgccttttaccttctctcttaatcctgaatggtaagaaagtcttctttcctaacacattaatagtttcagccgtggtattttaggtaagctatgaaagattggaaagtgttttctgtcgagaagaaataattatccctttcaaaaaattgtatattccaaacatcttctctctttgttaggttattgaaagtctgctatttaaatagttatttcctgttacttattaactcagaaaattttctatatggttrtatttgggaagatttatttaaaagttttcttttagagttaacatcaataatctgcatgttttctacagtggaggtgttaatgttgaaacataagagaatgaacatactcagcgaatggaaatcttaacatctaatccaaaaaagaaaacatctggaataaacaccttaatgaaaactttcattttcgacttttgtgtggtttcctgagcgtgattccctgatctaagagactttcttatgcgagggagagaacta

SEQ ID NO: 609999 - DNA, 636 bp, Homo sapiens
cacactgccaaacccaaaggtcagctctcagtcttcctttcccttagaactccagcaccatttgacatagttgattgctctattttattttaaataattttttatttaaaagaaacatatgcccctgattctctttccacctcttgtgttcagtcttcctttctacttcttcctcccttagaagtctcaggcttctaaaygttatgttccagggttgagccacactcacctgtcaagtgatctcatctgggttcatgactctagctactatctgtatgtggatggttcttaaatcatcatattactaatgatctcaaatttatatctctaacccagaacatttacctaaactccagtctcatatatacaacttactacttaacatctcccatttggaaatctattaggcatctccaacttagcacatccaaaactgattgtctgttaggaaccaccccctgaacacacaccctgacctgtccatcctgcaggccctcccatggagggcctcccagccttccattggctcaggcaaaaccctgatgcctcctttcctttcttccctctgttttaatatcacatatctggattaatcaataattcttgttagccctcctttcaaaataaatgcagaat

SEQ ID NO: 610000 - DNA, 580 bp, Homo sapiens
caactttacatctctgtcacatgcctagcacaatgcctaatataaataaatacttcttgagagaataaatagacgattgtctcattagcaaggtgagcttttaatcactctttttgctcctttgctctttctctttcaaatgcatacagtgcatgctcagggacgggaactgccataggagaaagagcctgttttctaaatcctcagagggacaaggaagtgatttcttcagtaaataaaagcygttcattaactttgcagctgatcccaaaatggggtgagaagtggtatattagtgcaatccaaaggagctgcgcatgagctctgaacaagcagaatggggatgggcaagggtagggccaggctgggacctgggctcacacactggagctgcccgtgagtccttcccatgtgcctccctctgtggacctcagccttgccccaagtggtggccttgaagtctctgcaggcatcctggccttgccttgcctctttgccttccagctatgcttcagccacctcaccttggcctccctgagtggacatttgggaaaacagctgacaagataatagccatcat

SEQ ID NO: 610001 - DNA, 580 bp, Homo sapiens
caactttacatctctgtcacatgcctagcacaatgcctaatataaataaatacttcttgagagaataaatagacgattgtctcattagcaaggtgagcttttaatcactctttttgctcctttgctctttctctttcaaatgcatacagtgcatgctcagggacgggaactgccataggagaaagagcctgttttctaaatcctcagagggacaaggaagtgatttcttcagtaaataaaagccgttcattaactttgcagctgatcccaaaatggggtgagaagtggtatattagtgcaatccaaaggagctgcgcatgagctctgaacaagcagaatggggatgggcaagggtagggccaggctgggacctgggctcacacactggagctgcccrtgagtccttcccatgtgcctccctctgtggacctcagccttgccccaagtggtggccttgaagtctctgcaggcatcctggccttgccttgcctctttgccttccagctatgcttcagccacctcaccttggcctccctgagtggacatttgggaaaacagctgacaagataatagccatcat

SEQ ID NO: 610002 - DNA, 581 bp, Homo sapiens
cagcatagcgagacctcatttctagaaaagattaaaaaattagccaggtacagcagcacatacctgtagtcctagctacttgggaggctaaggcgggaagattccttgaagtcaagactgctgtgagccactgcactacagcctgggagacagcaaatttaaaaaaataaaaaagaaaaagagaaaacaacggaaggggatcttccagcatcctctagcccagtggtctgcaaaatgtgctctgtgcagcctagatggtctccacagccccttcaggaccacgaggcaagggtgaggacagccactgtgcaaacagcgcasctttgggattctcgcccactcaaattcaaccaaaacaacttcagatctttttttttctttccattaagcttgtatttgaagaaagagttctgcagcttttaatatatcttctttcttccaatatcatggctctgtttaaaacatttccaaagtcagatagtccaaacttcccctccccagagctatctcagctccctctgggctcacacagaactctgcatatccctctgtgatgcagctagtcacactagacagtgatg

SEQ ID NO: 610003 - DNA, 581 bp, Homo sapiens
cagcatagcgagacctcatttctagaaaagattaaaaaattagccaggtacagcagcacatacctgtagtcctagctacttgggaggctaaggcgggaagattccttgaagtcaagactgctgtgagccactgcactacagcctgggagacagcaaatttaaaaaaataaaaaagaaaaagagaaaacaacggaaggggatcttccagcatcctctagcccagtggtctgcaaaatgtgctctgtgcagcctagatggtctccacagccccttcaggaccacgaggcaagggtgaggacagccactgtgcaaacagcgcagctttgggattctcgcccactcaaattcaaccaaaacaacttcagatctttttttttctttccattaagcttgtatttgaagaaagagttctgcagcttttaatatatcttctttcttccratatcatggctctgtttaaaacatttccaaagtcagatagtccaaacttcccctccccagagctatctcagctccctctgggctcacacagaactctgcatatccctctgtgatgcagctagtcacactagacagtgatg

SEQ ID NO: 610004 - DNA, 619 bp, Homo sapiens
ataattattatacattttctgatactggctaatttttttgaaaacagatgcctgcggcttcagttttactacctcgttttgtgagtgacactgtaaaacttttttgttcttatggccaagaggagaaagagaaataaatgaagaaactaacacaaacttatttcctttagtccctttccttaatgaaaaggaaaagaaatacacaacaccaacagtccaagcctggttatcagctgcattgtagaagaaatggtcagatgaataggtcttttgcttgttagggagttttattgagcacttcggaaaaaaaactcagttctctgtgtattgaaatggaaaaayagtgtccaacgtcaaggtctctcttgaaagaaaatgtttcaaatattctgaaaaaatgtttctgaggggtcagtttctgaagctagctgatttagtttcttttgacctaaaaacaggcaaatactatggggagtaaggtattgcacacactgcttttaaaaacatagttttgttgtggcctaactcatgttggccaaataattcctatttataaacagtccaccaagtcccatctataaacaatctaccaaagttgtgactagatagaaagactaag

SEQ ID NO: 610005 - DNA, 592 bp, Homo sapiens
ctgtatcagaaaaaaataccaaaagtttaatgaagagcttactccccttttgttttaatttactgaaatcatctatctatatatatttttaattgtcaayattattttggattttatctttccaactactgttttcttgttgctccttgaagaaattattttggggaatatgaagcttcatgtttacagatttgcagaccctttgataacacaagaggatgacagaactgcctcaggttatcttctgagctggcagacttctcaaatttgcacagacacaacctttagtgacctttggagctctgaaactacatgaatcatcattaaaggaaaattgaaccaaagccactgggaagttcctttttcagaggattaacttcgtttcgtttcatacataagcaatgaaggtatgtatagatccatgtcatttctcaggtcgagttaaactgtcctgtgatttaaaagttatagtatgtacatgattttatttgaaactctatatagctaataaagacaaagagaacagctaattcgaaattgcctgcacaagaaaattaaaatttccaaaatctattataattttgtcactcta

SEQ ID NO: 610006 - DNA, 592 bp, Homo sapiens
ctgtatcagaaaaaaataccaaaagtttaatgaagagcttactccccttttgttttaatttactgaaatcatctatctatatatatttttaattgtcaatattattttggattttatctttccaactactgttttcttgttgctccttraagaaattattttggggaatatgaagcttcatgtttacagatttgcagaccctttgataacacaagaggatgacagaactgcctcaggttatcttctgagctggcagacttctcaaatttgcacagacacaacctttagtgacctttggagctctgaaactacatgaatcatcattaaaggaaaattgaaccaaagccactgggaagttcctttttcagaggattaacttcgtttcgtttcatacataagcaatgaaggtatgtatagatccatgtcatttctcaggtcgagttaaactgtcctgtgatttaaaagttatagtatgtacatgattttatttgaaactctatatagctaataaagacaaagagaacagctaattcgaaattgcctgcacaagaaaattaaaatttccaaaatctattataattttgtcactcta

SEQ ID NO: 610007 - DNA, 592 bp, Homo sapiens
ctgtatcagaaaaaaataccaaaagtttaatgaagagcttactccccttttgttttaatttactgaaatcatctatctatatatatttttaattgtcaatattattttggattttatctttccaactactgttttcttgttgctccttgaagaaattattttggggaatatgaagcttcatgtttacagatttgcagaccctttgataacacaagaggatgacagaactgcctcaggttatcttctgagctggcagacttctcaaatttgcacagacacaacctttagtgacctttggagctctgaaactacatgaatcatcattaaaggaaaattgaaccaaagccactgggaagttcctttttcagaggattaacttcgtttcgtttcatacataagcaatgaaggtatgtatagatccatgtcatttctcaggtcgagttaaactgtcctgtgatttaaaagttatagtawgtacatgattttatttgaaactctatatagctaataaagacaaagagaacagctaattcgaaattgcctgcacaagaaaattaaaatttccaaaatctattataattttgtcactcta

SEQ ID NO: 610008 - DNA, 559 bp, Homo sapiens
tgaatctgggtgatccagtgttggatgcatatatatttaggatagttaagtcttgctgaattgtaccctttttcattatgtaatgccttttattattattattattgttgttgttgttggtttaaagtctgttttgtctgaaatcagaatagcaactccttttgtattttcagtttgcttagtatatttttatctatcccttttctttgatcctatgggtgtcattgcatgtgacatggggtctcctgaaaacagcacacagtcaggtctttcttctttattcaacatgcctctatgccttttcagtggggcatttcacccatttatgttcaaggataatattgatatgggcagatttggtcctgtcatcatgttgttaactggtttttatgcaagcttgatcttgtagttgttttatactgtcagtggtctgtatgcttaagtgtgtttttgtggtggctggcaatgatctttcctttccatgtttagcacttctttaaggatctcttgtaagataggtctggcrgtaatgtattcccttagcatttacttgtctgaa

SEQ ID NO: 610009 - DNA, 570 bp, Homo sapiens
taagcactaatagaatgtatgacatacacacatatgtatacacacagacacacacataaaggggcatagggaaacttttggaggtgatgcacgtgtttattaccttgattttgatgatggtatcacagttgtgtgcctacgtccaaatgcttcaagttgtacacatttagcatgtgcattttttatacagttataccccaataaagctgataaaggtacatcagggagtttattaataaaatattgagttatttgcatttttaatatttrtggtgttcatcaacttttataattagtaactgaggaagatatttttactcattctaaataaatatttacttttgttcctaattttgggtttcttgttttgcatttttaaaaaagttcctcccaattgtcaaagtttctgggcccacaaaatctggacctgctcctaattttttgccacatatctgagtctgggtattttcttcgtggcttttagggggctttggggttctactgccatgcctgtgattcctagtatttggaaggtaactagaggttgcagaccagaaggaacagaaagcc

SEQ ID NO: 610010 - DNA, 584 bp, Homo sapiens
gtcctattactctctcctgaattttaagagattaataaagattctaatggatcctgaagttcaggatcagcagaaagtttcraaggggattttccaggtgggaagaaagtatgcagaacagaaagagatggaacagtcaaaagacaagtgttggtgaagatgtggagaaactggaacccttgcacactgctggtgggaatgcaaaataatgcagttgctataaaaaacacagtatggatattcctcaaaaaattaaaaatagaatgattatataatccagcaatcccatttctgcatatttatctaaaagattgaaatttagatctttaagagatgttagcactcatgttttattgcaggtctattcacaatagccaagatgtggaaacaacctattatgcccatcaacagatgactggataaaaaaattgtgggataatatacacaatggaatactactcaacctttaaaaaaaaggaaattcttcaatacacacaacacggatgaatcctgagaacatgatgctaagttaaataagccagtcacagaaagacaaatgctgcttgattccacttgtatgaggt

SEQ ID NO: 610011 - DNA, 550 bp, Homo sapiens
ttcttttccttccacaaaacttccatcaccatcttctccctctttaatcagctaatgtttttgcattctgtttccctgaaaaaacaaaagcagttagaatagaacttcaacatattcccaccattatatcgacaatattccagcatctgcacccagtttctctgccatctcctgttgccctcagtactatggataagctgtctcagttcttatctacagacaatcccatcctttctgcactgatgccatcccctctctcctcctcaatttcacccgtccaacaactgtctcccttctctatatcatcagtttttctttctactgactcattctcmtcagcttgaaacatgctataattcctccaatatgtattttcaaaacaccttgttcccacttctcttctcccttaaactaccactctatttatctactcctctttatagcaaagctataaagagttgtaagagttttataaatatagctatatggcttttctacttcctttgtcccattctttcttgaaccactactaatcagtcttttatcccaa

SEQ ID NO: 610012 - DNA, 538 bp, Homo sapiens
gttaaaccaaaattatgttaatatttattactttctgwgcatattctgagcaaggagggggaaatggccttctacctaagagtcatggctaacaaacaaatgaccaaatatgtttaattataaagactgactttcctcttacgcaccaccccctcacccaagtcttttttaaggaaagaaggtagccatagggaaaagccattgtctgccatctgtgtctatctgagttgggtataccatctcgttctcatagataagtgaatactgcatgctaaatatttgttgacacttccatagcaagggtgatagtttcaattattgggtactataaaaggaatttaggcaggggcgcaatggatttctctctatgtatttattgcaagtacggtcatgtgcatctaaaaagaatcataagaaaatgctaaggcaggtggggaggcatttaagcagggtagccaggaaaactgactccttgttttgagtagataactggcttttgagagtgaacctcccaaggtctcagctttcttgcctgaaa

SEQ ID NO: 610013 - DNA, 521 bp, Homo sapiens
atttctttgcacaaaatatcctctctaccttcccgcagtttttttcctctgacggayaggacaatgttccaaaataaattttcttttctggtacagcccttctagtgtccttgcttcttaaccaaatgtgtgcttctaaactgtattttcattcagctttataataagaaaattcattctgtattaatttttaaaaaacaaatctttaacattattgttcaaagtttcattgaaagacatcatattaaaagttgattatctctcaagaagaataaaaatttgcaatttacaaattcaatgcaatccctatcaaaataccaccatcattcttcacagaagtataaaaaaaattctaaaattaatatggaaccaaaaaagagcctgcatagcccaagcaagactaagcaaaaagaatgaatctgcaggcatcacactacctgatttcaaactatactataagccatagtcaccaaaacagcatggtactggtataaaaataggtacattgaccaatggaacag

SEQ ID NO: 610014 - DNA, 515 bp, Homo sapiens
gagcagagcatttgaaggaaatctgtggcaaatccttccataacaaagaatattagtattgatttaatgcttagtatttgccagatattaagctaaatgctttaaatacattatctcattgaatgctccaaacatctccatgaggtaaataatattagtaaatcccatttattgtygggtaaatttaggcaaagaaacatttgataactcacccaaaagcccagctagaaaagaacaaaagaagctaaaatttaaactcatatctgtctactcttgagtcatagctcttaaccattagggtgttttcataactgatttctctaagtgaagcatatgctattaatcattatctatgttttactaaagagctaaataaatctttaaatattaaatatgctaggcatagattatatgctaattaaattttactatcttttaccaggcacggtggcacatgcctgtagttccagctacttgagaagttgaggcaggaggatcacttgaggccaggagtt

SEQ ID NO: 610015 - DNA, 414 bp, Homo sapiens
  misc_feature 374, 375, 376, 377, 378, 379, 380, 381, 382, 383, 384, 385,386, 387, 388, 389, 390, 391, 392, 393, 394, 395, 396, 397,398, 399, 400, 401, 402, 403, 404, 405, 406, 407, 408, 409,410, 411, 412, 413, 414: n = A,T,C or G
acaacataagcaaatctgtctgtccactggagaaccctgaagaattagatgctaggacaaacagccaggcaacaactcatgtcttgctggtggctctgaagttcaagtcctgggtactgagctccctggcccagtaactaacatttttcccttttctgcagtcttttcttcctaaaattataatacccatacattaggttagatggtttytctggttatactatcatatttgtatttgaagtttaaacttctgtttggcaacctatttgtgtacttagaagacttgccttttctgtaaagaattgtcttaatgtttataaaatatttttgttcttcagacccatattaacttttaattcatgcttgtaatgtannnnnnnnnnnnnnnnnnnnnnnnnnnnnnnnnnnnnnnnn

SEQ ID NO: 610016 - DNA, 615 bp, Homo sapiens
actgtttcgacaatttgctaaggtcagtaacctctacacaaccttgccatatgatggtaccataaacttattaagattttaaatcagcacctcatatgtatatttataaatagctcgcttctgttatcttttaaaagacctgatcagactggagtacggaagtactctgagctctcggatttttttttaagttaacaggtcataaataarttcaaaagttttctgcagaaccctgaagggaatagggatatttcaacattgcaaataaaacaagtgattaaataaatgagaatcataaaggccagagggtagagggttgaaaaaaagggacatcacatttttatgcaacattattaccttgctccttatcaaatccaccactttctctctttcactctctcactttctgtcccaaccttctccttttaaattgctgatataaaacactacttccaaaattaacaatacaaacacaactcccggccaggcacggtggctcacgcctgtaatcctagcactttgggagactgaggtgggtggatcacttgaggtcgggagttcgagacgaacctggccaacatggtaaaaccccatctctactaaaaatacaaaaat

SEQ ID NO: 610017 - DNA, 623 bp, Homo sapiens
tttagtgaggcctatactgtatacaatttgggcagcccttttaaagaaaaagatacaaaattagaactgaaaatgaatatttatccggaatgacaacagaaacacctgtaaatcactggagattcaggagggcccctggagaacaagcatacccactggagttggagcccaggaagactctgtaggtcacctccacctggaggagctggtracggaagtgctgccacctggggcacctggagcatggcccctgcaccagtcacagagaggagaccccgacagcccccttgccttgggctgagaggtgtgagccaacagtggcctgggcaggacctccacattgcccttaagctcacttcctaacattccacaaggccatctgggtgtagggtgaccaacagtcccagtttgcttgaaactgagggcaaaccagaatggttttctgtgacctctgcctttaagtgctagtacctgaaaagtcccaggcaaatggggacaagttggtcttcctatctggttccatatatatggcgggaatgcctcccatccactggtgattggtgacatgttgcagtcacgtggccatcaggtcacacatgtttgtaacaggtgtttactttttg

SEQ ID NO: 610018 - DNA, 623 bp, Homo sapiens
tttagtgaggcctatactgtatacaatttgggcagcccttttaaagaaaaagatacaaaattagaactgaaaatgaatatttatccggaatgacaacagaaacacctgtaaatcactggagattcaggagggcccctggagaacaagcatacccactggagttggagcccaggaagactctgtaggtcacctccacctggaggagctggtaacggaagtgctgccacctggggcacctggagcatggcccctgcaccagtcacagagaggagaccccgacagcccccttgccttgggctgagaggtgtgagccaacagtggcctgggcaggacctccacattgcccttaagctcacwtcctaacattccacaaggccatctgggtgtagggtgaccaacagtcccagtttgcttgaaactgagggcaaaccagaatggttttctgtgacctctgcctttaagtgctagtacctgaaaagtcccaggcaaatggggacaagttggtcttcctatctggttccatatatatggcgggaatgcctcccatccactggtgattggtgacatgttgcagtcacgtggccatcaggtcacacatgtttgtaacaggtgtttactttttg

SEQ ID NO: 610019 - DNA, 397 bp, Homo sapiens
gaattttgatagggattgcactgaatctgtagatcactttggacagtataaaaattttgacaatattaattatttctatctatgaacatggaatatattttcatatttttctgccatcatcaatattttataattttcargttacatatctttcatcttcttctttaaacttactactaagtatttttatgcattgtgaataggattgttttcttaattttgttttcagatagttttgttgttggtatatagaggcataattgatttttatacattgtttttgtatcctgtaactttaatgaattcatttatcagttctaacaattttttggtagcatcattagggttttgtatatattagagcatgttatcattagacagagacaattttgcttcc

SEQ ID NO: 610020 - DNA, 486 bp, Homo sapiens
gaggttgcggtgagccaagattgcaccactgcactccagcctgtgtgacagagcaagacttcatctcaaaaagaaaaaaaaaaaatagtatctccatatgtaagttccattctgtttgtttwaaaaaaatttagactgtaatcatacctttcatatagtttttttgttttgttttgtttttcgcagtgctgggattgcaggtgtgagccactgcgcccagactcatatagatttattaaattagcaacagaataaaactgtaccagttttgaaatgttctttgtccttctcatttctcatggagtacatctagagggtgctgcaaagatctctaaacaggatctccaggtctgaggcaagcttgtgcctgagctgcgctgtctgatgagatggccagtggcacacatggctatttaaatttaaattttagttagctaaataaaatttaaaattcaggtcctcagtcgcacaagccatatttcacat

SEQ ID NO: 610021 - DNA, 561 bp, Homo sapiens
acagacaataagaacctgccagtgtaatatgttgccaagctactgattgaggacaccaaggcaaagggctgacaaacccagaagctatgtccacatacagttgaagccacaggagcaaaaattcaaacrctttagggagttgtagtcccttgccattttttatacaaaatgattagatatcttgtaaaaatattaacaatcttaaaagataaaattaaagtagcaaaaaatatagttttatgaggtgacactgagaagaaacctctgaacaccaaactataggtgcaattcagaatctccaaacattgccaaattactcccaatacagaattaaagaagcaggttgactgaatgctaatgactactcttttatgtgatgtgcaaaagacaaaagagcagttctgagataaagaaggtaagaaagaagaaagggaaatagagcaggtaagaaagtagatgagcagctaacagaagcagcaggattctttaataagaatggccatggttggggtctagataaattctactcagctcttagttcttaatttggcagttttcttt

SEQ ID NO: 610022 - DNA, 526 bp, Homo sapiens
ctttaataagaatggccatggttggggtctagataaattctactcagctcttagttcttaatttggcagttttctttctgcaatcaacctttttctagcctctcgagacaagattagatgttcctgttgagtgcttctaacactctgaaacttgctccttcgtatcacttataatttatatagctatttgtttaacgtctatattctcctagtcctcaactataaactccacaatgctagagaccatatataccttgtttaccaaaatatacaccgtacccagcgtatagtatgtgttcaataaatatatgagtaaacaaattcaatgtaatcattaatgtaagtatgtggagagacagcattagcataatgattaaaggaaaaaactctgggttctgattgcctggatttgacttctgtttgtgacattcaccayctgtgtgaactttggctattcaagctttcttccttttctgaaattactttatttatatacaattaaaatgatacattgaaagtcaattac

SEQ ID NO: 610023 - DNA, 376 bp, Homo sapiens
aaggcatgatgggaacagagggcaagtcctaatggaaccaggccgactaactcctgccccatacccacaactctacacccaggctgtgcttaacaggcatggagaggctttgcacacakaattttatgtaagctttggaaattaattcagaaccaccaccaccaaaaaaaaaaaaaaagagagacagagagaagaagaatggtactggcatttggattatttaatttcacagctactgacatttcagaaaagtctttattgtcaccttgagccttgcataaaagctgtgaaaaacaaaggaacacaacttgaggaaacaaagatttcaaagaagaatgctttaaaccaaaatgatagcttatggatgtgtgtttta

SEQ ID NO: 610024 - DNA, 509 bp, Homo sapiens
gcaagtcctaatggaaccaggccgactaactcctgccccatacccacaactctacacccaggctgtgcttaacaggcatggagaggctttgcacacagaattttatgtaagctttggaaattaattcagaaccaccaccaccaaaaaaaaaaaaaragagagacagagagaagaagaatggtactggcatttggattatttaatttcacagctactgacatttcagaaaagtctttattgtcaccttgagccttgcataaaagctgtgaaaaacaaaggaacacaacttgaggaaacaaagatttcaaagaagaatgctttaaaccaaaatgatagcttatggatgtgtgttttactactttttcatattgcatttttaccctagatacataattcattcttaatatcatgtaggtaactggagaaagtatgttgtgataccatgactttggaaacattgttctattgtgattagaaatttctatagaaatggggaaaaaatgaataca

SEQ ID NO: 610025 - DNA, 376 bp, Homo sapiens
aaggcatgatgggaacagagggcaagtcctaatggaaccaggccgactaactcctgccccatacccacaactctacacccaggctgtgcttaacaggcatggagaggctttgcacacagaattttatgtaagctttggaaattaattcagaaccaccaccaccaaaaaaaaaaaaaaagagagacagagagaagaagaatggtactggcatttggattatttaatttcacagctactgacatttcagaaaagtcttkattgtcaccttgagccttgcataaaagctgtgaaaaacaaaggaacacaacttgaggaaacaaagatttcaaagaagaatgctttaaaccaaaatgatagcttatggatgtgtgtttta

SEQ ID NO: 610026 - DNA, 614 bp, Homo sapiens
gaattcctatactcatcaccagagaggaaaaagcaaaaaatggggctctagcaccagaattgggacttgaaatgcattttctctcacagaatattttaaaaggttgtgagctattatgttattagtgttatatttcagcacagtcgtgagtgaaatggctttttatggaccagtctagagacctcactaccatttatatcattgttattatgcagaaatatgttttgaattccaagcaagttatacattaactttcagaatactatttcttaagtcagacttatctgaactgccacatgtactaggtcaggatgatttagtgagatgcccaaaaaaatcttttgctttaaaggctattactctttayaatggctgtgttacagactttaaataaataccttggcttcaatcattcaaccaagatgtactaagtatctcatatttgtaagacactattctaagtgctggtgctaatgttagtgagccagaagcagattgtctatcatccctttggtagcatctctgcccttgtaaagattctaggaaatgcagagagccctgaaacaagtctttaggatgcccatcccatatggtgtcagtttagagttatccaa

SEQ ID NO: 610027 - DNA, 590 bp, Homo sapiens
acactgtggtgtctctgcctcttttacaaggaatgggtatataaagagacaaattgggagtggaatctggggaaaagaattagaccactggacagataaccaggtacgtctaagctctcacggctgaccaaaggacagtttggttgcccttggctgcattctgataagtcttgttggaaggaagggattgtatacagagagctagagaccarcaaggtttatcagctgattctccaagtggctgagatagttgattagtgcagagaagctgggctcaacgaaaagacaaaatctaacatagctacattatgaactgccaacaattacctacatttatcagactgcaaaggacatcagatcatcctgcttatcatcttgcttcctgacaaaattgcacattagtgattctgggtggaggtgtgcttcacatatcaaataattttgggaaaagctgactttagcatgaaaactcagtcaaagctaaagacgactttcctttgggtctagtattcctgatattattaagtcagtttcatcctggtgctaattcaaggaaatggacacaatttttcagttacagattatttaaa

SEQ ID NO: 610028 - DNA, 534 bp, Homo sapiens
ttgaccctttacacagtttattacatctaatttcattcygtggctcttgatttgggggcatgtttaacaacactaccactcaatgagttctgagccattgttatggtatatacaaacaattataaattgtaagagcactgaacagaaagataacagtacaatataataacagttacacaatcattcaggaatgttttcaggctacaaagtcaagtgtggttcatgggatacttttatttccaatatttttgcttaccagccagagtggtgctagctcatgggctagcataatgctacctgtggtcaacctactcagctcccagatttgaaggaatgtgattcatggatagttttcaaagtgtgtgtgtgtatgtgtgtgcgtgtgtcttcaaattttttatgtcaagttatattgcatgtaaatacaagatataatatacaaaatataaatggtataattaaatcaaaccatttcaagttggtgtctttcagtgttgtataatataggaatatctcacatctatatccagtaag

SEQ ID NO: 610029 - DNA, 534 bp, Homo sapiens
ttgaccctttacacagtttattacatctaatttcattctgtggctcttgatttgggggcatgtttaacaacactaccactcaatgagttctgagccattgttatggtatatacaaacaattataaattgtaagagcactgaacagwaagataacagtacaatataataacagttacacaatcattcaggaatgttttcaggctacaaagtcaagtgtggttcatgggatacttttatttccaatatttttgcttaccagccagagtggtgctagctcatgggctagcataatgctacctgtggtcaacctactcagctcccagatttgaaggaatgtgattcatggatagttttcaaagtgtgtgtgtgtatgtgtgtgcgtgtgtcttcaaattttttatgtcaagttatattgcatgtaaatacaagatataatatacaaaatataaatggtataattaaatcaaaccatttcaagttggtgtctttcagtgttgtataatataggaatatctcacatctatatccagtaag

SEQ ID NO: 610030 - DNA, 534 bp, Homo sapiens
ttgaccctttacacagtttattacatctaatttcattctgtggctcttgatttgggggcatgtttaacaacactaccactcaatgagttctgagccattgttatggtatatacaaacaattataaattgtaagagcactgaacagaaagataacagtacaatataataacasttacacaatcattcaggaatgttttcaggctacaaagtcaagtgtggttcatgggatacttttatttccaatatttttgcttaccagccagagtggtgctagctcatgggctagcataatgctacctgtggtcaacctactcagctcccagatttgaaggaatgtgattcatggatagttttcaaagtgtgtgtgtgtatgtgtgtgcgtgtgtcttcaaattttttatgtcaagttatattgcatgtaaatacaagatataatatacaaaatataaatggtataattaaatcaaaccatttcaagttggtgtctttcagtgttgtataatataggaatatctcacatctatatccagtaag

SEQ ID NO: 610031 - DNA, 534 bp, Homo sapiens
ttgaccctttacacagtttattacatctaatttcattctgtggctcttgatttgggggcatgtttaacaacactaccactcaatgagttctgagccattgttatggtatatacaaacaattataaattgtaagagcactgaacagaaagataacagtacaatataataacagttacacaatcattcaggaatgttttcaggctacaaagtcaagtgtggttcatgggatacttttatttccaatatttttgcttaccagccagagtggtgctagctcatgggctagcataatgctacctgtggtcaacctactcagctcccagatttgaaggaatgtgattcatggatagttttcaaagtgtgtgtgtgtatgtgtgtgcgtgtgtcttcaaattttttatgtcaagttrtattgcatgtaaatacaagatataatatacaaaatataaatggtataattaaatcaaaccatttcaagttggtgtctttcagtgttgtataatataggaatatctcacatctatatccagtaag

SEQ ID NO: 610032 - DNA, 509 bp, Homo sapiens
gtgtgtgtgtatgtgtgtgcgtgtgtcttcaaattttttatgtcaagttatattgcatgtaaatacaagatataatatacaaaatataaatggtataattaaatcaaaccatttcaagttggtgtctttcagtgttgtataatataggaatatctcacatctatatccagtaagagttatcatgattactaatgaaattttaggaagagttgctttataccatattctcaaaccaaaaatgtgatatatgctctcacattaagccatattgctatggacttgatgtggtttgctgtgtccccacccaaatctcatcttgaactgtagtccccataatccccatgtgtcrtgggaggaacccagttggaggtaattgatgggggttgattacctccatgctgctctcatgatagtgagtgagttctcacaagatctgatggttttgtaaagggctcctccccttcttcactctgcacttctccctgctgccgccatgtgaaggacatgtt

SEQ ID NO: 610033 - DNA, 536 bp, Homo sapiens
aggtccctcccatgacatgtggtgattatgggaaccacaattcaagatgagatttgggtggaaacacacagccaaaccatatcaccaatctttcagaaatggttagaacatacagctcaggatacgcagactgaccattccttggaggcaggtactatatttattttgttcacttctgatttattggtagctggaatgtgtgtggcatataggcatttattgaacaggcgttcaataagcacttgttgcatgaatgaaagactcattaaagtctaaagtcaaatatattagctatagtgtatttttttaatccaacattcctaatcattgaaaatgaaaagaattttagaaatttcaagggatgtacccacagtcaaaatgggaattagtgcaaatctaaaattgggtctcccagccctttgttctgtcaaytaaactactctgtcacccttttaggaaaaaaagatgagcaaaatttgagtggagaaatgaatgaataatgtaaaattttactttcaaatatttattgacacata

SEQ ID NO: 610034 - DNA, 614 bp, Homo sapiens
gtcaattaaactactctgtcacccttttaggaaaaaaagatgagcaaaatttgagtggagaaatgaatgaataatgtaaaattttactttcaaatatttattgacacatatctactgtgtaaagtgggaacaacaaaaagtaacttgctgtttatcctgtccttcagcccagacctctgtcccaggtaatctcagaatctttacacccaacctcacattccctttgcaaatgattctccaatctctgcatattgtaatgcctgcaccaaaccctctcaggatcagagtcaggaatgaccatacctcttctaacagaagtttgggtccccaaaactggttaacatgaatgacactctgatctgaggcgcccagtgaaggggagttagcaacttgtattttccacaaaacatcagatgattcaacatatcwactacttagagacccaattattggcagtaaattcagactagactaaaacgtcttgcatccatacttgctaagcattgctatggtgctcttgcagggtatttaaaaaaaaataaccctgcaagagcatcataatatggggatgataattcctacttcatggagtagtccagaattctacttaactc

SEQ ID NO: 610035 - DNA, 529 bp, Homo sapiens
aactttcccagctctctggttgatgcatgagtacaacagtcaggttagctgaataaggactaatttctgctctggtaaacccagaatgggtagacggacacaaaactgaccatgtaactcttaaaaactgttcacagataatcttacttttgtatkttttactgtctgatttttcatttcatcaagtcaaaaactttaaaaggtactatgtaaaggaacaattacaatctaggcttggtcataattttcttgatttttccccaaaaagacacatgctatcctcagacacatacgtcacagaagacagaaatatccacccagactcttcagggatttcagactttcccactttaatgcttctgtcttaaagctcaaccaacaactccagactagacaagaggtccctgggccctaacagtcttttaaacatagaaaacgtttgccttctatttctatttttctttacattttccacctgctaataactttttcctctcactcttatttatttagagtcagagagttaaat

SEQ ID NO: 610036 - DNA, 606 bp, Homo sapiens
agaaaatatttcaaaggccattcaagctaggatccttgcaaagtagtgatcaaatgattcaagcaaggatatcgaagaatattcacatttagaagttgtattggatgctttcattatttttgacagtagcaacaaaagaagatacatagaaggctctgattattgactcattttgtgtttctacagaattcagaaggaaacaatataatcatcactcaagtgagggcaccaccaagaaaataatattttatgaaaaatattgctacatacccaaatcatggtttaatgcagccaacagtttaaactttataatagaaatataatttgaacaaataaacaagaaacaaaaatttcacctctcctctttatctgtgactactctttctctgacagagatgctaatcaatagttattttgttttccagttaaacaacaacaggtagaaaaaggagaaggtaaaatggatagaaaaatccaaaactcaatgattgaagttaaatgtctataaagacatgaggcagamagaatcaaagaaaaatttaaaagatgacaggttggggttgtggctttcacatgttaaaatgctatctttatagtaaaattaga

SEQ ID NO: 610037 - DNA, 653 bp, Homo sapiens
gcctggtgaatggcaggtaaaaggaaagagcctatcctaagtgcccattgctctgacaaacatgatcttgtttaatctttactctgactgtatgaggggctgccaatcccatttcatagacaagctcagagagttcaacaaacaattggggctcatacaattaatcccacagccagaattttaatacaattctacctaattccaaagcccaaaagcctttcctctgtttctttgtgtttttctaatgttcagacttcttggggtttttgttgttgttgttgttgttttgaacatctgacatgagaactagaaactagacaataagatgaccttgctcagatcatcctgtagaagtgattcggagatcatattatccaggatttagaagcagtcattgccagaaactgtgctgtcagttctatgaatgtttccattttcctgtttcatttaaaggactcaacaatagacatactaaatccacttcggtctcatccagacttcartaaagaactaccacttcagaacttctaagtcctgaggctggaccactggatttaactgatgtactgaactgccatcaagtccagtggaatttaatattttatgacaatgattaaaatattgatgacagtgatgacaatagtaacaacagt

SEQ ID NO: 610038 - DNA, 432 bp, Homo sapiens
tgtctgctgccagggggaaggaaaggaattttgagtgaaaagaaaaatgagaaggtaactgaggcatgacatcagtgagacggtggaatatgaggccccagctctcatctctccagagaaatactgattttggtgaccactcatggatgagagtactttgtgggagccctgaagtctagttgagtatccagcataccaatgatgcaaaaaaatcgggagtggatatatggcagagagtaaggacagcagccacttcacttgtgtcatccctttccaaagtggcacagctaagtacgaaaggcccccttggcccatgatttcttccatggggaaaagygagagccccactttcccagcattgcaggatgccacccaagaggtccacttatgttgcacctcacctagaactgaaggagtcagcacagcggaatc

SEQ ID NO: 610039 - DNA, 542 bp, Homo sapiens
ggacagcagccacttcacttgtgtcatccctttccaaagtggcacagctaagtacgaaaggcccccttggcccatgatttcttccatggggaaaagcgagagccccactttcccagcattgcaggatgccacccaagaggtccacttatgttgcacctcacctagaactgaaggagtcagcacagcggaatcacctggggacatctaggagcaaggggtaggggaaggagcacacagcaactggcctgcagttctcaacagccaactgcagattctactaactggctcacamactccaccaagaggcccacccatgaagcccacaggatgactcacctgagaaccttctcaaccagccaacacataccctagcaccctgtgtggtcccaatgggcaatacctcacatgtctctgagcacgattcacatgagctccctgtattaggtcgttcttgcgttgttataaagaaatacctgagactgggtaatttatttaatataaagaaaagaggtttaattagctcatggttctgcaggctgcag

SEQ ID NO: 610040 - DNA, 574 bp, Homo sapiens
caggtcagtatcttttatgaacacagaagcagaaatcgagaacaaaatgctagaaaaccaagttcaacagtacattaaaaggattatgcaccataatatcagcaagtgagatttatccctgggatgcaaggatggctcaagtctacaaataaataaatgtgatccaccacaataatggaatgaaggataagaagcatataattatctcaatctatgcagagaaagtatttgacaaaattcaaaagcctttcaggataaaaactctcaacaaattatgtgtagaaggtaygtactgccggtatctagtcatattttgccgaacggagagaagttggaggatgtattgtattcctaggccctctgtaacagattaccataaacttggtggcttaaaccaatagaaatgtattctgtcacaattctggaagctggaagtgtgaaaccaaggtactgacagagactgttattctgaagactctgagaggagaattcttgcttgccttttccagcttctgttgactgcaagcattgcttggcatcactccaatctctgcatatgtcttcacacagcctt

SEQ ID NO: 610041 - DNA, 581 bp, Homo sapiens
aattcagtttccagatcatcttttcatcctgtgcagactgtaacataccagacatggtatacagcttctatctatagaatttttaaatyatttattgcggtaaaatattcacaacataaagtttaccattttatctatttttaagtgttacagttcagtggcattaaatcattcactttgttgtacaaacatcgctgtcattcttctccacagcttttcatcatcccaaacttaaacttggtacccactaaatgacacctcctcgttcctgtgcaacaccctcataaactctaatctacattttgtctctgggaatttgacttctttagatacctcatctaagtagaataataaaatttctgtcattttgcatctggcttatttcatagcataatgtcctcaaagttcatcatgttgtagcatacatcagaatttcattcctttttaaggctgagtaatattccattgtgtgtatatatcacattttgggttatttctacctctttgcaactatgaataatgctgccattatctccagattttgacatgaaaaagattcacctacagaaagctattgtata

SEQ ID NO: 610042 - DNA, 581 bp, Homo sapiens
aattcagtttccagatcatcttttcatcctgtgcagactgtaacataccagacatggtatacagcttctatctatagaatttttaaatcatttattgcggtaaaatattcacaacataaagtttaccattttatctatttttaagtgttacagttcagtggcattaaatcattcactttgttgtacaaacatcgctgtcattcttctccacagcttttcatcatcccaaacttaaacttggtacccactaaatgacacctcctcgttcctgtgcaacaccctcataaactctaatctacattttgtctctrggaatttgacttctttagatacctcatctaagtagaataataaaatttctgtcattttgcatctggcttatttcatagcataatgtcctcaaagttcatcatgttgtagcatacatcagaatttcattcctttttaaggctgagtaatattccattgtgtgtatatatcacattttgggttatttctacctctttgcaactatgaataatgctgccattatctccagattttgacatgaaaaagattcacctacagaaagctattgtata

SEQ ID NO: 610043 - DNA, 662 bp, Homo sapiens
cccctcctgggtttttcagcataaaccatggcattcaaactaagtatataattaatttcactttttggtattttgatggctatacaaaagagcaaaaccagatcttgaaatgggkgacattttggctcccttatgataacttgaaacccttcctaaatttaaaaagcatcttctgccttttcttgtctgagctgcatgtaccttaggacctctgcttctccatccacactgctctcctcacacccacgcctacacgcacattcctctgtgcaatgcttgctccttaactcaccctctcctggtccctcttcctccttctggggctggccagagaattagtatggtttttgttttagcctttaatgacgttctgttttattacattgatccgtttttatgtgactgacttttcctccatctgaatgaaaagttccctgaaggcagaaacaatgcttaattcctttgcacagagtttcaagaaatgcattaaaataaggggtggcaaacaacatcccatggaccaacactggcccattgcctgtatttgtatggctacaggctaagaacatttttatatttctagatggttgcataaaaaaataaagaatattcatgacaggccgggcacggtggtccacacctgtaatcctcgcactttggga

SEQ ID NO: 610044 - DNA, 563 bp, Homo sapiens
tcctaagtgtaaactatttaaaattcactagcagacacaataattctctgtaaacaaattccttctgatttttccatttctgattcagctgtcagggcgataggcctgaatacagtactcctatagaaagagcaatgctctaagaagaaatcatccagcaacaaggtaacaaaactaagcccacttacctggtgttatttcagtgggcaattttcattaaagaaagttagaagctgctgttagcattygctgatcttgttacctcgttgcttggatattgaccttgcaccagctattttgcctccagttttctctgggctttactatgttctttaatttcctgtggtattaatcttcagcccaggaaaaatgaagttgatgctgtaccacaagaaatgttgcaatcacctttcaatacagacatctgcagcattttacagggcctagaaattactaaagcccatttcaaggcttttttttattctttgtcttatgtagtttgtcccttgttaagaaataaaatcaatttattccctgttacatcataaagtgtccaagaggga

SEQ ID NO: 610045 - DNA, 583 bp, Homo sapiens
tcactcaaaaaatatttattggaagctaccatgagcattgttctcaaggcctgaacactacactatttaagacaatcagaatccctagcttgaattctatagctgggaataccccacaggcaatgaaacaataaataattgaaaatgacagaagggtagggatcacacagcaacttcccagcatcactgctacttttccttgaccaataatttgaataatagtcatatgtaccccacacaaataggtatttcccaaaaactctctctgaccctaactgctttctaattaatcaaaagcagragtatcacaaagtagtttctcaaccaaaaagcagcacctatttttcctgttaaaaaaagaaggttttcttttgttttcgtttttatggtggagggagggcagagggactatttgagacactagaaaaggtaaattttcttctttattagctatttctatccattcatttgacccaaatgtataataatatttaagatgttcaatttttaattattttaaattcagtttatgagtcagtattgcagcaggaaatacatggaacactcaaattgcgtaattgag

SEQ ID NO: 610046 - DNA, 589 bp, Homo sapiens
ggtcttaacgttatagtgatcatcttcatttacttatataaataataaactgcttgatttctgtttttaaaatttagagacagacatttctacaatctayaggtttcccatttatgctaactggagagatattcaggttacgatatggttacatgtgcacagctccagactcagttaaatttctaccaaccaattctgggccctcagtaaggcacatcccatatacacctactatgtacccataaaaattaaaaattaaaaataatgtacatccacggtatttagtaaactttcaaatactagtttggggaacaggtagcttacccttagagactaatacagttaatgaggactttttaagtaacaaagcttttattttaaaaaattataatgagatgaattgactagaactccaggagtctgggggaaacagaccaccatggcagggctactccccaagagagaagtagtggtcagagatgagatgagattctacctcttgggggattcgtggggctatgtaagcagctgcaattcctttgtacaacagcccccatccaccatatccccaaatgagattatggggatt

SEQ ID NO: 610047 - DNA, 540 bp, Homo sapiens
tggctaatttttgtatttttagtagagacgaggtttcaccatgttggcctggctggtctcaaactcctgacctcaagtgacccacctgcctcagccttccaaagtgctgggattacaggcgttgagccactgcaccggacttttttttttttttttttgataatacaaaaacaacataagtcagggtagtctctgtctcttgagaatttcaaaacaaccgtaatgtttctaccttggtatcaatagaagtgtagcctgacaggatattagtagctatttctgayagtgggtgattgaaatttttttcagcacccttccctggcccatcctgcctgtactaaatatcagatttgcctttcttctcttctttttttccacaaccagcttgaaggtctaatcattcacaatccctagagggattcaatattaatttcctttgttctgtaccccaacaatggagcactgaataagacattcccctatttttttttgtcagtagctcctataaaacatcaaaaggatgcctatacttttggccca

SEQ ID NO: 610048 - DNA, 429 bp, Homo sapiens
cccgggtgtctgatctaagtagtgttctttgccaacgagcctaaagagaaaacttactttatactatttatttcagcaggaaggcttctaagaatgtgtaactgtagattttgccttaagcccatttacttttcccatctttcaatttcaccatttccttcctcccatcacatgmtatgtgttttgtgtgtgcacacgccaaaccatgcttatctgagtgcatacgcatctctgtttacttaatttgaaattatttcctttctactgaaaatcctgacatcttatcatataagcagagcacaaagaatccatgaaattactactattaaataagacagctctctgtatgtaaatctagcaagctggaccatttcagtaattatctaaatacaacatatctaaccagttaaagtaagaaattaattactt

SEQ ID NO: 610049 - DNA, 389 bp, Homo sapiens
tattcagtaatgaactagcacagaaaagagtcatgaaaaaaattagagccaagtggagatggaaaagctgtgcaatcaggatgtatgwgtgacttacacaggaaaatgacataaatttgttttatgctttattttcaggattcaggagtagcccttagacataggtattgattggccagatgatgtaatctaccctgagaaatggaactcacatattttagaattgcctaagcaattatttgttgtggttattaaacaactaggacatgctgtggtggggtgagtcagacagacatccttagggctttagagaatcgtgcaagaatggatagaaaaattctgagccaggtggtcatgagtaggctgggctggtaacactgggttttaag

SEQ ID NO: 610050 - DNA, 639 bp, Homo sapiens
catggtagagacgcctgagaaaggaaacaatatcttttgaatgcctatgcctagccatgattaaatataaatcgttcattgtaatttacacaattacaatgtgtaattacacattgtaatttcacaaagttattttgaatcataacttttagtttttaaataccaaataataaggaattcatcgtttaaaaagagtataacatgctcttttttggcatgttatacatattttctagttcaaaaacctcatgaagcatgcattatctccattttacagatgagaaagttgaggctcagtgtgaactaacatataaaaaggaaataatccagacrggctcagtggctcacacctgcaatcccagcactttgggaggtcgaggtgggcggatgacgaggtcaggagatggagaccatcttggccaacatggtgaaaccctgtctgtactaaaatacaaaaaaattagctgggtgtagtgatgcgtgcctgtaatcccagctacttgggaagctgaggcagggtaatcgcttgaactcgggaggcagaggttgcagggagctgagatcgcgccactgcactccagcctggcgacagagcaagactctgtctcaataataataataataataataataataata

SEQ ID NO: 610051 - DNA, 653 bp, Homo sapiens
cctaacacctattagcatatcatcctaccttcttgtggcattattgttgatgtagatcattgacctcacaagacaataattcagttctcacttgtcttgactgaagttttggaggaagaggagacaggaaaacaaagggtttcttgttttgaaatatacaatgaatcaggagtgagaacagaaggagattttggattctctttgattttacayctccccctaacacttacccatggttactgctgtctagagtagattctcaaaaacctttctaaattaactcattaggagagtgactttttaagttaacatagcctgtgacaagcctgggactagaacccaggttgtgcataaggagtaggaagatgttgggcttggagtcagtgcagagagaaaaagtctggttgttcaactcatgaaacttctgactgggcaagtctttgagcctgagtttccttgaatataaaattgggaatgttcagagatgtatgagaatttcatgcaataatagatgtaaagtgtttctgtctgacacagagaagacactcataaaatgttcacccatttttccttcctaggacgtcagagggatgtgaattttgatctgtggtgtcatatgttgtatctctgttgtgacatggcagcctgatcgc

SEQ ID NO: 610052 - DNA, 629 bp, Homo sapiens
atgtattttagctagaggtaatcgtatattccatatatagagatattatatatgtatattctctctatagttaaaggagctagcaaagaagtttgtttttctatctttccagacactacaagacactactacaaaataagtgaataagtaccaggtctgataaaatcaaataaattatctattctrgattcaattcacaattcctattaaagccttttgcaataaaagcagagaaaaaattaaagtgaaaaatgagagtaaaaagaccatattccttattattaattattttaaaatttttaaaaagcatgagagttagacttgggaaagatcaccttggaaagagagtatatcaaacacgatagcaatagacttttcttttaggaagaataatggtttaatgtttaattaatcttatccatttctgcatttatgggaaggcagagaagagtctgctttataatgtagaaaattaaatattaaaaccttggtgcctaccagacttagattttcatattatgaatgagcattttcactttctgcacacacaaagaaacaggagatagatgcagtcacttagctcttcagtaaagggattatttcaatgtatttctgataccatcttgcta

SEQ ID NO: 610053 - DNA, 544 bp, Homo sapiens
ttgatttgctttgtccataattgattacttggcttttaccaaaaaaagcacatctcaaaaatgtccaaaaaaggagaggaaatatgttcaattctaygtaaaaaatttctaaaaatttttgaagctgaaaggaatgcccataaacaatctgattccagtcttattttcagtagtcatgcataaatcatgttctatgacacagagagaaagagattttttacctaaagtggtatttataagaatttttagcagactgggaagaagtccactttagctaaattaaaaaaaaattcaccgacttctatatattatgaagtggttttgaattctatctttactatttatttgaaattttctgagcaaagtactctgtctcattgatcctcaatgtcctcctatacaaaatggcaaaaagaacacatccccatttcattgaagtgttgtgagaaccaaacaggctgaaatatctggcctgtttagaatattatctagcacaccataagcacacaatacagggtgcccattattcatgtgacttatgtaa

SEQ ID NO: 610054 - DNA, 544 bp, Homo sapiens
ttgatttgctttgtccataattgattacttggcttttaccaaaaaaagcacatctcaaaaatgtccaaaaaaggagaggaaatatgttcaattctatgtaaaaaatttctaaaaakttttgaagctgaaaggaatgcccataaacaatctgattccagtcttattttcagtagtcatgcataaatcatgttctatgacacagagagaaagagattttttacctaaagtggtatttataagaatttttagcagactgggaagaagtccactttagctaaattaaaaaaaaattcaccgacttctatatattatgaagtggttttgaattctatctttactatttatttgaaattttctgagcaaagtactctgtctcattgatcctcaatgtcctcctatacaaaatggcaaaaagaacacatccccatttcattgaagtgttgtgagaaccaaacaggctgaaatatctggcctgtttagaatattatctagcacaccataagcacacaatacagggtgcccattattcatgtgacttatgtaa

SEQ ID NO: 610055 - DNA, 556 bp, Homo sapiens
gatggaacctatacctggtatttctttaaaaaccccagctaattccaatgtgcctcctccactctactgatctctttatttgtaccttcaggagaaatgcttctctttttttaggataagaaacagtttgttcttattttgataaaggcatgccctggccactatgagccatgtgcagcacatttctctcatcatcttggctgttagaaagtttaaagtcaattataaagtgaacactgtgtgtctgcacagtacttcagtgaatatattctttcctcggtcagttttatgatcctaatttttctttcttttgctttttccccctcatttttttctgwaatatttactctcttgctattgtatgtattattggaagctatcttttcagcacaacttgggccatcaaaagagataaggaactagacgcctaaaaatgtagaaaagaaaataaaaatatgtgattaatgacaattagcatcctaaagagtttagaatggctttatcattttgtttggaattccaaaaagccttacgatagacaaaaataaaacgagag

SEQ ID NO: 610056 - DNA, 603 bp, Homo sapiens
ctaagcctcagcaccatatcaccatcttatattgctgcagttcaggaacattgattctgagggctgatacagaacgttcataaccatggggaaataaacaaggaagaagaaatatggagagtgaaatagttctatactaggaatactaacaagaatatcagtgaccttaaaaagtggtaagaaaggtcaagccaygcacagtggctcacacttgtcatcccaacattctggaaggtcaaggtgcagaattgcttgagcccaggagttcaacgccagcctgggcaacatagtgagaccccatttctacaaaatgttaaaaaaaaaaattagccaggcatggtgggtgcacctgtgttccaagctactcaagaggctgagatggggggattacttgagtgcaaatagttgatgctgtggtgagctgtgttcaggccactgcagtccagccagcctgggcaacagagcaagatcctggctccaagtaaaatgtagtaacaagaatacatgagaaaaatactcagaaaacactcccaattatcaattacaatcatttaatggtcatttaaaatgttatctcaatctttaaacattttaaatccctaa

SEQ ID NO: 610057 - DNA, 603 bp, Homo sapiens
ctaagcctcagcaccatatcaccatcttatattgctgcagttcaggaacattgattctgagggctgatacagaacgttcataaccatggggaaataaacaaggaagaagaaatatggagagtgaaatagttctatactaggaatactaacaagaatatcagtgaccttaaaaagtggtaagaaaggtcaagccacgcacagtggctcacacttgtcatcccaacattctggaaggtcaaggtgcagaattgcttgagcccaggagttcaacgycagcctgggcaacatagtgagaccccatttctacaaaatgttaaaaaaaaaaattagccaggcatggtgggtgcacctgtgttccaagctactcaagaggctgagatggggggattacttgagtgcaaatagttgatgctgtggtgagctgtgttcaggccactgcagtccagccagcctgggcaacagagcaagatcctggctccaagtaaaatgtagtaacaagaatacatgagaaaaatactcagaaaacactcccaattatcaattacaatcatttaatggtcatttaaaatgttatctcaatctttaaacattttaaatccctaa

SEQ ID NO: 610058 - DNA, 601 bp, Homo sapiens
taaatcagtctataattaaaagaattgctggaagatgtagaaagagatgaacacagttcctagyacatattaaaaatataatacatattggggatggggaaaaacaaaaagaatataatacgtattcttccactatgcaattctttgacattaattttgtcagtgttaagatgtgaaaaaaatctgattttccaaacctactatatttttgtgaataattaagtgaaaagtgttaaaataatatgaaataactaaaaatcaaacaaatattagttattgacttaaacttatttgagacacttcttcaaaggtttaatctctcttctaaaggtttctctgacgatcccagtcagaaataatagcttccatttctatagcactttttggctgcatatatattgccttacattatacatataaaacccataggtttatgagtgcttttataaaatccttttaagatagttggatttcaaataacaagaacatattcattctgactgaacgaaagtgaattcaaaattaggggggtggtattagaaatgtattagaaaggatctgggttatctcataaaatagaaggaaggctgaataactaagc

SEQ ID NO: 610059 - DNA, 598 bp, Homo sapiens
cattctacatttatgattagccatttttcatctctgctctttcaatgaatatccttaaaaaatgggacactttttaaatgaaacatgctgggacttttaaatggcatcaataattttttacttgtttgtttttaattagtatctaaataaaataatccacaaactgggagagttattttctatgtgaatttaattgaatttcccacttctgttgtagggaatcaaaatataaaacacatagctaaagcaaatgcatccctacacagcagtgtagaggtacatgtgtttctctatggtaatagccaggtggttgtrtcccagcaggtttaataaggtggtattaaatactgtggtgactcatgatggtatagggtttgtgctcaacccaggaatctaaattttcttagcaaaataagtgaatcaatcctctagtgagcaaacctaaaccaagtctctatatttatattgactatatttaagagtctagctttaccatttttcaatagcatgccaaaagtaatgtactgcaaacttttactattaaatgtcttaaatacatttgtaaattgagcacaaaagggtttaacagacctgcata

SEQ ID NO: 610060 - DNA, 598 bp, Homo sapiens
cattctacatttatgattagccatttttcatctctgctctttcaatgaatatccttaaaaaatgggacactttttaaatgaaacatgctgggacttttaaatggcatcaataattttttacttgtttgtttttaattagtatctaaataaaataatccacaaactgggagagttattttctatgtgaatttaattgaatttcccacttctgttgtagggaatcaaaatataaaacacatagctaaagcaaatgcatccctacacagcagtgtagaggtacatgtgtttctctatggtaatagccaggtggttgtgtcccagcaggtttaataaggtggtattaaatactgtggtgactcatgatggtatagggtttgtgctcaacccaggaatctaaattttcttagcaaaataagtgaatcaatcctctagtgagcaaacctaaaccaagtctstatatttatattgactatatttaagagtctagctttaccatttttcaatagcatgccaaaagtaatgtactgcaaacttttactattaaatgtcttaaatacatttgtaaattgagcacaaaagggtttaacagacctgcata

SEQ ID NO: 610061 - DNA, 270 bp, Homo sapiens
tcactaagatggggaaaaagatactatgaaagttaaaggtcaaactaaaatatgttagaattccattttcaccctgcagttgtacaatgtttggcaaatcayttacttctttatgtctcaagtctttcaactgtaaaataagggtcaataatatattggaaagaataaatgagatatttagcacacaataactatttatctaacatccaaaaactatttcttactattgtgatttctgcatttgattatgtcaactgtttacaataataa

SEQ ID NO: 610062 - DNA, 561 bp, Homo sapiens
tttgtgagctgctcctaagtcttgtgtcattgtgattaccctctaggcttttctatctattgctccttctaccttcagaattaatagattgggaagattaggtcaattggcatttctgaggcaagtctgaattaattttctttggcttgtcttgttgaatttcacactccctgaacatttctcactgataagcagattatgatgctggctcatgttcagggatagcaatccaaatgtatttacagagttgtattgttaccttttagcaccatcaactgcaataagcattatcgtttataaagttaaagctcttcattttaaatctgtgtcaagaggctaatataactgtgattttaattactaaaaatcaatttcaaattaatgtgaaatttaacagtgggagatgtgtcggaacccagagacaatcagcttggcctttaccttaggtgcggtcctctataaaaggcattaacataatgytggttttctagatcagtggttttcaaactagtgtctatgaaaagcttaagtcaaaagaggagttcctggggatttattatt

SEQ ID NO: 610063 - DNA, 572 bp, Homo sapiens
aacgtagcccacataaatccaatacatatattttgaggaacaggattattattcttattgaagatgcataaaggggaaagttatattggtcagttataaaaggaaaaaataaaaaaaaggaaacgaactgagaatattctgatttgacataaaaacaaagtgaaagaaactgacaaatgcagtttcttattaatgctcactaggtggggtacaagaatggagaacctaggatttcaaacttgcyttgccattctctgctacagcctctccctggcaataattcattcttcctggagggactgaggaatcatgatgggttttttttcttaattatgatgggcacattttagaaagtttcttaaaattttactatctcttttcacatcaagttaaaattccatgacatcttatttctatgtccttcgttctacacttttatacataaccgaatacattctccacttcagatgaaaactgccacaagatctagtgtttttcttattaacaagggtaaaacactccatttgattagtctagttataattgttcaaatgtggtttattcaataatta

SEQ ID NO: 610064 - DNA, 576 bp, Homo sapiens
tgatttcaagttttagacattagcttaactctcccaaccaattcccaactaaagaatgcctaaaacccacctatgatctccccagccctctgctttgagatgtctgatctttttaaggccaaatcaatgtacaccttcctcataatgatttagattttcctgcaattcctgtctccctgaaatgcataaaatcaagctgtaatctggctgcctcgggcacactttatcggaacttcttgagattgtgtgacctaggccgtggtcactcatattgactcagaackcacctctttaaacatattttggcagaatttggatttttctattatcaaatgtattttcatatgtggaagataaacagtattttagtaaattaataacatttatggtaatttaaaacataatttttatcattccttaattattgttaaaactctaaagctttattaacaaattacccaataaactgtgataatgctttgattcctatccacgtatttcacctagatttcagaacaccaactttggagattcaatgagaaatgtgtaaaatggttagttggatcaaaattttca

SEQ ID NO: 610065 - DNA, 577 bp, Homo sapiens
ctgcagccttggccccctgtgtaatttgggtgccgaggagcaaggccaaggtggggctgaggatgtctacatgaggtctgcaggtgctccttggcatgaacagccggggcaccatggacatgattgatggtggcagacaggctccttgatggaaaggggcggatccccagtgaagcccctccttcaagcccatgtcagcctgaagcatgggggccgggctgtcacttccaggtggaccaggcagccccaaatgagatcttatggtgcttttcatggatctgcccatggccacccatgggccaatcaacacgcatatctaaagcccataaaaaagcccctccttcaagcccgtgtcagccgaagcatgggggccgggctgtcacttccaggtggascaggcagccccaaatgagatcttatggtgcttttcatgggcctgcccatggccacccataggccaatcaacacgcatattctaaagtccataaaaaccctgcactcagccagactcacagagacattgggacaacctcccagcagatagaaactaccactctgggcctcctctccactgagg

SEQ ID NO: 610066 - DNA, 584 bp, Homo sapiens
tccaggtggagcaggcagccccaaatgagatcttatggtgcttttcatgggcctgcccatggccacccataggccaatcaacaygcatattctaaagtccataaaaaccctgcactcagccagactcacagagacattgggacaacctcccagcagatagaaactaccactctgggcctcctctccactgagggctatggacgtcagaacgatctgcctgcagaaaggcactacccactgcaggtctcctctctcctgccaactggacattgttgggaggacctgcctacaaaaaggagctacccactttgggtctcctgagagctgttctgttgctcaatgaagctcctctccaccttgctcatcctctagttttccatgtccctcattcttcctggacatgagacagaactcaagacctgaactgagacctgccaaatggcaggactgaaacagctgtaatacaaacagggctgaaatgcccccttgctcaccatattgcaggcaacaaggagagaagagctacagcccttcgaggagcctagacctagaggccccccaagccagggctgtaacaccctctt

SEQ ID NO: 610067 - DNA, 571 bp, Homo sapiens
acactgagaaatgcaatcactgaggtgggaaataaaatgtacttcttttaccggctggagctaactagaagtcaaggtgttcactttggtgcatcacagataataatgctgcctacaatatatgccaagtcttatttacgtacttttttgactcaaattagagggcataacatagcttcattataactcggcagaaaaatctgagttcagtctgtttaaatcataacaactggttaattcaatattttaaaaaggcagacaaaatcatcaattgattatattgtaatttatgattccctggactgragttctgttttccaacctttttaaaatttctctcctaagtagccttttaagacattttttcttaattgtgaaatccatgaaacattaataccacagataaagtgtatatctgtttatataatatatgtaaatctgtgctttatacatgaaaagaataagaatcttttaatctcccccaggaaccaattttagcctctttggggtttatatatctccactgagactatatgaagtagacaaagctcaaagtttcaaattgtagaaa

SEQ ID NO: 610068 - DNA, 483 bp, Homo sapiens
agtggaacactaatggtgattaatatgtgattaatatagttagtaatgcaaataatttctattcataaaaatgcaaatgtctccagtgaaatgcaattgattgattatccgcctctggatattgaccagttttaccagttgtttatccatttgtaaatttgttttggcattccttatctgactttaatatgtggtattttgaattttcctttggaccaaatagaatatcttactggtttcttcattaattaatggattaaataaaatatttgacaggttttcattatatatcaggatgataataataatatatcctatatccgctttcaaattttatcatttatcaacttaaagaatggtarcacagcttagtttattaggactaaaggcactagtcagattgcccagttttgaatccagatgctgccagctatgtgcccttgactaagttacttaaatcctccaagtacccatttcataagc

SEQ ID NO: 610069 - DNA, 633 bp, Homo sapiens
ataagtgatttgttttgttattgtttgactcttggttctagaatgtaattttcttagatgcaggactctttttttttggtcctgatcatatcccaagttcctgatgctttgtctagcaaagagcagaatctcactaaattaaagagtgtgtttacatctgtgatgaattataatacaatgacacccttttaagggtagtacatgtggacatgtcaacttctttgaccatgtttttgaacagatagacaaatacaaaataccaagtgatcagttaaaacagagaccttctttagccatttggaataaacatcatgtcctctaatttatattcttgctgtatttaagtgacaattttgctgtgtttgatcgtatttctagagataaagaaccacatgagtctaattcagagcatccgtgcacttgctaacaaagcactttcagtgactgctgcttcatttctcgctttctgatggactgctgagtcactgcagccagatcatcctctgagaatctaggacttsgtatgcccgagacttgctgctgctcattggtgcagctgagtttgatcattatctgctgtgggctgcaaatgggcagtggccccaaatgcactctgaaggtcaggagaaaatt

SEQ ID NO: 610070 - DNA, 484 bp, Homo sapiens
cagatttactggatacagttttgtttctaggkttagaacatacttaaatggatagatttttatttgccctgggaagtcagactagtagctgtttgcattggtagtttttatatgtatttacatttagactttcaaaatcaacacaatacatctttttagactttagcttccttaaaaagttgtttgagaattttgcatttaaatacttgccaggtcagtagcctaccattgttaatcataaaatttaatctgttcttgaagtaaagatgtattgtcttgaaaaaaaattagttttaaaataaaattcagctcaattgatcatgtttttaaagtaaatgtatttcggttgcttttcagtatgctcctactcattcagtttttccaataatgtagtatctgtggctgtatgataggaagaacagaagtatctaccaagccatgtgttttacttagtgtcacaaataagttcttgtgttcttaagat

SEQ ID NO: 610071 - DNA, 484 bp, Homo sapiens
cagatttactggatacagttttgtttctagggttagaacatacttaaatggatagatttttatttgccctgggaagtcagactagtagctgtttgcattggtagtttttatatgtatttacatttagactttcaaaatcaacacaatacatctttttagactttagcttccttaaaaagttgtttgagaattttgcatttaaatacttgccaggtcagtagcctaccattgttaatcataaaatttaatctgttcttgaagtaaagatgtattgtcttgaaaaaaaattagttttaaaataaaattcagctcaattgatcatgtttttaaagtaaatgtatttcggttgcttttcagtatgctcctactcattcagtttttccaataatgtastatctgtggctgtatgataggaagaacagaagtatctaccaagccatgtgttttacttagtgtcacaaataagttcttgtgttcttaagat

SEQ ID NO: 610072 - DNA, 381 bp, Homo sapiens
gttttctctgtgttaactgaggatcattgtgcatattcttacaaagataacctggaaacacaggatctcatttagcaggaagscttggtgagtgagtgagagagagagagtgtgtgtgtgtgtgtgtatgtgtgtgtgttgggtgggtaattgtagcgaattaaattttctggttaatgtagggctaacaagaaccattttttgttcaggttctagtgaaaatctattcttcaatgcttcatggtcctccattgcctgataaatatggaacgttgagcacaattgaatcccaattagtgaataagaatccagcaggacctgaatacctgtggactttgtaggttgttacacagaaagcacaggtgatcaggccaaaatagg

SEQ ID NO: 610073 - DNA, 607 bp, Homo sapiens
ggtggtttggtctgtcacccatctgtaattttcgtatgtcagtggaagggtttactaattcaagatattcgtacctttagtactgtgttaaacatctttcatttctttaggaaaraattatagttcaggatgaatgattagggtggaaatagcatattgattctctcctggagatggctaagatgatgaattatttgaacccttctgagaagactatcagtgggtcagtactacagtcaaagaaattatattgctcttctcacttttattttgtaccttaaataaacctgcattaaaaaaactccccttatctatttcctgaaataaaaatcgcaaaaacacatctttgatatgaattaaccttctaggcttaaacttagacttaacatagacttagattcaaattttaattgagattttaaaatctctcctccctatatgaatatttagatgtttaggtggcattttcctgttctattctattcaggaaatatggactcctacaccctgtagaaggcatattgtgacattgtgcttgcaaagggagtctgatttcatttgattttatattaattattaaaaaacacacctataagttaacagttgt

SEQ ID NO: 610074 - DNA, 607 bp, Homo sapiens
ggtggtttggtctgtcacccatctgtaattttcgtatgtcagtggaagggtttactaattcaagatattcgtacctttagtactgtgttaaacatctttcatttctttaggaaagaattatagttcaggatgaatgattagggtggaaatagcatattgattctctcctggagatggctaagatgatgaattatttgaacccttctgagaagactatcagtgggtcagtactacagtcaaagaaattatattgctcttctcacttttattttgtaccttaaataaacctgcattaaaaaaactccccttatctatttcctgaaataaaaatcgcaaaaacacatctttgatatgaattaaccttctaggcttaaacttagacttaacatagacttagattcaaattttaattgagattttaaaatctctcctccctatatgaatatttagatgtttaggtggcattttcctgttctattctattcaggaaatayggactcctacaccctgtagaaggcatattgtgacattgtgcttgcaaagggagtctgatttcatttgattttatattaattattaaaaaacacacctataagttaacagttgt

SEQ ID NO: 610075 - DNA, 607 bp, Homo sapiens
ggtggtttggtctgtcacccatctgtaattttcgtatgtcagtggaagggtttactaattcaagatattcgtacctttagtactgtgttaaacatctttcatttctttaggaaagaattatagttcaggatgaatgattagggtggaaatagcatattgattctctcctggagatggctaagatgatgaattatttgaacccttctgagaagactatcagtgggtcagtactacagtcaaagaaattatattgctcttctcacttttattttgtaccttaaataaacctgcattaaaaaaactccccttatctatttcctgaaataaaaatcgcaaaaacacatctttgatatgaattaaccttctaggcttaaacttagacttaacatagacttagattcaaattttaattgagattttaaaatctctcctccctatatgaatatttagatgtttaggtggcattttcctgttctattctattcaggaaatatggactcctacaccctgtagaaggcatattgtgacattgtgcttrcaaagggagtctgatttcatttgattttatattaattattaaaaaacacacctataagttaacagttgt

SEQ ID NO: 610076 - DNA, 518 bp, Homo sapiens
cagcctgtgtagatatctgtcattactgctttgtgctgaccatcagtgactttgggaagcattgtggcatttgagggctacagtatttccagtgttttgttagattgctgaacatattgatctcactaatgattgcttttgggcaagacaatagggtgttgctaacagaaacagacctttggccttatgtggatgtggccaacaaatgctgcctggaaatataagctctgttatttagagtctcaacaataggttttctttttttttttctggaaactcacaacagaggtttgcttatatcctgttgtggctgctgagcatttatttaaatatcacacatattttaaatttataatttatttaaacattaaagtayaactgtaacagagacaggctggccttggagtgagctcaacagccatatgtatttatatgttctctttatgtatttagtgggtttgaaatttacagtcccaacttggtcataaagaggattttttttttcattctttctatag

SEQ ID NO: 610077 - DNA, 518 bp, Homo sapiens
cagcctgtgtagatatctgtcattactgctttgtgctgaccatcagtgactttgggaagcattgtggcatttgagggctacagtatttccagtgttttgttagattgctgaacatattgatctcactaatgattgcttttgggcaagacaatagggtgttgctaacagaaacagacctttggccttatgtggatgtggccaacaaatgctgcctggaaatataagctctgttatttagagtctcaacaataggttttctttttttttttctggaaactcacaacagaggtttgcttatatcctgttgtggctgctgagcatttatttaaatatcacacatattttaaatttataatttatttaaacattaaagtacaactgtaacagagacaggytggccttggagtgagctcaacagccatatgtatttatatgttctctttatgtatttagtgggtttgaaatttacagtcccaacttggtcataaagaggattttttttttcattctttctatag

SEQ ID NO: 610078 - DNA, 542 bp, Homo sapiens
agcaattcatcacaagtgcaagggatcctcagtaatgttaacagctgatttctcccccccaaaaatcatgaaggccagaaagcagtgggatgacatattcatattcaaagtgctcaaagaataacctatcaatcaagaattctatatccagcaaagccatcctttaataatgraggagaaattaagtattttcacattaaaggaaatctgtcactatcagatatttcgtacaagaaatattaaaaataatcctttgaaaaatgacaaggaattaatataactagaagatatctaacacaaagcagtttgtgttgaataaaaaggacattatagaagttgaataaaaaggacattatagaagttgaataaaaaggacattatagaatgttaaggctaggcctgatggctcgtatctttaatcccagaactttgggaggctgaggcaggagaatcacttgagcacaggagtttgattgagaccagccaaggaaacataaaaagacctcatctctgctaaaagttaaaaaaaacttaaccaggca

SEQ ID NO: 610079 - DNA, 542 bp, Homo sapiens
agcaattcatcacaagtgcaagggatcctcagtaatgttaacagctgatttctcccccccaaaaatcatgaaggccagaaagcagtgggatgacatattcatattcaaagtgctcaaagaataacctatcaatcaagaattctatatccagcaaagccatcctttaataatgaaggagaaattaagtattttcacattaaaggaaatctgtcactatcagatatttcgtacaagaaatattaaaaataatcctttgaaaaatgacaaggaattaatataacyagaagatatctaacacaaagcagtttgtgttgaataaaaaggacattatagaagttgaataaaaaggacattatagaagttgaataaaaaggacattatagaatgttaaggctaggcctgatggctcgtatctttaatcccagaactttgggaggctgaggcaggagaatcacttgagcacaggagtttgattgagaccagccaaggaaacataaaaagacctcatctctgctaaaagttaaaaaaaacttaaccaggca

SEQ ID NO: 610080 - DNA, 667 bp, Homo sapiens
ttccacccacgtcagaaccatccctttgtccagcatatctatactgtgtgcactacccactyattagtcacttagtagccatctcagttatcacgttgcaaaaacagtggtttcaggcattcactgggaatataggaatgtattccccacaaataaggggggactactataatgtccttctttgtctcttataactttttttgatctaaagtttattttgtggtagtatagccagttctgctctcttttggttactgtttgcatagaacatatttttctatcctttcactttcaacctatttgtgtccttggatttaaagtgagtctcttgtaggcagcgtatagttggatcatgtttttgttttttatccattctgtcagtctcttttgattggagagtttaatccattgaatttaaagtaattactgataaggaaggactgagttctgccattttgttatttgttttctatatgccttataggatttctgtccttcacttcttgcattactatcttctttgtgtttaggtgattttttttttagtaaaacattttaatttccttctcatttccttttgtgtattttctatagtaattttgagattaccattgagattacatttaacatcctaaagttataacactctaatttaaatttatgctag

SEQ ID NO: 610081 - DNA, 585 bp, Homo sapiens
gggtggggaggcagatttcctgtacttcctactttgccatcttctcagaatcctcatatgcttttataataccaaatatataatataaatattatacattatttatataaataaaagatatgtatataaattatatttatatatttttaatatttatatttgagttatataaatataaactttataactcaagtacattactggaaagactatattaaaaattaatagatggatgactagagtgggatgactaatgagtgcagggtttcttytggagatgacaaaaatgttctaaactatagcgatggttgtacaactctgtaaacataataaaaaccattgaattgtgttttttatatgggtaaaatttatgataaataaattttttcttaaagctttttttttaaaaaataactcatccaaagtcaacataaagccattttaaaatgccactgcataggcagttttgctgaaaatgagccaccaccatatgaataatattttagaataagttgagtgaaaaattatcagttatttaataaggtattattatagtaaatttctgagtcattttaattttttaag

SEQ ID NO: 610082 - DNA, 677 bp, Homo sapiens
attatttttaccctaaatatatgcaataaatttagattatgtgtggtaggttttgtctagttcttcctaaggaactggtgagaactttttctcactatagccaagacattgagattttactttcttatatcaggggacttagtctatggttctattatgtacatcaattcttccttatccattcctagggatgagttccaagacccccagtggatgtctgaaaccttggatggtaccaaaggatacatataccgtgttttttcctatacatacatacctaggatcaagtatgacttacaaattagacacagcaagagattaagaaccataataataaaatagattattggaataatatgccatcccttcactcttcttgcactttggggccattcttaagtacataagggtggcttgaacacaggcactaagacgccgccacagtccatctgatcactgagatggctattaagtgactcagggtaggtaggcagggcttacagtgtgaatctcccagaccaagggatgattcccatcctggatgggactgaacaatgmagcatgagatttcatcttgctactcagaatgttatgcaatttaaaacttataaattgtttgtttctggaatttttcacttaatatttttggactacagttgaccctgggtaactaaaac

SEQ ID NO: 610083 - DNA, 579 bp, Homo sapiens
ccaaaactgtctcacaaatgtacgacctgcatatattcaaccgcataagaacattcaacagaatacatcagcttagcattgacaacttaccacattcacctagtctgttggcagactagacatattcatggcagttatcgcattaatgggatctagacattcttaatcacaatgtctgtaatatttcattttaatagtacctgccagcagataaaaaaaatctacatttcatttcatttatcctgtacatttctctcacatcttgyattactttctattcaggtggctctggctcaagaatatgcaatgcaggtgcctacagtaatttaatagctctatcatctgcatggcaaattcatgggggtaagatgtgtatgccacagaaataaagttacctttttatctaagcacctacttaaaaaatttttctgtttaaacagtatttcagaagtaatctggcattgcccttaattgaaaatacaaatttccacaccttaagagatcccaagaactgcctcaagctgaggcgttagctctgaccctcattgcatccctgcctggggagggcagggcaagcga

SEQ ID NO: 610084 - DNA, 569 bp, Homo sapiens
ttattttagtttttgttctcactcttctctttttcacccacccaaattgggttgagatgtttgacaaagtaagccctagtacaatggaaattaggctctagcaaaatgagaagctgtgcaaagccctttaagtactgtgaaatcaaatgttcccattcttccaacagatattgaaaaggcacagaaataaaatcagatccaactctcactttctattttgagcagagggtttaaatgccatcagcttagattaatgtattagtcacctcgcataagtaygtttcatttacagggaagccaagtgaatatattaactaaaatgataatgtgctgaaggcacgccatagcctttttaaataaacaaatcatgattttccttgtctgtattttgtaaatgtccaaaccaccacaagtttacaactcaaaagaaagagattgccatgaaaatcaattgatcaacctccactttcatgtctcaaaaacgatatgtttttagcttaacactcactcagaaggttattcaccatatatgtgtgaggttgttataaaaattcaaaactagaatatat

SEQ ID NO: 610085 - DNA, 427 bp, Homo sapiens
ccacttcatgacacttttcaggctccgaaaacatacatcctttgccaggattatttatgcgaacgtcagcctctctgcccacctccccagctgtatccctacttccctatcatctgaatacttctgtgcaccaggaaaaaaaraaaaaaacaggagaaaaacttctaattttttttttacttgttttttaaattctttgccccatgatttctgttcttaggttatcccatggagaaaacatggcagtatttgaaaagagaggaagaagaggagaaactggaaaggaaagctgcaaatatcatattcttcatgtacttctttgatagctattttctgtttcttgggcacccagtaaatgaagtgctattcagaatacataatgacataggatcttccacataaattattctatccttgggcgatatga

SEQ ID NO: 610086 - DNA, 427 bp, Homo sapiens
ccacttcatgacacttttcaggctccgaaaacatacatcctttgccaggattatttatgcgaacgtcagcctctctgcccacctccccagctgtatccctacttccctatcatctgaatacttctgtgcaccaggaaaaaaagaaaaaaacaggagaaaaacttctaattttttttttacttgttttttaaattctttgccccatgatttctgttcttaggttatcccatggagaaaacatggcagtatttgaaaagagaggaagargaggagaaactggaaaggaaagctgcaaatatcatattcttcatgtacttctttgatagctattttctgtttcttgggcacccagtaaatgaagtgctattcagaatacataatgacataggatcttccacataaattattctatccttgggcgatatga

SEQ ID NO: 610087 - DNA, 427 bp, Homo sapiens
ccacttcatgacacttttcaggctccgaaaacatacatcctttgccaggattatttatgcgaacgtcagcctctctgcccacctccccagctgtatccctacttccctatcatctgaatacttctgtgcaccaggaaaaaaagaaaaaaacaggagaaaaacttctaattttttttttacttgttttttaaattctttgccccatgatttctgttcttaggttatcccatggagaaaacatggcagtatttgaaaagagaggaagaagaggagaaactggaaagkaaagctgcaaatatcatattcttcatgtacttctttgatagctattttctgtttcttgggcacccagtaaatgaagtgctattcagaatacataatgacataggatcttccacataaattattctatccttgggcgatatga

SEQ ID NO: 610088 - DNA, 427 bp, Homo sapiens
ccacttcatgacacttttcaggctccgaaaacatacatcctttgccaggattatttatgcgaacgtcagcctctctgcccacctccccagctgtatccctacttccctatcatctgaatacttctgtgcaccaggaaaaaaagaaaaaaacaggagaaaaacttctaattttttttttacttgttttttaaattctttgccccatgatttctgttcttaggttatcccatggagaaaacatggcagtatttgaaaagagaggaagaagaggagaaactggaaaggaaagytgcaaatatcatattcttcatgtacttctttgatagctattttctgtttcttgggcacccagtaaatgaagtgctattcagaatacataatgacataggatcttccacataaattattctatccttgggcgatatga

SEQ ID NO: 610089 - DNA, 465 bp, Homo sapiens
tttatatgcacacatacatacacataacacatgtatatataaacttttttaaaacacaaaactagtattataccacctgaatttttcagtatcaatcacgaacattctccacggtaactttctttcacatcatttttaaagcagcacagtattccattgcacaactaactccaatctgtttaggaaatctgctcttagaggtcatttaagctgtttccaagttactgctccatcaagttgagccctcscgttcctgggctctgctggtttatgccagtctcccgctggtgggcttctctggaggcagctggacattccgaagaccagaccctggttccatccccgctccttctcattgctgctatccttgaacagtgggttccctgagcatcttaaaataattcaaaactccttcgctaaaagccagagggaaaaatgaagcaggttagggtgaagacactggga

SEQ ID NO: 610090 - DNA, 565 bp, Homo sapiens
tatcatcctttattcattcatgcaacaaacatgtactgcacacttaataaatcctgtgccatcctaggcactctaaataaattatctttcatccttaaaacaatcctgcaacatattgtgcttcccatgtcacaggtagaagaccagttaactcaggtctatgtaggattaatatactcaacttcaccaagacaatgtgaagattacaagccaaatatcacaagtctttatactggcatttagtcatatttgcataggtagtaggtagcctttcttgttggataatttatttatcttaagtgtcaagtaaatagttttctcctggcatgtttaccaartattaataaggaggtctgatttgggatttaaaaatgacaaattattaactataaaacaatgatggcagctgctgaaattggatgcctagtaatctgtagtatgaattgttcagacattgttgttctaaacatctgtataaagagctgaaatctttggattaagaaatgcgagtgtaactctgttttaaattatagttactgcttctcaaatatttacttctcaaatt

SEQ ID NO: 610091 - DNA, 576 bp, Homo sapiens
aaaattcagaaaaatatgaatgaaaataataatgaaagccactgtgtgactatgaggacacagaagcatggtggctctcatgattattccagtgaagagataggaattccctatgatagagaaatcccagtagtaaaatgctggttagtgcacagtcaactccattcttgctcttttcccatgggtaactctctactagcgagagaaccatagcattttaacaccataaaaattgctgtctgttatttgtctgcaggctcttgtgcaattgaaagctaaaagtctatcagagggttctaaacaaggrtgtatttcttgattggatttctgtctaccacagagcttggaaataaatggtcctcaattcttggtgaggtatacagatctgctgaaccattttcttttcagccacgtttccaatcactaactaattattttctccaattcctatctaataaaactttatttggatcaaaattgaatagtcttggttatgtggaactagatctgaaaaacatcgagtagttagagaagatatttgaagatatcagggttgccttgttggatacaactagc

SEQ ID NO: 610092 - DNA, 492 bp, Homo sapiens
tctgtgttccctttcagatctttttctttctttttttttttttttttttgagatggagtttcgctcttgttgcccaggctgtagtgactgcagtgtcgtgatcttggctcactgcagcctctgcctctggggttcaagtgattctcctgcctcagcctccccagtagctgggattacaagcacgtgccaccatgcctggctaatttttggcgtttttagtagagacagggtttcaccatgttggccaggcaggtctcgaactcctgacctcaggtgatccacctgcctcagcctcccaaagtgctgagattacaggcgtgagccaccatgcccagcctccctttcagatcttacttaggtatatcctttataataaaactggaatcataagcatagcacattyccaagttgttctagtgaattactgaactggataggattgtggaaacctgtgaataatagctaggtagtcagaagacatggtgcgctggg

SEQ ID NO: 610093 - DNA, 586 bp, Homo sapiens
agtgctagaattgaactgaattgcagtacacccagttgggaatggaaacaggaaaaccagagtatttataaatatgtgtattggatgcactgaagtattaggtgtgttgcattttaagatagatatcaaatgatgaggataatgcttaataatttgtagtaaaaactgacctgattgcctcttaaaatatgttcataaaaagggctacctaatacaacttactattggctctttggtggttgctttaaagagagaatggaacatgagtgagaactcaagggactggtgatatttggatagacagagaatggaatgtaaagaataggcaaygttgtctgaaccccttggtctctacctgataccaaagcttccctttaaaattcagggccattattgttttatttgtcttctttgtgtgatggttaatttcaggtgttaacttgactggattatgggatactcagtggctggtaaagcattactcctgtgtatgtctttgagggtgtttttagaagagattggcatttgaaagagtggactgagtaagaaagattcaccctcacccagtatgggcaggcacaaccca

SEQ ID NO: 610094 - DNA, 601 bp, Homo sapiens
aggaaagcttagttcaaaatggaacaccttgtttgattgatgtatgactttakgttagtcatccaacctctcaagaatattctgttcctctattaaaagagataaggaacatgtcccaccccacagaacatgttttgatcataaaattcagtgacattaaagcacttagaataaaaatgaacataagtattttaatattcacgtagaatgattcacaactgaagccgatgtgctgaccgccaagaaggaaatgtgaataatatgaaaactgatgctataggcttttgagaattttcccttgcagttaaatctctttttattgtagttgatgtgctatatcttgggaataatttaggatagaagagtatttaaagaccaaggaaaattatttaacaatattattaggttaatacacactgggtcatcaaccaagaagtgttattgggtacaattaaaatatgaactactacatacaaaggagtgagaaagttcccactgaagcttacatgagggatagagtgatctaaagctgtctatacaatgaaggtatttccataccacccactctacaaaacaggtatacacacacacgcttgtacac

SEQ ID NO: 610095 - DNA, 601 bp, Homo sapiens
aggaaagcttagttcaaaatggaacaccttgtttgattgatgtatgactttatgttagtcatccaacctctcaagaatattctgttcctctattaaaagagataaggaacatgtcccaccccacagaacatgttttgatcataaaattcagtgacattaaagcacttagaataaaaatgaacataagtattttaatattcacgtagaatgattcacaactgaagccgatgtgctgaccgccaagaaggaaatgtgaataatatgaaaactgatgctataggcttttgagaattttcccttgcagttaaatctctttttattgtagttgatgtgctatatcttgggaataatttaggatagaagagtatttaaagaccaaggaaaattatttaacaatattattaggttaatacacactgggtcatcaaccaagaagtgttattgggtacmattaaaatatgaactactacatacaaaggagtgagaaagttcccactgaagcttacatgagggatagagtgatctaaagctgtctatacaatgaaggtatttccataccacccactctacaaaacaggtatacacacacacgcttgtacac

SEQ ID NO: 610096 - DNA, 580 bp, Homo sapiens
cttctctgtctgactttattgaagtaaacacgagatcttacttaattctaccttctaaatattycatataaatctcaattatctccccattcccactatcatcattctcttccaggacattatcttctcctgtatttttgtcttatgtcctatttttctttttctactcctgccctctaccttatcatttacttgaactaattctcctagcaatgcccaaatttactttccaaatatgtaaattgaattccatttatctgatgccaagctatgatttcttcaggtttcagcttaaatcttatttttttcaggaaggactttataattttctgtagagttagtttacagaaacttattatttactttgtcttatgataatactcaccatactttactttaattgcttttaatatctgtcttctccactagcttctgattttcatcagagaagataccagggtcaaattgttcacaactgtacacagaaattcaagcagcatagctgaagcataatgggagcataaaaatatttaatgaatgagtgagctctgaattatattaatctttgctgatattgaaa

SEQ ID NO: 610097 - DNA, 567 bp, Homo sapiens
ccctaaatgaacacaatgctagaactaccaaatgatgagttaatgattacattttaatgataacaatactatcacatcacatttcagtgctatagcagttaatctaattaactgttagaacttttctaaataaaacaaagtaaaataagtgtatgatacattttttaaaatccagcaaagaaatagaacatataaagaagaaccaaatggaaaggtgagaactgaaaaaatacaatattgaaatttgaaaatcactggatggacttaacagggaaataaatattacaaaggaaatagtacatgaactkaaatgtacatcaatagaaattaccttagggacttctcatgaaaaccatggaggccattaagagattgtaacacatctttaaagagctgaaacaaacaaaatcttgccaaccagaattttctaactagtaaaaatatttgtcaagaatcccagaaaataaagacattttggataaaacaaattaagagcatgtgctgtcaacattactgcactaaaatagatgctaaaggaagttcttcaggctaaaggcatatgatgta

SEQ ID NO: 610098 - DNA, 567 bp, Homo sapiens
ccctaaatgaacacaatgctagaactaccaaatgatgagttaatgattacattttaatgataacaatactatcacatcacatttcagtgctatagcagttaatctaattaactgttagaacttttctaaataaaacaaagtaaaataagtgtatgatacattttttaaaatccagcaaagaaatagaacatataaagaagaaccaaatggaaaggtgagaactgaaaaaatacaatattgaaatttgaaaatcactggatggacttaacagggaaataaatattacaaaggaaatagtacatgaactgaaatgtacatcaatagaaattaccttagggacttctcatgaaaaccatggaggccattaagagattgtaacacatctttaaagagctgaaacaaacaaaatcttgccaaccagrattttctaactagtaaaaatatttgtcaagaatcccagaaaataaagacattttggataaaacaaattaagagcatgtgctgtcaacattactgcactaaaatagatgctaaaggaagttcttcaggctaaaggcatatgatgta

SEQ ID NO: 610099 - DNA, 575 bp, Homo sapiens
ctcacttgataaaactagacaaaaatatagcaataatataaatgatctgaacattatctaccacattaacttaatagacaactgatgatagatgatagattagagatagatagatgatagatagatagatagatagatagatagatagatagatataaaagaagggaggggccgggcacagtggctcatgcctgtaatcccagcactttgggaggcccaggtgggtggatcacaaggtcaggagattgagaccatcctggctaacacggtgaaaccccatctctactaaaaatacgaaaaattagccaagcgcggcrgcggtcacctgtagtcccagctacttgggaggctgaggcaggagaatggcatgaacctgggaggcagagcttgcagtgagccaagatcatgccactgcactctagcctcggcgacagaaccggactccatttgtaaaaaaaaaaaaaaaaaaaaagaagggagggaggaaaggaggaaggaaggatggaaaaaaggaactatacccaacagcaaaatacctcatttttcaggcacctaaggtgctttttcccaggata

SEQ ID NO: 610100 - DNA, 622 bp, Homo sapiens
atcataaatatgtaagtactaattaaaagagctttcaaatacataaaacaaaaatattacagtatttaagggagaaatagacaacctcacaatcatcgttagctatttaaagaccctcctctcacttgataaaactagacaaaaatatagcaataatataaatgatctgaacattatctaccacattaacttaatagacaactgatgatagatgatagattagagatagatagatgatagatagatagatagatagatagatagatagatagatataaaagaagggaggggccgggcacagtggctcatgcctgtaatcccagcactttgggaggcccaggtgggtggatcacaaggtcaggagattgagaccatcctggctaacacggtgaaaccccatctctactaaaaatacgaaaaattagccaagcgcggcggcggtcacctgtagtcccagctacttgggaggctgaggcaggagaatggcatgaacctgggaggcagagcttgcagtgagccaagatcaygccactgcactctagcctcggcgacagaaccggactccatttgtaaaaaaaaaaaaaaaaaaaaagaagggagggaggaaaggaggaaggaagga

SEQ ID NO: 610101 - DNA, 522 bp, Homo sapiens
cagtaaggaaatgaatgtggggcatttagagagtgtctcctgcatacttaatagaaaaaagcatgtcaggtataaaagagaaatatatttcaaaaaatttcttgctaagagagttaccaataatattaaacacttgctcttatttttgatgaccaggaagttttcagctcaattttgtattcaatcacaataactacattygtttctttgataaattttattctatttctgtgctccaacttagtatttttccatctagtttaactgcccattttgattgtaattctttctttgaatgaggtaagatataattaataaatgacaaaataaaacatcctttacaaataatgattatctatctacccatctgtctattctgaaggatgacacaaagggtgtttggaactgaattgctgaagtgtgtgattacgcatttagtccagtgtctcaacttgatgtgtagtgcttttactgtgaaattcccattaacactgattgtccaatttagtgcttcattaatga

SEQ ID NO: 610102 - DNA, 551 bp, Homo sapiens
tgttttcctgagtatgtagtcattatattgcagggtttggatctcaaatcttcacattcttccctgacttcttaggcagcaaatgtcaaagaaacgaagtgatgtgagaggaggtggaatgataataatttggatctaataaaaattaaatataattgtcttggcttccaaaaaaaaaaagtcaaacctatcttaagcagagtttaatactggaattataacaacaaaaaaatgactcaatatgctcttaccagatgtatgcaagtatctagatgccaaagtcacccaggccagaaatggtccctacccagtcatctagaaaaaaaaaatagccattggatagaaactgattgcattartccaaaccctgagtccagtaaaacagaggaatcagagtttattgatgttgaacaacagcattgatcatttcccataagaccttctgaacagagtgatcttaactctcaggctaagagacctgtaattttaggtatatgaaacaactcctgatacagaaacttaattgtcaagagagagaaggcagatccgtc

SEQ ID NO: 610103 - DNA, 516 bp, Homo sapiens
ttacatttttaaagctttgttaagaggtgagggagggaatggaggaagaatctatgcaacagaggtgtatatggcctccaaagtstgaaatattcattgtctggaccttttctgaaaaacatttgataaccttcaatttataatgtacatatacattattttacatttttaaaatatgtttcataatactttttaaaaatgactgcctagtctctactctgctggaggaaatgaaaggaaaagtcagttacccatgtaacagtgatctgagaatctttacttggggcaaacactgaaataacagggtacctttttcttctttaccagctccacatagtgactgctaagaaagatgatctacattccaaaggactggataccaggtaagagacaataatcatcagaaataaaagctggccccaagacagctgatttctctcctctctcctgaagaggaagttgaagtgaactaaaaaggaaagggagagggtcaggatttgtagagaaaaaaacaaa

SEQ ID NO: 610104 - DNA, 600 bp, Homo sapiens
gaacaaatctcactaagatgctaccaaaattagagagaattgtgtttatgtgcaatgttcccagatagccttctgcaaggcacacagctaacagaatgcactcatccttactgaatcatatccaggcctttcaaatgacttacacggaaccagggtaactacacactccatctcttcagctttgggtcatgtagctgcaaatccttttcgaccctcgagtagatgaacggtgtgcatataagctatctaaatttgtgagtagccagaaagaattgaaggtggtcagggagtgtgcaaaaattagcaaaacagtgcctcagcctgctttccctggtgacctgaagggaaatttaacagagttggtttttgtaacatgccttattactgtatttgggtcatgttaagcatactatcaaagcttgatacaagtgaggcagtcctaaagaaaagactagaaaaagtctaacagtgagttattttctaagggaaaacagatattcccaggacaccctcgaaggcagaggtctctctctgaaaatcagttcatccttcagcttatgaagtcaccttcctgaacakgagatgagattaggaccatgg

SEQ ID NO: 610105 - DNA, 620 bp, Homo sapiens
gttgtagtaaaaactaacccgagaaatcatgtatgtgtacaccaggcacagaagacaacatggagtcacgtagtagaggcttagtgaaggttaattttccttacattgctctaaatgtttgatcttctgtgagacactcagttcctcaaagtttgtttcttcatttgcaaaatgtgaataataaaatttgtgagcattaaataagaaaatkcatgtaaagtatgaatcacagttcaaggcacaagtctagccactcagtaaatattacttcatatccctccagtgctgtttctccaggcagactttctctttagctgcactagtagatactgcattatatttgcccaaagtttgcacagaatcataggagttaaaatagtgctgctattcctgagcaatgaaagaagtgaatggtgtctgcctggttttggccatcacaccagttgaaccaatctagaatatgtggcctttgcattaacccagagccatccagcctacttctaccactcaactgcagcacagtgacccacctcctgcagaggctcattatcatagagacactgatttgtcatgctgggccttgctagcagctttctagtcactcacttcatgcttcttgt

SEQ ID NO: 610106 - DNA, 620 bp, Homo sapiens
gttgtagtaaaaactaacccgagaaatcatgtatgtgtacaccaggcacagaagacaacatggagtcacgtagtagaggcttagtgaaggttaattttccttacattgctctaaatgtttgatcttctgtgagacactcagttcctcaaagtttgtttcttcatttgcaaaatgtgaataataaaatttgtgagcattaaataagaaaatgcatgtaaagtatgaatcacagttcaaggcacaagtctagccaytcagtaaatattacttcatatccctccagtgctgtttctccaggcagactttctctttagctgcactagtagatactgcattatatttgcccaaagtttgcacagaatcataggagttaaaatagtgctgctattcctgagcaatgaaagaagtgaatggtgtctgcctggttttggccatcacaccagttgaaccaatctagaatatgtggcctttgcattaacccagagccatccagcctacttctaccactcaactgcagcacagtgacccacctcctgcagaggctcattatcatagagacactgatttgtcatgctgggccttgctagcagctttctagtcactcacttcatgcttcttgt

SEQ ID NO: 610107 - DNA, 538 bp, Homo sapiens
tattatcacagtccacatactttgaaagcaataaatgatgatatgcaaatatcactaatagttatgatcaattgaatccatagaatgaataaaagtatataaaaatgtatgtaaggcatttgaggacttgactttgataagcaaaaaagacgcagaattattttctgcctgaagctagaagaaaaagttgtcatatctggaatgtgcttttacccaattctgccagtcaaaatcattcccattcttcaaagtccatgtcttcagagagctttcttgattctctgactcctctaggatactgtgtgcttctttgagatttcctctaamacagtgccttgtatattagctttttgtgtaattctctcacatattactttgtaaattctaggagggcaaggacaatatcttctccacctttatgcatgttgataggcaatcaacaaatatgcactgattgactggctggcagccttaggtggtctctagtggttttctacatttgaattgggttattaatacactgggaaacaaatttgta

SEQ ID NO: 610108 - DNA, 643 bp, Homo sapiens
catagatcctgacttatgctggctcagaaggtaaggaagttttgactcagtagaatcaagaatattgtcccattcctggagccaggggttctcttatggaagggaagggaatagtgttctgagatgagccctctaaaaatacctaatctgcctcactgggaaagattcacaaaggtaaaaagagagtatattgtaataggaattataaaggcactgtgatgtggcctgaaagttagaaagacaccagaagtacaaaaaattgtaacaataaccacagaacctatttgtgaagcatctgatatatgccagcaatataccagtgattgtgacgatgatgatgatgataacaatacaaaatgcttatatagtgattcttatgtgcaggcattgttctaagttctttatatatagtaacaatcctatgaggtacatgtatattcatrtatgaggtatgaggtatattcacaatacctcaggtatgaggtatattcacaacaatcctatgaggtatatgttattaatacactctagagatacaaaagggactcttatgttgagtaatttgctgcatgttggctcaaagatgggttccagaatatcctctcataataaagccccaatttgcaacataagacatggtttg

SEQ ID NO: 610109 - DNA, 538 bp, Homo sapiens
tattatcacagtccacatactttgaaagcaataaatgatgatatgcaaatatcactaatagttatgatcaattgaatccatagaatgaataaaagtatataaaaatgtatgtaaggcatttgaggacttgactttgataagcaaaaaagacgcagaattattttctgcctgaagctagaagaaaaagttgtcatatctggaatgtgcttttacccaattctgccagtcaaaatcattcccattcttcaaagtccatgtcttcagagagctttcttgattctctgactcctctaggatactgtgtgcttctttgagatttcctctaaaacagtgccttgtatattagctttttgtgtaattctctcacatattactttgtaaattctmggagggcaaggacaatatcttctccacctttatgcatgttgataggcaatcaacaaatatgcactgattgactggctggcagccttaggtggtctctagtggttttctacatttgaattgggttattaatacactgggaaacaaatttgta

SEQ ID NO: 610110 - DNA, 538 bp, Homo sapiens
tattatcacagtccacatactttgaaagcaataaatgatgatatgcaaatatcactaatagttatgatcaattgaatccatagaatgaataaaagtatataaaaatgtatgtaaggcatttgaggacttgactttgataagcaaaaaagacgcagaattattttctgcctgaagctagaagaaaaagttgtcatatctggaatgtgcttttacccaattctgccagtcaaaatcattcccattcttcaaagtccatgtcttcagagagctttcttgattctctgactcctctaggatactgtgtgcttctttgagatttcctctaaaacagtgccttgtatattagctttttgtgtaattctctcacatattactttgtaaattctaggagggcaaggacaatatcttctccacctttatgcatgttgataggcaatcaacaaatatgcactgattgactggctggcagccttaggtggtctctagtggytttctacatttgaattgggttattaatacactgggaaacaaatttgta

SEQ ID NO: 610111 - DNA, 437 bp, Homo sapiens
tgtgtaattttaccatattagatcccttctgtctccccaacttgtcaagattctttttaatcctgattttgttattcaaggattttgtccttcccaatttcctctcgttttgcagacttcattttcatataccatattggcatccargttcttcatcataaccataaaaaggtcatgtccagaaatcaagcttctgggatacttaaaaaaatctttctgcttgcctttagttcttacatccatatccgttgattattattgttttatcaaatatacctattttcccataatgctggcccatggttctccttttctgtctaaaggatttggtgaaagaccataacaagtgtttgtggctgtgaaaaactggctgtgacagtttttcagactttccttgtttttgacaaatgtttggctaaagttcttttatgtaagat

SEQ ID NO: 610112 - DNA, 605 bp, Homo sapiens
tgtgttctgaccatccagagattggcataaaaggtagttttaagcaaacttaccttgtctgtctttgtacatcatcaccaaatggaaagttaatcgaagaggtgagtatgttttctttcattagtaattattttttaagttgagaaattaatttttaattagaatgtctttgatttccttttctcttagatagcgaagagatcattgtcaatcttacatttttggtatgttcttgagtggtggcaacttgattctaagtagcttttagaattatatgtaaactgattgcacctagtttctgttttaaataatatacatcttttaaatgctttggctaaattgtgggaaagatagtggtggcttaacagtttagtaaaatatctatatttgtcagcttttggccttaacttcaatcttgtctgacwtcaagatacttgcacatcttttaaactggctaatttaagtaactttatagaatttttgtgacttatctctggaaatactttgtcatataaattctatatagaatatatatatgcacatctatgctatatatcattttgagtacgtatttatttgcctatttaatgtaaaaccttattttc

SEQ ID NO: 610113 - DNA, 574 bp, Homo sapiens
gctcaagacttctctaggaagaatcctatgaggcagtgtcgaggatggttatttgggggtcggggtagtttttcttctttttttcttagtagcacaaacatagaaattgtgtgggagggaaaaaatgatgctagaaaatgattagaaaaatactactctgtaattgtaaacagaattagcttaagtgtctgggttctgaggcatcgatgtagtttacagacaaaaagaattgcaaaagttagagacgaagggtattatccacctaacgatgttataaaaaaagaacaatggcaaacagtagagggaagaaagacaagttttaaattttatgagacgaaactgactggtagcaaagttttaggctaatggccaaatagtttgatagagggagaaaagtcaaktcacgaaatgaatgacattgaattctggcaaaatatgttttcatgtctgtctgccacattgcctctcaaaacgtttctcgttctgaatataccagatttttatcactcccttgtttaattacaattgctgataaaactattgtacatctattatgcactattatgtttgttta

SEQ ID NO: 610114 - DNA, 574 bp, Homo sapiens
gctcaagacttctctaggaagaatcctatgaggcagtgtcgaggatggttatttgggggtcggggtagtttttcttctttttttcttagtagcacaaacatagaaattgtgtgggagggaaaaaatgatgctagaaaatgattagaaaaatactactctgtaattgtaaacagaattagcttaagtgtctgggttctgaggcatcgatgtagtttacagacaaaaagaattgcaaaagttagagacgaagggtattatccacctaacgatgttataaaaaaagaacaatggcaaacagtagagggaagaaagacaagttttaaattttatgagacgaaactgactggtagcaaagttttaggctaatggccaaatagtttgatagagggagaaaagtcaattcacraaatgaatgacattgaattctggcaaaatatgttttcatgtctgtctgccacattgcctctcaaaacgtttctcgttctgaatataccagatttttatcactcccttgtttaattacaattgctgataaaactattgtacatctattatgcactattatgtttgttta

SEQ ID NO: 610115 - DNA, 599 bp, Homo sapiens
cacttgcccataatttaaacttgtatgatggttttactttttgttaactactaaagatcatattatttacaaataatctgtgtgctcaattttttgagcctaataaagattaccaaccctatacaactagggacagtcactggtacatgatgcaattttactagtacttccaaaaaaactgtcctgtttgactagtttatgttgggaatttccattgtttcacagttccttgctgagtttaggataaagagacagacgaggaggaacccaattactaggtaatatatttaaaaatatttagttatccaattaagtaaacttagtgtcacaggaccttgagtgattggctggaagagcacattttgatagarggaaagaggtaagaggttgaaaataatatctaaggacaggtagaatattgcaccaggcccagccagggggcactgggaggacagtaggcaccaggggatggtggaaatgtgtgtgtccaaaggaattaggaagacagtaaaacagagaaatgaaggtccacagattaaaacaaaacaaaccttggccctcatttactttttttcctttcttcagtcattttttagtgg

SEQ ID NO: 610116 - DNA, 625 bp, Homo sapiens
aattttactgagcactatttctagaattgtagaattcttctgttcacttttataagaaatgactcccaaaagaaaaatagtaaaaaaattctaaatatatgttcatgtttttaatcctgaaatccagaaattttgggagccctaagttttaaaaaattaatttggtatcaaaattgaccagaactgacakgaagttatttatagtctttatttatttgagttattatgaatattcatttatttcactacagaaatgttaatgtgttcaatgacgatcaagccccaggctctactgagcattctacataatgtacagtatattgcatttaaaattttgcaaactcctgaattacaaaatacatttggctccatgtttgaggtaagggtttgtggacctgtcgatggattatatttctgaagtgggttatagttttttggaatctaaagagaatacatcacattcagaaaaaaaactgaggattgttcactgaataatattttttaaatggagcttatttttctgccacatatactaaggaaaaccattttgaagtgatagcatactgtagtatctatgcagcattgttctaaccacgttgaaaattagataaataaactttgtaaa

SEQ ID NO: 610117 - DNA, 527 bp, Homo sapiens
tgcctatttctgtctcttgcttacatcattacagtaagtaaataaggggttggttattgctgaagtttgtcttgtatgagtgaactttaacacttggcactttgacacctatatactacctttccattattacttattgctttttaaaaattaacttttaagaagtttttcaaggtaarcttatcctgaacacaggaaaccatggttttgtgaataatgctataatgaatgttcccatgttcattatagcgtctaagtgtccatcagtgaatgaatggataaaaaaatgtgatatgcacataatgaaatactattcagccttaagaaagaagaaaattctgtcatctacaaccacatggatgaacctggaagatactacattaaatgcaataagtttggcacagaaagagaaacacctcatgatctcctttatgtgtggaatctaaaaaagttgaattcatagaggcagggagtagaatagtggtgattaaggactaggggatggaggggactgaggtgatggactg

SEQ ID NO: 610118 - DNA, 529 bp, Homo sapiens
ttgcatgtcaggctttatgagggacagttattctccccacactaggtttgttgcacagccagtgtactgtattcttttggagggagttgcagtcaagaacttgcactgctacttcctccaggaagaactccagaagaactcagaacctcttcctagaggtttggcttcctagagagtgagagaatccttcccacctgtgctgcatgttatctgatcctctcttggtgctgttgtatggggacatatagaacattagagaactggtgcctatttctgtctcttgcttacatcattacagtaagtaaataaggggttggttattgctgaagtttgtcttgtatgagtgaactttaacacttggcactttgacacctatatactacctttccattattacttattgctttttaaaaattaacttttaagaagtttttcaaggtaagcttatcctgaacacaggaaaccatggttttgtgamtaatgctataatgaatgttcccatgttcattatagcgtctaagtgtccatc

SEQ ID NO: 610119 - DNA, 614 bp, Homo sapiens
ttaataataataatgttgaatcagtattcatccatcaattgtaacaaatacaccacactgctatttttctgtaaacctcaaactgctctaaaacataaaatcaatttttttaaactgggttttcactataactctcaagctacagccaagctagcagaatgtcttacaacttgaatataagcactctattttttaatttttctactaagttactgaaaattagttctaaacataatgaaagcaagaaataaactctaaccatgctgtgttggtacttgcacatagactttgggtaaatgtaaaaggagtgatggagcagatggctctcagtgatttagtggcacacattaaactcaattaggaaacaataatgggagttttgtgccatacagagagaactgcgtgtaataactttccatggcaggaatgctctctgagcttattgggtaggaaagtatgcagagagaggaaaccaacatttatgtgctgtttattaaggacaaggcactcttcatatgctttttgaatcctcatgrcagcttttgtataagatgagtagttgttccctcatatgcattctcccttatcccatagttatgttgatgttacatatg

SEQ ID NO: 610120 - DNA, 581 bp, Homo sapiens
gtaaatgatcaatatacgaaaatgtttttttctatatgctagtaatgaactattggaatttaaaataaaaaatatgacttactatatcaaaaaatttgaataagtagaatatattttacaaagatgtgaaagacttgtacactggaaactacaaaactttgctgagagaaataaagaatacaaaggaatataaggaaacttcagggagtgataaacatgtttcttgtttctgatggtatccagatatacatatgtgagttgtacactgtatataggtgcagtttatctattatttgtcacttatacctcaataaagctgtaaaaaaattaaaaaaattacagtttttaaattttctatgttgtgaggaatagtaaaataattaggtttgcttacctatacttctgtttctcttctagctacaacacagaattacatttttayacctctttgaagtgaggtatggtcatatcctttactttgattaatgaaatatgagcaaaagtatcttatgtccctttttaatagaagcatttacaagtttgttggtgatttcctgctgctatgttacaagtcgttgtcc

SEQ ID NO: 610121 - DNA, 614 bp, Homo sapiens
ttttgctcttctgttttcttcatatttctgactgtttcttccacatcatactttccaaacattctactactcttctgagctcccaaacgtgggtatacattaaggccaaattattagtcaatggctcactttctcagaataaaaagattaatgaaattaggtttaaatcccaagtctagcccatactatgtgtgaaaacctagatgttggtacacctctctaagcctacttttgcattggtaaaaatattaccccataacatttttaaggaggattaaatgtgaatgaacttggtaaataacagatacattccatatgctttttttccgccttctcccytttcccctctcaaactccttacttcacacttaattttcttttgccaaaaccagtattaagtgtcttaaaactgactttgttgttttaaatcacttcagccttaatcggttttaagtaccatagttccactagactattttgtgcaagatgaaaaaaaaatatgtatttattgcataacaaagtgatattatgagatctctttgaggaagattaaagttcaaagttcaaatccattcagtaggtcagttaaaattatctcaacgtggtctcaattt

SEQ ID NO: 610122 - DNA, 579 bp, Homo sapiens
aatccattcagtaggtcagttaaaattatctcaacgtggtctcaatttacatcttctaccaaaatcttattaattctgttacataaacttatactttgagagattaatttgttgtgaattaaaattttatgtgcacatgacttttctctctcgattcattcctggaatgtcttccatgacctgtttatttattttagatttcctttttttctttttctttttttgagacaggatcttgctctgttgcccaggctggagtgcaatggtgcgatcacggctcactgcaacctctgcctcccatgctcaagtgatcctcccgcctcagcctccygagtagctggtactacaggtatgcaccaccatgcccagataatttttgtattttttgtggagaccagtttctccatgtttcccaggcttgttttgaactcctgagcgcaagtgatctgcctgtcttggcctcccaaagtgctgggattatagatgtgagtcactgtgcctggctatttgagtttttcttatttcaaattttattttctgttgtgaagtcacccagggctactcaggccacagagatct

SEQ ID NO: 610123 - DNA, 605 bp, Homo sapiens
aggccacagagatcttatctcctctactactgtagtgttctgtgtctgtgccattgatttggtggtagaagtatctcaaagtgcactatcattcataggtttttatataataagagagtattagataggataagctgttgaattaatcaacttaaaaatctcagtagatttacaaaataaaagtataagccttgctcatagaatagttggagtgttttggggatggacatccacaaagtgtttcagagacacaggtgccttccaggtcagtgttccactattccctatagctatgctgtctaacatagtagtcactggcctgcatatggctatcgagcatttgaaatgtagctagyactaaattagatctactggaagtgtgaaatatatgcccattttaaagacagtataaaaaatgaaaatttagatttaataattttcttattgattacatgtggaaatgacaatattttatatttcctgaattaagtagattaaattaaattcattatttaaattaatttcaccttttgtttttggctattagaacatttagaaatgcacatgtaatatttttattaggcaggactgtaccagagccttat

SEQ ID NO: 610124 - DNA, 624 bp, Homo sapiens
attgtagccccaaataacaagaaaatgctaaagtttcttcatttttagaaaaatcccatgtggtataccatgaaatcaagctgtgaccgttagtgtcagtctcttttgtcataccaattgtttttctccctgggggagggtaatggaagttcatacacctgaggaaaaaaacaccttgatcctgcaatgtccttgtggttggtggaagtgtcagtgatggtcatagktacttcatgttaaccaatctgcattgtcttgaaaagagatgttatctcttttcttttagtgaaatgtagaatggagtccatgaaaaatctgccattaacttagcagttgcaaccgtgtgtgttagttggtgcacatgcgcatatctgaattgggagacactgacgatactgtccttactagaatgtgtgaatgtgtgtgcataggtccagagatagtggaatgggtaaattaataaaggatattctatactgcatagtgattatggatgagggcttagtaaattgaagaagttatgaatataaactgaatatttatttttaccatattgtgatcagataatcctacattaaagcatctaaatatgatttgtgctttacatctgttatcagaatattt

SEQ ID NO: 610125 - DNA, 659 bp, Homo sapiens
atttaggatccttcttggttttgaccctgacaacctgagaaaaaggatcagctgttttgaaagttcactaagacttcagaaagaaaaagtattgagaaaatctttaaataattttgggatccatttttggtgaaccagttggctaaatcaatgtttaagaggtagaccaatgagaggaattggtttcattgattgattgattatgtgatgcttgaaggttgagagaattgatttagaaaataaagtacatataagtgagagaagtattacattgcatatactggatgagaaatgaactcatatgaagaaaattctaactaaaggtgctaggttgatyaccatcccactggttctgcctgttaattttttaaacaataaaaatttaattcttcaaatcacatttcaattttgtcatcatggttacattataggatacttgataaatgaagagaataaacatttttgcagctgataacaaacataactcaaacataggtcacatagtctagcctctgattcaaggaactagagctgagaagtgactcatgtataagaagtcacatcctagttttcctgttgttggtggaaatgtgccctgactgtctcacaaggatgttggagagactcaaaggaaggaaatgcctttgaaaactgtaaaa

SEQ ID NO: 610126 - DNA, 608 bp, Homo sapiens
aaggaatttttatgaacaaagtgctaaagcattttagataaatggaataaatgagtgaaaccttaaaatatgcattgatttaggcttactatgtgctaggtgctctaggccagcactagattaaaaagaaaaaaaaatacacaaacgtataatgagaaaaaaacgtgagaaatagtgatcacactagatttatagatttgcttttctgtataaactggagactgagaatagagatcttagaatgccaggctaaatctgattattaaaatagctaaatataarcagcatagaaagttatatttcagtgaattaaatgagaaatcatttctagttttaattttattctcaaagcacatgttagaggaaccaccacctggtggcagggtacatacattgcatcttctgtcactgagaaatgacaataaccattctaaagtctcaagtgacaaaccttcatttgtaaagtgacaaacgtgatcacaaagtaagaggtgattattcgttgtataaaagtcttctccaccagacttatttctaaatggaaacccttatttctaaatggaaacccttgagttcccttgtagggaaaatagatattttccttacaa

SEQ ID NO: 610127 - DNA, 603 bp, Homo sapiens
tagatattttccttacaaatcatgatatcatttaaatagaaaagtggtgagaattctccctgtttgtttgtccaaattactttgactgctagcaattataattccaccaactgcctaatgacagtatcagcatttgatgttccactcaccttcttccctccaagtattgcctggatgtcgatgcccaaggcaaccatggaagtcacatgttgaagagagcagagacacataagacagtgtccctgaacgactacatgaagcagaagcttcacctttcatctccagccccactctcacttgacataccacctaaaatttttacttgaatgaaaaataaactttctcacctgtttataggtttgcctattacagcagctagctttaatatactatgtaaagtaacaagattgaccgtgattttttattttagtgcytctgacagtgtatcagtcaataaaatacaacatgctaactctgaatcagttgaaaatatttaattttagttgggttttctggggtagatgtcttagtctgttagctttgctataaaggaatacctgaggctgggtaattattttttttaaaaaaaaggtttatttggct

SEQ ID NO: 610128 - DNA, 209 bp, Homo sapiens
atttgcaaatagcaaagaagctcacctttaaaaacagcacttttacacggaaactgattgctcttttttgtcctttttcttctctgagtgtttgttgtgtgtgtgtttaaagctctaccctttgttttcccagccccatagaaagygtgctactctctgctggtttcttatgatagctctgctcactgaggtagagcagtccctggaac

SEQ ID NO: 610129 - DNA, 597 bp, Homo sapiens
gtgtgtgtttaaagctctaccctttgttttcccagccccatagaaagtgtgctactctctgctggtttcttatgatagctctgctcactgaggtagagcagtccctggaactgttcaatacatctaactggaggctatccttatgtgtagacaaaagaccccgagaatgcacttccttttctctatttctaagatgtggttggagttaataaaaattaatttttacctgtttatatcattaaagtcagtcacacattttttcaaacattgaccaatgtttctttctttttactaaaattaaacaaattattagtaatttgtttgctaagtttttaaaacattttcaccattgcytttatcttgtaaataaagatatatacatgtgctttagtttcaaggcaaaggaatggaaataggtaatactaatcccaagttgtaaaaaatataaatcttataatgttggcaatgaggtgattgaccctgctctagttaaattgatatatataatttatctaaaaaggataagataccatatttagtgattaaccaaagataatctaaactcacctatcttttgcaacattaaaaatgtgaaat

SEQ ID NO: 610130 - DNA, 616 bp, Homo sapiens
tacctgtttatatcattaaagtcagtcacacattttttcaaacattgaccaatgtttctttctttttactaaaattaaacaaattattagtaatttgtttgctaagtttttaaaacattttcaccattgcttttatcttgtaaataaagatatatacatgtgctttagtttcaaggcaaaggaatggaaataggtaatactaatcccaagttgtaaaaaatataaatcttataatgttggcaatgaggtgattgaccctgctctagttaaattgatatatataatttatctaaaaaggataagataccatatttagtgattaaccaaagataatctaaactcacctatcttttgcaacattaaaaatgtgaaatcctatgcatatctgatcgataagggattgctaacattgatgaatactcagcttgctatgggtttgaataaaagtgaaaaatacttagcaactataaggaataataaatgattcagattactattagggttattgtycactcttctcaaagagaatctacacaaaatttcctgaactgcttatctttatttacaataatcatccccaaatgtgtacgacctctgagtttcttatgttaccaaa

SEQ ID NO: 610131 - DNA, 549 bp, Homo sapiens
cttccttcacatccatgaattttcatacatcctctgaaatctaggtggaggttcccagacatcaattcttgacttctgtgyacctgcgggctcaacaccatgtggaagctgccaaggcttggggtttgcaccctctgaagccacagcctgacctgtaccttggccccttttagctacagctggaatggctgggatggagggcaacaagtccctaggctgtacccagcagagggcccctgggcccagcccatgaaaccattatttcctattaggcctctaggcctgtgattgaaggggtttccctaaaggtctctgacataccctggagacattttccccattgtcttggtgattaacattttgcttcttgttacttatgcaaatttctgtagcaggcttgaatttttccccagaaaatggagttttattttctattgcattgtcaggctacaaaatttccaaatttttatactctgcttccttttgaacactttgctgcttagaaattttttccaccagataccctaaatcatctctctgaagtttaaa

SEQ ID NO: 610132 - DNA, 549 bp, Homo sapiens
cttccttcacatccatgaattttcatacatcctctgaaatctaggtggaggttcccagacatcaattcttgacttctgtgcacctgckggctcaacaccatgtggaagctgccaaggcttggggtttgcaccctctgaagccacagcctgacctgtaccttggccccttttagctacagctggaatggctgggatggagggcaacaagtccctaggctgtacccagcagagggcccctgggcccagcccatgaaaccattatttcctattaggcctctaggcctgtgattgaaggggtttccctaaaggtctctgacataccctggagacattttccccattgtcttggtgattaacattttgcttcttgttacttatgcaaatttctgtagcaggcttgaatttttccccagaaaatggagttttattttctattgcattgtcaggctacaaaatttccaaatttttatactctgcttccttttgaacactttgctgcttagaaattttttccaccagataccctaaatcatctctctgaagtttaaa

SEQ ID NO: 610133 - DNA, 549 bp, Homo sapiens
cttccttcacatccatgaattttcatacatcctctgaaatctaggtggaggttcccagacatcaattcttgacttctgtgcacctgcgggctcaacaccatgtggaagctgccaaggcttggggtttgcaccctctgaagccacagcctgacctgtaccttggccccttttagctacagctggaatggctgggatggagggcaacaagtccctaggctgtacccagcagagggcccctgggcccagcccatgaaaccattatttcctattaggcctctaggcctgtgattgaaggggtttccctaaaggtctctgacataccctggagacattttccccattgtcttggtgattaacattttgctycttgttacttatgcaaatttctgtagcaggcttgaatttttccccagaaaatggagttttattttctattgcattgtcaggctacaaaatttccaaatttttatactctgcttccttttgaacactttgctgcttagaaattttttccaccagataccctaaatcatctctctgaagtttaaa

SEQ ID NO: 610134 - DNA, 545 bp, Homo sapiens
taaatcatctctctgaagtttaaagttgcacagatctctagggcagtggcaaaatgccaccagtctccttgtatagccaagggtgacctttactccagttctcaacaaattgctcatcttcatttgagaccaactgagcctggaccttgttgtccatatcactatcaccatttttgtcaaagccattcaacaaatctctagtaagttccaaactttgccacatctttctgtcttctgagccatccaagtctctaggaagttccaaattttccyacatttccctatcttcttctaagccctccaaactattataacctctgcctgttacccagttccaaagtcgcttccacatttttggatatcattacaacagcaccccactcctgataccaatttaccatattagtctgttctcacactactaataaaggcatagcagagattgggtaatttataaaggaaagaggtttaattgattcagttccacatggttagagaggcctcacaatcatggcagacggtaaatgaggagcaaagtcaagtct

SEQ ID NO: 610135 - DNA, 545 bp, Homo sapiens
taaatcatctctctgaagtttaaagttgcacagatctctagggcagtggcaaaatgccaccagtctccttgtatagccaagggtgacctttactccagttctcaacaaattgctcatcttcatttgagaccaactgagcctggaccttgttgtccatatcactatcaccatttttgtcaaagccattcaacaaatctctagtaagttccaaactttgccacatctttctgtcttctgagccatccaagtctctaggaagttccaaattttcccacatttccctatcttcttctaagccctccaaactattataacctctgcctgttacccagttccaaagtcgcttccacatttttggatatcattacaacagcaccccactcctgrtaccaatttaccatattagtctgttctcacactactaataaaggcatagcagagattgggtaatttataaaggaaagaggtttaattgattcagttccacatggttagagaggcctcacaatcatggcagacggtaaatgaggagcaaagtcaagtct

SEQ ID NO: 610136 - DNA, 545 bp, Homo sapiens
taaatcatctctctgaagtttaaagttgcacagatctctagggcagtggcaaaatgccaccagtctccttgtatagccaagggtgacctttactccagttctcaacaaattgctcatcttcatttgagaccaactgagcctggaccttgttgtccatatcactatcaccatttttgtcaaagccattcaacaaatctctagtaagttccaaactttgccacatctttctgtcttctgagccatccaagtctctaggaagttccaaattttcccacatttccctatcttcttctaagccctccaaactattataacctctgcctgttacccagttccaaagtcgcttccacatttttggatatcattacaacagcaccccactcctgataccaatttaccatattagtctgtwctcacactactaataaaggcatagcagagattgggtaatttataaaggaaagaggtttaattgattcagttccacatggttagagaggcctcacaatcatggcagacggtaaatgaggagcaaagtcaagtct

SEQ ID NO: 610137 - DNA, 605 bp, Homo sapiens
ccttgttgtccatatcactatcaccatttttgtcaaagccattcaacaaatctctagtaagttccaaactttgccacatctttctgtcttctgagccatccaagtctctaggaagttccaaattttcccacatttccctatcttcttctaagccctccaaactattataacctctgcctgttacccagttccaaagtcgcttccacatttttggatatcattacaacagcaccccactcctgataccaatttaccatattagtctgttctcacactactaataaaggcatagcagagattgggtaatttataaaggaaagaggtttaattgattcagttccacatggttagagaggcctcacaatcatggcagacggtaaatgaggagcaaagtcaagtcttatatggtggtaggcaagacagcatgtgcagatcttttataaaactatcagatctcatgagattaactcattgtcatgagaacagcatgggaaagaccctctcccattattcaattaactcccaccagttcatgacacttgggaattaygggagctacaattcaagataagatttgggtgaggacacagctaaaacatcagact

SEQ ID NO: 610138 - DNA, 595 bp, Homo sapiens
cattcaagtatttacactgtataaaaagtttgttgaggtacccaaccagagttcttcctgttttctgaggtaattcaatacagtgtgaaccactgcttttttggacaatttctgaaattatccaaccaaagtccaaatcctttctaacactgttttactctgatgttcagtggtttcccatgacatgtgccctttcttgatgaaagttgtaaaccaaatttcaactacagctgtgtgcttggtggtctttggttagaaagcattggcaatttgaaataaagctagtccaaattgagatatactgtaagtataaaatacacatttgattttcaaatacttaatatgaaaaagagaatgtaaaatatttcataatttcatattaattataatgataatattttggaaatgctgatagaatgtattattaaaagtcaatttgcctgttcttttytaatgtagccactagaaaatttaaaattacatatgtggcttgcatttcatttctgttgaatttgcattgttttataatgtcccagaatagccaataattgaccatcctgaccatgcatacacagcatacagcttttttcaaaga

SEQ ID NO: 610139 - DNA, 619 bp, Homo sapiens
atttgcttcataattaccttataatattgcaaaggatttggctctcagttgatgtttagagaagaatgaatttctttctcattcttattaagattttatwgacatatagattagttcacttattttataggtaattctgacaaatgagtgtagtatataatcaccacacataatccctccttctcttcctctctctttccctcctccctccctccctttccccttctcccctcccttctcccctccctccctccctttccttccttccttccttctttccttccttccttcctccttccctctttcctcccttccatctttattttcttctttctttgtgcaaatttcaagtatacaatacagtattgctaactatagtcacattttttatacattaggtcttcagaacttattaatcttgcataaactaaattttgtccaaatttgtttttatttttcaagtgtttggctctcccagtctctttacttttctatataaacgttagaatcagctgattgattctgacaaaaatgttacactgagattttagaatgaagttttatttcaccaatagatcattttggaaaggattgacttctttaaaatattgagttgttc

SEQ ID NO: 610140 - DNA, 619 bp, Homo sapiens
atttgcttcataattaccttataatattgcaaaggatttggctctcagttgatgtttagagaagaatgaatttctttctcattcttattaagattttatagacatatagattagttcacttattttataggtaattctgacaaatgagtgtagtatataatcaccacacataatccctccttctcttcctcyctctttccctcctccctccctccctttccccttctcccctcccttctcccctccctccctccctttccttccttccttccttctttccttccttccttcctccttccctctttcctcccttccatctttattttcttctttctttgtgcaaatttcaagtatacaatacagtattgctaactatagtcacattttttatacattaggtcttcagaacttattaatcttgcataaactaaattttgtccaaatttgtttttatttttcaagtgtttggctctcccagtctctttacttttctatataaacgttagaatcagctgattgattctgacaaaaatgttacactgagattttagaatgaagttttatttcaccaatagatcattttggaaaggattgacttctttaaaatattgagttgttc

SEQ ID NO: 610141 - DNA, 541 bp, Homo sapiens
tgatagatgttttttaaaaaaatttgaatgaatcttgagttttcaggacaaaacccacttaaaggggatatattttctttttactgtgttgaatttagttttctagtatttagttaaaagttttgtatttgtagtcattaggaatattggtctgtagttttcctttcttatgcagtttttccagtttggtatagggcaataaccttgtcttaaaatgagttgcagtttcccccttcacttgtattctgaaaggcctttttgaaattggtattatttctttctccaacatgtaatagaatatgtcaataaaactatctgagcctggaggtttctcttttggaaggctttaaactataaattatctttctttaatagacataacaatatccaggttatttaatcttcagtaattttcttatcwtttgaggaatttatgtaacgcctctatgttgtcaaatttatgggcataaaattgttcccaatattcactttgtggtacacagaattcctaacacagaatagcccccagtgacaaatggca

SEQ ID NO: 610142 - DNA, 577 bp, Homo sapiens
gagtctaccacagagccatcaaaggtagtctttatctctcctctcaggtttttcatttctagcatttccattttatgatgttttataattaccatttctttgctgaaagtctccatatgttcctgtacagtatscacctttttcactgcagactttattgatcataattattttttaaatctctgatagtccaagatctggttcatatctagttgttgtattaatttcttggtttcttggaagtatgttgtttcctttttttgtctttttggtgtcttgcgatgtttggttgaaagctcaacatcttacgtgggagatataagtagatcttatgcctgcccataaacatgcattttcattttcttttgatatgactttaatgtgaaggaggttgaaataatctagttaggagttcatagatttggtttttattagttgcatgattgccctcagtgcaccacaagctttcaattactctagcattaacttgtctttatggtggttgccagaatatttttctcaatgtctgttccacctttaactttagatattattttctttgtatctgtgagtaaaa

SEQ ID NO: 610143 - DNA, 577 bp, Homo sapiens
gagtctaccacagagccatcaaaggtagtctttatctctcctctcaggtttttcatttctagcatttccattttatgatgttttataattaccatttctttgctgaaagtctccatatgttcctgtacagtatgcacctttttcactgcagactttattgatcataattattttttaaatctctgatagtccaagatctggttcatatctagttgttgtattaatttcttggtttcttggaagtatgttgtttccyttttttgtctttttggtgtcttgcgatgtttggttgaaagctcaacatcttacgtgggagatataagtagatcttatgcctgcccataaacatgcattttcattttcttttgatatgactttaatgtgaaggaggttgaaataatctagttaggagttcatagatttggtttttattagttgcatgattgccctcagtgcaccacaagctttcaattactctagcattaacttgtctttatggtggttgccagaatatttttctcaatgtctgttccacctttaactttagatattattttctttgtatctgtgagtaaaa

SEQ ID NO: 610144 - DNA, 577 bp, Homo sapiens
gagtctaccacagagccatcaaaggtagtctttatctctcctctcaggtttttcatttctagcatttccattttatgatgttttataattaccatttctttgctgaaagtctccatatgttcctgtacagtatgcacctttttcactgcagactttattgatcataattattttttaaatctctgatagtccaagatctggttcatatctagttgttgtattaatttcttggtttcttggaagtatgttgtttcctttttttgtctttttggtgtcttgcratgtttggttgaaagctcaacatcttacgtgggagatataagtagatcttatgcctgcccataaacatgcattttcattttcttttgatatgactttaatgtgaaggaggttgaaataatctagttaggagttcatagatttggtttttattagttgcatgattgccctcagtgcaccacaagctttcaattactctagcattaacttgtctttatggtggttgccagaatatttttctcaatgtctgttccacctttaactttagatattattttctttgtatctgtgagtaaaa

SEQ ID NO: 610145 - DNA, 303 bp, Homo sapiens
ctgattattttgttcctttaytatttgttgaaaaggctatctttcctccactaaattgctgtatctcccctgtcaaagtcagttgagtgcatgtgtgtgagtctttttctgggatctctgttctgtttcatcaatctatgggtgtctgttcctctgccaaaactgtatagtcttgattgttatagctggaaagtaagtcttgaaattgggtagattgatttctcccacttgtttcttctttttcaaaagtcttttagctatgttatttcctgtgttttttttcatgtacattttaaataattt

SEQ ID NO: 610146 - DNA, 303 bp, Homo sapiens
ctgattattttgttcctttactatttgttgaaaaggctatctttcctccactaaattgctgtatctcccctgtcaaagtcagttgagtgcatgtgtgtgagtctttttctgggatctctgttctgtttyatcaatctatgggtgtctgttcctctgccaaaactgtatagtcttgattgttatagctggaaagtaagtcttgaaattgggtagattgatttctcccacttgtttcttctttttcaaaagtcttttagctatgttatttcctgtgttttttttcatgtacattttaaataattt

SEQ ID NO: 610147 - DNA, 303 bp, Homo sapiens
ctgattattttgttcctttactatttgttgaaaaggctatctttcctccactaaattgctgtatctcccctgtcaaagtcagttgagtgcatgtgtgtgagtctttttctgggatctctgttctgtttcatcaatctatgggtgtctgttcctctgccaaaactgtatagtcttgattgttatagctggaaagtaagtcttgaaattgggtagattgatttctcccacttgtttmttctttttcaaaagtcttttagctatgttatttcctgtgttttttttcatgtacattttaaataattt

SEQ ID NO: 610148 - DNA, 615 bp, Homo sapiens
agggattggaaagaaacttctaaataatttacacctcaaaagaatagggaagaatttatagttacaagttttctaaaatacgtgcttaaaaaatgggaatcagaggcctagtgtcaggtaaaataatattctaaacatcagtccggttgaggggaatattaagactatctttgtcayctacagttgataagtgctagactttgtctagtcatagaatggctcctcttcttctgtttgtaatacgcacacttcatagattacatggataagcattattattatccattgccctccaccatctgtttttctaaagctaagtggtatctttaattgtacctgaggagaaacctgctatatataatgggtatgcaagtgaaagctaagtacaacaatacaaacctgtagaagaatgcttaatagagccatctcatttttcctctctatatcccttctggcttcatcccttggacttgtgatttctggttgatacattcagatgtgtctctgcattgtcttgaataatcttctgtttctgattctactacctgactttctcttgcctatcagttaatgcagagaatctgattcctggatgaacatctttattaatgaaaa

SEQ ID NO: 610149 - DNA, 584 bp, Homo sapiens
gtttagtaagcaatgaaagttgtaaatgtttgtaaagttttgcaagactacttcttcatacaaagawacaaagcaaagaaccagaatatgtacatttacctcttagtcaacttactattcatatgagtattggcagccttaaaaaacaaacattacacatatctcagaggccacattcatcttttagaagctaaaaaggtttgcattgtttttaaataaagagcttgagtgttgtcaaaggttgctttagatctctctctttcttggacttgcttaagaaatgaatgatgcatggaagggcttcttcttgcacaaaggcacattttcataaacttatgagcactgaagcccacagtgcaaagaaatatatttttgtgtttcaaatggctctcatatggtgatattataaagatagaaaaatctttattttgcgtagaggctacatgacagtatttaaaagtggcctgataattgacattatcttattttctccttccaaaggaccccaccagggacatgtatcttaaaaattatgatttaaaagaccacggtatagtcttgaaaaacactgtgcaaaagagaag

SEQ ID NO: 610150 - DNA, 584 bp, Homo sapiens
gtttagtaagcaatgaaagttgtaaatgtttgtaaagttttgcaagactacttcttcatacaaagatacaaagcaaagaaccagaatatgtacatttacctcttagtcaacttactattcatatgagtattggcagccttaaaaaacaaacattacacatatctcagaggccacattcatcttttagaagctaaaaaggtttgcattgtttttaaataaagagcttgagtgttgtcaaaggttgctttagatctctctctttcttggacttgcttaagaaatgaatgatgcatggaagggcttcttcttgcacaaaggcacattttcataaacttatgagcactgaagcccacagtgcaaagaaatatatttttgtgtttcaaatggctctcatatggtgatattataaagatagaaaaatctttattttgcgtagaggctacatgacagtatttaaaagtggcctgataattgacattatcttattttctcctwccaaaggaccccaccagggacatgtatcttaaaaattatgatttaaaagaccacggtatagtcttgaaaaacactgtgcaaaagagaag

SEQ ID NO: 610151 - DNA, 564 bp, Homo sapiens
cttgctgtttcttaaaagcaaagctgtatttacacgaagtgggtatgaataacatttttaaatatcctgctaaaacacarttaggttagagattctgtttgctttcacttttttttttttttttttttgagacggagtgctttcactttttaattcaatcatgtgttgcttaatgacagggatgctttctgagaaatgcatcaggcgatttcatcattgtgcaaacatcatcgagtgtacttaaacaaacttagtatagtctaccacactcgtagcctatggctttttggctacaaacctgtacaacatgttactgtactggataatgtaagcaactgtaacacaatggtaagtactgatacatcaaacatatctaaatatatacaaaatttagtaaaattatgatatgatctcatgagataccatcatatatatggtccatagttgaccaaactctcattgcacatgcaatggataggttgggggaaaattatttattcatagatagattaggggaaaaattatccatccttttgtatctcaaataaggtaaaaggaagttat

SEQ ID NO: 610152 - DNA, 584 bp, Homo sapiens
agatggatatagtacagtaagagagaagggacaaggtttattggattctctggcttctctcaccaattagattctatctggtttataaagattccaaaggaagattcctacaggggcctcagaaaygcaatccaactgaaaaaccacactaaaaagacgggcactgtgtagggttctgagatactgaaagatatgattcctgaattccctcagcattctgggataaacacgaagaaatcctaagtcctcactgctatagtttttctcaaaggaagagtttcttacatgagatattgacaaaacagccaatcttccactgtaggttttggggctgggatatagagatgattcccagagttagagtactgagaactatgttggtttctgattaaatgttggtataatattaaaaaccagttaagaatgatcaaaggaacctacataaaacactgtggtcactctttcttcatgtgccattagcatctgcccaaaggctacctctgtgacaagtccaaatggcttgccccaggctctgcttgcaggaaccagacttaaataacagtcaaggtctgattttgagaaca

SEQ ID NO: 610153 - DNA, 584 bp, Homo sapiens
agatggatatagtacagtaagagagaagggacaaggtttattggattctctggcttctctcaccaattagattctatctggtttataaagattccaaaggaagattcctacaggggcctcagaaacgcaatccaactgaaaaaccacactaaaaagacgggcactgtgtagggttctgagatactgaaagatatgattcctgaattccctcagcattctgggataaacacgaagaaatcctaagtcctcactgctatagtttttctcaaaggaagagtttcttacatgagatattgacaaaacagccaatcttccactgtaggttttggggctgggatatagagatgattcccagagttagagtactgagaactatgttggtttctgattaaatgttggtataatattaaaaaccagttaagaatgatcaaaggaacctacataaaacactgtggtcactctttcttcatgtgccattagcatctgcccaaaggctacctctgtgacaagtccaaatggcttgccccaggctctgcttgcaggaaccagacttmaataacagtcaaggtctgattttgagaaca

SEQ ID NO: 610154 - DNA, 626 bp, Homo sapiens
ggattgctggatctaatggtagctctacttttagttatttaaggaatcttcacactgttttccatagtggctgtatttgtttacattctcaccagcaatgtaraaatgttccctgttcaccgcatccacaccaacatctatactgttttttttatttttttgattatgtccattcttgcaggagtaagatggtatcacattgtgattttgatttgcatttccctgatcattagggacttttagcattttttcatatgtttgttggccatttgtacatcttcttttgagacttgtctattcatgtccttagcccacttttttatggtattgtttgttttcttcttaccgatttgagttcattgtagattctagatattaggttttttgtcagatgtacagattgtgaagattttctcccactttgtgggttgtctgtttactctgctgactgttccttttgccatgcaaaagctctttagtttaattaggtcccagctatttatctttgtctttattgcatttgcttttgggttcttggtcatgaaatccttgcctaagccaacatctagaagggtttttccagtgttatcttctagaatttctgtagtttcagatcttaggtttaa

SEQ ID NO: 610155 - DNA, 626 bp, Homo sapiens
ggattgctggatctaatggtagctctacttttagttatttaaggaatcttcacactgttttccatagtggctgtatttgtttacattctcaccagcaatgtagaaatgttccctgttcaccgcatccacaccaacatctatactgttttttttatttttttgattatgtccattcttgcaggagtaagatggtatcacattgtgattttgatttgcatttccctgatcattagggacttttagcattttttcatatgtttgttggccatttgtacatcttcttttgagacttgtctattcatgtccttagcccacttttttatggtattgtttgttttcttcttaccgatttgagttcattgtagattctagatattaggttttttgtcagatgtacagattgtgaagattttctcccactttgtgggttgtctgtttactctgctgactgttccttttgccrtgcaaaagctctttagtttaattaggtcccagctatttatctttgtctttattgcatttgcttttgggttcttggtcatgaaatccttgcctaagccaacatctagaagggtttttccagtgttatcttctagaatttctgtagtttcagatcttaggtttaa

SEQ ID NO: 610156 - DNA, 493 bp, Homo sapiens
aaaattagtactactcaatgggctcaaattaggctcagcttagggctgcatgcctttgcacttgcacagctgggctccaccccttcagtccctgcctcaaagagggaaagacttcagacaagtcaaggcagaggagatgtgtgcaccaggcagcaacagaaaaaactatccctggtgattatgatatcctccaggcmcccaattctgagaccacaaggagtgacgatttaccacgtgttgtgggaacaggcttgggactgagattgacatgagttaattcagctgtggcactcaaatccacatatgcacaaccattgtgcagtcctgtggctccagcaaatctcaagataatgagggaaacagtgcgacatacagagaaaggcactggactgaatcagaagacctagatttttcttattgactctgctggctaatctcaagggaagaggcaaatcacgctctctctgggactaaatttcctcatctgtaaaat

SEQ ID NO: 610157 - DNA, 558 bp, Homo sapiens
ttctgaggaaaatctgttttcccatgagttttcaattaaaacaatcatttaaaaacaatgtaggcccatactggttaagaaagaaaaacaattgttttttcatatagaattattaagagaaaagccccaatagctatagagcattagctgacattatccgaaaagtaatcacctacattcacattctcatgtcacaaagcatgcagaatggaaatataccacaacccgcacaggactagaatctctggctgcagactgaaggatgaatgggaggccaacagggatctaatggatgctggtcccaaggagtgatatgaaatcacctgccctcgagtatcactacctcactatctacctgggatgtgtggttgatattactatatcttattctagtaaytaatagataaaacaaataggtaattaatatatagttttagttttacaaatcatcatactgaatgtacatataatatctttattacatcaaattatgaacttggggcattacaataaatatgaaattcaataatcacagtttgaatatttgctgttctgcac

SEQ ID NO: 610158 - DNA, 572 bp, Homo sapiens
ttcctacatattttttatttgatgycagcatgctctttttgcagttaccacccctttctgttagaattcttatttttggatgagtgatcaattgcttcatgttgattttccccagcaagctataggttcaccccagctgcaaaaatgttctcaactctaagcaaaagctccataggcaaagtcagcatacgatctttcaaatgcaaacagtgtgactctgtaggagtctaactcaggaatttgagaaaaggactttgtgagagtggtaagtttgtggcatttattactgtttttaaatctgacccaaaaaagttactaaaactcccataaaattactgtatttaactctcagataagacttctgacatacgaagttcatttaatttaccaaaatttctcatagactaaatacatatcattagctatactgcaaaagaaatgtcaaaagcttggagcaagttgttcaggggcaccctatgttagtgccaagttggacatacaacttctaggcttctaatccaaagttgatagtactgggagtatccctatagtaaaatattgataacacacag

SEQ ID NO: 610159 - DNA, 572 bp, Homo sapiens
ttcctacatattttttatttgatgccagcatgctctttttgcagttaccacccctttctgttagaattcttatttttggatgagtgatcaattgcttcatgttgattttccccagcaagctataggttcaccccagctgcaaaaatgttctcaactctaagcaaaagctccataggcaaagtcagcataygatctttcaaatgcaaacagtgtgactctgtaggagtctaactcaggaatttgagaaaaggactttgtgagagtggtaagtttgtggcatttattactgtttttaaatctgacccaaaaaagttactaaaactcccataaaattactgtatttaactctcagataagacttctgacatacgaagttcatttaatttaccaaaatttctcatagactaaatacatatcattagctatactgcaaaagaaatgtcaaaagcttggagcaagttgttcaggggcaccctatgttagtgccaagttggacatacaacttctaggcttctaatccaaagttgatagtactgggagtatccctatagtaaaatattgataacacacag

SEQ ID NO: 610160 - DNA, 572 bp, Homo sapiens
ttcctacatattttttatttgatgccagcatgctctttttgcagttaccacccctttctgttagaattcttatttttggatgagtgatcaattgcttcatgttgattttccccagcaagctataggttcaccccagctgcaaaaatgttctcaactctaagcaaaagctccataggcaaagtcagcatacgatctttcaaatgcaaacagtgtgactctgtaggagtctaactcaggaatttgagaaaaggactttgtgagagtggtaagtttgtggcatttattactgtttttaaatctgacccaaaaaagttactaaaactcccataaaattactgtatttaactctcagataagacttctgacatacgaagttcatttaatttaccaaaatttctcatagactaaatacatatcattagctatactgcaaaagaaatgtcaaaagcttggagcaagttgttcaggggcaccctatgttagtgccaagttggacatacaacttctaggcttctaatccaaagttgatagtactgggagtatccctatagtmaaatattgataacacacag

SEQ ID NO: 610161 - DNA, 553 bp, Homo sapiens
aagctgctggatagcatttacccacagtagaacttccttccaaattggaatcaaccctttcaaactcggctgatgatttaccagaaaagttttaaaaatactcaaaatcctttgatgtcatttcaacaatgttcatagcatctttaccaggaataagtttcatctcaagaaattctctgtatattcawgagaagcaactcctaacccattaatgtttgatcataaggttgcatcaattgagtcatattttaaagctccactttgaatcctagttctcctgctattctcaccacatatgcagttacatcctctaagaagtcttgaaccactcaaagtcacccaagagggttgaaatcaacttctaaactcctgttaatgttgatattttgacctcctctcataaatcgtgaatgctcttaaaggcatataaagtggtgaattctctccataaggtttgcaatttacctcatccagatccatcagaggaataaccatctatgtcagctacagccttataaaatgtatttcttaaacgataagactgaaaagtcaa

SEQ ID NO: 610162 - DNA, 314 bp, Homo sapiens
gactctgtctcaaaaaacaaaacaaaacaaaacaaaaaaggaaagatattttctccattttttmcggagaggaatcgaggctcagagtagttagttaatataccccaagtcacacagctagacagagccaggatttgatcctaggtttgactaactccagaccctccacttgaattattctacttccctgatgctaaagttggcagagagaggaagaaactcccttcctgctgaggttcctgacaaacagtaggggcaggtgagggtagcaagtaaccctgagatctgctggttagggacgcctggcacaaaag

SEQ ID NO: 610163 - DNA, 562 bp, Homo sapiens
ctgcctaactgggaggctgagcccaggagttgaaggctgcagtgagccatgatcacacccctgtactctagcctgggtaacagagtgaaatctcgtctcaaaaacaaaatgaaacacaaaccacatagcacctttggctacagaggattctatcagatacaataccaccgaaataagcaggcaataaaaaattataaaacacaaaaggatatcctctagkatgagaattaatagacacaataggatggctaaaaccaagaatttcagataaaacaaaatctaaaaaaacaatataaaagtaagcctaggacaatttaaaaataaagagaactgtttaaaactagagagaaagactttgaaaaaaatatttaaagttactaaaggtatgcctagaaacaaatcactgaaatttacaattcaatcattttgtaaccaccaggtcatcagaagttagaaaaaatggcaataacaagtgttgctaaggatatggagcaatgagaactcacttcacacactcctggctaggggtgcgatttggaaaaacacgcatcacctagtaagt

SEQ ID NO: 610164 - DNA, 465 bp, Homo sapiens
ttttgacacatttaaagatataataccgtcttcatgaatttggtagattatagaatcaataaccactttgagtgattcaattgcktttctaaacaataatgaagttaaaaggaagaagaaaatttccacacataattgctttcttaggacaattgaaaaaatcatacaaaagcatataagtaaattctttgtgactgtgcatgaaggacataaaccaaacataactagaattaatcaatgacagtcaaattacagctgttttacacaatagtaaacacatgtttatgcatttaaaaaatgccagacaggctgtggtactagcttatgtttccttttagtcaaaaaaataaaatggcatgtttatgctttgggaataaatttatagaagttaatatttttaaggcaaacctctgtgtgatattgtgaggttagataatgactctagttatcatttcccaactcaca

SEQ ID NO: 610165 - DNA, 611 bp, Homo sapiens
tttgtaccagtaccatgctgttttggttacygtagccttgtagtatacttggaagtcaggtagcatgattcctacagtttttttttttttttttttttttttgagacagagtcttgctctgtcactcaggctggagtgcaatgggaggatctcagctcactgcaacctccacctccagggttcacaccattctcctgcctcagtctcccaagtagctgggactacaggcacccgccaccacacccagctaattttttttgtatttttagtagagacggggtttcactgtgttagccaggatggtctcaatctcctgacatcatgatccacccaccttggcctcccaaagtgctgggattacaggcatgagccaccacaccctgctcatctttgtttttttacttaggattgccttggatatttgggctcttttttgattccacatgaattttaaaataagtttttctagtctgtgaagaatgtcagtggtagtttaatagcactgaatctataaattgctttgggcagtatagtcattttcacaatattgcatttatattcatgaaggatattggcttgaagttttcctttttgttgttgtatttctgcca

SEQ ID NO: 610166 - DNA, 556 bp, Homo sapiens
cattgtagttaagaaatcgtcatttataaattaatagtatcattaaatatatactctttactccaaaattttgaaaactagcttatatttcaaaaattcataaatatcttrtaatattgtgaagaagccaggagctgattaaattttctcaatactatcattacttattttcttttaaataattttattaatatttaagaaaagtaagaattgtgatcattaaaaaaagttattatggattgaccttcattgaaattttatttttgcttgagctctgctaaaaaatgagcaaatcacctaaataataaaaagagtggccatgcttccaaatatccatatagccactcatctcaaacttaaatattttaattggtcatgaactctttaggattaaacatagattttaaaaacttataaacaaacttttgcattgattcttgcttattattatatctaaacactaataaaaactgtttttttttctagcaactgcctgtattgttttatctaattctagctttttgcaatggaagtataaaattataaaacacagacc

SEQ ID NO: 610167 - DNA, 586 bp, Homo sapiens
ctgacgtgccctggagacattttccccattgtcttggggattaacatttggctcctcattacttatgcaaatttctgcagctggcttgaatttctcctcagaaaatgggttttctttttctatcacattgtcagactgcaaattttccaaacttttatgctctgcttcccttataaaatggaatgcctttaacagcacccargtcacttcttgaatactttgctgcttagaaatttcttccgccagataccctaaatctctctctcaagttcaaagttccacaaatctctagggcagaagtaaaatgccaccagtctctttgctaaaacataacaagttacctttgctctgctcttacgttttttattctcattgttatctagcctctcaacacttcttgagtgaagttacctctgcctttattattgctaccaacctagctgggcgtggtggctcatgcctgtaatcccagtactttgggaggctgaggcaggcagatcacgaggtcagaagtttgagaccagcctcactaacatggtgaaatcccacctctactaaaaagacaaaaattaaacgggcatggtgg

SEQ ID NO: 610168 - DNA, 564 bp, Homo sapiens
aaaatctgtactaatgagaatattctgatcacgagtatggctatggttctaataatctaggactcaggaaaataaaagaagaaaattttatttatttgtcaatattctagtcctgaacctgaagctcagtgcaagaaagagatacaggatttgagaacagatcaaagttagggattgtggaacagagtagagcgagaaagtagycactttatttcattctacacttcttgaatgtactttgtcatttatgtacttttcccaaaccatctattgcattctagcagatttttcagtatcttcaacttcttcaactactttccttattcttattccctcccactatcacttaaccctcttggctcctcagtgaccgtactactggtgttaatacgtgtctggaatatagaaagggttcatttaagtgcacaattatgccattcacaactgttgttatatactagaacatagcttaagcttagaatatgcaaatgcagtagaacctctcttaagcaaatttcatttaaacaacatgccagattaatctcattttctaatttcaaatat

SEQ ID NO: 610169 - DNA, 542 bp, Homo sapiens
acaaaggtgagatgggtgaccagcagatgacacaaaatccaaaaaaattttccgtgtaatgacagaatgttggcaaatatccagaatattttactgagcatagactgtcaaaaataaataatccaaacatttcaagtggtttttagagtcctaaaagcagaaatttgaatttatctttaagataaactaaacttcttatgccaaaatcactaaaccaaccacacaggcctttayttataaaagtgtgatgcaataatattcttttggaatggaaatagtatggggctgtagcttcaaggcgataaagtgttctatgtaattacctaaagaggttgttttcattaacagcaggcttgcacctctgaaaagcatgtctctcttaggaaaatgtttctcacaaactgtccagtctctaagaattatttttgtttttaggaagtgtatacctgcgattgtttctttgcttcatattgcagtaaaactcctaaaaaatgatatttatgcttcctgcatctaattcatctcctttcattttctcttaa

SEQ ID NO: 610170 - DNA, 580 bp, Homo sapiens
tattattcctttgtacttgtaactttgtacacattggccatgctctccccatccctccactcctcttgcccggtctctggaaaggtaagagctgttttatttatgactttaatattcttagattccctatatgagggagaacatgctgtatttgtctttctgtgtctggcttatttcacttaacataatatcctccaacttcatccatattgtcacaaatgrcagaatttcattctttttaatgttaaatagcattctactgtgtatatataccacgttttcttcatccatttatccattgttggacacttaagttgattctattaatatcttggctattatgaatagtactacaatggtcctgggagtacagatatcccttctacatactgatttcattttcttcagatatatactccgcagtgggattgttggatcagatggtagttcttgtttcaattttttgaggaatgtactaatttacattcccaccacctggggacaagggaaccctttgctccacatcctttccaacatttatttattatttgtcttttttgtaatagccattctaactgga

SEQ ID NO: 610171 - DNA, 533 bp, Homo sapiens
attatgaccttgtgctgaccacattctatgaagtgttacatgatcagggacagggaagttggttaatggaakttatatagtagctagatgtatccttgtcacacttcatctaaactgatacattgcaatggtccacactgctcagacctggcaattactgtccaattccaatctattccacactgccactataatgaaaaataattaggagcctgaaaatgagttttcacatgaaatggtttcagtgcttggacacaatcgcctttggcagatggctttgggtttgctttaatataataaagacagttaatcatctctaaagagtgcactgaatgaataaacttttaacactattttctacaatggaattcttatattgatcaaatgtttaatgctcaggggtggaagttgctttggctgaattgtttggtatgagcgcataaatcactgctaaataaatgcattagaaaagaagaaaattggttcaaattgattatctattattgatggaggaaaattaaaaagcttaacac

SEQ ID NO: 610172 - DNA, 574 bp, Homo sapiens
ggcaactctactcacctgttcctgcaagattgcaatttgaagtcaagatataccctcacctggaggaggagtttaaacaataaatgacaattaatatcaaagtaaattatattagaatatgacgaaaaactgctggaaactctgtttacaatttcagctacgaaagaagagaaaattttaattttcacatataatataatgacattctaattaaaatgtccatggaaaaatgaacagaattaatgaatgacatgtatgaggaatggcataactttcaaattaagtaggcatgcttgaaaatctaagatgcactattcagttgctgtgtgaccatgaacaacaygtaggaaaaaattacaacattccattgagttttctggaaatgtcaaatgctataatatatgtgcatagaaaatagaagaggttctatggcatagtaaatctaagcacattctggtggttattattactaacatactaattatcctgtactttggaaacattctctctgtggctatgcacttcctggaacttgatagagaaaataaggctcatctaataatttgtgcattat

SEQ ID NO: 610173 - DNA, 626 bp, Homo sapiens
ttactagctttttgaccctgaacgacttagataacccagctaagcaataattttctcatttgtcaaatgaggcttaatactagtatctatttcatagggttgttaagaggattagaggacatgataatttatccaaaaccacttaatacagttcctgtataaaaacaactcagtaaatggaaacttatcatgatcggtgtttgttgccgaagtgactcattaataaagactgaaggtataaataatagaaaatctcctcaagccagtaggttgtactgyagtttatctctgttggatagatgacattttattaattacttggtagctactgtccttgttttacactctaactttaacatggaacagcatttggcttttcactcttatcttcaacatctaagacattttatatagatcttatattcaatgtgtgtgattaattttttaatacatacaatcatacaatcctatggaaaacttctcaaatgatgtttgaaatgctcaattagacaattatgagtgttaaaatatctgttttaacttatggtaaaatctgtccctttttaaaactcaccgttggtccgagttaaccctctcagaccattttaaattgagattatcccttg

SEQ ID NO: 610174 - DNA, 512 bp, Homo sapiens
gttacttctccagagtttctatttttgctactcttttcatgtcacttaaaccaagaatatgcaggaattaaaatttctaactctagttctgggccataaccatcttaactgtccaatcaaatgctaacttttgtcatctttaagttattaattattttcatttgcataaaacaatttaaagttagaattatattatgtaaccattatgttaaagaagcttaaccttcaaggtgcaataagaaaacagcttaatcctactccttcctttcccactggtactacctgttcaaatyaactttatagggccaattaccacctttagatgagccccaggcatgacttctgtggttactgtcagataataaaaaatatcctccagtatctttgagtcaccaactacaggtataatgcccattccacaataatgaccaactctgaattcatttaaaatgaaagcttcccttctctatcaactcaacgtagctctaagtagaaattttacaataggaaaa

SEQ ID NO: 610175 - DNA, 401 bp, Homo sapiens
ttttgggttttttgcacctattatcattcaataaagttgtaatattgggaaacaaaaattcaattcttgcattgaatctatgggaatgtgtgtgtgtgtgtgtgtgtgtgtgtgtgtgtattatgtttagtctgattgccatggcagtttgaatgcttgactaatctatagagatcagtagtaattaacatgacagacaaaaggagcaaatgtagtccatttatgcctccagctgaactaattttactgttaagcatgaatctaatatccataaatagcgacwagttagtcagaattattgaagtcacaattatatttgtagtattgcagtaaaggtaagaattgcctagcttcactaagactatgggttttgttgttaagaataatgttgataaagataa

SEQ ID NO: 610176 - DNA, 548 bp, Homo sapiens
tggctgccttgcccatgaaatcttggtaattgataacttctccttttcttgaagccagggagggaggacacgcaggtggccctggcagggctgggctagctcttccttgctgctggagcactcattgatgcgttaatatagccaggtacaaggactatgtggcgaggtggagagaagccggagcctgggagctcagccactagataaccccgaagttggcaagtctcattcttggctgcctccctcctcccctcagaaagtaaggtggctcccaggagctgttgggcagggaagaccaagatatatggcscttccacgtgggggctgctgtcttctcttgaccctctattccagtcaatgtttagctatcagccctccaggcaaaaaaacaaaacaagcacaaaccactttgatgtgtagcatttgacttccacggtataaatacttccagcatggctgagtttaagccacggacatgacgctgtgtgcatgaattgaggagtgcatggtgcacagagggctctttttttagttttcatttttatttt

SEQ ID NO: 610177 - DNA, 548 bp, Homo sapiens
tggctgccttgcccatgaaatcttggtaattgataacttctccttttcttgaagccagggagggaggacacgcaggtggccctggcagggctgggctagctcttccttgctgctggagcactcattgatgcgttaatatagccaggtacaaggactatgtggcgaggtggagagaagccggagcctgggagctcagccactagataaccccgaagttggcaagtctcattcttggctgcctccctcctcccctcagaaagtaaggtggctcccaggagctgttgggcagggaagaccaagatatatggcgcttccacgtgggggctgctgtcttctcttgaccctctattccagtcaatgtttagctatcagccctccaggcaaaaaaacaaaacaagcacaaaccactttgatgtgtagcatttgacttccacggtataaatacttccagcatggctgagtttaagccayggacatgacgctgtgtgcatgaattgaggagtgcatggtgcacagagggctctttttttagttttcatttttatttt

SEQ ID NO: 610178 - DNA, 585 bp, Homo sapiens
gaatagtgctgcagtgaacatacacatgcttgtatctttatttttaaaaatctttttttttgaagacagggtctggctctgttgcccaggcaggagtacagtggcattatctcagctcactgcaaccactgcctcccaggctcaagtgatctgccctcctcagcctcctaagtagctgagaccacagggacacaccattacacctggctaattgttgtattttagtagagatgggatctttctatgttgcctaggctggcctcaagtgatcctcctgccttggcctcccaaagtgctgtgattacaggtgtgaaccaccatgcccagccagagatgctmaattcctggtgagtgcagctgaggggctagggccctctctaccaagcccctacccattagatgcaggctctacctcaagtacagcaggccacaaatactggggtccccattacccttgccccagctcacttggaaggctgttccacactggggagagatgatctgacaagaccagaggctaccaccctgtccagcacccagacgagtggctcagagaggctgcccagggaggacgcagcctgtgca

SEQ ID NO: 610179 - DNA, 528 bp, Homo sapiens
ggaagctctacatttggcacttgcccacacactgtccaatccaatgcttttcttggctcattttaatctgtattctttcctcataataagcggtaaccacaagtataacagctttctgtgaggtctatgagtcctaccaaatgatcaaaactgaggctgtttttgagaactcctcaaacttgcagctagtatcagaaatgagggtggtcccatgggggctgtgtgcccttaaacattgyagttgtccaaattaacacaaagtccacgagaaaaaagagctccagggcactccttaaaggaactgactttatttgaagcagaatgtggggaaaatgcatgtctaagagactcttgaagatgatgcctctcttaattaagaacaacaagctaaatcatagtccaactggttcaccagggggaaccagggaaagagacagcaaagaagagctctcgtggagtcagaacagacctcaaaaactggcctcaataactacccctgccagaatttaattggatcagactgctagg

SEQ ID NO: 610180 - DNA, 419 bp, Homo sapiens
aagcttgttgctatttggcttttcactgattctgggacagaaagacgtgattcctgaagtggagtttatgcccataaagctggctctaaaaactctaaattgagtagaacaaggcctggtacacggtgcatacagaaagatccttgttgaatgaatgaatagaccatataatcaaagggcamgcttcaggatgttgtttttcttcaatgaatttctcttaacgtaaaacgtaaatgaaggcgaaattctctcttcttaagtaaactaaacttggaatattcatgagagtttatttgacagggtgtggttccctgctctcttcttctttgtgcctccacatgttcacccctggcatgagagagcctgcatattagcaagatagagttgggtttctgtgtaggatgtttacgaacgggaac

SEQ ID NO: 610181 - DNA, 574 bp, Homo sapiens
ggattcctgacccacagaaatcatgagataatacatggcattgtttaggcaactaagttttgggttaatttgttatacagaatagataactaatgcagtacttttctgtgacttcttttgcttgacaaaatatgatttatccatgtttttgtgggyagaagagatattctcaaagagcttattaaaagcattaaacctattaagatagtcaaaaatttcagtataagagaaagcagcaatacagagaggtaaattgagcactgaagccacataagccctgcatttgctggacggggtgatggggagcttcagtggtgatggtatgggacagaaatgaaggtcaggaagagtctaatagatgaacattccataaggccggggtcccaaaaggtttctacatcctcagggtaaccgtggtccagaagaaacatgctcccggactacaaggaaatgcaccttggcactgagcagaggaggtggtggtgggtggagatggccagagaaccgtcctatgggtttatcaacacaggccagggtggggtgtcatggcagaccaaattcacttcacctgcat

SEQ ID NO: 610182 - DNA, 515 bp, Homo sapiens
  misc_feature 226: n = A,T,C or G
ttcaagcccaggtgtatggagtctttaaggccatgcttttaactgtaacaatgcactgcccccttttggcattttggagcattgtcactaggccctggttaattcaactcttaagtcggtatattctagaaytgaaagccccaagaagccacgcttcagttctagcgctccacatttggccctggctgtgaaaggacactgggaatggaattcaaccaggactccncagggttccagggtatatatgtctcagggtctctcaccccatctgtttccatggatcctttgtagcctccagatcataacgtagtgtcctgttttaaagagaagggccagctgttgaaatggcctgatccggcagtgtcctggagagtaagcatgacctgattaagatcctagtcaagataattgagagagagagagtagtgtttgtcttcttgcaatttcctcatgaaagatagagccccggaaattggcttcaaggctttcctgggaagtgcaaacccattaagagg

SEQ ID NO: 610183 - DNA, 555 bp, Homo sapiens
tgtggttcgctgggagcacagagaggaaggaaagggactttaaaaacatacatacaaaactgcttaacttatggccagcccagttagaaggtatggcccaggaggccgggatctttgctgtgtcccaagaacaagaacaactccaggccctcaggaggttgctccgtgaggcaggcgatgagtgaagccactgaaggarggaagaaaggaatgagtgactgaaactgacacatgcagtccaaggaccttcttcccttcagctgaggaggccttggtctgctcccaccccaggagactggtcccctaccccactgcctgtgcccagctaagtggacccatcctccgcctctcaccttaagtcccattttgtcacaggagcacaggagtttcctgaccatccctccccactgcaagtctgatctcttgccaccttcctgctcaccctgtgacacacagaggatgcctgtattcagggcaggcagcacgacatctgctgagttcaccactgagtccccagagccttgtacggagcctgatggagccggtgctcaatcc

SEQ ID NO: 610184 - DNA, 533 bp, Homo sapiens
caataaatgataaaaatcactgtcaacaacagtagcagtatttaatgctactgatgtagcaataatgtagtaataatgataaactaacagaggtaataataataagaaaatcgaccagtgtagcatgcacagttggttgcatagattaaacgaggaattgcaaactatggcctacaggccaaatccagctcaccacctgtttctgtgcagygcatgaacgacaaggtcttttacattttttaagggttgagagaaaaaatcaaaagaagaacacaatttcacgacaggcaaaaagtattccacattcagtcatcagtgtccgtaaataaaatttattggaacactggctgcccagtcatttacattttgtctgtagctgtttttttgctgcaacagcagagttgaatagtttcaacagagagcatgtggtcctcaaaggctaaaatatttactctttggccctttacagagaaagtttgctggcccctggattagatcctcctctcttgcctcctccctgccatcattttagg

SEQ ID NO: 610185 - DNA, 533 bp, Homo sapiens
caataaatgataaaaatcactgtcaacaacagtagcagtatttaatgctactgatgtagcaataatgtagtaataatgataaactaacagaggtaataataataagaaaatcgaccagtgtagcatgcacagttggttgcatagattaaacgaggaattgcaaactatggcctacaggccaaatccagctcaccacctgtttctgtgcagcgcatgaacgacaaggtcttttacattttttaagggttgagagaaaaaatcaaaagaagaacacaatttcacgacaggcaaaaagtattccacattcagtcatcagtgtccgtaaataaaatttattggaacactggctgcccagtcatttacattttgtctgtagctgtttttttgctgcaacagcagagttgaatagtttcaacagagascatgtggtcctcaaaggctaaaatatttactctttggccctttacagagaaagtttgctggcccctggattagatcctcctctcttgcctcctccctgccatcattttagg

SEQ ID NO: 610186 - DNA, 564 bp, Homo sapiens
tggtatgttagaaggtgataagctatggaacattttcataggtaaaaatccatgtaaaaatctatggagaaaaagagacagagaatggaaaagaggaatgtcaagggacaggattgcaatcttaaaaagggtgtctaggcctcattataaaggtaatattaaaagcaagattgaaaaagktaagtgagttatcctagtggattatctgagggaagcatgttccataaagcgggaagatccatttcaaaggccctaggtagtagtaatgtgcttggcaggtccaaggcacaccaaagaggtcattgaggctggaggtacataggtgacaggaagaatatagaaaatgaatatggagcaaggtgagggagagcctataggtctatgtaaggactttggtttttaccaagtgtatcataagaagcccttgccccagaagttcatgaaagctcagcatgaagtagaacataaactagaaaacatattctagaatactggttctcaaatgaggattattttgcttcccaggggatgcttcacaacgtctggaaacatttttggttgtca

SEQ ID NO: 610187 - DNA, 583 bp, Homo sapiens
acatatacacatacatctttacccatatctatacttagatacatatgtatgtatgtacttatataagtatgtatgcatgcatctattttttgagctgtatgtggcaattctacctactgtaccaaaatatttgctcaataaatatcctcrtagcatagataagaaacaattatagttaacacaccaatttatactatgcatgtggatatttctaaagtacagacaagtaatttttgctattaagctgtttatcatagcttgccccacagtcattttgtttgtttttgagatggagtctcacttcatcacccaggctggagtgcagtggtgacatcccggctcactgtagcctttgtctcctgagttcaagagattctcctgcctcagcttcccaagtagctgacactacaggctcgtgccaccatgcctggctaatttttgtatttttttttttaaatagagtctgggttttaccatgttggcctggctggtctcgaactcctgtccccaggtgatcctctcacctcggcctcccaaagtgctgggattacagatgtgagccatcacgtctggccctcacaat

SEQ ID NO: 610188 - DNA, 429 bp, Homo sapiens
aacaaacaggtatgaggattaggattagaggagtgtcctgamaactcactctcaatactgggaaattaagtattttagggagctatgtatccacgttctatgtaatccttcttgttagcatttaagactcttccagagatgatgagtttactaagaaaacaccataagaaatgaacactaaagcctccagaaaacattccctgaggagacaaaatctatgttgaaaaggactactgggctcaataataatctgttagttaatgtctggattgcaaaatatgtggcccactaaaggtcacttagccctggtgctgactggtttgaaccaaaaatatgaaatgattcaagcaggaagtggaggccttgagtgaacctcagctggtcaactctttaacttttccaggcgggcctagcatttagtggagcagg

SEQ ID NO: 610189 - DNA, 558 bp, Homo sapiens
ggcataaagattcagttgcaaaaaagacaagcattatctttgctgttaaggagttcagaatcgaaatgggatgtcagaatataaacaataacataaaataatcataaaaattacaaaagcaaagaaagtattataagacagtctctatgtgttgtattggtcaggggtgcaacttagtcagagtcaggaggtacctctctgaagaagtgatattgaagctgaaggatgaatagacattacctgagaagagagaccagccttagcaaagttytagagaaagacaaaacgtcactgtgttcagggaactaaaaagggcaagcatgagtagagtgaagagaacaaaggaaaagttattcttgtttgagattgaaatggtataggttgttagagaccaaagccaggtagcttgggaggacacaaagaacagggaaaggcgaagactcaattcaagttaagatggtcactatggcctcaaaaaaaaaaaaaaatggatgagagcagagcaatgaaggctgaaccagttaggatgatctgctgctgtaccccaagtaagtatcc

SEQ ID NO: 610190 - DNA, 684 bp, Homo sapiens
  misc_feature 119, 131: n = A,T,C or G
aatataaaataaaataaaaaggacgactgctaatactgaaagcaaagggcaaagtgctgagggaaacaattgaaccttgagtcaggacatcggctctagtcttatctctgccacaaatntgctgggggacntaggacaaattcctctcactccctggcccttgtctcttcacctgtgaaattaaattttggacatgaggttctgttttctaagatcttaaagctgtaatccaaagtacgtgaacatttctggaccaaaaactgctagcaggtaacaattgttattttgattagaaaagggcactgaatccttctgcttaagtcgtataggaaaaggtgtgcaaaatttggaattaaaaaaatctcagttcaaattttttctctgacccaarttaattaaataaatgctgtttatttagcagttaccttgcaccaggtgtggtgctgagtacaggacaagagactcacctgaaacaatctcttgtctttgcaatttaggcgaaagaataaagaataggacatcaacaaagaatctgggtataaattatttacaagctgtgaaagagatatttcggtcatattatcacaccttaaaaaatcacctttcatctgtttttttcatgattccacttttgactctggcttacacacatcttgacttacaaaaagctcagggcaagctcaa

SEQ ID NO: 610191 - DNA, 684 bp, Homo sapiens
  misc_feature 119, 131: n = A,T,C or G
aatataaaataaaataaaaaggacgactgctaatactgaaagcaaagggcaaagtgctgagggaaacaattgaaccttgagtcaggacatcggctctagtcttatctctgccacaaatntgctgggggacntaggacaaattcctctcactccctggcccttgtctcttcacctgtgaaattaaattttggacatgaggttctgttttctaagatcttaaagctgtaatccaaagtacgtgaacatttctggaccaaaaactgctagcaggtaacaattgttattttgattagaaaagggcactgaatccttctgcttaagtcgtataggaaaaggtgtgcaaaatttggaattaaaaaaatctcagttcaaattttttctctgacccaaattaattaaataaatgctgtttatttagcagttaccttgcaccaggtgyggtgctgagtacaggacaagagactcacctgaaacaatctcttgtctttgcaatttaggcgaaagaataaagaataggacatcaacaaagaatctgggtataaattatttacaagctgtgaaagagatatttcggtcatattatcacaccttaaaaaatcacctttcatctgtttttttcatgattccacttttgactctggcttacacacatcttgacttacaaaaagctcagggcaagctcaa

SEQ ID NO: 610192 - DNA, 684 bp, Homo sapiens
  misc_feature 119, 131: n = A,T,C or G
aatataaaataaaataaaaaggacgactgctaatactgaaagcaaagggcaaagtgctgagggaaacaattgaaccttgagtcaggacatcggctctagtcttatctctgccacaaatntgctgggggacntaggacaaattcctctcactccctggcccttgtctcttcacctgtgaaattaaattttggacatgaggttctgttttctaagatcttaaagctgtaatccaaagtacgtgaacatttctggaccaaaaactgctagcaggtaacaattgttattttgattagaaaagggcactgaatccttctgcttaagtcgtataggaaaaggtgtgcaaaatttggaattaaaaaaatctcagttcaaattttttctctgacccaaattaattaaataaatgctgtttatttagcagttaccttgcaccaggtgtggtgctgagtacaggacaagagactcacctgaaacaayctcttgtctttgcaatttaggcgaaagaataaagaataggacatcaacaaagaatctgggtataaattatttacaagctgtgaaagagatatttcggtcatattatcacaccttaaaaaatcacctttcatctgtttttttcatgattccacttttgactctggcttacacacatcttgacttacaaaaagctcagggcaagctcaa

SEQ ID NO: 610193 - DNA, 434 bp, Homo sapiens
aagcttgtgacccagctcctggctgctagagcagatgtcacacaaaaaaggcctggaagttgacaggctggctcctaggaggaagtcaccccctacagcactaactcctgcccagmgcctaaaggaaaggcttggcatgcaagagtttttgaagtcttcacgtgccacatttgctgcttgccttcttcggaacaagatactctcctgatctttgccttaatattctgctacaaacacctgaaaaccttcaagccttcaacctgtaacccatagcaaaggtcagaaaacagagaaaacagtttccaccccagaatccaaatggacagttgctgctgctggtctgtgatactggctctgacttccgagaccacagatcctaacattctgtactagggagcaagatagtcacagatactcaaatcctcttggggttc

SEQ ID NO: 610194 - DNA, 434 bp, Homo sapiens
aagcttgtgacccagctcctggctgctagagcagatgtcacacaaaaaaggcctggaagttgacaggctggctcctaggaggaagtcaccccctacagcactaactcctgcccagcgcctaaaggaaaggcttggcatgcaagagtttttgaagtcttcacgtgccacatttgctgcttgccttcttcggaacaagatactcycctgatctttgccttaatattctgctacaaacacctgaaaaccttcaagccttcaacctgtaacccatagcaaaggtcagaaaacagagaaaacagtttccaccccagaatccaaatggacagttgctgctgctggtctgtgatactggctctgacttccgagaccacagatcctaacattctgtactagggagcaagatagtcacagatactcaaatcctcttggggttc

SEQ ID NO: 610195 - DNA, 434 bp, Homo sapiens
aagcttgtgacccagctcctggctgctagagcagatgtcacacaaaaaaggcctggaagttgacaggctggctcctaggaggaagtcaccccctacagcactaactcctgcccagcgcctaaaggaaaggcttggcatgcaagagtttttgaagtcttcacgtgccacatttgctgcttgccttcttcggaacaagatactctcctgatctttgccttaatattctgctacaaacacctgaaaaccttcaagccttcaacctgtaacccatagcaaaggtcagaaaacagagaaaacagtttccaccccagaatcmaaatggacagttgctgctgctggtctgtgatactggctctgacttccgagaccacagatcctaacattctgtactagggagcaagatagtcacagatactcaaatcctcttggggttc

SEQ ID NO: 610196 - DNA, 434 bp, Homo sapiens
aagcttgtgacccagctcctggctgctagagcagatgtcacacaaaaaaggcctggaagttgacaggctggctcctaggaggaagtcaccccctacagcactaactcctgcccagcgcctaaaggaaaggcttggcatgcaagagtttttgaagtcttcacgtgccacatttgctgcttgccttcttcggaacaagatactctcctgatctttgccttaatattctgctacaaacacctgaaaaccttcaagccttcaacctgtaacccatagcaaaggtcagaaaacagagaaaacagtttccaccccagaatccaaatggacagttgctgctgctggtctgtgatactggctctgacttccgagaccacagatcctaacattctrtactagggagcaagatagtcacagatactcaaatcctcttggggttc

SEQ ID NO: 610197 - DNA, 506 bp, Homo sapiens
atatatatgtatatgtatcttcatatatttatatatggtgcatatacatttgtgcttgcatatatagtgtgtgcatatatatcaatatgctaaaatgcacaccatttaaaatgctgtaaagaacaaagtattctctcttccctcrgccctcaaagtgctctccccagagtcaactgctgttagcagtcacttgcgttcatctgcaaacatttcatagtcatctgtacatatttttaaatgaggaaagtaaaattaagaaggaaaaatatgacttgcccaaagtggggtgacaatgacagagatttttatggctcctgtactctcagtcgtgctcttttcccagaaacttttaatggcattgcctggctcaagagactagtctagaaaacttatgttggttacatgcagcctcaagagaactataccttgcaaaaccaacaaagagctaaaagaaagacatgatagggacagagggtgctaggaggcagatcaaagaacttcacagg

SEQ ID NO: 610198 - DNA, 506 bp, Homo sapiens
atatatatgtatatgtatcttcatatatttatatatggtgcatatacatttgtgcttgcatatatagtgtgtgcatatatatcaatatgctaaaatgcacaccatttaaaatgctgtaaagaacaaagtattctctcttccctcagccctcaaagtgctctccccagagtcaactgctgttagcagtcacttgygttcatctgcaaacatttcatagtcatctgtacatatttttaaatgaggaaagtaaaattaagaaggaaaaatatgacttgcccaaagtggggtgacaatgacagagatttttatggctcctgtactctcagtcgtgctcttttcccagaaacttttaatggcattgcctggctcaagagactagtctagaaaacttatgttggttacatgcagcctcaagagaactataccttgcaaaaccaacaaagagctaaaagaaagacatgatagggacagagggtgctaggaggcagatcaaagaacttcacagg

SEQ ID NO: 610199 - DNA, 506 bp, Homo sapiens
atatatatgtatatgtatcttcatatatttatatatggtgcatatacatttgtgcttgcatatatagtgtgtgcatatatatcaatatgctaaaatgcacaccatttaaaatgctgtaaagaacaaagtattctctcttccctcagccctcaaagtgctctccccagagtcaactgctgttagcagtcacttgcgttcatctgcaaacatttcatagtcatctgtacatatttttaartgaggaaagtaaaattaagaaggaaaaatatgacttgcccaaagtggggtgacaatgacagagatttttatggctcctgtactctcagtcgtgctcttttcccagaaacttttaatggcattgcctggctcaagagactagtctagaaaacttatgttggttacatgcagcctcaagagaactataccttgcaaaaccaacaaagagctaaaagaaagacatgatagggacagagggtgctaggaggcagatcaaagaacttcacagg

SEQ ID NO: 610200 - DNA, 506 bp, Homo sapiens
atatatatgtatatgtatcttcatatatttatatatggtgcatatacatttgtgcttgcatatatagtgtgtgcatatatatcaatatgctaaaatgcacaccatttaaaatgctgtaaagaacaaagtattctctcttccctcagccctcaaagtgctctccccagagtcaactgctgttagcagtcacttgcgttcatctgcaaacatttcatagtcatctgtacatatttttaaatgaggaaagtaaaattaagaaggaaaaatatgacttgcccaaagtggggtgacaatgacagagatttttatggctcctgtactctcagtcgtgctcttttcccagaaacttttaatggcrttgcctggctcaagagactagtctagaaaacttatgttggttacatgcagcctcaagagaactataccttgcaaaaccaacaaagagctaaaagaaagacatgatagggacagagggtgctaggaggcagatcaaagaacttcacagg

SEQ ID NO: 610201 - DNA, 512 bp, Homo sapiens
ggagtcaggggctaggcgtggtggctcacacctgtaatcccagcactttgaggaggtcgaggcaggcggatcaagtaaggctgggagtttgagaccagccttgccaacatggtgaaatcccatctctactaaaaatacaaaaattagctgggtgtggtggtgggcacctgtaatcccagctacttgggtggctgaggcacaagaatcacttgaactcaggatatggaggttgcagtgtgctgagatctcaccactgcattccagcsggggcaacagagtgagactgtctcaaaaaacaaaacaaaacaaaaaacaaggagtcagtattaggagaccaagtaggcaattagcacttactaatcagcctagtattccagaagaggaatatggtctatcagaaacaggaggcaggactctgagacaccaggtgaggctcagtcctgcagtacgtcaagctgggcaggtaatttagagaaagacccagggttgacatctgaggcaccaggtgaggg

SEQ ID NO: 610202 - DNA, 512 bp, Homo sapiens
ggagtcaggggctaggcgtggtggctcacacctgtaatcccagcactttgaggaggtcgaggcaggcggatcaagtaaggctgggagtttgagaccagccttgccaacatggtgaaatcccatctctactaaaaatacaaaaattagctgggtgtggtggtgggcacctgtaatcccagctacttgggtggctgaggcacaagaatcacttgaactcaggatatggaggttgcagtgtgctgagatctcaccactgcattccagccggggcaacagagtgagactgtctcaaaaaacaaarcaaaacaaaaaacaaggagtcagtattaggagaccaagtaggcaattagcacttactaatcagcctagtattccagaagaggaatatggtctatcagaaacaggaggcaggactctgagacaccaggtgaggctcagtcctgcagtacgtcaagctgggcaggtaatttagagaaagacccagggttgacatctgaggcaccaggtgaggg

SEQ ID NO: 610203 - DNA, 576 bp, Homo sapiens
gcgtaaaaataacgttatctcatagataaacagagaccaaagagcaaagagatcaagagatttgcctttgttcaacagcctgttagtggtggagccatttcactatcaatgtcttgtttccacagcctttcacctataactcaatggggttgatagcttaatccttttcagaaatgagggaacatgggaaatattataaatacatggatacatcatgacttgacgaatgagtctcccgttttgatatagcatcatcaggtttagaacgctaaaaccacatgttaaggatgctggaaaatctggatgatgaagttacacctctaatcatagaatagaattcctggaatggacatttactccaattgccacaatttataggtaaggaaacagccctggagatgtgaacatgctagaatgtcagagagctggcctgaccctcagcagccgtttggttcattcctttctgactgccartctttcttgtgacaccttcaaaatttttccaaatctgcataccttttatataattcatttcatcccgtttttttcctaagttggcccacattttaaacttaa

SEQ ID NO: 610204 - DNA, 628 bp, Homo sapiens
atatagttttgtgaatatgtttcaagttgtaaggtatcacacaaatttaaggcattacaattggcattaatttatccttattccaccctttatccctcttaaatccagaggatttaaagagctaaaaagaggctggctgaggcctgactttactctttcttctccttctgttctatgcatataatttctttccctgcttgtccacctcacctgccatttctagaatttccrtctgggagagggaactgataggaaggaggccaatgtcagccttgaatatttcggccttgaaatattccaagttgtatgttgatcttccttctcagagccttgtacatttgcttgaataaacacacttatgcagaattcatattcaaatatgaatagaaccacacttacatgtagcacggatatacacaaaatcatacattttcaagcatactaagaaactgaggcatacatctgtagataaacaatcatgtatgtatgttagttcctcacttatccacagtttcactttcccaggtttcatggtcagttatggtctgaaaataggtgagtacagtacagtaagatattttgagagagagaaagaaagagatcacattcacataacttttattacaat

SEQ ID NO: 610205 - DNA, 351 bp, Homo sapiens
tgtgaacactgtacgaaaaggcaaaggatgtctattgtgctatcttttgtgcttgccctaattcagaatctcctatgggttaacaagaagggaagctggcctctctgtaagcacagatttaaggtttctggggcaagtttattgggtatccagtggattgaagatgaattacataagagacattgtttgrtgaaaaactacttcttgtttgaaaaaaaaaaaaagggagaggtggtctaccttaatagagtacttgacaaaattttcatgcaggaaactgaaatttagaacataatggcatagatgcagctagtagccattatcctaagcaaattaacaaaggaacagaaa

SEQ ID NO: 610206 - DNA, 629 bp, Homo sapiens
ataccatgagttctcactttataagtaggatccaaacatggagtacacatggacataaagatgacaaaaatagaccctggggattactagagaggggatagagagaaagcagcaagggttgaaaaactaactattgggtactatgctcactacctgagtgatggtatcgattgtaccctacacctcagcattacgcaatataaccatgtaaatccctgaatcaaaaataaaagttgaaattattttaaaaacctaatgaaattctgtaagaatactttatgcttataaaatatattttataaaaatttaaatatatacagcatattaatatttattatcacatttaatccagcagaataagtttcatcatttccattgatcagatatgaaaactaagattaagggagatgaagtaatatgcctaaggttacatggttataaakgttgggggtaaacttggctcaggtcttctgaccccaacaggactctatgcactataccactgcctttgaattgttccattactcctttgttacatcctatctatatccaaattagagtataataggtcgtatgctcactcttctacagaaatgtctgctctaaaaaggatttttatactgtgacct

SEQ ID NO: 610207 - DNA, 629 bp, Homo sapiens
ataccatgagttctcactttataagtaggatccaaacatggagtacacatggacataaagatgacaaaaatagaccctggggattactagagaggggatagagagaaagcagcaagggttgaaaaactaactattgggtactatgctcactacctgagtgatggtatcgattgtaccctacacctcagcattacgcaatataaccatgtaaatccctgaatcaaaaataaaagttgaaattattttaaaaacctaatgaaattctgtaagaatactttatgcttataaaatatattttataaaaatttaaatatatacagcatattaatatttattatcacatttaatccagcagaataagtttcatcatttccattgatcagatatgaaaactaagattaagggagatgaagtaatatgcctaaggttacatggttataaaggttgggggtaaacttggctcaggtcttctgaccccaacaggactctatgcactataccactgcctttgaattgttccattactcctttgttacatcctatctatatccaaattagagtataataggtcgtatgytcactcttctacagaaatgtctgctctaaaaaggatttttatactgtgacct

SEQ ID NO: 610208 - DNA, 551 bp, Homo sapiens
cattttatcatatgtaaaatgtaggtaataaaatatccaatatcgtgcttgctgcagtagcacatacactaaaattggaaggatacagagaagatgagcatggcccctgcacaaggatgacacacaaatccatgatgcgttccatattttcatgatctatgcagcaaatcaccatggcacacatttacttatgtaataaacctgcatgctctgcacatgtgcctctgaacttaaaagttgaaaatacaaaaaataaataaaatatccagtatcattytaaatactccatatcattggggagactgtctggcagtcaagatgtccagaccttccttagtcatggcccagattttgacaactgcattctttttcttggctcattgacccttgagcaaagtgatgtagaaatagggggaaatctttagagtgcatggattcccatggtggaacctagtaaataaggtcaagtgctttatgctgtctttgtttttacactgctttctagcctactttcccacattctttgtaagcctaattctctaacgctccca

SEQ ID NO: 610209 - DNA, 551 bp, Homo sapiens
cattttatcatatgtaaaatgtaggtaataaaatatccaatatcgtgcttgctgcagtagcacatacactaaaattggaaggatacagagaagatgagcatggcccctgcacaaggatgacacacaaatccatgatgcgttccatattttcatgatctatgcagcaaatcaccatggcacacatttacttatgtaataaacctgcatgctctgcacatgtgcctctgaacttaaaagttgaaaatacaaaaaataaataaaatatccagtatcattttaaatactccatatcattggggagactgtctggcagtcaagatgtccagaccttccttagtcatggcccagattttgacaactgcattcttttycttggctcattgacccttgagcaaagtgatgtagaaatagggggaaatctttagagtgcatggattcccatggtggaacctagtaaataaggtcaagtgctttatgctgtctttgtttttacactgctttctagcctactttcccacattctttgtaagcctaattctctaacgctccca

SEQ ID NO: 610210 - DNA, 599 bp, Homo sapiens
ctttgccctcttttattccctttcacrggaagcacaaccatctaacattatgttgtctatctgattgttctcatcgtattgttcatctcctgtattccattgcaagtttgatgggtttgcccactgctttgtctccagcactcagaatggtgtctggcaaatggttggtgctcaataaatatttgctgaatcactaactgattgaataactgattaaatgaaggtttacttaagtccaaattgtaggcatttcctgccaagtgctgtgggcattacaaagaaaaatatgatgcagctccagacttcaatggactcacagtctagagtaagagtttagataggagcaaagctaacactatctcaaggggccataaaataggcttagaaaatatgccctgtggttcagagaaagcagagatcaagtctggattcaggaaaggcttcccagaaaaggaagattttaaagtgggtcttggaagatgagtaaggtttagatatgtggaaaggggaagaaaaacatgtcctaaggagaggacaacgtgagcacgtaaagagtggaaaacaaactcagattagctggtgagtggtgggagtggtga

SEQ ID NO: 610211 - DNA, 434 bp, Homo sapiens
tctagaaaaaaaaatattaagcagtataaggggatttgaggcaaataagtgaggctggagagctctacatggggcaatcaaggaagactgccctgaggaggggacatttaatcagagatctgaatggagtgattaaagcatgaaaaggacttgggctgcactgaccaatacggtagtcactagccatacacagttatcaaacacaagaaatgtgaatagtgtaaattgagaagtgtggtaaatgtaaaayatatactaaattccagacttagtaccaaacaaggaatgtaaaaatatcaataataggtaaatatatattaaaattttaaacattattttaaatacgctaagttaaataaaactattatcgaaattaaattcacttgtttctttttttaatgaggctactaaaaactttaaaagtacatatgtgg

SEQ ID NO: 610212 - DNA, 587 bp, Homo sapiens
gtacaggagttctcattttttcacatcttcaccaacacttattattactttctggtctgtaaaatgtggtaatcacttttaatcatagcagaagcttgcatttataaaatgtattaaaataaagatacgcaatggtagtcaaattatacaaacctaccaacctttagttttctggtctttaaaacgaagataatcgcatgtgttttgaattactgaattaagctaacttacgtaaaacgtctagtctagagcatcatcattacattccataaatgagagctatgatgaggattgaaaatgtggatagaatgaagatgataatatgtatctcaaagtattgtattgggattaaatgaactggcatttgtaaagcttttaggacagtgtctggaaagtagcaagtgcaatgtaagtttctgttaaataagaacctgatttaaaacaggaatattatgyatgctaagtcctagatagttctactgtaatatcctccaagcacttccaatccaacgtgtcaaaaaccaagctgtgagggaccattttgtggtggactgggcacaaactcttgtagactccatcaacacacc

SEQ ID NO: 610213 - DNA, 620 bp, Homo sapiens
agatggaagtgtaaaacagtcataattgacgcaaattaagtcaaaagaaattggtgtttggtcagtgagaagcaactgacatatgttgataccctcacactggcctttcatcaaacagtgacttaccttccaacatcacccaactatttcattgttcatgtgctgagtttcccaaaggtcatcttgagttcttgcaaaatatayatatgtgtgtatacacatatatacatatacacacacacacacacacacacatatatatacatgcttttcccctttttcctcaacacctaaaaatcctccgtatccttgaaggattagttcaaatgctgtctccgccagaaatcatccttttatttacccagagctgctttgatttttgccttatccattttctaatttttcctaataatttacctgtatgtctattgtaaatttatcttttctttctcccttccagggtgttttggctcctgtttattcccaagtctgattgtctgaaataccctcaaagatcctttcactgtatttctgttttcttatgttagccaaagaatacttacattcaataatcctatttagtggagatatataaatgttaaaaacaactgcagagggag

SEQ ID NO: 610214 - DNA, 620 bp, Homo sapiens
agatggaagtgtaaaacagtcataattgacgcaaattaagtcaaaagaaattggtgtttggtcagtgagaagcaactgacatatgttgataccctcacactggcctttcatcaaacagtgacttaccttccaacatcacccaactatttcattgttcatgtgctgagtttcccaaaggtcatcttgagttcttgcaaaatatatatatgtgtgtatacacatatatacatayacacacacacacacacacacacatatatatacatgcttttcccctttttcctcaacacctaaaaatcctccgtatccttgaaggattagttcaaatgctgtctccgccagaaatcatccttttatttacccagagctgctttgatttttgccttatccattttctaatttttcctaataatttacctgtatgtctattgtaaatttatcttttctttctcccttccagggtgttttggctcctgtttattcccaagtctgattgtctgaaataccctcaaagatcctttcactgtatttctgttttcttatgttagccaaagaatacttacattcaataatcctatttagtggagatatataaatgttaaaaacaactgcagagggag

SEQ ID NO: 610215 - DNA, 620 bp, Homo sapiens
agatggaagtgtaaaacagtcataattgacgcaaattaagtcaaaagaaattggtgtttggtcagtgagaagcaactgacatatgttgataccctcacactggcctttcatcaaacagtgacttaccttccaacatcacccaactatttcattgttcatgtgctgagtttcccaaaggtcatcttgagttcttgcaaaatatatatatgtgtgtatacacatatatacatatacacacacacacacacacacayatatatatacatgcttttcccctttttcctcaacacctaaaaatcctccgtatccttgaaggattagttcaaatgctgtctccgccagaaatcatccttttatttacccagagctgctttgatttttgccttatccattttctaatttttcctaataatttacctgtatgtctattgtaaatttatcttttctttctcccttccagggtgttttggctcctgtttattcccaagtctgattgtctgaaataccctcaaagatcctttcactgtatttctgttttcttatgttagccaaagaatacttacattcaataatcctatttagtggagatatataaatgttaaaaacaactgcagagggag

SEQ ID NO: 610216 - DNA, 620 bp, Homo sapiens
agatggaagtgtaaaacagtcataattgacgcaaattaagtcaaaagaaattggtgtttggtcagtgagaagcaactgacatatgttgataccctcacactggcctttcatcaaacagtgacttaccttccaacatcacccaactatttcattgttcatgtgctgagtttcccaaaggtcatcttgagttcttgcaaaatatatatatgtgtgtatacacatatatacatatacacacacacacacacacacacatatatatacatgcttttcccctttttcctcaacacmtaaaaatcctccgtatccttgaaggattagttcaaatgctgtctccgccagaaatcatccttttatttacccagagctgctttgatttttgccttatccattttctaatttttcctaataatttacctgtatgtctattgtaaatttatcttttctttctcccttccagggtgttttggctcctgtttattcccaagtctgattgtctgaaataccctcaaagatcctttcactgtatttctgttttcttatgttagccaaagaatacttacattcaataatcctatttagtggagatatataaatgttaaaaacaactgcagagggag

SEQ ID NO: 610217 - DNA, 617 bp, Homo sapiens
tttattaccccatctttaaatagggactcataatctaagctctgcactctactatctgatttttaaaaggactttactaatctggatttgcatcctaaattacccacctatcctacaggaaattcccattacttcccttaagwtcatatggtaatttgcaattgataaaatgcccgtttattgactcataataagctccaccaaccaactcattttgagaaagatttcacattcattgactcataataagccctgccaaccattcattctcactttctctctttttgtcctcaatcgtggtgtgagaatcagacttctattgtactcatatgtacttttttattttctattttagctctcagcttacctgttaaagtaacagtgcagctactttagaaagtgatcaccttcccttttcctttcacactgttttattaagttaactaactgcccctcccccatgccaacagatagatgcatggagaaacagactaagtaagaaaatgaaccctgggacagagaactcagataatagcaaaaaaaaaaaataaaaaaaaaaaaaaaaaaataagaagctttactttgtagaatgctagctcaaaagtaaaacagagagc

SEQ ID NO: 610218 - DNA, 536 bp, Homo sapiens
actgcccctcccccatgccaacagatagatgcatggagaaacagactaagtaagaaaatgaaccctgggacagagaactcagataatagcaaaaaaaaaaaataaaaaaaaaaaaaaaaaaataagaagctttactttgtagaatgctagctcaaaagtaaaacagagagcccaaggtatatgactaactctcaagtttttcccaaatggagtcctattcctatgkgctgcctctgcaaaagtgaaagtattttaggattttaggactggactaaatagatagatattcatcagatttacattgatgttgttttcatggaaattgaatacgtacttaccacctaaaatgccagcttaaggaaagtccacagtgtttatatcatggcagaggtaaaaaaccaaattcagggaaatatatctttgaatggtccactgacgaataatgagaaataaataaatttgaacataaaggactaagtttcaatgttgtattcaacctcaatgatagaaataaaggtacctaccccaccactcct

SEQ ID NO: 610219 - DNA, 620 bp, Homo sapiens
aaacaacttatctaggaaattacatttttcacaatggcagcaaaaactcaggttactctatgtctgccatcccctttacctactctagtcttcttatgcagattgaggaatgaggaagagggatgctagtgttcctaataggagggttgcttgctggttccttgcaagatctagaggtcagacatgaaggaacgtggccccaaagttggctattcttaggtttctatttagaatataagtgatgggatattttatctttagctttgagacttagatacaatttagacaacacaaataaaaatttcatcaaacatcttattatagcaatatttagtccagtttggaaaaatagcactgaaaattacaggaggacattttctgagggatattgatagtgggagtgatttgacagaaactctagtataattgttagcgtggaaagacttaaagatatcataaaaggacagagcacagggaaaaaaagataatyagaaattctggaaataaacacataaaccaaaaacaataatatatttaaaatatgaagctaactaaaaaaaatgaagctaactaaagcatgacataattttgagctattttatgtttttttattagcagag

SEQ ID NO: 610220 - DNA, 658 bp, Homo sapiens
gggtgctaggcaaaatggtaaccaacaatggaaagaataacaatactacctctctctcatattagtttgagaactgaatgccttaagacacaagaaatccttgatcctttattccatagctgggtagctattgcacccttctgaacttcagtttccttttctgcaaaatgagaataataaataccagcacataataaagctttaaaaggcatgcctgtgtggcacatagtaggtacttagcgaaaagagactatgaacatagcagaaataattatcttcttttatgctttcagaagtagaaaatgcygaatcctcacaaaaaattttgagttagagatgctggacgaggcataaaaaaactgagagttgcttcattctctctttcctctgggtctgcatccttctttgcaatagcttgtcaggaagcctgctatcctttggaagcacaggacggaagagagtgtgtgtttgcagagataacatggagcgagttcaggggttactaattgggtttctgcttacctttcatattcattcagaatcccaaccagaacaggtgttacagcagcctccctccatctttctccatcctctctcccatctgctgacagcacgcatgtctcttccaaagtcacttccccacttaaattgtaagtct

SEQ ID NO: 610221 - DNA, 658 bp, Homo sapiens
gggtgctaggcaaaatggtaaccaacaatggaaagaataacaatactacctctctctcatattagtttgagaactgaatgccttaagacacaagaaatccttgatcctttattccatagctgggtagctattgcacccttctgaacttcagtttccttttctgcaaaatgagaataataaataccagcacataataaagctttaaaaggcatgcctgtgtggcacatagtaggtacttagcgaaaagagactatgaacatagcagaaataattatcttcttttatgctttcagaagtagaaaatgctgaatcctcacaaaaaattttgagttagagatgctggacgaggcataaaaaaactgagagttgcttcattctctctttcctctgggtctgcatccttctttgcaatagcttgtcaggaagcctgctatcctttggaagcacaggayggaagagagtgtgtgtttgcagagataacatggagcgagttcaggggttactaattgggtttctgcttacctttcatattcattcagaatcccaaccagaacaggtgttacagcagcctccctccatctttctccatcctctctcccatctgctgacagcacgcatgtctcttccaaagtcacttccccacttaaattgtaagtct

SEQ ID NO: 610222 - DNA, 568 bp, Homo sapiens
tctctctttcctctgggtctgcatccttctttgcaatagcttgtcaggaagcctgctatcctttggaagcacaggacggaagagagtgtgtgtttgcagagataacatggagcgagttcaggggttactaattgggtttctgcttacctttcatattcattcagaatcccaaccagaacaggtgttacagcagcctccctccatctttctccatcctctctcccatctgctgacagcacgcatgtctcttccraagtcacttccccacttaaattgtaagtctaatcagaaactgatgtggctgcaaaactagggagagacaaacatgtccgtgtcgcctatgaagatattttgagattggatttgatagtacaataaaagtccatacaaggagtgtttaactctctcctggaagtggagtctgacagccctgaccccctacgtggcccacatagttaccccttacagtctgatactggttcaggggatttagaaaatgaagcccaattgcaaagctttttagtctaagaattgcttccatgcagtgcagatcatttaatccttccca

SEQ ID NO: 610223 - DNA, 568 bp, Homo sapiens
tctctctttcctctgggtctgcatccttctttgcaatagcttgtcaggaagcctgctatcctttggaagcacaggacggaagagagtgtgtgtttgcagagataacatggagcgagttcaggggttactaattgggtttctgcttacctttcatattcattcagaatcccaaccagaacaggtgttacagcagcctccctccatctttctccatcctctctcccatctgctgacagcacgcatgtctcttccaaagtcacttccccacttaaattgtaagtctaatcagaaactgatgtggctgcaaaactagggagagacaaacatgtccrtgtcgcctatgaagatattttgagattggatttgatagtacaataaaagtccatacaaggagtgtttaactctctcctggaagtggagtctgacagccctgaccccctacgtggcccacatagttaccccttacagtctgatactggttcaggggatttagaaaatgaagcccaattgcaaagctttttagtctaagaattgcttccatgcagtgcagatcatttaatccttccca

SEQ ID NO: 610224 - DNA, 574 bp, Homo sapiens
ttttatctcatttaagcagttagtgatacatttgatcaaccattctgcttcyaaggagattttacttgatctcatctttggtgatgctaagacaaattattttttgtaatgggttgagctacaaatttgaggtggaaataagatatttttaattggtttaatgatttacactagttcccagttgccttaataacatgaattctaacttttgagacttctctcttcttctgatttgttcaaaacctacaaggctcaagtgtcctaaaaagaaaagttagtccaaggtataatataggtctgaaactcttccaaggggttatttgttactaacttcatccttagagggctgtgagcatttttctttgaaatcctagaagcaatctctctgtctttctttctcatctaccctatttttctcccttttttaaatctttccttaaaaatgctatgttaaaatttcccaaccttcaccaaacttgaagctaggcagaggcaaggaaataccataggttgacaaattagataagctaaactcttattcttagggagaaagtcctttatctccgatgtatct

SEQ ID NO: 610225 - DNA, 658 bp, Homo sapiens
tttaatcagctgaaaagacaatgtggttttattaagcaccaagattcttctagtgtaggaagtggctccttaactttgatccctgctgattccacaggttgataaatgtcatagtcaattattaaagcagagtctcctttataccattgaattgagtattttggtgcagtagtaacagaaaaatgcacactctacattytgctccccatctcgtctcatcttaccttcaaactgactggcttttctcaccaaatcaggaaatttatcattaaaaatggtgtttgaaccagaacactgggtatcatggtgacaatgttggtaattagtatgagctgtagccagttatggtagtggctaagataattatctgtggagtcagaaggatcttctgactggattttaaattccagttctgcctcttgcttgccgcagggctttgggcgcataacccaaacaaaatctcagcttcctcattggtaaatggagaaaacactgagaaggtatacatagagtgagtacctggcacacagttaactccacattactggtagcagtaaagagtaatggtagaagcaacataagtgacataccagaaggagcaaaattttgaagttcagacagaccctgtttatacctggaatcaagatgcttcatgatt

SEQ ID NO: 610226 - DNA, 578 bp, Homo sapiens
actgactggcttttctcaccaaatcaggaaatttatcattaaaaatggtgtttgaaccagaacactgggtatcatggtgacaatgttggtaattagtatgagctgtagccagttatggtagtggctaagataattatctgtggagtcagaaggatcttctgactggattttaaattccagttctgcctcttgcttgccgcagggctttgggcgcataacccaaacaaaatctcagcttcctcattggtaaatggagaaaacactgagaaggtatacatagagtgagtacctggcacacagttaactccacattactggtagcagtaaagagtaatggtagargcaacataagtgacataccagaaggagcaaaattttgaagttcagacagaccctgtttatacctggaatcaagatgcttcatgattttggacaagtcatttgatcttgctaaacttcaatttttctcatctgtaaaatattgacaatcatatctaactttataatgttgcatttgagattagctttggtgcttgtcaagtttcctacctagagcttgacttatagaaggtactaaa

SEQ ID NO: 610227 - DNA, 568 bp, Homo sapiens
agtatttcacttgattttaaaaaacattttaatccatttatttcctgataaacatttatttctagcttttggttgttatgaataaagaagctatgaatatttgcatagaagtctttgcatggacataggctttcatttctwttgagtaatacttaaaattctaatgactgggttacatggtaattgcatgtttaacttttagccacctatgttttcagttgtgcaattcatcaactcattgtgggtttaccactcacagatgattgtcctgaacttactaccacactgccttgcctcactacaggagtctaaggaaggaggaatacacctatcttcacctcatcatgcctttgtctttcaacatgttggttctgtttctctttctgaaagcttctttctttctcagcaaggctcttattacaagatggccaggttactaccatatcaggttaccaccttactagatcagcaactgcaaggaaaataaagggggaaaaaaagcaccttttttctttctatatgttttagcaaagtccattgttcactttcacttaactggggttataag

SEQ ID NO: 610228 - DNA, 548 bp, Homo sapiens
cttcgttttgtatctagagcctctcaatgccaaattgaattatgccactctaccacgctctcctctttctctcttccagtgggctgggatgctcattatcatgttaacataatgcagacttcaaatccatctgtccctcaatatcagtaggatataaaaggaggctttaccaaaataaaggtaaaatatgtcaggataaatcctaaagttttatcttccactaattgtctattagtcaatgattctacaactcttacttctstaactcttatattttgctgtaggagtctctaatattaagattccaatgtgccttgattcttgagacagcacgtgctcttgagcaggccatactctcatcttgttaccaagttcagatcatgaggttgatacatcccttagggcagattgacattttcatgtttctagttagcaaaaacatgaactggggatgctgcattaacaagcaaataaatttatggtatgccagtgctaaaatgaatcttgctatttgtcggcagcttttaaaaagtgaaatatgtatgttg

SEQ ID NO: 610229 - DNA, 614 bp, Homo sapiens
ttgaaggctcatacactgaagtagttcataaatcttttgtgaaaatttggtgttcaggaaatatgatcacatagaacttcctttcttgatgcttgatgtaaagagtcactgaaatagcataatattgggcacttctaatcattcctttattatyccattagattttcaacagctcaaagttatagatagggcaagaatgttctccattttatgaatgaggactcggtagctcaaatgtatgaaacaactttccctaagtcacttaatatgagatggtgctatgaaaatcaaagggaaagtaattagatatgaaataactctgaaaactagaaaaaatacattaattaatgttgttaaaatgtccatactactaaagcaatctacagattcaaagaaactcccatcaacatcccaaagacattttttacagaaataaaagaaacaatcctaaaatacacacggaaccaagaaagaaatggccaaataaattttcagcaagaaggataaagctggaggcattctattttctgacttcaaaatatattacaaagttacagtaatcaaaacagcatggtagaccaattcatcagaataaagagtccagatatatatat

SEQ ID NO: 610230 - DNA, 614 bp, Homo sapiens
ttgaaggctcatacactgaagtagttcataaatcttttgtgaaaatttggtgttcaggaaatatgatcacatagaacttcctttcttgatgcttgatgtaaagagtcactgaaatagcataatattgggcacttctaatcattcctttattatcccattagattttcaacagctcaaagttatagatagggcaagaatgttctccattttatgaatgaggactckgtagctcaaatgtatgaaacaactttccctaagtcacttaatatgagatggtgctatgaaaatcaaagggaaagtaattagatatgaaataactctgaaaactagaaaaaatacattaattaatgttgttaaaatgtccatactactaaagcaatctacagattcaaagaaactcccatcaacatcccaaagacattttttacagaaataaaagaaacaatcctaaaatacacacggaaccaagaaagaaatggccaaataaattttcagcaagaaggataaagctggaggcattctattttctgacttcaaaatatattacaaagttacagtaatcaaaacagcatggtagaccaattcatcagaataaagagtccagatatatatat

SEQ ID NO: 610231 - DNA, 470 bp, Homo sapiens
ctcatagaagcagagagtagaatggtagtttcctgggcctaaagggagggaaaaattgggagtctttttttaaacatgcttgagtatagcataaatgatcattatttttattggtacaaagtccacaagaatttaagtaagatgctaaagaaatgtcccttctgaagtgtggcagatttcaaaatgtggccacaaatttctctcatccttttatgcaatgtaacactgaccatttttctagcaggaggtagagtctatttctgcaccctttgaaatgttgaacccttttaaatatgatctagctttgtgacatgcttggaccaatagactgcatgatgtgcaaattctaaagaggcccttgagacagctggcggcttccattcacaatctcttataacccaattgtcatgtatggaagsctgagctagccatgtggacaggttgcatgcaaaatcaaagtgatgtagttt

SEQ ID NO: 610232 - DNA, 561 bp, Homo sapiens
accttgttttcaatgcagtagacactaagtttttgtttttattttctgaaagcagaaagagtgggaagaaacaattcaaacatggaagctagagagaaaatacaaaagacaggaagaaaggaaggaaggggaaacattaaaatgcattttattacattacaggactcatttaagacataacggaagcttcattatttgttcactttttgcctttaagtgctgattcctataaaggaccaaaaatattaaaacataaagaattaggagcctgccgaatatcaaattggggatgaaaatgtcaaatctctcaaattagaaagaaattcaggaagaaggcagtatctgttctaaagggttacatgtttgaaatcacatttgtaggtgtacatttmtcctacaaagcaagacgccctggagtgcaaacacacttttcccagcttcaggaaaaccactcagcatgccacagctcctggaggtgcccgttcccaccattatcactgcctccccgcagcacagcctctccaggacagatgctaacaatcgatagcaaacacctcacac

SEQ ID NO: 610233 - DNA, 353 bp, Homo sapiens
ggaaaaaaatgctttgcttactttctcttgctttctcttatggaggatataaaactaatcagtgatcgaatccaaagtctctgctaggcaatcaacattatgacctaagtcaaatgcttcatctctcacagctcacattcttcatctaccaaagaggtatattcctatttattgcctaatttctatggtttttgaaaaaataaatgacgaatcaaaatkttgcgccttgagtccaaatgtataggcagacaggaagctggtatgtgatgagagagggggagcccttctcttgaaaccacaaatttaatcagaatttcttcctgtcttcaccaagctgtaggctgaagcagccc

SEQ ID NO: 610234 - DNA, 599 bp, Homo sapiens
tctctccttctggacacatagaaggactatccattctggtcccttctagttaggaagggccatgttgctaattctggtcaatgagctgtcaggagaagcacatgtcatttgaggatataaagcatttccctgctgatgcagcagtctcyaatacccacttcaactctccaggtcacatgtttccttcttcctctattggagtttcatgttgagaaagtggagccacaaaaccaaagccacctggatagctgagctatgaccctgaagaggggagtagatttggcatgaatgagaattaaacttttgtggtgttaatctgaagacctttgcaagttatttgagggtgcaatgtaacccattcttacctgacaaatgtagatgctcctatgaaaaattacaaacctacttttcagtctctgaagcccccatcacttagggtttctgcatccacacgttccagaggtttttccagttcttgctacgtagtgccctcctagcgatcccctacagagcattaatagtggctctctaatcatctttggaagtgcacttaaattttagttcctgatcaatactcctccccacaatgcctcacttct

SEQ ID NO: 610235 - DNA, 603 bp, Homo sapiens
atctttctttgagagatgaagaaactgagactcaatgagatgacttacttttcttttgtctcagctcctcagacactatgtggatcttctttctttttcaattctcttttctcccataatggagacatgatcacacatatctggtccttctctccttctggacacatagaaggactatccattctggtcccttctagttaggaagggccatgttgctaattctggtcaatgagctgtcaggagaagcacatgtcatttgaggatataaagcatttccctgctgatgcagcagtctccaatacccacttcarctctccaggtcacatgtttccttcttcctctattggagtttcatgttgagaaagtggagccacaaaaccaaagccacctggatagctgagctatgaccctgaagaggggagtagatttggcatgaatgagaattaaacttttgtggtgttaatctgaagacctttgcaagttatttgagggtgcaatgtaacccattcttacctgacaaatgtagatgctcctatgaaaaattacaaacctacttttcagtctctgaagcccccatcacttagggtttctgcatccacacgt

SEQ ID NO: 610236 - DNA, 603 bp, Homo sapiens
atctttctttgagagatgaagaaactgagactcaatgagatgacttacttttcttttgtctcagctcctcagacactatgtggatcttctttctttttcaattctcttttctcccataatggagacatgatcacacatatctggtccttctctccttctggacacatagaaggactatccattctggtcccttctagttaggaagggccatgttgctaattctggtcaatgagctgtcaggagaagcacatgtcatttgaggatataaagcatttccctgctgatgcagcagtctccaatacccacttcaactctccaggtcacatgtttccttcttcctctattggagtttcatgttgagaaagtggagccacaaaaccaaagccacctggatagctgagctatgaccctgaagaggggagtagatttggcatgaatgagaattaaacttttgtggtgttaatctgaagacctttgcaagttatttgagggtgcaatgtaacccattcttacctgacaaatgtagatgctcctatgaaaaattacaaacctacttttcagtctctgaakcccccatcacttagggtttctgcatccacacgt

SEQ ID NO: 610237 - DNA, 659 bp, Homo sapiens
acaaacctacttttcagtctctgaagcccccatcacttagggtttctgcatccacacgttccagaggtttttccagttcttgctacktagtgccctcctagcgatcccctacagagcattaatagtggctctctaatcatctttggaagtgcacttaaattttagttcctgatcaatactcctccccacaatgcctcacttcttttgccctcccctgcatcactgaaataaacaagctgggctattcccaggttgctgtacttgccagcttcctatccattccactccagacccactgacgtagcaatgacaggaaagactagagtcagaagatctgttgcaaatttgaagatttttggagctgaaagaaggcgtccagtggtagaattaggaacataggggatggaatttgcctcctccaatgcttgcatatcctctacagcagagtaggagggttacactcaagtttcccagagaaacacctctaggggcagggcattcactagctcacaaagcatttcttccatctttgaacaatctgactctagataattatttgtcttgtgcctgtgtattccacacaggttcctgactgtactacttgagagtcaaacagagaaatccattcttcttccccataacaattctttaagaattta

SEQ ID NO: 610238 - DNA, 659 bp, Homo sapiens
acaaacctacttttcagtctctgaagcccccatcacttagggtttctgcatccacacgttccagaggtttttccagttcttgctacgtagtgccctcctagcgatcccctacagagcattaatagtggctctctaatcatctttggaagtgcacttaaattttagttcctgatcaatactcctccccacaatgcctcacttcttttgccctcccctgcatcactgaaataaacaagctgggctattcccaggttgctgtacttgccagcttcctatccattccactccagacccactgacgtagcaatgacaggaaagactagagtcagaagatctgttgcaaatttgaagatttttggagctgaaagaaggcgtccagtggtagaattaggaacataggggatggaatttgcctcctccaatgcttgcatatcctctacagcagagtaggagggttacactcaagtttcccagagaaacacctctaggggcagggcattcactagctcacaaagcatttcttccatctttgaacaatctgactctagataattatttgtcttgtgcctgtgtattccacacaggtycctgactgtactacttgagagtcaaacagagaaatccattcttcttccccataacaattctttaagaattta

SEQ ID NO: 610239 - DNA, 604 bp, Homo sapiens
cataaaactaactggagattatcagtactcacagaagtgttcatggcctttgacccagtaatcccactcaggcattccagattaagaaggaattcaaatgaatgtaaagccaaaataattagtcttaaaaaatgcataaaatgttcagaggagcaactgcagtaaaaaactggaagcaaactagtgagtaatctatgaagtgttaagttttgtagtaatgtcaaagrtattttacagatagtaacagtgatacataaggaacaatatggagttatccttaaccagatactataaggtgtttttgttgttgttgttgttgagacggagtctcgctctgtcaccaggctggagtgcagtggcgcgatctcggctcactgcaatctccacccccaggttcaagcgattctcctgcctcagtctcctgagtagctgggactacaggcacgcattaccacacccagctaatttttgtatttttagtagagacagggtttcatcatgttggccaggattgtctcgatctcttgaccttgtgatccacctgcctcagcctcccaaagtgctgggattacaggcgtgagccaccatgcctggtttttaaaaa

SEQ ID NO: 610240 - DNA, 540 bp, Homo sapiens
acttattcagtattttgttttgtttttatttatatgtttatatatatttgagacaggatcttactctgttacccaggctgaagtggagcctggatgacagaatgagatctcagctcactacagttttgacctcccaggcacaagccatcctcccacctcagcctcccaagtagctggaccacaggtgcgtgccaccacactcagctaatggttgtatttttcgtagagatggggttgctcaggctggtctcaacttcctgggctccagtgatccatccgcctcagcctcccaaagttctgggattacaggtatgagacattatgcccaggcttttttgtttattaatataaatattttaactrtatattttctcttaaacttggtattagctgcttttcaccatttccaagtggattttcattatttatctttattacctgtttaactcacatgtacctgtgcatagtttggtagggtgggaggctattgagattcgctatgtagcctaacacttggttaattttttttgcagacattcc

SEQ ID NO: 610241 - DNA, 555 bp, Homo sapiens
tggctcactgcagcctccacctcctgggcccaagtgatcctcccacctcagtttcccaagtagctgggagcacaggtgcacaccaccatatccagcaagtttttaaattattttttgtagagactggatctccctatgttgcttaggctggtgttgaactcctgggctacggtgatcttcccaccttggcctgccagagtgctgggattacaggtgtgagctaccactccggcctatattttcacttcttctcacttgccttcccgccatccttctctttacaattggttgattacattttattagatctaatctttttatttctatctttgcatatatctctatgtatgctatttgaccagctatatgattctttctgaatccccagctctaaaaagaaaggctatcagcmtacagtcactaccatcactttcttcctcatttaagttttgatacttatattatttttcctttttatagttctattactataatgaccacagatttgatttttgttttcttagcctagagctagatggcttcaatggccactgc

SEQ ID NO: 610242 - DNA, 555 bp, Homo sapiens
tggctcactgcagcctccacctcctgggcccaagtgatcctcccacctcagtttcccaagtagctgggagcacaggtgcacaccaccatatccagcaagtttttaaattattttttgtagagactggatctccctatgttgcttaggctggtgttgaactcctgggctacggtgatcttcccaccttggcctgccagagtgctgggattacaggtgtgagctaccactccggcctatattttcacttcttctcacttgccttcccgccatccttctctttacaattggttgattacattttattagatctaatctttttatttctatctttgcatatatctctatgtatgctatttgaccagctatatgattctttctgaatccccagctctaaaaagaaaggctatcagcctacaktcactaccatcactttcttcctcatttaagttttgatacttatattatttttcctttttatagttctattactataatgaccacagatttgatttttgttttcttagcctagagctagatggcttcaatggccactgc

SEQ ID NO: 610243 - DNA, 555 bp, Homo sapiens
tggctcactgcagcctccacctcctgggcccaagtgatcctcccacctcagtttcccaagtagctgggagcacaggtgcacaccaccatatccagcaagtttttaaattattttttgtagagactggatctccctatgttgcttaggctggtgttgaactcctgggctacggtgatcttcccaccttggcctgccagagtgctgggattacaggtgtgagctaccactccggcctatattttcacttcttctcacttgccttcccgccatccttctctttacaattggttgattacattttattagatctaatctttttatttctatctttgcatatatctctatgtatgctatttgaccagctatatgattctttctgaatccccagctctaaaaagaaaggctatcagcctacagtcactaccatcactttcttcctcatttaasttttgatacttatattatttttcctttttatagttctattactataatgaccacagatttgatttttgttttcttagcctagagctagatggcttcaatggccactgc

SEQ ID NO: 610244 - DNA, 460 bp, Homo sapiens
ggttggagttacacaattgtgagtcaccatgtataagtggcaattaaaggcattgggactgaatgagattgccagagagaaagaagagggctgcatgttgagcagagaggaacttcagtatttatacactgggtcaarggagttaatcctgcaaaggagatgaacaatgaggtgtccagggttggattttactggtcaggagcaatgaaagaacaaatgaagaacagtgtacagaatactgattaagaaaaggatatttttcccttctcttgtctctgaccaacattggtattttcttactgccacactaacctatgttggtctagtcctttcctggagactcttctcagagaactctgtttcatgagattgctcagtgttcagaccatgtaataagcatttgtttttttttttttaattaacattgcaaatatgtttgcaataccagaattgcaagaaa

SEQ ID NO: 610245 - DNA, 606 bp, Homo sapiens
gcaatgtaaagtaacatattcacatgttccaaggattaaaacatggacatctttgagatgtcattattctgcctaccacattgggtaaaatactagaacagttagggagtaaccaagggcagagacagattgaattaatggacatgttttagagcgtgtctgttggtatggtcttcaagagaagaaccagcaaaaacaaaattatcaacagaaaagtagacgttgggataacaccttttagttagcagttgccacactttgcacatagagcaatcctctttgttcattcaatatttaaataaactaatgacactattaggcctgtcctgtcatctgtttcccaatctgggtagcagatgtaactccatcatttargtacttgaagttctatagcaaacagttgaaaactactaaggtaaaataaaactaggttaatagacagtttctaaatccagagtttcttgcctagagtatatttagggtccacaggagaatgacaataactatagcccaaccaaactataaaccaaattttgtcttctcagaaaaatgtttttgacttaaatagataaaactataatacatctacatcaaaacaagggcaag

SEQ ID NO: 610246 - DNA, 637 bp, Homo sapiens
atgaatcatctgtgagaaatgtgaaaattaagaaattgccctcactgacttacatttcaataagaaagacagacacatggaacaaaccattactctctagtttcaaatgtaattctgtaaaggtaaatccatggttctgtaggagccaaaaggatgttgaatcaaatttggacagaaaaactcagccaagttccataatgaaagaaatcttggccatgcttggtggctcatgcctgtaatctcagcacttcaggaggccaaagcaggcagattgcttgacctcaggagttcaagaccatcctgggcaacattgaaagactgcacttctaaaaaaaaaaaaaaaaaaaaaagagacaaaattagccaggcgaggtgtgcatgcctgtggtcccagctacttgggaggctgaggagggagattgacttragcccaaggaggccgaggccgcaatgtgccatgactgctccactgcactccagcctaggtgacagaatgagactctgtcacaaaaaagaaagaaaaagtctttctattatttttgaaagttccatagcaaatctccccgttattttgtgggctgtttctcccatggctcctcttagctccctgaatgcagggcattttagtcactgaaac

SEQ ID NO: 610247 - DNA, 460 bp, Homo sapiens
tctagtatttgatagcacaacagggtaactatagtcaataatttaactgtacatttaaaaataactaaaataatataactgaatcatttataacacaaagaataaatgcttgaggtggtgaatactccatttaccctgatgtaattttatacattatatgcctgtattgaatatccctataccccattaatatatatgcctactgtgtacccacaaaattaaaaattaaagttcaagaagtgcttgtaggccaactctgcagcagaacaatttctgccccaaattctacacttgcaaagtagacttgatttagrttgctcatgcttttactttaagttaggatctgatctgcacaggctccatgacaatgagattctaaattggccacgaactgaagagcacctaaggctacagtcaagcttacaagacttcagtgttgcaaatgctgttctgtagagtc

SEQ ID NO: 610248 - DNA, 591 bp, Homo sapiens
ttcttacataacaggcagttccattctgaaagatggctggagtgtgattattcctgctccctttaggattttttttttttttaagatagagtttccctctgtcacccaggttggactgcaatagcacaatcttggctcactgcaaccaccacctcccaggctcacgcgattcttgtccctcaacctcccaagtagctgggactataggcatgtgycaccatgcctggctaatttatttatttatttatttatttatttatttatttatttattttatttttagtagagacaggttttgccatgttggccaagctagtcttgaactcctggcctcaagtgatctgccggccttggactctcacagtgctgggattacaggtgtgagccaccacgcccggcctccctttagaatcttgattcaccaaaggaaagcacagaaatggtatggaaatcctcccttactacagagacagatccatttgttctgtccacaaaaaggctgcaaaggaggaccttatctgcctcagcagccttttttcacactgatcacctctttttagcaggaggcagttatgaagaatggggagagaa

SEQ ID NO: 610249 - DNA, 536 bp, Homo sapiens
gttctcttttccctgcagctttgtcagtatctgttttttttttttttagtttgtcttcttttaatcaagggtgaatcattgaatgagctacccccttcttcttttattgaaagatcatttatgtttaaaaaaaaaacttcttgccttaagagatacatattgtagtttctagaattagctacaaagttgtggcatcagttgcttcttcagtgatctttagtttttttcttctaataattgkaaaatacacacatgtcaatgggacatatccagactacttctgaatgtagctatgtagtagttttctaaatgattccctattgtctttcttccttttctttcaccttcgtccttagaagctgtcctaagtatagaacttccctcagtctggtagtctcattaaaaacaaagcctactgcctatgttcagggagctgttttattagaaatcagcatattgagtggcctgtttcaactcctggacttgacccaatttgtggttccattctttgcctagatagctacaagtacctactt

SEQ ID NO: 610250 - DNA, 536 bp, Homo sapiens
gttctcttttccctgcagctttgtcagtatctgttttttttttttttagtttgtcttcttttaatcaagggtgaatcattgaatgagctacccccttcttcttttattgaaagatcatttatgtttaaaaaaaaaacttcttgccttaagagatacatattgtagtttctagaattagctacaaagttgtggcatcagttgcttcttcagtgatctttagtttttttcttctaataattgtaaaatacacacatgtcaatgggacatatccagactacttctgaatgtagctatgtagtagttttctaaatgattccctattgkctttcttccttttctttcaccttcgtccttagaagctgtcctaagtatagaacttccctcagtctggtagtctcattaaaaacaaagcctactgcctatgttcagggagctgttttattagaaatcagcatattgagtggcctgtttcaactcctggacttgacccaatttgtggttccattctttgcctagatagctacaagtacctactt

SEQ ID NO: 610251 - DNA, 634 bp, Homo sapiens
ctgccctcctccttcttttcctggttacttaaatttcagcgtgctactttcttttgtttcatcttacagagctcattttccattttagtttctgccatttccttgctaggataatcgccaatcttctgtagctttaacccctaaaacccgaggtggtattacatatgttgcgtaagagctaagtctttcaccctggcatttgagtcaaaactctaagcattatatccttaaacagaggcttcttctattttgagacttctactacctttttaccaggtagacagaattctcctcactagactatggcttttgtacccttccttttccactacctggattagcctagtgcatccacagaaggtagctgaaagttcaaaatctattttgggcacagacaactatatcaatgatgcatatggaatctccttgacatattataagataaataacagaatataacatttaatgtgtactctttttttggttgttgttagaggcagggtctccctctgtcactcaggctgaagtgcagtggcatgatcaagctcactgcagcctccaactactgggctcaagcrattcttccaccttagcctcccatgtagctaggactacaggtgtgtggcaccatgcc

SEQ ID NO: 610252 - DNA, 587 bp, Homo sapiens
aagcaattcttccaccttagcctcccatgtagctaggactacaggtgtgtggcaccatgccagctacattaaaaaaattttttttgtagagacagggtctcactaccttgaccaggctggtcttgaactcctggcctcaagtgagcctcccaccttggcctctcaatgtgttgggattacaggcatgagctattgcacccagcctaatgtgtacttttgtgtggttctcattttttatttgtttttcattcaccttttctcaggttgaaaatgtgtacttttgatttgtcaggaatcagataggcactttacatttatcatctcatttagccctattagtatatacagtaggttttactaccccattttacacatgaagaaactaaagccaagaaatgaaaagtgacttgccctaggtcacttaacaatttagttgcagagtccagtctagaatagctaaaatgtcctgagcatttttawttattaggaattgttttcaaatattttgtgtgccttaactcattaatcctcccaataaccttatgagtagatattattatcatttccatcttacagaaaaataaaat

SEQ ID NO: 610253 - DNA, 584 bp, Homo sapiens
atatatagtatttcctctgcagatttaacatattttatttaaccagttccttttaaatggacatttgggttgttttcaatcttctatgatcacaagcaatggttttatacataatataattccatgcatgtgtagcataatataattccatgcatgtgtagctatgtatacatatacatagctataattatataaaaatatatgtctgcggtctctgtgggatattagtttatgatttctgagtgagagtggtatattagtccaatctcacactgctataaataactacctgagactgggtaatttatgaagaaaagaggtttaattgactcacagttcctcaggcataactggaagcatgactgggacgccgcaggaaacttacaatcctggcagaaggcaaaggggaagcaagcacctttttcacgtggtggcaggaaagagagagagagtgaggaggatcctatacttttaaatcatcagatcttgtgagaacacaagaatagcatgagggaaagccgcctccatgattcagtcacctccyaccaggtccctccccaacactgggagttacaattcaacat

SEQ ID NO: 610254 - DNA, 288 bp, Homo sapiens
cctttactaaccttaatgtcttaggcaagtttgttaacttctctgatcttcagttctttcatctgtaaaatgggcataataatgttcaccttgcatggtggtcgtaggagttaagtatggttctgaaaatgttagttctgtttctccaaaaaactattagcccttggaaaaagggyatctcatttatctctgtatacacagtatatttgtgatacagtttctatcacaatgttgtgcacacagccaacattcaataaatatatattgaatattgaatgagtgaatgaa

SEQ ID NO: 610255 - DNA, 596 bp, Homo sapiens
tttactgaggttgttctagaagcagctcaaggaacmagatcatggcagtaaaagggctgtgtgttttttttcttttctttcttggcacttttcatgtaaaaaggaatgggtaagccttctaaaatacttagtggagcaggaagggtttgcaggaacaaaattctgccctaaggatgctatgcaaaagccccaagggaactgatcgttttaagaagtgcagtgagaggggttgaaaggcttattccacccctctctgcatggtttctatactacgtattgactcagggctctcgccattgcctctagagtcctgatcccagactgttccagggagctaccacattgggtaaatgacaaaaacgagtaggaaaagagggaacagatgaaaagctaaaaggaattgtcattttagagatgaattattttcacattgagtattcagtactatgctgctcattgggtaaatgaaaaagaaggaaaagaaggaacagatgaggcgcagtggctcacgcctgtaatcccagcactttgggaggccgaggtgagcagattgcttgtgctcaggagttcaagacaagcctgggcaacatggcgaa

SEQ ID NO: 610256 - DNA, 596 bp, Homo sapiens
tttactgaggttgttctagaagcagctcaaggaaccagatcatggcagtaaaagggctgtgtgttttttttcttttctttcttggcacttttcatgtaaaaaggaatgggtaagccttctaaaatacttagtggagcaggaagggtttgcaggaacaaaattctgccctaaggatgctatgcaaaagccccaagggaactgatcgttttaagaagtgcagtgagaggggttgaaaggcttattccacccctctctgcatggtttctatactacgtattgactcagggctctygccattgcctctagagtcctgatcccagactgttccagggagctaccacattgggtaaatgacaaaaacgagtaggaaaagagggaacagatgaaaagctaaaaggaattgtcattttagagatgaattattttcacattgagtattcagtactatgctgctcattgggtaaatgaaaaagaaggaaaagaaggaacagatgaggcgcagtggctcacgcctgtaatcccagcactttgggaggccgaggtgagcagattgcttgtgctcaggagttcaagacaagcctgggcaacatggcgaa

SEQ ID NO: 610257 - DNA, 525 bp, Homo sapiens
ctcctaggctcaagcaatcctcctacctgtgcctctttagtagcagggtctacaggcatgcaccaccatgcctggctaatttaaaaaaaawtttttttttttttttttgtagatgcagggtcttgctgtattgcccaggctggtcttgaactcctggcctgaagtgatcctcccactttggccttccaaagtgctgagagtacaggtgtgagccactatactcagcccataatatttttgctactgtgaatagtgctgcaataaacatatgggtgcaggtatctttttgatataatgatttattgaagttacatgtttaatgacaattggctgtcagtagtataatatctggcagatattaaaagcacaatcatgctcacatatgtgcacatatactttaaaaattaatttattttgaagcaatttcaaacttaaggaaaagttgcaaaaacagtaaagaactactatgtctcctcacccagatgctccaactattcacatttcacatttacttcattgccttcc

SEQ ID NO: 610258 - DNA, 653 bp, Homo sapiens
accatggatagtaccaaacttcacatatactatgttttttcctatacatacatatgataaggtttaatttgttaattttagagacaggatctcactctgtcctgcaggctggaatgcagtggttcactgcagccttgaatcctgggctcaagcagtccttcyacctcagcttcctgagtagcttggactataggcatgcaccaccacacctggctaagtttctattttttagttttttgtagagacaagagctgtgttgcccaggctggtcttcaacttctgggctcaagtgatccttatgccttggtctcccgaggcactgggattgcaggtgtgaaccactgtgcccagccaatgtttaatttataaattaggcacagtaagagattaacaacataataaaataaaacaattataaccatatactgtaattaaagatatgtaaatatgatctctcaaaatattttattgtattgtacagcaggtaactgaaaccacagaaagcaaaacagtggctaaggagggactaccgtaatatctattcaaatcctccgctcatttttaaattgggttatttgtctttttgttgttgagttgtaagagttcttcacatattttggatagaagtcccttatcaaacatatgatttgcaa

SEQ ID NO: 610259 - DNA, 589 bp, Homo sapiens
tggttttctgcagagtattggaaagaagcggggtaccgtgaaagggtcaggtggagagggagaaaagctctcatcttctgtaggytggggccttgatactttgttttttgtaccttgaggaggattgaacctcacacaaaatggaaatgggctgcttccagccaggatcaaagtgagcaggtgaaaagatgagtgaaagaacgtaacattcgactgcctctgggatgacagtgtgccctttgcagtgagcttctactgccaggtttggaaggctctccagagtatttcccaccccagaattctagacccatgctgtccaatgtggtagctactggccacatgtgactgctgagtacttaaaatgtggctagtctaatttgagatgcattctaaacataagatacatactagatttcaagaacttagtataggaaacaaatgcaagtatatgattaataattttttatattgattatatgttgaaataatactttggctattgggttagataaaatatattaaaattaattctacctgtttcttttttatgtggcgattagaaattttaaaatgacacatgtggttcaca

SEQ ID NO: 610260 - DNA, 531 bp, Homo sapiens
ggagcagggtggggtatcagtggacggaaattactaagatgaagtatcaaaggggattttggctaaacttacttgacaggatttttgctgaaggcaggccaaggtggtaagatatcaggggtaggggataagaaatttggtcagataccaagcatagacagatactaagggtgaaagatgaggaatttgatcagaaatcaagggtgggaattttcaytaaaatgacctggctggattcttgttaaaactggactaaatgagccaatgtcaagggcctactcagaaagaggactcagaggagcctgacttatgtttcgtcaaagaagagtctttgtcatgggttagattctgggtgtgattgtatttgttgtatgctttgttatactccttggtataaaaaaccttgctactgctgaaagggagccctgggcagggcacagaatagcctgctctcatgcctggcattcagtctccattatgaggtattgatatgccctccctctgaaggctaggtccgccctcatgccactg

SEQ ID NO: 610261 - DNA, 527 bp, Homo sapiens
gtctacctaggcagctgggcaccaagcccaagacccagaaattctggttgtgcaggtagtgcatcctcgcaggctagactgagttggccagattaggggcatggctgttcctggccccatgagaccttgaggtgaagcagtaatgcctcacaggatggatagggttcttagatgaagaattcctcaatgaattagagttgttagataagctggaaagaaaaggagagatgtgaaatgggaatacatgcagtttctgtctcttggttcttggcctagttatttctagtaaaaagaatcagcttcatctttatcccaagtcytctgactcgtccttctggttcctcctagtctggggaagcacaatgcttttaaattccaggcccacagactagatgtaggtggtggcctttcctgaaaatgggttgccatgagagcagtctgcctgtgttctttaaggcattttcccacttttaggattaacttgagtactgggaaaataaaaggaggcagagtttagaagatttaga

SEQ ID NO: 610262 - DNA, 354 bp, Homo sapiens
attactcttcccaatcaaaattaaatttatccaaagagcatatgctatattcatccagttttaaatttaaatggggttgtcctcttatgcatataacctgattaatcttcctaaggcaacatctaaattgtgaagcatattgtgttggcaaaggtgtgagggaatatgcacttgtacgttgctggtgggatgggagtatamattggcataatctctaaggaaggtaattggcaaaatttatcaaaattacaaatatatatataccctttaagtcctcaacaccacttacaggaatgtatcctgcagacacattttcacatgtggaagtgacatatggacaaggctatttttgaa

SEQ ID NO: 610263 - DNA, 646 bp, Homo sapiens
ctgcttgggatcttttaggccctaagcttactagttgtagcttatgattaatttgagttagttttcatcttttttttcttggtatgtgccaggtactgttttaagtactctcatgtgcattgtataaaattcaattcttttattcctgtcactccaccaaaatagctttgatcagggccattagatgtccaccatattgccaaactaatggttcattttcagtcttctttttatcagtcagcaatttgacacagttgatgatcactttcctctttttattataacagctttattgagttataattcatgtgccataaaattcaccttaaagtcccttaaaaagtattgaatcgaatggtttttagtttattcatagttaygcagacatcatcaccatctaatttcagaacatttccatcaccccataagaaacctcttacccattggcagtcactccccacttctctttgcccccagcctctggcaaccattaatttacttcctgtttctatgaatttgcctattatgtacatttcatataaatgggtttataaaatatgtgcccttttgtgtctggcatgatgtttttaaggatgctgtagcatgtatcagtacttcatttctttttctggctgaacaatattta

SEQ ID NO: 610264 - DNA, 528 bp, Homo sapiens
attgccattacaaaggatgaattgtgatgcaaaaacacttggagatctgtctgagtgctctatagaagagataaccccttcctctattgaggagcccaaggaggaccgtattgatacaatggatgagcttcagtgtttggtagaaacggtgtcagaatatttagcagagaaggaagaggagattaatagatttggttcactttcaaaaactaaaaaatcacataaacaaaatagtactcttgatgcagaacagagaacgcctggggatcaaataccacctttaactattgtcaagaatgacaaggacacggccatctctttccctgagttgactggagtacaatgtgctgttggttctttgtttagttcactcacagaaaaagtgggttcaggcacaaagcatctaacaaactctgtggaaaagttggtttccttagttccagaaaaaacagaaactcttaatcaaatagaggcaattaattygggatctaaacccagagccatggcagtattggggaaggatctttc

SEQ ID NO: 610265 - DNA, 539 bp, Homo sapiens
aaaaattagctgggcatggtggtgggcgcctgtagtcccagctacttgggaggctgaggcaggagaatggtgtgaacccaggaggtggagcttgcagtgagccgagatcgcaccactgcactctagcctgggcaatagagcgagactccgtctcaaaaaaaaaaaaaaaaaaaatctgcatctatttgctctggttctcatctgtacaatggtgggacttgtcaaggcattatgtgttaaataccaatgagaaggatgaatgtaacttaggtgcactaggatggccttattaactcttgcttgggtgggcatcagagaaggcttcccagaactatgcyttggaggaagagttggattttcctctatggaaaggaggtgtgagatgctatttcaggctaatggaacagaatgagtaaataaaaatttggggttttgagtatgtgacgtctttgtgaaacaagacaattagattgtaggaatgtatatggggtcaagaaagagggcagaggagaggaatttggggatttgggccagatcat

SEQ ID NO: 610266 - DNA, 539 bp, Homo sapiens
aaaaattagctgggcatggtggtgggcgcctgtagtcccagctacttgggaggctgaggcaggagaatggtgtgaacccaggaggtggagcttgcagtgagccgagatcgcaccactgcactctagcctgggcaatagagcgagactccgtctcaaaaaaaaaaaaaaaaaaaatctgcatctatttgctctggttctcatctgtacaatggtgggacttgtcaaggcattatgtgttaaataccaatgagaaggatgaatgtaacttaggtgcactaggatggccttattaactcttgcttgggtgggcatcagagaaggcttcccagaactatgccttggaggaagagttggattttcctctatggaaaggaggtgtgagatgctatttcaggctaatggaacagaatgagtaaataaaaatttggggttttgagtatgtgacgtctttgtgaaacaagacaattagattstaggaatgtatatggggtcaagaaagagggcagaggagaggaatttggggatttgggccagatcat

SEQ ID NO: 610267 - DNA, 653 bp, Homo sapiens
aattttaaaagacatcaagagtttatgccagtgtaaatatggaataaggaaaaaatgaaattgagagaaagtaaaaagcagatactaaaatacaaaggctaaagagtatccctgaatagtttatgagaacagtgtctttcctcaaccagagacttcatagacagatgacagaggagcctagaatgtatcaagtaaaacaaaggcctcaggaaaacctcccatggatttcagaatcaacaggaggctttagaaaccttaaaaggaagaagccttaaatacatggctggcacagaaagtacacttgggaatgagaagaggcagtaggaacaagatcttagtctttatgagggtgttcctaggaagctttacaaattggatgtagttacttaaagataaatgtccaagacatttaggttgtcctgccatcattggttgtccaaatcccactgccttttaaggtctatctcaaatgttccttgttttatgtagcttttcctggtatctgatcaagagtgcgaaaagactcttcctccytggaattcctttaatcttatccctttttcaaggcccttcaaacagactcttttgattagagttatatatatgtttatgagactgcaaacttactgaaggagcactgtgctctcctcaga

SEQ ID NO: 610268 - DNA, 512 bp, Homo sapiens
aatacgtagaccagataaataaatacaaagctcaaagatagacccacttaagtacagtcaacatattttttggcaaatgtgcaaaggcaatttaaggcagagaagatggttgaaaaacaaatgatgaggaaacacttgatatccacacgtaaaaaacaaatataaagaggctcaacatacatctcaaactttacacaaaataaccaaaagagatcattgacttaaatgtaaaatataaaaccataaaacctctagaagaaaattaatgtaacctttggtttggcaaaaagatatttagttatgaaaccaaaagcaaaatctatamaagaaaaatatattgataaactgagctttattaaaattataaacctttattctttgaaaaataccattaagagattgaaaagaaagcccgttgtgatggttactattgagtatcaacttgactggatagaaagaggcaaagtattgatcctgggtgtgtctgtgagggtgttgccaagggagattaa

SEQ ID NO: 610269 - DNA, 622 bp, Homo sapiens
aaatccgaagttaaagtgactctattaaatacattttgagggaattttatttggcattgtgataagtgactccagtagagattttctttcgtatgtataaataaggtcaacacagagttacacaaggaawgcattcttaggtcatgtgtgtatgagagggcaggcaaataaacatctccttgtttgctgagagggagaaattgctatttattggcttaccataactacactctactttcatgaaagcattttgtaggaaagcagtctaatgaaatggttaggccaaattttcgattccaacacccttttatacttacgctattgtctctgataacattagattcacatacatgtgtgcttgtatatatacatgtatacacatacatgcattcaaatatgcacacatattcaccccacagggttcttgagatactaatggagggtaaagtgtgaaaaacctggagcctttgacaagaactctggaaaaggcttaaaagaggttggatgttgtggctcatgcctgtaatcccagcacttggaaaaggctgaggcattaaggatcacttgagctaaggagttcaggactcctccaggcaacatagtgggacttgtctctacaaaa

SEQ ID NO: 610270 - DNA, 465 bp, Homo sapiens
aatgacataccctacaataaaatgtaaataattccagtagtctcataaggttgtgttaagaattaattgagataatatgagtattaatataccagccattccataaatcctctctcagaaatggacatatccttgagaaatgacattaaatccaaaggcacacaaatactgcaataaatgctgttgacrttgagatactgtatattgaccatgtttattgtttgaccatttcttctcatctagaatcctactgtaatgcactagagaagtgtttaacttgattcagggaaacaccctcaaacatcataaaccaaaagagctgattccttctcatttgggaaggtcgcctgccaggtttcttccatttcttaacttcattgtcctcaaaagctttctcatctgggaattccatatggaaccacgaatggatttgaagtcttgcaagaagggtaatagaattgtcaa

SEQ ID NO: 610271 - DNA, 532 bp, Homo sapiens
ttgtattttttgagctatggttttgctctttcattcaagctggaatgcagtggtgcaaccatgcctcaccacagcctcaaactcctggcctcatgtgatcttcccgccttggcctcccaaagtgctaggattacaggagtgagctaccgcaaaactcttctattttagatctaatactataccatggacatctttctttgtcaatacatttagagttttccattgttgaccctatcataattcatttaacaatctccttttctcttcttgatgagtatttcaacttttttatgtttcatttacaaataatactgtactttatatctttgcatgtgtatctttatagagatgtgcaaatagtactataaaactaattttttgaaatacatctacttgctgaaaaaatgtgatttcattgtgtgctcctacctgtagtgaattagcatgtgcatttcttcacaacttactgattaactcattttataggcaaaatgtgatggaatttgytgctgtaatttccatgtccttcgca

SEQ ID NO: 610272 - DNA, 624 bp, Homo sapiens
cagtactcacttcctgacgactggtacctacatttgccttggtcctagcttttcagattgcagaatccagatatgttctttggaacagttcatatcttctacaggtctgaggcttcactgagtcctagacaatttccttaaaggaaattgtgagaaaaactattgagatggctcttccttcccaaacataaagacagagagagagagagagagagaaagttgctgctttgctcaacagcatctgcttggtgaagagcctcaagatctgactcgggcctcccagctcttaggaacccattctccactggcaggggtggcgtgtttaccctgtttttcatggaggaattggaccacaaacatttggggatgttaggttgagagctggaaaaccccaagcctctggctcaaaaacccagagcttgctaggagcacttgcaggatacgcccgtgtcctgtcacctgcctaaagaagcctttcgggccgggcacagtggctcacgcctgtaatctcagcactttggaaggctgaggtaggtggatcacctgaggtcaggagttcgagaccagcytggccaacctggtgaaaccccatctctactaaaaatacaaaaattagctggtacg

SEQ ID NO: 610273 - DNA, 603 bp, Homo sapiens
ttgttacctttaaatatggtcccatttactcaggaccaatattcccttatgtggagagcaggactagtgcccttgagttacttacggtgactcatctttgagtggggaatgtgttagtattttcagcaaatgttaagtgtgatgaaacatttgctgaactgtctccccgtttcgaaataagctaacagcactcaggggctctatttacagcaattgggtggagtcaggagtgggaacgcatcttgcactgtcaccttgattgacaatagctctgacctgtggaggatggtcaagtcctgtctcctataacgtggggcagtgatgggtcagggtcatggctcctgcatttgggtgaggccttctcatcacttttagacaagcaagttcagggtgaccgcaggcctccccacttccatcagtatcctcccaactccccctgacctctctcacgaagctccccaccrattcagagatccagtcctgaggggctaaaagaaacattcattaacctgtctagagagtcatgaataattcatgaattacattgaattcatccctagtataactatcttcagaaattcagacttggtaacccggtagccc

SEQ ID NO: 610274 - DNA, 593 bp, Homo sapiens
tacatatacacaatggtacatatacacaaagcactactatttcagccataaaaaagaatcaaatctgtcatttgcaacaacatggatggaactggaggtcattattttaagtgaaataagtcaagcacagaagtacaaacttcacatgttctcacttctttgtggagctaaacattaaaacaagtgacctcatggagatacagggtagaaggatggttactagaggctgggaagggtagtgggagtgtcaagggaagtggggatggttaatgggtacaaaaaaatagaaagaatgaaacaaacctagtatttgatagcacaacaaggtaacagtagtcaataataatttacttgcatgtgtaaaaataactaaaagaatataattggattgtttataacacaaagaaaggataaatgcttgaggagatggatactccatttactctgatgtgattattacacattgcgtgcctgtatcaaaatatctcacatagcccataaatatatacacttattatgtacccacaaaaattacaaagtaaaaaagcatttaaagtaccttcaascttcctgtaagcgtcaccaccatattc

SEQ ID NO: 610275 - DNA, 566 bp, Homo sapiens
ttttaccataaaatttacattgattgaaatgcacaaatctgaggtgtatgttctttgagttttgacaattgcatataycagtacgacccaagtccctatcaagacatacaacttactgttattccagaaagttctctcatgcccctttcctgtctaaagcactgctataatttcttttgtgtagtatctcatatttttaatgtgcaattctatgaaattagagcaatttgtaaaaaaattaggtattctttgtttgtttttaaaattaataaacataatttttaagagctaagttttgttcctatcaaaattgggtggaaagaacaggaagttccacgcccttcttctccaaacccctacaacctctcctcctccaccactatcaacatatgcaccagagtagtccatttcctacagtccaagaacctacagtgactcaccattatcatccaaagttcataataaacactagggttcactcttggtgttgtgcattcgatgggttttgacaaatgtatgaggacatggattcaccattatagtatcacacagaatagtttcactga

SEQ ID NO: 610276 - DNA, 566 bp, Homo sapiens
ttttaccataaaatttacattgattgaaatgcacaaatctgaggtgtatgttctttgagttttgacaattgcatataccagtacgacccaagtccctatcaagacatacaacttactgttattccagaaagttctctcatgcccctttcctgtctaaagcactgctataatttcttttgtgtagtatctcatatttttaatgtgcaattctatgaaattagagcaatttgtaaaaaaattaggtattctttgtttgtttttaaaattaataaacataatttttaagagctaagttttgttcctatcaaaattgggtggaaagaacaggaagttccaygcccttcttctccaaacccctacaacctctcctcctccaccactatcaacatatgcaccagagtagtccatttcctacagtccaagaacctacagtgactcaccattatcatccaaagttcataataaacactagggttcactcttggtgttgtgcattcgatgggttttgacaaatgtatgaggacatggattcaccattatagtatcacacagaatagtttcactga

SEQ ID NO: 610277 - DNA, 496 bp, Homo sapiens
cataaaaaattcattcttattggacactaacatgaaagccttatgttacgttttgtgattaagcagttttctcttacagcttatttacaagggaaagagaaaggaaacaagaaatagtttcaaaaaaacagcccaaatttcagtaatcattaaaatcaacacaattaaatactctttttttggaatgaaatttcgctcttgttgcccaggctggagcacaatggcacaatctcagctcactgcaacctgtgcctcccgggttcaagcaattctgcctcagcctcctgagtagctgggattgcaggcgcctgycaccacgcctggctaatttttgtatatttagtagagacggggtttcaccatgttgaccaggctggtcttgaacttctgacctcaggtgatccacccgcctcggcctcccaaaatgctgggattacaggcgtcagctaccactaccagcaatgaaatactctttttaaaagccttgagggaaccg

SEQ ID NO: 610278 - DNA, 496 bp, Homo sapiens
cataaaaaattcattcttattggacactaacatgaaagccttatgttacgttttgtgattaagcagttttctcttacagcttatttacaagggaaagagaaaggaaacaagaaatagtttcaaaaaaacagcccaaatttcagtaatcattaaaatcaacacaattaaatactctttttttggaatgaaatttcgctcttgttgcccaggctggagcacaatggcacaatctcagctcactgcaacctgtgcctcccgggttcaagcaattctgcctcagcctcctgagtagctgggattgcaggcgcctgtcaccacgcctggctaatttttgtatatttagtagagacrgggtttcaccatgttgaccaggctggtcttgaacttctgacctcaggtgatccacccgcctcggcctcccaaaatgctgggattacaggcgtcagctaccactaccagcaatgaaatactctttttaaaagccttgagggaaccg

SEQ ID NO: 610279 - DNA, 477 bp, Homo sapiens
atcaattcagcaagaagatataacagttctaaacatatatgtatccatcaccagagcatgcagatatttacagyaaatattattagatctataggaacagatagacttcaatacaacaatatttggggaattcaacaccccactttcagcattaggcagattatacagacagaaaattaacaaagaaacactgaatttaaactgcctgttagaccaagtggacctaacggacatttacagaacattttatccaacagctacagaatacgcattttctcatcagcacacagaacattctccaggatagaacatatatcaggacacatgaaaagtctcaacaaatgtaaaaaaaattgaaatcatatcaagtatctcctcaaaccacagtgcagtaaaactagaaattgataacaagaggaactttggaaactgtacaaatacatggaaagtaaacaacatgctcctgaatgaccacag

SEQ ID NO: 610280 - DNA, 477 bp, Homo sapiens
atcaattcagcaagaagatataacagttctaaacatatatgtatccatcaccagagcatgcagatatttacagcaaatattattagatctataggaacagatagacttcaatacaacaatatttggggaattcaacaccccactttcagcatyaggcagattatacagacagaaaattaacaaagaaacactgaatttaaactgcctgttagaccaagtggacctaacggacatttacagaacattttatccaacagctacagaatacgcattttctcatcagcacacagaacattctccaggatagaacatatatcaggacacatgaaaagtctcaacaaatgtaaaaaaaattgaaatcatatcaagtatctcctcaaaccacagtgcagtaaaactagaaattgataacaagaggaactttggaaactgtacaaatacatggaaagtaaacaacatgctcctgaatgaccacag

SEQ ID NO: 610281 - DNA, 476 bp, Homo sapiens
ggatgtcctccacggtgtagcggccccggtagtggtgcagcgcccgtggggtctccacggacagcaacttccccaggacgtttgtgcagagccagcgggggtccaggagcagcacgtcctgaactgtttcactttgcatgatgttgatctgcggggggacaacagaaagtcacgcttagggacagagccctggccaggtgcaccagccacttagagcactaaagggcctgatgccggcaayagaggctgagcagatgctctaaggagtgacccaaggccattccacgtggatgcgtctcaaaaaccaaacaccgagtggagaaaagcagcttgaaaatgtcagaatagagattctgaaaaacaactcccctgaagtcttcaaaaaggccagcgaaatgaaagaagaaaaaaaaatgggagatggcaaccaaatgcaatgagtgattttagactggattctgaatcccaaaataagt

SEQ ID NO: 610282 - DNA, 550 bp, Homo sapiens
acattttttatgaacctaaaagcacagttattttcatttctccatttttcaccaaatgatagcatctctttagtcttaccacatttatttagcacaaaaaacggtagtaggaacttttgcccataaaactctcaatgcggaaagctaagcagaaaaatatagggccaggtgtgatggctcatgcctgtaaacccagcacattgggrggctgaagcgggcagatcacttgaggtcaggagttcgagaccagcctggccaacatggtgaaaccctgtctctactaaaaatacaaaaattagcagggcatggtggcatgagcctgtaatcccagctactcaggaggctgaggcatgagaatcgcttgagcccaggaggcagaggttgcagcgagccaagattgggccactgcactccagcccaggtgacaagagtgagactctgtctcaaaaaaaataataataatgataataaataaaataaataaataaaataaaaaagagaaatacagtcctgggatcaaatcttaatgtcactagacattttcctgaag

SEQ ID NO: 610283 - DNA, 443 bp, Homo sapiens
caattaattcacaggattgttgtgtgaactgaatgaaacacacacatatgaaaacaaggtatcttgataaatcagtaacttttataacaccgttgtgccaaaaaaaagccttactttattactttatgtgcattgtctcattaatatcttctagtgtctgtgattgtcaggtcagcactgtcagccacttcaaagaagaagagaataggrgagatccgcttaaaagcacaaggttgagtcaggaagaaaatcgaatcgagaccgaggtctctctctggttgtctgtactagaactttgaggtttttatgttatggggattataattcaatgcgtgcgtattatggcaactacctgaaagattttgacttaaggctgatttcagtattagaccaaaccacaggcaacaagacatttccaacttaaatgttctgcaggtgaattc

SEQ ID NO: 610284 - DNA, 593 bp, Homo sapiens
gcactgcattctccctgattctctggtgtgggtgtgtgggaagggagtggcggctgtctgccccttctgtgctactgttaaccaagattcttctatgtcagtggctacagttcatgaaaattaggataagctcttttctcttctgctggctagcctctcttttaccaaaatatcagtgcgtgtgtctctatgtgtgtgcatttgctgtgcatgtgtgtatgtgtgtgtgttgcgggggtggtctgtgcttatgtttgcatcraggtggagggtagtgttagaggtatggggctatgaggggggacagcaccatccaaatcaaagagaaaaaaagaggaaagaagcaagagggtgcatcaatcagcacccccaaacccctccgaggggatcaagaataagcttgccatttccacaacttcaggttcctgggaggttgaacaaatagaacagcttggtcattctgagtacccagtgctaagaaaggagcaccagggctcacgggtttgcttaccagagtatcatcgcttctggcaacactcatgttacttctggacaggaatgacctggataatctttggcacagtgatatcaag

SEQ ID NO: 610285 - DNA, 464 bp, Homo sapiens
attgcactccagcctgggcgactgagcgagactccatctcaaaataaacgaatgaatgaattaaaagatgatttcagttttgcaagatgaagaaagtttctggagggcatggtgatgatggcacaacaatatgaatgtattgaatgccactgatctgtgcagttcaagttgggtaaagtagtaaattttgtgtttctctatattaccacagttttctttaaaaaaraaaaaaaaactaaaaagataaagctgaaacctaaaaatgtccaggtaacaataaagctggcagagtaatgtacaagactacctactgtatttagagcagctcagccaagcggagccccccagaaaaggggaacaggaaaagggattgattgctttttaaagaatttaatatttgttatttcaaaaaaaaaaaaactttaaagtggtcctcagagggggaagaagtgagagttctgttt

SEQ ID NO: 610286 - DNA, 569 bp, Homo sapiens
atgaacgagtgggtttttttgttgttgttgacgtttttttttctttttttagactgggtctcgctattgcccaggctggtctcaaacccttgggctcaagtaatcctcttgtctcagtctcctgagtagctccgactacaagtacacaccactgtgtctggctagtttgtgttttttgggttgagtactggggcagttgtcttttagacttgcttttaagcctcatctattgctcaaatataaagttttataaaggctctttagttcatgttaaatagattttgagtcttctaggaaygtttttggaattgtggactcagtcactcaatcaactaatgttcaccaactcctaatgtttcactccctcactttttcctccctccctcctttcttccctcgctctctctctcgtgactgtttcactcaggcaatgatcactttatgaacagaggaaaagagaatgagtatcatcatcaatattagagtgagtgtttaccagtaaattaggcattcgtggggactgttgttgaaatattgtttccaattagacccattcttggtatgtaggc

SEQ ID NO: 610287 - DNA, 555 bp, Homo sapiens
actgggtccaggtgttgggagatgaagctggtcaagaggtagattttcaggataaaggagccactgggagtgcagtgaacagactgttttggttctgttactgtaaaacaaaccacccagaaacccaatggctgggaaggaacatctttcacatgattctgcctggacttggctrtgtggttttcacgtggaggtctatatctgtgcttgagacatctgcaggtttgagtgaactggacatctgcaaaggctcactcacatggctggctgcagatgctggtgctggctggacgttcaacttgggctattgaccagagcacctgcccggggcctccccatggcttgggcttcccacagcattgatactgggggaaatacatatatagtgcaattcagtgttttaagtttgccaacttggaaggtgtatatatacagctttaaaccctgaatttcacaaatgttcatgattatctctttgttaataagttaataagaaaaataatttccaggagacttggtctcttttctccagtaatacagcttaaacattccata

SEQ ID NO: 610288 - DNA, 559 bp, Homo sapiens
gacgcagagtgactctgctcagaactccagaacacttgctcccttcagctgccccactccccacaaccatgcacactcccctcatcccaacctggggcagcatgttgagcacttaacagaactgccatttctgtggctttttcatccctttccttttcctccatattcaggaagaacaacagattactaatcacccacactcagggaagtccaatataagtaggagcaagagcaaatcccgagctttgggtsgttaattcttctgaaaaaccatagcagagacttcctgtttccattacaacgtggaaggagttttgaagttgtaaccatccactcacaagtaaaaagctgaacaaattgaaaaatcaacaactcttcttagaatcatcagacaagtgaagacacacagcaaaccactgccttaataattagagaaatgaatgtcaagaatcacagcttacagaaggagaaatttatgagcagagatttccacaggaacaagtgcttagtaaggaaaaccaagctgtaactgaggaattgccacaggtccatgtggaca

SEQ ID NO: 610289 - DNA, 573 bp, Homo sapiens
cacaatattttcctttttgtgaccatgctcttactcttaggacaatggccttagggttcatccatggggcagcacrggacatgatttccttcctttctaaggtcacagaatgttctattgtgtgtctattttcaaaggaggaattctggagatgggtgattatatcaacactcacggtatcttatttaatttttaacacaaaattatgaggtcattgctgttatacacatctatagtggttaaaatcaagccttcgagactgaaagtaatttgcccaaagtttatgcataccagaaatgagacttgagttatcttcttcccaaacctttgccattgagtaggaaactcataaagtcaaagggcactggaattgttgcttctattggtttgtcatttttttccacttactgttttagtgcagacatgtctgaaatgcaaacaggttttaaaatggaagctttggagtattccgtaattatggttatcaacgtttagtatttccagcaaaacattcttatttatcaacttccccatttatctcaatcaaaataagtaggaaaaagaaaaagcata

SEQ ID NO: 610290 - DNA, 573 bp, Homo sapiens
cacaatattttcctttttgtgaccatgctcttactcttaggacaatggccttagggttcatccatggggcagcacgggacatgatttccttcctttctaasgtcacagaatgttctattgtgtgtctattttcaaaggaggaattctggagatgggtgattatatcaacactcacggtatcttatttaatttttaacacaaaattatgaggtcattgctgttatacacatctatagtggttaaaatcaagccttcgagactgaaagtaatttgcccaaagtttatgcataccagaaatgagacttgagttatcttcttcccaaacctttgccattgagtaggaaactcataaagtcaaagggcactggaattgttgcttctattggtttgtcatttttttccacttactgttttagtgcagacatgtctgaaatgcaaacaggttttaaaatggaagctttggagtattccgtaattatggttatcaacgtttagtatttccagcaaaacattcttatttatcaacttccccatttatctcaatcaaaataagtaggaaaaagaaaaagcata

SEQ ID NO: 610291 - DNA, 573 bp, Homo sapiens
cacaatattttcctttttgtgaccatgctcttactcttaggacaatggccttagggttcatccatggggcagcacgggacatgatttccttcctttctaaggtcacagaatgttctattgtgtgtctattttcaaaggaggaattctggagatgggtgattatatcaacactcacggtatcttatttaatttttaacacaaaattatgaggtcattgctgttatacacatctatagtggttaaaaycaagccttcgagactgaaagtaatttgcccaaagtttatgcataccagaaatgagacttgagttatcttcttcccaaacctttgccattgagtaggaaactcataaagtcaaagggcactggaattgttgcttctattggtttgtcatttttttccacttactgttttagtgcagacatgtctgaaatgcaaacaggttttaaaatggaagctttggagtattccgtaattatggttatcaacgtttagtatttccagcaaaacattcttatttatcaacttccccatttatctcaatcaaaataagtaggaaaaagaaaaagcata

SEQ ID NO: 610292 - DNA, 573 bp, Homo sapiens
cacaatattttcctttttgtgaccatgctcttactcttaggacaatggccttagggttcatccatggggcagcacgggacatgatttccttcctttctaaggtcacagaatgttctattgtgtgtctattttcaaaggaggaattctggagatgggtgattatatcaacactcacggtatcttatttaatttttaacacaaaattatgaggtcattgctgttatacacatctatagtggttaaaatcaagccttcgagactgaaagtaatttgcccaaagtttatgcataccagaaatgagacttgagttatcttcttcccaaacctttgccattgagtaggaaactcataaagtcaaagggcactggaattgttgcttctattggtttgtcatttttttccacttactgttttagtgcagacatgtctgaaatgcaaacaggttttaaaatggaagctttggagtattccgtaattatggytatcaacgtttagtatttccagcaaaacattcttatttatcaacttccccatttatctcaatcaaaataagtaggaaaaagaaaaagcata

SEQ ID NO: 610293 - DNA, 526 bp, Homo sapiens
cactggctagcttctgatgatggggactctctaaagaacacaggagttctaagttccctgaggcacttctaagcatctctaggatagcaaggagggtctaggattcctgtgtcctgggggcaggagaaattccccaagtccacctgagacccactgagctgtgggcaaagtgccagggtcccggggagttgtagccaaattagcaacaattcttctcttagcctaattatcattctgccatggtatttactgggtgtctatcatatactggggacccctacactgtaaaacaaagtctctgtcctcaagatgctttggttggggagatgggatatgtaacagttttgtttgtccttctgatataactaaaacatgtttcttatatcattcaaatcattatttagtttcatttatccctttgaacktggggaaaaactcactcgtttaccacttcacatatttcttaatcaaattctactcacttccgcagagtcttgcaaccatccctgacactactcctgagtgt

SEQ ID NO: 610294 - DNA, 631 bp, Homo sapiens
ataagcttcttgacactttgcaacaccattttcttccttaaactctttcctcctttgattccaggattctactctctgcagaatcccaaacccaatttctgactggtctttttcaaaagattcctttgctgttatattttcctctgtccacctttaaagaagagatttttgaaagatttccatcaccctaccctcactgtccctcactctacatacttttcctatgggatcacatccactgccatgattctaactaatgccaatattttgatggttctcaaatctctctctaacctaaatgtgtatcacaatacaaggcttacatgtccatcagcataatgggtatcttcatctggcaaatcaacgaaatatggcaaaagtctcatgaatgtrttatgttccttctaaccacaatgctcttctctgccattttcaccagtcaaactccttttctcccttcaaaattcactttaatgtcatcttatttaaaccttttctgattccttgggtggagttgatccctctgtcttttcagccccactctggtgaacttcttctaacaaactttcagtggtaacttacttatgcctagccccagagaaagagagatgaactcatcctagagcagctc

SEQ ID NO: 610295 - DNA, 468 bp, Homo sapiens
aggcattcttataaaaagagcatgacagtagttctcaggacacaagcaatgatacccaacaaaatcatctaaaaatgccttcagaatactcttatagcagaaaacacaccagtctttaataaagtctagcaaaggtaagaataatgtgttatccacctratacatatatactgagcagagcacttggggtgaatagcatgagggttatcaatgttagtttttgaggataaatttattaattcatttaaaaagttaacatttgacatacctgccatgtcagcatttgaaattttctctccaccaaggaatatatctagaaaataaacatattgcaaagatttatagtgtttacatgggagggacaacatatgtaacataagtaatgacgattgttgtagtcattacatgcttcgcaaatttgtattcagttttgtaaaagaataaagcagtcatattttatttaacatg

SEQ ID NO: 610296 - DNA, 468 bp, Homo sapiens
aggcattcttataaaaagagcatgacagtagttctcaggacacaagcaatgatacccaacaaaatcatctaaaaatgccttcagaatactcttatagcagaaaacacaccagtctttaataaagtctagcaaaggtaagaataatgtgttatccacctgatacatatatactgagcagagcacttggggtgaatagcatgagggttatcaatgttagtttttgaggataaatttattaattcatttaaaaagttaacatttgacatacctgccaygtcagcatttgaaattttctctccaccaaggaatatatctagaaaataaacatattgcaaagatttatagtgtttacatgggagggacaacatatgtaacataagtaatgacgattgttgtagtcattacatgcttcgcaaatttgtattcagttttgtaaaagaataaagcagtcatattttatttaacatg

SEQ ID NO: 610297 - DNA, 554 bp, Homo sapiens
tttttgcaatgaagagctttcctcttgaggtcggcataatccttcctttcttgtacaaaatggggaatgttaaaaagtcatcccatttccaccttctattctttaaccataaaatctgaactcttaaaataactagtctttaaaaaatgttttgcctctatacaatgtatagaaacacttgcctccctctctgtctctgtctgtctgtctttctagatatagctatagatacagatatacaggaatatctcattttattgtgcttcactttattgcacttcacatcacgtttttaacaactttgagttttagggcaaccctgctccaagcaactctatgagcatcatttttctaacagyatatgctcacttcatttctctatgccccattctgataatactcacaatatttctaacttcattattattattatatctgttatggtgatctgtaattggtgacctttgatgttactactgtaattgttttggggctccatgaaccacacccacataagacagtgaacttaattaacaaatgtgtgtgtcctgact

SEQ ID NO: 610298 - DNA, 601 bp, Homo sapiens
tgaaggcaatgctcatttaccattccccaaattctaggatccttaagaattatgctaaagatactctgcctgtgctctataaatggaacaacaaagcctggatggcagcacatctgtttatagcatggyttactgaatattttaagcccactgttgagacatactgcccccaaaaaaagacttgtctcaaaatattgctcactgtcaatgatctggtcactcaagaaccctgatggagatttagaaggagattaatattgttttcacacctgctaacacatcaatctgcagtccatggatcaaggagtaattcctccttccaagtcttatttttttaaggaacatatcttgtgaggctatagctgccatagattgtgatccctccagtgcatctgggcaatgtaaatttaaaacctttttgaaaggattcactattctagatgccattaagatcatttgtgattcataggaggagatgaaaacagcaacattaataggagtttggaggaagctgattccaaccctcgtgaatgactttggggattcaagattttagtggagaaagtaactaaaattatgctagaaataacaaaagaactag

SEQ ID NO: 610299 - DNA, 417 bp, Homo sapiens
tggcagagggatagacacatagacaatgaactgaatagcaaacccagaaagagcccacacacaagtatggccaacttatttttgacaatggtgaaagacaagtcaatggaggaaagatagtcttttcaacaaatggtgcttcagtctggacatccataagcaaattaatgcacctcgacctaagttcatactttatacaaaaagtaactcacagaggatcacagacagcagtaaggagacacagacaaatcaccatcacagtggagaatttctctctcctcgaagtaatagaagaagcagacaaaaaaggatagattttctatgacacaaytgacgactaaataattaaatattattttcaagttatatatagaacgtttctaaaaattcaccatggactaggccataagtctcctt

SEQ ID NO: 610300 - DNA, 549 bp, Homo sapiens
ggaatgagcttcacgtagatatttttctaacacagaaarctaaggttagagatccattacagagataaacttttgcacactgaaaccccacttttgaataactcccgggtaaaagacaaatgaatacaagttaacactcttaaaaaacataatgcttcaaacccaatggggcttagaatgaactttaagaccttaacggtgatgttagaaaagagaaaagcctgcaaaatgatgagtgaatcatccaactcaagttagataaacgattccatcactggccacacagaatcgcccagcactcaccctccccggccccccatcacctccacatccctgggcactgaacgtcgaatcctcctgacaactatcaaaccccggctgagaaccggcgagaaccgcagccgcttccggtcactacccctagcaccgccctttttcggggtttgggacttcacatgaatgagggaagcggaggttccgcgcgtgcgcaaaaccacctttgaagctgctgttagccaggagtcaacatggagaagttacggaagtggg

SEQ ID NO: 610301 - DNA, 549 bp, Homo sapiens
ggaatgagcttcacgtagatatttttctaacacagaaagctaaggttagagatccattacagagataaacttttgcacactgaaaccccacttttgaataactcccgggtaaaagacaaatgaatacaagttaacactcttaaaaaacataatgctycaaacccaatggggcttagaatgaactttaagaccttaacggtgatgttagaaaagagaaaagcctgcaaaatgatgagtgaatcatccaactcaagttagataaacgattccatcactggccacacagaatcgcccagcactcaccctccccggccccccatcacctccacatccctgggcactgaacgtcgaatcctcctgacaactatcaaaccccggctgagaaccggcgagaaccgcagccgcttccggtcactacccctagcaccgccctttttcggggtttgggacttcacatgaatgagggaagcggaggttccgcgcgtgcgcaaaaccacctttgaagctgctgttagccaggagtcaacatggagaagttacggaagtggg

SEQ ID NO: 610302 - DNA, 597 bp, Homo sapiens
gggacaaatattcaagccataccagcatggcatcctgttcacaacagcaaaacctggraaaaaaaatggatgctcatcaacaggagtcataatgaatgaactagaacaacacccaacaatatggatgaatattaagggggaggaactgtaatcccaaaagattatataaagcataacacacttttataaacttaaaggctactaatataggctgggcacagtggctcacgcctgtaatctcagcactttgggaggccaaggtgggatgatctcttgaagccaggaattcaagaccagtgtgggcaacaaagtgagatccccgtccctacaataattttaaaaattagccaggtgtggtggtttgtgcctgtaatcccagctactcgggaggctgaggtgggaggatcccttgagcctcttgaggagttcaagactgcagtgagctatgatagtgccactgcactccaacctgggtgacagagcaagaccctgtctctttaaaaaaaaaaaaaaaaaaagctactaatataaaggatatgaactatttaggattttgtgtagttgcaataaaattacattaaaaagaaatttaaaaac

SEQ ID NO: 610303 - DNA, 597 bp, Homo sapiens
gggacaaatattcaagccataccagcatggcatcctgttcacaacagcaaaacctgggaaaaaaaatggatgctcatcaacaggagtcataatgaatgaactagaacaacacccaacaatatggatgaatattaagggggaggaactgtaatcccaaaagattatataaagcataacacacttttataaacttaaargctactaatataggctgggcacagtggctcacgcctgtaatctcagcactttgggaggccaaggtgggatgatctcttgaagccaggaattcaagaccagtgtgggcaacaaagtgagatccccgtccctacaataattttaaaaattagccaggtgtggtggtttgtgcctgtaatcccagctactcgggaggctgaggtgggaggatcccttgagcctcttgaggagttcaagactgcagtgagctatgatagtgccactgcactccaacctgggtgacagagcaagaccctgtctctttaaaaaaaaaaaaaaaaaaagctactaatataaaggatatgaactatttaggattttgtgtagttgcaataaaattacattaaaaagaaatttaaaaac

SEQ ID NO: 610304 - DNA, 597 bp, Homo sapiens
gggacaaatattcaagccataccagcatggcatcctgttcacaacagcaaaacctgggaaaaaaaatggatgctcatcaacaggagtcataatgaatgaactagaacaacacccaacaatatggatgaatattaagggggaggaactgtaatcccaaaagattatataaagcataacacacttttataaacttaaaggctactaatataggctgggcacagtggctcaygcctgtaatctcagcactttgggaggccaaggtgggatgatctcttgaagccaggaattcaagaccagtgtgggcaacaaagtgagatccccgtccctacaataattttaaaaattagccaggtgtggtggtttgtgcctgtaatcccagctactcgggaggctgaggtgggaggatcccttgagcctcttgaggagttcaagactgcagtgagctatgatagtgccactgcactccaacctgggtgacagagcaagaccctgtctctttaaaaaaaaaaaaaaaaaaagctactaatataaaggatatgaactatttaggattttgtgtagttgcaataaaattacattaaaaagaaatttaaaaac

SEQ ID NO: 610305 - DNA, 551 bp, Homo sapiens
cctaaaataatcattaactttagggtggcaaaatgtgcttctctaattctattatttttctgtattagctggcattttttattaaagaattttccttccctgtgcatgtagggtttttttttagaataattatagtcatgtcccagcatcagatttactgcttttctgattgcagatacattgtataacacacaattagtgcttaagaaatatcagtgcaatgaataaatgataagtactgctataatattctactagaactcctggacacataatctgtactcatcaattgcagttttcttccccaattgcagtatgtcagatatactggtcctcagatgtttgtcttggctctgaaaccacatttttttcttacttctaatctaatatcttcatgcttcttgattctagtgactggaatcatgctgatgacttgatttcattratttatttgagctctactgagaaacaactgaactattgaatattgccatattcatctccataggattgtattgttttgactcaccccagcaatagatgagagtatt

SEQ ID NO: 610306 - DNA, 559 bp, Homo sapiens
atttcattatgttctcaataggcaattccctgattagtaatgttttgctcattattttattaatttctgtttttaacatttacttacttcctttgtgggtatttcattttcctttcctacagtgtgtagtaaaagtttagataattcatcttcagaatttcttgcttactaataaatgcattttatgatataaataatcttaagtatattaattttcccagcccatagatgttatatgtagygctctcataatactaggtagttggtaatccattttaatttcctccttaacccaagtattaattgtatgtgagtgcttttaatgtccaggtatttgaaatatttattgtctctttgcttttacctccatttttatttcattgtgggttatgaatattgccttgtgatatcattttaaagatttattattttgttgcactagtgcaaggatttttaagggtgtcttgttcatgtttaaaacatgtgcattctcttgagtacaaaataaagattgaatatagctatatcaaataccaagtttattgattgtattattcca

SEQ ID NO: 610307 - DNA, 557 bp, Homo sapiens
atgcccacttagccacttttacaacttacttctgcccaggaaggtggcaacacaacggcccagtagataaggtacagataaggctagcagaagagccctgcccttgctcatttcctcccctacattatataaatgcccactttttcttccaaaggtgaagcagtacatttaaagctggacactttgtgcactcccccaaactagctttggaaataaaatcacttttctggaaagtaccaggactcactcttgttaattggactctacattcagcaagcaactaacccactttttggttgcaatttttggtggcccatacagggacatgctctgtgctccaggtaggcttctgcctgaycacccaatttcgctatcagatgagacatggggtcacctgtgagtgccagctgctcatggctatcaggtcccacgatgaaagcattagggagcttcccagcagctgcaaaaaatgctttcttatggggaaatttcccttttgctccccactcccagcacaacatttgctgccttcaatgcattgcctgtgcaagggaagt

SEQ ID NO: 610308 - DNA, 487 bp, Homo sapiens
tctcatttcattgaagtatagttcacttaagaaagtcaggataaatgcttaattatttccttttcaaaccaattatcaaataatgagatgattctctagcatcctccaaagatgaccaataatattttaaaagtatcattgtgaattcatgaatttaaacacatttggtgtattttaatccattacagttattattcctattgatgcatagttgttccatctttggctgatgggaacatatttgggttggcttctgagtctgacatgaatttagtactttttgagagtgtctttgctttccgatgttctattttccaggtttatcatgtatctttggtgtccagacctggaatccaacatttctccaaggagccttagcgagaaatgatatgtgagatcacagtctgggtgytacgcatgctcatggctctggatttccagttctttttaatgaaacagagtgagaaaatatacattttaagagaag

SEQ ID NO: 610309 - DNA, 566 bp, Homo sapiens
ctcctgtcctcccccacagcttccccttctatcaatatctctcaccagagagatacatctgtgagaactgacgaacctacattgacacattattatcactcaaagtgcctcatctacattaggattcacactttatgttgtgcattctatgggtttgaacaaatgtaaaatgacatgtaggcaccattatactatcatccagagtagtttcactgacctaaaaatcctctgtgttctgcctattcatccctctttctccccagcttctgacaatctgatctttttactgtctccatagttgtgcatttccaaaatgtcatatagttggaatcatacagtacatagccttgtaractggcttttttgacttagtaatatgcacttaagtctcagccttgcattttcatggctttaatagcatctttctttttagtgctgaataatattccattgtctggatataccccaatttattcattcacctactaaaggacattttagttgcttccaagttggggaattacgaataaaactgctacaaacatccatgtgcaggtttttgtatg

SEQ ID NO: 610310 - DNA, 566 bp, Homo sapiens
ctcctgtcctcccccacagcttccccttctatcaatatctctcaccagagagatacatctgtgagaactgacgaacctacattgacacattattatcactcaaagtgcctcatctacattaggattcacactttatgttgtgcattctatgggtttgaacaaatgtaaaatgacatgtaggcaccattatactatcatccagagtagtttcactgacctaaaaatcctctgtgttctgcctattcatccctctttctccccagcttctgacaatctgatctttttactgtctccatagttgtgcatttccaaaatgtcatatagttggaatcatacagtacatagccttgtaaactggcttttttgacttagtaatatgcacttaagtctcagccttgcattttcatggctttaatagcatctttctttttagtgctgaataatattccattgtctggatataccccaattyattcattcacctactaaaggacattttagttgcttccaagttggggaattacgaataaaactgctacaaacatccatgtgcaggtttttgtatg

SEQ ID NO: 610311 - DNA, 602 bp, Homo sapiens
tgatctgacttcaagacttatgaagctacagcaaagagtaatgctacagtagtacagaagctacagtagtacagaagctacagtaatggtgtagtactggcagtagtggtactggcataatagaaaactagagcagaaatagaaccaatcaattaattttttgataaatatatcaaggcaatccaatgcattatcattttcaacaaatggttctggaacaactggacagccatatgcaaaacaaaatcaacctaaatccttatctttggaaaggatttacatcatatrcaaaattaataaaaatggattaggtaaccaaatataagagccaatattataaaacttctagaagaaagcataaatctttttaaaaacttttatcttaatgacgttgagctttgcaaaaatttattaaccatgaccaaaaaagcatgaagtataaaagaaaacaaaaatgaattgagcttgttaacattaaaaacttttggtcttctgttatttaaatgaaaaggcaaacctagaagaaactgtttacagaatgtacatccaacaaaggacatatatctaggatatataaagaacacttacaactcaataataag

SEQ ID NO: 610312 - DNA, 602 bp, Homo sapiens
tgatctgacttcaagacttatgaagctacagcaaagagtaatgctacagtagtacagaagctacagtagtacagaagctacagtaatggtgtagtactggcagtagtggtactggcataatagaaaactagagcagaaatagaaccaatcaattaattttttgataaatatatcaaggcaatccaatgcattatcattttcaacaaatggttctggaacaactggacagccatatgcaaaacaaaatcaacctaaatccttatctttggaaaggatttacatcatatacaaaattaataaaaatggattaggtaaccaaatataagagccaatattataaaacttctagaagaaagcataaatctttttaaaaacttttatcttaatgacsttgagctttgcaaaaatttattaaccatgaccaaaaaagcatgaagtataaaagaaaacaaaaatgaattgagcttgttaacattaaaaacttttggtcttctgttatttaaatgaaaaggcaaacctagaagaaactgtttacagaatgtacatccaacaaaggacatatatctaggatatataaagaacacttacaactcaataataag

SEQ ID NO: 610313 - DNA, 627 bp, Homo sapiens
tatgcaaaacaaaatcaacctaaatccttatctttggaaaggatttacatcatatacaaaattaataaaaatggattaggtaaccaaatataagagccaatattataaaacttctagaagaaagcataaatctttttaaaaacttttatcttaatgacgttgagctttgcaaaaatttattaaccatgaccaaaaaagcatgaagtataaaagaaaacaaaaatgaattgagcttgttaacattaaaaacttttggtcttctgttatttaaatgaaaaggcaaacctagaagaaactgtttacagaatgtacatccaacaaaggacatatatctaggatatataaagaacacttacaactcaataataagacgaacaactgagtttacaaattggcaaaatatttaagaagacacatcaaccaagatggtatacagatggtacataaacacaagaaaagatgctcaacagcattacttattagggaagtgtaacctaaaaccacagtgaaataccactacacycccattaaatgactaaaattaaaaataataatcatacccaatgaagcaactgcagcacttatatactgctggttaaaatgtaacatagtacaaccactttggaa

SEQ ID NO: 610314 - DNA, 613 bp, Homo sapiens
agagggtattatgggctgaatgattgcatcccccccaaaattcatatgttaaaatcctaatcctcaatgtgatggtattaggaggtggagcctttgggtggtagttaggtaatgtgggtggagaactcatgaatgggattggtgcccttataaaagggatcccaaagagttctctagctgtagacatgggaaaatgcaagaagtgagcagtttgcaaccttgaagagggccgtcaccaagacctaaccttgctagattctgatctcagacttccaggctccagaactgtgaggaataaatttctgttgtttataagccaccaagtctatggtgctttattatagcagctcaaactgactaagacaaagggtaraggggaaaacatgaacatgcatgaaaagatggggaatttcagcagatatatgaaaattgtaagaatcaaatggaaatattacaaataaaaataaaacataactgagttgaagaatgccttcaatgggttcatcagtagacttgacaaagccagggtgagagaaaaaacatcagtgaatttgaagacagatcaatggaaattatcctaactgaaacacaaagagaaataaagactgaagaa

SEQ ID NO: 610315 - DNA, 613 bp, Homo sapiens
agagggtattatgggctgaatgattgcatcccccccaaaattcatatgttaaaatcctaatcctcaatgtgatggtattaggaggtggagcctttgggtggtagttaggtaatgtgggtggagaactcatgaatgggattggtgcccttataaaagggatcccaaagagttctctagctgtagacatgggaaaatgcaagaagtgagcagtttgcaaccttgaagagggccgtcaccaagacctaaccttgctagattctgatctcagacttccaggctccagaactgtgaggaataaatttctgttgtttataagccaccaagtctatggtgctttattatagcagctcaaactgactaagacaaagggtagaggggaaaacatgaacatgcatgaaaagatggggaatttcagcagatatatgaaaattgtaagaatcaaatggaaatattacaaataaaaataaaacataactgagttgaagaatgccttcaatgggttcakcagtagacttgacaaagccagggtgagagaaaaaacatcagtgaatttgaagacagatcaatggaaattatcctaactgaaacacaaagagaaataaagactgaagaa

SEQ ID NO: 610316 - DNA, 570 bp, Homo sapiens
actcattttcaattctaaatcctcactaatcttgcttatcagcaaacatccaaaatttatgtgataaaaataatttattcatgtctataaaaatattgtagtcatagccatcctaacctatacaaacaataaatagatgtctatactccaactctacatccagrtgtaattgttttcttggacctacattatatatatatatctaacaaaaaaatagcagaaaagacaagtcatctctggtagagactgaaagctacccactagaatctgtttccccattcttttgcatttaacagagtagcatccaggcatatggatgcccagtcatagagcatttcttagcctcctttgaaattagtgtggccatgtgacaatgttctcatcaagagaatttgagagaaaatgatggtgccactttcagatgggagcactgagaccacaggcatgttttctccacacccgcttctaccttcttgcttactaaaacctgaacttggcagaaacacagagtcaagcacgcagatcccacaaaaatcctaagagatggtggagtaatgtgtgttggaagga

SEQ ID NO: 610317 - DNA, 628 bp, Homo sapiens
actatttgtcattcaaaaggaataaaccagagatatacttaataacatggatgaattgcaaaatgattatgctgaacaaatgaagccagacccaaaagagtatgtaaggtattattccatttatataaaaccctaataaagayagatctaatctagagtgacaaaaagcatgtcagtggttgcctggggctgtgtgtactgactgcaaggggcatgagggagcattctgtgtgaaggaatggtatatatcacaataggggtggtggttacactggtgtatatctttatcaaaactcatcaaactgtccacttaaaataaatacatttcattttgtgtaaattctaccttaataaaatggattttaaaagaagaaatgctaagtgatagtgaccataaagtcagaagatgggagagaggtactaggccatgggaaggtggagaggagtgaggaatctgaaggtgatacttacaaaggcaacaggaggtgaggctggttgtagatgagagtttgttggtaccttagagtgagaaggtgagaacaaaagaaagaataaagtgcaagagtgctaggaagaacagaagtgaggcaaccaacggattttcaaaaagtcaaatccagtaaaactg

SEQ ID NO: 610318 - DNA, 574 bp, Homo sapiens
agtgcaagagtgctaggaagaacagaagtgaggcaaccaacggattttcaaaaagtcaaatccagtaaaactgaaatgtatgtgataagaatctaagactctggggtgtggtttaaggaattacacataaaaatgggactgaaggaaggaaagaatatccaagaaagcaagaccgctagtgaggaagactggcatgtratccagagtataggaattggggcaattctcctggaagaaagccaagcaaagaagacaggtgataacagtaagagaaataaaaggagagaacaatttggcacccgagaggccaatgctacctatcctcaagcaatttataaagtttccaacctttaagcaataacagcattttaaaggcatcggtcttccttagggaaaaaaaaaattacttcgtgtccccatctgcctgggtcacacccactcacctgaacagctctgatgtggggcttccccttccaatgtccatggcccctctccttgctccaacttgaagatgacctctggtttaggaacttcgaaccctgttaacaggacacgatagagaattgggtccagc

SEQ ID NO: 610319 - DNA, 560 bp, Homo sapiens
gctcatgaatgggttagtgttcttttaaaagggctggagggaactagctacatccttcctttttgaccttccacactttccaccacgtgaggacacagaattcaccccctctggaggacacagcaacaaggcgccatcttggaagcagagagcagccctcactggacacctaagctgctggtgcctttatcttggacttctcagcctccagaattgtgagaaataaatttctattgtttataagataccaaatctcaggaatgttgttacagtaggacaaacaaactaaaacagatgagtaagacaaaaatcaaaagatctaacatacatgcaatttaagacccagaaggagagaaggrcagaaaaggtatttttaaaaataatgtgcagaaactcctcaaatttggtgaaagacatacacttatagattcaataagttttgcaaattccaaacagaataacccacataaaaccattcctaggagcatcatagtcaaactattgagaaccaaagaagacaagattttaaaagcagccagaaaagccaaaaacaaacaaaa

SEQ ID NO: 610320 - DNA, 516 bp, Homo sapiens
tgttacagcagtgatagaaaactaatatatggggcaattaagaggatttaaggtgaatcagcagtgaatatgttgactaaattgtatggtcaactgtgcaataaatggtcctccactttattgcttgtcawtgaggaggaactggggaaattcttacacactaagtgccaggaagtaggtttaaagagtctcctagttattccaaactctcatccaggtggaggacttcctcaccaatgtgatggtcagtctcaggttccccccaatcgggggatgtcattgaggggaatgcctgatacagaggtctgggcatactgaaaacatgagaggttcactaggttgagtcctgagcagctgctgcattgcttgaaactgaaagtaaatgggaagacttgcttactggcatggcgccgcaccatctcactccatgcctggtccctctgtccccttctacccttagtaacaaccagtattgagaatcattggtgggaggggtggaggtgcagttcccaaccc

SEQ ID NO: 610321 - DNA, 490 bp, Homo sapiens
gtttctgaaaacaccttgaacagtaccttatgtatcttaatgtatcccmatcatctagaatatttgttgaaagaatgatatcagtatataatttgaagattaagtagacattaagactccattaggaaatcccttggatttcttagatatccctagaatagattctaaaagatggttttatgacatgctttaaaattgagatcactggcaaatatcaacattatagaactttcaattaaacacaaacaaaagggccaagcatggtggctcatgcctgtaatcccaacactttgagaggccaggtgggtggatcacctaagatcaggagtttgagaccaacctggccaacgtggcaaaacactgtctcctccaataaaaatacaaaaaattagctgggcatggtggtacacacctgtaatcccagctacttgggaggctgaggcatgagaatcgcttgaatctgggaggcagaggttgcagtgagccgaga

SEQ ID NO: 610322 - DNA, 504 bp, Homo sapiens
aacaaacaaattctgtgtaatcttctgaccttatattcctgtgctgtatcaattttagacatattttccaggtggyataactacatgatggagtagagccactcaaactgcttcaatgtctatgaaaatggaatatcatttctacatttcttatagagtagaacattttgtggtaaacttttttttcatcctccttttgatagttttgccaagttaagaatcccaagctgcctcccccaccccagttttccttcttatttaatcaaatattggcagataaacataattacagcacaattcagataattcttcatgttgtatacatagatctttaaatataatctaaaaggaatctgcagtccacaatgacacacatacagcttttccttactttgcttaaaaaacattatttgaggcagggtctcactctcacccaggctggagtgcagtggtgtgatcttatccttgcctcccaggttcaagtgattctcatgcctcagcctc

SEQ ID NO: 610323 - DNA, 559 bp, Homo sapiens
tttgttaccctccagtggaactggtaaaaagacaaaataattctcatagaatgtcagtgtttccttctcaagtaggtctctttcctgcttacttgcagctatatatctgttctaaaaataaggaatttcttacagttttccactgagaaaatctgaaatgtggccaggtgcagtggctcacacctgtaatctcagcactttgggaggctaaggcatgaggatcacttgagcccagaagtttgagaccagccctggcaacatagggagaccccgtgtctacaaaaaattttttwaattagctgggtgtgatggtgtgcacctgtagtctcggctttttaggaaactgaggcaggaggatcacttgagccagggaggttgaggctgcagtgagctgtgattgcaccactgcactccagcctgggtgacagagcaaaactctgtctcaaaaaaaaaaaaaaaaaaagaaaggaaaaagaaaatctgtaatgttactgtttgtactagctaatatgatattttaaatgcttccttttttcctgcaggtattcttggcgttacc

SEQ ID NO: 610324 - DNA, 408 bp, Homo sapiens
cagagaaatagagagagaatatgaaagaaggttaagagacatgggggattgattccaacacacattcatttagagttctagaaggaaagaagagagcaaatgcagtagaggcaatatttgaatagatgactgagaattttccagatctaacaaaagataccaaattaaagattcaggaaatcaagagaatyccaagcaaaatttaaaagaaaagaaaatccatctccacattaatcagagcaaagacaaaaagacgaccttaaaaatagagagaagagatgaattcacttcaaaggaactgacagctggattctcaatggtcagttcaataacaacaaaatccagaaaacagtaaaaataataacgatgtgctgagagaaaagaataccatcccagaatcaatagcat

SEQ ID NO: 610325 - DNA, 563 bp, Homo sapiens
ggagtggttgctatacaatgacatcagtttctgtctgaaataggcacaggagcaaggattctcagaactgagtcctcctaaaaaatggcctcccgctgtatgaggtcagactggatcaagctrtgccaggatcaggtggatggtaaataattagcccctggactgccttagtactcttggggaactagataatccctatctgtttctgaagaagcaatttacctagactgttatggaaagtggagtaagaatttatatcagtaggggtgatcaaactccaaaagatggttacctaggagatcttcaatttttttctgtttttcttttttctttttttttttttgagatggagtttcgctctgttgcccaggctggaatgcagtggagcaatctcggctcggcacaacctctacctcccgggttcaagggattctcctgcctcaacctcctgagtagcttggaggcacccactaccacacctggctaatttttgtatttttagtacagacacagtttcaccatgttggccaggctggtctcaaactcccgacctcaggtgatct

SEQ ID NO: 610326 - DNA, 563 bp, Homo sapiens
ggagtggttgctatacaatgacatcagtttctgtctgaaataggcacaggagcaaggattctcagaactgagtcctcctaaaaaatggcctcccgctgtatgaggtcagactggatcaagctatgccaggatcaggtggatggtaaataattagcccctggactgccttagtactcttggggaactagataatccctatctgtttctgaagaagcaatttacctagactgttatggaaagtggagtaagaatttatatcagtaggggtgatcaaactccaaaagatggttacctaggagatcttcaatttttttctgtttttcttttttctttttttttttttgagatggagtttcgctctgttgcccaggctggaatgcagtggagcaatctcggctmggcacaacctctacctcccgggttcaagggattctcctgcctcaacctcctgagtagcttggaggcacccactaccacacctggctaatttttgtatttttagtacagacacagtttcaccatgttggccaggctggtctcaaactcccgacctcaggtgatct

SEQ ID NO: 610327 - DNA, 606 bp, Homo sapiens
tccagcatcatgcaaatctccttggctggaaagaagcagaaacattagcttgtgggaaactctcactaatgtcatccaaatatcagtctagtaggtcaaatgctagaatgtggcacaagccacacagcattaccatagagctgcattagacaaggcttctctggaaaaccatcttcttttcaccttgtgggatgtggatgaggccatagaaatcccaaagtctgatgtcataaagattcatgtaccatagaggtttgtctagatcaggagaagatggtagcagtccaggatggtgatgaatttgaaataaaaataaccttcatgaagatggaactaaccatttttttaaagagtacctcagtatggtctgctaagccccttaccataaactcgcttgatatacccttgagaggcctcaggcttagggaaraggcatatgcattttcttagcagaagaaggcctttgcataggctcagttacagccttacctctggtgtgagagcagattctcagcctcctctgataagactcccccagtttatttatctgaaatcactagagaacggttagtgagtgagaaagagcttaacagaggaccaaagtag

SEQ ID NO: 610328 - DNA, 281 bp, Homo sapiens
cccaggttaaaatcttggctccatctattactggatgttgatgcttaggcaagttacttctctgtgcctctatttgttgtgaaaacaaaatgaacatatgccaatatgaaagatgctctggatagagcctggcacacagttaacatatgtataggacttatctttttaaaaactggatatatggcattatctgaattattctgaaacttgatttttttcactcaacattatggttttaaaaatgatccaygttgcagagcagatttattttatactactac

SEQ ID NO: 610329 - DNA, 546 bp, Homo sapiens
cgcccagctaatttttgcatttttagtagagacaagagttacaccatgttggccaggctggtctcaaactcstgacctcaagcgatccacccaccttggcatcccagagtactgggattacaggtgtgagccactgcgcctggcctaaaatgggaaatttcatgtaaattttatctaaaacaatttttagattcatagagaaaaaaataatcagagtaatttgtccaaatgttatagtgattgtgttatggctgtaagatattaggtgatttgtttctcttttttataaatttatgctgatatggctatagtactcagtgaaaataatttttcaaatgaaaaatttaaaatgaaaccagaatattttcctttatcatacagttcttgctagttaatttcctacccacatttctattctctccactttgattccccaaatacaggtcactgaatccaaggcaacctgtggaaagaagaattcagatgtcagtgggagcctccaggtgggaggagagcatgcctaaaccctggtggccattgttctgt

SEQ ID NO: 610330 - DNA, 505 bp, Homo sapiens
gtgatacgcccaccttggccttccaaagtgcttagattacaggtgtgagccaccacacctggcctgttgtggacattttatttgaaaggaatcattgtactgtgtggtctttgtgtctaacttctttgacttagcataattttttcaaggttcatccatgttgtggcatatttcagtagttcatttttatgactgaatcatattctayttatggatataccacattttatttattcatttgtccattgatagacacttggattgtttccatcttttggccttaatgagtaatgtttcaataaacattcatgtgcatgctttttgtggacaaacatttgttttcatttctctttgggtatatatcacctaaggagtggaattgctggatcatatggcaattctatttttaataatttgaggaactgccagactgttttccaaggtgtttttggaaaacctacacaattttacattcacatcagcagtgcatgtgggttctgatttc

SEQ ID NO: 610331 - DNA, 505 bp, Homo sapiens
gtgatacgcccaccttggccttccaaagtgcttagattacaggtgtgagccaccacacctggcctgttgtggacattttatttgaaaggaatcattgtactgtgtggtctttgtgtctaacttctttgacttagcataattttttcaaggttcatccatgttgtggcatatttcagtagttcatttttatgactgaatcatattctacttatggatataccacattttatttattcatttgtscattgatagacacttggattgtttccatcttttggccttaatgagtaatgtttcaataaacattcatgtgcatgctttttgtggacaaacatttgttttcatttctctttgggtatatatcacctaaggagtggaattgctggatcatatggcaattctatttttaataatttgaggaactgccagactgttttccaaggtgtttttggaaaacctacacaattttacattcacatcagcagtgcatgtgggttctgatttc

SEQ ID NO: 610332 - DNA, 537 bp, Homo sapiens
gaattcttacttattattgcttctgaaaatggagctcaaagcctccctctgcattcactttcttgcctctcccaggcactatcccccaagacaaataatttgtaaaagacgtctgttaagtattgaagacttcagtattggtactttaagaatgaaattttaaagagttttttacagtttgataattttccagaaaaactgatattctgggccaggtaagctctttcttaattaagctgcaaataagtattaatctgtcttagtcttttttctgttgctatagcagaataccagacagtgggtaatttataaggaaaataagtctatttggttcatggttctggaggttggaaagtccaaggacatggtggaagcttctgaggagggctttcatactgtgtcataacatggtggaaaagcagaaagcaagtaagcaggcatgaaaaaggcagcaagagcaagctgagctcacttttataacaaccatgttgcccaggctggtcttgacatcttgygctcaagcaattcccttgcctt

SEQ ID NO: 610333 - DNA, 272 bp, Homo sapiens
gatcctcgcacctccacctcccaaaatgctgggattacaggcttgagccaccaggcctggcctcaggacccttgatgttttctgaacaggctttttagaactctttttgtctttgtatatgctattccctttaaataatatcctcctctgtgcatatctccttcataaaatcctactgatcattcaaaatccagctgtcatgctaacactttaatggtatcttcattcccagcagagatttgctrtctactgcacttggtaaacatgtcagt

SEQ ID NO: 610334 - DNA, 547 bp, Homo sapiens
ggaaatgacatagcactttgtttttctaaatcaaattaatctggctatgagtcctctcttggtatgggtgggcgaaaatgcaatctgtcctttttctcctccaaaccaaatgtgttaaggcactaggcatgcagtctcccctggcatcccgtggctacaactactgccatcttagtctgggatggggtctgctgcacacaaggcatggatctgtccctaataggaaagctcacgcctgtaccctctccccctgggttctgtcctccacctccaactcaaagcaccagtttgcagtgctgcctctggggtaactcagtgtacttgggcctcccctgggagaggggcctaacagtctcttgtttcaagggtctgacagtccttaacactaggtcctgaatcacaggccctatgaacccttgtctccaacaaatccatcagcttacctcctaactacatttagaacccagccatttctaccatcgtagcccaagccattttctctcacctggatcatygcaataactgtctaactggcctccctgcttct

SEQ ID NO: 610335 - DNA, 648 bp, Homo sapiens
tcaataaaaactaaaggtatttaggaattaacaaggaataaaccttttttgagaaaaaaattttcaactgaacaaaggacataacaattaatccaactaaatacgctttcaatgtctctggatggatgttaataccataaagttgtcaattcttctcaaattaatctatatagtcaaggaaatttcaatgaaattcgtggttaaatttactacagaattcatgtgaaagactaaaggtccacgaatggtcaatttgatctttasaaaaatgagaaatgtggctgctcctgttctatcagatactaagacatactacaaagcctcacagtgctagaaacagtgtgatattggtagacaggcagacagtaaaacaatggaacagaacagacaattcagcaacttaatatatgatgaagatggctctacagattaatatgaaagcatacatgttagcagatgatgttggaaacactgactcccatataaagaaagttgaaactgattcctatgtaccacctgcaaagttggactccagataaagacttggatatgaaaaatatacatatcagatttaatagaaaatatagcatgagaatatccccttacatgagggataggaaaaggcttcttctatttttgcaaaagatg

SEQ ID NO: 610336 - DNA, 623 bp, Homo sapiens
tggtcccaaatggtgtgactttttatttgagaaatgtcatccaattgaggcaatttctagtggaagctttactgatttcctgagaatagcttgcaaagaaagctttagctcacatatctaaagtaatggaagaatgacggagcagagactatggtgctcctaaaaatgattaaaaacacttactggtcttcatcctaacaggtcattgagtgacaggacattcagaatcttaacactccaaaaagaaggcttagcataagacgaactgtttttgtataagatcgatctgttagaataatagaaaaacgactcaaaggaaaacctaaaatcttcagccataagataaaccaatctgtacaagcccccagtctgtgttaatatttcttacttgttcaaagagaagctaaaatagaaaaataatatgggatggggagaagaaaagrgctgaacaggaaaccaagagaccaatttccaccattcatttcctaaagcacctctttgagctcaagttttctcatttgtaaaacaggagtaataaacactctcatgagtctctcctaggactttttttttaaaaaaataaagtaaggtagtaggtgcagaagcttctttgagtaacgtaa

SEQ ID NO: 610337 - DNA, 572 bp, Homo sapiens
aaaaaaaaatagccattcaaactttaaaatcacctgattgaaataaaattaaatagcataatactggtgtaatgctatatttgtttcttcagattccccagaaatgctttataagtctatactttaaaaatatttaaactcttctctcttaaaaaccttcgtaaatcctaaaatattagttttggaaagctctgatttatttcttcctaaagctgggattttgtttctaattttgctcttgaaaatgatttcaaattcactgacaaatgaaataaaataacatartgaaaatttttggagtatggctgtaacaaaaagaccaacttagtaatataacagctctatagaatatcatcttacatagagactttaaaataccgaagtgtatattattttatttcttacgaataaaggtagttggggcagatgtattatcctgaattcaaaaaaagacaagacttttaagtgaaaatttcaagggaagtattggtatttgcggtagactttgaaaaatgggtagactttatatgacgaaaaggtcattgaaggcagagggaacaatttgagcaaaa

SEQ ID NO: 610338 - DNA, 572 bp, Homo sapiens
aaaaaaaaatagccattcaaactttaaaatcacctgattgaaataaaattaaatagcataatactggtgtaatgctatatttgtttcttcagattccccagaaatgctttataagtctatactttaaaaatatttaaactcttctctcttaaaaaccttcgtaaatcctaaaatattagttttggaaagctctgatttatttcttcctaaagctgggattttgtttctaattttgctcttgaaaatgatttcaaattcactgacaaatgaaataaaataacataatgaaaatttttggagtatggctgtaacaaaaagaycaacttagtaatataacagctctatagaatatcatcttacatagagactttaaaataccgaagtgtatattattttatttcttacgaataaaggtagttggggcagatgtattatcctgaattcaaaaaaagacaagacttttaagtgaaaatttcaagggaagtattggtatttgcggtagactttgaaaaatgggtagactttatatgacgaaaaggtcattgaaggcagagggaacaatttgagcaaaa

SEQ ID NO: 610339 - DNA, 572 bp, Homo sapiens
aaaaaaaaatagccattcaaactttaaaatcacctgattgaaataaaattaaatagcataatactggtgtaatgctatatttgtttcttcagattccccagaaatgctttataagtctatactttaaaaatatttaaactcttctctcttaaaaaccttcgtaaatcctaaaatattagttttggaaagctctgatttatttcttcctaaagctgggattttgtttctaattttgctcttgaaaatgatttcaaattcactgacaaatgaaataaaataacataatgaaaatttttggagtatggctgtaacaaaaagaccaacttagtaatataacagctctatagaatatcatcttacatagagactttaaaataccraagtgtatattattttatttcttacgaataaaggtagttggggcagatgtattatcctgaattcaaaaaaagacaagacttttaagtgaaaatttcaagggaagtattggtatttgcggtagactttgaaaaatgggtagactttatatgacgaaaaggtcattgaaggcagagggaacaatttgagcaaaa

SEQ ID NO: 610340 - DNA, 490 bp, Homo sapiens
tatgatagtgttatatctggatcaatccagtttgattactaacaatatcaccttccgttgatatttgctttttttttttttttttaagaagtggctcttctgtcatttggatttggagttttctaatgcttactttaaaagattagatatctctcccttttttctttggaaaaggtaggagaacaaactcagacccttccaatttctcatgcaagattttagaacttttatacccattcctgacatccatcagtttaatggaagccccagacagtttcttttgggcatcagggtatgacaatgtccggaggctatgatttctaaatggtccttgggctcagccaaagtcaagttgactcagcagccatgagttatgcagacattaatagtcctttcacratttcaccctgcattttttacatgctaaaaagcagcctagaggatgaccttcccttaggtgcctaaggcaatccctatttagataatgaac

SEQ ID NO: 610341 - DNA, 559 bp, Homo sapiens
agggaataatgataaaaaacattcattaaattattaacaatacttaccagaataaaggagttaggagtaagttacagtagcctattataatacgcaattttcttttattttcgaaggagaaaaaaattactgtgcaaagaaaaagtgtctgtcaacaagagagatacagtttaaaattaaaatattttcaacatttgagtataaaaatgtttaggctaaaaagcattaaatagtraaaatgaagtaatccatgtttttatgtgttttatcttgctcctagtgttcattacactgtaaatatggagatagacatagaaataatttactttaaatttcactttgaaccaaataattaatccttaatatacttatccttaataaatttttgctgtttttaaaaggcgtgtatttatttagagtattattaactagaatcagaagacgtgctaacatttgttttaattagctaagctataacaacgtaagctattttttaaaaaaatcatgacaccactcttcatctggtggcctttcattagggatacaagcaagagagaca

SEQ ID NO: 610342 - DNA, 559 bp, Homo sapiens
agggaataatgataaaaaacattcattaaattattaacaatacttaccagaataaaggagttaggagtaagttacagtagcctattataatacgcaattttcttttattttcgaaggagaaaaaaattactgtgcaaagaaaaagtgtctgtcaacaagagagatacagtttaaaattaaaatattttcaacatttgagtataaaaatgtttaggctaaaaagcattaaatagtgaaaatgaagtaatccatrtttttatgtgttttatcttgctcctagtgttcattacactgtaaatatggagatagacatagaaataatttactttaaatttcactttgaaccaaataattaatccttaatatacttatccttaataaatttttgctgtttttaaaaggcgtgtatttatttagagtattattaactagaatcagaagacgtgctaacatttgttttaattagctaagctataacaacgtaagctattttttaaaaaaatcatgacaccactcttcatctggtggcctttcattagggatacaagcaagagagaca

SEQ ID NO: 610343 - DNA, 559 bp, Homo sapiens
agggaataatgataaaaaacattcattaaattattaacaatacttaccagaataaaggagttaggagtaagttacagtagcctattataatacgcaattttcttttattttcgaaggagaaaaaaattactgtgcaaagaaaaagtgtctgtcaacaagagagatacagtttaaaattaaaatattttcaacatttgagtataaaaatgtttaggctaaaaagcattaaatagtgaaaatgaagtaatccatgtttttatgtgttttatcttgctcctagtgttcattacactgtaaatatggagatagacatagaaataatttactttaaatttcactttgaaccaaataattaatccttaatatacttatccttaataaatttttgctgtttttaaaaggcgtgtatttatttagagtattattaactagaatcagaagacgtgctaacatttgttttaattagctaagctrtaacaacgtaagctattttttaaaaaaatcatgacaccactcttcatctggtggcctttcattagggatacaagcaagagagaca

SEQ ID NO: 610344 - DNA, 532 bp, Homo sapiens
aatatgttcatgtatactaatatggtttaaaagtcagctgagaggcctggtataggtggctcacacttgtaatccaaacactttgggagtccgagccaggaggaatgcttgaggccaggagttcaagactagcctgggcaacayggcaaaatatcatttctaccaaaaattttaaaaaaaaaaaattaggtgtggtggcacacacctgagaggctgagcccaggaatttgaggctgcagtgagctatgatcatgcaactgcactcaatcctgggaaacagagcaagaccttgtctcaaaaaaaaaaaaaaaagttatctgaagtaattttaatttttttattttgaaaatttcatacatacccgagtatatttattacatatgtattatttaaagtataataatatggatgtgtatgtacctaccactcagcctaacagacactatcaataattttaaaataccttatgtgtgtctctcattcacatttccctgtctccccagatataaatactattttgttatttatttag

SEQ ID NO: 610345 - DNA, 532 bp, Homo sapiens
aatatgttcatgtatactaatatggtttaaaagtcagctgagaggcctggtataggtggctcacacttgtaatccaaacactttgggagtccgagccaggaggaatgcttgaggccaggagttcaagactagcctgggcaacacggcaaaatatcatttytaccaaaaattttaaaaaaaaaaaattaggtgtggtggcacacacctgagaggctgagcccaggaatttgaggctgcagtgagctatgatcatgcaactgcactcaatcctgggaaacagagcaagaccttgtctcaaaaaaaaaaaaaaaagttatctgaagtaattttaatttttttattttgaaaatttcatacatacccgagtatatttattacatatgtattatttaaagtataataatatggatgtgtatgtacctaccactcagcctaacagacactatcaataattttaaaataccttatgtgtgtctctcattcacatttccctgtctccccagatataaatactattttgttatttatttag

SEQ ID NO: 610346 - DNA, 532 bp, Homo sapiens
aatatgttcatgtatactaatatggtttaaaagtcagctgagaggcctggtataggtggctcacacttgtaatccaaacactttgggagtccgagccaggaggaatgcttgaggccaggagttcaagactagcctgggcaacacggcaaaatatcatttctaccaaaaattttaaaaaaaaaaaattaggtgtggtggcacacacctgagaggctgagcccaggaatttgaggctgcagtgagctatgatcatgcaactgcactcmatcctgggaaacagagcaagaccttgtctcaaaaaaaaaaaaaaaagttatctgaagtaattttaatttttttattttgaaaatttcatacatacccgagtatatttattacatatgtattatttaaagtataataatatggatgtgtatgtacctaccactcagcctaacagacactatcaataattttaaaataccttatgtgtgtctctcattcacatttccctgtctccccagatataaatactattttgttatttatttag

SEQ ID NO: 610347 - DNA, 532 bp, Homo sapiens
aatatgttcatgtatactaatatggtttaaaagtcagctgagaggcctggtataggtggctcacacttgtaatccaaacactttgggagtccgagccaggaggaatgcttgaggccaggagttcaagactagcctgggcaacacggcaaaatatcatttctaccaaaaattttaaaaaaaaaaaattaggtgtggtggcacacacctgagaggctgagcccaggaatttgaggctgcagtgagctatgatcatgcaactgcactcaatcctgggaaacagagcaagaccttgtctcaaaaaaaaaaaaaaaagttatctgaagtaattttaatttttttattttgaaaatttcatacatacccgagtatatttattacatatgtattayttaaagtataataatatggatgtgtatgtacctaccactcagcctaacagacactatcaataattttaaaataccttatgtgtgtctctcattcacatttccctgtctccccagatataaatactattttgttatttatttag

SEQ ID NO: 610348 - DNA, 525 bp, Homo sapiens
cagaaccaacacttaaatgtaatagagtccctgtgataagatgttcaactgatattttatcccagtgattgagataactttaaatgttcctcaatagtccccacaatagcttagctctgtaaggaaaaaatgtgtttatttttcattgataattataattattataataatgtttttttttttttttttgagacagagtcttgctctgtctcccaagctggagtgcagtggcatgatctcagttcactgcaacctctgcctcccgggttcaagtgattctcatgccycagcctcctgagtagctgggactataggcatgcacaaccactccaggctaactgtattttttgtatttttagtagagacaagttttgccatgttggccaggctggtctcaaactcctggactcaagtgatctgcctgccttggcctcccaaagtactaggattacaggtgtgagccaccacacctggcctataattattatttaaattattaattttctactaatgctgagaaagatg

SEQ ID NO: 610349 - DNA, 588 bp, Homo sapiens
caagcatacaggagatgtagctaattgagggtatgggggactccacatggaagagcagccaattaagaactaaggaaaggatattctaggtaaaagtaacagtaaggaccttaggtataaagcagcagatatatccaggaatagcacatagcatttggtctaacggcagtctaggatattagcagggatatggctgcagagacaggaacagccaagttgaagaggaccctgcagagaccacaccaaaagagctttgctgtgatcctctgggtaatgcaaactgaaggtttttaacaggaaagaacactattgtatstgtatttcagaatgataggcagcagagaagaaaaatgggtgtggcagagttagttaagactttggtaactatgctgttgacattatatctaaagtactaaatttaaacctaagtactacatttaaacctaggcagccacatttttaaatgaacaataacagaattgtccaaaaaggcagctgaaatacctgggcagtctggaacctatgttatgaggaatggctaatgtaacttaatattttagcttagaaaacaaaacaaaacaaaaacct

SEQ ID NO: 610350 - DNA, 588 bp, Homo sapiens
caagcatacaggagatgtagctaattgagggtatgggggactccacatggaagagcagccaattaagaactaaggaaaggatattctaggtaaaagtaacagtaaggaccttaggtataaagcagcagatatatccaggaatagcacatagcatttggtctaacggcagtctaggatattagcagggatatggctgcagagacaggaacagccaagttgaagaggaccctgcagagaccacaccaaaagagctttgctgtgatcctctgggtaatgcaaactgaaggtttttaacaggaaagaacactattgtatctgtatttcagaatgataggcagcagagaagaaaaatgggtgtggcagagttagttaagactttggtaactatgctgttgacattatatctaaagtactaaatttaaacctaagtactacatttaaacctaggcagccacatttttaaatgaacaataacwgaattgtccaaaaaggcagctgaaatacctgggcagtctggaacctatgttatgaggaatggctaatgtaacttaatattttagcttagaaaacaaaacaaaacaaaaacct

SEQ ID NO: 610351 - DNA, 565 bp, Homo sapiens
ccccattagctctaatccccaaacctaatgcccttcctctcaatcctttcattatccctctagatattctggatcagtgactagcagattattctgcatgccactcccatcctcaaaatcctctacctccttgtctgacctagctatgtcttcaggactccaaccctcttttcggctcttcctcccttgactgtcactgttgaacttcttcagagcaatatcccagactatttcttcttttcccactgtatattctccccaaagcatttcattcattcratgacttcactttttatataataattttgaaattttatataataatttgaaattaataattttcaaatctttatttgtttcctgagagtcatatatccaactgctctttggacacttccatttggataacacacattgaaaactgagtttacatcctaatcttaaaacatatgccaaaataagattaatattgattaaatatttaaacgtcagatattatgctatacaaatactaaaatatgtggtgaatgctatgaaacattgagatggtctttttaactgtaac

SEQ ID NO: 610352 - DNA, 485 bp, Homo sapiens
atcaccgatgaaacacacaaaaaaggaaacaacatcccatgctcatgaattggaakaatcattgtgaaaaggaccatattgcccaaagcaatgcatacattcaatgcaattcccatcaaaataccaacatcatttttcacggaattagaaaaaaaaatcctaaaattcatattgaaccaaaaaagagcccaaatagccaaagcaatcctaatcaaaaagaacaactctggaggcatcatattaccagacttcaaattatactacaaggatatagttaccaaaacagcatggtactggtataaaaaacaggcacatagattaatggaacagaatagagaacccagaaataaaaccaaatacttacagccagctgatcttcgacaaagcatacaaaaacataacttagggaatggaccctctttttaataaatggtgcagggaaaactagcaatccacatgtagaagaataaaactggatccctatc

SEQ ID NO: 610353 - DNA, 547 bp, Homo sapiens
ttaagaaaatgaaaaggcaagccacaaagtagcaaaaaaaatttgcaaaatatatatctgataaagatcttgcatccagaataaagatctcttacagctcaacagggaacagaacaaaaaaaggggtagaaaggcaaaagatttgcayagacacatcaccaaagaacacataagaatgcccaacatctttagtctttagggaaatgcaaacccaaaccacaatgagatgccattgcacacccaacagaataactaaaaataaaaagactgatgataccaagtgttggggaggaggttgagcagctaaagctcttcatcatccctatttggaatataaaatgatatgattattttgaaaaataatttgccagttttttttgtacctactctatgacccatcaatcccataccgagatatatacccaagaaaaagaaaaatatgtttacggagacttgtatttaaacttttttaccagttttattcatattaggtaaaacaacaactgaaataaatatttactggtgaatggataaacaaactgtggaa

SEQ ID NO: 610354 - DNA, 418 bp, Homo sapiens
atgttcaggaatctcatgttmctcagaaggaccatatgtggacgtaaaagggatgctccatggcagcatctcctggaaccccatcctaatacagggctacaacttacaactccccaaggagtctcctgaacaaccctgatgatatggtctggctgtgtccccacccaaatctcatcttgaattgtagctcccataattcccatgtgttgtgagaggtatccagtgggagataatcgaatcatggaggcggtctttcccgtgctattctcatgacagtgaataagcctcatgagatctgatggttttataaaggggagtttccctgcacaagttctctctcttgcctgctgccatgtaagatttgcttttcaccttctgccatgattatgaggcctccccagtcacttggaactatgag

SEQ ID NO: 610355 - DNA, 580 bp, Homo sapiens
ggcgagtgacaggtgcagccgcgccatccccaagcatcccggaacctggcccggaggctgctgtgggatccacagccctgcgcgctggggaggcgctgcaatgaccctgcggcggcgccttcccccggcgtccccaaatagaaacagcactagtgccctctctccgaccccaccagggccgctgccgggctcctccttactcagaccaggctctaccgactccgcaacagctgctcaccacgcttgagatgcaaaaggtctgtgtgaatacaataaggggatgcatattttcaggccagaattcacacccgagcatgattttcaccgcgtgattgacttaggtgaatttaaaataccccgagcctcataaataaattgcgctggggctttaaattggcaaaatgagttactgacttccctgactctacttaacattgcacctacctatgttttgaggaagtggaggggagtctttcatgactgtcttagactccaagtcattaggtctattagtttgcttttttcttttctcgtcaatacaattgacttggtcttgsacttccccaggcaactttctgta

SEQ ID NO: 610356 - DNA, 505 bp, Homo sapiens
gcataaattaatatttttacaagcatgatgagtaaaattcaaccacatacaagatgtgtaatataatcgtgtgtttgtacrtgtatcttgttgttttcagaaagaacattattctagggtgttttttaaaaaaatttttaaaatacaaagatcagaggtttctccattttccataggagtgtcatgtttccatggtgatgaaaacagctcctgataccagattaatcaaggtgatctgtgggcttcctgcttcctagttccatgtaacagggagatgcacagaagaaaaggggaaaccggtagcatgtctgataggtgggtagaaaaataccaggaggttcaggttcaggtcttaagactttgttatgtcaatgccattcaatgacagatcctttccaatgtttttttttttttttttcaaaagtggcattctgtttttaacaatacctttagagtaacttcacaaaatatgaaagctttgataaaaattcagaaccacctcttc

SEQ ID NO: 610357 - DNA, 623 bp, Homo sapiens
acaagaagggcaagtacagtacaaaaggatgttttgagagagacgccacattcacataacttttattatagtatattgttataattgttccattgtatttgttattgttgttaatttcttgccatgcctaatttataaattaaactttatcatataccttgcatcatatacatacctttatcataggtatgtattcacaggaaaaaaagcacagtatacacagggttcagtactatttgcagtttcaggcaaccactgggtgtcatagaacgtatttccttccaggataagggggcattgctgtatatgtgtccttcacatgcactggtatctctgagaggaccctcaagaaactagtaggctgggyacagtgcctcacgcctgaaatcccagcattttgggaggctgaggtgggtggatggcttgagcccaggagtttgagaccagcctgggaaacatggcaaaaccctgttttttgtttttgcttttgtttttaaagaaagaaaaaagaaaagaaaaagaaactagtaaagtggtcccctctgaggaattttaggaagagcaaattttatatctattcaaaaattaattttaaaaaattcattatagcaaggagaggcata

SEQ ID NO: 610358 - DNA, 531 bp, Homo sapiens
ttcactgggtgttgggaatagtgcaacaggagacaaacaaggaatacaagtccaggtgtattccacaaattatttgttttctttcaaacaaatgatttcttttaaggcaaaataacagaactaccgtttgcatagctatacacttggtaccttcatctactttcttttctctgctaagaaatcttaagctatgttactcagggcaataaaagctgctgaagtgagtatcagacaagaaattctctcctctaaccttctaggttttaatatctgcagctaaacataaagctggttcttaaacagaacttcactcttatcttgttcaaaaggyggctctgatagtgagcaaatgcaaagctttactccattcagagaggcatagctagggtcctaatcttggaatgaagagagagaccagccatattgaattgtctggggctctttcaaaaccatatctatgtttgatatacacccagcttggcacatactgaacctcacaggtgaaaaagaggtggtttcaatacaaaagtc

SEQ ID NO: 610359 - DNA, 602 bp, Homo sapiens
ctgcactgtttgaatcacagtgctcaggaaacagggcctcctgcagagcataagctttaaaataatagaaatcaactgcctagcttgagcctttccctagctagcacatggcattctgactgcactatcctccccttagaggctcagttccagtgtccccagaatctctcggccttttggggggaaaaaaagtcaagaaagagttatgaagggcagaacatgcatagtgggaagtcgggagaaatctgagggtaggtaggaagatgatctggaaagggatgaggagaaacaagcaccactaacccaccgttctgtgcaggagtctgaagtttttgcatagcatcttgcaccatggcacagagcgggtatgacataaagcagctctggaaagaactgatttgctcttttgccaaatgcttctttctctgcyttacaaaatcagtgccatagcacacttggaatgttaatggacaaatcagaacactgctcaagtccactatcccagttccataactcaaattaacagaatagtttataatcaacataaatctgaatatttatttagtttaaaatatgttgttgacaatgtaatatgaacacag

SEQ ID NO: 610360 - DNA, 515 bp, Homo sapiens
ttagagcacattaataaatacaatttattcataaagtctttgttgagcccttctgtatgtttgtactgttctcagtcctgaaggtgtggtggtgagcaaggcagataagatgccatctatattctagaaagggtggatcagtgaggaatgtgtttgtctgtgagtaaaaggatcctcaccaaatagtggctgcacagcagtgctggtctagagtgcctgtagagaggcctgcagagggctgttgaggtggtggctaagaccggggtgatggcagtggaratgtataggaagtatatcatggattagagtcaatgggacttgctgatggactggatgctggggataaaaggtagagaggattcacaactgacttttagatatttgtcttgataattaatcaagaaggagagaagaaggaggaggaggaagagaagaagaaggaaaaagagaagggaaaggacaggaagaagaaggaggaggagaatgttgtgttgtttcatagtttaatgatattt

SEQ ID NO: 610361 - DNA, 632 bp, Homo sapiens
tttcctgtaggatttttaatttgcaccacttgcttcctccttttccttcaccaaaagtctacaagtgatgcctcacttttcctaatttggtgcctgctaagactgctaccttcagtcccacacatttycatgccactttctttttaggacttttgattttaaaataattttagatctttagaagagataaaaagacagtacaaagtgttctcatatgtactttcacttagatttctctaatgatgacatcttaaacatggaatatttatcaaaactaagaagttaactttgctacaagactgcctactaaactatggactttgttaggcttaccccagtttttccactaataccatttttctgttctaggatccagtccaggatactacaagtatttgttaggtctctttagcctccccagtctatggcagtttcttggttgccctttgcctttcatgaccttggcacttttgaagaatcatggtctaatattttgtagaacatcctcaatctgactttgcttaacgtttctcatgattaggccaaagttgtggattctgggtaagaatactgcagagatgatgtatccttctcatcaaatcatattggatgcacatgatatcaatatgact

SEQ ID NO: 610362 - DNA, 632 bp, Homo sapiens
tttcctgtaggatttttaatttgcaccacttgcttcctccttttccttcaccaaaagtctacaagtgatgcctcacttttcctaatttggtgcctgctaagactgctaccttcagtcccacacattttcatgccactttctttttaggacttttgattktaaaataattttagatctttagaagagataaaaagacagtacaaagtgttctcatatgtactttcacttagatttctctaatgatgacatcttaaacatggaatatttatcaaaactaagaagttaactttgctacaagactgcctactaaactatggactttgttaggcttaccccagtttttccactaataccatttttctgttctaggatccagtccaggatactacaagtatttgttaggtctctttagcctccccagtctatggcagtttcttggttgccctttgcctttcatgaccttggcacttttgaagaatcatggtctaatattttgtagaacatcctcaatctgactttgcttaacgtttctcatgattaggccaaagttgtggattctgggtaagaatactgcagagatgatgtatccttctcatcaaatcatattggatgcacatgatatcaatatgact

SEQ ID NO: 610363 - DNA, 606 bp, Homo sapiens
tgttctcatatgtactttcacttagatttctctaatgatgacatcttaaacatggaatatttatcaaaactaagaagttaactttgctacaagactgcctactaaactatggactttgttaggcttaccccagtttttccactaataccatttttctgttctaggatccagtccaggatactacaagtatttgttaggtctctttagcctccccagtctatggcagtttcttggttgccctttgcctttcatgaccttggcacttttgaagaatcatggtctaatattttgtagaacatcctcaatctgactttgcttaacgtttctcatgattaggccaaagttgtggattctgggtaagaatactgcagagatgatgtatccttctcatcaaatcatattggwtgcacatgatatcaatatgacttattactgctaatatttattttaatcactcagttaaggtggtgtttgccagattccctcattgttaaattaactgttttttcatttgcactctttgatcattatcttattcatacttcttcatagtgagtaagtaggtccagcccacactcaggtggagggaaagtaagccccacgtcc

SEQ ID NO: 610364 - DNA, 626 bp, Homo sapiens
agatgggtgcctctgtcaccgcacactgtcctccaggacgcagtgctcctgtgatgctgattgtatcccagcatcttgcgcgctcgctctgaaatgaacttgtgtttcaagaccatgttgtggtggaatgtggcagtttccaggctggggcactggtgcctgggaggcggccatcagagaaagtggcttcctgctgcagtgaccagcaccatccaggctcyagctgctccattcacctggggctggggtcagcaggacgggccggtcggctgtgggcatagaatacgagagaaagagctttattttaagccaccaagatttttgtttctcaccttgccatcacctagtctccttaagtgacacatatgcacacagtcggtgtgactggccaaaaggtttctattaattcaatacagtcatccctctatcctcagggggtacgttccaagacccccagaggatgcccgaaaccacagatagtactgagccccatgtacactatgtttttcctatccatccacacctgggataaagtttaatttataaatcaggcacagtaagagattgacaacaactagtaaaattgaacaattataacagtatagtctcaattttacaaaaagaag

SEQ ID NO: 610365 - DNA, 626 bp, Homo sapiens
agatgggtgcctctgtcaccgcacactgtcctccaggacgcagtgctcctgtgatgctgattgtatcccagcatcttgcgcgctcgctctgaaatgaacttgtgtttcaagaccatgttgtggtggaatgtggcagtttccaggctggggcactggtgcctgggaggcggccatcagagaaagtggcttcctgctgcagtgaccagcaccatccaggctctagctgctccattcacctggggctggggtcagcaggacgggccggtcggctgtggrcatagaatacgagagaaagagctttattttaagccaccaagatttttgtttctcaccttgccatcacctagtctccttaagtgacacatatgcacacagtcggtgtgactggccaaaaggtttctattaattcaatacagtcatccctctatcctcagggggtacgttccaagacccccagaggatgcccgaaaccacagatagtactgagccccatgtacactatgtttttcctatccatccacacctgggataaagtttaatttataaatcaggcacagtaagagattgacaacaactagtaaaattgaacaattataacagtatagtctcaattttacaaaaagaag

SEQ ID NO: 610366 - DNA, 527 bp, Homo sapiens
cttcctgctctctcctcactcttggaccaccaaggtggcaccctggagaagagatgatcagagtacttggcttactcctgttgcttcatgtgttgggggatgtrttctcttccttggtctacttttctgtttcttctctgttcttatcaccagagtggcaaaatcttaaaaatctagaaatctaggttttcaattaggggcaattgctagaattgcccaggggattcctagcaatatctagagacagttttgattgtcacactgtgtgtatgtgtcagggcttggggggtgtgttattgacgtatagccagtgatgctgctaagatacacaaaaccaaccaagaactctctggtcctgaatgttgacggtgctgaggttgagcaacctgctctagaggactgagatatgataaaatcctggaagatgcagactaagaaggctgctgcctgattttagtctctaaaccacagaagcaaaagaaaatgtgtgcctcccatgtagccagcctgatttactggggtcagag

SEQ ID NO: 610367 - DNA, 562 bp, Homo sapiens
  misc_feature 167: n = A,T,C or G
acctctcccaggatgtcagttacctcatgtcataattaaatctttgcatatttcaaaccttgactttctgtgcccagatcagcacgacttgagtgcttccatgagaaactattttgcatttttccttttgtttagctgtgtggaaatttgagttctgtaaaatgctntattataaactgggacttcatttctaaaaacttgaaatacgctttctaaaatctcctgcagttaggcagttagtaatttttttttttttttttctgagaagagtttcgctcttgttgcccaggctggagtgcagtggtrcgatcttggctgactgcaaccttttgcctcccgggttcaagcagttctcctgcctcagcctcccaagtagctgacattacaggtgcctgccaccatgcccggctaatttttatatttttagtaaagatggggtttcaccatgttggccgggctggtcttgaactcctgacctcaagtgatccacccgcctcagcctcccaaagtgctgggattgcagatgtgagccaccgtgcctggccacgttagtcattctttt

SEQ ID NO: 610368 - DNA, 562 bp, Homo sapiens
  misc_feature 167: n = A,T,C or G
acctctcccaggatgtcagttacctcatgtcataattaaatctttgcatatttcaaaccttgactttctgtgcccagatcagcacgacttgagtgcttccatgagaaactattttgcatttttccttttgtttagctgtgtggaaatttgagttctgtaaaatgctntattataaactgggacttcatttctaaaaacttgaaatacgctttctaaaatctcctgcagttaggcagttagtaatttttttttttttttttctgagaagagtttcgctcttgttgcccaggctggagtgcagtggtgygatcttggctgactgcaaccttttgcctcccgggttcaagcagttctcctgcctcagcctcccaagtagctgacattacaggtgcctgccaccatgcccggctaatttttatatttttagtaaagatggggtttcaccatgttggccgggctggtcttgaactcctgacctcaagtgatccacccgcctcagcctcccaaagtgctgggattgcagatgtgagccaccgtgcctggccacgttagtcattctttt

SEQ ID NO: 610369 - DNA, 562 bp, Homo sapiens
  misc_feature 167: n = A,T,C or G
acctctcccaggatgtcagttacctcatgtcataattaaatctttgcatatttcaaaccttgactttctgtgcccagatcagcacgacttgagtgcttccatgagaaactattttgcatttttccttttgtttagctgtgtggaaatttgagttctgtaaaatgctntattataaactgggacttcatttctaaaaacttgaaatacgctttctaaaatctcctgcagttaggcagttagtaatttttttttttttttttctgagaagagtttcgctcttgttgcccaggctggagtgcagtggtgcgatcttggctgactgcaaccttttgcctcccgggttcaagcagttctcctgcctcagcctcccaagtagctgacattacaggtgcctgccaccatgcccggctaatttttatatttttagtaaagatggggtttcaccatgttggccrggctggtcttgaactcctgacctcaagtgatccacccgcctcagcctcccaaagtgctgggattgcagatgtgagccaccgtgcctggccacgttagtcattctttt

SEQ ID NO: 610370 - DNA, 576 bp, Homo sapiens
tttctgtgttggggtctggtggggacagagatggtggcatgttcatggggcttccacttcagaatacaaatcccgctgacaaagaagaaggcaggggctgacctcgccggggagcatgtgcaggagcaggcacgtgtgttatgtttgtgggtaacaatgtcctggcaaagacaccacgcaacaagatgtccgcaagcccactgtcccatctcagtgtctctgaatttgctctttaaatatttttgaagacctaccgtgtggttggattgtgttaaaggttatttctttttgtaaataagttagcattgggaatttgttatttacaaaggaaccagtaataattctttttatgtaatgaatccttatctcctgatttatctgatttcaaagttcaggtttttagcaggttggrtatttatttcaatgtcaacttctcctcaagccccatggacattctaccaagaggtagtagttattttcagaatccaaaaatacatatatacaatgcaagaagtttaagaatgagtgaacactagagttaggaaacggaggctttcatggaaacagaattcatcc

SEQ ID NO: 610371 - DNA, 527 bp, Homo sapiens
cttcctgctctctcctcactcttggaccaccaaggtggcaccctggagaagagatgatcagagtacttggcttactcctgttgcttcatgtgttgggggatgtgttctcttccttggtctacttttctgtttcttctctgttcttatcaccagagtggcaaaatcttaaaaatctagaaatctaggttttcaattaggggcaattgctagaattgcccaggggattcctagcaatatctagagacagttttgattgtcacactgtgtgtatgtgtcagggcttggggggtgtgttattgacgtatagccagtgatgctgctaagatacacaaaaccaaccaagaactctctggtcctgaatgttgayggtgctgaggttgagcaacctgctctagaggactgagatatgataaaatcctggaagatgcagactaagaaggctgctgcctgattttagtctctaaaccacagaagcaaaagaaaatgtgtgcctcccatgtagccagcctgatttactggggtcagag

SEQ ID NO: 610372 - DNA, 604 bp, Homo sapiens
tttacttgagatctttccacttttttgaagtagatgtttacagctattaacttcctgcttagaatgctatatctcataggtttgggtatgttgtatttccattttcatttgtctcaargaatttttaaattttcttttaaagttcttcattgacccatttgttattcagtagtgtgtcatttaatttccatgtatttgtagagtttccaatattctttctggtattgatttctagtgttattccattgtggtcagaaaaaatacttgacatcattttgattttttaatttgttaagacttgttttgtgacctaatatatggtctatcctggaaaatatttatgtgctgttgaaaagaatatgtattctgtagctgttgaatggaatactccataaatgtctgttatgtccatttggtctagagtgcagtttaactctaatgtttcttcattgattttctatctgaataacctgtccattgtggaaagtggggtgttgaagtccctactattattatattgcagctgatctcttcctttaagtctattaatagttgcttgtatgtttgggtgctctagtgttgggtacatatatatttacaattg

SEQ ID NO: 610373 - DNA, 527 bp, Homo sapiens
cttcctgctctctcctcactcttggaccaccaaggtggcaccctggagaagagatgatcagagtacttggcttactcctgttgcttcatgtgttgggggatgtgttctcttccttggtctacttttctgtttcttctctgttcttatcaccagagtggcaaaatcttaaaaatctagaaatctaggttttcaattaggggcaattgctagaattgcccaggggattcctagcaatatctagagacagttttgattgtcacactgtgtgtatgtgtcagggcttggggggtgtgttattgacgtatagccagtgatgctgctaagatacacaaaaccaaccaagaactctctggtcctgaatgttgacggtgctgaggttgagcaacctgctctagaggactgagatatgataaaatcctggaagatgcagactaagamggctgctgcctgattttagtctctaaaccacagaagcaaaagaaaatgtgtgcctcccatgtagccagcctgatttactggggtcagag

SEQ ID NO: 610374 - DNA, 576 bp, Homo sapiens
taatcactgttagcaacttgcatgtgaactttgatttttatttgtcaagtacatatatttgaggttttgtttgtttgtttgtttgttgagatggagtctcactctgtcacccaggctggagtgcagtggcgcgatcttggctcactgcaacttctgccacccaagttcaagtgattctcctgcctcagcctcctcagtagctggggttatargcatgagccactgcacccggccatatttgtttgtttaaacaaaaatggagtcctactctacgtagttttctgtaaattgctcatttcactcaataatgtatcatacaaatagtttcattccatacatgaaagtcttcttcattccttttttagcaattacaaaatattttatacagatttgccttaatttatttaatcagtcccctaattattgaaatttaggttgttttcagtttttcgatattccaagtgaaactatgatgatcatcttaacccatatgtatctttacacaaaattatgctgtaacttatattcctagaaggaaaatggttaaatcaaaggtaagcacatttagattttcaa

SEQ ID NO: 610375 - DNA, 569 bp, Homo sapiens
gtggcggaaacaggaggatctgcaaggcagaaggttcggggactggtcctgagaagagggaagaggcagagtgagtcactgcacgcacctggcctccatggacgagcragggcatcccagaaacgtgtaaatgaccccgagtgtgactgggaaggagaacttattccttaccaggaaactggaagctaaaaatacagagggtgacgtagaaacacgcagaaaccattctaaagaaagtagtgatcttgtattaaattgagcagaattctcacagattttaccattcctgttataaactagtatttgttgtttagccaaaacagaaaatgatttccactggacagtagaaaaatatgtgtaaaatagggaagaaagttagtattggatcagtgtgagtcctgaagcactttcagtgctgtgagaacgacatccactttgggtttcattcgtttgtaagcagaggagctgtcagtcactcgtgcttctcggtggcctctgagccatggtgtcgagtgaagagtagttcttgtttgttacaacctttgtgagtcagccatgcccgcaaagcg

SEQ ID NO: 610376 - DNA, 569 bp, Homo sapiens
gtggcggaaacaggaggatctgcaaggcagaaggttcggggactggtcctgagaagagggaagaggcagagtgagtcactgcacgcacctggcctccatggacgagcaagggcatcccagaaacgtgtaaatgaccccgagtgtgactgggaaggagaacttattccttaccaggaaactggaagctaaaaatacagagggtgacrtagaaacacgcagaaaccattctaaagaaagtagtgatcttgtattaaattgagcagaattctcacagattttaccattcctgttataaactagtatttgttgtttagccaaaacagaaaatgatttccactggacagtagaaaaatatgtgtaaaatagggaagaaagttagtattggatcagtgtgagtcctgaagcactttcagtgctgtgagaacgacatccactttgggtttcattcgtttgtaagcagaggagctgtcagtcactcgtgcttctcggtggcctctgagccatggtgtcgagtgaagagtagttcttgtttgttacaacctttgtgagtcagccatgcccgcaaagcg

SEQ ID NO: 610377 - DNA, 502 bp, Homo sapiens
ttgcaggcatgagctggagctatctccatgtggggatccctctgctctacataggggaactcccccccctttcccttttccaactcrggacccttggtggacagcatctaagcacagaggcaactgcaggtctctggctggggacactctggtgacagtgaaaggtttccgtgtggaagcctgaccaccactgcccagtttgggtgagggacctgagtttttttcttgttttcagtctttcagtggccatttcctacctaattgctccttggtaactgagggcaactggctggggccacactctggtgttacctaaatttcttgaggctctccttggaggaatgagagagtaactaaggcagtaaactatgataaagtaagggaggttacacaggacaaggagaaaaatccagccatgtttcatgggaggaggactcccaaaggcagtgttgagccctcttttattcctagtattactacttttggtatgaactttcctttt

SEQ ID NO: 610378 - DNA, 495 bp, Homo sapiens
aggcatgagctggagctatctccatgtggggatccctctgctctacataggggaactcccccccctttcccttttccaactcgggacccttggtggacagcatctaagcacagaggcaactgcaggtctctggctggggacactctggtgacagtgaaaggtttccgtgtggaagcctgaccaccactgcccagtttgggtgagggacctgagtttttttcttgttttcagtctttcagtggccatttcctacctaattgctccttggtaactgagggcaactggctggggccacactctggtgttacctamatttcttgaggctctccttggaggaatgagagagtaactaaggcagtaaactatgataaagtaagggaggttacacaggacaaggagaaaaatccagccatgtttcatgggaggaggactcccaaaggcagtgttgagccctcttttattcctagtattactacttttggtatgaactttcct

SEQ ID NO: 610379 - DNA, 604 bp, Homo sapiens
aaggattaaagacatcacagccccctgtaagattcagtaatattggccagacatggtggctcacgcctgtaatcccagcactttgggaggccgaggagggcggatcacaaggtcaggagatcaagatcatcctggcgaacactgtgaaaccccatcactactaaaaatacaaaaaaattagccgggcrtggtgatgggtgcctgtagtcccagctactcaggaggctgaggcaggagaatggcatgaaccccggtgagggggagcttgcagtgagcagagatcctgccactgcactccaccctgggcgacagagcgagactccgtctcaaaaaaaaaaaaagattcagtaatattaataaaatttgagatatatagggttagaacccaacacatgcagagaaaaactgtttatactgccgtagagcaggaaacgaaacccaggttctaagggggcagggaaactgtttgctaggtgtgccatgagctaccacacaagtgcatcagtgactgggcatagagcaggcacaattacaggatggttaagagagtgagctgtggagcctatgggaacatgcatttttaaactgtgatgtgcctcagttt

SEQ ID NO: 610380 - DNA, 455 bp, Homo sapiens
acccacaggaacaaagagaactgaaaatggtaaataacagggttaatataacaaatgatataagtatatacaccttctttcctcacagcttctttgaaaaacaaaattacataaataataacaatgtataattgagaaaatctgtcattagtacatctgcccagtragaaatactaaagggagtcctttatgctaaaacagaaggatactacataggaattcaaatccacattgttgcagaagagtcaaactctaagaactcgaagtgcaggcttccaggtaacaggtagatttaagatttttctgattggttgaaagagttattatcaatagtaagcaatgtctgggttatgataagaggttgcagagaccaaattttatcatgcagatgaagcctccaggtagcaggcttcagagaggatagatggtaagtgtttcttcttatcagactgaag

SEQ ID NO: 610381 - DNA, 450 bp, Homo sapiens
agccactccccttcacttgcatttccgcctgagctctgcctcctgtcagatcagaggcattaggttctcgtaagtgcgcaaaccctattgttaactgcacatgtgagggatctaggtggcgcactccttacgagaatctaatgcctgatgacctgtcgctgtctcccatctctcccagatgggaccatctagttgcaggaaaacaagctcagggctcccactgattcttcattatagtgagttgtataattatttcattatatgctacaatgtaataataatagaaaaaagyacacgataaatgtaatgcgcttgaatcatcaagaaaccagtccccccaccctgggagggggggcttctacaaaatggtccctggtgccaaaaatgttggggaccactgataagagtccatcactgaattgcacgctagatcaaagcagcatagctcaa

SEQ ID NO: 610382 - DNA, 573 bp, Homo sapiens
acaacagagagctcttcttctaggaagttcgaggcattaaaaatttcctccactgggagcatgagcataaatatcttccatattgttcccagtttttctgaaggcgaaagaaaataaagaaggccagtcaattagaaatctgaatttttctattaaagaaggcaggggttagccgggcacagtggctcacgcctgtaatcccagcactttggaaggccaaggtgggtggatcacytgaggtcaggagtttgagactatcctggctaacatggtgaaaccctgtctctactaaaaatacaaaaattagctgggcgtgatggcaggcgcctgtaatcccagctactcgggaggctgaggcaggagaactgcttgaacccgggaggcagaggttgcagtgagtggagatcgcgccactgcactccagcctgggtgacagagtgagaccccatctcaaaataaataaataaataaaaataaagaaggcgggggttcctgtctctatttttccaggagaacaaatattaccaatgtacaaaactagggggagacaggagtgactttacctcactgcca

SEQ ID NO: 610383 - DNA, 573 bp, Homo sapiens
acaacagagagctcttcttctaggaagttcgaggcattaaaaatttcctccactgggagcatgagcataaatatcttccatattgttcccagtttttctgaaggcgaaagaaaataaagaaggccagtcaattagaaatctgaatttttctattaaagaaggcaggggttagccgggcacagtggctcacgcctgtaatcccagcactttggaaggccaaggtgggtggatcacttgaggtcaggagtttgagactatcctggctaacatggtgaaaccctgtctctactaaaaatacaaaaattagctgggcgtgatggcaggcgcctgtaatcccagctactcgggaggctgaggcaggagaaytgcttgaacccgggaggcagaggttgcagtgagtggagatcgcgccactgcactccagcctgggtgacagagtgagaccccatctcaaaataaataaataaataaaaataaagaaggcgggggttcctgtctctatttttccaggagaacaaatattaccaatgtacaaaactagggggagacaggagtgactttacctcactgcca

SEQ ID NO: 610384 - DNA, 711 bp, Homo sapiens
gtcctttttacagcctttgattgccactgtctaaggcagataatcatgtcccattcttccccaagaaaagaccatcatgcacaattgtttttttctactcscatcttccaattgtacccctgatcttctgtacttcctgtctctacctcctgtccttcccaagaatttgatttctctccatctctctccaacttatgttaatttccccaagattttacccttgctttttctattttgtcacctttcattcatgtcgcaaagcaacattggctgcagcctccttcccttttattgttcttgtcaaggtcaccaagcccttctgcatttccagttgaatccgaaagactatttctatttcaacaattcattcaggtaatacacaaatacattctcaacatgaaagaaacagctcaggactatagagaatacaaagtgaagttatccttcatccctctctgcctctctggatcagcagccacagctcttgtgttaaccttgaactgtgctgttcctccccaatacagagcataggcaggagaggagcactgccaagcaaagctccctcagatttcagcccttggagaatgccccttaattcccatccatgtgtatatccttttatcctgcatttcatgcagtttcctcaaaaccctgctgacatttgctgcagtttcttatatttgtttttgtcctttcttcaagttctgtttc

SEQ ID NO: 610385 - DNA, 711 bp, Homo sapiens
gtcctttttacagcctttgattgccactgtctaaggcagataatcatgtcccattcttccccaagaaaagaccatcatgcacaattgtttttttctactcccatcttccaattgtacccctgatcttctgtacttcctgtctctacctcctgtccttcccaagaatttgatttctctccatctctctccaacttatgttaatttccccaagattttacccttgctttttctattttgtcacctttcattcatgtcgcaaagcaacattggctgcagcctccttcccttttattgttcttgtcaaggtcaccaagcccttctgcatttccagttgaatccgaaagactatttctatttcaacaattcattcaggtaatacacaaatacattctcaacatgaaagaaacagctcaggactatagagaatacaaagtgaagttatccttcatccctctctgcctctctggatcagcagccacagctcttgtgttaaccttgaactgtgctgttcctccccaatacagagcataggcaggagaggagcactgccaagcaaagctccctcagatttcagcccttggagaatgccccttaattcccatccatgtgtatatccttttatcctgcatttcatgcagtttcctyaaaaccctgctgacatttgctgcagtttcttatatttgtttttgtcctttcttcaagttctgtttc

SEQ ID NO: 610386 - DNA, 580 bp, Homo sapiens
aacatcacactctggggactgttgtggggtaggggkagggggtagggatagcattaggagatacacctaatgtaaatgacgagttaatgggtgcagcacaccaacatggcacatgtatacatatgtaactaaccggcacattgtgcacatataccctaaaacttaaagtataataataataataataataataataataataataaattttatattacagttgggaatgttttggatatactgtgttaaataaaatgtattatcacaattaaaaaaagaaatttgaaatttaaagattcgctttgaacctatttgatcagaaagtattaaatatcactaccacatgagttaaaacaaaaaatggaataaaaaacaaaagtggtgtctatgtaatcagtgaattacttgataggacattttaactattttacagttcttcttagcaccagaataaactggttccaaggttaaaaaaaaaaaagaaagtaaaatagatgcaaaaataatcactcataactgaagatcatttcacctttgaatgagaatttgtctctgaaggctaacttttctaggcaaagtc

SEQ ID NO: 610387 - DNA, 580 bp, Homo sapiens
aacatcacactctggggactgttgtggggtagggggagggggtagggatagcattaggagatacacctaatgtaaatgacgagttaatgggtgcagcacaccaacatggcacatgtatacatatgtaactaaccggcacattgtgcacatataccctaaaacttaaagtataataataataataataataataataataataataaattttatattacagttgggaatgttttggatatactgtgttaaataaaatgtattatcacaattaaaaaaagaaatttgaaatttaaagattcgctttgaacctatttgatcagaaagtattaaatatcactaccacatgagttaaaacaaaaaatggaataaaaaacaaaagtggtgtctatgtaatcagtgaattacttgataggacattttaactattttacagttcttcttagcaccagaataaactggttccaaggttaaaaaaaaaaaagaaagtaaaatagatgcaaaaataatcactcataactgaagatcatttcacytttgaatgagaatttgtctctgaaggctaacttttctaggcaaagtc

SEQ ID NO: 610388 - DNA, 576 bp, Homo sapiens
agcaatcctcctgcctcagccccttaagtagctgggactacaggcacactccaccacgctcagctaatttttgtactttttgtagagatgaggcgctgctatgttgcccagagtggtcttgaactcctggrctcaagcaatccttccacctcagccttccaaagtgctgaaatttataggtatgagccaccacaccgggccaattacaagttgacaaaggaaaatgctctaagaaaagataacttttgttcttattccctttttattttttaagcatcagagctatcaaactgcattctcttatttttaaaagtgagagttaagccttttatttttcatgtataattgcccttatagtcttcataagaaattaagagttttgtataaccatttatactttcaccttatttgactaattttgactaattgttgagaaaataagtctgaattaaagagtcacaattgcagtttatttcagagaaatttttattctccaatgcacatggtaactagtgttataccagaaagaatggtaactagtgttataccagaaagaatatcagcgagtggagctcc

SEQ ID NO: 610389 - DNA, 576 bp, Homo sapiens
agcaatcctcctgcctcagccccttaagtagctgggactacaggcacactccaccacgctcagctaatttttgtactttttgtagagatgaggcgctgctatgttgcccagagtggtcttgaactcctgggctcaagcaatccttccacctcagccttccaaagtgctgaaatttataggtatgagccaccacaccgggccaattacaagttgacaaaggaaaatgctctaagaaaagataacttttgttcttattccctttttattttttaagcatcagagctatcaaactgcattctcttatttttaaaagtgagagttaagccttttatttttcatgtataattgcccttatagtcttcataagaaattaagagttttgtataaccatttatactttcaccttatttgactaattttgactaattgttgagaaaataagtctgaattaaagagtcamaattgcagtttatttcagagaaatttttattctccaatgcacatggtaactagtgttataccagaaagaatggtaactagtgttataccagaaagaatatcagcgagtggagctcc

SEQ ID NO: 610390 - DNA, 576 bp, Homo sapiens
agcaatcctcctgcctcagccccttaagtagctgggactacaggcacactccaccacgctcagctaatttttgtactttttgtagagatgaggcgctgctatgttgcccagagtggtcttgaactcctgggctcaagcaatccttccacctcagccttccaaagtgctgaaatttataggtatgagccaccacaccgggccaattacaagttgacaaaggaaaatgctctaagaaaagataacttttgttcttattccctttttattttttaagcatcagagctatcaaactgcattctcttatttttaaaagtgagagttaagccttttatttttcatgtataattgcccttatagtcttcataagaaattaagagttttgtataaccatttatactttcaccttatttgactaattttgactaattgttgagaaaataagtctgaattaaagagtcacaattgcagtttatttcagagaaatttttattctccratgcacatggtaactagtgttataccagaaagaatggtaactagtgttataccagaaagaatatcagcgagtggagctcc

SEQ ID NO: 610391 - DNA, 637 bp, Homo sapiens
taaaactttcaaattgtctacttcttgaattttccatttaacaatttcagactgtggttaactggataaataaaacaatggaaagggaaactgtggataaatggaaacaactgtagtctcaacttaatatttttaagatcttcaaaatattctgcaatttagagaaaagtgagatatctaaacaaatccaaggtgggcggatcacgaggtcaggacatcaagaccatcctggctaacacggtgaaaacccatctctactaaaaatacaaaaaattagctgggagtggtggtgcrtacctgtagtcccagatactcaggaggctgagccaggagaatggcgtgaacctgggaggcggagctcgcagtgagccatgattgcaccactgcactccagcctgggcaacagagcaagactctgtctcaagataaaaacagaacaaaacaaaactgtgacaaaactatacagaaatgcttaaggaaaaagatgacaatcctgccattctttctaatttaatcatcttgataagtgtgaagtcttttgacagattctcagcacttgtgtgtgtatttgtgtgtgtatgtatacatatatatatataatctccacatattatcactatattatcattagtttacc

SEQ ID NO: 610392 - DNA, 526 bp, Homo sapiens
tggcttatctgacttaggttcatctatgtcgttaagattcattcatgttatcacacactgcagaattttctttttaaaatttgtataatatttcattttctttatgtatctgtcaatggacatttasattgcttttacatcttggatattatgaataatgttgcaataaacatggaagtgctgataattctttgagattctgattgtggttcttttgaataaatacccagaaatgggattgctggatcatatggtagttctattttttaatttttgaggaaatttaatactattttccatagaggctgtactattttgcattcccccatcagtgtggaagagtttcagtttattcacatccttaccaacacttgtctttactttttttgacaatttctactctgacaggtgttaggtcatatctcattgtggttttgatttgcatttctctgattagtgacattaaacttttttcatatactttttggtcatttgtatggcttccttggaaaaatgtctattcaag

SEQ ID NO: 610393 - DNA, 526 bp, Homo sapiens
tggcttatctgacttaggttcatctatgtcgttaagattcattcatgttatcacacactgcagaattttctttttaaaatttgtataatatttcattttctttatgtatctgtcaatggacatttagattgcttttacatcttggatattatgaataatgttgcaataaacatggaagtgctgataattctttgagattctgattgyggttcttttgaataaatacccagaaatgggattgctggatcatatggtagttctattttttaatttttgaggaaatttaatactattttccatagaggctgtactattttgcattcccccatcagtgtggaagagtttcagtttattcacatccttaccaacacttgtctttactttttttgacaatttctactctgacaggtgttaggtcatatctcattgtggttttgatttgcatttctctgattagtgacattaaacttttttcatatactttttggtcatttgtatggcttccttggaaaaatgtctattcaag

SEQ ID NO: 610394 - DNA, 520 bp, Homo sapiens
ctccacatcctcaccatggagggcctttaaaatgcagagtctcaggacccttggatttttggttccaggatctagtgtgaaggcccacaatctggattgctaaagctccccagctgatcctgatgctggtggccctccaaacacgcttcggttggggttttattaaggttcagtcactgggagggccttcagaaggagattccatcacgtgtatccacggtttgctgagtcttacacatgccaggcagttggaggtagtctgaattgagccctgtattccacaactccaactggtgtcaacacagcttaggaagaatacatgtggcattccctcacagactctgatgtggcaagtgcagggcagatagcctgtggccctcggtttgggaagctgtgacatcctggaatgggtgctgggtctcagacatgcaatttccccacccatccttgtcctgcccctttaggaaggcrtttgaccatagtgggtctcagacttgttgtgagagaaaacgtgacctgt

SEQ ID NO: 610395 - DNA, 587 bp, Homo sapiens
ttaatatatttaagtgtagtttcttctattaaccaaccttgctaggcctgctagattgaaataataataaagaaaaagaattccagctctcccttcattaaaccaagatatgctatgtttactagggggtaatatctaaaagcaattattaatatttctcttttactgtgctctcatgactatgaatgtcaccctaattgcccagagccatcttttggaagaaaaacttagggtacggaaattaagactgtaacaagataaatgtaaacaaaaaaatacaggtaggatgcagctttggatgctcaaagttagaaacatatcctttcaagtcatgttatttttctggaaaaggattttccgattcctttagctctcatgtagcataccaagggtttaaattggctttatagtcagatagaaggatttcatgtagggaaagtaaaaggaaactcaggctctttccaatgcctgtggattatggaacaagtaacaggcacaaggagaaagagmtatcagagctcatcagatatatatgtccagattttactttctatgtgcttagctcactaagggctgataaggaaggg

SEQ ID NO: 610396 - DNA, 442 bp, Homo sapiens
atttaccctgcattatgcttacagatttaattcctcacatttgttgttttactaaggaagcattttggcttacccctcagtttataatctcatatgaatgcatgggaatttatatacattattcatatggtctgtcttcaatggaaaaaaataccctatcttgagtttttagcatggaggaatacctccaactaggaaaactcactgtataagaatacctyacttaaacaattaacagatttttcacccttaatcaatggcattcctgagtaaatatttaaaataaatgctgtaaaaatattaaaaatgctctctaaaatgttgcttgaatgtaggtctaatgtggacttacagcacagaacagctgacataatgctgacattttcacacaaaattagaagtgatagaaagttaaaaatttttctaatattttaaaaataca

SEQ ID NO: 610397 - DNA, 616 bp, Homo sapiens
ttggccaggctggtctcaaactcctgacctcaggtgatctgcccacctgggcctcccaaagtgctgggattacaggcatgagccaccacgcayggccaaaattaatattatagcacaaaaaagaaatatacaacaaatgaacattttaattacattaatatatacatcgtaaaattctatctatatattgatttgtcacagtaatgaataacattacgatttagcacaattaaataaaaagtaagagcacaagccattttttaaaggaatgtttccagtttaaaaatattattcaaagttaataaagtgttttttgtcttgttttcttttgtttttgagacagagtcactctctgttgctcaggccggagtgcagtggtgcgatctcaactcactgcaacctctgcctcctgggttgaaaggattcttgtgcctcagcctcctgagtagctgggactgcaggcatgcgccaccacacccggctaatttttgtgtttttagtagagatggggtttcagcatgttggccaggttggtctcgagctcctgacctcaagtgatctgcccaccatggcctcccaaagtgctgggattacaggcgagagccattgtgtccgg

SEQ ID NO: 610398 - DNA, 616 bp, Homo sapiens
ttggccaggctggtctcaaactcctgacctcaggtgatctgcccacctgggcctcccaaagtgctgggattacaggcatgagccaccacgcacgrccaaaattaatattatagcacaaaaaagaaatatacaacaaatgaacattttaattacattaatatatacatcgtaaaattctatctatatattgatttgtcacagtaatgaataacattacgatttagcacaattaaataaaaagtaagagcacaagccattttttaaaggaatgtttccagtttaaaaatattattcaaagttaataaagtgttttttgtcttgttttcttttgtttttgagacagagtcactctctgttgctcaggccggagtgcagtggtgcgatctcaactcactgcaacctctgcctcctgggttgaaaggattcttgtgcctcagcctcctgagtagctgggactgcaggcatgcgccaccacacccggctaatttttgtgtttttagtagagatggggtttcagcatgttggccaggttggtctcgagctcctgacctcaagtgatctgcccaccatggcctcccaaagtgctgggattacaggcgagagccattgtgtccgg

SEQ ID NO: 610399 - DNA, 616 bp, Homo sapiens
ttggccaggctggtctcaaactcctgacctcaggtgatctgcccacctgggcctcccaaagtgctgggattacaggcatgagccaccacgcacggccaaaattaatattatagyacaaaaaagaaatatacaacaaatgaacattttaattacattaatatatacatcgtaaaattctatctatatattgatttgtcacagtaatgaataacattacgatttagcacaattaaataaaaagtaagagcacaagccattttttaaaggaatgtttccagtttaaaaatattattcaaagttaataaagtgttttttgtcttgttttcttttgtttttgagacagagtcactctctgttgctcaggccggagtgcagtggtgcgatctcaactcactgcaacctctgcctcctgggttgaaaggattcttgtgcctcagcctcctgagtagctgggactgcaggcatgcgccaccacacccggctaatttttgtgtttttagtagagatggggtttcagcatgttggccaggttggtctcgagctcctgacctcaagtgatctgcccaccatggcctcccaaagtgctgggattacaggcgagagccattgtgtccgg

SEQ ID NO: 610400 - DNA, 616 bp, Homo sapiens
ttggccaggctggtctcaaactcctgacctcaggtgatctgcccacctgggcctcccaaagtgctgggattacaggcatgagccaccacgcacggccaaaattaatattatagcacaaaaaagaaatatacaacaaatgaacattttaattacattaatatatacatcgtaaaattctatctatatattgatttgtcacagtaatgaataacattacgatttagcacaattaaataaaaagtaagagcacaagccattttttaaaggaatgtttccagtttaaaaatattattcamagttaataaagtgttttttgtcttgttttcttttgtttttgagacagagtcactctctgttgctcaggccggagtgcagtggtgcgatctcaactcactgcaacctctgcctcctgggttgaaaggattcttgtgcctcagcctcctgagtagctgggactgcaggcatgcgccaccacacccggctaatttttgtgtttttagtagagatggggtttcagcatgttggccaggttggtctcgagctcctgacctcaagtgatctgcccaccatggcctcccaaagtgctgggattacaggcgagagccattgtgtccgg

SEQ ID NO: 610401 - DNA, 605 bp, Homo sapiens
ataaacaaacaaatgaatgaataaataaataaaagatttgccctgaaaatagtagtccagttttttattgacagtggatccaatttagaaaagttggaattaattttatgcaatagtgatttaaaatctccgtatgatcagcagggagaaaacacattttataccagaggaattatggtatctttggctcacaaattataccatataagcatcactagatgatctacctatttgggcagttttatgccctaagcagttataaacattgaaactcaccttttcaartctgctccaatgctcctgtcatactgaatgctgacatgcagtttcatactctcatttcataaagaatgaggacattagagcttaagatgaactcaaagttatagccaggagccataaattcgatttctcttagtcccccataatattgttttgtttgtttgttttaagacagcatcttactttgtcaccaaggctagagtacagtgacatgatcttggctcactgcagccttgacctcctgggctcaagtgatcctcctacttcagcctcctgagtagctggaaccacaggcacatgctaccctgcctggctaatttttg

SEQ ID NO: 610402 - DNA, 516 bp, Homo sapiens
tgaaagttcatttgtggagaatgggatatgaagggcagcttatgccatagttaaggtgatgtaactgtacttgaaagtaagcctcttctcccagggaccagcacccagttaggagaactagtggcacttacccaagccttagaactgggaaagggaagaagaataaatgtgtatacagatagtatgcttatctaagcctacatgaccatgctgcaatatggaaagaaaggtagttcctaacctctgggggaacccccattaactgccacaaggaaatcatggagttattgcactcatgcaaaaacccaaggaggtggcagtcttacactgctgaagccaacagaaaggggaaggagaggggagaacagcaccataagcggctggcagaggcaaggaaagaccagcagagagaaagagagagacaaagtcaaaaacagaaggaaagagagaaagagacagaaacagccrgagagaaagagagagaaagagacagaaccagagagaaagagagagaga

SEQ ID NO: 610403 - DNA, 632 bp, Homo sapiens
ggtcttttctccttgacatctctgccaaggcaccttgactcatgagagtgtccagcctacttgaggaaaattgtccaagaagtctaaaggtttcttccttatgaggttaattcaattcactttttaaaaatgtagtaggcactgggcatacaaagatgaatgataccctttatcctgggagcttaaaatccaatggagaatgtagaagatacacaatacaggtggccctccatatctgtgacttctgcatactaggattcaaccaacctcagttaaaaatatttgaaaaggctgggcgtggtggctcacgcctgtaatcccagcactttgggaggccgaggtgggcggataatgaggtcaggaaatcgagaccatcctggctaatacggtgaaaccccatctctactaaaaatacaaaaaattagctgagcgcggtggcgggcgcctgtagtcccagctactcrggaggctgaggcaggagaaaggcgtgaacccgggaggcggagcttgcagtgagccgagatcgcaccactgcagtccggctgggcggaagagtgagactccgtctcaaaaaaaaaaaaaaaaaaaaaaggtttgaaaaaataaaaaataataaaaccacaataaaaata

SEQ ID NO: 610404 - DNA, 632 bp, Homo sapiens
ggtcttttctccttgacatctctgccaaggcaccttgactcatgagagtgtccagcctacttgaggaaaattgtccaagaagtctaaaggtttcttccttatgaggttaattcaattcactttttaaaaatgtagtaggcactgggcatacaaagatgaatgataccctttatcctgggagcttaaaatccaatggagaatgtagaagatacacaatacaggtggccctccatatctgtgacttctgcatactaggattcaaccaacctcagttaaaaatatttgaaaaggctgggcgtggtggctcacgcctgtaatcccagcactttgggaggccgaggtgggcggataatgaggtcaggaaatcgagaccatcctggctaatacggtgaaaccccatctctactaaaaatacaaaaaattagctgagcgcggtggcgggcgcctgtagtcccagctactcaggaggctgaggcaggagaaaggcrtgaacccgggaggcggagcttgcagtgagccgagatcgcaccactgcagtccggctgggcggaagagtgagactccgtctcaaaaaaaaaaaaaaaaaaaaaaggtttgaaaaaataaaaaataataaaaccacaataaaaata

SEQ ID NO: 610405 - DNA, 580 bp, Homo sapiens
tctcggctctctgcaacctctgcctcccagattcaagtgattctcatgcctcagcttcccaagcagctggaactacaggcatgcgccatcacgyccccggctaatattttgtatttttagtagagaggggatttcaccatgttggccagactggtctcaaactcctggcctcaagtgatctacccacctcagcctcccaaaatgctggaattacaggagtgagccgccgcgcccagcctctgagcagttctaacttgctgtgggggagaaaaatcttgctattgaaaagagttaggaaactctcggccacttttggtgggaatgtaaaatggtacagccactacaaaaaacagtatggcagttcctaaaaaaaattaaaaatagaattgccaggtgatccaacaattccacttctgggtatatacccaaaataattaaaagcagaatcttgaaaagatacttgtatatcatattcatagcagcattgttcacaatagccaaaaggtggaagtaaatcaggtatccacccatgcaaaatgtagtacagtatatacacacaatggaatattattcagcctgc

SEQ ID NO: 610406 - DNA, 580 bp, Homo sapiens
tctcggctctctgcaacctctgcctcccagattcaagtgattctcatgcctcagcttcccaagcagctggaactacaggcatgcgccatcacgccccckgctaatattttgtatttttagtagagaggggatttcaccatgttggccagactggtctcaaactcctggcctcaagtgatctacccacctcagcctcccaaaatgctggaattacaggagtgagccgccgcgcccagcctctgagcagttctaacttgctgtgggggagaaaaatcttgctattgaaaagagttaggaaactctcggccacttttggtgggaatgtaaaatggtacagccactacaaaaaacagtatggcagttcctaaaaaaaattaaaaatagaattgccaggtgatccaacaattccacttctgggtatatacccaaaataattaaaagcagaatcttgaaaagatacttgtatatcatattcatagcagcattgttcacaatagccaaaaggtggaagtaaatcaggtatccacccatgcaaaatgtagtacagtatatacacacaatggaatattattcagcctgc

SEQ ID NO: 610407 - DNA, 308 bp, Homo sapiens
gaagatctaaggccgggcatggtggctcacgcctgtaatgctagcactttggaagaccaaggttggaggatcacttgagatcaggtatttgagaccggcctggccaacatagtgaaacagcgtctctactaaaaaaaaaaaaaaatagctgggtgtggtggcacgtgcctatagtcccagctactcaggaggctgagacaggagaactgcttgtgctcaggaggcagaggctgcagtgagcygagatcatgccactgcactccagcctgggtgacagagcaagactctgtctcctcaaaaaaaaagag

SEQ ID NO: 610408 - DNA, 495 bp, Homo sapiens
cgttttcagcaaaaaattatgaaacatgcaaagaagcaagaaagtatggtctatacacaggaaaaataaacaatcaataggaactccctaatgaagcccagaagatgttggctgcaaacttcccagatttgatgaacaagattaatctataaatctaagaagctcaatgaatttcaagtaggataaactcaaagaaatccacaactagacacatcataatcaaacagtagaaagtcaaaaacaaagagcatctcacccaaacaaaagtgactygccatatacaatggatcttcaataatactaaaaagcaatctctcattagaagcaataaagggcaaagggatgaaaaaaagttggttaatgggcacaaaaatagttatatagaagaaatatgttctagtgtttgacagtacagtagggaaattatagttgacagtaatttattatatatttcaaaatagctgaaaagaagaattgtaatgttcccaccacaaa

SEQ ID NO: 610409 - DNA, 554 bp, Homo sapiens
attgcctcaacttttaatgtataagttaactctcgcatgttttaatagctcrtctagttcaatttggccttcaaacgctatatcccctattatagaactcactttccatgaccacgctcttataattattttcctaattagttccctggtcctatacattattttcctaatactcaccaaaaaattaactcatactagcatcatagatgcctaaaaaatcgagactgtctgaactattttacctgccattatcttaattttaattgccctcctatccttacgtgttctgtacataacagatgaggttaacaacccttctatcactgtcaaagcaattggccaccaatgatattgaagctatgaatatacaggctatgaagaattagtcttcgattcttatatagtcccaacagcagacttaaagccaggaaaacttcgattcctggatgttgataaccgaacaattctcccagtagagatccccatccgtatattaatctcatccgaagatgtcctgcactcatgaactaactatcccctcattgggcctcaaa

SEQ ID NO: 610410 - DNA, 558 bp, Homo sapiens
tccccaagattcttgcaggagttcacaaagctataactgctttcccaacaatgccgatatattatttggcttttcactgtgttgctatttgcacattaatggtacaaaagcaacagtggtaaaacttctggtactttttagctcaaataaaaacagtggcaccaaaccattaaagtcatcttgtagctcttcacttcaaagcactctcagtagaaaaataaaacaaaagcaaacaaaagcaaaacacagcacgaagtcaatttcacatacgaatggcattagtgaatcagtgaaaattaattgtattaaatctcagtccttaagtatatgttctttcaatattgcagatgatgaaataagaggttttaaaaaagcatttcctccgctactgaagtactatagttatctcagggaaaaacattttgtaattgagttgcaatctgaactagctacttgtttcaggaagcaaaattyttactggagagaacaaattacaaataagcagttgaaagacatttcctttttttttttctttcttttctttagacacaggttctt

SEQ ID NO: 610411 - DNA, 546 bp, Homo sapiens
caccatgaaatactactcagccataaaatggaacaaaatagtggcatttgcagcaaactgggtggaatttgaggctattattctaagtgaagtgacccaggaatggaaaaccaaacatcatatattctcactcataagtgggagctaagctataaggatgcaaaggcataagaatgatatatcgcactttggggacttaggggaaagggtgtgggggggtgtgagagaaaaaagactacacaatgggtacagtgtatactgcttgggtgatgggggcaccaaaatctcagaaattaaaaaaaaagtaaataaataactaaaatagattcaaagmattactccatttactataaaattaatcaaatttggggtgttaaatttaatataggtagatgaaataacttttgtgttacatgtccttttttatttgttttccataaaatttaagaacttctcattttccctaatatttcctgtttcaaagaacagagttaagatagcttctgaggttagtaagaaaattcagaatttagatttcagaagaag

SEQ ID NO: 610412 - DNA, 619 bp, Homo sapiens
acttaatattctttagctcttctgtctttccrtctccccttgggagtgaatacagagcacacattcaagggtaaaatgaagagaaagtagtaaggttgcaggagaaggaagacagaccagtcatatgggaaaaggagcaattctaggattaagtaataactgagagcacatgtttagtgcaaagcttttgaaataaagaatctgaatgccacactaattccctgttttaaaattgaaatttgagcaattgcagatgaatttatggacagtactttctggcataggacaaaaacagtatggaatatagaatacgaccagtagaagctgaggaaaagaaataattatcgtcaccacatctgattgaagactttcacatttcacaataaaaaaaatctgcatttgtaaatgattgcgccccactgattattttgcagaaatgttccatgattgggttgaacgaaattgaatttatttcttatttcctagtgtaggatcagttatcttcaggcattcttgtattatcttcctaaaaccccgaggaaaggtccctgtaggtgttgttctaagtagagacatctagataaggtagacccccctcctgataactgcagttaggatc

SEQ ID NO: 610413 - DNA, 362 bp, Homo sapiens
agaatacgaccagtagaagctgaggaaaagaaataattatcgtcaccacrtctgattgaagactttcacatttcacaataaaaaaaatctgcatttgtaaatgattgcgccccactgattattttgcagaaatgttccatgattgggttgaacgaaattgaatttatttcttatttcctagtgtaggatcagttatcttcaggcattcttgtattatcttcctaaaaccccgaggaaaggtccctgtaggtgttgttctaagtagagacatctagataaggtagacccccctcctgataactgcagttaggatcctgccaccaagagtgcataagccaggttaacagtacgatttccagaat

SEQ ID NO: 610414 - DNA, 585 bp, Homo sapiens
tctgtctcatagtagagttgatcattaaataatgtaataacaacctagttggtgaccactactatggaggaaagagaaagtactttggtttatgagaaatatatacataaaaccacagctacaatttaaaatctgccttcattggaaatcagaaaaatcccaaataatgatgcagtgtgactaatattttctagagaagcctataagacgtcatttaaacatcatggatttcatgaattttgctttatttcatatgaatcccagggcacagccaatgcaagggataaagatatcattcatcatgatctagcatctaaataaaaatggttttaccccactgccaacacctatgtttatttaaatttaaaactgttggccaggcrcggtggctcacacctgtaatcccagcactttgggaggcctgaggtcaggagttcaagacctgcctggccaacatggcaaaaccccgtctctactaagaatacaaaaattagccaggcatggtaaagagcacctgtaatcccagctactcagtaggctgaggcaggagaatcacttaaactcgggaggcggaggttgcagtga

SEQ ID NO: 610415 - DNA, 537 bp, Homo sapiens
tgacggtggtttctacagtggaaagtgtaaattggagaaagacatttgacttcctcaccattctgtgacactttacaggtggctcgctctggaaatattgggaatgttagcagggctagtcgaccaggagtcaattctaaatgaagaatgggagtggggcccacagcaatcaacatgtgaaccttgctgctggccatagcagatgccggtttaaaccactctctagtgctacaacggctatggcaatgataggcttggagaccaaaacaaatrgtctgctcaaagtttctagtcaggtctactgtagaaaagtagtcacagacagaggcaggctgcaaagatgaaataaatacccttctattcaatgtgcagacatctatgaagaaccaaaagtatcaggaacaatgagggaaatatgacctcaccaaacgaaatgatatgccaatgactgaccctaaagagacgaagatgtacaagctgcctaacaagtaattcaaaataactttttaaagtaaattcagtaaagttccagaaaat

SEQ ID NO: 610416 - DNA, 537 bp, Homo sapiens
ggtctgtgcttgggttcctgagaaatctgtatacttggtgaacaatttcttggctactccacaataatagcagcacacttcatggaattaccttttaaaaaatttatatatagatagatatataacaacctctaggawctgatgcttttgataccctcataaaaatataaaaaaaaaaagaccacactgtacttataattcaagcattctgaaaatcctaataaaatttttgtcatcagataaatgatctgctgctcaattaaaataaactgtgctgattatgaatgcctggtccctgttcaggaggccacagaatggatttctatgaagtactctctgattcactgctgaacttggcagggatagaggtttgtcttggccttctcctccatgccttttctctgcggcaagagaatagcgctgggctcatactgaggctggtgctccatcatgagcaccacaccatctgagttaaccagccccagtacagcttcatatgcaccctcatgtttttctcttcaagggagcttagcaaac

SEQ ID NO: 610417 - DNA, 406 bp, Homo sapiens
cattctcctgcctcagcctcccgagtagctgggactacaagcgcccgccaccaagcccggctaatttttttgtatttttttagtagagacgggtttcacygtgttagccaggatggtctcgatctcctgacctcgtgatccacccccctcagcctcccaaagtgctgggattacaggtgtgagccaccgtgcctggcccactctttttttaaaaaatagtttctacatttgggccatgttgagaatggtcttctccacctcaagaaaatataaatattaccaacatttttgtgtgttattttatggttttactttaaatattttataatgttatatgtttatacatcaaaattatgttttaacatttaaatcttatgtcctggtacaagatgtcaggtagaagtct

SEQ ID NO: 610418 - DNA, 590 bp, Homo sapiens
tatctgataaaggactgcaaactaaaatatacaaagtacccttaaaactaacatgcaattatagcaacattaaaaaacaaacaaccagttaaaaagcaagcaaaagatctgaatagacacttcaataatgaagatatacagatagcaaataagtgtataaaaagatgttcaacatcagttatcattagagaattgcaaattaaaacgatgatataacactacatttctattattagaatggctaaagttcaaaaacctgacactactaaaagcagaaagttatatattgtgagaaattagagacaaatttcttacaattccctcttccaataagtaatctttaagaaggggctgaagaaggaacttattgataaagactactttccttgaaatgctttagaaaatcttttctatctagggaacaaaagtagatgtggaatgactttgttataatgctgsgtagagaacacacacatacacacacaaacacacacagtctctgcatgtctaatgtggaaaataggatttaagcaacatcttataggtaaaagtggcaaataaacagatacggctgagctatgagaaacaaa

SEQ ID NO: 610419 - DNA, 591 bp, Homo sapiens
actctaatcttcataactggacctccaaataaatagattaataatatttgctaggaagaagtgactttatctccaaaatgtccctggcaggatgtcctggttcaggattacctatgaaaaacaaacccaagatatacaagaaatggctctcatgagaatgtcatttaagttacataattctttgacttcaaaattttttgacttcccaatttaaatgctcccgctgtgtgaaatggtgctgcaaacttaatatagaggtctcatcttttattctgagccagaaagacatgtctcacagaagaaaacagaacctgggaagccagcctcaatgcccctatcttatctctgctttttctgaaatgattgttttcaaattgaaattaattagtaaagcttgctaaggtgtaagatctctgatatattgagtttgwtttgatacttttattctgtgtcttagcttatatgtatacaataagacccaacaattctactcttaggtaaatgccaaacaaatcattcactgtgctctgctaaaccttggaattgttatattcataacagcactattcttaatggtctcgaactggaaaa

SEQ ID NO: 610420 - DNA, 591 bp, Homo sapiens
actctaatcttcataactggacctccaaataaatagattaataatatttgctaggaagaagtgactttatctccaaaatgtccctggcaggatgtcctggttcaggattacctatgaaaaacaaacccaagatatacaagaaatggctctcatgagaatgtcatttaagttacataattctttgacttcaaaattttttgacttcccaatttaaatgctcccgctgtgtgaaatggtgctgcaaacttaatatagaggtctcatcttttattctgagccagaaagacatgtctcacagaagaaaacagaacctgggaagccagcctcaatgcccctatcttatctctgctttttctgaaatgattgttttcaaattgaaattaattagtaaagcttgctaaggtgtaagatctctgatatattgagtttgatttgatwcttttattctgtgtcttagcttatatgtatacaataagacccaacaattctactcttaggtaaatgccaaacaaatcattcactgtgctctgctaaaccttggaattgttatattcataacagcactattcttaatggtctcgaactggaaaa

SEQ ID NO: 610421 - DNA, 591 bp, Homo sapiens
actctaatcttcataactggacctccaaataaatagattaataatatttgctaggaagaagtgactttatctccaaaatgtccctggcaggatgtcctggttcaggattacctatgaaaaacaaacccaagatatacaagaaatggctctcatgagaatgtcatttaagttacataattctttgacttcaaaattttttgacttcccaatttaaatgctcccgctgtgtgaaatggtgctgcaaacttaatatagaggtctcatcttttattctgagccagaaagacatgtctcacagaagaaaacagaacctgggaagccagcctcaatgcccctatcttatctctgctttttctgaaatgattgttttcaaattgaaattaattagtaaagcttgctaaggtgtaagatctctgatatattgagtttgatttgatacttttattctgtgtcttagcttatatgtayacaataagacccaacaattctactcttaggtaaatgccaaacaaatcattcactgtgctctgctaaaccttggaattgttatattcataacagcactattcttaatggtctcgaactggaaaa

SEQ ID NO: 610422 - DNA, 282 bp, Homo sapiens
taaggaacacttaaaaaaaaactattgtagttagaagactgggtgtgcttctaacttacaaatttcatttttcatagcaatgaatcttataatatagagttattttcttctatggcacagtggggtgatgtactgacatttttctgagatattttattccatcatttaatacatgcttacragcatcacatattgtgctagatgctcaggtaatgatgttgcacaaaatctgattgagtttctgatctctggtagcttgaagtctaatggaggacacagcca

SEQ ID NO: 610423 - DNA, 638 bp, Homo sapiens
tgaaagggggatgatttccttggctggagtcccaatgcatccctcacatggaacttgtagacccatttttagtgtctatgtttcaaatatgtttctgtttgaataaatatgatgccagagtttaaaaraaactagatgcagggtctgaaaacagcaaaaattagttgcatatttttttattttgccactgtcaatcatgagtatacttgctgtaaatgcataattttgcaacagtttaaatttagtaatataaaaaaagatggctattgtctaggactaaattgctcaaacttttcctctaaaagtacccagattgcctaatggagtgcacttactgctggggctcagggatggcgcaggaagaagtctgttatgaacaagacatttctttgaaatcttatgccttatacttagaaattgaaatatactttgatttctatgtcacaatttagctgtgtttgtagtgatattgagttaatataaaatgatctcttacttctattatcccccaaatctccttgtaaaaactcaagcccccatgaaaatggggatttgtgattaccctgtgtctgtgtcttcttttgtcctctgtccaccatcattgtctcccagtttgagaaatatgaaaatagtggaag

SEQ ID NO: 610424 - DNA, 586 bp, Homo sapiens
tggggactgttcttcactgtcctcactacttttctgtgaactaaaattattcaaacctctatagcttccaaaaatttccttcaatcacactttggaatggagtacaaatttcaatctatatttgcttaagctaaaacagtactttatattagaaatataatttgaaaacccaaagtaattaatttgttaatagttcttttctgctttggacagtagccaacattctgcttttataacataagttaacatttctgyttctctaggagtggcctttgaaccagaaaaacacccactcagttttgccagtgaaacataagtaacttctaagaatatgtttagaataacttatttgttaatatgtagattggaatggataatttctaaattcataataagacactattgtcatttcttctaaacctatacgatctcttataaagagctatatgaattaaactgggctttacacataaaataattaaataagaaaaaataagggtattcacttgttttttaaattttttattaaatttttttttaattaaatcctcaatatcatattcatttcaatgatctcatctctttt

SEQ ID NO: 610425 - DNA, 638 bp, Homo sapiens
cctctttgaaagaattgctagacaatataaaccactaacaataagaagtccaagaggagggaataagataaaagaactgatggatagcaaagaaagtggtaagtctccatgtctaacaaagctgcacatgtacccccggaacttaaaataatagttaaaaataaataaatacataaatagtttaaaaaagaaaataataagtctaaataaatgtttattttacataaatttatataattttaaaaatatagccatgaagatataaaattgaaaataatatcaggaagggttcaaagatgggagagattagagttgcaagggagtagaggaacataaaagtattctaaacctcttttttaagatgttctcagggatgagatactgattaattctagattatagaaaaatacgcttgaacatttatgttaatgkttcagtaaccacaaaaaataataacaatacatttgtaaaatagcagaaaaaattgaactaagaaaaatctatctgttcaattaaaggtaagcaagaggacaacaaactagaaaacatgagaaatagaaaataaagtaaggaaataaactaattccaaacatcaaaaatcacaataaatggtaatactttgtatttacttgttaaaa

SEQ ID NO: 610426 - DNA, 589 bp, Homo sapiens
tggattgattgtttcatttggaatccttctaggctataggtgttgcatcacactaatacgtgggttgattattatgttttgagtctttctaggctgcagttattgtatcatatgaataattctcattactcatgaagmcagatgggaagtggaggcatgttctaggttctggaggctcattgcatttgtcacttgtagatttctagcctaaaaagttccttttactggagttgtaagatttacaaaggataaaagctatagatttgacttgcaagtaaactactcagcagtaagctaccacaaatttcatcatttctcaattgcttttcccccttcaactttctattcccttcagaatgtaatttaaaggcagttgagcagagaattcaacagagatagattgtcctggagagaaatctaaataagtttctgctctggtaatctgagcaggaccaaatgacttgttctaacatcaatattgctttttctccaacttcttcatctttacttcatcaatacttaaaagtcatggaacataagagtttctttcttccatcagtactgggagcacatagaaaatacccggccc

SEQ ID NO: 610427 - DNA, 620 bp, Homo sapiens
cttggaaattggtggtgatggagcaggagtattttcttatttaaactaaaacagatatattatgtgatttctacatttacttttaaaggaaacttaggacgttaaagaaatgtactttctttaatgcttggcatgggcaactttgagtcatacacttggagcccctagtattctccctgtgtcataaggaatgtttccatggaaaagtttgagaagcactggtgcgtgaaagcatctggcatagtctgtgccacgtagcacattctcatttaacttcccatgtctgtttgatgaagtatccaactgcatttccctagcacatgcttgataacgtctcttggatgtggctagcatcgaacttgtcatgcatcctccaaccccgattctcaccccgtattccctgccttagtcatggacagcaccgtccattgagttatgcagtcaagaaccaaggtatcctccttggcctttctctttcctgcatatccctgtccaagctttaacatctagttgtgtctacattgccaccttcacaygtcttgggtgcatcttttgtcactgtcaacagcatcttcatttcagctaccatcatcccctgcctagatgcctgtaatcaccta

SEQ ID NO: 610428 - DNA, 618 bp, Homo sapiens
gggagctgggggaatgctcaaaatgctttaactaggtgaattttaatgcataatttgtgctgccagctcctttacttcttggctttctgctagctagaaacttgactatgtgattagacaagtgaatgctacggtgacttaaaactcctgaaagcattttgaagtaattcctgggttcacatagaggaagaaaatttgttaaatccatttcaaattattaatarcaatgaaattcctctaatttaaaatacaacaataaaaaagaaaaaatattaactgagtttcaaaatcgttctcaaaattaattggatcacctattccagtggtttctttgaattgggaaaaaatggactcagtagggaagactttttcttccattcgcttcagctcacattctggacgatttttttttttctcacatatttttgttaagcaattatgagctcagtatacattttgtaactccattgaggcaaattaaaattttaactgaactttctcataaactaacaatatgaggcttgaaaatagtttcatgacctcattgaaaaactcatcaaacctgtagttttgcacaggtgcattttaaaataaccttttaggtgcattctaaattaa

SEQ ID NO: 610429 - DNA, 466 bp, Homo sapiens
tttacttacaacaagaatctaaggctgccactgatctgacagcaggcggagctcaggcggtaatgctcacctcctgctgcgcagcccagttcctaacaggccatggactggtacgggtctgtggcctgggagttggggatccctcatctaggacactctataatgttcacacaaggagaaatctcctaaggacatcccaccagcatgactgtatttacaaatgtgcccagatcattcaacataacaaaggcctgccctcaagggaaactaatataacaatggcttatctgatctgagggaagggaaagtaaccacctccagccctgtctagtcttytgtctcatctaagaggccaaaacaaacaaacaaaaaacctaagaaacactaaggtcacagcccaggaatgcaagcctcctaaaagactgatattttgtcataggattgtagaacacttcccctcccctcc

SEQ ID NO: 610430 - DNA, 381 bp, Homo sapiens
tcttaaacattacaatacaattatatattggataactgcagctttagcttgcgttctaaaaggagttcagatgttgtacctgttttggcctcattttccttctttatattctckctctcagcctcggtccagtttgagagctgttagtgttccagcataagattcttttcttaatcctccttttttttttttgaagactgagtctcactctgtcacccaggctggaatgcagtggtgcaatcttggctcactgcaacctcctccttccgggttcaagtggttctcctgcctcagcctcctcagtagctgggattacaggcgcatgccagcatgcctggctactttttgtatttttagagacagggtttcaccatgttcgtc

SEQ ID NO: 610431 - DNA, 381 bp, Homo sapiens
tcttaaacattacaatacaattatatattggataactgcagctttagcttgcgttctaaaaggagttcagatgttgtacctgttttggcctcattttccttctttatattctctytctcagcctcggtccagtttgagagctgttagtgttccagcataagattcttttcttaatcctccttttttttttttgaagactgagtctcactctgtcacccaggctggaatgcagtggtgcaatcttggctcactgcaacctcctccttccgggttcaagtggttctcctgcctcagcctcctcagtagctgggattacaggcgcatgccagcatgcctggctactttttgtatttttagagacagggtttcaccatgttcgtc

SEQ ID NO: 610432 - DNA, 603 bp, Homo sapiens
ctcaaaatccaggacagagaaagaacagaactttcaactttctaacaggaaaggaaaaaatctgcatttagctaagctgcagtgtagctctttcattgttcacattagccatgttgtccaaagtcaggttgttgatggccaatttgacaaaacaaaacagactatgggagggtcttagagataagayggtgagcttgtcttttcattggctcattcaccaattcattcaattacttattaaataagagtttgtggagtgcttacaatgtgccacgtatggggaaccagcaaacgataaagaaataaagtaataaaaatagtaaagaaatgcttcagggaactcacaatatagttgggaaggcacagggttcaacctctttcttttacaaaaaaaatttagaagacttttttctcacctctacttactttttgttgtaataaccaaaatattaaggcatatatgtgatataaacatttatattattgcccacacctttccttctttcttctaaatcactgttctcagtaacttagacccatttctgaacctaacctttcagtaataagagctgaaaagacttatctgaggttatttagctggtg

SEQ ID NO: 610433 - DNA, 603 bp, Homo sapiens
ctcaaaatccaggacagagaaagaacagaactttcaactttctaacaggaaaggaaaaaatctgcatttagctaagctgcagtgtagctctttcattgttcacattagccatgttgtccaaagtcaggttgttgatggccaatttgacaaaacaaaacagactatgggagggtcttagagataagacggtgagcttgtcttttcattggctcattcaccaattcattcaaytacttattaaataagagtttgtggagtgcttacaatgtgccacgtatggggaaccagcaaacgataaagaaataaagtaataaaaatagtaaagaaatgcttcagggaactcacaatatagttgggaaggcacagggttcaacctctttcttttacaaaaaaaatttagaagacttttttctcacctctacttactttttgttgtaataaccaaaatattaaggcatatatgtgatataaacatttatattattgcccacacctttccttctttcttctaaatcactgttctcagtaacttagacccatttctgaacctaacctttcagtaataagagctgaaaagacttatctgaggttatttagctggtg

SEQ ID NO: 610434 - DNA, 603 bp, Homo sapiens
ctcaaaatccaggacagagaaagaacagaactttcaactttctaacaggaaaggaaaaaatctgcatttagctaagctgcagtgtagctctttcattgttcacattagccatgttgtccaaagtcaggttgttgatggccaatttgacaaaacaaaacagactatgggagggtcttagagataagacggtgagcttgtcttttcattggctcattcaccaattcattcaattacttattaaataagagtttgtggagtgcttacaatgtgccacgtatggggaaccagcaaacgataaagaaataaagtaataaaaatagtaaagaaatgcttcagggaactyacaatatagttgggaaggcacagggttcaacctctttcttttacaaaaaaaatttagaagacttttttctcacctctacttactttttgttgtaataaccaaaatattaaggcatatatgtgatataaacatttatattattgcccacacctttccttctttcttctaaatcactgttctcagtaacttagacccatttctgaacctaacctttcagtaataagagctgaaaagacttatctgaggttatttagctggtg

SEQ ID NO: 610435 - DNA, 645 bp, Homo sapiens
agcaagtcatttttaaaggaacttattaaaagttaaattgaaaataacaacttattaataatgatgtcttaccaaacagttgtttaaattcaattgtttgtttctgaaatgtggttttaaggagaaaaattaaaatttaaagtagattagttaaggttaacactagactggataaatgaggggcatacaaatacaatacaaataaagaactwaaaagggggaaagcactttggtgaatataagcatatttcaataatgtagcttgaaaacatggaaggagttggaaaaaacagaatggtaccaagtgccacaaaatcaagaggaaaaatatataaaaatgcataaggattagcttgattgaagaaagaaatgcctgtgtcttttcaaatggaaaaaggagccaggcggaaaagtagcttaaatgtttcctaattgtaaacatcacaaataagatcaagaaacattgcaaagaattgatggaacaaaaatgagcaatcggaattggaggaaaataggcattcaggtaatgtcgagctcatattacacatatagaaatgagagaaaaatatttaaacagaaaaaataatatttggaaaaggttacaaaaaaagaatataccaaaacttaatatgttaaaaggtaata

SEQ ID NO: 610436 - DNA, 661 bp, Homo sapiens
aaacagcaagtcatttttaaaggaacttattaaaagttaaattgaaaataacaacttattaataatgatgtcttaccaaacagttgtttaaattcaattgtttgtttctgaaatgtggttttaaggagaaaaattaaaatttaaagtagattagttaaggttaacactagactggataaatgaggggcatacaaatacaatacaaataaagaacttaaaagggggaaagcactttggtgaatataagcatatttcaataatgtagcttgaaaacatggaaggagttggaaaaaamagaatggtaccaagtgccacaaaatcaagaggaaaaatatataaaaatgcataaggattagcttgattgaagaaagaaatgcctgtgtcttttcaaatggaaaaaggagccaggcggaaaagtagcttaaatgtttcctaattgtaaacatcacaaataagatcaagaaacattgcaaagaattgatggaacaaaaatgagcaatcggaattggaggaaaataggcattcaggtaatgtcgagctcatattacacatatagaaatgagagaaaaatatttaaacagaaaaaataatatttggaaaaggttacaaaaaaagaatataccaaaacttaatatgttaaaaggtaatatgattcaaacat

SEQ ID NO: 610437 - DNA, 652 bp, Homo sapiens
gattgcataggctgaagggcccagaaactccctccttgccctcagagagccaaatcaaagatacatgacctaagatctgtcaattggatgtttgtactagggasttccagtcctgcaggagtaatacaaacattcagtggctggaatctatgttggaggcctagaccaaaaccatgtcacctccaataagcaaacagagactgggaagcctcaagcagtactcaggctgttctaaggcatgatctaggctgtttaccactgcaagtggccttacctcttgccatttctaagcttaattcgtcagcacttctattgcttctataatttctcttccaatcaactcattttcagcttaaatttggtttagttttattgcttgtgactagaaaacctgaaaaacaaaaattggtcctaaggaggggccacagcattgaaggcaagatgcagaaggccacactgcaacaaagaaagtatgaaaacatgaagacctggtgtggtgcttttttcagtggcattaagtagataagagaggacatgataagctcatatcctcaaatgttgggctaaaagaacaaactgatacccagaggctttctgtgaatgtactaaagaattgcttcactgttaaacttcagggcagaggtggcaaaaa

SEQ ID NO: 610438 - DNA, 578 bp, Homo sapiens
gatctgtcaattggatgtttgtactagggagttccagtcctgcaggagtaatacaaacattcagtggctggaatctatgttggaggcctagaccaaaaccatgtcacctccaataagcaaacagagactgggaagcctcaagcagtactcaggctgttctaaggcatgatctaggctgtttaccactgcaagtggccttacctcttgccatttctaagcttaattcgtcagcacttctattgcttctataatttctcttccaatcaactcattttcagcttaaatttggtttagttttattgcttgtgactagaaaacctgaaaaacaaaaattggtcctaaggaggggccacagcattgaaggcaagatgcagaaggccacactgcaacaaagaaagtatgaaaacatgaagacctggkgtggtgcttttttcagtggcattaagtagataagagaggacatgataagctcatatcctcaaatgttgggctaaaagaacaaactgatacccagaggctttctgtgaatgtactaaagaattgcttcactgttaaacttcagggcagaggtggcaaaa

SEQ ID NO: 610439 - DNA, 479 bp, Homo sapiens
aaggggaacatgacacactgggccctgttgtagggtgggggaaagrgggtgggatagcattaggagatatacctaatgtaaatgacgagttaatgggtgcagcacactaacatggcacatgtatacatatgtaacaaacctgcatgttgtgcacatgtactctgaaacttaaagtataataaaaaaaactgaaaaaattatgaagttgaaacttgaaggattaataactagtcattaaaaacaaataacagaagtggagcttgtgggaaaaaaaagcaacctgggtatatgttttgaggcatagaagagaacttgatgtatgctgggacctaagaggacctgagaatgctcaagggaatgatgccacaaggtaagggtggagagatgtacacagcaaggttataataaagctgcttggcattggtaaagaatctagattggatttggaatgtgatgtgaagcctttgagacctttaagc

SEQ ID NO: 610440 - DNA, 592 bp, Homo sapiens
tggagcatatataaatatttcattcttttttattgctggataatattccattgtatggatataccacttttatttatccggacatcagttgttggacatttggrttatttccacttcttggctatcataaataatgttgctatgaacattcatgtataggtttttgtgtaggcatttgttttcaattttttttgatgtataaatagtcatgtggtaactctatgtttaacattttgtggaactgaaaagccgttttccaaagtggctgcatcactttataatcccacaggctatgaatgagttatctaatttttccacatccttgccttgtcattatcagtgatcttgattttagctatcttagtgggtgtgaagtgatatctcattgtggtttttatttgcaaatcgctaatgaataataaggtcaagcatcctttcatgatatatcctctttggagaaatatctaatcaaattccctgcctatttcttttccggctcagattttgtattaggttatttctctttttattattgtattatattgttaactgctagagtatagaaataaaagttgaatatcccttagccaaa

SEQ ID NO: 610441 - DNA, 592 bp, Homo sapiens
tggagcatatataaatatttcattcttttttattgctggataatattccattgtatggatataccacttttatttatccggacatcagttgttggacatttggattatttccacttcttggctatcataaataatgttgctatgaacattcatgtataggtttttgtgtaggcatttgttttcaattttttttgatgtataaatagtcatgtggtaactctatgtttaacattttgtggaactgaaaagccgttttccaaagtgrctgcatcactttataatcccacaggctatgaatgagttatctaatttttccacatccttgccttgtcattatcagtgatcttgattttagctatcttagtgggtgtgaagtgatatctcattgtggtttttatttgcaaatcgctaatgaataataaggtcaagcatcctttcatgatatatcctctttggagaaatatctaatcaaattccctgcctatttcttttccggctcagattttgtattaggttatttctctttttattattgtattatattgttaactgctagagtatagaaataaaagttgaatatcccttagccaaa

SEQ ID NO: 610442 - DNA, 592 bp, Homo sapiens
gtattgttttttactctccatttcatttatttctgctcatgtctttattattgtcttccttccatttgcttttggtttagtttgctcttcttttttgaattccttctacaagctaccttctgggmttttagtatttacagatactttgtttcttggggcagctggttttgaaggctgttgtagataggaagaaaggaatggaataagtgaaagtgaaaatagcataaaacatactgttctttccatcttattcagtatcttttcttgaataattgctccttggattgttgaaagcttgtggttaatttcaaaagttctcaaaaaattgattttgacaaattttgccagtgttcttattgcttttatggaggatataatttttgaaggcccttattttttattctagaagtgctttttttctgtagtcttcttttaactgtatttgacagaaagagaatgatctgcaatattttgaggagacagttgtacatttatgtgaacacaaagtagatgatgatatgatgtagatgagaattaaaattcccttcaatgcttataatagggagaataaaacattctgggtagtcagttt

SEQ ID NO: 610443 - DNA, 581 bp, Homo sapiens
aagaattcacatgtttgtactgaaataaattgttgtttagtgcaaatatactagaagctttcaaaatgtgattataggggctttgggtattgaagctgacagttgttgatgaacagtatttgccagtgatatactcaatttggtatacaacaactctttaawcatttatcagatctatactattttccatatgcttggagtatacaagggtaaatatgatgcaatccctgtccttgaggtccttatctagatgaacagataatagcagcagcatgtagtaagttatgtgtaaaacttaagcccagtatacctggtgcacgaagaaagaacacagtgtcagttggggttatatttgtcttggagtagtaataacaacagaataccccaaataacaagatcaaaatttatttttctctcaggtctaacaaggtatagtaggaattgtgtggtgcctcaccaggtccagagctcaggcttctctcctgtcctgttactctcctgtttgtggctttcattcccaagttttctcatggtcccaagtggctgctggtatacagataggtctgcatggagccatcaga

SEQ ID NO: 610444 - DNA, 461 bp, Homo sapiens
gatgttttaactttaagctatattgttttccaaaaaatatttacagaaaatttatagtttaattgaaaactcactgtaacttgcagccattgacagcaaaacgtttaagttgtttacacataaaggtggagcatgctgcaggggtatcttagcagttctcccaacaagatggagtcccctgttccccttgttcaaacttgggcgttatcattattatatttgccaaattattacatgtaaatgtttatgtgaatgtgaaaaacttataaggagagtaggtgatccacctttctaacatattctaatacattaggtacatttatatkacatatttgttgtagtatagaagaaaaatattcaataccttagtgtatggttgttaacttcagacaaaatatgtaacctcattaagcattaaataattaggcaattagtgtcttaaatgctttacattatgcaga

SEQ ID NO: 610445 - DNA, 603 bp, Homo sapiens
tgactagggaagaatctaccaatgtggagtccatttgggtttttggaactcttcaaacctcacaaattatgtaaaataacatatataggaatatgtcctttgtttctagagaaatttgcccagatgttctaccattcctttcttctaggaacaacttaaatgaaaacttatacatgaaaaccttatctaatcaacagatagaaagatcatttccaccatcacctcacacaacccctcaaaaaattaaatagtattttgttttcactatgtagtggcactttttgtatactgccttgtatcaccattttataagttcatttcatatctcttcaaaaagcttttaaagcccttgagggcaaaagtcatttctaaattacttctgattctcccaagacttttgatcttctaattcaaataaaaagtgttcatattagaaaatttggaatgtatagaaaatcagatgggaaaatcattttcttccatcatctgcagtttaagctctaaattcagtgagaaaaatgaagaacaatacattaatgaattttartcatgtgtgcatataaatatgaatgatttaaaatgtactaatatattaatattggc

SEQ ID NO: 610446 - DNA, 542 bp, Homo sapiens
tgtgtgtgtgtatgtttgtgtctgggtctgtctgcttgtttgtgtttgtttgtgtgtgtgtgtttactggatgtgttctagattatcttctttgtattagttttcttgggctgccataacaaaagctcatagactcagtggcttagacaacataaatatactttctggaagtccaacatcagtttcttctgggttttctggtaagagctctgttactggcttataaatggctgccatcttatgtcctcacatggccttcccttggtgccttactgcacgcaaaagaagagagcttgagctctctggtatctatctattcacatatttttttttagacagagtcttgctttgtcgctcaggctggagtgcagtggcgtgatcttggcacactgcaccctctgccttcccagttcaagcgattctccttcctcagcctccagattaactgggagtacaggtgagtgccaccatgcctgrctaatttttgttattttaatagagacggaatttcatcatgttggccaggctggtctcaaactcct

SEQ ID NO: 610447 - DNA, 650 bp, Homo sapiens
cagcttgtacatttatacctcttctctttcttatgcattttcttctccctcaaattccttcccatctgtagttgggtacaaataccaaagccatttttttaggtcctctaagcctggttcagcatctcagttatatcttccctgaacagcgaagatggtagtagttcttccctcttttagactcataacactgatttttctgactttcaaattactgaatgtataatcttttatactgaaattatgtgtgaccaaggcttttttcaactactggacagggtctaaatcttgttcactttgaattccacatgtacttaacacgtttccttatatttatttgccactcaataattatttgttgaatgagaaaattttcttctttttttccagtatactttatgtaagtaacatcttctgagaygcagatattgatattgatatttgcgtttcaattaggtaaatgatagatgtgtgtatttaaaatattgatttttgtgaggtatgtgattatttggaactctagagccttgtatataatcaaatatttgaccttcttatttaatcttttttttccataattaccatgatatagcttggttcttaataactcagacctactaaaataattcagaaggaattatgaaatacct

SEQ ID NO: 610448 - DNA, 585 bp, Homo sapiens
cttttttcaactactggacagggtctaaatcttgttcactttgaattccacatgtacttaacacgtttccttatatttatttgccactcaataattatttgttgaatgagaaaattttcttctttttttccagtatactttatgtaagtaacatcttctgagatgcagatattgatattgatatttgcgtttcaattaggtaaatgatagatgtgtgtatttaaaatattgatttttgtgaggtatgtgattatttggaactctagagccttgtatataatcaaatatttgaccttcttatttaatcttttttttccataattaccatgatatagcttggttcttaataactcagacctrctaaaataattcagaaggaattatgaaatacctgcactatatctttgttgacattataatactatcatatacaaactataaaaaaactgttaattcaaaattataatgtggtattaaagattaggttaacaggattaaatgtgaagcttaactggaaatattgaggcatgacaccaaaaaatttaatatccttttagttacacagttaggctggtcattgctcaa

SEQ ID NO: 610449 - DNA, 438 bp, Homo sapiens
ttgctcttcttaaaaacttttaatggtggaataatataaaaatgtataaaaattgaaggaagttgtccagcatgaacaaatgctggacatttgttcatgtccagcattgccagtaaaaaatattggcatctaaaatgtttaatgattactggcaaagattagagaagcttctctcaggatgggatctgtgggtctcctgccactgccttctccctttcaatatggtattatgcttagaatgtttctcagcactttattatttaggaacatttayctactttatgtggattttcaatatttttgtttctaaaatttagaatattattgtaatcagcctcagtggtcgactcacttatttactgctctcctggacatgtgcatgggtggctgtcccctccactcttcagtttcctgtttcctttgttcagaaggagcttt

SEQ ID NO: 610450 - DNA, 589 bp, Homo sapiens
cgctagagcagcactgtttctcgcgcctcttccttgtgctgtgctattattccttatgttgctcatcactactttagctgagttgtgaatctgtttgtttatggcatgtctcctccattagaatgtaaactccaagagaacagggaactttaatctctttcccactccctgttcaatatttagaataatgcctagtaagttgttgttgctcaataaatctttgctgaataaaaggctaaataagtaaatccatatcatcgatttgaaattgcacatttgtcatatgtctatctgcatgccgatagtttttagagtctctttttctttcagatctatttttgaatactatattgtgttcatcaatattactttaaaatacactttcatacttaaaaaagcaaagagcaaggagctcctcatttccttgccacttcaaatacattctgactattctatatttattttccaggaggagctttaraataaatctgtcagattccaatgaacctctcattcattaaactaaatttataaatgaatttgcctctttcaatattgtcttctaattccagatcaagactagcattac

SEQ ID NO: 610451 - DNA, 583 bp, Homo sapiens
agttatttcacctcaaataatctttgcactccttagaataccttttaacagacagaatacagtttgcttcaaatgagataccttttgaaagagtacaatctaattgaaactgtcttgaatgtctttattctaggcagcctctattacaatatctatttttacatacactttatttttcccattttcaagctgattaaaattgtgaagcattaagcaaaattattacaccttttgcttttcaatattctagacaattcaaatgatcaacttatttttcaaaattcataacaagaaggtgaaaataaattaatttgtgtgtgcatatattctcttcttaaaaatgataatacatcagaatgcaggactgatgaagttctgtatattaaaaaaatgcagatttttttcaaaatataaaaatattctttttctccctttcagatatggcttccttcagactttatttttaaaaaatattaatttaggcttttctttactgtctttacatttttaaggtagtgcgctaaratcacaagccattggtatttattggattcattactatgaaaggacagaattcagaata

SEQ ID NO: 610452 - DNA, 571 bp, Homo sapiens
ctaggatgaagatttctatcttttttctgttatatacctatacatgtatcactttaaataaaaatgaaaccatgatgcattcactgttctgtgacatgtattttcatttaacagtaaattttggagcttgtttcagattcttacatgagccaatctctctttttttaattgttatataccattccatggtatttgacatttgatattttatttaaatctctcctcttgatttacatttagttcttttctgattttttgatagtttaaataatacacagctaatactgtggctcacacttgtaatcctagcactttgggaggccaggagttcgagatcagcctggccaacatggtgaaactccgtctctactaaaaatacaaaaattagctgggcatggtggcgggcgcctgtaatcccarctactcgggaggcgatggcgggagaatcacttgaacatgggaggtggaggttgcagtgagtggagattacaccactgcactccagcctgggcgacaagagcaaaacaccatttcaagaaacaaacaaacgaaactgtaaccaactgctcta

SEQ ID NO: 610453 - DNA, 598 bp, Homo sapiens
attgtaaaccatgaattctacccctaggggaaataacttttttaagaataatttataatgaaagaaaagacatttttaggcaaacraaacttgagagttagccacgaaaagatcctaactaaaggaatttctaaaggcagaagaaaatgattccagatggatggtctgagatttcagaagaaatgaagaccaaaaaaaggtggtaaatgtgttggtttatctaaacaaacatggctgacccttgaacaatatgggtttgaactgcccagtttcacttatgtgtaggttttcttccacctcttccaccctcaagacagcaagaccagccctcctgtgttcctcttctacctcagcctacccaatgggaaggcaatgaggatgaagacatttatgatgatccacttctacttaataaatagtaaatctattttctcttccttataattttcttaaaaacattttcttttctcttgctcactttattataaaaatatagtatgtaatacttatatgatgcaaaatatgtgttaatcaattgttatattatcgataaggtttctggtcaacagtaggctcttagtagttacgttttggggga

SEQ ID NO: 610454 - DNA, 645 bp, Homo sapiens
aaattattagtgtatagctaagcgaattttaaagtaaacacattcaggaaccagcacccacatcaaaaatagatcagaagtccaccttttctcactcactaaataaggttgattactattctctaaggttgatgactattctgattcctaacatcatatataattttttgcttatttttgcaaygtataaatggaaacataccttatgaatcgtcttgtctttttttctgatttcattcagttaatattgaatttgtgatatttattcatttaattgtacctagttacatctcattttttctcattgctctataacatttcattatatgaagatgccacagtttattaatccattctatatctcaggtatgtccatcttcagtaaatactgccactgatttttacaaaagagttgtaccagtttatattcccacaagcagttgctccatatcctcattagcacttacaacaatctttcttcattttagtcattatgcttcaatttgtggtaacattttgctgtggttttaatgaataatggtttgaagaatttacatttttacaggcaactttgctgtcttcattgtgaagtttttgttcaaaactttccattttacttgagtgtctaacttattagtgagtagc

SEQ ID NO: 610455 - DNA, 645 bp, Homo sapiens
aaattattagtgtatagctaagcgaattttaaagtaaacacattcaggaaccagcacccacatcaaaaatagatcagaagtccaccttttctcactcactaaataaggttgattactattctctaaggttgatgactattctgattcctaacatcatatataattttttgcttatttttgcaacgtataaatggaaacataccttatgaatcgtcttgtctttttttctgatttcattcagttaatattgaatttgtgatatttattcatttaattgtacctagttacatctcattttttctcattgctctataacatttcattatatgaagatgccacagtttattaatccattctatatctcaggtatgtccatcttcagtaaatactgccactgatttttacaaaagagttgtaccagtttatattcccacaagcagttgctccatatcctcattagcacttacaacaatctttcttcattttagtcattatgcttcaatttgtggkaacattttgctgtggttttaatgaataatggtttgaagaatttacatttttacaggcaactttgctgtcttcattgtgaagtttttgttcaaaactttccattttacttgagtgtctaacttattagtgagtagc

SEQ ID NO: 610456 - DNA, 591 bp, Homo sapiens
cagtagcggaatgaagaaacaaattgtggtccatctatacactgcaatgctactcatcagtaaatacaaaggaattactgatatgtgtaataagaagatgagtctcaaaggctttatactaagtaaaaacagtcagattcaaatggccacatgctgaatgattccatttataggacatattgtgaaactacagaggcagaaaacagatctgtcgctagctatggggaaggtgttggctacaaaaagccacaggatatttgagtcctgataaaagttctatgtgatgattatggtggtgataatacaactgtgtatgtttctgaaaacttgcagaactttaagccagaaagagtattttactttatgtaaattttaccttagtgaaaaaaaaggctgtggacatttaccccataaacagctatgataactgattatcattcaaaaataawctaggggttaattctaagtctgcaccttatctgacctttcagcagcatttggcaaagttgaccacttccctcctttcatgaattaccttttaatttttttaattttttgtttcatgcataacacacttttcatgttggcatt

SEQ ID NO: 610457 - DNA, 548 bp, Homo sapiens
gatttaaaattattttgcaaatttcaaaccacattatattattattattatgcctaacttacatcttcctaagctaggtcactgttaatcacaaacttcaaaatagaagaaaaaaatcaggtaatatggttagacacaattagtaaggtaactccaaaggaacgccacagacaacttgctatctacttgtctagccataggtactagctagaagtaaaaaaaacaaatatctggagagaatggcctargtgtagcttcctaaggagagaatagtcagggtgaaaaaagaacttagtatgtaacatgataaaatgttaacaaaaataagctctcagttgccttatttttgataaataaatgaatgattctgtttaattatttaatttattgtggagaagttggaacgaaggaaatgattaaaatcagtccaaatatttgtctagtttttccatggattcttgcaagcttgtttctccttttgattccatatctaagttctagttcttgcaagagacacctttctatactattcctgcagctaattatta

SEQ ID NO: 610458 - DNA, 540 bp, Homo sapiens
taaattatgcagtctcagctaygtagaccaggtttgaatgtaaaaatgaaaaatgttctttgggtggttatatctaaatagccctaatgggtttccatacaagtgaagtggggactataaccaaaatttcatgggaaatgacactactataagtaattcaactgatgttactttatcctataaaactgagctccaactgcccaagacatcgcaggtgcaaaattaattttcctccagttccccaccattcttgcctttacaactttttctactgcagctaaggcagagccgtctcaggggatcaaggcatcattctgtccttgttgaattacatctttgaatgtttttgagttttccatttttgtgtgtgtggttttgtaagtttatttttagagttagtgaggtttagagacaagaaaaatataagggtatctgaggctatttttaaagaactaacacaattgtataaaattatttttaaaagcggaaataggagtgagaggaagaacaatacaagttctatataagttatgttttata

SEQ ID NO: 610459 - DNA, 540 bp, Homo sapiens
taaattatgcagtctcagctacgtagaccaggtttgaatgtaaaaatgaaaaatgttctttgggtggttatatctaaatagccctaaygggtttccatacaagtgaagtggggactataaccaaaatttcatgggaaatgacactactataagtaattcaactgatgttactttatcctataaaactgagctccaactgcccaagacatcgcaggtgcaaaattaattttcctccagttccccaccattcttgcctttacaactttttctactgcagctaaggcagagccgtctcaggggatcaaggcatcattctgtccttgttgaattacatctttgaatgtttttgagttttccatttttgtgtgtgtggttttgtaagtttatttttagagttagtgaggtttagagacaagaaaaatataagggtatctgaggctatttttaaagaactaacacaattgtataaaattatttttaaaagcggaaataggagtgagaggaagaacaatacaagttctatataagttatgttttata

SEQ ID NO: 610460 - DNA, 540 bp, Homo sapiens
taaattatgcagtctcagctacgtagaccaggtttgaatgtaaaaatgaaaaatgttctttgggtggttatatctaaatagccctaatgggtttccatacaagtgaagtggggactataaccaaaatttcatgggaaatgacactactataagtaattcaactgatgttactttatcctataaaactgagctccaactgcccaagacatcgcaggtgcaaaattaattttcctccagttccccaccattcttgcctttacaactttttctactgcagctaaggcagagccgtctcaggggatcaaggcatcattctgtccttgttgaatkacatctttgaatgtttttgagttttccatttttgtgtgtgtggttttgtaagtttatttttagagttagtgaggtttagagacaagaaaaatataagggtatctgaggctatttttaaagaactaacacaattgtataaaattatttttaaaagcggaaataggagtgagaggaagaacaatacaagttctatataagttatgttttata

SEQ ID NO: 610461 - DNA, 540 bp, Homo sapiens
taaattatgcagtctcagctacgtagaccaggtttgaatgtaaaaatgaaaaatgttctttgggtggttatatctaaatagccctaatgggtttccatacaagtgaagtggggactataaccaaaatttcatgggaaatgacactactataagtaattcaactgatgttactttatcctataaaactgagctccaactgcccaagacatcgcaggtgcaaaattaattttcctccagttccccaccattcttgcctttacaactttttctactgcagctaaggcagagccgtctcaggggatcaaggcatcattctgtccttgttgaattacatctttgaatgtttttgagttttccatttttgtgtgtgtggttttgtaagtttatttttagagttagtgaggtttagagacaagaaaaatataagggtatctgaggctatttttaaagaactaacacaattgtataaaattatttttaaaagcggaaataggagtgagaggaagaacratacaagttctatataagttatgttttata

SEQ ID NO: 610462 - DNA, 618 bp, Homo sapiens
tagattatctgatgcagagagaaatccatattgagatatgccctttaacttggagtctcaggatatttttctttataattttggtgctttaaaaattattgattttgtcttaggagaaaactatgtgcataccaggcccacaaaattgactgaatcagcagaataacctgtctggcttctgtgtattgcaagttcatcattacctaaaaaatgggctcttgtgagctgcctgggttggatcattttaatgatgtgttacaaaatatatctgagtggytataaacaatctcccttttgtttaagagaaagaaaaagagcacaagagcaagtaaaacgcttcctgttgcaaagtggtgatcactcttaaaaacaattcacatactttttacaatgctcctctttgactaaccacccgcagccacacgagctcacagcagggtgtgtatacgtgcatgcacgtgtgtctatttcccaaaaattttttgaatttgtcgtatttcactataggtctaaaaaattaggattctttaaaatgggtttaacttacattttaatgctgaaaatacacaaatgacctgaaaagactttaaggaatggaaatctttgccttgtcaggtt

SEQ ID NO: 610463 - DNA, 618 bp, Homo sapiens
tagattatctgatgcagagagaaatccatattgagatatgccctttaacttggagtctcaggatatttttctttataattttggtgctttaaaaattattgattttgtcttaggagaaaactatgtgcataccaggcccacaaaattgactgaatcagcagaataacctgtctggcttctgtgtattgcaagttcatcattacctaaaaaatgggctcttgtgagctgcctgggttggatcattttaatgatgtgttacaaaatatatctgagtggttataaacaatctcccttttgtttaagagaaagaaaaagagcacaagagcaagtaaaacgcttcctgttgcaaagtggtgatcactcttaaaaacaattcacatactttttacaatgctcctctttgactaaccacccgcagccacacgagctcacagcagggtgtgtatacgtgcatgcacrtgtgtctatttcccaaaaattttttgaatttgtcgtatttcactataggtctaaaaaattaggattctttaaaatgggtttaacttacattttaatgctgaaaatacacaaatgacctgaaaagactttaaggaatggaaatctttgccttgtcaggtt

SEQ ID NO: 610464 - DNA, 593 bp, Homo sapiens
tttacaatgctcctctttgactaaccacccgcagccacacgagctcacagcagggtgtgtatacgtgcatgcacgtgtgtctatttcccaaaaattttttgaatttgtcgtatttcactataggtctaaaaaattaggattctttaaaatgggtttaacttacattttaatgctgaaaatacacaaatgacctgaaaagactttaaggaatggaaatctttgccttgtcaggtttgatgtagtgaaaaaggccctgaattcccagttctttagtttataagctatctatgggaaaattgtttaataggtaacaatagaacatcccatatatgtggtggggttcatgtaaagtgtgtctggcatatcacaggtattctacaagagtggttgkttgaatctgaccgacatttattttcactaagagaatcgacataacagttcagagggtttctcatcatttggggctcaaaccaaacaaatcattaaaacatacagacgcacacacatagatacacagatgaccttaagaagaaaactaaagcaaagggctcaattttaatttgaggaaaaaagacattcaagacatgattcaa

SEQ ID NO: 610465 - DNA, 615 bp, Homo sapiens
atgaatgaaatttggatgaccttacagattactctttttgctttctctactcagaagtgctgcctcctttaaggaccttccttaagaaccctgtaacctaataatcttctaagagttccctaagccctcattaaatcctgctaacaaaattgaatctaatgatataaaaatcttatgttataaatgacaaacatatttaaaatgtttgccatccccaggaatgtttaagatcatcaaatggacttcaggtctcttcattgctctgagtacatgaaaaagggattttaaggggctacacttgggaggcttcccagtgaacccagtagcacaccaggtaggagacagctcattccacacacttcaagggtgaccatggcattgagttcaatgagtgaaatctttatgtggcaagtggcaccttattgtctttgakgattttatgataatctcagttctccaagcccttttcagacataggggagtatccagttcagtgaatttcacatactttaggtgtttatgagggtttggagagggattttcttcagtactcaatttcttcatcttgtcattcattcaataaagccagggaacatacaggaataaaataattca

SEQ ID NO: 610466 - DNA, 560 bp, Homo sapiens
ctaagtaagcaaccaacaattttaggttgatctcacatgtctcactttccttatattcacattagcactattcagtttccttcgctgtatgaacttcagagtgactctgaagcatgggggaggggaacaagctcacaagtgcacagtgaaatgctatttgctttgaggttggkgggtgcattattgtaaagaaaattgaactgaaatgaactgtttctaaatattattatatgtcatgactatttttgcacaaaaataagaaatgaagacagtgacttgccagctatgctgcatataagcaagacacttatcttgcggaagggacagtctttcaagaaaaataggatcttttcaaaaagggagcatttcatttccagaagactatcccagcaacgagaatatattagtactagtaatacttgtgataatgttaatagattcctgactttatttgatttgtaaaggaagaaataccataatttttttgtttttctttacacactcaggttaaaccacactaacataaaatcacagatatgtgatacttgttatctcaatat

SEQ ID NO: 610467 - DNA, 560 bp, Homo sapiens
ctaagtaagcaaccaacaattttaggttgatctcacatgtctcactttccttatattcacattagcactattcagtttccttcgctgtatgaacttcagagtgactctgaagcatgggggaggggaacaagctcacaagtgcacagtgaaatgctatttgctttgaggttggtgggtgcattattgtaaagaaaattgaactgaaatgaactgtttctaaatattattatatgtcatgactatttttgcacaaaaataagaaatgaagacagtgacttgccagctatgctgcatataagcaagacacttatcttgcggaagggacagtctttcaagaaaaataggatcttttcaaaaagggagcatttcatttccagaagactatcccagcaaygagaatatattagtactagtaatacttgtgataatgttaatagattcctgactttatttgatttgtaaaggaagaaataccataatttttttgtttttctttacacactcaggttaaaccacactaacataaaatcacagatatgtgatacttgttatctcaatat

SEQ ID NO: 610468 - DNA, 543 bp, Homo sapiens
catccttgttttgccaagagtagaaaataaagtaaggaaacatttcatgttgaaatattttggttatgggtttattgctcatttggaaatggtaagtcattttcttacccactggcttatcaaaatcaggccatccactcttgttctgtcacctgaatggacaaggcataatttgctttctattggaacacagaacccagtcttttctagccaagttgcaggcgaatttcagctgtaggcattatcaaccataaaaggaggccatgtacaacaaggcacaagcactttgctgactgatagagactgctattttatttttggaaagtagcctaaagctattattgctgtgggtttttgacaggcgtcatatattgctatttcagaagaaaatttagctttaaaaatcaagtagcctgagggtttggaagcatacttaaatttttaataagttgtcaaaaaatactttgcagtattcatttgtaactgaactwaattctgcagattaatatgtaaactgcccaatcccattaacagtttgttgtt

SEQ ID NO: 610469 - DNA, 467 bp, Homo sapiens
gtttttggtgcggcaagcaggtgggtctgggatagaatgataggaccatgagtggtttggattaggtctaagagaatgtagaatgtcctcatggaatcttcgcagtctcataatgaaacaagcaggacattctaatcagacagaggctgttttgaagtctacatctttcacttctaagttttggaactttatccaagatttttattctgtctgagtgtcagtctaagtaaaaaatttcattaacaatgaaaataataataacaaaagtaatacttgctttattgtgttgttatgggtttcctaagaaaaaacttctgcaattgtttctgcattgaataaccagtatttccttttctgtttactaatggttgggacccagggccaaaagagtggctctagtaaacttctagaacttatttargctattcaggatgacaaacatgtgggtcaaatacccagggagtggt

SEQ ID NO: 610470 - DNA, 434 bp, Homo sapiens
gaattcacaagagtatattataatctaaatgtctaaagtcaaagtgaaagaaaaaattttaaaattagcaagagaaaaatgtctagtcacttataaaggaaattccatcagactaacggcagactttccagcagaaacgttataggtcagaagaggatggacggcattttcaaagggctgaaagaaaaaaaaactgttagctgagagttttatatcctgcttgaataatcttcaaaaatgaaagaaaaataaaggctttcccagacaagcaagcactgagggaatttctcaccatgagactgtccctacaggaaatgcacgaagggttaytaaacatagaaagaaaaggtcaattttactatcatgaaaacatatagaaatataaaattcacagctcttatgaaacagtcatacaaaggaggaagaggcaggaa

SEQ ID NO: 610471 - DNA, 601 bp, Homo sapiens
attttgattcaaatttgtttcataccrtcttggtattttaaaatttttaatattgatatagcaaatagactatatttaaaaatagttaacatactaaatatatatgtatttggaaaggggagaagagaaatatagtaatcgctctggaggactttcacagtgaagaatgtttgcagttgcagagccgcaaatttggtgagccaaaggttctcaggtattaactatcggttcaccttaattttttttaaataatccacaattgtgttaaaattcctttcaaatcagtgcaagaattatcaaacaaaatgttgcaaagatgctttttattttcttaattttgtaagcaatcaggtagctaagtagaagaccttatttaattcccaaatcagtgcaggaataccttggagatactgggggtttagttccagaccacaataaagtacatattgcaataaagcgagtcacttgaagtttttggtttcaaagtgcacataaaagttatgtttgtagactcttctgtagtctacaaagtatgcaatagcattatgtctataaaaacaatgtgataccataactaaaaataatttattattaaaagatg

SEQ ID NO: 610472 - DNA, 601 bp, Homo sapiens
attttgattcaaatttgtttcataccgtcttggtattttaaaatttttaatattgatatagcaaatagactatatttaaaaatagttaacatactaaatatatatgtatttggaaaggggagaagagaaatatagtaatcgctctggaggactttcacagtgaagaatgtttgcagttgcagagcygcaaatttggtgagccaaaggttctcaggtattaactatcggttcaccttaattttttttaaataatccacaattgtgttaaaattcctttcaaatcagtgcaagaattatcaaacaaaatgttgcaaagatgctttttattttcttaattttgtaagcaatcaggtagctaagtagaagaccttatttaattcccaaatcagtgcaggaataccttggagatactgggggtttagttccagaccacaataaagtacatattgcaataaagcgagtcacttgaagtttttggtttcaaagtgcacataaaagttatgtttgtagactcttctgtagtctacaaagtatgcaatagcattatgtctataaaaacaatgtgataccataactaaaaataatttattattaaaagatg

SEQ ID NO: 610473 - DNA, 601 bp, Homo sapiens
attttgattcaaatttgtttcataccgtcttggtattttaaaatttttaatattgatatagcaaatagactatatttaaaaatagttaacatactaaatatatatgtatttggaaaggggagaagagaaatatagtaatcgctctggaggactttcacagtgaagaatgtttgcagttgcagagccgcaaatttggtgagccaaaggttctcaggtattaactatcrgttcaccttaattttttttaaataatccacaattgtgttaaaattcctttcaaatcagtgcaagaattatcaaacaaaatgttgcaaagatgctttttattttcttaattttgtaagcaatcaggtagctaagtagaagaccttatttaattcccaaatcagtgcaggaataccttggagatactgggggtttagttccagaccacaataaagtacatattgcaataaagcgagtcacttgaagtttttggtttcaaagtgcacataaaagttatgtttgtagactcttctgtagtctacaaagtatgcaatagcattatgtctataaaaacaatgtgataccataactaaaaataatttattattaaaagatg

SEQ ID NO: 610474 - DNA, 627 bp, Homo sapiens
  misc_feature 401: n = A,T,C or G
gtgttaaaattcctttcaaatcagtgcaagaattatcaaacaaaatgttgcaaagatgctttttattttcttaattttgtaagcaatcaggtagctaagtagaagaccttatttaattcccaaatcagtgcaggaataccttggagatactgggggtttagttccagaccacaataaagtacatattgcaataaagcgagtcacttgaagtttttggtttcaaagtgcacataaaagttatgtttgtagactcttctgtagtctacaaagtatgcaatagcattatgtctataaaaacaatgtgataccrtaactaaaaataatttattattaaaagatgctaataatgatctcaggcttgagcaagtcataatcttttcactgatggagggtcttgtttngacattgacggctgacgtatgggagtggtggttgatgaaagctggggaggttgtggcaatttttaaaaataagtcaataatgatgtttgccatatcaattgacttttcccattcatgtaagatttatctgaagcatgcaatgatgtttgatagcattttaccaatagaacttctttcaaaattgggtatcaatcttcccaaatcttgctgctgctttatcaactaa

SEQ ID NO: 610475 - DNA, 449 bp, Homo sapiens
tctgctcgtgtttttaccaggggttacctctattctaagtttgtaattcttctagctattgtaagtttgtaattcttctagatttttcacatttatttgcttaccaatggctttacctacagaataaatttatgcatacatttatataaatacatacagtttttttgtattttctacttacataaagtatgtatactatatgcatcattcatttttccaatcaatgtctctttaattattccatagaatttcatagtgtgtacatacgatagtttaattataaatgtattgtcagatatataggattttttttttttttttttgagatggagtctcactctgtcgcccaggctggagtgcagtggcgcgatcttggctcactgcaagctccacctcctccagggttcacgccattctcctgcctcarcctcccgagtagctgggactat

SEQ ID NO: 610476 - DNA, 549 bp, Homo sapiens
ccttgtctcaccctcttatggatctcaccctctaaatctgtaaatgggcatctccagggcatctaaataaggctctttacttttccattctaaytctgtatattcttccttggtgatcttgtctatgtccatggttttaagcatcactaacaattcttaaatagttacttccaattctgcattctcccggcatagttcaatccacttgggcattcaatgggaacattaaactaagtatatcacagataaattttttatctttatcagcaaaacttattattttaattaagatactgcctaaatttccatcaccttttaggagggagtcaattgctggtcaggttaatttttcccatagagctaagggacaggagatgagatcagagtgcctctaccagagtcacatgtagggccacataaaataatccagaaattttaaatatcaaaaggaaaatgatagaaaaaaataggcaaagaaaaatttgcctacatacaaataatctgtaaatatgaaaaagttaatatctccaacaagtcaataactggaat

SEQ ID NO: 610477 - DNA, 549 bp, Homo sapiens
ccttgtctcaccctcttatggatctcaccctctaaatctgtaaatgggcatctccagggcatctaaataaggctctttacttttccattctaattctgtatattcttccttggtgatcttgtctatgtccatggttttaagcatcactaacaattcttaaatagttacttccaattctgcattctcccggcatagttcaatccacttgggcattcaatgggaacattaaactaagtatatcacagataaattttttatctttatcagcaaaacttattattttaattaagatactgcctaaatttccatcaccttttaggagggagtcaattgctggtcaggttaatttttcccatagagctaagggacaggagatgagatcagagtgcctctaccagagtcacatgtagggccacataaaataatccagaaattttaaatatcaaaaggaaaatgatagaaaaaaatagrcaaagaaaaatttgcctacatacaaataatctgtaaatatgaaaaagttaatatctccaacaagtcaataactggaat

SEQ ID NO: 610478 - DNA, 597 bp, Homo sapiens
acatcatagtaaatgttcaccagatattaattatttgagtgagaatggttgtgagcattgggtactcccccagccagtacccttctctcttgcagtagtatattttgtagattaaataaaactcaagataaaaaaaacaaattaataaatgatcaatggaaacagaaatttggaacataaaagtattatttcaaaatgaacacattatatgtaaaagctcacaaccaggaatttcttcagttgggtttgcagcaatgttatgtcactaatactatatttctctctgtatggccaaacctgtaaagcctcaatatctgattatggagcacatctagactgttaaaaagctttctataatattaataaaatcaaataataaataaaaattaaattgactaatcatagcaatttcattttgagaatgttttgtaggctgaaggcaaatccttgagatatttttgcaggagcgtcattgcgaaacagaatctgcagtagaactatgtcatcttctggttctragtgtgccctctcattgctggcagatggcaagtatttatttgcttgctagctctttagtggaactggtcttctgtttcc

SEQ ID NO: 610479 - DNA, 633 bp, Homo sapiens
aatgtataacaagagccataaaagtgtttatattcccttgtcctagtaattctgcttgtggatatttatcttaacaaaatcatcagaaatgtgtagaatgatttatggataagcatgttcactgaagcattccttagactataggaaaatttgggaaaaaaaccccaatatacaaaaatgaggaaacacttaaattaatcrtagtccattcagatgatggaatgcagtgtagatatgtaaaaatcatattttcagagatggctgttgatcaatgaaaatgcccaatctataacattccatgaaaaagacagatatacagccatatattccatacaattataattttaaatatgtatgaatgtgtgtgtatatataatatatgtgaaaaaattggaaagaaatacactaaaatgttaactcattatctctaagtggcaggattatgagattacaggtgattgtttctggttctttgtattttttagtatttttttttatttttttgagatggattctcactctgttgcccaggctggagtgcagtggcatgatctcagctcactgcaacctctgcctcccaggttcaagcgattctcctgcctcaacctcccgagtagctgggactacaggtgc

SEQ ID NO: 610480 - DNA, 544 bp, Homo sapiens
agatcatacaggcaacgacagagcattaacattccatttctaacaaagatgatcttagtattagtcagagttctccagagagacaagaccaataggagatagatggatggatagatggatggatggatagatgatagatagatagatagatagatgatagatagatagatagatagrtagataaagagaggattattaggggaattggctcatatgattatggaggcagagaagtcccatgacaagccgcccacaaactgcatgcctgcagtatggctcagtccaaaagcctcagaaccagagaagccaatggtgcaactctgagtctgaggccaaaggcctgagaacccagggtgtcctggagtctaaaggctgaaaagcctggagttctgatatccaagggcaacagaaacagggtgtcccaggtccaggagaaagaaagaaagatttctcctttcctctgccttgttgttctatgtgggcccccagctgattggatggtgcccgcctacattgagggcagatctttcccactcggtccact

SEQ ID NO: 610481 - DNA, 506 bp, Homo sapiens
gtcctcatcctcattgtgttcatgttgagtaggctgagcagtggggaggaagaggagggattggtcttgctgtctcaggggtagcagaggtagaagaaaatctgtgcatagtggacctgcacagttcaagcccatgttgttcaagggccaattgtgtacacaacaccacacacacgcacacacacacacacacgaatgtgcacaaaaatttgggatcatggttatttctattatttattgctacataacaaatcacccccaaacgtagtggtctaaaacagtagcaagtgtttcccggctaattttttgtatttttagtagagacggggtttcaccgtgttagccgggatggtctcgatctcctgacctggtgatctkcccgcctccatctcccaaagtgctgggatgtgttttggtataattttgtcaaggtagtagtaatctaaattcaagcagtggaattcctggatcaaagggaacatacattgaaaattacaattgctatt

SEQ ID NO: 610482 - DNA, 355 bp, Homo sapiens
ccagaaataaacccaaacatatacaatcaactaatttttgacaagagcaccaagaaggtacaatggagaaatcagtctctttagtaaatcgtgttgggaatgcaagatatccacatgaaaatgaatgaarttagaccttatcttacaacagacacaaaaatcaacttaaaatagattaagatgtaagttaagacctgaaaccatgaaactcctagaagaaaacagggggaaagctccttggcattggccttggcaatgacttttttttaaatattacatcaaaacctcaggcaacaaaagcaaaaataaataagtgggactatatcaaattaaaaattttccacacagcaaggaa

SEQ ID NO: 610483 - DNA, 355 bp, Homo sapiens
ccagaaataaacccaaacatatacaatcaactaatttttgacaagagcaccaagaaggtacaatggagaaatcagtctctttagtaaatcgtgttgggaatgcaagatatccacatgaaaatgaatgaagttagaccttatcttacaacagacacaaaaatcaacttaaaatagattaagatgtaagttaagacctgaaaccatgaaactcctagaagaaaacagggggaaagctccttggcattggccttggcaatgactttttttwaaatattacatcaaaacctcaggcaacaaaagcaaaaataaataagtgggactatatcaaattaaaaattttccacacagcaaggaa

SEQ ID NO: 610484 - DNA, 351 bp, Homo sapiens
cctccccccgcgcgccgaaggagcgctgccgggagagccggctaygcggcgcccgcccgcccgcggggcagcgcagcagcgcagcgccggtgttcccttcggaacaccgcgcaaagtgatcgagtgcttttcctccactttccctcacttcgcgccccacccggctgtcccgaccaccctcaggatgttttcctctggtgtgcctctgggccaaatcgtgctaaaaatcattttttttcttttatgcaaggacactttgtcacttggtttccgtcagtctcctgagaatggggaatttaggtctagcgtggttcacagttctggttttttaggagttatacttgaaagctc

SEQ ID NO: 610485 - DNA, 402 bp, Homo sapiens
atatcattccctggaaacagcaggccgcttggagagtattgggaagaggctgtccttgctcagcacctgtcacccagattgcgtgctaacttctctggagctccatctttattctacatgttgattagatgcactcagcataataaattgcagaaggcttcaaagtttctgtagctaagtactgctcagagacagtgactctgtcagtgctgaatgaagacactggatcttgcttagctaccaygccatgctgaatgtcttggacctggttccttttagcagaaggctgattaaacccacatagtgctgagatcataggaatgactgtaaatggcaattatctgcttgagggtatgtcttgttttctcagatagactgcaagctgcctgaggacataaacca

SEQ ID NO: 610486 - DNA, 562 bp, Homo sapiens
ctctaccagttgtatcttacattttcaggaatgccagctgttggtaaatgttggactggagaaatgctagaattcaggatccaatctttttttttttaatgactggtcagctatgttaatcaatcaactcacccttttccatcttctctttttaaaaatgaaattgagaattgtaatcagcacatacagcagcctggcaggaaggcaggatctaaacatatttgwaggaaagagggttgaagtctgaactggtgaacaactcttatcggccagctctttgatgctgctgctgtctaaataatttgttttccaggcgctgactcaccaaattcctctttagaagtggtaatctttttattttattttattctttaattatactttaagttctggggtacacgtgcagaatgtgcaggtttgttacataggtatacatgtgccatggtcgtttgctgcactcgtcaacctgtcatctacattaggtatttctcctaatgctatccctcccctagcaccccaccccctgacaggccccagtgtgtgatgttcccctccctgtgtt

SEQ ID NO: 610487 - DNA, 586 bp, Homo sapiens
ctctaccatgcagcccaggtgtgtagtaggctgtaccatctaggtttgtgtgaatatgctctacgatgctcacacaatgacaaaatgacctaacaatgcatttcgcagaatgtgtcctcatcatgaagcaatgcctgactgcaatgtcttatcagagctgatggttacattttcaggaatttcgtaagctacttgttaaccacagccattattaaaaattaaataacaaagttatagttaaattatatttaaaatgcaaataattacttaaaagtcatcacttcctaattagttaactrcattttacagtgatctattctaattatctgtgcctactgtatcagcttggtgggaatcctgtgagacactgtgctcacctctccccaatgctggctgttttctttctttctttctttctttctttctttctttctttctttctttctttctttctttctttctttctttctttcttttctttctttctttctttctttttctttctttctctttctttctttctttttcttgctttcttgctttcttgcttttttttttttttttccagaatctcactctgccaccc

SEQ ID NO: 610488 - DNA, 519 bp, Homo sapiens
agaccccactattaggaacttctctttcagagcagcatttagagatggaaggtgtctgttttctagcagccgcgaggggtacccatgatcacttctgcgtttctctaactgagcaaagttcattttaaaggacacaaatcctcaaagactcccagaacacgtcccaggacaccacttgaaaagcaccaattcaagaatataaaattctggactataaaaatctctttcagtggtgcattagcactgctacagtgcgattttgtcattagatgctaaagctgttttattggttttttttgttggtttttttgtttgttttgttttgagatggagtttcgctcttgttgcccaggctggagtgtaatggtgcaatctcagctcactgcaacctctgcctcccgggttcaagcaattctcctgcctcagcctcccamgtagctggaattacaggcatgcaccaccacacccagctaattttttatttttgttttctgatagagatggggtttcaccatgttg

SEQ ID NO: 610489 - DNA, 542 bp, Homo sapiens
agatgtgaatttagaccccagctccattccagagccaaccaaattgtaattcactctcagcttttcctaatattatgtgtgtgccaaagcaattgcggtttttgccattaaagtaatgccggtaaagtaatggcaaaaatggcaattgcttttgcaccaacctaatagaatagagtcaaatgcaaaatcccacgccagyagcaaacggtccctcgctgctctcccagtctccctgggcagcgggacccacaagcacagccctctcctcctgtatgccattctgtgggattctggaaagtccaaagggatgatctagggcaaagaatcacccatggcccggcaccacgagggccggaatagtacatgcctgaggcctgggtccaggacttgcttccaaaattgcactcaaggctctcttgcctttgggataaaagaccaattctctgataaggcttgtgatattgatttttaaaaagtcaaaagaagaatatttttttgatacaaataatgatatgaaattcaaattctggtgtccacaaata

SEQ ID NO: 610490 - DNA, 587 bp, Homo sapiens
ttctagtttcccaccattaagtataatgttagcttgatattctttatcaagttgaagaagttctctctattcttagtttactgagagtaattattatgaataggtatattgaattttgtcaaatgctttttctgcatctattgatatgtgatttttcttccgtagcatgttgatgtagttgattatgtgaactggttttcaaatgttggactagctttaaatacctagaataaatcccacttgattgtgatgtataatttttttatacattattgaatttgattgatttgctaatattttgttgagtattttgtgtctacaatcataacacatattggcctataatttcctttcctatttttttttttgttgttgtttgtttttttcagacagagtctcattctgtcacccaggctcgaatgcagtggcgcgatctcggctccctgcaacctcctcctcctgggttcaagtgattctyatgcctcggcctcctaagtagctgagattacaagcgtgtgtcaccacacccagctaatttttatatttttggtagagatggggtttctccatgttggccagactggtct

SEQ ID NO: 610491 - DNA, 523 bp, Homo sapiens
gatagaacaaccagagagaatattaataagaaaacagaggacttgaacaagtaataaaccaagtagaacaaataagtcatattcgaaacactccacccaacaacagcaggatagaattttttatcaagcgtacatggaactttctccaggatacacaatgtgtagaccacaaagcaattcttaatgagttttaaaagattaaagtcatacaaaatgtattttcagatcacagtagaataaagctagaaatcaataacagaaggaaagctggaaatgtagaaatatatgaaaattaaacaatacaattttaaacaaccagtagrtcaaggaataaatcacaagggaacttataaaataccaagaagcaaatgaaaataaaagcacaacataccaaaacttatggaatatggtgaaagcagtgccaagagagaaatttatagctaaaacctacatacattgaaaatgaagaaagatctcaaatcaataacttaattttacactttaaggaaaagcaaataaaaca

SEQ ID NO: 610492 - DNA, 561 bp, Homo sapiens
tgattggagtcttggtcacccaaatgtaagcatttgtcaaagctgagggaatgcgtgcctaaaatggatggctttttctctaggaaatkttgcttcattaatgtaaatgaatattgaacactactgagatacacacagaagtgtttaggtgtgaagtatactgacgtctgcacttttatcttgaaacgcattgaaaagtaaaatggatacagggatgggcagaggatagatatgggatgaaggaaacacaggaacatgtgaattttagattttttttttttttgagacagggtattgctctgttgcccaggctggagtgcagtggcgtgatcggctcactgcagcctcaacttcctcctggttcaagtgatcctcctgcctcagcatcctgaatacctgggaatacaggcacacaccaccatgcccagctaatttttaatttttttttgtacagacagggtctcactgtgttgcccagactggtctcaaactcctggccttaagtgatccttctgcctcagcctcccaaagtgctgggattacaagagtgagccactgtgg

SEQ ID NO: 610493 - DNA, 536 bp, Homo sapiens
gtatggggcaggttgtgactatctgtacccaggcacccacctgagggttgagggagggctgtgtgcagagttggatacccacatgtcagcattcaaagacccacttctgaccctgctctccttaaatcctctcatctatctcatggcttcaatgaccagctctacaccaatcttcaacagcaaaactcctcctcaactacagccctctatttctgagtgatcaaaccactttgttattccccagtcacctaaattcaacacatctaaaactcaacttattactttctcctgaacttcattctttatcctgtatctttttctccagttaatggcaycattttctaccagctgaccaaactcctattatcatcaccctgccctccttattcctctcttatcaacatccaactaaacagcacctgaattgttaagccaccaaaaatcaactgcatctaccctttcttttccatccccacagtttcaaggtttttatcatctctagcctagatttgtatcagctaattagcttctctaac

SEQ ID NO: 610494 - DNA, 452 bp, Homo sapiens
atttcaagtggggatggatagagacaatggtaggcatgctcattttatttaaaggamggcagaatttagacaggtggagaagagagcattgcaagggcagaggaactaagagatcaatactcagagaagtacttggattctgggaaatggcaagtaaaacctttgggttgaattgaagtttttcagatagaggagaaatgggagaggctttaaattgagatagcataccaaatgtgaatagacttaaacttttgggtaagcactatgagccttttgaaaaatgttttgttatgtaaattatgtgatgaaaggcttgcatgagggctttagaaagaaaatttgaaattacagctatcatataaaagagatatagaaatatataaaatatatattcatcatgtgcttaattgttcatggctctgtgccgaatccttttttttttttttacatta

SEQ ID NO: 610495 - DNA, 452 bp, Homo sapiens
atttcaagtggggatggatagagacaatggtaggcatgctcattttatttaaaggaaggcagaatttagacaggtggagaagagagcattgcaagggcagaggaactaagagatcaatactcagagaagtacttggattctgggaaatggcaagtaaaacctttgggttgaattgaagtttttcagatagaggagaaatgggagaggctttaaattgagatagcataccaaatgtgaatagacttaaacttttgggtaagcactatgagccttttgaaaaatgttttgttatgtaaattatgtgatraaaggcttgcatgagggctttagaaagaaaatttgaaattacagctatcatataaaagagatatagaaatatataaaatatatattcatcatgtgcttaattgttcatggctctgtgccgaatccttttttttttttttacatta

SEQ ID NO: 610496 - DNA, 552 bp, Homo sapiens
tcctatttcgtattataatattcatgagtatcattttaaaattgtccatcaaagaaaaggttttaytattctcattagttgattcttcttttaaaaacatagaacattaaaaactaattgtaatactagtgctgttaacattcaaaaatataatagtttgaaatattgttaagaaaatgaaaagacaagccacagacttggaggaaataattgcataacacataaccgataaaggccttgcatctaaaatatacaaacaactctgaaaagtcaacagtttaaaaaagcactttataagaggcagaaggtctgaacacttcaccagaaaagataaatgaacagcaaataagcatatgaaaatacattcaacatcattacgcattagagaaattcaaattaaaaccccaatgaaatactattatcctgctactgaaaagggtaaagctaaaagaaactgacaatagcaaatgctgggaggatgtgaagcaactgaactctcattactctactggcaaaatttcaattgtactgttgcttataaagttaaacaca

SEQ ID NO: 610497 - DNA, 552 bp, Homo sapiens
tcctatttcgtattataatattcatgagtatcattttaaaattgtccatcaaagaaaaggttttactattctcattagttgattcttcttttaaaaacatagaacattaaaaactaattgtaatactagtgctgttaacattcaaaaatataatagtttgaaatattgttaagaaaatgaaaagacaagccacagacttggaggaaataattgcataacacataacmgataaaggccttgcatctaaaatatacaaacaactctgaaaagtcaacagtttaaaaaagcactttataagaggcagaaggtctgaacacttcaccagaaaagataaatgaacagcaaataagcatatgaaaatacattcaacatcattacgcattagagaaattcaaattaaaaccccaatgaaatactattatcctgctactgaaaagggtaaagctaaaagaaactgacaatagcaaatgctgggaggatgtgaagcaactgaactctcattactctactggcaaaatttcaattgtactgttgcttataaagttaaacaca

SEQ ID NO: 610498 - DNA, 552 bp, Homo sapiens
tcctatttcgtattataatattcatgagtatcattttaaaattgtccatcaaagaaaaggttttactattctcattagttgattcttcttttaaaaacatagaacattaaaaactaattgtaatactagtgctgttaacattcaaaaatataatagtttgaaatattgttaagaaaatgaaaagacaagccacagacttggaggaaataattgcataacacataaccgataaaggccttgcatctaaaatatacaaacaactctgaaaagtcaacagtttaaaaaagcactttataagaggcagaaggtctgaacacttcaccagaaaagataaatgaacagcaaataagcatatgaaaatacattcaacatcattacgcrttagagaaattcaaattaaaaccccaatgaaatactattatcctgctactgaaaagggtaaagctaaaagaaactgacaatagcaaatgctgggaggatgtgaagcaactgaactctcattactctactggcaaaatttcaattgtactgttgcttataaagttaaacaca

SEQ ID NO: 610499 - DNA, 484 bp, Homo sapiens
agcacttggctcataggtgaacagtaagtgtttgctgaattgagtgtgtataagaaactctgatccttaaaaagaataaaaaacagtcaattaggagccagaacctaaatattccatattcgataagattgagtatatatgtttatacattgtaacattatatatttttgatttgtgtcaattaaaatgtgctaaactgttgtagttgtacggtatcatgaaagtgcattttgaaaatggaaaaatcagaattcgtaggtgaacatatrttaaaaaaaaacaaaccttaaggggctgagagtcttcctcatctgaatctttgaattcaatgcaaatcgcaatatttctagcctgcagcaataaacaaaacagaataagaaaaaacaacagaaagtcagactatgtaagtatttataaaagaacatgggacgctgaatctaaagggagggtttgacatcaagaatgaaacctccatcttcacact

SEQ ID NO: 610500 - DNA, 582 bp, Homo sapiens
taataatttttaaaaacacttaaatcacaacttttgatgcttagtttacaaacagacacagataaaaacaaattattttactcttttgaagccttggatacactttattaaatgaaaacaccatcagctgcatctgcaaagacaatttgaaggaagagacttccattgaagtcagaaccttagattttgaaatgcaccccggagactaattgatagctcagggcagttgtacttataaacatctgtccctgggccagaaacaggcagcaaaactctsttataaaacaaaaataattacttcctactttaaaaaatgaggttgccaaatacatttagttttgctttaaccttctttttaaagtcagtgccagaaaattcagctaaaaagtaacttaaaggtcttttgactaaagaatacaaataaaactcctacttgggaatcccacccaagaagtcaattcactgtcactgataaatcactctggcactccttacttcacagacattgtcaatgaacatactctgatataattagattgttcatagtggtggccttcagagaaggctgaattgccagctaag

SEQ ID NO: 610501 - DNA, 535 bp, Homo sapiens
aagttatgtagccataaaaggacatatataaacaggccatgtgctctatgtgaacagattgtatatattttttgaggcaggatctcgtgctattgcctaggctggagcatagtagcgtgatcatggctcactgcaacttctaactcctgtgatcaagtaatcctcctgcctcatcctcccaagtagctagaactacaagtgcacaccaccacaccctgatctttttaaaaattttttcttgagatgaggccttgctatgttgcccaggctggcctcaaactctaggcctcaagtgatcctcccatcttggcctcccaaagtgctgggattacaggcacaagccacagggcctagyctgaacagattgtctttacaatgcttctacaaaagtcagttactcaagactatagaattattctttccatgaaacaatactatgtaattgcacattgccaagtaaacattcagaagccattttgaatcatattatatactaactatattttccaaagcatgggatctctcaaaggaattt

SEQ ID NO: 610502 - DNA, 542 bp, Homo sapiens
tcctgggattgggcttcagtttaagttaccctagttccagcttcctattcatcctcatcacaaagtgccatgatctcagggtggcttatgtccaaattcacccaaatttcagcttatcctacttcatctctctttaatgtacgttgctactttgacttctaggagaaatctataccctaattttctcccaacctctttgtctacacattctccttcattgaattatcttccctagacaactcctttaatgctgattttcctctggattctgtgccccctggctttctcaggcttctgtcacaggaaatctcattcaatgcaayggcttaaatcaggcattggtaaaggatagcccactggccaaatctggtctgctcactgcctgtttttgtaaagttttattgaaacacagctacactcctttatttaaatattgtctacagctgtttctacgactcaccaacagtagagttgagtggttagacagaccatatggcctgcaaagcctagactatttactatctggcccattagagaaaaca

SEQ ID NO: 610503 - DNA, 542 bp, Homo sapiens
tcctgggattgggcttcagtttaagttaccctagttccagcttcctattcatcctcatcacaaagtgccatgatctcagggtggcttatgtccaaattcacccaaatttcagcttatcctacttcatctctctttaatgtacgttgctactttgacttctaggagaaatctataccctaattttctcccaacctctttgtctacacattctccttcattgaattatcttccctagacaactcctttaatgctgattttcctctggattctgtgccccctggctttctcaggcttctgtcacaggaaatctcattcaatgcaatggcttaaatcaggcattggtaaaggatagcccactggccaaatctggtctgctcactgcctgtttttgtaaagttttattgaaacacagctacactcctttatttaaatmttgtctacagctgtttctacgactcaccaacagtagagttgagtggttagacagaccatatggcctgcaaagcctagactatttactatctggcccattagagaaaaca

SEQ ID NO: 610504 - DNA, 542 bp, Homo sapiens
tcctgggattgggcttcagtttaagttaccctagttccagcttcctattcatcctcatcacaaagtgccatgatctcagggtggcttatgtccaaattcacccaaatttcagcttatcctacttcatctctctttaatgtacgttgctactttgacttctaggagaaatctataccctaattttctcccaacctctttgtctacacattctccttcattgaattatcttccctagacaactcctttaatgctgattttcctctggattctgtgccccctggctttctcaggcttctgtcacaggaaatctcattcaatgcaatggcttaaatcaggcattggtaaaggatagcccactggccaaatctggtctgctcactgcctgtttttgtaaagttttattgaaacacagctacactcctttatttaaatawtgtctacagctgtttctacgactcaccaacagtagagttgagtggttagacagaccatatggcctgcaaagcctagactatttactatctggcccattagagaaaaca

SEQ ID NO: 610505 - DNA, 605 bp, Homo sapiens
gaattcagtgatgtttctcccatttgcttttgaaagaagagaaatatggctctgttctgcccagctcactggcagtcagagtttaaggttatctctcttgttccctgaacattgctgttatcctgttttatcaaggtgcccagatttcatattgttcaaacagacatgctctacaaacaatttgtgcrgttaacccaatcatcacagggtcctgaggcgacatacatcctcctcagcttacaaagatgatgggattaagagattaaagacaggcacaggaaatcacaagggtattgattggggaagtgataagtgtctatgaaatcttcacaatttatgtttggagatcgcagtaaatacaggcgtaagaaattataaaagtattaatttggggaactaataaatgtccatgaaatcttcacaatttatgttcttctgccatggcttcagctgatccctccattcggggtccctgacttccctcaacaaaaggcatctaaactggacaggaagaaataaaattacctctgttcacagacaatataatcttataggtagaaaaccctaaagattacacacacacacacacacacaaacacacaaaa

SEQ ID NO: 610506 - DNA, 579 bp, Homo sapiens
ctgttctgcccagctcactggcagtcagagtttaaggttatctctcttgttccctgaacattgctgttatcctgttttatcaaggtgcccagatttcatattgttcaaacagacatgctctacaaacaatttgtgcagttaacccaatcatcacagggtcytgaggcgacatacatcctcctcagcttacaaagatgatgggattaagagattaaagacaggcacaggaaatcacaagggtattgattggggaagtgataagtgtctatgaaatcttcacaatttatgtttggagatcgcagtaaatacaggcgtaagaaattataaaagtattaatttggggaactaataaatgtccatgaaatcttcacaatttatgttcttctgccatggcttcagctgatccctccattcggggtccctgacttccctcaacaaaaggcatctaaactggacaggaagaaataaaattacctctgttcacagacaatataatcttataggtagaaaaccctaaagattacacacacacacacacacacaaacacacaaaacctgttagaactaataagtgaattc

SEQ ID NO: 610507 - DNA, 564 bp, Homo sapiens
  misc_feature 427: n = A,T,C or G
tcaaaaataccaaaagttggctctttgaaaagatcaacaaaattgccaacccttttaagtagacaagaaagaatgaattgttggtggtgcagtggtgagcatagctgcttttcaagaacaaaaaagactcaaatgactaaaatcaagaatgatcaagaatgagagagtagacattactacagatcttacagaaatgaaaggattattaatgagtactgtgaacagttgcatgccaacaaatagtctaagtgaactagacaaatatctagaaagacactaacaaccaaaaccgaatcaagaaaaaatataaaatctgaatacacgtataacaagtaaagagattaaattggtaccacaaagaaaaactgtcaccaatgtaatgtcagacccagatggcttttttggtgaattccaccaaatgtttaanggagaattaacaccaaatctaaatctaaaccagacatagacattgcaagaaaaccacagaccaatatcccttrtgaatatagatataaaatcctcaacaaagtactagcaaatcaagtccatgaacatatacaattc

SEQ ID NO: 610508 - DNA, 536 bp, Homo sapiens
tatggaattatttcctagataaaaaactaaaaagcacaagtaggagaagaaaaatgagatacagtatacttcatcaaaattgaataattttgtgttgtaagttttgtgttactatcaggaaacaaaaatccacaaaattggaggaaaaaatccataaaattggagaaaatatctgcaaactgtatctgataaggggcttgtattcagaatgtgtgaagaactcttacttcttctaaaaagacaacctaataaaaaggtgggcaaaagatttgaaaagtcatttcttcaaagaagttatgtacatgtactataagcatatgaaagattcacaacatcatcagtcatcagggaaatgcaaatcaaaaccacaatgagatactgcttcacacccattataatgggtagaattaaaaagataaaaacaagtgttagcaacgatatggaaaaattkgaaccctcatacactgctggtgggaatgtaaactggtaaatgtactttgggaaatagcctggcagtttcctaaagacagttaaac

SEQ ID NO: 610509 - DNA, 604 bp, Homo sapiens
cttgtccctttattaactcatcctagactacttctaaaaacaaagatccctactgcctgctcmtctgttgtcacttacagaccaccagcatcctagacaaggtttttaacctgccagctgtttttaaaaatgtaaaaccagcacaggcagttgatacacctaaccttatacaaattctaaatcaagccactgtgtagctattttcactgtagtaaggcctgactcaaaggcttttcgtctttcacttcctaattctgagacctattctaggctcttgttagaagtctggccacaaaataacaattacagaagcacttatttctacatactttttttttaggataacataaggaaaaatatatacatgatagtcataaaacgcccaaaccaccatatagacaagatgatgcaagaaatttcacagtatgtgctatatggacaattactttgccaattattacctagcagtcagcaaactaggtcccctggccaaatccagtccacagatggcttgtttttgtttggctcttgagacaacaatgtaaaaatttttacgtttttaaaagattataaaaaactaacaaacaaacaagaacattcaacc

SEQ ID NO: 610510 - DNA, 604 bp, Homo sapiens
cttgtccctttattaactcatcctagactacttctaaaaacaaagatccctactgcctgctcctctgttgtcacttacagaccaccagcatcctagacaaggtttttaacctgccagctgtttttaaaaatgtaaaaccagcacaggcagttgatacacctaaccttatacaaattctaaatcaagccactgtgtagctattttcactgtagtaaggcctgactcaaaggcttttcgtctttcacttcctaattctgagacctattctaggctcttgttagaagtctggccacaaaataacaattacagaagcacttatttctacatactttttttttaggataacataaggaaaaatatatacatgatagtcataaaacgcccaaaccaccatatagacaagatgatgcaagamatttcacagtatgtgctatatggacaattactttgccaattattacctagcagtcagcaaactaggtcccctggccaaatccagtccacagatggcttgtttttgtttggctcttgagacaacaatgtaaaaatttttacgtttttaaaagattataaaaaactaacaaacaaacaagaacattcaacc

SEQ ID NO: 610511 - DNA, 606 bp, Homo sapiens
cttccatttcctagtttgcattctcacacatttgctccaggtttatgttaatatagttagcaagtctttactsggtacagtgggtcacgcctgtaatcctagcactttgggaggctgaggtgggtggatcacttgagcccaggagttcaagaccagcctgggcaacatggtaaaaccccatctctacaaaaaatacaaaaattagccaggagtggtggcaggcgcctatagtcctagctactcaggaggctgaggtgggagaattacctgaccccaggaggtcgaggctgtggtgagccgtgattgtgctactgcactctagcctgggtaacagaatgagatcctgtctcaaaaaaaaaaaaaagaaaagcaaatcttgccttctttttggtttataagtcattttctctcaggtcagactatgtcctttacccctttgagcatgatgatatctgatcttcattatgagcccagtggcaacgaggggtattaaggtaagtcttcaggacaatgagtgtccccttataaggcactgcctcagatgaggttattacagggtatttaagcaaggaacatgtagtctacttagacatgcaaaaggtaagc

SEQ ID NO: 610512 - DNA, 606 bp, Homo sapiens
cttccatttcctagtttgcattctcacacatttgctccaggtttatgttaatatagttagcaagtctttactcggyacagtgggtcacgcctgtaatcctagcactttgggaggctgaggtgggtggatcacttgagcccaggagttcaagaccagcctgggcaacatggtaaaaccccatctctacaaaaaatacaaaaattagccaggagtggtggcaggcgcctatagtcctagctactcaggaggctgaggtgggagaattacctgaccccaggaggtcgaggctgtggtgagccgtgattgtgctactgcactctagcctgggtaacagaatgagatcctgtctcaaaaaaaaaaaaaagaaaagcaaatcttgccttctttttggtttataagtcattttctctcaggtcagactatgtcctttacccctttgagcatgatgatatctgatcttcattatgagcccagtggcaacgaggggtattaaggtaagtcttcaggacaatgagtgtccccttataaggcactgcctcagatgaggttattacagggtatttaagcaaggaacatgtagtctacttagacatgcaaaaggtaagc

SEQ ID NO: 610513 - DNA, 587 bp, Homo sapiens
caccatttttgaaaggacagttcctgaggctggactcaccggcccaagtactaccccctccccaggtctccgtcggcaactgtaagtcaaaagccctcaggcattattgcagcgtcccacattgtttgaggttccaggaagtcgctgctacgctcacttgtaagtcttcgtgctgttgtaaaaattgaggtcgtggttttccacgcgatttggctggcgaagagaccacgaagccaccccccacgttttcaactgagtaaatatctaaatatttttgcttgctatccagatcctgggttsgaagtctttgggattagaaacttccaagcccatttcagaggcttcctagtccttgggaggagtgtcttttaaagcacctgccagccttaagttcgcgtgctttcggaaaggggccgacagggtgcgtctcaggggagccttttgaaatgtggattgagaattgtgtgagtgtctctaggaacctccattaactccacttttcctgagtgtagctccgagcctggccacagcggatgctaccacaagccaggcgcagccgggcctcgggagaaagccggaagcccgag

SEQ ID NO: 610514 - DNA, 430 bp, Homo sapiens
ccatgggaatatgaaatacagcacctgttatcagatactgttctcagaagatggagtatttctgtttagaaacacaattttttacagcagtttttaggttcataacgaaattgagaggaaggtagagagatagtycttacatgccccgccctcccccgccacacacaaaggctcattcttatcagcaccctgcaccagaatgatacattttttacaatctatgaacacatcactgtcacctaagttccactgtttacattagggtttattcttggtgttatattctgtgagtttgaacaacacagaatgatatgcatccaccattacagtatcacacagagtagattccctgccctaaaaatcttccatgcccacatatccatccctccctcacccttacccatggcaaccagtgatctttttactgttt

SEQ ID NO: 610515 - DNA, 422 bp, Homo sapiens
tatgaaatacagcacctgttatcagatactgttctcagaagatggagtatttctgtttagaaacacaattttttacagcagtttttaggttcataacgaaattgagaggaaggtagagagatagtccttacatgcccygccctcccccgccacacacaaaggctcattcttatcagcaccctgcaccagaatgatacattttttacaatctatgaacacatcactgtcacctaagttccactgtttacattagggtttattcttggtgttatattctgtgagtttgaacaacacagaatgatatgcatccaccattacagtatcacacagagtagattccctgccctaaaaatcttccatgcccacatatccatccctccctcacccttacccatggcaaccagtgatctttttactgtttc

SEQ ID NO: 610516 - DNA, 571 bp, Homo sapiens
ctcattcttatcagcaccctgcaccagaatgatacattttttacaatctatgaacacatcactgtcacctaagttccactgtttacattagggtttattcttggtgttatattctgtgagtttgaacaacacagaatgatatgcatccaccattacagtatcacacagagtagattccctgccctaaaaatcttccatgcccacatatccatccctccctcacccttacccatggcaaccagtgatctttttactgtttccatagttttgccttttctagaatgtcgtatagttggaatcatacaggaagcagacttttccaattggcttgtttcacttggtaatgtgcatttaaggtcctctatgtcttttcacggcttgatagcttatttccttctagtgcagagtaatattccattgtagggatcacagcttatttacccaccccttactaaagtacygctgggttgctttcaagtcttcataattatgaacaaacctgctataagtatctgtgtgcaggtatctgtataagcgttaagtgtccattcctttgataaaatactaagta

SEQ ID NO: 610517 - DNA, 525 bp, Homo sapiens
acaaaataattctaattcctcctcctcaccctttgtatcattgctgtaattaatttcacttatgtgtgtgtgtgtgtgtacacacaagcatactcaatmaaatacattgtttctattattagtttgaacacactatcatctattacatcaattaagaataggaaaattaaagtttttattttaccttcacttagcacttctttgatgctcttttatgtagatccatgtttctgacctatattattttccttctgtctaaagaacttcttttaacatttcttacatggcaggtctactggtaacaaattccctcaattgattgagaaagtctttatttgtccttaactcttgaaggaaaatttctcagggtacagaattttaggtgctattttctcaatactttaaatgtttcactgcactctcttctgccttgcatgatttctgagtaaaagtcagatgtcattcttatctctgctcctctgtacatatggcgtttttttccctctagtttcttggagggttttt

SEQ ID NO: 610518 - DNA, 525 bp, Homo sapiens
acaaaataattctaattcctcctcctcaccctttgtatcattgctgtaattaatttcacttatgtgtgtgtgtgtgtgtacacacaagcatactcaatcaaatacattgttkctattattagtttgaacacactatcatctattacatcaattaagaataggaaaattaaagtttttattttaccttcacttagcacttctttgatgctcttttatgtagatccatgtttctgacctatattattttccttctgtctaaagaacttcttttaacatttcttacatggcaggtctactggtaacaaattccctcaattgattgagaaagtctttatttgtccttaactcttgaaggaaaatttctcagggtacagaattttaggtgctattttctcaatactttaaatgtttcactgcactctcttctgccttgcatgatttctgagtaaaagtcagatgtcattcttatctctgctcctctgtacatatggcgtttttttccctctagtttcttggagggttttt

SEQ ID NO: 610519 - DNA, 525 bp, Homo sapiens
acaaaataattctaattcctcctcctcaccctttgtatcattgctgtaattaatttcacttatgtgtgtgtgtgtgtgtacacacaagcatactcaatcaaatacattgtttctattattagtttgaacacactatcatctattacatcaattaagaataggaaaattaaagtttttattttaccttcacttagcacttctttgatgctcttttatgtagatccatgtttctgacctatattattttccttctgtctaaagaacttcttttaacatttcttacatggcaggtctactggtaacaaattccctcaattgattgagaaagtctttatttgtccttaactcttgaaggaaaatttctcagggtacagaattttaggtgctattttctcaatactttaaatgtttcactgcactctcttctgccttgcaygatttctgagtaaaagtcagatgtcattcttatctctgctcctctgtacatatggcgtttttttccctctagtttcttggagggttttt

SEQ ID NO: 610520 - DNA, 580 bp, Homo sapiens
accattactcatggcacagtccctcaaggcttcccttggtgagggggaggagtacccggaccccttgcacttcccaggtgaagtgacaccccatcctgctttggctcaccctccatgggctrcacccactgtctaaccagtcccaatgagatgagctgggtacctcagttggaaatgcagaaaacacctgccttctgcactgatctcgctgggagctgcagatcagagttgttcctattcggccatcttgctagccaccacacaatgctttagttttaaatcttcagtggaatttcagttgttattgattaatgcaaattaaccttaaaaattttactgttttagtgaaacactacaaattttaaattatataaaacaatgacatctgttgaattctgggtttgagaacctatttatctcagtaagacacatgaatcaaaagtattaaaaaaggaattgtatgatatttggctaaagtgacataatgatccaataattctgtcatggtatccaaagtttcattaataattaactcaaagaattgagttaagacgaatgcattttacaaacacagatacac

SEQ ID NO: 610521 - DNA, 580 bp, Homo sapiens
accattactcatggcacagtccctcaaggcttcccttggtgagggggaggagtacccggaccccttgcacttcccaggtgaagtgacaccccatcctgctttggctcaccctccatgggctgcacccactgtctaaccagtcccaatgagatgagctgggtacctcagttggaaatgcagaaaacacctgccttctgcactgatctcgctgggagctgcagatcagagttgttcctattcggccatcttgctagccaccacacaatgctttagttttaaatcttcartggaatttcagttgttattgattaatgcaaattaaccttaaaaattttactgttttagtgaaacactacaaattttaaattatataaaacaatgacatctgttgaattctgggtttgagaacctatttatctcagtaagacacatgaatcaaaagtattaaaaaaggaattgtatgatatttggctaaagtgacataatgatccaataattctgtcatggtatccaaagtttcattaataattaactcaaagaattgagttaagacgaatgcattttacaaacacagatacac

SEQ ID NO: 610522 - DNA, 580 bp, Homo sapiens
accattactcatggcacagtccctcaaggcttcccttggtgagggggaggagtacccggaccccttgcacttcccaggtgaagtgacaccccatcctgctttggctcaccctccatgggctgcacccactgtctaaccagtcccaatgagatgagctgggtacctcagttggaaatgcagaaaacacctgccttctgcactgatctcgctgggagctgcagatcagagttgttcctattcggccatcttgctagccaccacacaatgctttagttttaaatcttcagtggaatttcagttgttattgattaatgcaaattaaccttaaaaattttactgttttagtgaaacactacaaatyttaaattatataaaacaatgacatctgttgaattctgggtttgagaacctatttatctcagtaagacacatgaatcaaaagtattaaaaaaggaattgtatgatatttggctaaagtgacataatgatccaataattctgtcatggtatccaaagtttcattaataattaactcaaagaattgagttaagacgaatgcattttacaaacacagatacac

SEQ ID NO: 610523 - DNA, 578 bp, Homo sapiens
atcattaagccaacaaatattcayattgtaacaatgccagagggagaagagatgaagataggcacagaaaacctatttaattaaataatagctgaaaacttcccaagtcttaggagagatataaacacccagattcaggaaactcaaaggtccctaattagattcaacccccaaaaaattctctttgaggcacattataaacaaactgccagactctaaataaacctataacaaatacagaaattgaattcataatcaaaaaacttcccacaaagaaaagcctatgaccagatgtactcactggcaaattctaccaaatgtttcaaaaacaagtaagtgcaatcttttgcaaactctttcaaaaatagaagaggtgggactatttcccatcttattctataagatcagtgttgctctgatatcagacccagacaaaaatatcccaagtaaggatacttccagaacaatatcccttataaatataaatgccaaaaaaaacctcaaaaaatactagaacacttaattcagtgtgcaacattttaaaaagaattgtaccaaatgatcaaatggaatttatc

SEQ ID NO: 610524 - DNA, 578 bp, Homo sapiens
atcattaagccaacaaatattcatattgtaacaatgccagagggagaagagatgaagataggcacagaaaacctatttaattaaataatagctgaaaacttcccaagtcttaggagagatataaacacccagattcaggaaactcaaaggtccctaattagattcaacccccaaaaaattctctttgaggcacrttataaacaaactgccagactctaaataaacctataacaaatacagaaattgaattcataatcaaaaaacttcccacaaagaaaagcctatgaccagatgtactcactggcaaattctaccaaatgtttcaaaaacaagtaagtgcaatcttttgcaaactctttcaaaaatagaagaggtgggactatttcccatcttattctataagatcagtgttgctctgatatcagacccagacaaaaatatcccaagtaaggatacttccagaacaatatcccttataaatataaatgccaaaaaaaacctcaaaaaatactagaacacttaattcagtgtgcaacattttaaaaagaattgtaccaaatgatcaaatggaatttatc

SEQ ID NO: 610525 - DNA, 567 bp, Homo sapiens
ggcaatggtttgttagatacgacaccaaaagacaagcaaaaaaagaaaaaaatagataaactggactttatcaaaataaaaaacttgtacttcaaaagataatataaagaagtgaaaagccaacccacagaatgggagaaaatatttacaaatcatgtactgttaaaggtctaggatccagaatatatttaaaaactattacaactcaacaataaaaacataaattatccaattaaaacataggcacaggatttgagtagacatttctctaaagaagatatacaaatatcttgtatacacatgaaaagatgcttgatattattagtcattagagaatgcaaatcaaaaccataatgagataacacttcatatctactaggatagctacaataaaaggcaayaattaagtattagtttaaataaggaaagaccagaactgtcatacaatgctggtgaaatattaaaatgatagttactttggaaaacagttgggcagtttctaaacataaagttacaatctaattcagcaattttatccctaagtatctacccaggagaattaaaaac

SEQ ID NO: 610526 - DNA, 499 bp, Homo sapiens
gcagagggagcccttgatagcaaagaaaattacaaaactaatgtttatacttctgatcataaagttaatacagcctttttacagaaaatttgaaaaagtgccacataaaggtaataaaaacccactaatcattccaccatcctaagaaccactattaacatttcatcgacacaaatccttccagtcttttttctgtatgtgtacatatatrcatgtacgtacatatatagccaagcccacccacagctctcctgtacatgcaactttgccgttacatttttcacttcatgttaccttttatattttttctaaagccttaaatattcctgagaatgtggtttgccatgcctacagatgagctgtcagtaattaaacctatttttagaatttttcagtcacaagtaaccctgcaataaacatccttatacctaaatccttgtatttcctaaaaatatatccgaagtaaggatagattccttaagaaggaattattaggtca

SEQ ID NO: 610527 - DNA, 555 bp, Homo sapiens
ctctgttgggtttcaaagtaccttgagtctacacctatttaccagtttatggttctctgatacagagcttctgaattggaagaaccacrtcattgtcacatttgcatttagagcatctggcccaggatctggcacatagaacatgctaaaatatggtttttggattaaagtacatccagatatctccttactgcccctgccagcatccttatgaatggactccatactttttaaagtaaaaaatacagaaaaaggtctccagagacacacagtacctgcctaaaaacaagcttcatgaaaagaatgaagaatggactcctgaccccacgccaccactctaacaagcattaagtaacaagtaacagttagtaatggtggaagaattaaatgagtatggaaagagaccgtctctaaggcatagtgtaaaataaagacctaaagctgagaatggatattaagaaaaagccttctggcgaaccagcctccacccaacacacaaagtgtcactataggaatttgaagtctgtagtacactgtagttaaccagagcaacag

SEQ ID NO: 610528 - DNA, 555 bp, Homo sapiens
ctctgttgggtttcaaagtaccttgagtctacacctatttaccagtttatggttctctgatacagagcttctgaattggaagaaccacatcattgtcacatttgcatttagagcatctggcccaggatctggcacatagaacatgctaaaatatggtttttggattaaagtacatccagatatctccttactgccccygccagcatccttatgaatggactccatactttttaaagtaaaaaatacagaaaaaggtctccagagacacacagtacctgcctaaaaacaagcttcatgaaaagaatgaagaatggactcctgaccccacgccaccactctaacaagcattaagtaacaagtaacagttagtaatggtggaagaattaaatgagtatggaaagagaccgtctctaaggcatagtgtaaaataaagacctaaagctgagaatggatattaagaaaaagccttctggcgaaccagcctccacccaacacacaaagtgtcactataggaatttgaagtctgtagtacactgtagttaaccagagcaacag

SEQ ID NO: 610529 - DNA, 609 bp, Homo sapiens
atcagcagttagcagaggctggaggtagaaaaaagactgatgacaaccaggcagcatgagaaattttttggaagtgatggaactcttggcatgttgattgtggtagtagataccttagtccaaactatacactacatacttatacataatggagtactattcagttataaaaaaggatgagatcctgtcatttgcaataacatggatggaactggaggtcactatgttaaatgaaataagccaagcacagaaagacaaacatcacaygtactcacttatttctagggggtaaaaatcaaaataattgaacttatgtagaaggatggttaccagaggctgggaagggtactgggatgctgggaggaggtgggaatggttaatgggtacaaaaaacagaaagaatgaataatatcttgtgtttgatagcacaacagggtgactatagtcaaaataatttaattgtacatttttaaataactaacagagtataactggatggtctgtaacacaaaggataaatgcttgtggggatgaacaccccactttccacaatgtgattattatgcattatatgcctgtatcaaactatctaatgcaccccatcaatat

SEQ ID NO: 610530 - DNA, 634 bp, Homo sapiens
atcacttgacgccgggagtttgaaaccagcctgggcaacatagtaagaccctgtctctacaaaaaataaaaaacaaaaattaaccaagcatggtggcacatgcctatagttccagctactcaggaggctgaggtgggaggatcacttgagcccaggagttcaaggctgctgtgagtcttgatcatgccactgcactccagctggggtgacagagcaagacttagtctcaaaaactaacaaacaaaaaaggtaatgatcgcgaaagctggccagctgctatgtaccatctccttgaaattgcccataatctatccctgtaatatactttttcatatgtcaaacttttaaaaatttttttagggcttttttgttttttctttttgcttttcctttgtttaatttttttttgactttttaaaattatcggcactatgttttacaattcactgtgtagygtattacatctctgcataatttccaacaatagaggtaaagatgtttagagactttagagttttaatttgtttcatgcatattttgcaaattcaactttacaaaagtgcattatcgcaatattgactttgtatgtaagacttgtgtggcatgtaaaaacatgcacaatgtttttacatta

SEQ ID NO: 610531 - DNA, 634 bp, Homo sapiens
atcacttgacgccgggagtttgaaaccagcctgggcaacatagtaagaccctgtctctacaaaaaataaaaaacaaaaattaaccaagcatggtggcacatgcctatagttccagctactcaggaggctgaggtgggaggatcacttgagcccaggagttcaaggctgctgtgagtcttgatcatgccactgcactccagctggggtgacagagcaagacttagtctcaaaaactaacaaacaaaaaaggtaatgatcgcgaaagctggccagctgctatgtaccatctccttgaaattgcccataatctatccctgtaatatactttttcatatgtcaaacttttaaaaatttttttagggcttttttgttttttctttttgcttttcctttgtttaatttttttttgactttttaaaattatcggcactatgttttacaattcactgtgtagcgtattacatctctgcataatttccaacaatagaggtaaagatgtttagagactttagagttttaatttgtttcwtgcatattttgcaaattcaactttacaaaagtgcattatcgcaatattgactttgtatgtaagacttgtgtggcatgtaaaaacatgcacaatgtttttacatta

SEQ ID NO: 610532 - DNA, 601 bp, Homo sapiens
aagcttctgatccttgctggttcacacctcttgccctaactgactgacacatagtaggctcccaataaacatttattaaatgaatgcataactttttctcacacaggcctatccaggattggtggaagcagtttgtatttttttgctttctgttattctttgcaaaggaatgtggctaagttttcgaggtactacttacctatgatgagatttcctgagactataaaatgaagcaacagcagagaagagagaaggcttctcttctttggcagttatttatggccctggatctgtgggtagcctgaacacagaaatgcayatcttagtcataaattggtcagcattctggaaatctgaagccttgagatattagtaggttggctttcaagctgcttctgcagaggtctgcacagaaattcacatgtacacactcagtcacttccctgcctgcctgtgcaccctggcctgtattctgggaacctgccaggacacacaggcctgtctgcctgcagggttccaccccagctgagtcctgagtcaatggtggggctggtagctgaaccacagacctcaagatgctcaggcaagccctgcaaaagtc

SEQ ID NO: 610533 - DNA, 601 bp, Homo sapiens
aagcttctgatccttgctggttcacacctcttgccctaactgactgacacatagtaggctcccaataaacatttattaaatgaatgcataactttttctcacacaggcctatccaggattggtggaagcagtttgtatttttttgctttctgttattctttgcaaaggaatgtggctaagttttcgaggtactacttacctatgatgagatttcctgagactataaaatgaagcaacagcagagaagagagaaggcttctcttctttggcagttatttatggccctggatctgtgggtagcctgaacacagaaatgcatatcttagtcataaattggtcagcattctggamatctgaagccttgagatattagtaggttggctttcaagctgcttctgcagaggtctgcacagaaattcacatgtacacactcagtcacttccctgcctgcctgtgcaccctggcctgtattctgggaacctgccaggacacacaggcctgtctgcctgcagggttccaccccagctgagtcctgagtcaatggtggggctggtagctgaaccacagacctcaagatgctcaggcaagccctgcaaaagtc

SEQ ID NO: 610534 - DNA, 595 bp, Homo sapiens
accttgtcagcatcctatctctctttgctctgcgaatccagtgtcagtcgctctttctctctgattcactagaatcaaacagagctttcacagaccaggggaagaggctaaatgatttgcctgctactaacatgtttagagagaaattcaaatcttctggctttaagtgtattaaattactcaacattaaattactgaccacattgtcagttcatggcaagtttcagttgataggttctttttgatcagtgactatctttcaatggtcatttcccagttttggtttctacctaaacttcactactggtcagccagaaattcaattcactcttggtggctggatttattcccatcaaatggaaaacacttctggttaaataggagcttgctaagaaaatgcaaggacagcacaaattaatgaacaagmactaatcaacccaatttggtgaatctcccacgaataaaaccaaatctaagttccacaaaatatcttgatgactcatttttatgggagaatgtgttgtagtcccacagctctctctgaggacataaacactcttagacttctgaaataatttgccctttgtacaagata

SEQ ID NO: 610535 - DNA, 517 bp, Homo sapiens
tattctctttgaagcaattgtgaatgggagttcactcatgatttggctctctgtttgtctgttattggtgtataagaatgcttgtgatttttgcacattgattttgtatcctgagactttaccgaagtcgcttatcagcttacggagattttggtctgagacgatggggttttctagatataaccagacctattttatatcagagaccaataaaaggagagagtccccaaagtcggtttgcatgagggttttgttgatatcttagcagaggttcaaggatgcacttagkcatccagtcacctggcagtctgaggcttccttaccctccgttatacccgatgagctaagcaacagtagacagtgtcttcatgcaaggggcactgagcacaggcctccggtcttacaagcctacatccttgaccagaaaggaaggaatcctgcagatttgttataaagatctccatacagggaatttggtgtggagataaacataaaccacactttttcccctataatt

SEQ ID NO: 610536 - DNA, 517 bp, Homo sapiens
tattctctttgaagcaattgtgaatgggagttcactcatgatttggctctctgtttgtctgttattggtgtataagaatgcttgtgatttttgcacattgattttgtatcctgagactttaccgaagtcgcttatcagcttacggagattttggtctgagacgatggggttttctagatataaccagacctattttatatcagagaccaataaaaggagagagtccccaaagtcggtttgcatgagggttttgttgatatcttagcagaggttcaaggatgcacttagtcatccagtcacctggcagtctgaggcttccttaccctccgttatacccgatgagctaagcaacagtagacagtgtcttcatgcaaggggcactgagcacaggcctccrgtcttacaagcctacatccttgaccagaaaggaaggaatcctgcagatttgttataaagatctccatacagggaatttggtgtggagataaacataaaccacactttttcccctataatt

SEQ ID NO: 610537 - DNA, 283 bp, Homo sapiens
ttattttacaaagacttgtctaaaatacctgttcctgacatgcaaacaaaaatagataatttgttcttttattcctaaatctatttaatttggtgtaattcagagtgatctttgaggatagaaagataatgcccaactgaagttaatattcttactgcctggaataagaataaagaattttagcagttcttaaaatatggagcagagcattagaatacctgcttttatgaaaaattttatacmtttaaatttatataatgaaaatctttaggaaccaggccct

SEQ ID NO: 610538 - DNA, 629 bp, Homo sapiens
aagtctcatatgtgtacccccagaatctaaaataaaagttgaaaaagaaaaaaaatggtagcatgagaagtgtaagctttgtatatatgagaagttatgtccagatgattctacattaagtaacttactcattaattcagtaaactgttatgacgtgttcccataaatgtgtgaacttttccaagtatgggggaattcaaagatgagcggaccctaagctctaggagatactgattaaaggagtcatacttataaataagtgaatatgtaatttaacagaagggaacatgtgttatggtgaatgtataaacaaaaggttgagtgaacatgaagcatgaagcaactaacccaatctggaggtttgggtaragaaaatcagtattaagctgcaactggacaggtgacaggaggatcaaatggacttctctgtgtctgcaatgaaagaagtctgagctaagattttatttagaacttattaaatgctcataaaaggatcagatgaataatttaaatgagcaagtaaccaatgacattcattcaaaactgcgtaaacttatgcaagaatgcatgttttctgatatttctgctttgtggaagctcgcagtgtgatccataatcatgtcacatgc

SEQ ID NO: 610539 - DNA, 578 bp, Homo sapiens
ctctccacctgcaacatttttctttctctgctctctgtcctctttctttttctttttctcccttctgataggaagcattctttgatatccacgctcctaataaatgtggtttagctgctgctcttaaaactacactttgggaccagcatggattagggatatttttccctagaagaagagatatctaagttgaaacacaaagaataagtaggatcaaatgaagcagaaagagagagatcagcagtatatatatatatatatgtttattgaatgagtaaataaacgaatgaagacaatttgacaagaagcacctgtaaagcatatcactgagaccttggtgttctgttggtagcttctctttctgaaggcataaggtaaaactgtccaaatataaatttccctcctagtttgctcrctctccagaaagctctgagcattttgaaatatattcttatgatagctcattttataacataaggaaactaaagctgcctggccttatggatggagccacatagttatagataagtcagacaccaagataaagagcatttccatgaagtgaggtagaggcaggt

SEQ ID NO: 610540 - DNA, 377 bp, Homo sapiens
atggagagtgggagtagaaatagccgtgggaggagactctaggtgcagagaatgggagaagtaatggcccagggagtgttctcacaacagtgggcagtggagactggcaggagcatagaggtataaaggaaaccaggaaataactacggctggaaaaccaagtcaaagccccattgcagaatctttggtgccttgctaagtattcccaacaatagagggcattgaaggacttggaggargagactggtttgactcctgctgtgacttgggaagttccccctaacagcagtgtgcacactacactggaggaatgaaaactggaaggcaggaagacagtaggcagtaggtatcacgtcagccatgtgagacataagtga

SEQ ID NO: 610541 - DNA, 478 bp, Homo sapiens
aactatttttaataaaacacagtttttctcgtgaacaattctaaataaaacgacatgtgtctttatttggcagactatcttattagtggttcagaagtaaaactggtagttgccttgccttaaaaactggccactttagttttttcaggaagcttaacgttatgtgaggcgctgtggaaaattagagaaactatgacttttaattattaactagacaaagaggtaagatttggttaaggaaaagttctctcagtggtgctttatgaaatattgtgaagaaagctccaatcccacattatttcatagatttaaatgggatatttgatggtgttcatacatgctccctgttggggaaagccgatgaatgagcagatctaagaaattctgcctttcatatttggagatatgccaagaatcagagggcggagacctgcaagccattataagcatcaaagyttatgtgagctgggaaacagac

SEQ ID NO: 610542 - DNA, 578 bp, Homo sapiens
ccctttataaaaccatcagatctcgtgagacttactgtcatgagaacagcatgggaaaaccggcccctgtgatttaattacctcccaccggatccctcccatgacatgtggggattatgggagctacatttcaagatgagatttgggtggagagacagccaaaccatatcattatcatttctattagcatgagacagtgaaatgaaatcaatcagctatagacaagtcatcttaaacagctctccttgccttcaaaagaatgttaatatataatagctcatcatgaaaaaggtcaaaatactctctccttcatgctttataaactgggctgtcactgctgtgagtggggcttcttaccacctatagtttcaggtctcctgatttgcaaactgttcttttgtataaacttgtacagttttaaaatttgatctrattttattttataataactgtttttaacaaacattacttaatacttacatcaacttcacaaaatggatattattatgatgatctccattttatggataagtctgggtgggtgaggaaattgatcaagcccacataacaagtggaag

SEQ ID NO: 610543 - DNA, 622 bp, Homo sapiens
gccctgcaatctaaatgtattcatttgaaaatgcaatatttcaattagatttgaaagagagtcctattactgctgaaaaatacttaaggaaaataaattcagcaacaggactctgcctttttcgaaatgaattgtttagcttagtgctaagtttatatgagggtatgagtcaaatttacagggacactggatttagtcacagagattgagggtgttactttattatgtctaaaaaaaaatgaaacagctgaagtctttcttcctacttagaatcttcatagagtaattgtacagctttaacaggctgtacaggagagcaatagtgctagataaacaaatgataggtctctaatagtttgaaagcttaatcaggtagctttaaacaaaagtgtattcatatctgggtatcagtgaaggaaggtctgtaatggaaattactggcacctcttgcttctcctattagcccagcagttccacaaatccttataaatataaaggtataatattacatataaaacctacacatggtttgcttcaaactgrtaagtcacgaaagaaagatgcagacatgtcttcccattggtgatgccatttcccactgcctgttatcaggaatgttttc

SEQ ID NO: 610544 - DNA, 520 bp, Homo sapiens
ttctgttttgcattatctattttacctattttataaagttgtacaaaattgtgtctcctttcactggagattttctcttattgtttaagtgctgcaaattttgatactgtcaygaatagaatatgctgtgtttaaatgcgccgttataggaaaacaagcactaatcatacccctacttgaatcttcaatttgtttattttccaaattatttttcccatgaatattttcctatccaatgagtcctaaagtgacacagaggatacaagcagtacttgcattgcactatacactgtttaattgaaacagatgtatatcagaaccctatcatcactttgcacagttcatggtaaacgaacacaagaaatatctctgaaatctaggtctatgattcttttattgcattcatattatgaaaatagtgttgggtgtcacatatattttaatctattactttttatttacttgttttaatgattctcattaaatctctcactctttgatctgtcacctttcaatagca

SEQ ID NO: 610545 - DNA, 605 bp, Homo sapiens
actagtgacaaaaataacatgcttactgctttccataaggaaaagtggaggtttttaaaaaagtaaagtgactaaaagtgatcttggcaaaaagaaagtctctctcttcttttctctctttttcctgaaagacatgtttcttcctttctccctatacattactcatactttaataaccatctttcaaagactactaattcaaacattgaagggaggtcaatctcttctgaatatctattttaaataatcaatacaagaaaattaatcagtaggtaatattatgtgatttacatttaatgactatgttttaaaaacatgaaaaataaactgcakgcatataaacccacctgagaggaacgctgatattacacaaccttcatgtaaatagctatatcttgtttggaaagagttaaagttgatgctgtattaaaattaaatatttttataatttattaggacattatatgctaacttgattatgcttaaccaaacgaactaaaaatgacattaagataatttaaccaagcttatactaaaggcaaattatgtcaaacccaaaaaacagaagtggtacaatttaaaaacaattattaattattgaagaa

SEQ ID NO: 610546 - DNA, 605 bp, Homo sapiens
actagtgacaaaaataacatgcttactgctttccataaggaaaagtggaggtttttaaaaaagtaaagtgactaaaagtgatcttggcaaaaagaaagtctctctcttcttttctctctttttcctgaaagacatgtttcttcctttctccctatacattactcatactttaataaccatctttcaaagactactaattcaaacattgaagggaggtcaatctcttctgaatatctattttaaataatcaatacaagaaaattaatcagtaggtaatattatgtgatttacatttaatgactatgttttaaaaacatgaaaaataaactgcatgcatataaacccacctgagaggaacgctgatattacacaacyttcatgtaaatagctatatcttgtttggaaagagttaaagttgatgctgtattaaaattaaatatttttataatttattaggacattatatgctaacttgattatgcttaaccaaacgaactaaaaatgacattaagataatttaaccaagcttatactaaaggcaaattatgtcaaacccaaaaaacagaagtggtacaatttaaaaacaattattaattattgaagaa

SEQ ID NO: 610547 - DNA, 536 bp, Homo sapiens
taaggaaaatagagaagtaataggtcaagtatgtatttcttgacatgttttcatgtttaaagcacacagtaacatgcccaagcagcatcagggagcagcagacactattgtatataatggaagagtggcacaggtaccaaatagattcagctgaaattgatatagtcagagttgggagaacwgaaaacaggaaccttttctgtaggtaccagtggagcatcccttgggaaattccagagtctttgagttggtatgtattagtttctcattgctgctataccaaattgccacaaatgtggtggcttaaaacatttattatcttacagttttagaggtcagacatctaaactggattgctatggctttactcctggaggttctagggaagtgttcatttccatgcattttcttcttctagaacctgcacacattatttgttttgtggcctttccacactcagatctctgcttccattgtcatatctctcatgtgacactccagccttcctctttcatttatatgacccttgtgataca

SEQ ID NO: 610548 - DNA, 564 bp, Homo sapiens
accgtggggctggagcccaagagtgctcaccctagctactgcacctgctcatctgtgtgctccatatcccgtaaggggtttgagcacacagaagccaagcaaaggagccgcactcctgtcccaagtcccatgaaggggtgaaggaactcccccatttcactttgrtacagaatctcgtttaaaataacataaattacaggttaattgatcgacaaattaaaaattatattatttgctttgaaataaatgtacccttaaacgtatgtataccactggtaatttttgaataagcattatacacaaatataactgacaaactcagcatattaaatatcatacattgttttctaaatggctatcatttttaagtatttttattttcatgcatgcatactaataacagatgcatacagcctatattatgtttccattcacaatcactataaattctgaaaaagtaaaacattaagcacacaaaacaatattatctgataaaaaagtaaggactcaacattgagcaaagttacagtactgttttattatttcttctaagatgtttacaaa

SEQ ID NO: 610549 - DNA, 564 bp, Homo sapiens
accgtggggctggagcccaagagtgctcaccctagctactgcacctgctcatctgtgtgctccatatcccgtaaggggtttgagcacacagaagccaagcaaaggagccgcactcctgtcccaagtcccatgaaggggtgaaggaactcccccatttcactttgatacagaatctcgtttaaaataacataaattacaggttaattgatcgacaaattaaaaattatattatttgctttgaaataaatgtacccttaaacgtatgtataccactggtaatttttgaataagcattatacacaaatataactgacaaactcagcatattaaatatcatacattgttttctaaatggctatcatttttaagtatttttattttcatgcatgcatactaataacagatgcatacagcctatattatgtttccattcacaatcactataaattctgaaaaagtaaaayattaagcacacaaaacaatattatctgataaaaaagtaaggactcaacattgagcaaagttacagtactgttttattatttcttctaagatgtttacaaa

SEQ ID NO: 610550 - DNA, 536 bp, Homo sapiens
taaggaaaatagagaagtaataggtcaagtatgtatttcttgacatgttttcatgtttaaagcacacagtaacatgcccaagcagcatcagggagcagcagacactattgtatataatggaagagtggcacaggtaccaaatagattcagctgaaattgatatagtcagagttgggagaacagaaaacaggaaccttttctgtaggtaccagtggagcaycccttgggaaattccagagtctttgagttggtatgtattagtttctcattgctgctataccaaattgccacaaatgtggtggcttaaaacatttattatcttacagttttagaggtcagacatctaaactggattgctatggctttactcctggaggttctagggaagtgttcatttccatgcattttcttcttctagaacctgcacacattatttgttttgtggcctttccacactcagatctctgcttccattgtcatatctctcatgtgacactccagccttcctctttcatttatatgacccttgtgataca

SEQ ID NO: 610551 - DNA, 595 bp, Homo sapiens
aattcaatgcgtatctgtttgtttcttgaaattaatcttttttacttagtttatacttttttgagagttttggattttaaagcctttacctacattaaataagaacttctttttagaagtggtactcacaaaaacactatgaaagagtgaagcagtgtttcaattccttggcttaatgtttttgccacttctgcgtaaggaactccatcttaaatattctgcagtaagctgcgcatatctctatccctgtccttatcactcttaatgtttacttttgatttatgtaactatttcatccatctatcacagtggctggaaaacagcagtcacctaataaataatgatagaattaagaaatgaatatctatgtggaaagtttaacaaacagtgggcattttgttctagttggaaggtaggagtaaaaaatagcatgtgggccgggtgcggtagctcccgcctgtaatcccagcactttgggaggctgaggtgggcggatcacaaggtcaagagatcaagaccatcctggccaacatggtgaaacccmgtctctactaaaaatacaaaaagttagctgggcgtggtggcatgtgcctgt

SEQ ID NO: 610552 - DNA, 433 bp, Homo sapiens
ttccaaatgaggacacagccactcagtgaaagtgagtagatctctatgtgactatgaggaaggccacaaccrggtattatcctttgggttttagaaaaatgagaaataaacctgtactaagatatgtatatattagggttacaacagcagggatacctaacgtgcaataaggctggatcctatattccacttcagatgctgattcatttatgttcattcagttcatattcctgtttctattctattttttctaattctctcttgacattgggccatgttatcttttggcctcacctctaacacaatacttctttataaaacacatcagtggagtccatttttaaccatacaaacttcatattaaactaataatttctcagtcctcagcttacagcctgggtgccagcatttggtatgattcactactcctttt

SEQ ID NO: 610553 - DNA, 625 bp, Homo sapiens
tttggtatgattcactactcctttttcctctaaattctttctttacttaattcttattctccacttacctcacttattcttcctgcctgctatttttgtttctcctcagctctcctaaattcagtttctctttctacattcactcccttaatttacctcctccaggttcatgtcattaaatatgattgctttgtgaattgrtcttaaattcacagtttaagaccatttcacccttgaaattcagatttttatattcaccttgttagtaaaacattccacctgtgtgtttaacttaacagtaagatgtctaaacagaaacttctgacttctgacccacattggcttccttaaaggttttgttcaaaagctgttattccaattgtttagacttaaaaaaaatttgaattacccttaattactttatttctctgacaacccacatgtagtactccatcagaaaatcctgctttttatttaaaatatattaaggttttgacgtctgccaaggtcatcaccaggaccacgaccagaattcaaggcaaaatgtttcacctgagccaccatgtgactagtatccctaattttgcctttttttttttttaacgatttcactcttcacacagaa

SEQ ID NO: 610554 - DNA, 608 bp, Homo sapiens
taaggtgatgtgtttccttacctrttgcccattaggcaccaccactcttttctaaagctaaagattatttttcccagaatcctcctccctgtatgtggttcctagttggagtgtgccaataacaggcgttcacgtgtgatttagcacaaagaagtgaaacagaagccattatttctgagaagcagttgcatcctgaagcttatgcagaggagagatttacagcatgtctcccggctcttgagaactatttacttcatcactgcaacctaagtagttggtaggacctccttagagaatcttggcaactgcagaaatttacaaactagctcctgagaaacagatttcactgcttcaatttgacaacgttggtgtgaaatcctctattgtggaagctctcttcactaccactctcttgatctttcagtggttttaaacccctaatattatcctaagcaccttttacttgattaaacagagtggcttctgactttttatatgattttttcactggcacaggtgcttcacagagtagtaataaactagttaattttaaacaggagccaaaggtgaaattattttcaaaaagagtacaggaaagtcataatgtc

SEQ ID NO: 610555 - DNA, 546 bp, Homo sapiens
tggcaagctttgcacttctattaattcatggagccattattgacatttgaaattatcatttttcaatgtgatttaaatgtattaaagttgtcttttttaaaaatcacgtagtttatttcactgataaacttatcctttttcattgaagtcattttttaataacagttgtttttaaaaattttttttaaatatgtayacttttaaaatttatgtggaagctgctctattttcttcaggacaacactcctgtaccattctaatgtagttttaaatatatccaaagaaatttaggaaatctataaaaataagatatttctaaactttagattcttattccacaaaaagtcttctgtttttaataaaaactatttccttacagttaatataccaagctgacaaagctatgttcttttgccaagtttttgttaagattgctgtatacatcactaaaggaacatttgagtatccatttataaatgcacctactttttggcttagaatcttagtttgtgcgttttgaaaatagaagtactttataaagtcctt

SEQ ID NO: 610556 - DNA, 516 bp, Homo sapiens
tcactcaccccaaattaccctgaacacacacacacacacacacacacrcacacacactcatgcacacacagataatgaaatggcaaatgatagcaacaggaggcagccaaatgcctaggcagataggggagggtccctggtaaaaaccccactttcagtccaaagatagttgaaagcctgaaaaacaagctacaaattagatcttcggaccagattgagaacttgtcttcctctttggtgtgcttttcctctgactgatccccacctttcacctattttacatatacctacttttttctaactggttttctacactgtcgtgcccacctttgagtggcatcttcacttaaccttttttgcatactcaccaaccaatcagcatgtactccccattctgagtccataaaaggccccagacccagccacatggggaaatttcctttctttaagtagggagaccaactgtgcatccatcctctctctggtgaaagctattttcattgttcaacagaattc

SEQ ID NO: 610557 - DNA, 516 bp, Homo sapiens
tcactcaccccaaattaccctgaacacacacacacacacacacacacgcrcacacactcatgcacacacagataatgaaatggcaaatgatagcaacaggaggcagccaaatgcctaggcagataggggagggtccctggtaaaaaccccactttcagtccaaagatagttgaaagcctgaaaaacaagctacaaattagatcttcggaccagattgagaacttgtcttcctctttggtgtgcttttcctctgactgatccccacctttcacctattttacatatacctacttttttctaactggttttctacactgtcgtgcccacctttgagtggcatcttcacttaaccttttttgcatactcaccaaccaatcagcatgtactccccattctgagtccataaaaggccccagacccagccacatggggaaatttcctttctttaagtagggagaccaactgtgcatccatcctctctctggtgaaagctattttcattgttcaacagaattc

SEQ ID NO: 610558 - DNA, 563 bp, Homo sapiens
gcatttggacagttgaaaatggtaactctggaacttgggggtccaatttactgtaaccactagccatgtggtttttactaaaaacctccttttagtaaaaaaataaattaagttaaatgtttagttcattagtcacactagtcacatttcaacttctcaatatccaaatgtcactagcagctaccatataggacagaagtatacaacttgtcatcaccacacaaagttcgatwtgacagtactgctctaaataattggttttattaaatcagagtcaaatcttccaaatgcttaggataaaatatggagttgtaagtccagcgtaagaaaaggtaggatatcagttctaactttccaattactggatttctaggctgactagctgtgatgctcaaagctgggatgactggaagatcttttgaagtattagatgattagtgttttgtgttcttactatcctctttgcaaaagattatgaggtgggagactagatcatcccaccatcaagtaagcaggttttatcatcattgtgaactcaggaagagaaagagaagtagaaatgc

SEQ ID NO: 610559 - DNA, 563 bp, Homo sapiens
gcatttggacagttgaaaatggtaactctggaacttgggggtccaatttactgtaaccactagccatgtggtttttactaaaaacctccttttagtaaaaaaataaattaagttaaatgtttagttcattagtcacactagtcacatttcaacttctcaatatccaaatgtcactagcagctaccatataggacagaagtatacaacttgtcatcaccacacaaagttcgatatgacagtactgctctaaataattggttttattaaatcagagtcaaatcttccaaatgcttaggataaaatatggagttgtaagtccagcrtaagaaaaggtaggatatcagttctaactttccaattactggatttctaggctgactagctgtgatgctcaaagctgggatgactggaagatcttttgaagtattagatgattagtgttttgtgttcttactatcctctttgcaaaagattatgaggtgggagactagatcatcccaccatcaagtaagcaggttttatcatcattgtgaactcaggaagagaaagagaagtagaaatgc

SEQ ID NO: 610560 - DNA, 520 bp, Homo sapiens
agctgccgctgcagccacactgccatggctgcggacccaggcatttctatatactgggggccaggagtaggcgggagccctgccctcccaggagcagctgcagccaaccrggccacggccgtagacccaggcatctctgcactctcgggggcctgggaagaacctccctgcacctgcctgcaggctcaaaagtgcctactcctgctacctggcttctccctgctgtcagtgtccactccaatctcagagcgaagttgaggccgagcccggggactatctcaatctggccaggtgtgccaatgcctgtgacagtgctgacacgccatttccctgctgcctcatccccctctggactttaggtaccaacaagcatgggagggaggctgaagggggtgctgaaggcagcttagtgccttctgtctacctcattcttctggatgcaggacaagaactcaggacctaatgaatggtggggctaaaagagccataacacaaacagggctgaaacacgccccttcct

SEQ ID NO: 610561 - DNA, 608 bp, Homo sapiens
ttaattgtttcctcagtaaagggtttttatggactgaaggctgtgtccccacaaaagtcatatgttgaactcctactcctcaacatgatggaattacaggcaggccttttgggagatcattagacttggataaactcacgagcgtggagtcccagtggtggaactagtgtccttataagaggaggaagaaagactagatccctctctctcagccataccaggacacagtcaaagggtggctgactgcaaaccaagaggaaaactctcattgggaactgaacttggatttcccaacctgctagatctgtgagaaatacatgcttattgtataagccacacagtctatggcattttgtaatagcaacctgagctaagatagtgacataatacatcaaacactgaaaatttggatgttagttaaaggactaaatatagatgaattsaaatcaagaaaattgtcttaataaatgtataacttcctttggaaagcatacacaaaggattttgttagatatatttgcaaatgtttatatagaattcattctttatcgtggttttatgttaaaatacaacattacagtcacaaaagtacggttttgtgcatttga

SEQ ID NO: 610562 - DNA, 564 bp, Homo sapiens
tataatgaaaacaattaatcttgacaggaccaccttatatgttggcattataaataaaagaagacattccaattgctatgattattttgttttgggtagacaatgaaatagaaactgcatgattttaggagaataatttaatgtctgatgaggattttgaatatgttttaatctctttcttttaatcttatccattttctattttgttgccagcattttttagtattctagaaaatactgaggtctgaatagcatcctggagttcatcagttgatgtggcctgtgagctctacaattggcctcccagcagtactttttgttatttaaacaaaggggtaataaaatgtgcaagatgaaaatgctggtccttttgtttttgcagtctgcaatgtccaactgaataaaaacaaagcttggactatgacacagtgaatgcctaataatatagtgsccatatataacatagtgcctatattttatataaatatatttattttttcttcctccttggagttttttttttactaaattcagaactcttagtttcataacatcaacatacaa

SEQ ID NO: 610563 - DNA, 605 bp, Homo sapiens
tgtttttgcagtctgcaatgtccaactgaataaaaacaaagcttggactatgacacagtgaatgcctaataatatagtgcccatatataacatagtgcctatattttatataaatatatttattttttcttcctccttggagttttttttttactaaattcagaactcttagtttcataacatcaacatacaagacaaaagtctacatgatttgcactctagaccacgtgtattgctaatgacaataccttcccctgcatcctctcctcttcaaaaatttaaaacatggcatatttaagtgcaaaaggatgacatgcatctttttggatggtcaccccttaaagaattctagtatttttttctatgtaatatctttatcttgtattaggtaccataggaacaatttcttctgaaagataatgtcatttaaattgatggctgtgtgtgtgtgtgtgtgtgtgtgtgtgtgtgtatgtgtgtgtgtgtatatatgtgtgtgtatatatatatataatgaaaggytttaaattatacatataaaactttaaaaaatgaactcaaaattgattaaagtcttataaaacccaaaactataaaactactaa

SEQ ID NO: 610564 - DNA, 607 bp, Homo sapiens
cacttataggaggctgagccaatattcaaactcagatgacccaggctctaaatttcaggttatttctttttttaatatttttgtccgttgcactaatctggaaaataacataggtgtcccagagctggagagatggctttacatcaggcaataatataaaggaaggagccatggtaaaaaagatcctttgaactgcatcttgaagagcctttagtactatgaagagataggacaagcatgtattctagaaggaagaaagcctgagcaaaaataagygggtaacacagcatgagaaaaacgtcaactgctagcttctcctaatgttaaaaaaacattctgttggtaagacctagaaggtttacttcttacagcagcaaaggagaccaccactatttttcagtggtctcagcaggagaggttgaaattaggatatattgtttgaaaactatggcttcctcctacttttgtaaataaagtgtcaatgaaacacaatcacactcagtcatctaaccattgtctatagtgatttttacaccacaaaagcagagttgagtgggtgcaacagagatgttgatgtcaaaaatattcaagtgtttagtacacaaaa

SEQ ID NO: 610565 - DNA, 524 bp, Homo sapiens
atcagcaaatctccttgtccttaaagtagggcattatattagagttaatataattttaatgttcattcctcaagcataaacagtaaaaagttaaatctaatatatgagacaagctgtaattaaagccttttcagagtacccagactggtagtcaattaatatttgaaagttattacgacaaatgttgtaagacatgatgatatccaaagtgaagacagtagcggtagaaatrgagcctaaccagacataagtgaaagacaattctgagcaattggcatagatgaccaacttgttgctaataagagaaaaagcagctcttttgacttcaagagctctttgacaactaaatgggtagtgtgatgctactaatataaatatgacctcaaagtagaatatacagtggaagtaggtagtttcatcttccttttactgaggttaaggcactgttttcaattggggatatgtattggattgactttaaaaattcgtgttcaaatttagtacagaaggagttcatagaaata

SEQ ID NO: 610566 - DNA, 439 bp, Homo sapiens
tgataccaaagcctggcagagacacaaccaaaaaagagaattttagaccaatatccttgatgaacattgatggaattttttttttaatttctcttttggaaaggctaagaacattcgctattataatgccttctgcacattctattttctagggcagagtttggccctagaggtttaaacacaaatatactaagaagaaattccttttcttctttattttatacataactaatgaccataaaatgggcgtcaaatatttgaatggtggcaatcatctgaaagaaaaaggaaatttaaaaaaaaatcgattttagttgatatttggttattgaaagaaaataatccccccaaaatgcatgtaagtacaggctaygtgtaaaatgaggtgggacatgttggcttacgcctgtgatctcagcactttgggaggccaaagcag

SEQ ID NO: 610567 - DNA, 606 bp, Homo sapiens
tgtatgcaaatgcatatggtgacattattcataatcacataaaactggaaataaattcagtgtctttcaactgatgactggcttgtattagtgatccatcactgtgcaaaatattactcccaaaacttggaggcttatataagaaatggttattatttcatagtttctgtgggccaggaagctgtgtgtggcttagcaggrtgcctttggtttaaggtcccccatgagacagcaatcaagctgtcagccaagaccacagtcatcttgagacttgagtgaaggctgatccattttcaaggtcactcacgtggctattggcaggccacagaaggttcacatccaagtcaactcacatgggcagcctcccagcacagcagctctccccacatccctgagcaagcaatccaagagagagcaccccagatggaggctgcagtcttcacataacccagtcttgaaaatgacaccccagcactctgtcacgtttgattgagtcactaaatccaggccacactcaatgggtggggagtccgtgagtgcctggaggtgggctcaccagcatctcacaggctgaactagcacatggatgaagcctgcaataaataa

SEQ ID NO: 610568 - DNA, 606 bp, Homo sapiens
tgtatgcaaatgcatatggtgacattattcataatcacataaaactggaaataaattcagtgtctttcaactgatgactggcttgtattagtgatccatcactgtgcaaaatattactcccaaaacttggaggcttatataagaaatggttattatttcatagtttctgtgggccaggaagctgtgtgtggcttagcagggtgcctttggtttaaggtcccccatgagacagcaatcaagctgtcagccaagaccacagtcatcttgagacttgagtgaaggctgatccattttcaaggtcactcacrtggctattggcaggccacagaaggttcacatccaagtcaactcacatgggcagcctcccagcacagcagctctccccacatccctgagcaagcaatccaagagagagcaccccagatggaggctgcagtcttcacataacccagtcttgaaaatgacaccccagcactctgtcacgtttgattgagtcactaaatccaggccacactcaatgggtggggagtccgtgagtgcctggaggtgggctcaccagcatctcacaggctgaactagcacatggatgaagcctgcaataaataa

SEQ ID NO: 610569 - DNA, 645 bp, Homo sapiens
ccaaaacctcaaaagcagggaagccaacagtgcagtctttaatccgtgaccaaaggcccaagagcccctggcaaaccactgatgtaagtccaagagtccaaaagctgaagaagttggaatccaatgttcaagagaaggaagcagggccaggcgcagtggctcatgcctgtaatcccagcactttgggaggccgacttgggtggatcacctgaggtcaggagttcgagaccacsctggccaacctggagaaaacctgtctctactaaaaatacaaaagttagctgggcgtggtggtgcatgcctgtaaccccagctactcgggaggctgaggcaggagaattgcttgaaccagggaggcgaaggttgcagtgagcagagacagtgtaattgtacttcagcctgggcaacaagagcaaaattctgtctaaaaaaaatgaaaaaaaaaaagaaggacacatccagcatagaagaaagatgaaggccaaaagattcagcaagtcaagtccttccatgttcttccctctgctttattctagcagtgctggcagctgattagatggtgcccacccagatcaagggtgggtctgcctctcccagtccactgactcaaatgttaatctcttttggcaacaccctcacagacac

SEQ ID NO: 610570 - DNA, 645 bp, Homo sapiens
ccaaaacctcaaaagcagggaagccaacagtgcagtctttaatccgtgaccaaaggcccaagagcccctggcaaaccactgatgtaagtccaagagtccaaaagctgaagaagttggaatccaatgttcaagagaaggaagcagggccaggcgcagtggctcatgcctgtaatcccagcactttgggaggccgacttgggtggatcacctgaggtcaggagttcgagaccaccctggccaacctggagaaaacctgtctctactaaaaatacaaaagttagctgggcgtggtggtgcatgcctgtaaccccagctactcgggaggctgaggcaggagaattgcttgaaccwgggaggcgaaggttgcagtgagcagagacagtgtaattgtacttcagcctgggcaacaagagcaaaattctgtctaaaaaaaatgaaaaaaaaaaagaaggacacatccagcatagaagaaagatgaaggccaaaagattcagcaagtcaagtccttccatgttcttccctctgctttattctagcagtgctggcagctgattagatggtgcccacccagatcaagggtgggtctgcctctcccagtccactgactcaaatgttaatctcttttggcaacaccctcacagacac

SEQ ID NO: 610571 - DNA, 499 bp, Homo sapiens
tatatatatatatatatatatatatatatatatatatgtataggggagattttaaagtattaactcacatgatcacaaggccccataataagctgtctgcaggctgaggagcaaagagaaccagtccaagttccaaaactgaagaacttggagtccaatgtttgaggtccagaagcattcagaactggagaaagatgtaggctgggaggctaagtcagtctctcttttcatgtttttctgcctgcytatattctagctgcattggcagctgattagattgtgcccattcagcttaagggtaggtctgcctttcccagcttactgaccaaatgttaatcccctttggcaacatccttacagacacacccagtatcaatgctttgtatccttcattccaatcaagttgacactcagtattaaccatcacacagagtttctccatgttggctaggctggtctcaaaatcctgacctcaggtgacatgccctccttagcctcc

SEQ ID NO: 610572 - DNA, 471 bp, Homo sapiens
tgtctttttttttgttttctgcacaacttgcggaatttcagtaatagtttgttctatgttagtctcaagtcatactgatattttcatatgtaactattcctggttcmaaatttcaatctaaaatttgtttagaagtttttatgttatacctaatgttgacttggtttgaatttccatgccttaatcaagaataaaccttcccacagctcctgtcaagccattaatgccaggtgaaatgaagtaaaaaaaaatgtgctaccaatgaattcagttgacatgtggcccatgctttcactgtaatctctaaataagaaaacatatggtgatatattaccttgagaagcataccactggaaaataaatcaaagaaaagaatattccaaaatgtagtactttgctttcagctatcagacccacgtttactttttggatgctttcttgcttcctgtggtttattgttgggtgtttttg

SEQ ID NO: 610573 - DNA, 471 bp, Homo sapiens
tgtctttttttttgttttctgcacaacttgcggaatttcagtaatagtttgttctatgttagtctcaagtcatactgatattttcatatgtaactattcctggttcaaaatttcaatctaaaatttgtttagaagtttttatgttatacctaatgttgacttggtttgaatttccatgccttaatcaagaataaaccttcccacagctcctgtcaagccattaatgccaggtgaaatgaagtaaaaamaaatgtgctaccaatgaattcagttgacatgtggcccatgctttcactgtaatctctaaataagaaaacatatggtgatatattaccttgagaagcataccactggaaaataaatcaaagaaaagaatattccaaaatgtagtactttgctttcagctatcagacccacgtttactttttggatgctttcttgcttcctgtggtttattgttgggtgtttttg

SEQ ID NO: 610574 - DNA, 460 bp, Homo sapiens
actaaaaagcttctgcacagcaatagaaactatccacagagtaaacagacaacttacagaatgggagaaaatatttgcaaactatgcatctgataaagatctaatataacaaatccataaggaagaaaaaatgacaagcataaaacaaccccagttaaaaagggcaaagctaatacaggagcagaaaatcaaactccgcatcttctcacttataagtgggagctgaacaatgggaacacatggacacagggaggggaacaacacacaatggggaacaacacacaacacacactataattttctgtagggggttgaggagagggagagcatcaggaaaaatagctaatgcatgctgggcttaatacctaggtgatgggttgayaggtgcagcaaaccaccaccacacacgtttatctatgtaacaaaactgcgcttcctgcacatgtaccccagaacttaa

SEQ ID NO: 610575 - DNA, 584 bp, Homo sapiens
agagacataattttcactgcgatggtcataattttaaaaggttgcatcatccatttttagttaacatatattgtactaacatcacatatctatgtaacagaaaaatagagtcaactcatgtagggacagacatgaaaatgacaaatacatatagagatagaaaggtatcttgtgcattatactgagaaagacaatagaaataaacaatttacatgggttgatttattttgattaagatatataagtggttagataaatgttaaataggtcagtatgtaattacagaaaatgacaaattgttatgtatggtacatttgtaggcataacacagacattacattttggaaaattgtgttctatgcaacagtgccaagtctaatgaaagtaagaggaagaggaattcagccaaagtaccaacccctgttatccattccttaagaaaggaacttctttatacactcaaaagaggggattctttttaaatttgtttccagaggggcatctgcatacacatacacayacacacacacacacacacacacacatttacattatatttaaatgtgtgtgcatgatatatatat

SEQ ID NO: 610576 - DNA, 620 bp, Homo sapiens
tactgatttttaggctgtgagactacagtaataaataaataaaaaagttcatacttccttctatcgagggaaattgagcatttttctcatagtcctaartcaccagatcaagggatatatgtaatacttgagtgttgacattttattaatttttatatttaactagagctgtaaagttgaaacaaatgggtcaatgcagtagcccataaaatattttaaaaacacataaaagaaatatcactaaaatttaaacataaaaaaaatacaaaaaaaccctgagctataggaagggaagtatcctctaaatgcccaagttgaaggtagtcctcttagaaaggcacagtaagaagcagtgtttgatgggaacgtgatttttcaagtatttgaattttcaaactcaccacattaactgagtaaaatgaaaaaaatatataaacttcctctgaggcagaaaaaacatttggcattttcaagatagaattataataaaaatatctcgccccaatagaatacaaagaagcatccttaagcaaatagaaggcatctacggaaatatcacactgaagtttgaactaataaattattcatttaagatccagaagaagacaaagtgtcctctt

SEQ ID NO: 610577 - DNA, 620 bp, Homo sapiens
tactgatttttaggctgtgagactacagtaataaataaataaaaaagttcatacttccttctatcgagggaaattgagcatttttctcatagtcctaaatcaccagatcaagggatatatgtaatacttgagtgttgacattttattaatttttatatttaactagagctgtaaagttgaaacaaatgggtcaatgcartagcccataaaatattttaaaaacacataaaagaaatatcactaaaatttaaacataaaaaaaatacaaaaaaaccctgagctataggaagggaagtatcctctaaatgcccaagttgaaggtagtcctcttagaaaggcacagtaagaagcagtgtttgatgggaacgtgatttttcaagtatttgaattttcaaactcaccacattaactgagtaaaatgaaaaaaatatataaacttcctctgaggcagaaaaaacatttggcattttcaagatagaattataataaaaatatctcgccccaatagaatacaaagaagcatccttaagcaaatagaaggcatctacggaaatatcacactgaagtttgaactaataaattattcatttaagatccagaagaagacaaagtgtcctctt

SEQ ID NO: 610578 - DNA, 620 bp, Homo sapiens
tactgatttttaggctgtgagactacagtaataaataaataaaaaagttcatacttccttctatcgagggaaattgagcatttttctcatagtcctaaatcaccagatcaagggatatatgtaatacttgagtgttgacattttattaatttttatatttaactagagctgtaaagttgaaacaaatgggtcaatgcagtagcccataaaatattttaaaaacacataaaagaaatatcactaaaatttaaacataaaaaaaatacaaaaaaaccctgagctataggaagggaagtatcctctaaatgcccaagttgaaggtagtcctcttagaaaggcacagwaagaagcagtgtttgatgggaacgtgatttttcaagtatttgaattttcaaactcaccacattaactgagtaaaatgaaaaaaatatataaacttcctctgaggcagaaaaaacatttggcattttcaagatagaattataataaaaatatctcgccccaatagaatacaaagaagcatccttaagcaaatagaaggcatctacggaaatatcacactgaagtttgaactaataaattattcatttaagatccagaagaagacaaagtgtcctctt

SEQ ID NO: 610579 - DNA, 614 bp, Homo sapiens
aagctttatattatttctaacaataaatgtaaaccatctaattttctgaaaaggggtggaaataaatatttaacaaagaagatgttattcttaaattgtaatatgtacattgcctaaaaataaaaaggtagttgaagatatattgtgaacaacaaaaaatgaagagctgataatattaatgtgcgaaggaaactcataacatattgtactaattataaatcagtgtattgacaaaacctgagtcctcaattattattgactgtyattgacatgttaatgatagaatattaaatatagaatataataaagcaatttagaataaaaaagagaaagcgatagacatgaatagaaacaaaatgcaactgttcaatattaaaagcctttctaaattgcttgtgtttttctagtgacctgtttcgctatgcagtgtaggctcaggtgtctagattttagttgcagataaacacaggtagtgttttccagatctcagaatgaccagttacataaaaataggccataaaccatatatttcattcttacggttgacaaacctctaattcacctgaaaatattaaaaagaaagaagacagacgtgacagtggttggaagttgag

SEQ ID NO: 610580 - DNA, 577 bp, Homo sapiens
atttcttaacttttttatattcattctgaaatttcttgctgaaatttgttcagaaggtgagttaacggagctatacatctttagtgtcatgtgctctaaattgcaaaatacatgtatttttatttcagacaacttgagyaacatttgtgcaaatgttttatatacacggacttaatttggtaaatttaggcatgtggtagacaaatttaaaaatgtataaaaatcgtgggcaagcatatgaacattctatttttgctactataaaaaaatagcagactatccaactattttatgatactcaacgatacatcttactaaatggtcacgactcttgcctctcagggtcagagtttgcaatagtgaaagcaagagaaagccacggaaaaaaaaacagggagagggaaaatattaagctctagaatatgtacattgttttgcttgtataaatttagaacattcaacacatgtttacaatgaatacatataaaataccaatgacatgaggagaattagaatagaaataaatacaaggattctttcatgataactaaaaatatcagtgaaggtttgtacataa

SEQ ID NO: 610581 - DNA, 591 bp, Homo sapiens
catctaacataacttgttttaacattatgaagggaaaaagtttagaaatttcaaagtggaaacaatccaacactaacaaactatagtgatcaaaagtattaacttttaaagaaaaacaaggacaattcataaaagtagaactaccatttgatccagcaatcttactggttatctacccagaggaaaagaagtcattacacaaaaaagatacttgcacatgcacgtttataacagcacaattagcaattgcaaaaatgtggaaccagcctaaatgcccgtgaatcaatgagtgaataaactgtggtatatatttatgtgtgtgtgtgtgtgtgtgtgtgtgtgtgtgtgtatgtatatgtatatatatatgcatatgtatatatatatatgcatatgtrtatatatatatatgcataaatacatatatgtgatggaatactactcagccataaaaaggaatgaattaatggcattcataataacctggatgggattggagactattattctaagtgaagtatctcaggaatggaaaaccaaacattgcatgttctcactcttaagtgggagctaagctatgaagatgcaaag

SEQ ID NO: 610582 - DNA, 591 bp, Homo sapiens
catctaacataacttgttttaacattatgaagggaaaaagtttagaaatttcaaagtggaaacaatccaacactaacaaactatagtgatcaaaagtattaacttttaaagaaaaacaaggacaattcataaaagtagaactaccatttgatccagcaatcttactggttatctacccagaggaaaagaagtcattacacaaaaaagatacttgcacatgcacgtttataacagcacaattagcaattgcaaaaatgtggaaccagcctaaatgcccgtgaatcaatgagtgaataaactgtggtatatatttatgtgtgtgtgtgtgtgtgtgtgtgtgtgtgtgtgtatgtatatgtatatatatatgcatatgtatatatatatatgcatatgtatatatatatatatgcataaatacatatatgtratggaatactactcagccataaaaaggaatgaattaatggcattcataataacctggatgggattggagactattattctaagtgaagtatctcaggaatggaaaaccaaacattgcatgttctcactcttaagtgggagctaagctatgaagatgcaaag

SEQ ID NO: 610583 - DNA, 591 bp, Homo sapiens
catctaacataacttgttttaacattatgaagggaaaaagtttagaaatttcaaagtggaaacaatccaacactaacaaactatagtgatcaaaagtattaacttttaaagaaaaacaaggacaattcataaaagtagaactaccatttgatccagcaatcttactggttatctacccagaggaaaagaagtcattacacaaaaaagatacttgcacatgcacgtttataacagcacaattagcaattgcaaaaatgtggaaccagcctaaatgcccgtgaatcaatgagtgaataaactgtggtatatatttatgtgtgtgtgtgtgtgtgtgtgtgtgtgtgtgtgtatgtatatgtatatatatatgcatatgtatatatatatatgcatatgtatatatatatatatgcataaatacatatatgtgatggaatactaytcagccataaaaaggaatgaattaatggcattcataataacctggatgggattggagactattattctaagtgaagtatctcaggaatggaaaaccaaacattgcatgttctcactcttaagtgggagctaagctatgaagatgcaaag

SEQ ID NO: 610584 - DNA, 535 bp, Homo sapiens
tctcaaaaaacaaaaacaaaaacaaaccaacaaaaaatgaaataattgtaaaaaccaaccatagttctcagtaatgatagtttcatttccgtcagctattagtagagttaattaactcctatcaacctcacattttccatttaaaaaatacaggagaaaaagtttgatgtgggtttaatgagaaaayttatataaaatagatctaactactatatttatcacaaaacagatgcacaaactatgtttttttcctctcacttgttcttattttatatatcattttaattgaggaaatcattgagcataatgtaacaaatattttcataagttattataaagagggtttgaaggacttgttagaaagtgtctggcagtggaaaaaacatctgaatagaaaatgaaaatagcatgtgaatgctgaaatagcgtattaaatagctgcaactctaatataatttacatttggattttagtatagacagaatacttaaatttatttctgcagtcttttcagttgttaaacattttattgaac

SEQ ID NO: 610585 - DNA, 535 bp, Homo sapiens
tctcaaaaaacaaaaacaaaaacaaaccaacaaaaaatgaaataattgtaaaaaccaaccatagttctcagtaatgatagtttcatttccgtcagctattagtagagttaattaactcctatcaacctcacattttccatttaaaaaatacaggagaaaaagtttgatgtgggtttaatgagaaaatttatataaaatagatctaactactatatttatcacaaaacagatgcacaaactatgtttttttcctctcacttgttcttattttatatatcattttaattgaggaaatcattgagcataatgtaacaaatattttcataagttattataaagagggtttgaaggacttgttagaaagtgtctggcagtggaaaaaacatctgaatagaaaawgaaaatagcatgtgaatgctgaaatagcgtattaaatagctgcaactctaatataatttacatttggattttagtatagacagaatacttaaatttatttctgcagtcttttcagttgttaaacattttattgaac

SEQ ID NO: 610586 - DNA, 633 bp, Homo sapiens
aaatgttaatcaccaagacaatggggcaaatgtctccagggcatgttagagaccctcacagcagaccctcccatcacaggccaggaggcttagaaggaaaaatggttttgtgggtccagaaccccctgctgtgtgcagcctaggaacttggggccctgcatcccagctgctcctgccataggtaaaaggggccaaggtacacctcaggccatggcttcagagggtgcaagttccaagcctttcaggttctaggtggtgttaagcctgcagatgcaccaaagtcaagaattaacgttcatgaacctccgcctacatttcagaagatgtatgaaaatgcctggaaatccaggcaaaagtttgctgtgggggggaggggaagggggggccctcatggataacctctgctaggrcagtgtcaaagggaaatatggggttggagctcccacacagagtccccactggggtactgccaagcagagctgtgagaaaagggccaccatcctccagaccccagaatggtagatccactgacagcttgcactgtgtgcctggaaaagctgcagacactcaatgcagccagaaggggggctgtaccctgcaaagccacaggggcggggctgcccaagaccctgg

SEQ ID NO: 610587 - DNA, 567 bp, Homo sapiens
caaaataaccccaaggaacttataaaacaagtagaacacaaacagcaatatggcagaaagaaaamctcatgtattaacattaaccttgaatgtaaatgaattaaacattccacttaaaatatatagattgatagatattgggccaggtgcagttgctcacacctgtaatcccagcactttgggaggccgaggtgggtggatcacgaggtcaggagttcgaggccaggctggccaacatagtgaaaccctatctccattaaaaatacaaaaattagccaggcgtggtggccggcacctgtaatcccatctacttgggaggctgaagcaggagaatcgcttgaacctgcaagacggagtttgcagtgagccaagattgcgccactgcactccactctggatgacagagtgaaactccatctaaaagtaaaaaaaaaaaaaaaagaaaggtagattgatggaacgaactaaaaaatgatccaaaaatattatgcttacaagaaacatatagacacatacagactgaaaagtaaagacacatacagatttaaagtaaatgggtgaaaaaag

SEQ ID NO: 610588 - DNA, 567 bp, Homo sapiens
caaaataaccccaaggaacttataaaacaagtagaacacaaacagcaatatggcagaaagaaaaactcatgtattaayattaaccttgaatgtaaatgaattaaacattccacttaaaatatatagattgatagatattgggccaggtgcagttgctcacacctgtaatcccagcactttgggaggccgaggtgggtggatcacgaggtcaggagttcgaggccaggctggccaacatagtgaaaccctatctccattaaaaatacaaaaattagccaggcgtggtggccggcacctgtaatcccatctacttgggaggctgaagcaggagaatcgcttgaacctgcaagacggagtttgcagtgagccaagattgcgccactgcactccactctggatgacagagtgaaactccatctaaaagtaaaaaaaaaaaaaaaagaaaggtagattgatggaacgaactaaaaaatgatccaaaaatattatgcttacaagaaacatatagacacatacagactgaaaagtaaagacacatacagatttaaagtaaatgggtgaaaaaag

SEQ ID NO: 610589 - DNA, 567 bp, Homo sapiens
caaaataaccccaaggaacttataaaacaagtagaacacaaacagcaatatggcagaaagaaaaactcatgtattaacattaaccttgaatgtaaatgaattaaacattccacttaaaatatatagattgatagatattgggccaggtgcagttgctcacacctgtaatcccagcactttgggaggccgaggtgggtggaycacgaggtcaggagttcgaggccaggctggccaacatagtgaaaccctatctccattaaaaatacaaaaattagccaggcgtggtggccggcacctgtaatcccatctacttgggaggctgaagcaggagaatcgcttgaacctgcaagacggagtttgcagtgagccaagattgcgccactgcactccactctggatgacagagtgaaactccatctaaaagtaaaaaaaaaaaaaaaagaaaggtagattgatggaacgaactaaaaaatgatccaaaaatattatgcttacaagaaacatatagacacatacagactgaaaagtaaagacacatacagatttaaagtaaatgggtgaaaaaag

SEQ ID NO: 610590 - DNA, 567 bp, Homo sapiens
caaaataaccccaaggaacttataaaacaagtagaacacaaacagcaatatggcagaaagaaaaactcatgtattaacattaaccttgaatgtaaatgaattaaacattccacttaaaatatatagattgatagatattgggccaggtgcagttgctcacacctgtaatcccagcactttgggaggccgaggtgggtggatcacgaggtcaggagttcgaggccaggctggccaacatagtgaaaccctatctccattaaaaatacaaaaattagccaggcgtggtggccggcacctgtaatcccatctacttgggaggctgaagcaggagaatcgcttgaacctgcaagacggagtttgcagtgagccaagattgcgccactgcactccamtctggatgacagagtgaaactccatctaaaagtaaaaaaaaaaaaaaaagaaaggtagattgatggaacgaactaaaaaatgatccaaaaatattatgcttacaagaaacatatagacacatacagactgaaaagtaaagacacatacagatttaaagtaaatgggtgaaaaaag

SEQ ID NO: 610591 - DNA, 536 bp, Homo sapiens
taatccaattaacaaatttaagatgtcatctaagcaggaatgaatgcaataaataggccttcttacttcaaaatcaactgcagaggtaatgcattgccactagacttgtgtgctgtgttggtaataaattaacaaaaactttggggataagaaaaatctgcaaataaaatggtgtgtcatttgtgaaatataatcacaaaaatgttcagattgttataattaacagaaaaactattgyttttattatatccagtgtttaacagacactattcatgtatacatacaacattcttataataactcttgtgtccatgtaaatagcagtcttgccaaaaagaattgattatcatgtagtagtttgtaagtattttcatgcataggctgcaaccctttagagtgctattctaataaattattaatattaacttgatgaacacaattctaagacatttcatttgaggatatgtttattaactattaggttggtacaaaaggcattgcgttttttgccattactttcaataaaaaatagaacc

SEQ ID NO: 610592 - DNA, 521 bp, Homo sapiens
ccttcagaggacgctgtaacaaggcaccatcttggaagcaaagagtagccctcaccagacaccaaatttgctggtgttctgatcttggacttcccagcttccagaaatstgagaaataaatttgtattatttataaattatccagtctatggtattttgttatgacagcacgaatgaactaagatagatggttgtttgtttgcctttttgttgggttgtttttgtctgagtggctagaaaaatggagttgggtgtggcaagatacatagatgaggatgattatacaggagcaagtttggaatgaggggatgaggacaaacaggaagttggctttgtgcatattcaggcagaaatgtctatagccatccttggaaatattaataagacagttggataaacaagaggagagatatgggtggaaatttaaaagtggattactattgattaaattatattgtgcagaataaggctcaaatgagagatggaaagttgcaagaaggcaatcttaaatgtaggtaaac

SEQ ID NO: 610593 - DNA, 521 bp, Homo sapiens
ccttcagaggacgctgtaacaaggcaccatcttggaagcaaagagtagccctcaccagacaccaaatttgctggtgttctgatcttggacttcccagcttccagaaatctgagaaataaatttgtattatttataaattatccagtctatggtattttgttatgacagcacgaatgaactaagatagatggttgtttgtttgcctttttgttgggttgtttttgtctgagtggctagaaaaatggagttgggtgtggcaagatacataratgaggatgattatacaggagcaagtttggaatgaggggatgaggacaaacaggaagttggctttgtgcatattcaggcagaaatgtctatagccatccttggaaatattaataagacagttggataaacaagaggagagatatgggtggaaatttaaaagtggattactattgattaaattatattgtgcagaataaggctcaaatgagagatggaaagttgcaagaaggcaatcttaaatgtaggtaaac

SEQ ID NO: 610594 - DNA, 521 bp, Homo sapiens
ccttcagaggacgctgtaacaaggcaccatcttggaagcaaagagtagccctcaccagacaccaaatttgctggtgttctgatcttggacttcccagcttccagaaatctgagaaataaatttgtattatttataaattatccagtctatggtattttgttatgacagcacgaatgaactaagatagatggttgtttgtttgcctttttgttgggttgtttttgtctgagtggctagaaaaatggagttgggtgtggcaagatacatagatgaggatgattatacaggwgcaagtttggaatgaggggatgaggacaaacaggaagttggctttgtgcatattcaggcagaaatgtctatagccatccttggaaatattaataagacagttggataaacaagaggagagatatgggtggaaatttaaaagtggattactattgattaaattatattgtgcagaataaggctcaaatgagagatggaaagttgcaagaaggcaatcttaaatgtaggtaaac

SEQ ID NO: 610595 - DNA, 489 bp, Homo sapiens
atcctattatcatacatatataaagttgccaaaattttttccttatcacttcattttagttaccaccaacaattcagttacctaagtataaaatttcatggaggtcatgcttaagaaaactgaagatacatacatatttaagaactgtgaatgyagtagtaaggaaattaggctgtgtttctttaaaaagggaggaaggcagtttctataactcctcagaaaaacactcagttatgaaatacagtcttttaataagtaatccaattctaaacatacacctggaaaaaatgtatctacaaaaatgtttctaagataaggcacaactgaatgttaataaatcaaattattttatctatttacaagaaaacaataaatctttataataataagtctaaacagctctgagaacataaaacaacaagtataaagcaccagtttattttccatagcactaatatgatagtcaaaaggattgagttttgcataaaa

SEQ ID NO: 610596 - DNA, 517 bp, Homo sapiens
acaattgtaaagatcaatagaaaacaccaagctctaaagacatttcctacagcataatttgaagaagtagaatacatgaagcagtgagccatagaaaatcaggtcttagmactaattagaaaatttctaagctttctctcttaagaaaatcagttcattggttaaggggccaatttgaaacatggttggtttacagattttcatctggactgaaaaaaattacagccagatatttaaaccaacattctaaataaaattgtgaaactgattaattacttactgttaataaaattgtaatgaaaaatcgattattcactagtagttaaaagctgttttccatatgtcagaataaagaaaacctataaagcagaaaaaaataaaacacccactagagtttcttgtttaatcagaaaagggggaaagaagcttaatactgtgtccccagaaacataacttcctcccttaagccctcattttataacatttactttcaacaatgtaataaacgtttacctca

SEQ ID NO: 610597 - DNA, 531 bp, Homo sapiens
ggcatatgagaaacattgtaccttctttctaacctttttatgggctagtctattccatggtctctgagtatgttaacccaaacaaataaaggaagaccccaactttccagggtgtgagcataagaggctgaaaaataattggtaattaagccttaaaatcaaaggcatactccatttatcctgttatcttattacaatgtgtttcaattcaacctatcacacaaaaggacaagaattcacttctagtgaagccttaacttgtgaatgctgggccttgttttattatgtatttcattaraagtttttgtgatgttgttttcctttcaattccatgaagaaaaagtaaaaaatgaggaatgtgaacttctcagatgatcctgtgactttgaagccacgtatctaaatatatgatctcttgcttttgcatttagaagccctggggagctacattatctgactgattatgaatgcatatattttcataagaatatgcaatcttaaccagctcagcacaggacactgaagtgacta

SEQ ID NO: 610598 - DNA, 543 bp, Homo sapiens
ggcagatgtggaaaaggaaagcaggacgaccatcccttgagccagtgaagcaaagaacagtagggggcttggtgcaagggatgggatataaggaaatggcctgagacttcagagaatagctgcaggtttacttatactagaaagttcttccacacccccaaccctactgttatygcagccgccactaaaccgacctcaccccaaaccctagaccctgccagtagtttgcctgccagtggtgtctccaccacctatggtttgtcgttagggcattccttgtttcctctgcctaacaggaaggagaagaggaataatcagtccttccaggatgcataaaggggaaccatgcagtacactcaggggttcaatcactgaaagtcatttcctggcacaacatcattccacagtgacacaagttccactgcctttgagggctaagccaagaacctccacatacacatttttctatgggaggatgtttgagttacctaaatttgaacacgtttctcctttgaaatataagttccttgaaggcaaagctca

SEQ ID NO: 610599 - DNA, 572 bp, Homo sapiens
tttgtgtagatccaaggagcaacaaattccaactttctgctgtagcaattacacgctttttgtctgtttgactagattttagtattttactttttttcttctttttaaaggcaacggacagccaagacgtagatccatccaagacttgactgtaactggaacagaacctggtcaggtaagacaacattcaaattttctatctttgaagaatactaggcagaaaacaagaattaactgtattctactctgcaaaattagttttatgagttgacctaaagttgtgatagagaaattcattgcacctgaacttaaatacttaggggggaaaaaaacataggtgccattgttaatttaacttgaaagataatttattaaagtaggtttattaaactccatggaaaagtaaattgttcattagcgctgtatatatgttatatggttttatgtatgttttaataagtattcaattttataatttaacaatttatcattaaagtgtcctttaaagtgaatcattartatgtctcctttttactaataagggtagtaaacatttccccaataagttgcta

SEQ ID NO: 610600 - DNA, 560 bp, Homo sapiens
aattacaagtgggacaaacaagcatgcacagaaggtgctaagagtttcttggaaagtagaaggtgaaaagaarggtgtagcaaagaatcattttgcaaaagatttaagcttaaggagtactataaaattcctattaggtccaacttatttgttttaatattgcagatgttcagtgacctcttttttaaatatactaaatccattctcattttaaaaacctaattattacttctactgtattttgttgatttctcacaactgatactgattcttacatgtcacaaacatgtgtttctctttttaaaatgtgcattagcattacactgactctgaaaccctggtctgccaccactttgaaggaaaaatgcctttgatttataatagcagttataactatgggcatatttgtgtacttgctttcagtcaaagaaagttaaaaagactcaggaataatttcataatgtctatacttgctttgtcaagggtaaaagtatcctaaaagtaagagtgaaacatttcatcactggttttctttggtgtatgtcgttgttattcttata

SEQ ID NO: 610601 - DNA, 551 bp, Homo sapiens
aattcttcattctcctggtcagtttaaatatctctccaatcttcatgttactaagttttaggatacttttttcccctggattttccaagggtaaactttagttctttccaaatacctatttaattcatttgaatagtttgcttgttgaaagttaataaggtgttattatggcactaatgattactttcagaaataactgatattttaatcaaaaaatatgtaaaaatagagagaatagacagagttttattttctgagcttccgagctaagctttatcatcatgatatacttcagcatcggtttttcatggcagaaacttaatcagataagaacatgagtcagcaaaaaaattatcttcatggaaatagtgctcttcactacaaaagtgcattcactgaatgttttatrtcatagactaatatgtcacatcgatgttcttagatgatctttctcagaagaaactgcagaagcaatttggtttcatttatgggaataaataagggtatttcatttcacacagcctcaggaaatcacaaattaaaactttcca

SEQ ID NO: 610602 - DNA, 637 bp, Homo sapiens
gtcaatcttattgaggacccatttattgaatagtggtaccatggggagctgatataaagaaaataatttctgtctctaaagtatagaggcaggaacatataccagaaaacaaaacaaaacaaaagctaaacaacttaatcaaaatcaatgtaaacaagggcaaattgtagtgggattacttacattaattctcagtgattatagttgaaaagtactttcacaagatattttatcctatgacgatttgtttaaatattatgaattttttgcaaaatgattaaatacaatgatgaaattgaaaataaaaaktatagtatttaaaaaagctaaggtctgacaagatggctgaataggaacagctccagtctgcagctcccagtgaaatcaatgcagaaggcaggtgatttctgcatttgcaactgaagtacccagctcatctcattgggactggttagacagtgggtgcagcccacggagggcgagccatagcacagtgggatgtcacctcatctgggaagcacaaggggatgggaactccctcctctagccgagggaagccaagagggactgtgcagtgaggaatggtacattccggcccagatactatgcttttccccttgtctttgcaacctgcaga

SEQ ID NO: 610603 - DNA, 528 bp, Homo sapiens
atttgtttaaatattatgaattttttgcaaaatgattaaatacaatgatgaaattgaaaataaaaattatagtatttaaaaaagctaaggtctgacaagatggctgaataggaacagctccagtctgcagctcccagtgaaatcaatgcagaaggcaggtgatttctgcatttgcaactgaagtacccagctcatctcattgggactggttagacagtgggtgcagcccacggagggcgagccatakcacagtgggatgtcacctcatctgggaagcacaaggggatgggaactccctcctctagccgagggaagccaagagggactgtgcagtgaggaatggtacattccggcccagatactatgcttttccccttgtctttgcaacctgcagaccaggagattccctcaggtgcctacaccaccagggccctgggtttccagcacaaaactgggcagctgtttgggcagacactgagctagctacaggagttttttcataccccagtggcacctggaatgccagtg

SEQ ID NO: 610604 - DNA, 485 bp, Homo sapiens
gggatgggaactccctcctctagccgagggaagccaagagggactgtgcagtgaggaatggtacattccggcccagatactatgcttttccccttgtctttgcaacctgcagaccaggagattccctcaggtgcctacaccaccagggccctgggtttccagcacaaaactgggcagctgtttgggcagacactgagctagctrcaggagttttttcataccccagtggcacctggaatgccagtgagacagaactgttcacttccctggaaagggggctgaagccagggagccaagcggtctagctcattggatcccaccccaatggagcccagcaagctaagatctactggcttgaaattcttgctgccagcacagcagtctgaagtctgggatgcttgagcttggttgtgggaggagcatccgccattactgaggcttgagtaggcgattttctcctcacagtataaacaaagctgccagga

SEQ ID NO: 610605 - DNA, 565 bp, Homo sapiens
tcacttccctggaaagggggctgaagccagggagccaagcggtctagctcattggatcccaccccaatggagcccagcaagctaagatctactggcttgaaattcttgctgccagcacagcagtctgaagtctgggatgcttgagcttggttgtgggaggagcatccgccattactgaggcttgagtaggcgattttctcctcacagtataaacaaagctgccaggaattcagactgggtggagcccaccacagcttggcaaagccactgtagccagactgcccctctagattcctcctctctgggtagggcrtttctgaaagaaaggcaacagccccagtgaggggcttatagataaaactcccatctccctgagacagagcacctcggtgaaggggtggctgtgagtgcagcttcagcgacttaaacatttctgcttgccagctctgaagatagcagtgtatctcccagcacagcactcgagctctgctaaaggacagactgccttctgaagtggatccctgactaccaggcctcctgactaggagacacctcccagcagggg

SEQ ID NO: 610606 - DNA, 559 bp, Homo sapiens
ccaccacagcttggcaaagccactgtagccagactgcccctctagattcctcctctctgggtagggcatttctgaaagaaaggcaacagccccagtgaggggcttatagataaaactcccatctccctgagacagagcacctcggtgaaggggtggctgtgagtgcagcttcagcgacttaaacatttctgcttgccagctctgaagatagcagtgtatctcccagcacagcactcgagctctgctaaaggacagactgccttctgaagtggatccctgactaccaggcctcctgactaggagacacctcccagcagggrtcaacagacacttcatacaggagagctccggctgcatctggtgggtgcccctctgggacgaagcttccagaggacggaacaggcaacaatctttgctgttctgcagcctctgctggtgatagccaggcaaacagggtctggaatggacctccaacaaacgccagcagaccggcagcaaaggggtctgactgttaaaaggaaaagtaacaaacagaaaggaatagcatcaacatcaacaa

SEQ ID NO: 610607 - DNA, 633 bp, Homo sapiens
tagacacttgtcctctccaggacagtaagataatttcaaggtgagctttgaaggaaaggtaggcatctttcagagaaacaaagggaaaaaggcagtctatgacatgttcaaaggtawggatggagcaaagcagcccacaaatagcccataaagacccatgtataaagatgcatggccaagaggcaatttatgaagctgggaagatagccagggaccagatgaggaagcactttttatgctgtgctaaggagtatgatttttaccctacagctgatgaaggcagggtgtcaaaatatttaagcagaggagagacaaaagcagacctgtgttttagaaagaaaactctaacagcagggtgatggatggacaggacacaccactcaagaagctatttcagtaattcagacaaaaggtggtgcagactcaaaataagaccatggcaaagaggaatagggaagaggaaggtttcaaaaatattaagaaagtggaatctaaatggaatagggtcagttcagaaaagcaaagattcataagctttgatatggagaagagaagaaagtttaaaccaaacccaaggcaggtggtaaggggtgtaccagaaatgggaaaaaagaacacactgaaagaaatgat

SEQ ID NO: 610608 - DNA, 471 bp, Homo sapiens
agggcttaccccaatggcctcattttaatgtaatcacctctttataggccatatgtctaataatagtcacattctgaggttctgagggttgagacttcaacatataaattatagagggatataactcagcctgtaatggacaccaatataatgcatcagctaaagaaattgaacatttgcagcccctctgtgggtttctcccaaatcacatcccttccttcctcaagggcaaccactcttctgatttttgtctggcatttcttgatagttttaccaactatgtttgtatacattcaaaatcgtactttttaatttcctaacagaaccatttaaagcaaataaaattccttctaagcagtgtttgggctgcatctcttccagattttgatatatttgggtatatatcatcatcaytgcaaaacctattctaatcgtacttctgatttcttctttgacctatgagttatttag

SEQ ID NO: 610609 - DNA, 564 bp, Homo sapiens
tagatcttcagcgaccaccatattggacagaatggctctaggaggctaaattagtagagaacaaaaaaaaaacacaaaaaaaatcaccacttggatcctgcttcacaaccattttaaaatctggaatggaagaataattttgaaactggaattacaattaaattataacagaccaaacatgcaatgggctctcaacatcaccragacagtagcagggggcagtaatctaaagatgtctgtgttttaaagcaatgtgtcatttgattttccacatactggaatattttgcatataattaggctctttttaaaaaggcaacacattattgaaagaaaaaaaaaacatgggaatcaggctgttccatgagtattttaggaaggaaaagtacacttgaaaaaatattcatttcactctattggtattgttttcccctaattttaagaatgagaagatgatagaaaaggactttgtctaacactttacaatttgcattcttgtaccttgatagacataacagtgagttgattttgtcaggtgtaaacagtgttttcacacttcttatag

SEQ ID NO: 610610 - DNA, 595 bp, Homo sapiens
attggacagaatggctctaggaggctaaattagtagagaacaaaaaaaaaacacaaaaaaaatcaccacttggatcctgcttcacaaccattttaaaatctggaatggaagaataattttgaaactggaattacaattaaattataacagaccaaacatgcaatgggctctcaacatcaccaagacagtagcagggggcagtaatctaaagatgtctgtgttttaaagcaatgtgtcatttgattttccacatactggaatattttgcatataattaggctctttttaaaaaggcaacacattattgaaagaaaaaaaaaacatgggaatcaggctgttccatgagtattttaggaaggaaaagtacacttgaaaaaatattcatttcactctattggtattgttttcccctaattttaagaatgagaagatgatagaaaaggactttgtctarcactttacaatttgcattcttgtaccttgatagacataacagtgagttgattttgtcaggtgtaaacagtgttttcacacttcttatagaagtgtgccttcattattattcaacatttaattaagtcataacaccagaaaa

SEQ ID NO: 610611 - DNA, 497 bp, Homo sapiens
aggacataattgctgaaaaatgaaccaaaatactaactcacgccattattaatgagaaaacaaaaagctgctcaagagatttttttccccctttctgtcttatggctctggcaggtcaatcattctttgtgtgatcatcactgaaaaaagaatctgatttgtctggaagcataagcaaaccttaacattaactctaccaagagaaagaaaggcagagttagacagttctctcactgtctaactctgtaatcttgagcgaatcattccttataagataataataaaaaaaaaaactagtccctcactgatgactagttttcttatttatacaggttgagtaccccttatctgaaatgctkgggaacagaagtgttccagatttgggatatttttagatttcagaatatttgcattaccggttaagcatccctaatgtaaaaatccaaaatccgaaatgctccaacgatcatttcctttgaactttaggtcagcattta

SEQ ID NO: 610612 - DNA, 550 bp, Homo sapiens
cattttggccccatttgatactatctcactgatctgggtccaacttacatttgtttctctctttctttccctcccctatttcctcgttgttccagaagcatataaaaaccatagaaaagaagctggatagaatttccaagaatacactgaaaacactgtcaaataagagaatggctatctagtccaagcataacttcatttcaattaagaaaaatctaaaatgctaaaasaaatctttctggcatcaggaaaaaaaaaagaaacaacattatctaaatgttgattataaaaaccaataggtttgtggggagaaattcttaaaagaactaattaaatatgccttttaatctgtacttacgcatagggcactataatttagtatgagtcagccttcaagccggatgtactttttaattcaaacttatatttaaagtctttaattatgtttaattccacttccagcttttgttacccggcactgatccctatctgttcaaccctgatgtaaatgaatctcagatttttgatacttacagtgaaacacatcatt

SEQ ID NO: 610613 - DNA, 550 bp, Homo sapiens
cattttggccccatttgatactatctcactgatctgggtccaacttacatttgtttctctctttctttccctcccctatttcctcgttgttccagaagcatataaaaaccatagaaaagaagctggatagaatttccaagaatacactgaaaacactgtcaaataagagaatggctatctagtccaagcataacttcatttcaattaagaaaaatctaaaatgctaaaacaaatctttctggcatcaggaaaaaaaaaagaaacaacattatctaaatgttgattataaaaaccaataggtttgtggggagaaattcttaaaagaactaattaaatatgccttttaatctgtacttacgcatagggcactataatttagtatgagtcagccttcaagccggatgtactttttaattcaaacttatatttaaagtctttaattatgtttaattccacttccagcttttgttmcccggcactgatccctatctgttcaaccctgatgtaaatgaatctcagatttttgatacttacagtgaaacacatcatt

SEQ ID NO: 610614 - DNA, 579 bp, Homo sapiens
accaatatatcaggtcctaatctctgggacctgtaaatgttaccttctatgcaaagactttgcagatgtgatgaaattaaagatcttgagatggggggattattttgaattatctagttgggccttaaatgtcattacatgtatgcttmtaagagggaagcagaggcagatttgactacagatggaagacaggaaggcaatgtggccgtggagggggcagatattggagtgatgaggccacaagccaagggatgtcagcagtttccagaagctggaagagagaaggaacagattctcccccagagcctctggcaggagctcagccctgtcaaaacctaaatgtctgttgttttaaggtgccaagtttgtggtaatttgctacagcagccagaggaaattaatacacacagtgaacaaagagtcacccccagctgttcttagatgccaccatcaccagtcttgataagaatcattcagaccaagggcagtgactcacgcctataatcccagcactttgggaggccaaggtgggagggtagcttgaggccaggagtttgagaccaccttgggcagcaaagc

SEQ ID NO: 610615 - DNA, 579 bp, Homo sapiens
accaatatatcaggtcctaatctctgggacctgtaaatgttaccttctatgcaaagactttgcagatgtgatgaaattaaagatcttgagatggggggattattttgaattatctagttgggccttaaatgtcattacatgtatgcttctaagagggaagcagaggcagatttgactacagatggaagacaggaaggcaatgtggccgtggagggggcagatattggagtgatgaggccacaagccaagggatgtcagcagtttccagaagctggaagagagaaggaacagattctcccccagagcctctggcaggagctcagccctgtcaaaacctaaatgtctgttgttttaaggtgccaagtttgtggtaatttgctacagcagccagaggaaattaatacacacagtgaacaaagrgtcacccccagctgttcttagatgccaccatcaccagtcttgataagaatcattcagaccaagggcagtgactcacgcctataatcccagcactttgggaggccaaggtgggagggtagcttgaggccaggagtttgagaccaccttgggcagcaaagc

SEQ ID NO: 610616 - DNA, 595 bp, Homo sapiens
caggtttatctggggaagaaaatgtatgttaatcagatgtgaaaatgactcatttttgcttacagctatagattctatatccccttttaccaaagagcttaggtgtagagtggtgccctactggagaatgcaggcagctccccgctcttgcctgcgatttttcacggctggtactagctgaaacatggaaatggcttagagggagcagcgtgtgacattctggattagatagttggtacgcatgacaatgtgggaaggcagcacagtgtaattcaatgatgcaaaggatgatgatataatccccatccttaagcaattgtgtgtgttaagataaataaggttcttggcccaataacaaagaccatggcaatgcagaggtgaccagaaaacagcacctttatcctagtcagctgttrcatttaaaaacaaatatattcacagtgaggaaataaaagacctaggaaaatatgtaaataaacaagtaaacatatgcgcaaatagaagccttattttttatgacctattattggaaacacattttggttgtctccaattaaactttgaaactcatgagaagtcctgaccacatactgct

SEQ ID NO: 610617 - DNA, 555 bp, Homo sapiens
ttacttaaggagaaaccaaggcacagagagacaaagtcacccaaggttgcagccttagtgtacagtggagccaggaccagaatccaagcagcctgattccagtgtctcacactcarttcccctcctagctatactgtttctcaggcccgtgctccaacatgccacctgttaaaaaaaaaaaagtaaacaattgttcaaagatagtaaacactgtcaatgacataagtgtttctgattatttcaaaaatctccaagaggaccagacacaaacaagtccaaagagagtagcaacatgtatatacacagaaaactttctgagaatagtttaaataaaaaagattccacttggctatgaagaaacctttcaccattttagggtgaccaaaagaaaaatgaaatgagctgtattaaaaaaaagttggaagcatctgctcctgaacaacttttctttttaagcgattctcctgaaagactcatgtttatctatcttagaatttgaaccaaatacagatttgcttttattatgatcacttcaggattttgtacttactatcc

SEQ ID NO: 610618 - DNA, 449 bp, Homo sapiens
tatcctgttaaatcagtttagaaataacatttatagcatgtgaaagcatatgcttgctctcagtgttactaagtttggtgttgttcttgactttggccaaggtaaggacaggttggggctaagtatatggatggtggatggaaagaaattataatttttacaaaaaatagagcatgtacacacacattctccttgtctttttttcatttgtgtactcaccctcagtctattttttgaatctccctacaaattcaagtggcaaaatgaaaaggttgtacaagtattggaaggtaaaatattgtcatagagacatttagcgagcagtggctctgctctgtcagcakttccaggcagtcatagaggtacatgtgtgaattcccattctcatgaccccaaggccattctaatccccccattctaatcccctggctcctcacctccttcccctt

SEQ ID NO: 610619 - DNA, 598 bp, Homo sapiens
ttgtacaagtctcttaactccttgattaattcctaagtatttcattgtttttgatgctattataaatggaaccatttttgtaatttcyttttcagattgttcattgttagtatatataaatgcaacttacttttatatgttggctttgtatcctgctactttattgaatttattatctctaacaattttttgagtgcgggatcgggggatctttcggagataagatcagatcatttgcaaacagaaatagttttatttttcctttccaatttggatggcctttatttcgttttcttgcctaattgctctggctagagcttcttgtaccatgttgaatagaagtggtgaaagcaggcatccttgccttatttctgatcttagagtaaatgcttttagtctttcaccattatgatgttggctatgggttttttcatatatggattttattatattgaggtagatttctttctagtatgttgagtattttcaacatgaaagggtattgaattttgtcaagtcctttttctgaatcaaccacattgagatgatcatgtggttttagtctttcattctgttaacattatatattatatcaatt

SEQ ID NO: 610620 - DNA, 598 bp, Homo sapiens
ttgtacaagtctcttaactccttgattaattcctaagtatttcattgtttttgatgctattataaatggaaccatttttgtaatttccttttcagattgttcattgttagtatatataaatgcaacttacttttatatgttggctttgtatcctgctactttattgaatttattatctctaacaattttttgagtgcgggatcgggggatctttcggagataagatcagatcatttgcaaacagaaatagttttatttttcctttccaatttggatggcctttatttcgttttcttgcctaattkctctggctagagcttcttgtaccatgttgaatagaagtggtgaaagcaggcatccttgccttatttctgatcttagagtaaatgcttttagtctttcaccattatgatgttggctatgggttttttcatatatggattttattatattgaggtagatttctttctagtatgttgagtattttcaacatgaaagggtattgaattttgtcaagtcctttttctgaatcaaccacattgagatgatcatgtggttttagtctttcattctgttaacattatatattatatcaatt

SEQ ID NO: 610621 - DNA, 523 bp, Homo sapiens
gtggcttcaggaaagttccttagcctcaaagaacctcagattcctacttgcaaattggtgtaacagcacagcccaagattatcacatgcatccaatgagatagtgtttgaaaaattctttgagaaaaaaaaaattttttttttttttgagacacagtctcactctgtcgcccargctacagtgcagtaaagatcttggctcagtgcaacctcagcctcccgggttcaagcgattctcctgcctcagcctcccaagtagctgggactacaggtgtgcaccaccatgtctggctaatttttgtatttttagtagagatgggggtttcatcatgttgaccacaatggtctcgaactcctgacctcaggtgatccgcccacctcaggattacaggcatgagccactgcatcctgccactctttgagaaaattttaataagtctctacatagcagctcttcccagtgggaggctaaacaggagggagaagagagaagctggcatggctgccacaggggcagcagcagt

SEQ ID NO: 610622 - DNA, 540 bp, Homo sapiens
ttctctttctcttggtgttccttcttcatccctctccccactctctttctctctcttgcctgcccacctgcccgcccccctcccttcctccctccctctccttccccctccttcttccttccttgcttccttccttcctccctccctccctccctccctccctcatggaatacccagaacaatactgtctaatagacatataatataagccacatgtgtagccatgctaaaaaaaaaaaaaatgaagagaattaggtgaaattgattttaataacacactttatttaacctaatatatccaaaatattatttcaatatttaattaatataaaaattaatgagctatttaactgtatttttcatagtaagtctgtgaaatccactgttttaaacttgagatacatctcagtttggactgatmacatttcaaggactcaagagccacatgtgtctagtgaccactgtattagacagtgcagacctagtgtatttggtaccaagcacgtaaagtccagaaaagggcagccctccactttgctt

SEQ ID NO: 610623 - DNA, 572 bp, Homo sapiens
agggccattattaatgtttccatggttttagcagtttaaaagttgggagtttaaataatgttgttagttgtggggaaaacagcccacagacattcagacatagttgaagtttagtctttcagtcttcattttaatctgaaggtrgggagccgagccttctgaatcacacagcaaagggattgcttcgtaattttaacagtctgaattattgcatgctcataatggcataagatttgcatagctccaccactctcatcaaatcccaattatctgaagattgtttctcttgggaggcaaaagaatattataatttttgggtttcttttaatcttccaaaatgatttatattcatccccttaaaacctgggtgtaaccaaaggcactagggcccaaagaacaggtgttgtctttccagaacatccataaaatgatccctgtatacattctctttgcacctcttgtgtaggggttaacgtggaaggcttcattatttgactggaaagtaggtttgactttcccactggagatttggtactcttagctccagaaccaagaaagagaagactattaga

SEQ ID NO: 610624 - DNA, 544 bp, Homo sapiens
tctggaatctattatacccatttccaatctcacctagaaatccagaaaaaaagtcactttcagacacattacaggattcaaactttgctttcttacgagaaggttagaactatatgcacactttgccatttgctctgctcttccatttacaaggtttttttttggtttttttttttttttttggttttttttttcctcacacacttctacagttgacaacaaagcrttcttacacacaacactgcccaccctctcatctttctatatccatttttaagtgcctggaaaacacaagaaggggaaacaaagggcaaatgccagtctgtgacctctgtctggacttagccaagcgtgatgtgtgaatcaggtgtgcggaatggaagtttccatggcaacgagactgccaggcaggcagggacttcacacaggctttctaccaaggtaatagaaacaatgaggccacctgagggacctcagcaaagagggaggcggcaaagttcagagatctccagcgacggcaaggacctgggtctgcactgactta

SEQ ID NO: 610625 - DNA, 356 bp, Homo sapiens
tgagttcttactggaataaacgatcttcagcacttctctgtgaaatgaagggcttgttctgggacctgaaatgcttcaaaccctgtgcagttgttgccagagtggctgtctgagcctggataatagagcctggagtcctatgtaaccatgtctgttggaataaataagaacagctggtcgcttgtacagatactgttggcatgaattttttatttaagtctctccatgtatctagtaaacagtaagcagtattctaacattactaaaagcctcctaagtctcccaccaataaatttccttcactcttccscattaaaagttcagggagtagggcaaggttaatataccagagaagg

SEQ ID NO: 610626 - DNA, 602 bp, Homo sapiens
aaaatgcctgttctggtggagtttagttggaggaaaaagagtaaacagagaagtgaattttatggtaggccagttactgatcagtgctacagagaaatacaaagcagcaaaggggaggaggcagctattttgtatacagcaatcactgatacttgcacaaggacctgaaggaggtgaaggaggggacctgggagccataaggagaaagactttgaagtacgtgcttgtttggcatattctaggaccagcaaggagaccccctggggcagggcaggaagcgccagaagctgattgctatgaggtctgactgtttttccttgttcactctaagctgggaagacagtcacgaagtttgagcagagcaaagacgtgatccgacttaaaagaaccactcttactttagtgttaaccatggaccaggcatcagaaacctttttatgtaaaggtccagatagtaaatattttaggctttacaggctatatgatctctttcacaactactcaactctgctattttagtacagaagcarccatagacaatatggaagtgaaaggctacggctgtgttccaataaaactttattttttataaaacaggtgtc

SEQ ID NO: 610627 - DNA, 538 bp, Homo sapiens
atacagtataatggtattttaatgaatgaggaaaaatagatgaagtgtttatctgtaagtctactttaatcaaaagccyttaattcacaatcatattttcagtgaagacctcacaccctttacaaattcagatttcaaaatcacatcctcactctttttaactcaatgagatgcaggaagtagctgaagaagaatgaatttctgctgtggtaatgctgctgccgcaatgccacttgatattttatgtaaggaaaataaataaataaatattctcctaatcctccagagatcaaaattctgacaaaggctgggcaagaaacgatacttggactgaaatacgctcttctaaaagggtgtgtgtgtgtagttgcatgtgtgcatgggcacatggcagtacaggtctctctgatctttgttacagctgcataagtgagtccactgttctttcactaaaaaagaaagagacgggcaaggtatggagaggtggaagagaagcctagctttacaagtgccccagtatttcagaagttttgatcat

SEQ ID NO: 610628 - DNA, 515 bp, Homo sapiens
tccagccagagactgcctctatttattacaatctgcattcaaggcacaagggctgcagacaagccttagggaaactgaaaggtttgtgatttttgcactagcagctgtatacatatatgtctaacacaaacacaacacccccccacccaygtctaaaacttatattgttcctaccagagggaaaaatgatctactttccagaaccttccatttcctagaagttggcagagtttctgtatcaggctgcggcttctttaggacagcctgtatatttctggggagctaaaggatggagtctcttttgaaaattagtaagaacaaattaggcccagtggcccaggggagctgtgttgtaaaacatgagaaaactttgttttccaactctttggcagtattttcataaactgatgacaatgaaaggacagagattatttttgtacattgatattattctaaaatatcatggagaaaggtgtgaatgttatcagttaaatgatttagttgggtaaatagtg

SEQ ID NO: 610629 - DNA, 579 bp, Homo sapiens
actacactgtaggaatgtgacttagtacagccactatggaaaacagggtgaaggtttctcaaaaaactaaaaatagagctactgtatgatccagcaatcctattgcgtggtacagtgtcaaaagaaaggaaatcagtatactgaagagatatctgtactcacatgtttcttgcagcacaattcacaatagctaagatatagaaccttcttaagtgtccatcagcagatgaatggataagcaaatgtgatatatatacacaatggaatattattcagccataaaaaattctatcatttgcagcaacacagatggaactgggggacattctgttacgtgaaataagtcaagaacagaaagataaattatcacatgttctcatttagatgtgggagctaaaaatgttgatctcatgaaggtagagagtagaataatggttaccagaggttgagaagggtagggggaagrgagaatgaagagaggttggttaatgggtgcaaaaatacagtttgatagaaggaataagttttagtgtttgatagcacagtagggtgacagtagttaacaataatttattatat

SEQ ID NO: 610630 - DNA, 644 bp, Homo sapiens
attaaaaatttcttataaacatatagtttgtgtgtctcacagagttctttaacccaaatacatgccagtggccttgtagagttgagtagtgtttataagaaggcttgtcactgggcagctttatgtcaatatccagaaaacttgggccatactatcaaaccttcaccaccaatgttttttactttgatttattgtgaaagccttttctttctttcttttttttttctttttttgagatgargttttgctgtcacccagcttggagtgcagcggcgcaatcttggcccactgcaatctcgcctctggggttcaagtggttctgcttcagcctcctgagtggctgggattataggtgtgcgccaccatgcctggctaattttcatatttttattagagatggggttttgccatgttggccagactggtcttgaactcctgacctcgggcgatcttcctgccttggcctcctaaagtgctgggattacaggcatgagccaccacgcccagcctgatttactgtgaaagccttttgatgtaatttcccttgaaagttggagaaattatcacatagattttttaaaaagaggaaagtttcaaaggacatgacaaaataatcaatgaactgaattataatttgtattttg

SEQ ID NO: 610631 - DNA, 644 bp, Homo sapiens
attaaaaatttcttataaacatatagtttgtgtgtctcacagagttctttaacccaaatacatgccagtggccttgtagagttgagtagtgtttataagaaggcttgtcactgggcagctttatgtcaatatccagaaaacttgggccatactatcaaaccttcaccaccaatgttttttactttgatttattgtgaaagccttttctttctttcttttttttttctttttttgagatgaggttttgctgtcacccagcttggagtgcagcggcgcaatcttggcccactgcaatctcgcctcyggggttcaagtggttctgcttcagcctcctgagtggctgggattataggtgtgcgccaccatgcctggctaattttcatatttttattagagatggggttttgccatgttggccagactggtcttgaactcctgacctcgggcgatcttcctgccttggcctcctaaagtgctgggattacaggcatgagccaccacgcccagcctgatttactgtgaaagccttttgatgtaatttcccttgaaagttggagaaattatcacatagattttttaaaaagaggaaagtttcaaaggacatgacaaaataatcaatgaactgaattataatttgtattttg

SEQ ID NO: 610632 - DNA, 592 bp, Homo sapiens
tgctggaatttaacacaaggcagagaataagatttgagtaaaagagagagttatataaaattgatgcttttctctcttttttttaatcattgaaaagtgaatggagagaccctttttcatttttgctggacagcttacaaattctagatacatcagagctcttacatacagatgtagaacaatatggtcttgggaagctgaaaatrctaactgaaacaagcaggacaggggatgagtcaagtgattaattttttatgatgatagatgtcttacaactctttctttcctcttcctagaaatgcatatgtatctttggaagaaactctgaagtaaaggccggaatattctttgtttaaaacattaaaaacaaaacagaccaaagcatcaagcaagaagtttcctggcaataaactaagcacagcattattttttaaggaacacaaattaagtgttcaacctgtggcaaatttgtactttctccctgaattatgttgttatcaaagaaaaaaattgggaagcatggcaaaatatcatcaaaactgaaactagaattaaacaaaactaaattaaaatgaaataaaatgatgtccat

SEQ ID NO: 610633 - DNA, 628 bp, Homo sapiens
agaatattcagggcataaaagttgaatactgttataaatttcctattgattataaactagatcaatgtaaaattgccctctactcaatttcatatttgtcttaacaaaacaatgattaattagctgatttattcactcaacaagtatttctttaagtttgattacattccaaatgcttttaggagcctatgaacaaaattcactgtccccattttgtagagcttacagagaatgtagtcattattacaaataatactgacatcaatatttgtactctgggtttttctttgagggggggaactgcattctagagccttgtgtatgatattttcttgtgatacattatttttgcgatattttgtgtaagaaataacagattattattttcaattgtttctgagagtctttgcctgtattataaaggggaaatttagacccttwacttttattcttctgttattcttttgtcatcctgatttatactttttaaaatatgtaatactcttgccttttatttatttttttttacaggtggaagtgtagccactctctttttcattctaccagttgctatttcaatctttttcaagagaaggctaaaattttaagagaaggctaaaattttatg

SEQ ID NO: 610634 - DNA, 641 bp, Homo sapiens
acacatctgaagaatagagaatggagattctaacctaatgataactattcctaatgggaaaagcaaacaaacattcagaatcattgatgacaatttcactagcagaaaaaatggtgtaaacatgcagatcaaaagactctgtatgtttcagttaacattaataaggaaggtcacaggtaaaaatagaggttgctaaaacttctttccagctttattgaggtataattgacaagaaaaaattgtttttatttaaggtgtacaatgtcataatttaatgtacacaaataaawtaaaaataaacctttaaagcatccaggcacaacagcaacaaaaaatatattattaaaagaggaaaaatcaaactgatttcatacatctctgaaaagctaagtgtcttagtccgttttaacactgctataaagaactacccgagactgggtaatttataaaagaaagatgtttaattgactcacagttcagcatggctggggaggcctcaggaaactcacaatcatagtggaaggcaaaggggaagcaaggcaccttcttcacaaggcaacaggaaggagaatgaacacaacagtaactatcaaactcttataaaaccatcaggtctcttgaaaactcactcactatcatga

SEQ ID NO: 610635 - DNA, 405 bp, Homo sapiens
ctatatatccaattgattgacaaaagcccaagaagcttgttaaaagggctggctaagcatatttgtgaagacaaatatttttaaatgtccattagagtaacttcaacataactaagtaaatcagaagaactaggattatgtttactctttaaatttgctaaaacagaggtcaatgattattgatcttgattggctgtctccgctctttttcttamctttccttttattcttcttatgcttcaattttttaccgttcttttttttttttaagtgatcacgcattaacttcaaatgactggattctaacactggtttctttgcagggcatagaggtaaattatgactttcctaacctcttccctgatccataaaccatgaactaccctccaataggtctactttgaa

SEQ ID NO: 610636 - DNA, 533 bp, Homo sapiens
ttttattgcctgcagtacaggcctacagcattaagttagtataaaattacatatagtttaatatatctgtacaacacctttaaacaagcttctctaggcaagaaggttatccgtcttataaatctattattccattgtacatcttgatagcctagcattgctcctagccatgtttaagcattaaatagtgcattattatttcacataaatcaaccagagatgtgtgaattcataaattttgcatttgcacagacagtattttaaacgttttactgcttcgtgggaactcagagcaccagcctgtacacaaatcaggacctgagaaatttcrataaaatttaatatcacaattacatcttctcaaagtcaaagcaggcatgttttggaagtattttaactgagtccaaaaatgaaagtaaatgttaagagtggcttttttgttggcatttagtcagctattgttataacaagctaataaaaactttacttttaaaattctttatagccaaatggtatagagaaaaggttttatc

SEQ ID NO: 610637 - DNA, 581 bp, Homo sapiens
tggaaacaaacatgtttaaaaattctcagtgtatgtcaatgccatttaaataaatatatgtttttttctcataacactaactttactggttagagcggaaattacaagaaaaaatggacaatgaatacaggcatatttaatgttattgcactttgcagatattgtgtttttacagtttgaaggtttgtggcaaacctgcatcaagcaaatctattggtgtcatttttctgacagcatgtgtaaattttgtgtctctattatattttggtaattatagtaatatttcaaaattattattattatwatatctgtgatggtgatctgtaatcactgattttgatgttgttattataattgttttggagtgccatgaactgtgcccatataagatggtgaacttaatcaatgctatgtgtgttctgactgtttcactgactgagtattcccccatctctctccctcttcttgtgacttcttattccctgagacacaatgatattgaaattaggacaattaataaccctacaatggcctctaagtgttcaaatgaaaggaaggaagagtctcacatctctcacctt

SEQ ID NO: 610638 - DNA, 580 bp, Homo sapiens
taatagcagtagctctttgacagtgcacctggtcacctaagagttcagatggagatgtacaaggggattcatgttgttttcgtgcctgctaacacagcatccattctgtgggtgaaatgctatcaaagagcatctcatgctacagagacatttttttgtgaaaggaagagtcagtgtggcaaatttcattgttgtcttattttaagaaattgccacagtaactccaatctttagcaagcgccaccgtgatcagtcagccacgaatgtcaaggcaagaccctccaccagcaaaatgattatgacttgctgaatgctcagatgattgttggcatttcttagcaatattttaaaattaaggtctacatactattttgttaaacatagctattacacacttaatagactatagtgtaaacataacttttatattcactgggaaaccaaaggtcccatgtgacttatttaattgcaatattcccttattgcagtggtttagactacaaacctgtaataactctgagatatgcctrcatgttgaattctaagacaaaatgaatttgtttcatctttttaaataaaa

SEQ ID NO: 610639 - DNA, 452 bp, Homo sapiens
ataattggaatttagagatagctcagagagatacatccttgtactttctgataaaccaggatgaataatttaggtccttgttgtggagaactatttcrtgaatgttgattttgccattatcagctttgtcagctacaagaatctcgccacacactggggtgtcctcaatcttggccgctgtttatcagtggtgtggtgatgcataggagaactaaactgaatgtttagggcagagacagaactgactgggatgggacaccggacacgtctactgcagaaggcgaacgatgggcatgaaacaggtcactaaagtaaacacacacaattacaactgcattttgtttggaaattttcatgtagacttttctgtcattttcctccagatataacttggcttacctttgtactcctaaatgaggtaattaacacacgtgaattcacatccaaatgaa

SEQ ID NO: 610640 - DNA, 452 bp, Homo sapiens
ataattggaatttagagatagctcagagagatacatccttgtactttctgataaaccaggatgaataatttaggtccttgttgtggagaactatttcatgaatgttgattttgccattatcagctttgtcagctacaagaatctcgccacacactggggtgtcctcaatcttggccgctgtttatcagtggtgtggtgatgcataggagaactaaactgaatgtttagggcagagacagaactgactgggatgggacacyggacacgtctactgcagaaggcgaacgatgggcatgaaacaggtcactaaagtaaacacacacaattacaactgcattttgtttggaaattttcatgtagacttttctgtcattttcctccagatataacttggcttacctttgtactcctaaatgaggtaattaacacacgtgaattcacatccaaatgaa

SEQ ID NO: 610641 - DNA, 260 bp, Homo sapiens
tattttcttgctgaggggtatgtgcttacagttgtatattactcacaagtactgttgagtagagttacatttaattatatcatctagtaygtaattctttttatagtatatgttcagttttccttaatggcttcttccttaaatatggctttaagattagcagcagaacaggaactgattgaacatttactattatttcccttattgggtagtttgggtaggccagatcttaccttatgtctaaaagtatgtttcatcca

SEQ ID NO: 610642 - DNA, 513 bp, Homo sapiens
aacttctttctaccccatgaaaaactgttattgaaatgtggatttcagggcctttcaaagacacttagggaagaaaatattttgtaaattcaggaagcattcctgttttctcaaaagcagtggtaattaaaatgcactgtccaacagggaaaactgtgacatgcatgacagcgctattttttttttttttgagatggagtttcactcttgttgcccaagctgrggtgcaatggcatgatcttagctcactgcaacctctgcctcctgggttcaagcaattcttcggcctcagcctcccgagtagctgggattacaggcacacaccacaacacccggctaatttttagtagaaacgaggtttgactatgttggccaggctggtctcgaactcctgacctcagatggtccgcccacctcggcctcccaaaatgctgggattacaagcctgagccctgcacctggcctgagggtgctgttttttttgttttttgtttttaaattgtgtttttaatg

SEQ ID NO: 610643 - DNA, 575 bp, Homo sapiens
ttagtgaattcttatccattctgccattctgtatcttttaagtggagcatttaggccatttatattcaatgttagtattgagatgtgagatactattttattcatcatgctatttgttgcctaaatacctgtttttttttttaattgtgttaccattatataggtcctgtgagatttatgctttaaggaggttctattttggtatatctcaaggatttgtttcaggatttacagctccttttagcagatcttgtagtgctgacttgttggtggygaattctctcagcatttgtctatctggaaaagactgtatcattcctgcatttatcatgcttagtttcacaggctacaaaattcttggctcataattattttgtttaatgaggagaaaagtaggaccccaatcccttctattgtgtagggtttctgctgagaaatctgctgttaatgtgagaggtttccctttgtaggttacctgattcttttgcctcacagatcttatgattctttccttcatcttgacattagataacctgatgagtatgtgcctaagtgatgatctttttgtgatgaat

SEQ ID NO: 610644 - DNA, 575 bp, Homo sapiens
ttagtgaattcttatccattctgccattctgtatcttttaagtggagcatttaggccatttatattcaatgttagtattgagatgtgagatactattttattcatcatgctatttgttgcctaaatacctgtttttttttttaattgtgttaccattatataggtcctgtgagatttatgctttaaggaggttctattttggtatatctcaaggatttgtttcaggatttacagctccttttagcagatcttgtagtgctgacttgttggtggcgaattctctcagcatttgtctatctggaaaagactgtatcattcctgcatttatcawgcttagtttcacaggctacaaaattcttggctcataattattttgtttaatgaggagaaaagtaggaccccaatcccttctattgtgtagggtttctgctgagaaatctgctgttaatgtgagaggtttccctttgtaggttacctgattcttttgcctcacagatcttatgattctttccttcatcttgacattagataacctgatgagtatgtgcctaagtgatgatctttttgtgatgaat

SEQ ID NO: 610645 - DNA, 603 bp, Homo sapiens
aattaaacctgcataatgttagtctcttctggatctattttcagtgagggaatttgagaaggtcatactgtaagagatggctcaacaaaccaaaactcacattaaacaaaagaaagactttgatacttcaatattctccccttctgtttggaaaaagtgaccattgcactaatgactacacattacaatgaagcagcagcatcttacattatctttccagtccatccaattattcacctctacgtgtttatgtaccactatcaagaattgttcatggaaagaatttatgcacacatcaccaaaaaaattccaaaatagtctatggaaaaaaagaaatggcttttattttggggaggaaagggagccaaatgcacctattaatatttccttcctcaaaatattataaaggcaaagtgaatgattggtttagagaacagaaaaattgctaaaaatgtcctcatggaccccacaggacattgttgaggtagccttatacatgcacctgtttacatctgcctaagtcccctaccayatcaaagctcctcgagaacagcactttgttttctcttcttgtagcatccccataatgactcatgtccaata

SEQ ID NO: 610646 - DNA, 567 bp, Homo sapiens
gcactttgttttctcttcttgtagcatccccataatgactcatgtccaataagagcttcataaatgttttctaatgaaggcattaatactatcaagaggaatatgataagactaaaaacacaggtcatttataatttgcaccaggrgcaacactgctgcccaattggtagttattatcagtaatgcacactaatcctgcttctgccaaaagcccgctggcacctctgaaatgatgacacattcacagaacaacaggccagtgctacaagtcattgccaagtatagtgggtaaacaggaaataaggaatatttgatgccactgaattggtgggagatgaatttgggtggcatgaaaaaaattccatgtatttgttcaacttctagacaccaatataattatatgtcaaaatttgtgggaaagttttagtggcccagaatgttaaaaaatcagttatttttcccatcaggaattctcttacatcagttggataaaaagaaaccacagaaatacttttcataacgtcttagcttaccatgaagtgccacttgaagcacattctctctaat

SEQ ID NO: 610647 - DNA, 571 bp, Homo sapiens
tgttttcatttcattgcgttttgaggagatttagcaatactgctctaggcagatgacaaattcggagaggatatgaaactgcttgtatagattattttgtaagagttagaatacctagttgtatttaccaaggaaaaagtttagttaggattaaagtagcaaagcttcctgttttaatgagaactaaaagtgaaagacccagacaggggccttgtgactcccgaagagtgcaatgggattctaagttgcttgtgaaggataggttcaagacgtttagccttccctttctatatttttatcaatggacatatgtaatcactgagcttgctcccctcyccatcccactctctatctagcccactgttgagcaccaaatcaggttaatggaacatctactctttttgaaaatggcccaaaagacctggattaggaattttatgactatcatctctttaggtttattttgtgttttacttgaacatatctattctattaaatcaggtggtgagtgatattacccatgttgttctgtcacttgctagaaatagctcaagatgctcttgcaagcagc

SEQ ID NO: 610648 - DNA, 659 bp, Homo sapiens
atctctctagtggtagccatgatataacagattagaaagactcaagggtcctgggacagaaggtgtgtacagacatctttctaaatccattaccttatcctttgtcagggccgtgtgtttcacgttagtgttcatgaattttcttaaatttttattatatcttcctgtgggttttaatgctgaaagatgacatttagaaattatacaatcaaataatactggaaaggaattagaagtaacgactggaaggtgtgagcatctctctcttatgtagctctagtggagagaacactggctctcaagatggaatgcttgggtttacccatctactctacgactcagtttcctcattttaaaaataggaatgttaagagtatttatctcagagctgtttgaagattaaattagtaaatatatggaatgtgggccaggcagggtggmtcacgcctataatcccagcactttgggaggctgagatgggtgcatcaaaaccagcctgggctgggcaacatgacaaaacaccgtttttaccaaaaaatacaaaaattagttgggtgtggtgacacacccctgtatttccagctacttgggaggctgaggtgggaggatggcttgagcctgggaggcagaggttgcaggttgcagtgagccaagatcaa

SEQ ID NO: 610649 - DNA, 578 bp, Homo sapiens
gctcgagctcagattcattaagtagtasgttaggaataagccacagtatggtgctgaccaccacaacctcagaatccaaaaggtatttgctagctcattcctttgtcagaaggttgaactaacccagcaacagcacagccaattttagcactttgacttgtcagcagggtagcctccactgatgaattttgaatccggtgatatcatatagtattagtcactaaactgctatgtaccacccttttctgcctatctacatggcacagaaataatcattaatggataccacagctatccacatgcattcatttccacaatgagagaagtttgtccaggtagcctaagaaagaaagtatcaggtttttgtgttattttttcacaggagaaatgtgatccctcatttagggccctcaaagccactttcagtctgcctttgtttcatattatgttatccagatctgtgccagctacttagtaggcttcattcaagtaaattaccatctctgattatgatgaaatagatctaatgcactgattagggtctcttcctaaactgcctgccaagcttcttgctgagt

SEQ ID NO: 610650 - DNA, 578 bp, Homo sapiens
gctcgagctcagattcattaagtagtacgttaggaataagccacagtatggtgctgaccaccacaacctcagaayccaaaaggtatttgctagctcattcctttgtcagaaggttgaactaacccagcaacagcacagccaattttagcactttgacttgtcagcagggtagcctccactgatgaattttgaatccggtgatatcatatagtattagtcactaaactgctatgtaccacccttttctgcctatctacatggcacagaaataatcattaatggataccacagctatccacatgcattcatttccacaatgagagaagtttgtccaggtagcctaagaaagaaagtatcaggtttttgtgttattttttcacaggagaaatgtgatccctcatttagggccctcaaagccactttcagtctgcctttgtttcatattatgttatccagatctgtgccagctacttagtaggcttcattcaagtaaattaccatctctgattatgatgaaatagatctaatgcactgattagggtctcttcctaaactgcctgccaagcttcttgctgagt

SEQ ID NO: 610651 - DNA, 629 bp, Homo sapiens
ttcttgccttctagaatactcaactacaactccaaaatgcagacagaaaaagactttcctggctatctcttttataatattttctgacggggccaagctcgtccccaaccactccaggtggctgacaacaccatactcctgataacatagagattattattttcccaggagggatgacttaggaggaaggatgggggtcagaccattcaggcccagcaagactgtatcatcagcttgtccacagacttgccagattcattcatccctgtgctctgtctkccccaggctatgccactccagaaacatgggaacagagtggcagcatacaagctgggcactgcatgcgggcaaatgaggcatatcctcagccctgcatagatatgagaagggcatgcatctgctttctctgatccacagatcagaaaattaaggtcagcgtctctttagtctaaacaatatctcagtgagatgagggggaaaggaggcagtcagccttatcaccatttcacaggctagagagttgagaccgagtgaaggccacacctccggagggaaagataatgtgaaggctctctccactgacatgtcacatgctttctacttgactgggcttccctaaacttgggtaa

SEQ ID NO: 610652 - DNA, 629 bp, Homo sapiens
ttcttgccttctagaatactcaactacaactccaaaatgcagacagaaaaagactttcctggctatctcttttataatattttctgacggggccaagctcgtccccaaccactccaggtggctgacaacaccatactcctgataacatagagattattattttcccaggagggatgacttaggaggaaggatgggggtcagaccattcaggcccagcaagactgtatcatcagcttgtccacagacttgccagattcattcatccctgtgctctgtctgccccaggctatgccactccagaaacatgggaacagagtggcagcatacaagctgggcactgcatgcgggcaaatgaggcatatcctcagccctgcatagatatgagaagggcatgcatctkctttctctgatccacagatcagaaaattaaggtcagcgtctctttagtctaaacaatatctcagtgagatgagggggaaaggaggcagtcagccttatcaccatttcacaggctagagagttgagaccgagtgaaggccacacctccggagggaaagataatgtgaaggctctctccactgacatgtcacatgctttctacttgactgggcttccctaaacttgggtaa

SEQ ID NO: 610653 - DNA, 485 bp, Homo sapiens
ttttttctacaaaaaaccaaaaacrttacccaggcatggtgatgtgcccctgtaatcccagctactcaggaggctaagatgggaggactgcttgagcctgggagtttgaggttgcagtgggccatgatcacaacattgtactctaccctgggcaacacagcaagaccctgtctcaaaaataaataaataaaatttttaaaaatattgaatataaaaaaataattcattgatagaatctggcaatagaaaaagtaactgacaatattgaatagttgcactaagattataaaactagacatgaaaacaaaaaacaaggtatttgaggtgcatttagttagaagaaaacatctcagcagcccatacatgaataccgtcctctctagggatcagtaggggattggttccaggaacctcatagatatcaaatcctcatatgttcaagtcctgcagtcagccctgtggaacctgtggatacaaaatgtcag

SEQ ID NO: 610654 - DNA, 474 bp, Homo sapiens
ccgggttttgtttttctcctgcaaacctctataacaaacattcctgacagcataggtatccacccctgaagttcccattaaatcttttaaccaaattcatttcctctcrcctagagaccatcaagcttcagatgatcatgctacaaaggtttcagctggttccaggtgaagacaccacccctggccatcatggagctaccctgcctccactagacagagcagggtgagcgttccatgatcctcaataggtagggacaatcccccaagccagcatgaagcagttacagaagaaagaccatcagtccctctgcgtcccataaagatttatagggatcacatctttcactggggagatgcagcaggagaatagggcgtggaggcagggaaattaaggacttcctagaactaaatcaaatgaaaacacttcagctatgacaagaaatatcctcttcatttacatagggcatacaccaa

SEQ ID NO: 610655 - DNA, 474 bp, Homo sapiens
tcttaataatattttctgtagctttattgtaagaatatggtacaaaatttgtggaaattggccatttatgttattggtaaggcttctagtcaacagtaggctattactaattaagtttctgtagagtcaaaagttatatgcagatctttgactgcatcattcaaggattaactgaactttgtgaaaacaccttgccttaatatctgtagtctaaaacagcattatgatgaagtgtcatcatattaacaaattgttactatagagatctagttactctccttggatgttccccaaacgctctttgaggctggggtttctgttccttctcccgcgcccagagtagccacatgctgtcatggaaagagtgaggcagagcttcatggactgctcagggcgttgtcacgggtgtaaggaccttctcacytatctgaattgatgcctggtagctttttccattaaaagaccctttcccag

SEQ ID NO: 610656 - DNA, 585 bp, Homo sapiens
ctgatagggaccagaagtctctaaaaataaacacgagtgtaataaaatgccaaattggaagttttaatgggggcaacaagatacaatagataagaaattctaaaataatgtttcagagtaagaagcagattttcaaaaggaaatatttgggaaccagttttatgcctccaaaaatcccttcctacaaggagtttwtaaaaagaattggaagtgtgggggttgagaaagaatgttatgaggaggatttctttgagagaactgtactgaattttttacccattcccacattgaggagagcttcagggagatgactcaaggacctcactaagtgccccctaaagttggaacttatgggcagtgttggactccagcctggaaatctagaagacaagagacacagacggtgaattgatttggtggtggattaaagaagagtagttgctttgttgggaaggctggtactccttgaacttgccaggacaaggattaatgcacatttcctgaggaccatatatgggccacatgaagagaaagtgagccaggaactattttcaagatcttttccgaaaggactacctgaaaaaa

SEQ ID NO: 610657 - DNA, 625 bp, Homo sapiens
aggttgggcatgcaactatcattggccttataatgaggtcagatcacaaccacttagagggccagagctctgtccactttattcttacccttaaatgtcctggggcacctttccactttgctgctgaagtgggagtccatggcagaaataattctgctcgtttggttttatgaaatttcttgggctacacacatatctgtagcagcagccaacatcagacagtaatgtgactagaaggcagactcaggagggtgacgtgcctgggtttgaatctctttgctatgccttagtagctatgtggttatgatcaagttacctaacctctctgtgcctccatttcctcctctgcaaaatggaaatgatagaaatgatgacaacataattcatatgtgccacagagcatggtacacaaaacactagctgcattgttataataattattatcatcatcattatcatcagtgtaaacaagcctggaatgaatatcactgaagtatgcyttttaataaaaatggatttcttccttcaacaaaatcatgtatccataagtcactgatatattattttctaccttttcatctgacaaacccagaaaataaataaactcacacatataaatgcaaca

SEQ ID NO: 610658 - DNA, 590 bp, Homo sapiens
caaaatcatgtatccataagtcactgatatattattttctaccttttcatctgacaaacccagaaaataaataaactcacacatataaatgcaacacctctgtaaacatgacggtgggagggaacagtggtgtgcataatcctacctggcagataatcaggatttgaatgttcagcayatgcaatacctgctgtgtagacagacccggacattccttgctggtctctacagtaagattaagggtgtggctccaaagggcagggcagtgtgaataggagctgggctcctgttggtcctgcttctgcctcagcaagggcacttctaggacagaccaccagccctctaggtcctaaatgagggggtgggaggatgggatattcaggtcagagtctgaggggtcagttccaaacccaagacccagagcttgggcagccagaaaggccaggtcagagacaagaatccaggtagggtagctggatcatggctgtgatctcacctcaatgtaaggctgagacaatgtcaaggctcccgggtggtcccctggatgccctttccacccttcctctgcacacctgctacctgtgtagctg

SEQ ID NO: 610659 - DNA, 621 bp, Homo sapiens
aagctaagaggctcattgcaaaatatcacagggaagcaatagttaggagtcctctctcatatgtcccagtgtccatacatggcgcttctgtagacagcagaatgtgtctggaatgtccagacagcagactcggctgggcagttttgggttgggatatttggctgcaacaccaatggcttccctccattgtacactacttgtttctttttatcttgctcctaactttttatgggaatccgcatgtaaggccaaagttataatgccagcaagcacacagtgtatccatggggaaatcattattcttgtgtgtttgaagcgcttgtttgagccatttttaaattatttctttggaaataggtctggcttaaatgtgtttatcyctttgcctttgttagtccttgtttgcattcactgggcattagtaacagatgagcacagtcatattaaggtatttagctctttgaggcagtgtcattgctttcacatttctagcctagataagatcaacaagaaccagggaaggatgctgtggctagaagcccaggaaaagtgaagttgggtttgactgaagatagacaaatcactatggagacgcttgagagtgtatcgtcatttatataa

SEQ ID NO: 610660 - DNA, 593 bp, Homo sapiens
tgtcttgggccacacataaaatacactagcactaacgatagctgatgagcgagaaaaaaaaaaaaagaaagaaagaaaaagaaaacttaaaaaaaataaaaccttgcaaaaatctcataacattttaagaaattttatgaatttgtgttggccctcattcaaagccatcctgggccgcatgcagcccatgggccacgggctgaacaagcttgatttaaaagatcctccatcccacagggtatcagctggtcttttagggcccctttcccccagttctcagtttcctctctaccaaacagtggccatgacccttttccacacctcactkgacttatctcctcatttacaaagttggtaatactaaccagaagataaaaccacaatacaaaactgtctaacatctgcacatataatatgtattcaaccatgcttttacaatgtatgtggagagaaaagactggaaacattaactgccaaatgttaagtgacctgggaaggcagattctccaagtgttgtttgtggccaggtgggaagctgtgggaaagggggcagaggaacagaaagatcaaagtctcttttcagtgccccgtga

SEQ ID NO: 610661 - DNA, 539 bp, Homo sapiens
gggagtgccaactgcttcctgcctggagcctgactgacagagacaacaatacacattcttagagaaaccacgctcccatgatttgctcaaacaagtcccaatttcatgatttttgtcttttaattaaggtgaattacacgatgtataaataagcaggatgcagagaggaaagccacccccaactttagtccccagtgcaagcaccacgccaacccgataaggggttcactgctgctgaactgagagttaaggttcacggactgggtcaaggacaaaggccatataacaaggacaagggccctcagggccaacacagtgtatgtcacttggattgggctcagaccagatttcaagggaaggaagctatcataaaaagtaagggacatgaaagagctgaatcgactgcacttcaataagacaccagagaakaagtcagcatggcttcattgtcaagtaaaagaaagtgaagcaattcccagtggtgggtactttcccacctcaggctggggtgttcgcaaaaggaacagagcaatggctgt

SEQ ID NO: 610662 - DNA, 316 bp, Homo sapiens
agcgaggatggtaacttattgactttgtgtcttggaagggccgagcagttcctaactatctctgggcagctgctagtgcaatgcttcctggtggggaacagtctgattaatacactgacagagattacaaaagaaatagagwgttataatagcttgatccttctgcagcccaaagtccacagaaactctgaatttgtttcaaaataacttcagagctgcctctggcactgtgaaaatattgacgtatcttcccactgacctggaatcactttctcccctccctgccctggtcaagggaacttggaggcagggggct

SEQ ID NO: 610663 - DNA, 400 bp, Homo sapiens
tttatttagttatttatttttattatacttttagttctgggttacatgtgcagaacgtgcattttgttacataggtatacacgtgccatggtggtttgctacaccaatcaacccgtcacctacattaggtatttctcctaatgttatccctcccctagccccccacccccacagggccccaggctctggtgtgtgatgttcccctcyctgtgtccatgtgttctcattgttcaactcccacttatgagtgagaacatgcagtgtttggttttctgatcttgtgatcgtttgctgagaatgatggtttctagcttcatctgtgtgcctgcaaaggacatgaactcatccttttttatggctgcgtagtattctgtggtgtatatgtgccacattttcttaa

SEQ ID NO: 610664 - DNA, 481 bp, Homo sapiens
atcattccactctctatctccatgagttgagtgggttttttgttttgttttgttttgttttgttttgttttagctctcgcatattagtgagaaacgtgcagtattgatctttctgtgcctggcgtatttcacttaacataatgttctccacttccaatcatgctgttgcaaatgacagaattttgttcttctttatggttgaataatattcaattgtgtatatgtaccacatgttctttatccattcttccattgatggaaacttaaattgattccatatctcggccattgtgaataatgctgtaataaacacaggggtgcatctctttgaaatactgttttcctttaggatagatacccagcagtgggattgctggatcatatcatagttctatttttagttttttggagaacctccatactgttttttttwtatatatatagtggctgtgctaatttacattcttaccaacagttgcct

SEQ ID NO: 610665 - DNA, 580 bp, Homo sapiens
tcattttttgaaatcatttagaaccaaggtcggtgaactttcttgtgaatggctaaatataaatattttargctgtgaggttcaagatgcaaagttgagggtattatataggtacttatataacaagagaggaaacaaatatctacaattttttgtaatacagctctactaatgagcacaatgaaatttgtggatggacactggaataagagtttcctataattttcatgtttcactaaatattattctcttatttttttcaatcatttaaaactgtaaaaaacattcttagattgctggccatacaaaaacacaggcaggctgaatttggcttatgggccctagtttgcagagccttactctagaacagagattcttaaccagtaagtagttcataaccccacaccaggggtgagtgtcgtggggtccttgaacttgctgagatcacaagcaacattttttgcatacatgaatttttctgtggacagagtctgcagcctttatctgactcttggagaagtcctggactcaaaaaagattaggagccagtgttgtctagatatttcgttaatttttagga

SEQ ID NO: 610666 - DNA, 592 bp, Homo sapiens
taaacattaaataaaatgattcacaatatagaatgtccaagtcatcactattttcatctgatccracttcagcccaccaaactgttatcatactgacatatatttctccatattttttgccttgtacttatgcatgctccttttgttccttaagtaattacaggatagtaccatacatactattttgaagcctactttttaatctgcaattctcccctctttttacaacagtagagattatgtcactgctcccatgtgaggcaatcactatttctacctttacattctccaccttcctgccttctagggaaccttatactatcaaccatccattccatctctggtaccatcaacctctttctttcaccgtgaactttctcaacaatacttgtgcctcattaagtcccttctttatttaaaaacccttccctagaccccaccaccctttccagttaccctcttgtctctcttctcccatttatagatatacttctttaaaaatttgtcttttttctatccattttgttattcctcaaccaactccaatctgtcctctactcctccaacaaaatagctttatgaaagtcatcaa

SEQ ID NO: 610667 - DNA, 620 bp, Homo sapiens
taaatgacttgcccaaggtcgccttgctagagagaggcaggctgctagggtagtctagcactagaatccaagcctttcaccactgcaagccaccttcatgggcttgtcttctgagagatgtcacagatgctagtggatgtgaagtctttgcatctagctaaagagctgggtacagtggctcatgcctgtaattccagcactttgggaggctgaggtgggcagatcccttgagcccaggagttccagaccagcaatgggcaacatgacaaaaccccgtctctacaaaaaacaaatacctgggcttggtggcacatacctcaagtctaactacttggaggctgaggtgggaggattgcttgagcctgggagatctaggctacagtgagctatgattgtgtgatggcactgcagcctgggtgacagagtgagacctcatctcaacaaacaaacaaaaaaatggacracaacaacaacaacaacaacaagagctattcacatgaggagaggaaacattggttttgcatttaagtcaacaagaatattgctgaaatagggcatgacacatgagtggagcgttgtggcctgagctctccatggttcctggggatcctcatgtgtga

SEQ ID NO: 610668 - DNA, 391 bp, Homo sapiens
caagggttttaggagcttgtgccaggagttagcgacaaaaaccaaatgcacttcttattagaccacaaggtcacatggtcacacgaaaccgaagagacttattgagtgagtgtgagtgttgtgtgcgggcataaaaatcatacttgagagtgcccactggggccagccagctgcccccacatgcattattttgctagagcctcatgaaggccctacattttgaagatgagcaaacgaagccttggaaaggtaaaatgacttgtcttargtcacataactagaaggtagcccaggtagtattgaaaccagcatttgctgaccttaaaaaccaggtatctccagcttttttgtgtaaatctgcacaagacctcttatgggaaggggcatttgc

SEQ ID NO: 610669 - DNA, 420 bp, Homo sapiens
acatgtggatgcccagttgtactaccacaatttgttaaaaaattttttccactgactttactcctttgtcaaagatcatttgactatatttacttgggtctatctctgggctctctgttctgttccrttgacctatttgtctgttcttttaccaataccacactatcttgattactatagctttattgtaagtctcaaagttagatagtgtcagtcctttcactttattcttctcattcaatattgtgttggctattttaggccttttgtctctcatgtaaactttagaatcaatttgttggtatccataaaatagtgtgctaagattttgaatgggattgcattgaacctgtaggtcaatgggaagaactgacatcttgacaatgttgagttttcctatccatgaacatggaatatttt

SEQ ID NO: 610670 - DNA, 548 bp, Homo sapiens
agatgcagccccttgaccttggacttcccaaacttcagaattgtaaaaaatacatttcttttctttctaagttacccagtctgtggcattcagttatagcaatacaaaatagactaagccagagttaatgggtttcattagattttcaaaatgcttctgtgactaaaaagggttaatgtcactgaggcccaacctcaacccctgctttktatgaattcttatacatcagagcccagtgcaggaaaattccagtagcagagaattcctcccttcctctctccttccctccctgtcactttcctcactccctctccctttcccttttggatagcagccagcctagtgccagcttctcaaattggagtatgcaggcccctaagaaaatgtgaagggagatgggaggcttcaggataaacatggaccattttcccagaatgatacttttgcttaaagattttgatgaaaactttattctagtacttaagaaaaatactaatctaagataatagagcaagcatgtaaaaccaacatgaatttgagagccaaaa

SEQ ID NO: 610671 - DNA, 616 bp, Homo sapiens
aataagcaagcagaatcaggtgtgagcttccaaatagtgttttttcaactttccttaggctaggatttcaaaatgctgctccaaatrcagaaatcactgggctctttatccaaattctcaggaactcttctgcacagaatccctcctagtttctgacgctctggtgtttgatttgatggatggcatgtgtaataggcaggagcaggaggataaaaccaaggactatatttctcctgcaagaaacaagagcaagcctctcatgttatggacatttattctatcatgggagaagatgggaagacagggcttttgaagcaaacccggtccaacaccctgctgaactgacctgcgcccagctcggcctgaagggatttcttgatatgatgagagaaaaactgagaggagtgtgttttagacaaaacgaaaggcatttctgtttgcttctctcttgtatgtcttgtgacgctatcaaaaaatagaatcaggatgtgctttggcagttagacatttatatttccagctggactcaaataatttttagaatctatttacaacaagtatagagtcatacttttttttcacgttaggagaaaactaccttgttggcatggtaaat

SEQ ID NO: 610672 - DNA, 616 bp, Homo sapiens
aataagcaagcagaatcaggtgtgagcttccaaatagtgttttttcaactttccttaggctaggatttcaaaatgctgctccaaatacagaaatcactgggctctttatccaaattctcaggaactcttctgcacagaatccctcctagtttctgacgctctggtgtttgatttgatggatggcatgtgtaataggcaggagcaggaggataaaaccaaggactatatttctcctgcaagaaacaagagcaagcctctcatgttatggacatttattctatcatgggagaakatgggaagacagggcttttgaagcaaacccggtccaacaccctgctgaactgacctgcgcccagctcggcctgaagggatttcttgatatgatgagagaaaaactgagaggagtgtgttttagacaaaacgaaaggcatttctgtttgcttctctcttgtatgtcttgtgacgctatcaaaaaatagaatcaggatgtgctttggcagttagacatttatatttccagctggactcaaataatttttagaatctatttacaacaagtatagagtcatacttttttttcacgttaggagaaaactaccttgttggcatggtaaat

SEQ ID NO: 610673 - DNA, 560 bp, Homo sapiens
ttgagaaatctccaaattgctttccacagtggctgaactaatttacattctcaccaacagcatataagcatttgttctcttttctctagcttctcttgttttttgactttttaataatggccattctgactgatgtgagatggtatctcattgtggctttgatttgcattttaaagatacatttatttcctcacctcagcttgtggcctaaggaattcctacctgctacacaggtattgtaagatygatctatcgatctatctatcgatctatctatctatctatcttaccttgactgttatcttacctcctaacttattagcagagtaaagagccccacctattagtgtaactgttaataaaaatgttcttaagcctgatcaaccttgttaattgtctttgaatgagaactggacttgggggtggggcctccactagaggccagcacacaccgcaaagcagcaagctctgctgtccaattcaacattagccacttccctagcgttcctgcaagccacttagcaaaaaagaacatcatacggagtcctagccagaactag

SEQ ID NO: 610674 - DNA, 560 bp, Homo sapiens
ttgagaaatctccaaattgctttccacagtggctgaactaatttacattctcaccaacagcatataagcatttgttctcttttctctagcttctcttgttttttgactttttaataatggccattctgactgatgtgagatggtatctcattgtggctttgatttgcattttaaagatacatttatttcctcacctcagcttgtggcctaaggaattcctacctgctacacaggtattgtaagatcgatctatcgatctatctatcgatctatctatctatctatcttaccttgactgttatcttacctcctaacttattagcagagtaaagagccccacctattagtgtaactgttaataaaaatgttcttaagcctgatcaaccttgttaattgtctttgaatgagaactggacttgggggtggggcctccactagaggccagcacacaccgcaaagcagcaagctctgctgtccaattcaacrttagccacttccctagcgttcctgcaagccacttagcaaaaaagaacatcatacggagtcctagccagaactag

SEQ ID NO: 610675 - DNA, 560 bp, Homo sapiens
ttgagaaatctccaaattgctttccacagtggctgaactaatttacattctcaccaacagcatataagcatttgttctcttttctctagcttctcttgttttttgactttttaataatggccattctgactgatgtgagatggtatctcattgtggctttgatttgcattttaaagatacatttatttcctcacctcagcttgtggcctaaggaattcctacctgctacacaggtattgtaagatcgatctatcgatctatctatcgatctatctatctatctatcttaccttgactgttatcttacctcctaacttattagcagagtaaagagccccacctattagtgtaactgttaataaaaatgttcttaagcctgatcaaccttgttaattgtctttgaatgagaactggacttgggggtggggcctccactagaggccagcacacaccgcaaagcagcaagctctgctgtccaattcaacattagccacttccctagcgttcctrcaagccacttagcaaaaaagaacatcatacggagtcctagccagaactag

SEQ ID NO: 610676 - DNA, 560 bp, Homo sapiens
gccagaactagccccctaccctgtgtttgcactaaatcttttgatgtgggtrtggggggactttgcttttagagagctctggtgaaagattcccctgaacagagtgaatgcttcattgctgagaactgttttttacttctagtggtaaaataaggactgttttattcttctggtggtagaataagttgttcttttctttcagagaagctgatgacttcaaagtcacttggcatagtgtccggtttcttctgtgatctatgggatggctgagtccacagtgggagtccagcagcagtaccttttgcactgaattcctgattgattctgttgaactcctatcaggtaccaggagaagttcctggattggggaatggctgggaaggtgctttatctttgcctatttccaggatatgtgaccactttaaaagccatcccttcagcacttgaggacctaatcagcgatctcaattttgcttttttgatatggtctctgagtcttaggtgttaaacgcagtgaaagcttggaaatgttctcctgctgtagtgagccgtcagctgcc

SEQ ID NO: 610677 - DNA, 597 bp, Homo sapiens
tgggaggaacatgctatccaatccygacttcaggtcaaaaagaccactgaatcacaaaaatatttcttaaagcgaagaatacatcaaccaaaagtgggtaagggattttattacagttcatcatttatggtctcttttaacagagtttattgccatcagggattcagcagaccaagaccacacatcatgtgaggggctccaaagaagctcttgaaattagctcgtggagaaattttgcttgaacagcaggttccaagcaaactgtgacacagagaaaatttgtctttacccagctcttttcccttcttctggttccccagatctctcagattgtaattaagagattaaaagtgttccattcacctccttttaaagactaccaactgcctgaacacctttgattactaatccacgtcacagtatattataatctacatgctcgtgtggttatagctcttataaaaccctgggcttctggaggtcaggcaagtgtatcctacttacccttacatctttgggcactgttacggtgttgcaatagtcagcactcaataaatgttgaatacatacgtaaataaaaaacatatagattttcta

SEQ ID NO: 610678 - DNA, 500 bp, Homo sapiens
atttcttaaagcgaagaatacatcaaccaaaagtgggtaagggattttattacagttcatcatttatggtctsttttaacagagtttattgccatcagggattcagcagaccaagaccacacatcatgtgaggggctccaaagaagctcttgaaattagctcgtggagaaattttgcttgaacagcaggttccaagcaaactgtgacacagagaaaatttgtctttacccagctcttttcccttcttctggttccccagatctctcagattgtaattaagagattaaaagtgttccattcacctccttttaaagactaccaactgcctgaacacctttgattactaatccacgtcacagtatattataatctacatgctcgtgtggttatagctcttataaaaccctgggcttctggaggtcaggcaagtgtatcctacttacccttacatctttgggcactgttacggtgttgcaatagtcagcactcaataaatgttg

SEQ ID NO: 610679 - DNA, 500 bp, Homo sapiens
atttcttaaagcgaagaatacatcaaccaaaagtgggtaagggattttattacagttcatcatttatggtctcttttaacagagtttattgccatcagggattcagcagaccaagaccacacatcatgtgaggggctccaaagaagctcttgaaattagctcgtggagaaattttgcttgaacagcaggttccaagcaaactgtgacacagagaaaatttgtctttacccagctcttttcccttcttctggttccccagatctctcagattgtaattaagagattaaaagtgttccattcacctccttttaaagactmccaactgcctgaacacctttgattactaatccacgtcacagtatattataatctacatgctcgtgtggttatagctcttataaaaccctgggcttctggaggtcaggcaagtgtatcctacttacccttacatctttgggcactgttacggtgttgcaatagtcagcactcaataaatgttg

SEQ ID NO: 610680 - DNA, 510 bp, Homo sapiens
ttcatagaataagaattccagagttaggcagcttctggggttggttggttggcttaatgataacagggcgagtttcttttcttttctttttttttttttgagacagagtctcactccttcacaaaggctgaagtgcaatggcaagatctcggctcactgcaacctctgcctcccaggttcaagagattcatgtggctcagcctcccgagtagctgggattacaggtgagtgccactacacctggctaatttttttgtatttttcgtagagaaagggttttgccatgttggccaggctggtctcgaactcctcrtctcaagtgatctgcccatcttggcctcccaaagtgctgggattacaggcatgagctaccatgcccagcctcagggtgagtttcattgcaattctcttggtcttttcctcatgcttgttgcttcattgttgtaagagggctgctgtccctccagccattaacattaagggcaggaaagaagaggaaggggagcagca

SEQ ID NO: 610681 - DNA, 588 bp, Homo sapiens
tgctaagcctttcaaaaggcctggccccatatttcccgcattggagaggcctgtggaccggtgcagcgaccgctgaggcctgcacatcattacaacccgagagaactccaactgtgcagaccccagctcccctgcggatctgattcacatttagtagttctggggcatggtctggggatgcgcatcaaaaaatttcctcgcagggatgccgacgattagtcagctttgggaacaaacccgcctcttgggcagagcaaaatttgagttggacagacctgacttcaaatcttggcttctccactttaagattaagtctgggccgggcgcagtggcccatgcctgtaatcccagcactttgggaggttgaggcaggtggatcatgaggtcaggagatcgagaccagcctggctaacacggtaaaaccccatctctactaaaaatacaaaaaattagccaggcgtggtggygggcacctgtagtcccagctactcaggaggctgaggcaggagaatggtgtgaacgtgggaggcggagcttgcagtgagccgagatcgcgccaccgcactccagcctgggtgacagaaggag

SEQ ID NO: 610682 - DNA, 539 bp, Homo sapiens
  misc_feature 526, 527, 528, 529, 530, 531, 532, 533, 534, 535, 536, 537,538, 539: n = A,T,C or G
atcagttcccctcccctcattcagactctccacctatcyatccttcacttcatgctaaaggcactgggctaatgccagagaagatcatgtgtaaaaaccaatcaggcagagaagaaaagccactggctgaaaagcagagaacccaggtaagccctgggaagtgctctgtgtcgccttttgaggcccagattactttttaagctgagttcccttcctaatgacagggtcggattccacttcttcaagaagaactggctggctagtactccaggctatctccttccctgtccagccagtcttcccaagcaatcttggaatgccacccacctggcactgctaaggctgggcccccttcctctcctccaggtgggaaggcacactcccccggaggggtggccacagcacccagggagtaggtgttaggcccggatccaggtccggcgtgtcccagtgcacctggactgcaggccctgagcatcctcctaagacctcaccggtcccacctagtatctactagtacctgccnnnnnnnnnnnnnn

SEQ ID NO: 610683 - DNA, 656 bp, Homo sapiens
tttccttctcttggctcaaagtgaacaggcttttaatcaatccagagatatttacctagatcttttcatttactgcactgcaagccctgtggcagaatgatatacaggaaaacctgaggctcattatgagaaaattgcataaggggcttctctcctgacttccacgtatggcccaggaatcttggttckgactgtcaggccagcgccacctgggccaggtatttatagatgacatccttagatggggaacacagagctagctgctataatagaaacccaaaataacagtgaatttaaggggggtagacatttatttctctctcaagcaatccagggtgtctccatgtcagactcccaggccccttctgtgttgttgctcctgcccacctagagtgttgccctccctgcatggcccatgatggcttcccactgtgttcacagtccaggcagcaggatggaagaaggggagtcaaagccaggttgcacccatctcttttccctctcagcccaacaaccagaactcagtccactgaaaggtaggaaatgcagtctttgttctgggcagccatgtgggagagtggatactggcagacaagtagcaggttctgacatgtggcctgtgtcttgggatttgattaagatgaaccaaagggcct

SEQ ID NO: 610684 - DNA, 656 bp, Homo sapiens
tttccttctcttggctcaaagtgaacaggcttttaatcaatccagagatatttacctagatcttttcatttactgcactgcaagccctgtggcagaatgatatacaggaaaacctgaggctcattatgagaaaattgcataaggggcttctctcctgacttccacgtatggcccaggaatcttggttcggactgtcaggccagckccacctgggccaggtatttatagatgacatccttagatggggaacacagagctagctgctataatagaaacccaaaataacagtgaatttaaggggggtagacatttatttctctctcaagcaatccagggtgtctccatgtcagactcccaggccccttctgtgttgttgctcctgcccacctagagtgttgccctccctgcatggcccatgatggcttcccactgtgttcacagtccaggcagcaggatggaagaaggggagtcaaagccaggttgcacccatctcttttccctctcagcccaacaaccagaactcagtccactgaaaggtaggaaatgcagtctttgttctgggcagccatgtgggagagtggatactggcagacaagtagcaggttctgacatgtggcctgtgtcttgggatttgattaagatgaaccaaagggcct

SEQ ID NO: 610685 - DNA, 500 bp, Homo sapiens
gttcatattaaagaaaattcaagttttacagccttagcttacacactaatcttcagaacaccatagccatttctttaatctgatggatgccctcgcatgatgcctgtcttctctgatcagaaatgacattcttaacatcaatagattcttagacttttctgacaggaaatatttttgaggatatgtaatcagttatggggtrtgcttgtcaatacatttttcctgcaaaaataaatcagaaatcctatcaaaatagcattatgaaagaatccatttcccttaatactcctcatgaaatggtcatgcctgaagtttctgagaatttttatttagatgaaggttgtgtatttaatttatatactggccatttttctaaccagccaatctgcataaatttcatatcctaagcaggaagaaaatggttgtgatctggagccagcctcttccttataaagcctgcatcaccttccttttcccttggctagcctcttctactttcc

SEQ ID NO: 610686 - DNA, 500 bp, Homo sapiens
gttcatattaaagaaaattcaagttttacagccttagcttacacactaatcttcagaacaccatagccatttctttaatctgatggatgccctcgcatgatgcctgtcttctctgatcagaaatgacattcttaacatcaatagattcttagacttttctgacaggaaatatttttgaggatatgtaatcagttatggggtatgcttgtcaatacatttttcctgcaaaaataaatcagaaatcctatcaaaatagcattatgaaagaatccatttcccttaatactcctcatgaaatggtcatgcctgaagtttctgagaatttttatttagatgaaggttgtgtatttaatttatatactggccatttttctaaccagccaatctgcataaatttcatatcctaagcaggaagaaaatggttgtgatctggagccagcctcttccttataaagcctgcatcaccttccttttmccttggctagcctcttctactttcc

SEQ ID NO: 610687 - DNA, 560 bp, Homo sapiens
tgattatgcagctattcatttcatatttttcccccaaaatcaaagccataatgagaaaaaagttctcgtaatcatttctgtgtattttggtaacaaaggaaatggctgttgatgatgataataaaaaaactgctcttcaaaaactggcaccctttgttgccatttataaacgaagcctggtattgtgggctcattagcagctgaactttattttgtcaaaggaaatggagtcaagagagattatgtttcatctttaatatggctgttcaacaacaatgccattatcctgagtttcagatgaatttaattggaccttaatgagcaaaattagttgttttatgcaattagaattccatttaaatgggttagaaaatgaataggattgtgaatgtggttgacttgattttcctcaagactgactctctaggctctttttgcccctaggttttctttccccactgaataatattttcctaatttaagaagatttctgacttcctcagttttcctaccaatstatagaaaatgcctgggacctctaagaaggtaggaggcagatg

SEQ ID NO: 610688 - DNA, 440 bp, Homo sapiens
cacattctgctttagcctctattgactacccttggattacattcctactccaggccattttctgggctaggggcttggggtcttgtgttaagagcaagatgacttatgtggaagagacaccttaaaagaggactctggaagtggtagctaccctgggcgtgttagtcttttttcacgctgctgataaagtcayacccaagactggacaatttccaaaagaaagaggtttaatggacttacagttccacatggctggggaagcctcacaatcatggtggaaggcaaggaggagcaagtcacgtcttacacggatggcagcaggcaaagagagagcttgtgcagggaaactcccctgtattaaaccatcagatctcatgagacttattcactatcatgagaacagcatgagaaagacccacccccatgattcgattacctcc

SEQ ID NO: 610689 - DNA, 440 bp, Homo sapiens
cacattctgctttagcctctattgactacccttggattacattcctactccaggccattttctgggctaggggcttggggtcttgtgttaagagcaagatgacttatgtggaagagacaccttaaaagaggactctggaagtggtagctaccctgggcgtgttagtcttttttcacgctgctgataaagtcacacccaagactggacaatttccaaaagaaagaggtttaatggacttacagttccacatggctggggaagcctcacaatcatggtggaaggcaaggaggagcaagtcacgtcttacayggatggcagcaggcaaagagagagcttgtgcagggaaactcccctgtattaaaccatcagatctcatgagacttattcactatcatgagaacagcatgagaaagacccacccccatgattcgattacctcc

SEQ ID NO: 610690 - DNA, 608 bp, Homo sapiens
gtttatctccatcacaatatttcctgttttgcagtataactggtgattaactttaattacaatcatgactactctatagcagaggccaaaatgatgattacacatcatgtttcataatatttttcagttagatgaagcttcagtgcagctaccctgctaaaataactaatttgcatatcattatrtagagttcaaatgaacttattttatccactcccacccattagtcatcttattgcagtttagaaaatatattgactctggaccatgagtctgtaggtgaaggtaacagttataatgatgaaaaaaaattttctcaggtcattctgtatttttcctgatttaattgattatatcactcataggccatcaaggcaccactagaaacttttctattaaacatagtactggaagttccagccagggcaatcagtcaagagaaagaaataaagggtattcaaataggaagagaggaagtcaaattgtctctgtttgcagatgacgtgattgtatatttagaaaaccccatcgtctcagtccaatatctccttaagctgataagcaacttcagaaaagtctcaggatacaaaatcaatgtgcaaaaatca

SEQ ID NO: 610691 - DNA, 608 bp, Homo sapiens
gtttatctccatcacaatatttcctgttttgcagtataactggtgattaactttaattacaatcatgactactctatagcagaggccaaaatgatgattacacatcatgtttcataatatttttcagttagatgaagcttcagtgcagctaccctgctaaaataactaatttgcatatcattatatagagttcaaatgaacttattttatccactcccacccattagtcatcttattgcagtttagaaaatatattgactctggaccatgagtctgtaggtgaaggtaacagttataatgatgaaaaaaaattttctcaggtcattctgtatttttcctgatttaattgattatatcactcataggccatcaaggcaccactagaaacttttctattaaacatagtactggaagttccagccagggcaatcagtcaagagaaagaaataaagggtattcaaataggaagagaggaagtcaaattgtctctgtttgmagatgacgtgattgtatatttagaaaaccccatcgtctcagtccaatatctccttaagctgataagcaacttcagaaaagtctcaggatacaaaatcaatgtgcaaaaatca

SEQ ID NO: 610692 - DNA, 606 bp, Homo sapiens
ttctcaacacaaagaaataaatgatgtgctaattaccctaatctgattactgcacattgtatgtactgaaayattatgtaccccatgaatatgtactattattatttgtcaattaacataaatttcaaaaaatatcacaaaaactaatgattctttatcacagtaaattaaaccaataaaactgaagaagaatcaacattttacaatattcaactttactattcaggaacatggtatgttttcctacagttgaagtaacagacataaaagatgggttgaataattaattttctttacctggattatccacatttcttcttagcattatttatatgtcttataatttttacagtttttataaatgaaattttggtcatatattacaaactttattctaagacatagaaaagttattgattcctacatatattttatagatttcattcatagttcattttgtattaagtatacttggtttttgtctcaagttcttggatatataatcatgatagttgctgagtgatgaaattgtataatttgtccagtatttgtgatttattacttaatccactattagctaatgtttctcttgttttcctatttgac

SEQ ID NO: 610693 - DNA, 606 bp, Homo sapiens
ttctcaacacaaagaaataaatgatgtgctaattaccctaatctgattactgcacattgtatgtactgaaacattatgtaccccatgaatatgtactattattatttgtcaattaacataaatttcaaaaaatatcacaaaaactaatgattctttatcacagtaaattaaaccaataaaactgaagaagaatcaacattttacaatattcaactttactattcaggaacatggtatgttttcctacagttgaagtaacagacataaaagatgggttgaataattaattttctttacctggattatccacatttcttcttagcattatttatatgtcttataatttttacagtttttataaatgaaattttggtcatatattacaaactttattctaagacatagaaaagttattkattcctacatatattttatagatttcattcatagttcattttgtattaagtatacttggtttttgtctcaagttcttggatatataatcatgatagttgctgagtgatgaaattgtataatttgtccagtatttgtgatttattacttaatccactattagctaatgtttctcttgttttcctatttgac

SEQ ID NO: 610694 - DNA, 512 bp, Homo sapiens
ttcgatttcggaacttgttgttggtctattcttggtttcaatttcttccttgttcaatcttgggayattgtatgtttccaggaatttgttcatttcttctagcttttctaatttgtttgcacgtaggtgtttatactagtctttgagggttttctttaatatatttatgtggcattgataataatgtcccctttatcatttctgattgtttatttggatcttctcttttttttttcttttttagtccagctagcagtctatcaattttattttttctttattcattcaaagaactgacttttggttttttattctatttattatttatttattcttttatttatttttattttatttattctttcaaagaacttttagtttcatccaccttttgtatgcctttttgcatctcaatttcattcacatcagctataattttggttatgtattgttttctactagttttgaggctggtttgctcttgtttttctccttcctctaggtgtgatgct

SEQ ID NO: 610695 - DNA, 512 bp, Homo sapiens
ttcgatttcggaacttgttgttggtctattcttggtttcaatttcttccttgttcaatcttgggacattgtatgtttccaggaatttgttcatttcttctagcttttctaatttgtttgcaygtaggtgtttatactagtctttgagggttttctttaatatatttatgtggcattgataataatgtcccctttatcatttctgattgtttatttggatcttctcttttttttttcttttttagtccagctagcagtctatcaattttattttttctttattcattcaaagaactgacttttggttttttattctatttattatttatttattcttttatttatttttattttatttattctttcaaagaacttttagtttcatccaccttttgtatgcctttttgcatctcaatttcattcacatcagctataattttggttatgtattgttttctactagttttgaggctggtttgctcttgtttttctccttcctctaggtgtgatgct

SEQ ID NO: 610696 - DNA, 627 bp, Homo sapiens
gaccttcatatactgtgtataggaagatacagccatctctgtgaagcatccctcaaagatatttctatatgaaaccgcaggtttagagccttggctcaggaggtaatataaacctgaggttagatctcggctctgctactggccaacaaaatgacctcagtcagttgcccaacttttctaagactcagttcagagtctttttgtaaaagttcaataggatcatatgttaaactcagcatagtactacactaatagcacatattcaataaattataatagttattactgggttcacttaaatcttttttaaattttactttaagttctggggtacatgtgcagaatgtgcaggtttgttacataggtatacacatgccatggtggtttgctgcacccatcaacccgtcacctacattaggtatttctcctaatgctatcgctctcctacctccccaccycctgacaggccaccatgtgtgatgttcccccgccccatgtccatgtgttctcattgttcaactcccgcttatgagtgagaacatgtggtgtttggttttctgttcttgtgatagtttgctgagaatgatggtttccagcttcatccgtgtccctgcaaaggacataaag

SEQ ID NO: 610697 - DNA, 604 bp, Homo sapiens
aacttaccctactagatagtataataaaatgtgtgttaagttgcagtgattaaaacactgtgatatagtgaatgaaaagaaggatttataaaatcacatagagcctgaaattaccttacatatatttgagattaggatatagatagttttaactaaaaagctttctgcatagtaaaataaataattaactgaatgaacagaaactgaatgaacagaaattctcctatagaacgggagaaaatatttgcaaactatgcatgtgacagggaattaatatccaaaatttgtaaggaactaaacaacaacaaaaaagacaaataatcccattaaaaagtgggcaaggaacatgaatagacatttttcaaaagaagacatgaaaatggttagcagaaatatgaaaaaatgctcaacatcactattcatcagagaactgcaaattaaaaccacaatgagacatcatcttacacaagtcagartgtctattattaaaaggaaaaaatttaacagatattgtcaaagatgtggagaaaagggaactcttatacactgttggtgggaatataaattagtacaacctctacggtaaacagtatggagatttctc

SEQ ID NO: 610698 - DNA, 561 bp, Homo sapiens
gaataacactcccttcacttcaatcttccagtgtgaactgtggawagctacatggtgactctgggcatcttccacctcttcatgcctatagccaggcaggagccccaagaatctggcttctttgagagagatgagctattggtttcatcttttagatatcagggactcaggggtcccatggatactcacacctaatcagagagcctgatgacatcaaggagttcatcaattgtgtgatgatttttcttttgtaaatttttttcagagagtttcaggttaagtataagccattcagaataattttttgtgtatatatttctcccatcacatatgcaaagctgcttaaaaaatcactattggttactttcttcttcagaagtcttcattagcataacatgaaaaggacatgcacatagcctgattatatgttcatatgaaaagtcactcaaggaaattaggaacagattttattgacagggatagataataataacacctgagcctctcccacaagtcctagcggccactggtcaaatgtaccaattgttactagcagtcatt

SEQ ID NO: 610699 - DNA, 561 bp, Homo sapiens
gaataacactcccttcacttcaatcttccagtgtgaactgtggatagctacatggtgactctgggcatcttccacctcttcatgcctatagccaggcaggagccccaagaatctggcttctttgagagagatgagctattggtttcatcttttagatatcagggactcaggggtcccatggatactcacacctaatcagagagcctgatgacatcaaggagttcatcaaytgtgtgatgatttttcttttgtaaatttttttcagagagtttcaggttaagtataagccattcagaataattttttgtgtatatatttctcccatcacatatgcaaagctgcttaaaaaatcactattggttactttcttcttcagaagtcttcattagcataacatgaaaaggacatgcacatagcctgattatatgttcatatgaaaagtcactcaaggaaattaggaacagattttattgacagggatagataataataacacctgagcctctcccacaagtcctagcggccactggtcaaatgtaccaattgttactagcagtcatt

SEQ ID NO: 610700 - DNA, 561 bp, Homo sapiens
gaataacactcccttcacttcaatcttccagtgtgaactgtggatagctacatggtgactctgggcatcttccacctcttcatgcctatagccaggcaggagccccaagaatctggcttctttgagagagatgagctattggtttcatcttttagatatcagggactcaggggtcccatggatactcacacctaatcagagagcctgatgacatcaaggagttcatcaattgtgtgaygatttttcttttgtaaatttttttcagagagtttcaggttaagtataagccattcagaataattttttgtgtatatatttctcccatcacatatgcaaagctgcttaaaaaatcactattggttactttcttcttcagaagtcttcattagcataacatgaaaaggacatgcacatagcctgattatatgttcatatgaaaagtcactcaaggaaattaggaacagattttattgacagggatagataataataacacctgagcctctcccacaagtcctagcggccactggtcaaatgtaccaattgttactagcagtcatt

SEQ ID NO: 610701 - DNA, 527 bp, Homo sapiens
agaataattttttgtgtatatatttctcccatcacatatgcaaagctgcttaaaaaatcactattggttactttcttcttcagaagtcttcattagcataacatgaaaaggacatgcacatagcctgattatatgttcatatgaaaagtcactcraggaaattaggaacagattttattgacagggatagataataataacacctgagcctctcccacaagtcctagcggccactggtcaaatgtaccaattgttactagcagtcatttgactttcgacattcatttatttcagtatagaaatctttgaaggaagatctccaagcatgccttactgacattctgaaaagtgttgcagcttaaaccattatctaataccttattcatttttagttaggttagtggcaaaaatgatacactagattagaagaagtagaaggatgataaaggacaggccagtttaagaaaggctttattgatagacaaaagtagaagagaccaaatctaagcactgtctgtttcaaaaat

SEQ ID NO: 610702 - DNA, 527 bp, Homo sapiens
agaataattttttgtgtatatatttctcccatcacatatgcaaagctgcttaaaaaatcactattggttactttcttcttcagaagtcttcattagcataacatgaaaaggacatgcacatagcctgattatatgttcatatgaaaagtcactcaaggaaattaggaacagattttattgacagggatagataataataacacctgagcctctcccacaagtcctagcggccactggtcaaatgtaccaattgttactagcagtcatttgactttcgacattcatttatttcagtatagaaatctttgaaggaagatctccaagcatgccttactgacattctgaaaagtgttgcagcttaaaccattatctaataccttattcatttttagttaggttagtggcaaaaatgatacactagattagaagaagtagaaggaygataaaggacaggccagtttaagaaaggctttattgatagacaaaagtagaagagaccaaatctaagcactgtctgtttcaaaaat

SEQ ID NO: 610703 - DNA, 344 bp, Homo sapiens
ataaccttgtttgggttgggggaagcaaataggggcacgaagtcagcttatttctaaatacaaagttaagtatatgagatttttcatcaagaaaaaagtccattaaactcatcytaggaattcacgagtgaaagctttttcctatatcaaaggaatgtatccctcactccacaattgcacccctagaaaacctatttcatggcataatttttgttctattactggaatgaaataaaatcatggaaataaaaccaatctcagataattattttctgaatatgcggagacatttcaggacaaccagtaactaagcaatgcctaaaaatagcaaaagatcattaagg

SEQ ID NO: 610704 - DNA, 410 bp, Homo sapiens
tcttttgtgccaataaaaatgttctgaaattgactgtggtgatggctgcataactttgtgaatatactcagaacccatgaattgtaaattttctatgggtgaatcatagggaatgcaaattatatcttaataaagctgctatatttttaaaaaactactcaaagatcacccagaaggcttcaagcagcagcttcgtgggctgtgctctgcacaggaggtggaatgacagcacgagacatggagtcggccagacctgaggtcttgatgggctctaccactgaccaggtggtgtgacactggccacagaacttaacccctcccatggggctggggtcctcaagtcaggaaaacagcaactctctcccaggctggstgcgagctttaaatacgataattcccgtaaagccctg

SEQ ID NO: 610705 - DNA, 397 bp, Homo sapiens
gaattctcggcctcaagtgatctgcctgcctcggcctcccaaagtgctgggattatgggcatgagccamcatgcccagccaggcttaagtacattttgaacagctagtttaatctgcagatgtggaactgtacatccatctctgtgtttacgaactcttacctatgtgtacagtcccttattcacaactttgaaatccaaaacggtctctaaaaactcagagaaagttttaaaaacttttccagcaacaaaacctgaactgagatcaaggtctgatcagaacttatctgaagctactgatagtctttatcttcctcctttcatgtgaatgctcatacatttcactgcagaaagatgagtgtttgagcatgcggtgctgtcctagatcctcctggggc

SEQ ID NO: 610706 - DNA, 396 bp, Homo sapiens
gaattctcggcctcaagtgatctgcctgcctcggcctcccaaagtgctgggattatgggcatgagccaccatgcccagccaggcttaagtacattttgaacagctagtttaatctgcagatgtggaactgtacatccatctctgtgtttaygaactcttacctatgtgtacagtcccttattcacaactttgaaatccaaaacggtctctaaaaactcagagaaagttttaaaaacttttccagcaacaaaacctgaactgagatcaaggtctgatcagaacttatctgaagctactgatagtctttatcttcctcctttcatgtgaatgctcatacatttcactgcagaaagatgagtgtttgagcatgcggtgctgtcctagatcctcctgggg

SEQ ID NO: 610707 - DNA, 397 bp, Homo sapiens
gaattctcggcctcaagtgatctgcctgcctcggcctcccaaagtgctgggattatgggcatgagccaccatgcccagccaggcttaagtacattttgaacagctagtttaatctgcagatgtggaactgtacatccatctctgtgtttacgaactcttacctatgtgtacagtcccttattcacaactttgaaatccaaaacggtctctaaaaactcagagaaagttttaaaaacttttccagcaacaaaacctgaactgagatcaaggtctgatcagaacttatctgaagctactkatagtctttatcttcctcctttcatgtgaatgctcatacatttcactgcagaaagatgagtgtttgagcatgcggtgctgtcctagatcctcctggggc

SEQ ID NO: 610708 - DNA, 397 bp, Homo sapiens
gaattctcggcctcaagtgatctgcctgcctcggcctcccaaagtgctgggattatgggcatgagccaccatgcccagccaggcttaagtacattttgaacagctagtttaatctgcagatgtggaactgtacatccatctctgtgtttacgaactcttacctatgtgtacagtcccttattcacaactttgaaatccaaaacggtctctaaaaactcagagaaagttttaaaaacttttccagcaacaaaacctgaactgagatcaaggtctgatcagaacttatctgaagctactgayagtctttatcttcctcctttcatgtgaatgctcatacatttcactgcagaaagatgagtgtttgagcatgcggtgctgtcctagatcctcctggggc

SEQ ID NO: 610709 - DNA, 397 bp, Homo sapiens
gaattctcggcctcaagtgatctgcctgcctcggcctcccaaagtgctgggattatgggcatgagccaccatgcccagccaggcttaagtacattttgaacagctagtttaatctgcagatgtggaactgtacatccatctctgtgtttacgaactcttacctatgtgtacagtcccttattcacaactttgaaatccaaaacggtctctaaaaactcagagaaagttttaaaaacttttccagcaacaaaacctgaactgagatcaaggtctgatcagaacttatctgaagctactgatagtctttatcttcctcctttcatgtgaatgctcatacatttcactgcagaaagatgagtgtttgagcatgcrgtgctgtcctagatcctcctggggc

SEQ ID NO: 610710 - DNA, 620 bp, Homo sapiens
tacaggggctcgtatcagctttgggggcattatcatccccattttgcaggagatgaaataaatcacatctctgtggatctatttctgggtcaaaaatgtatgtttttaatattgatagagcttctctcttccaaaatagttggcaaattacaaagggaaaaacagttctattacatgaagaattctggcagatgccaccttagccacatgttcaagcttggtatccctgataatgaggcacatygacatcacataccccctgatatggtgcactaggagggcacggcacctctacagcctcctgccagggatacataacctcaatcttatcaggagaaaattcagaggaagtcaacgcgtcagacattctataaaacacttggccagcacggttaaaaagatattaccaaggttaatctcttaattttgataaattctatggttaaggggaaacagggtaaagggtatataggaactatatgtactattttccaacccttccttaagtctaaactatataaaaaattatttgatagatcttaaccatatccaaaacaggtccaacctgtcaaatgcatgagccccttgaaccttctagttaaatattaatattttaaaaa

SEQ ID NO: 610711 - DNA, 535 bp, Homo sapiens
tcctgcaaagactggatcaattcaaagtcaagtctatgaggaattatctttatcacaatacagagggatccgtctgccccttctcctgaccccaaagaacgaggcatgcagccaaatagcagttccctaagaggacctgcaattcttccttcaggagacttgacagtagcaaagccaccatgagcccaaggatcttggtgggacttcctacctggcccaggagcgatcacctgccaggggtcaaccaaaatttaacaaaaaggactaacagcaagactccctccttccatatagcacttcaaggtccacaaaaccctttgcattatttggttcttgtaaccacctgattgcagacagagccggcaactccatttaagtggggaaacgggaaactcaaaattgaagggccttgccaaagtcacagagtgagcggtcggcacagttactatgtctccacttcctaccctratggcctttccaactctaacgtcacttcttgtatttcttggtgttacagcacataaaaccctattaa

SEQ ID NO: 610712 - DNA, 547 bp, Homo sapiens
tctggcctgagagcctgtgcaagctttgagtgtatcaacaagtaaagaacaccccctttcactttcctttaatctcagaaacttcatttcaacatctgtctttcaactaagccatcatataggcaggcatcagggtagcagaatccccccagccccagggattttcctaaagcttgtctctccccagtgctctcaggcataccgcagtcaaaccagacatcatccccattgtcrgggttctacagaaatagatatcccacaaagggcagtatcttgcctgagaatttgttttctcttgctgataattcctctccataaacatttttgagaaagatgaataggtgtacctttctggaacagtgaatggatgctggggggtgaaatgactctgcatggcatgttttatggatgaggggagggtcctgaggactgcctttcatgtcctcagcctctgacttggttgcagattgcccagcctactcttctgtaggtgaaggtttagcagctgcttctctcactgctgataacctctggaaggcccagcctg

SEQ ID NO: 610713 - DNA, 490 bp, Homo sapiens
gcttatgtcttcaacctattctttttatttataaagttgtggtttaaaaaaccccacataacataaaattgaccatcttaccatgtttcttttcattttttttttttgagaagggatctctctgtcactcaggctggarggcagtggtgacctcagctctttgtgacctctgcctcccaggctcaagcagtcatccacctcagcctcctgagtagctgggaccagaggcctgtgccaccacgcccagctaaattcttgtatttttggtagagacagggttttgccatattggccaggctggtctcaaacacctggactcaagcaatccacctgccttggcctcccaaagtgctgggattataggcgtgagaaaccgtgcccggctgttttaacatttttatgtgtacagttcagtcatgttaaatatactcacattgttgtgaagcagcactccagaaggcttttgtcttgcaaaactgaaacctatacc

SEQ ID NO: 610714 - DNA, 541 bp, Homo sapiens
tggctggtcaacttactccaggccttggatcggggtaggaaatgggggaagcatgcttgactttcagggctgttagggatgacataacatatgcaaagctcaggactctgtaaygtggagagacattgagggcttcctagcggcttagcctcactctaggctctgtttgggaggaggggacgggggctaggagcctggaacatggccctggagggttcctatacaggcagattatcattccaacagttggcccccaggcacctcctgccccaacttaacacacacttcctctctacctgcatcctgctgccaacctaggtggcctcagtgtcccctggacttaacacttcacttcagccttacagtccaggatcacctttgataacaatcgcagcagataatgttaatggagcacttgtctcgcgccaggccctgttcttagttctccatacgtgtcatcttgtttgatgctcccaatagctcttcagagggagcctcgctctgtcacccaggctggagtgaagtggtgcaatctcggctt

SEQ ID NO: 610715 - DNA, 495 bp, Homo sapiens
ggtttcgccatgttgccgaggttggtcttgagctcctgagctcaggtgacctgccctccgcagcctcccaaagtgctaggatcacaggtgtgagccactgcacccagccagagcaccattcttctagtcatcttacgcatgagcgaggactcacgatttgcccaaactcatgcaggtgaggagagctggaatttggtgcaagtaccatagtgcctgaaccaacaccacctgaggcctccccacctctgaaacctcagctgccacagcccactccttggccacagggtccctctgcacctcatagagacctttaggtcttttttgtagcttccccccatttcactcagtcactyagcccctcctgccttcactttacctgcctaaatccttagacccatactagcaacctcaccagtgctctgaagccccagggctattaccagatctagtgaaaaccctgtttccctacctggaaggagaagcaaaactgctcat

SEQ ID NO: 610716 - DNA, 511 bp, Homo sapiens
tggagcctgaggcttctgcactagctaggggttttccaatgtgctccgggctgactcttgcccattctcttatcttgtctcatcttgtctcatctcattaaggatgaggggctagagagagagcactgagatgggatcttgaaattgacttctgaacagctcttggcttgtacagtgagagaaacacttccccsaccccctcacccaagcccagaagtgaaaaccacccctggcctccattccagttacccctccttgctggccaggctgtctctgtggggtcccaggaaaaagtcgtgggcaggggacaagtgaggaataggaatgggccactcctttggggaggaaactccactgggcttgagctcctggaaccaaggaggacagactggcagctgcctgttgggataggttcttcggaatttcatggagttctttagaatggaaggcagagggaggaaagcatctgagattgggtccagggaagaaggagcaggggcaatggcaaagg

SEQ ID NO: 610717 - DNA, 511 bp, Homo sapiens
tggagcctgaggcttctgcactagctaggggttttccaatgtgctccgggctgactcttgcccattctcttatcttgtctcatcttgtctcatctcattaaggatgaggggctagagagagagcactgagatgggatcttgaaattgacttctgaacagctcttggcttgtacagtgagagaaacacttcccccrccccctcacccaagcccagaagtgaaaaccacccctggcctccattccagttacccctccttgctggccaggctgtctctgtggggtcccaggaaaaagtcgtgggcaggggacaagtgaggaataggaatgggccactcctttggggaggaaactccactgggcttgagctcctggaaccaaggaggacagactggcagctgcctgttgggataggttcttcggaatttcatggagttctttagaatggaaggcagagggaggaaagcatctgagattgggtccagggaagaaggagcaggggcaatggcaaagg

SEQ ID NO: 610718 - DNA, 566 bp, Homo sapiens
gtggaaagtccaggggttggttggttctgatgttaggcatggctggacctaggggttcagtgatgtttaatgatgtcagttatagcctgtctgtccatctctctgtctctccgcatctcagttctgctgggctgtatttggcttcattctgcatgtaggttctctccaccagataaggcttmgtgtctccaggggaaagaggctaatttctgccagcagcagagttctgggggaactctgattggcctggatcaagaatgaataagagtgccccagtcctaaagttagaggacagggccattgtgattggcagttcccctgtgaccatgtggaattgagaatgagcaattccccaaagcagaagtgaggtgtcattcctaggaatgtatgctggatcaagaaacagtacagcatccacaggctgtgtcagggtgtcttcactacacaagtgaggattctgcagcacaaatagatgagatcatctagggagactgtatatagataagagagagaagggctagagcttaatctgccagagttcagggaggagactggccaggaagagg

SEQ ID NO: 610719 - DNA, 566 bp, Homo sapiens
gtggaaagtccaggggttggttggttctgatgttaggcatggctggacctaggggttcagtgatgtttaatgatgtcagttatagcctgtctgtccatctctctgtctctccgcatctcagttctgctgggctgtatttggcttcattctgcatgtaggttctctccaccagataaggcttagtgtctccaggggaaagaggctaatttctgccagcagcagagttctgggggaactctgattggcctggatcaagaatgaataagagtgccccagtcctaaagttagaggacagggccattgtgattggcagttcccctgtkaccatgtggaattgagaatgagcaattccccaaagcagaagtgaggtgtcattcctaggaatgtatgctggatcaagaaacagtacagcatccacaggctgtgtcagggtgtcttcactacacaagtgaggattctgcagcacaaatagatgagatcatctagggagactgtatatagataagagagagaagggctagagcttaatctgccagagttcagggaggagactggccaggaagagg

SEQ ID NO: 610720 - DNA, 566 bp, Homo sapiens
gtggaaagtccaggggttggttggttctgatgttaggcatggctggacctaggggttcagtgatgtttaatgatgtcagttatagcctgtctgtccatctctctgtctctccgcatctcagttctgctgggctgtatttggcttcattctgcatgtaggttctctccaccagataaggcttagtgtctccaggggaaagaggctaatttctgccagcagcagagttctgggggaactctgattggcctggatcaagaatgaataagagtgccccagtcctaaagttagaggacagggccattgtgattggcagttcccctgtgaccawgtggaattgagaatgagcaattccccaaagcagaagtgaggtgtcattcctaggaatgtatgctggatcaagaaacagtacagcatccacaggctgtgtcagggtgtcttcactacacaagtgaggattctgcagcacaaatagatgagatcatctagggagactgtatatagataagagagagaagggctagagcttaatctgccagagttcagggaggagactggccaggaagagg

SEQ ID NO: 610721 - DNA, 590 bp, Homo sapiens
ctaggtaatgatgtgggttgcagatatgagggaggtgggaaagaatttatgagtcaggatggaaattcctgggtagcatagagaacatggagggctcagggttctccacctctcagcttccaaatggagccctctgggtgacccggacagcagtggctgggtttcagaatgccgacctggatgttatcatttctgccatgtgctgcagacttgaaaacagattggaccgaggaaggattttgcttaagctttgggtgagcagttactgagcacygtccccttctttatccagacagccatttagtttcaccattgttaaacaatctctgttatttaatttgatatctagattcattggtattaaactttctatttcttttattactaattttcatagatttctttgatcacttcatatatatatgtatacacatatgtatatatatacacacgtgtatatatatatacatgtgtagtatcgattcctactattttattactgttcataccttcatttctgtgtgtgtgtgtgtgtgtgtgtctgtgtgtgtgtatattcacctcttttggggggaattgactgttcatat

SEQ ID NO: 610722 - DNA, 614 bp, Homo sapiens
ccagaggaggtgagctgctgctaagtggctgaacaggtgtagcagctgatctttcatccccagcatcatcatggatacctgatttccaagtacagcatctgcatctctctgcccaaggacttatcctgcctgccagagtctatggcaggtcacaagcattggakaatttgtcctccctgcagtctcctgccaatgactggctgaggttggtgtgcacataccccagctccttgctcctggaaggtgggaggtggagcactcagaggcatgagtttggcaccagctcctagagttccccagtgggttaaagctttacagtctaccttttgctggctgactcacttccctgctccacatcccactctccaataggagttttctggggtcatctcccaaataaatgcttacacctgaatccttgtctcatagtcagcatttggggtaacccaaaccaagatagtaggcaatggaccaaaatggccaggggtgaggtggaggcacaccagatctggggatcaaaggcaggcaccactgggctgagagagggagattttgagtctgtggtgtgagctgagggggttttggccccttcctttgtactttgattttatggc

SEQ ID NO: 610723 - DNA, 422 bp, Homo sapiens
gagatcctttgccactagaaactctatagtcctcctgagatttttatggtaccctgaagcataggactggggataggggagccagtgttgaaggggttgctccaaccttataaaactgcatccctccctctcactttcacaggctgctcagtgagagaggttctccacctctttccccagtggcatgtgaaaggttgggtgccatgggagaagcacagaatcacatcctgaagttcagcaatgcccacggtggggtaggtcttggggacagaaggacaaagctcagtcagtgtctaccttcmatgagtggataatctagggagaggtcagcaaccctctcctgtaaattaccatatagaaaatattttaggttcctgagggtcatacagtactcctggtttagtccagtgattctcaacata

SEQ ID NO: 610724 - DNA, 426 bp, Homo sapiens
ctttaaaaacccaagtcagatgcgtggctggcttctctgctcagaaccctctgctgcccccatctcatgcagggttagcgaggaaggcctcttcaatgcttgtgagttccracatcctctgccccacacctctcagccctcagctgccttcatacctcctcctcacctgctccgctcagtcatatagatctctgcattgctccctgaaccaccgaggcatgctactgcctcaggcttctgcactgttcttcttccctctgcctggaatgccgtccttggagagcggggtggttcatgccatcacaactcttagcaaggccctctctgagcacccacataaaaagcatcccaccccaaattcacgtttgccatcgcctctttattcctctttactttcctccacagtccccacccctgacgtaactg

SEQ ID NO: 610725 - DNA, 623 bp, Homo sapiens
tggcacaggctgctttattccttctgcatgaaaagccctcttccccactcccctgccttgggaattcccactcagccttctacactcagctcaagagtggccttctgctgaaggccctctttggcttcccagccaagttcaggccctcccaaccctstgcacacacttctggcattcctcgggttgtgatattgtctctctggttgtatctgtctccctgactagaccgggagaagctggtattcaactgcaaactgagaagcttcctttttggaaagttagccaccacttacttctctctgaattccctctgcctagcaggcagtttagaaactgtttgctggatgtttttttttttttttttttaaagttagacatgatattatttattctgtaactatggaaaaagtgttatttaactcaactctggatgctgacaaaatataaagtgttggtacacattagtatgtatttaaaacctgggaaaactgatgtcatgatgctcctgacttagttgtggtggaaacaacatttatttaattataataaaagaaacaagacttcagcagaaaatataactggatgagacctgtttggctgcacaaaaggagacctaccaaagt

SEQ ID NO: 610726 - DNA, 623 bp, Homo sapiens
tggcacaggctgctttattccttctgcatgaaaagccctcttccccactcccctgccttgggaattcccactcagccttctacactcagctcaagagtggccttctgctgaaggccctctttggcttcccagccaagttcaggccctcccaaccctgtgcacacacttctggcattcctcgggttgtgatattgtctctctggttgtatctgtctccctgactagaccgggagaagctggtattcaactgcaaactgagaagcttcctttttggaaagttagccaccacttacttctctctgaattccctctgcctagcaggcagtttagaaactgtttgctggatgtttttttttttttttttttaaagttagacatgatattatttattctgtaactatggaaaaagtgttatttaactcawctctggatgctgacaaaatataaagtgttggtacacattagtatgtatttaaaacctgggaaaactgatgtcatgatgctcctgacttagttgtggtggaaacaacatttatttaattataataaaagaaacaagacttcagcagaaaatataactggatgagacctgtttggctgcacaaaaggagacctaccaaagt

SEQ ID NO: 610727 - DNA, 509 bp, Homo sapiens
ctctcgcagctaaatcccttcacaggccccctctgtgcttagcctacaaggtcctccctgactcaggccctgcccaactcttaacctctcaatttcagccacaagggacttcacctgcagttccctgaagcacagggttcttctccagccaaccatggtgaccacccctccctcacaataatggccctgcctccaaggygcactcctcgatgccacaccccccaacctctcccttgcccttcatccctcctgtaaccctgtaacacgaggtctcatcatagcactcatcaccatcacgccactatggcctctgtcatagcattcgctgcagagggtccctgctccagcacccagcaggggaggacacagagaagacccgtaagaaatatctggtgatgaaaagagtcaagtcttaaatatcttgacatcctggctataaaacaaatcattccttagtgtttgaaacagtcttaactgtaactgggaaaaaatgtttactgaagttttga

SEQ ID NO: 610728 - DNA, 472 bp, Homo sapiens
acactctcgcagctaaatcccttcacaggccccctctgtgcttagcctacaaggtcctccctgactcaggccctgcccaactcttaacctctcaatttcagccacaagggacttcacctgcagttccctgaagcacagggttcttctccagccaaccatggtgaccacccctccctcacaataatggccctgcctccaaggtgcactcctcgatgccacaccccccaacctctcccttgmccttcatccctcctgtaaccctgtaacacgaggtctcatcatagcactcatcaccatcacgccactatggcctctgtcatagcattcgctgcagagggtccctgctccagcacccagcaggggaggacacagagaagacccgtaagaaatatctggtgatgaaaagagtcaagtcttaaatatcttgacatcctggctataaaacaaatcattccttagtgtttgaaacagt

SEQ ID NO: 610729 - DNA, 533 bp, Homo sapiens
tttctgttctatctcagcttctcaccttagaccaagagctcctcaagctgcyaggggcatggtgtctcctttgctgcacctccttccagtatctggaggaaggctgtgccacttgtacaggtccagaaaaatagtgccaccaccaacccaacagactcatcttcttcttcttcttcttcttcttttttttttttgagacagagactggctctatcacccaggctggagtgcagtggcacgatctccgcttactgcaagctcagcctcccaggttcatgccattctcctgcctcagcctcctgagtggctgggactacaggcccctgccacgacgcccggctaattttttttgtatttttttagcagagaccatgttagccaggatggtctcgatctcctgacctcgtgacgcacctgcctcagcctcccaaagtgctgggattacaggtgtgagccactgcgcctggcctttttttttttgagacagagtttcactcttgttgcccaggctagagtgcaatggggtgatgttg

SEQ ID NO: 610730 - DNA, 533 bp, Homo sapiens
tttctgttctatctcagcttctcaccttagaccaagagctcctcaagctgctaggggcatggtgtctcctttgctgcacctccttccagtatctggaggaaggctgtgccacttgtacaggtccagaaaaatagtgccaccaccaacccaacagactcatcttcttcttcttcttcttcttcttttttttttttgagacagagactggctctatcacccaggctggagtgcagtggcacgatctccgctyactgcaagctcagcctcccaggttcatgccattctcctgcctcagcctcctgagtggctgggactacaggcccctgccacgacgcccggctaattttttttgtatttttttagcagagaccatgttagccaggatggtctcgatctcctgacctcgtgacgcacctgcctcagcctcccaaagtgctgggattacaggtgtgagccactgcgcctggcctttttttttttgagacagagtttcactcttgttgcccaggctagagtgcaatggggtgatgttg

SEQ ID NO: 610731 - DNA, 603 bp, Homo sapiens
aaaaacttctgtcatccatgaccccttagttcattcctactttacccagcccgtcggcaaagtatatgcagaatctggccactactcaccccctccactgttaccatcctggaccaagactccttcatctcttgcctggattattgtgggagtctcttatccatcttccctgcttccatctcaccccagcagccagtgatcctgttaaaaatgggtgtgattatgtctttcctctcttcacatcccccctggaatcctgattttcctaacaggaaatgccaaaattcttacagtagcccgtaaggccttatatgacttggtccccttaaactcctaacctcctgttatgctgtcctctctctcctgctgcagccaggctgcctctttgctgttctttgaagcctctaggcacacttgtgccttccttcaggactttatttaaatgtcacatgctcagtgaggcctcccctgggcacagtgtctagaactgcggtcccygctcaacacttgccatccctcttcctcattttattttcccgataactctcttcctcatttcacctactgtatattttacatatatttcttgtttattctttgtct

SEQ ID NO: 610732 - DNA, 516 bp, Homo sapiens
ccaggctggagtgcaatggcatgatctcagctcaccacaacctctgcctcccaggttcaagcgattctcctgcctcagcctcctgagtagctgggattacaggcatgcaccaccacgctgggctamttttgtatttttagtggagacggggtttctccatgttggtcaggctggtctcgaactcccgacctcaggtgatcctcccacctcggcctcccaaagtgctgggattataggcataagccactgcgcccagctgactggcatttctttaatgatcaatgatattgaactctttttcatatgcttgttgactgcatgtatgtcttaagacatgtatgtatgtatgtatgtcagccaacaaacataaaaacaagcaatgtctcccattgtttgtttttgtcagctctgtcgaagatcaggtagttgtaggtatgcagcatggctgggatttgaactcagacctggctggctgggaagcccaggccagtcccaggaacatccttgccctgcatc

SEQ ID NO: 610733 - DNA, 535 bp, Homo sapiens
gtttccctttttgaaaaggttcttgaattcattgacagacctttggctaaactgatgaattaatttgttcgggccagatttcataaatcctctaataattcttccctttacacatattgacttgatttatcagatctacagcatgtggtttaaatgttttaaccattactgctttaatcaaataccatttatttcaaggttggatgatgactgaccattgaaagatatagctaactaataaagtccaatttgtcagttaagtaaacctgggtatctaaataataagtagaaattagtctatgtcactgaattttgaaatgtttggcagctttaatgtaactccttctctcccaggactttgtggaagataaatttctgagtattgctacaaagcttgggcatgcatgtagatgccatgcttagatgtagctaattgagcttggctatacacaagccagcttttaactatacaagtagatttgtttatggtgtgttagactctttttwaaattaatacacgaaagctaagtaccaa

SEQ ID NO: 610734 - DNA, 612 bp, Homo sapiens
ttcttaacatatcccaagctgttggtaatgccgaaagtcacagactataaaaatatatatatatatcccaagaaaagccttttccctttagccaaagaaccaggaaaggtgtagccttgaaaggcagaaaaatgtgacacaataaccactctactcctgccaaacaccaaggaacaatctgcagccccatccctaccttagtcagcaaaggctgaatgaggatgctagacttctacccttgcctggctataatgagacactaccactgattcttgctggggtggtgtcagagaagactgagtgaagagctagagctttcgttttcttcccaatgataacagggtctccctccatggtgtcaggggacgccaggtgggagcagtagtaaagcacttccctctcaggctatcagcagaggccaaagacrgaacctagctttccacccctacttggctggcatggtgtcaaagaggaggtgtactaaaatggaagatttaaatcacatgcagagtctcataacacaatactcaaaatgtccaagacacaatgatacaataaaaaatcacttataccaagaaccaggaaaattgcagcctgaataagaaaagactg

SEQ ID NO: 610735 - DNA, 276 bp, Homo sapiens
attaagatatacaaggtaaaaaaaaaaaaaaaaaaaaascaaaaccccaaaaggtgaacaagtattgatttcatgttcaatttatttaaagtctaatactacttgtcaatttggtcttccgaggaaatgcatcacatatttttagttgagcttcattttggaagtgactagagattgtgagttggggaaaataattaacttaccctgctaagctcacacatcaattaggtagcagagctgggaatagaaagcatagtctcctcttctagatgcact

SEQ ID NO: 610736 - DNA, 652 bp, Homo sapiens
ttggttctgccacttactagctgtgggaatttagacttatttagtctctgtgcctcagttttcttatctgtaaaatgtggataataatagtggtatctttatatggattgtcatgaagtacaaatgaggtgcttcatgtagaacatttaacatggtgcctggtacatagtaaatactacataaatgtttagcaacagaacttattaacctgaaagtgtgtatgtataagtgagggaaaaaaagcatgggttttgaggtcagattatattatgttcaaatgctracttatagccttattagcactgtacaaatagaaaaatgatacttcataggtttattgtaagaatgaaacgagacagtgcatggaaaatacccaacaagagattcactcagtagggctctaactaaccctattaggtttcattcttcttgctctatccatccctcttgtctatcaccctatattataaaacattgaatttcagagtctgacatgttcaaccagcacgtgttattatagaaacagtgtatgtgcctggtggaaagttagaaaacacaaataaaagaatgtaaatatcatatcccctaccttgggttacctatgttaatagaaaaacttatattccttactgtatctctttctatacatata

SEQ ID NO: 610737 - DNA, 591 bp, Homo sapiens
tcactcagtagggctctaactaaccctattaggtttcattcttcttgctctatccatccctcttgtctatcaccctatattataaaacattgaatttcagagtctgacatgttcaaccagcacgtgttattatagaaacagtgtatgtgcctggtggaaagttagaaaacacaaataaragaatgtaaatatcatatcccctaccttgggttacctatgttaatagaaaaacttatattccttactgtatctctttctatacatatacattatatgcatataattaaaatacataatataatatacataatatatatacatatataatttatttgcctgtgataataccaaagacatcaaaaagcacattgcttgtaacctgctttttcttttccatcaacaattgccaactaccaattaataaattttggccgggtgtggcgactcacacctgtaatcctagaactttgagtggctgaggtgggaggatcacttgaggccaggaattcaagaccagcctggataatagagcaaaaccctgtctctacaaaaaattttctttaatcaaccaggtgtagtggcatgttcctg

SEQ ID NO: 610738 - DNA, 591 bp, Homo sapiens
tcactcagtagggctctaactaaccctattaggtttcattcttcttgctctatccatccctcttgtctatcaccctatattataaaacattgaatttcagagtctgacatgttcaaccagcacgtgttattatagaaacagtgtatgtgcctggtggaaagttagaaaacacaaataaaagaatgtaaatatcatatcccctaccttgggttacctatgttaatagaaaaacttatattccttactgtatctctttctatacatatacattatatgcatataattaaaatacataatataatatacataatatatatacatatataatttatttgcctgtgataataccaaagacatcaaaaagcacattgcttgtaacctgctttttcttttccatcaacaattgccaactaccaattaataaattttggccgggygtggcgactcacacctgtaatcctagaactttgagtggctgaggtgggaggatcacttgaggccaggaattcaagaccagcctggataatagagcaaaaccctgtctctacaaaaaattttctttaatcaaccaggtgtagtggcatgttcctg

SEQ ID NO: 610739 - DNA, 591 bp, Homo sapiens
tcactcagtagggctctaactaaccctattaggtttcattcttcttgctctatccatccctcttgtctatcaccctatattataaaacattgaatttcagagtctgacatgttcaaccagcacgtgttattatagaaacagtgtatgtgcctggtggaaagttagaaaacacaaataaaagaatgtaaatatcatatcccctaccttgggttacctatgttaatagaaaaacttatattccttactgtatctctttctatacatatacattatatgcatataattaaaatacataatataatatacataatatatatacatatataatttatttgcctgtgataataccaaagacatcaaaaagcacattgcttgtaacctgctttttcttttccatcaacaattgccaactaccaattaataaattttggccgggtgtggcgactcacacctgtaatcctagarctttgagtggctgaggtgggaggatcacttgaggccaggaattcaagaccagcctggataatagagcaaaaccctgtctctacaaaaaattttctttaatcaaccaggtgtagtggcatgttcctg

SEQ ID NO: 610740 - DNA, 404 bp, Homo sapiens
caaattcctggcctgaagtgatccccctgcttcagcctcccaaagtgctgggattatgggyatgagccactgaacctggctacttttaatcttcttattagtatcttttaatgggcagaagttttaaattttgatgaagtccagtttatttttcttataattaatggattatatgattattatatatgtctttgtcaactacaagaaatttttgcttcctccaaggtcagagagatattttctccatattttcttctagagtcattgcagtttcaacttttacacttatgtctagaatgattttgaattaatttttgagcacggtataaggtaggggtcgaggttcacttatttcccttatccagtttttccaatcccatttttaaaaaagaattttctttccc

SEQ ID NO: 610741 - DNA, 373 bp, Homo sapiens
aaagtgctgggattatgggtatgagccactgaacctggctacttttaatcttcttattagtatcttttaatgrgcagaagttttaaattttgatgaagtccagtttatttttcttataattaatggattatatgattattatatatgtctttgtcaactacaagaaatttttgcttcctccaaggtcagagagatattttctccatattttcttctagagtcattgcagtttcaacttttacacttatgtctagaatgattttgaattaatttttgagcacggtataaggtaggggtcgaggttcacttatttcccttatccagtttttccaatcccatttttaaaaaagaattttctttcccctgaatagcc

SEQ ID NO: 610742 - DNA, 404 bp, Homo sapiens
caaattcctggcctgaagtgatccccctgcttcagcctcccaaagtgctgggattatgggtatgagccactgaacctggctacttttaatcttcttattagtatcttttaatgggcagaagttttaaattttgatgaagtcyagtttatttttcttataattaatggattatatgattattatatatgtctttgtcaactacaagaaatttttgcttcctccaaggtcagagagatattttctccatattttcttctagagtcattgcagtttcaacttttacacttatgtctagaatgattttgaattaatttttgagcacggtataaggtaggggtcgaggttcacttatttcccttatccagtttttccaatcccatttttaaaaaagaattttctttccc

SEQ ID NO: 610743 - DNA, 373 bp, Homo sapiens
aaagtgctgggattatgggtatgagccactgaacctggctacttttaatcttcttattagtatcttttaatgggcagaagttttaaattttgatgaagtccagtttatttttcttataattaatggattatatgattattatatatgtctttgtcaactacaagaaatttttgcttcctccaaggtcagagagatattttctccatattttcttctagagtcattgcagtttcaacttttacayttatgtctagaatgattttgaattaatttttgagcacggtataaggtaggggtcgaggttcacttatttcccttatccagtttttccaatcccatttttaaaaaagaattttctttcccctgaatagcc

SEQ ID NO: 610744 - DNA, 599 bp, Homo sapiens
gatctaaaaagtatgttttgactatgaaaaaggccatccaagatccaycacccataaacagggtggtgaatggattagtgctcatctaccctctatttgctcttatgccacccctatggttcaccatttatccactcaagaaatatttattaaggacctcctatgtcctagacatggtccccgtggcagtgctttcagtctaatgcggaagacaaagaataacaagtaagggaaacatacagaaacacaaattgtaacacaggctagtggaaatgaacttggtgcagtactcattggtgggcatcgagcatcttgcttagataggagatccagggaaggactcttggaggagattaggcataggaccaaagatcagaaacaggtatctggacctgactgtgatgctgggattagaaatgacacccacacatgtgaaaacacttattcctcagaaggtagtctacagctatttgttgccaatccccaatctaaaatatgtactatagctttatcttgaacatactcagctgatcgttggaatccagacagtgttaatcctgcaagtatgcaagtatctactgatctctggtgatctcgat

SEQ ID NO: 610745 - DNA, 599 bp, Homo sapiens
gatctaaaaagtatgttttgactatgaaaaaggccatccaagatccatcacccataaacagggtggtgaatggattagtgctcatctaccctctatttgctcttatgccacccctatggttcaccatttatccactcaagaaatatttattaaggacctcctatgtcctagacatggtccccgtggcrgtgctttcagtctaatgcggaagacaaagaataacaagtaagggaaacatacagaaacacaaattgtaacacaggctagtggaaatgaacttggtgcagtactcattggtgggcatcgagcatcttgcttagataggagatccagggaaggactcttggaggagattaggcataggaccaaagatcagaaacaggtatctggacctgactgtgatgctgggattagaaatgacacccacacatgtgaaaacacttattcctcagaaggtagtctacagctatttgttgccaatccccaatctaaaatatgtactatagctttatcttgaacatactcagctgatcgttggaatccagacagtgttaatcctgcaagtatgcaagtatctactgatctctggtgatctcgat

SEQ ID NO: 610746 - DNA, 599 bp, Homo sapiens
gatctaaaaagtatgttttgactatgaaaaaggccatccaagatccatcacccataaacagggtggtgaatggattagtgctcatctaccctctatttgctcttatgccacccctatggttcaccatttatccactcaagaaatatttattaaggacctcctatgtcctagacatggtccccgtggcagtgctttcagtctaatgsggaagacaaagaataacaagtaagggaaacatacagaaacacaaattgtaacacaggctagtggaaatgaacttggtgcagtactcattggtgggcatcgagcatcttgcttagataggagatccagggaaggactcttggaggagattaggcataggaccaaagatcagaaacaggtatctggacctgactgtgatgctgggattagaaatgacacccacacatgtgaaaacacttattcctcagaaggtagtctacagctatttgttgccaatccccaatctaaaatatgtactatagctttatcttgaacatactcagctgatcgttggaatccagacagtgttaatcctgcaagtatgcaagtatctactgatctctggtgatctcgat

SEQ ID NO: 610747 - DNA, 410 bp, Homo sapiens
tgccattctgtccaataatcagtcgtccaatctaaaccatccaaaaaaaaaaaatcaatccagttgcttgggattaaaggcatttcaacaggaaagtgccccaggctctgttaacatacagccaatcacttgataaaagaaacagagtaggctttagattaggggaggcagggtagggggagcactgacattgtctctcctatctaatgtctctaagaccatttggtgcacctgcatctagtagtcaattattaacctgtaaataggatatgcctcattgatcttcagtmgtttgaaacatctgcttctgataatcgagggcttagcttgaatcacacaagaagttcttagtttgctactgactcagaaactatgcatgtggacatgctagagattacaagaaaaaagaa

SEQ ID NO: 610748 - DNA, 410 bp, Homo sapiens
tgccattctgtccaataatcagtcgtccaatctaaaccatccaaaaaaaaaaaatcaatccagttgcttgggattaaaggcatttcaacaggaaagtgccccaggctctgttaacatacagccaatcacttgataaaagaaacagagtaggctttagattaggggaggcagggtagggggagcactgacattgtctctcctatctaatgtctctaagaccatttggtgcacctgcatctagtagtcaattattaacctgtaaataggatatgcctcattgatcttcagtagtttgaaacatctgcttctgataatcgagggsttagcttgaatcacacaagaagttcttagtttgctactgactcagaaactatgcatgtggacatgctagagattacaagaaaaaagaa

SEQ ID NO: 610749 - DNA, 528 bp, Homo sapiens
gttaagtgacagcatgtgctggagacattggagaaattacccagtcatgctaagcagagatctggaggtcatycatggatgcagccagattctttccagagctacaaaactgactttctaaaaagtcagcaacacagcgctgaagaacatttattgctacaccttgttttaaaattggattcaatatcatccaatctagtagttctcaatatttctacaaaatagaatcacttacgaagctttttaaaaccctagtactcaaactgtattctagactgattatattgcaatctctggggttgagagcccagcattagtagttttaaagctccacagatgattccaatgttcagccaagctcagtaataaagcccccttgttactcaaagggctggcaacatgggcatcacctgcaagcttgatagaaatgcagaacctcagctgggcgtggtggctccacctgaaatcccagcactttgggaggctgaggtgggcagatcacttgaggtccagagttcgagaccagcc

SEQ ID NO: 610750 - DNA, 595 bp, Homo sapiens
  misc_feature 1, 2, 3, 4, 5, 6, 7, 8, 9, 10, 11, 12, 13, 14, 15, 16, 17,18, 19, 20, 21, 22, 23: n = A,T,C or G
nnnnnnnnnnnnnnnnnnnnnnnaactttccagccaaggtactgagccatctcacagtggatcctccagcccccaccaaaacttcatatgaccaaaccaataccaacatgtaactgtgacctcatgtgagtccccaagccagaatacccatctcctgtctcatagaaatgatgakaaataataaatatatgtgctcacacatattaccatctaattttctacattatatgtttatttccccactgtatataagatccaaggactgttttctttttcactgctatattccaagaacctagaacaaatctggcatatggtaagtatacaataaatatctgttgaattaattaatgggaaaaaataaatgaatgatgaacggctgctctggaaaaaataccttgaagagtggcaggagcggaaagaggaggatcagatgggaggctaacagccagcaccaccttgccagccaagtgactgagccatcttgcagtggatcctccagcccccatcaagccccaactaagccactaagtttcatggtaatttcttacactgcaataaataactaatactggaccagtgagaaaaggagtca

SEQ ID NO: 610751 - DNA, 436 bp, Homo sapiens
ctcattaacccatcaataccagagagaagaggtattgctggacatggtcctatcatctgggggataagtactggaggagatgtgaaagagagggtgatggggcttctaaggtaagacatggaaaattgtgaagatatktgtgtcccttatggacactcaccaaatggtgacctaggcagaggaggattttaataataggatgaccagttctgtggatgtcagtgagtggctttcccccagccattcctgtcattgtccaatgggctcatgagccaagtggctgatatggtttagatgtttgtctcctccaaatctcatattgaaatgtaatcctcagtgttagcggtggggcccagtgagaggtgtttggatcatgggggcgagtccctcatgaatggtctagcaccatgcccttgacgataagtgtgttctcgct

SEQ ID NO: 610752 - DNA, 436 bp, Homo sapiens
ctcattaacccatcaataccagagagaagaggtattgctggacatggtcctatcatctgggggataagtactggaggagatgtgaaagagagggtgatggggcttctaaggtaagacatggaaaattgtgaagatatttgtgtcccttatggacactcacmaaatggtgacctaggcagaggaggattttaataataggatgaccagttctgtggatgtcagtgagtggctttcccccagccattcctgtcattgtccaatgggctcatgagccaagtggctgatatggtttagatgtttgtctcctccaaatctcatattgaaatgtaatcctcagtgttagcggtggggcccagtgagaggtgtttggatcatgggggcgagtccctcatgaatggtctagcaccatgcccttgacgataagtgtgttctcgct

SEQ ID NO: 610753 - DNA, 437 bp, Homo sapiens
gctcattaacccatcaataccagagagaagaggtattgctggacatggtcctatcatctgggggataagtactggaggagatgtgaaagagagggtgatggggcttctaaggtaagacatggaaaattgtgaagatatttgtgtcccttatggacactcaccaaatggtgacctaggcagaggaggattttaataataggatgaccagttctgtggatgtcartgagtggctttcccccagccattcctgtcattgtccaatgggctcatgagccaagtggctgatatggtttagatgtttgtctcctccaaatctcatattgaaatgtaatcctcagtgttagcggtggggcccagtgagaggtgtttggatcatgggggcgagtccctcatgaatggtctagcaccatgcccttgacgataagtgtgttctcgct

SEQ ID NO: 610754 - DNA, 431 bp, Homo sapiens
tgagatctgctcattaacccatcaataccagagagaagaggtattgctggacatggtcctatcatctgggggataagtactggaggagatgtgaaagagagggtgatggggcttctaaggtaagacatggaaaattgtgaagatatttgtgtcccttatggacactcaccaaatggtgacctaggcagaggaggattttaataataggatgaccagttctgtggatgtcagtgagtggctttcccccagccattcctgtcattgtccaatgggctcatgagccaagtggctgatatggtttagatgtttgtctcctccaaatctcatattgaaatgtaatcytcagtgttagcggtggggcccagtgagaggtgtttggatcatgggggcgagtccctcatgaatggtctagcaccatgcccttgacgata

SEQ ID NO: 610755 - DNA, 431 bp, Homo sapiens
tgagatctgctcattaacccatcaataccagagagaagaggtattgctggacatggtcctatcatctgggggataagtactggaggagatgtgaaagagagggtgatggggcttctaaggtaagacatggaaaattgtgaagatatttgtgtcccttatggacactcaccaaatggtgacctaggcagaggaggattttaataataggatgaccagttctgtggatgtcagtgagtggctttcccccagccattcctgtcattgtccaatgggctcatgagccaagtggctgatatggtttagatgtttgtctcctccaaatctcatattgaaatgtaatcctcagtgttagcggtggggcccagtgagaggtgtttggatcatgggggcgagtccctcatgaatggtytagcaccatgcccttgacgata

SEQ ID NO: 610756 - DNA, 384 bp, Homo sapiens
tgcctgctcccactttgtcatccgccatgtgtaaaagctcctgaggcctcaccagaagccaaggagatgctggcaccaggcttgtacagccttcagaaccatgagctaaggaaacttcttttctttgtaaattacccagcctcaggtatttctttatagcaatgcaagaatgctgtaataccatggccgtgatggcagggatgaaggctatgcatgggctcaacaacatggacattcactcaccaaggctgacctggctatggccactgcagagtgcctactctaccagcagcaggggccaacactgagtctccttatggtacygttccccaaatgatcagccagctacctggtggtagattggttaatttgggccacttccat

SEQ ID NO: 610757 - DNA, 384 bp, Homo sapiens
tgcctgctcccactttgtcatccgccatgtgtaaaagctcctgaggcctcaccagaagccaaggagatgctggcaccaggcttgtacagccttcagaaccatgagctaaggaaacttcttttctttgtaaattacccagcctcaggtatttctttatagcaatgcaagaatgctgtaataccatggccgtgatggcagggatgaaggctatgcatgggctcaacaacatggacattcactcaccaaggctgacctggctatggccactgcagagtgcctactctaccagcagcaggggccaacactgagtctccttatggtactrttccccaaatgatcagccagctacctggtggtagattggttaatttgggccacttccat

SEQ ID NO: 610758 - DNA, 594 bp, Homo sapiens
gccttaaacctcacctaaattatgtcattgggctttttcatccataaatgagcataccaggtgccaagggaatcaatatgccctttcacatgccttagaccagtgtccaaagaaagataaaatgtcattctataaaagctttctcccagcatttctattcctttacattttgtgccatatacaactatggttttttaatgatcttatttctgacagctgtttttcttcagaacatcaacagcttctttcctaaactagttttagtatgagttccatttctaattagctcaaattaaagtcctagagagcagcgaggtaatatttaaaccctcaggctaaaatttcggagtaggtgcagaatgttgactctaaatgagtttttccygtgacataacacgcatgaaagcaggatttctttcatgtgtgaaatgtcttaaatcagacttaccctttgtgattcttttagctttaaatgtcatttaagaaaaaaaaagaaaagaaaattaagcatgacattccccaatatcctctgctcactgtgttataatccctatcactccccaagtgaattggagagagtgaagacacaatgaa

SEQ ID NO: 610759 - DNA, 582 bp, Homo sapiens
tggatgagagttcatgagcatcaaaccaccatggatttcataatcaattcctaatatctgaataagtgccgaaaagtcacaggcatctagaagtgtggcccaagtcttgttcttcaatcggcccacccatttctcaagatttcattgagaagatcaagaaatctaatcttccttggatgcaaaatggaggtggtgaaaattggaagtatgtccttcctggtaatgaggctatttcagtacataggaagtgctctgaaatctttaaggtatacagtctgactcactagaacaagaaagggccccacttgttgccattttatgaggtgaccaccccagctggataagagctacaagtgtccattgggtctacctgggtgtgggtcaagaaagcagagttgagtgccctgaggtaagctgagattttggtgttcgatgggaaagaatgtaagaattgactttgccacctactgcctgggtgactttgygcaagatcccaaatccctatgtatctcgattttgttatctaaaagatcacatgatggaggatgtaagcaagtagcacagccaagacccagtttacag

SEQ ID NO: 610760 - DNA, 532 bp, Homo sapiens
tatcaagtggtattgttttttccatgtagagtacttttataataaataagtagattgaggtaaaaacaaagtgagtcaatttaaagacaaatattggccacgcgtggtggcwcatgcctgtaatcccaatattttggaaggctgaggcagaggatcacttgagccaggagtttaataccagcctgaacaacatagaccgcatctctacaaaaaataagaattagctgagtgcagtggtgtgtgcctatagtcctagctactcggtaggctgagatgggaggatggcttgagcccagaagttcaaggttacagtgaactatgattgcataactgcattccaacctgggtgacaaagtgagaccctgcctgtctctaaaaagaaaaaataaaaataaaataaaaaataaagacacctattaatatagagatactgatagaaaagaagtttgggtaatattaggataatggaagaaacaaaaattctgtaattcaggaaaagaaggcttgcattttgggagggggagaggaattc

SEQ ID NO: 610761 - DNA, 417 bp, Homo sapiens
gtgatcaccacatcagcaggcgctttctggttagtaaagctactgggacaaaaacacacaygatctcgtccttcttttattttaatcagagcaaaatatttttataataattgtgttatatgaataaataattcataatgctgtaacccattatcacattcaatcctcccaacaaccctagaagatatgtagacaagtattattactttccctatttttataaatgaggaaataaaccccaggaggctaggcgacttccccatggtcatataagttgcaaacagtagtatcatgattcaaatccaaagcttctccttttgtctttatcattttaattttgaaggtaatgcatatgcatgtatgatcttttaaaaccagacatgtatatggaatagataggaaaagggactctccttc

SEQ ID NO: 610762 - DNA, 417 bp, Homo sapiens
gtgatcaccacatcagcaggcgctttctggttagtaaagctactgggacaaaaacacacatgatctcgtccttcttttattttaatcagagcaaaatatttttataataattgtgttatatgaataaataattcataatgctgtaacccattatcacattcaatcctcccaacaaccctagaagatatgtagacaagtattattactttccctatttttataaatgaggaaataaaccccaggaggctaggcgacttccccayggtcatataagttgcaaacagtagtatcatgattcaaatccaaagcttctccttttgtctttatcattttaattttgaaggtaatgcatatgcatgtatgatcttttaaaaccagacatgtatatggaatagataggaaaagggactctccttc

SEQ ID NO: 610763 - DNA, 508 bp, Homo sapiens
aggctggcacaggtcattgaagccctagctttttatctwtaattttaaaatccccaaacaatttatactaatttttcttgtccattatttccaaataatcttgtttaaatgttattacagtgcttgctcatgttactgttgtctaacagaagggtatccggggccttaaaactgagagggttaggattaatgattccaatacctatgcttggacatctccaaaagtgggttccaacttcttgtcctcaagtctgtatagaaactagcaaacttccagagttcacaaaaggctcaaagagaacagatgttttatagaaaattcttagggcaagtttcacgcataatgttgctgatgtgtgtctgccttttcaataaacatcactatgctttatcacaagatttaataaagcagcttagttaaaaatgccatctgggtctctggacacattaaacaaagcttaaaataaccaccccagcaactgggaggacccagctgttctcataatct

SEQ ID NO: 610764 - DNA, 306 bp, Homo sapiens
cacattattgcctatgaaatagtctttaaaaaaagaagttgaacctgaatctaactaaaccttgcaatgggctgaacgtgtatgtcttcccaaaattaatatgttgacatcctaaccccaaaggtgctggtattaaaaggtggggcctttaggcggtcattagatcataaggacagagccctcatgattggaattagtgmccttataaaagaggccccagagagctagctagtctctcccactatgtgagggcccagcaagaaggccaatctatgaaccagaaagttggtcctaaccagatatcaa

SEQ ID NO: 610765 - DNA, 600 bp, Homo sapiens
tgggcggatcacttgaggccaggagttttagaccagcctggccaatatggtgaaatcctgtctctcctaaaaatacaaatattagtcagggagtgatggcacacgcctgtggtcctgctacttgggaggctgaggcatgagaatcacctgaacccaggaagcagaggttgcagtgagctgagatagtgccactacactccagcctgggtgacagagcaagagtccatctccaaagcaattaagaaattacttttagagttccacttgtgtacttctctttaggatatgaaaatcagtaagagaaagctattcccatcctagcaatggtaaaaggcaattttaaagctctataggaaatatgacccagtttcttcaatgaataaataataagggcaaaatgtaaagaagagaaasgtagattaaaagagacttaagagacatatcagccaattacagtgtaagatcttttagaaccaattagaacaaactgttaacggggagggggaaaatgaggatagaggaaattattagaaaattctgaagggtgtggtgttgagcattttgtattctacacaccatccaacacaatgcctggtactc

SEQ ID NO: 610766 - DNA, 574 bp, Homo sapiens
ttgatcaatgtggtgagcagaaaaggtagcttccctacattacagctagtagtggtgtttgctggacttcagcaggtctttgtaaattcaaagcccaggctctctaacaccatacatagcactttgttactcacaatgaatggtttgctayagaatgctttctcttttctaatctgcttcttgtctgattgtcatgcaaacttgaatgggataataaatgtaaagtaattagcatagaagaagcactcagtgactattacctgctattattactttataatgtagtctgcattatttttcttcctttatttaaatcttcaactttgctgaattgcttattgaagaaaatgctgtctctaaacataacattactggcagctgaaagtgaaccttacacatgatgcttcatggtatctgagagtcatgaagtttacaaagacatttctggtcttattctgataaatatcacatgctaatatttcctacattcccatttactcagtgttccctacttcctaaatgagggaaaagcactgtcgaacagttgtcaaattttcttcacaagcagcttggt

SEQ ID NO: 610767 - DNA, 584 bp, Homo sapiens
cccctacctcttggtaacaaaactgaccctcaagagtcactccttgtgtggtggttttttgttttgttttgttttttgttttgttttgttttttgtttttttgagaggggtttcactatgttgcccaggatggtctcaaactcctaggctcaagtgatcctcctgcctcagcctcccaaaattctggaattataggtgtgagccacctagccgggcccggtgtactttcttccccattcatctagaaaagtaagaaggcatattgttgatgaggtaattaaaataaattaattagcacaacaataagaaaataagtaatgtgataaaagcagtctgcaarggcataattaaaaaaatttttttcccataggttattgggaaacaggtggtgtttggttacatgagtaagttctttagtggtgatttgtgagattttggtgcacccatcacctgagcagtacacagtgcatgctatttgtagtcttctgtctctcatccccttcccaccctttcccccgtgtccccaaagtccattgtgtcattcttatgcctttgcatcctcatagcttagctcccacttagga

SEQ ID NO: 610768 - DNA, 588 bp, Homo sapiens
acacagctcactgcagcctctgtctcccgggttcaagcaattctccagcctcagcctccggagtagctgggactacaggtgcgtgccaccacgccctgctaatttttttttttttttttggtattttttagtagaggcagggtttcgctatgttggccaggctggtctcgaattcctggactccagtgatttgcctgcctcggcctcccaaagtgctgggattacaggcatgaaccactgctcccggccaattttttttttttttatgttctttttttttgagacaaggtcttactccgtcacccaggctggagtacagtggagtgatctrggatcactgcaacctctgcttcccaggctcaagcgatcctcccaccttagcctctcgagtagctgggactataggcgcacgtcaccatacccgctaatttttatactttttgtagagacagggtttcaccatcttgcccaggctggtctagaactcctgaactcaagtgatcctcccacttcagcctcccaaagtgctgggatcacaggcatgaaccatggcgctcagctgtcaatttgtgaatcaataattgtatg

SEQ ID NO: 610769 - DNA, 607 bp, Homo sapiens
tcatgttcaagaccttgaacataactgtaatttgcaacgtacttaatgtcattaatcaaaagtaatggcaaaaccacaactacttttgcaccaacctaataacatatgcgtcacctcacattgttaccgtgtgtgtrtgtgtgtgtgtgtgtgtggtgagaacatttaatatctactctcttatcaaatttcaagtatgtaatacagtattattaactacagtcaccatgctacacattaattttaaggagagctttctgtcatgtgaacttgtctgctgcagtctctccctgaaggtgagctacatggaaagccaaatgaacagaaaggttcttgctgagtgaggaatttgaacaaggaaagttggttatttatttaggtgtataacataactctagctttctccacatagctacatttgtcatatggacataatactctggccagtctggagggctcctgcttaagagtattagatggtcattcttgatatttgcctccatgttttgtctttctctaagcccctacttttatgagcttccctatttatggacagaatatttgaagaaaggcatataactctctttttttttttgaacatcaagaa

SEQ ID NO: 610770 - DNA, 436 bp, Homo sapiens
taacataactctagctttctccacatagctacatttgtcatatggacataatactctggccagtctggagggctcctgcttaagagtattagatggtcattcttgatatttgcctccatgttttgtctttctctaagcccctacttttatgagcttccctatttatggacagaatatttgaagaaaggcatataactctctttttttttttgaacatcaagaacatcccttttatttatgcctatttaggaaatgattacagttttaattaacagtagtttgaaattcctcagcttttcttttttwaatttttttaattattattattattatttaaattatactctaagttctagggtacatgtgcacaacgtgcaggtttgttatatatgtatacgtgtgccatgttggtgtgctgcacccattaactcatcat

SEQ ID NO: 610771 - DNA, 436 bp, Homo sapiens
taacataactctagctttctccacatagctacatttgtcatatggacataatactctggccagtctggagggctcctgcttaagagtattagatggtcattcttgatatttgcctccatgttttgtctttctctaagcccctacttttatgagcttccctatttatggacagaatatttgaagaaaggcatataactctctttttttttttgaacatcaagaacatcccttttatttatgcctatttaggaaatgattacagttttaattaacagtagtttgaaattcctcagcttttctttttttaawttttttaattattattattattatttaaattatactctaagttctagggtacatgtgcacaacgtgcaggtttgttatatatgtatacgtgtgccatgttggtgtgctgcacccattaactcatcat

SEQ ID NO: 610772 - DNA, 555 bp, Homo sapiens
catgctacacattaattttaaggagagctttctgtcatgtgaacttgtctgctgcagtctctccctgaaggtgagctacatggaaagccaaatgaacagaaaggttcttgctgagtgaggaatttgaacaaggaaagttggttatttatttaggtgtataacataactctagctttctccacatagctacatttgtcatatggacataatactctggccagtctggagggctcctgcttaagagtattagatggtcattcttgatatttgcctccatgttttgtctttctctaagcccctacttttatgagcttccctatttatggacagaatatttgaagaaaggcatataactctctttttttttttgaacatcaagaacatcccttttatttatgcctatttaggaaatgattacagttttaattaacagtagtttgaaattcctcagcttttctttttttaatttttttwattattattattattatttaaattatactctaagttctagggtacatgtgcacaacgtgcaggtttgttatatatgtatac

SEQ ID NO: 610773 - DNA, 467 bp, Homo sapiens
cttttcaattatttaatgaataaccttatgatagtatccaaaaggaaatccttgtttcaagttttccctgtaatatgaagtaattaaatcgtccaatgatcttgtgtcctaaagcaatcattacattttttctttctttcttagcatttttattattttatcacttctcctgagtaactcaggcatcacgctgttatttctaggaagaaatataacttctaagcagagatggtcccaggaaaattgtgaggaagattttattttgcctgccttcaaactctcctctatcccaggcaagccccctttcaaagrctgtatctcttttcctccataaccaaacttcctttcagggaaggctctgatatcatcacatcagataattattgacacctcagtaagaatatgtgaatatatgaaattatattaacttttccactagaatttgttttgaccttagtggacaaatg

SEQ ID NO: 610774 - DNA, 361 bp, Homo sapiens
tctctcactgggtccctcccacaacatgtgggaattatgggagctacaagatgagatttgggtggggacacagagccaaaccttatcagaaggggagaagagaagaaggagctgaatgtcagagagaagcagcttracttcagaggggcagcttcatggcaggactttgtagaagagtccagatggagatggccagacttcaggggaagaataccttcctgctccatccccttttcagctccccttcccactcagagccacttccatcagcaataaagtcccccacatttactatcctactatttgttcatgtgacctgatttttcctggatgctggataagagctcaggatacagaggcc

SEQ ID NO: 610775 - DNA, 361 bp, Homo sapiens
tctctcactgggtccctcccacaacatgtgggaattatgggagctacaagatgagatttgggtggggacacagagccaaaccttatcagaaggggagaagagaagaaggagctgaatgtcagagagaagcagcttgacttcagagggrcagcttcatggcaggactttgtagaagagtccagatggagatggccagacttcaggggaagaataccttcctgctccatccccttttcagctccccttcccactcagagccacttccatcagcaataaagtcccccacatttactatcctactatttgttcatgtgacctgatttttcctggatgctggataagagctcaggatacagaggcc

SEQ ID NO: 610776 - DNA, 566 bp, Homo sapiens
gctgaatgtaggctccttttgaggggtagcgtagagccctgtctctgtagttctttctctatcctccatgcctcacacatggttgacatttcatgaatattaaatgattagagtagaaaatcctgactcaaagttctgattttgtcacatacttgcagcatggctaaaaataaggcactacaatttactgaggctcagttcccttacctacaaaataatatggattttaaaatgaatatcaaatgcatttacacatgtgaaatgcttaacttgaacatctttataacacagatgatactgttgaattaaggtaaatggatgtggattttactagtccatatgtgagtagggaacccrcacaaaaaatgtggacctattttgagagtcacatgttaaaatgagacttttcctattttatcagtattgggggcctcaatttaaagcgttgtaagtgcccacacttaggatttcaaaaaagagagtgccaggccaccttatcagtttgcaaaggggtgactctattcaatgtttggtgggtcccgtcccattatgtacttcaggagtgg

SEQ ID NO: 610777 - DNA, 578 bp, Homo sapiens
atacctagaaaatcctaaaaaaaaaaawacctagaaaatcctcaagactaagccaaaagtctcctaaaactgataaatgattttagtaagatttcagggtacaaaattaatgtacaaaaatcagtagcatttctatacaacaacaatgtccaggctgtgagtgaaatcaagaacacaatcctacttacaataatcacaaagaaaatggaatactaaaatacagctaaccaatgaggtgaaaggtctcaacaaggagaactacaaaacatgctgaaagaaatcatagacaacacaaataaatggaaaaactttctgtgctcatggattggacaaagcaatatttttaaaatggccatactgcccaaagcagtattatttaatgctattacagatttaatgctattcctatcaaactaccaatgccattcttcacagaattaggaacaactattctaaaattcatatggaaccaaaaaagagcccaaagcaatcacaggcaaaaagaacaaagctagggatatcatactacccaacttcaaactatactataagtctacattaaccaaaacagcatgata

SEQ ID NO: 610778 - DNA, 578 bp, Homo sapiens
atacctagaaaatcctaaaaaaaaaaatacctagaaaatcctcaagactmagccaaaagtctcctaaaactgataaatgattttagtaagatttcagggtacaaaattaatgtacaaaaatcagtagcatttctatacaacaacaatgtccaggctgtgagtgaaatcaagaacacaatcctacttacaataatcacaaagaaaatggaatactaaaatacagctaaccaatgaggtgaaaggtctcaacaaggagaactacaaaacatgctgaaagaaatcatagacaacacaaataaatggaaaaactttctgtgctcatggattggacaaagcaatatttttaaaatggccatactgcccaaagcagtattatttaatgctattacagatttaatgctattcctatcaaactaccaatgccattcttcacagaattaggaacaactattctaaaattcatatggaaccaaaaaagagcccaaagcaatcacaggcaaaaagaacaaagctagggatatcatactacccaacttcaaactatactataagtctacattaaccaaaacagcatgata

SEQ ID NO: 610779 - DNA, 578 bp, Homo sapiens
atacctagaaaatcctaaaaaaaaaaatacctagaaaatcctcaagactaagccaaaagtctcctaaaactgataaatgattttagtaagatttcagggtacaaaattaatgtacaaaaatcagtagcatttctatacaacaacaatgtccaggctgtgagtgaaatcaagaacacaatcctacttacaataatcacaaagaaaatggaatactaaaatacagctaaccaatgaggtgaaaggtctcaacaaggagaactacaaaacatgctgaaagaaatcatagacaacacaaataaatggaaaaactttctgtgctcatggattggacaaakcaatatttttaaaatggccatactgcccaaagcagtattatttaatgctattacagatttaatgctattcctatcaaactaccaatgccattcttcacagaattaggaacaactattctaaaattcatatggaaccaaaaaagagcccaaagcaatcacaggcaaaaagaacaaagctagggatatcatactacccaacttcaaactatactataagtctacattaaccaaaacagcatgata

SEQ ID NO: 610780 - DNA, 600 bp, Homo sapiens
tcgtttaggatattgcttttctttttaaaattaaaattattgcttctatcctctgtatagtctaatttttaaaggttggttaatttctagtcttacattttctttatatgatatacaaagtgtctatcagtctgtatacaaaacctctccaggtattttaaacaggagaggatttaacacaggaaattgtttgcaagacccagttgagcaaaagaaggaaggttgtgtcacccataaccctgaagcccacacaatactgctgaattgcctctgcctgaccgactgctcctgctgaaactactggaggcaccaccaaaacataatgtcttctcccatcttctcaaatgatgcaagtgcctccccctggcagaacctakctgccaataaagtttgggaaatgtaattttcagtcttccatgctccatggttcaggagagagtatgtaagggtgagagcagagctgacaccaagaaacaatattcagaacactctgttaaacatttgctttcttgaagatccagaagccagaggtctataacaagacagatgtccttttcaattcaaataataatatgatttggattatctttaaggacatgc

SEQ ID NO: 610781 - DNA, 503 bp, Homo sapiens
taggtatgataaacctatcaataaagtattgtttttactttaaatattgatgtcttttaaagagattacaagaaagaaaataaaaaataaattagtattttatacttattgatatctactgtttctagtgctcttcattccttcctgtatatcctttagcatttttccccccatacmcccacccctttaatatttcttttaatacaggtcccctggtaacaaattttctcagatttttgttcccccggaaatgtctttacgacactttcatttcagaaagacagtttgctagatataaaattctcggtgtatttttttcttcagcactttgtgtcatttcaatatatgcagcatttatactgtctaatgagaagtcagcttttaatcttatctttcttctgtatgtaacatcatttttctctgggtgctttcaagattttgtctttatctttggctttcattagcttaaatatgataggcctaggagttgtttcctctgtgtt

SEQ ID NO: 610782 - DNA, 464 bp, Homo sapiens
gggattgtaagcgttttaactatcccctttctcaaygtaattgtgagaagattccatttagaagataagagagagactaaataaatttctcaacatgaaatccctattttaatacacaatataatatagtaaagtcactgaaatgactgtaagactgtgcagacattgagctattagatccagggacagcccagatcccctggggcctgtactggccacatatcagaagcctagagctctgcttaattggtgtaaaatggggcatattgcagccacactcatttcagtgactttgtgctctaagcatctgttttgaaatacctaactttgtaaaaccgtaacttcacattccgacaaaaacggagaggttctcaaggtgatgccaagcagtatggaggatcctagaagtgactcggtatgtctgggaagaggcagtagagttctttcttttcctataggaattc

SEQ ID NO: 610783 - DNA, 464 bp, Homo sapiens
gggattgtaagcgttttaactatcccctttctcaatgtaattgtgagaagattccatttagaagataagagagagactaaataaatttctcaacatgaaatccctattttaatacacaatataatatagtaaagtcactgaaatgactgtaagactgtgcagacattgagctattagatccagggacagcccagatcccctggggcctgtactggccacataycagaagcctagagctctgcttaattggtgtaaaatggggcatattgcagccacactcatttcagtgactttgtgctctaagcatctgttttgaaatacctaactttgtaaaaccgtaacttcacattccgacaaaaacggagaggttctcaaggtgatgccaagcagtatggaggatcctagaagtgactcggtatgtctgggaagaggcagtagagttctttcttttcctataggaattc

SEQ ID NO: 610784 - DNA, 604 bp, Homo sapiens
agcagcttgattgacgtatcatttctattccataaaagtcacccaacttaattttcttttaatccataaattcgccctctctctctttttttcctcgcaaattttcagatgaagaagccaggttgtctgtcctgtggagtttttcggctcctggactttaccaacggcagcctcacttcaatgctcacttggcaagttccctatatttcccagaaattgattgagatgctgcgtcagatttaaatttaaaacttttacaaaaacacttcaccagtggtggtgtgcacttycacacagaacatctgctcggttttgtgtgctttgtgtgtgtgtgccattgggtagatctcacacaagggcggcacgtggtggtactctcatttttctgttcttcattaatcagctggattactttgtaaataggagctgcccctctgtcagctctctgattacccagtagtacagttcatattggaagcacagaataaatacttaactgctttccttttatttgctggttttcaaaattaaacgttggttcctagcattcttcaagggtgagcaacaaagttgtggtcatcattgtttttagtctctttttgaa

SEQ ID NO: 610785 - DNA, 565 bp, Homo sapiens
acttggcttcaatgtcaccttaactggaagcttctctcactctccagaagagcttcccattgcacctgatgcatgggaaacataatttgatcatttttaagttacagtccaaatctttttgtacctgaataacatgttgcccagtcagtctctcttcctggattcacaagtctttcatggtagatccagctggaagtgacaaaaagacatcttttgacataaagggatgacacagacagacataagttcttaaatgtcttaaatgttatgtgaraattaaacagaattcaaagacttgtggggagcacttaggaagttactgggaatgtcataaagggttaatttgtattttattttattttttgagacagtctcattctgtcacctaggctggagtgcagtggtgcaatcaggctcactgcagccttgaccacctgggctcaagtaatctcacttaatttttatttggtttaagaaagtcttggttgagggtggtggcttatgcctgtaatctcagcactttgggaggctgagagaggtatattacttgaggccaggagtttga

SEQ ID NO: 610786 - DNA, 271 bp, Homo sapiens
gtggttggggccaggtgcggtggctcactcctgtaatcctagcagtttggaaggctgaggcacatggaccacttgaggtcaagagtttsagaccagcctgaccaacatggtgaaaccccatttctactaaaaataacaacagttagctaggcgttgtggcacatccctataattccagctactcgggaggccgaggcaggagaattgcttgaacccgggaggtggaggttgtagtgagctgagattgtgccattgcactccagcctgggct

SEQ ID NO: 610787 - DNA, 271 bp, Homo sapiens
gtggttggggccaggtgcggtggctcactcctgtaatcctagcagtttggaaggctgaggcacatggaccacttgaggtcaagagtttcagacyagcctgaccaacatggtgaaaccccatttctactaaaaataacaacagttagctaggcgttgtggcacatccctataattccagctactcgggaggccgaggcaggagaattgcttgaacccgggaggtggaggttgtagtgagctgagattgtgccattgcactccagcctgggct

SEQ ID NO: 610788 - DNA, 569 bp, Homo sapiens
cgagttgtaataatagctctgtttaagatccgtcagtcacttgaatcttctctaaggctttgtatgttagaagttaatttgctttcttacaaggccacattctatcttgtaactaaacaactgaattttatgtcttagcgtagatggtttaytactttctggtttttctttagtaagaatcctataaaaacactagtatttttctctgagtttaaaattcaatacatgcctactgatatggttaggctttgtatccccacctgaatctcatcttgaattgtaatccccatagcccccataatccccacaggtcaagggagagaccaggtggaggtaattgaatcatgggggcagtttcccctgtgctgttcttgtgatagtgagttctcacgagatttgatggttttataagggattctttcccctttgctcggcacttcttcatgctaccttgcgaagaagctggcttgcttcctctttgtcttccgccatgattgtagatttcctgaggcctcccaagctgtgctgaactgtgagccaattaaactactttcctttataaattaccc

SEQ ID NO: 610789 - DNA, 419 bp, Homo sapiens
ttcttttgttctattctattcaatagaaacaagtacctgggaccagcttayactataggaaagagattatataagggtataaataccaagaggtagagatcatcaagagccattctggtagcagccacaatatcttatccagaatatttcttattcaggccttcaaatgtgctgtcttttctggtctaatggaaatgaaccttccttccatacaatttcttctcctaaattgtactctggctctcttatcatatacagacgtctatgttaggtatttgtgtctgtcttgattcttggtaggcttttaaactctgtgaatgttggactgtgatgtagacatcatttcaccgcacactctgtaaccaccaaaccttagcagcttattcagtaagcacatacttggctcttaatgagtattg

SEQ ID NO: 610790 - DNA, 535 bp, Homo sapiens
ttctggtagcagccacaatatcttatccagaatatttcttattcaggccttcaaatgtgctgtcttttctggtctaatggaaatgaaccttccttccatacaatttcttctcctaaattgtactctggctctcttatcayatacagacgtctatgttaggtatttgtgtctgtcttgattcttggtaggcttttaaactctgtgaatgttggactgtgatgtagacatcatttcaccgcacactctgtaaccaccaaaccttagcagcttattcagtaagcacatacttggctcttaatgagtattgcttaaattgatgaattgaattagtattttaccttctctgttgcttagctaagcagaagaatttgtcatttttttaatttagtgactggttctattaaaagttacctttgtctatatcattttgttatactaaagcacaaatgtataaggtcaaaaaacattctcaagattttgtttaaaccacagccctcagttgtgtatatttatctcttgttttcatatgcaagat

SEQ ID NO: 610791 - DNA, 555 bp, Homo sapiens
cacagtatcttataatctaatctcagaagtggcatctcatttcttttgttctattctattcaatagaaacaagtacctgggaccagcttacactataggaaagagattatataagggtataaataccaagaggtagagatcatcaagagccattctggtagcagccacaatatcttatccagaatatttcttattcaggccttcaaatgtgctgtcttttctggtctaatggaaatgaaccttccttccatacaatttcttctcctaaattgtactctggctctcttatcatatacaracgtctatgttaggtatttgtgtctgtcttgattcttggtaggcttttaaactctgtgaatgttggactgtgatgtagacatcatttcaccgcacactctgtaaccaccaaaccttagcagcttattcagtaagcacatacttggctcttaatgagtattgcttaaattgatgaattgaattagtattttaccttctctgttgcttagctaagcagaagaatttgtcatttttttaatttagtgactggttctatta

SEQ ID NO: 610792 - DNA, 499 bp, Homo sapiens
ttaattcacaagtttagaaaagtgaacctgaaaaatcacagggctaggtgggttatgaggcccactggtacatgatagtgttgaatgtggattagaatgaactccgtggattagaatctcagaccataggcaaacatttacttgttttagaataagcacatttgagtctgcaataagtattactatttttaagttgaaaatgtaattggtttctaataataaccatattggctagcattatttcaatsgtgtttaatgttttccaatgtcatttcatgtcagatatctctcttgattcttagtaacaatttggacaagacagcaaatgctattgtccaagttttctaaagaagaatctgaagtgaaatgacatcaagagacctatcaagacctgtatccaggaaaaggtaaatctgagctgaaagtgtagcccttgtaaattacctacgtgacataccagatagtgttcatgatccattcagtactctgttctaaaaat

SEQ ID NO: 610793 - DNA, 351 bp, Homo sapiens
aatgacatcaagagacctatcaagacctgtatccaggaaaaggtaaatctgagctgaaaktgtagcccttgtaaattacctacgtgacataccagatagtgttcatgatccattcagtactctgttctaaaaatgagacaatatccatttattcacttgttcatttatttagtgcttgttcagcccttactgcatattccaggcactattctgactgtggcaggagtgaacaaacaggcatggttcttacttgcatgtaattacagtcttatagtgaaaacaagtgttaaacaacaaaatctcccaattattttaaaattataaacttgattcgatactatgtggccatat

SEQ ID NO: 610794 - DNA, 351 bp, Homo sapiens
aatgacatcaagagacctatcaagacctgtatccaggaaaaggtaaatctgagctgaaagtgtagcccttgtaaattacctacgtgacataccagatagtgttcatgatccattcagtactctgttctaaaaatgagacaatatccatttattcacttgttcatttatttagtgyttgttcagcccttactgcatattccaggcactattctgactgtggcaggagtgaacaaacaggcatggttcttacttgcatgtaattacagtcttatagtgaaaacaagtgttaaacaacaaaatctcccaattattttaaaattataaacttgattcgatactatgtggccatat

SEQ ID NO: 610795 - DNA, 582 bp, Homo sapiens
  misc_feature 267, 270, 302, 303, 304, 305, 306, 307, 308, 309, 310, 311,312, 313, 314, 315, 316, 317, 318, 319, 320, 321, 322, 323,324, 325, 326, 327, 328, 329, 330, 331, 332, 333, 334, 335,336, 337, 338, 339, 340, 341, 342, 343, 344, 345, 346: n = A,T,C or G
  misc_feature 347, 348, 349, 350, 351, 352, 353, 354, 355, 356, 357, 358,359, 360, 361, 362, 363, 364, 365, 366, 367, 368, 369, 370,371, 372, 373, 374, 375, 376, 377, 378, 379, 380, 381, 382,383, 384, 385, 386, 387, 388, 389, 390, 391, 392, 393: n = A,T,C or G
  misc_feature 394, 395, 396, 397, 398, 399, 400, 401: n = A,T,C or G
aaaatgagttcattacatggtaaggatgagggagaaagaaaagatctgaaaaagtagaagagtgatggattcagaaagyataggatgattgtcagtgtgattgttttatctagccacatatagctgtgtggtatcaagatgtagaaggcagagagtaggatttatcaggattgttgtttggaagagtgagtacaatcattacgagggagcaaggtattgatcatggaatataaagtgggaaaagaggtaaggtaagggtgggttttncgnttcgctgagggatgcttttttaccccgagtgnnnnnnnnnnnnnnnnnnnnnnnnnnnnnnnnnnnnnnnnnnnnnnnnnnnnnnnnnnnnnnnnnnnnnnnnnnnnnnnnnnnnnnnnnnnnnnnnnnnnttatctcaaattatgacaaatttatctacttatttccaaaactcccatatctagtttaagtaatcaaatttcttgccttggcaagcatgttgctttctaattgactcacctgtatccaatttgaattccttaaaatccattctatacattgtaaccatagtgatatttacaaatgtgaaat

SEQ ID NO: 610796 - DNA, 582 bp, Homo sapiens
  misc_feature 267, 270, 302, 303, 304, 305, 306, 307, 308, 309, 310, 311,312, 313, 314, 315, 316, 317, 318, 319, 320, 321, 322, 323,324, 325, 326, 327, 328, 329, 330, 331, 332, 333, 334, 335,336, 337, 338, 339, 340, 341, 342, 343, 344, 345, 346: n = A,T,C or G
  misc_feature 347, 348, 349, 350, 351, 352, 353, 354, 355, 356, 357, 358,359, 360, 361, 362, 363, 364, 365, 366, 367, 368, 369, 370,371, 372, 373, 374, 375, 376, 377, 378, 379, 380, 381, 382,383, 384, 385, 386, 387, 388, 389, 390, 391, 392, 393: n = A,T,C or G
  misc_feature 394, 395, 396, 397, 398, 399, 400, 401: n = A,T,C or G
aaaatgagttcattacatggtaaggatgagggagaaagaaaagatctgaaaaagtagaagagtgatggattcagaaagtataggatgattgtcagtgtgattgttttatctagccacatatagctgtgtggtatcaagatgtagaaggcagagagtwggatttatcaggattgttgtttggaagagtgagtacaatcattacgagggagcaaggtattgatcatggaatataaagtgggaaaagaggtaaggtaagggtgggttttncgnttcgctgagggatgcttttttaccccgagtgnnnnnnnnnnnnnnnnnnnnnnnnnnnnnnnnnnnnnnnnnnnnnnnnnnnnnnnnnnnnnnnnnnnnnnnnnnnnnnnnnnnnnnnnnnnnnnnnnnnnttatctcaaattatgacaaatttatctacttatttccaaaactcccatatctagtttaagtaatcaaatttcttgccttggcaagcatgttgctttctaattgactcacctgtatccaatttgaattccttaaaatccattctatacattgtaaccatagtgatatttacaaatgtgaaat

SEQ ID NO: 610797 - DNA, 582 bp, Homo sapiens
  misc_feature 267, 270, 302, 303, 304, 305, 306, 307, 308, 309, 310, 311,312, 313, 314, 315, 316, 317, 318, 319, 320, 321, 322, 323,324, 325, 326, 327, 328, 329, 330, 331, 332, 333, 334, 335,336, 337, 338, 339, 340, 341, 342, 343, 344, 345, 346: n = A,T,C or G
  misc_feature 347, 348, 349, 350, 351, 352, 353, 354, 355, 356, 357, 358,359, 360, 361, 362, 363, 364, 365, 366, 367, 368, 369, 370,371, 372, 373, 374, 375, 376, 377, 378, 379, 380, 381, 382,383, 384, 385, 386, 387, 388, 389, 390, 391, 392, 393: n = A,T,C or G
  misc_feature 394, 395, 396, 397, 398, 399, 400, 401: n = A,T,C or G
aaaatgagttcattacatggtaaggatgagggagaaagaaaagatctgaaaaagtagaagagtgatggattcagaaagtataggatgattgtcagtgtgattgttttatctagccacatatagctgtgtggtatcaagatgtagaaggcagagagtaggatttatcaggattgttgtttggaagagtgagtacaatcattacgagggagcaaggtattgatcatggaatataaagtgggaaaagaggtaaggtaagggtgggttttncgnttcgctgagggatgcttttttaccccgagtgnnnnnnnnnnnnnnnnnnnnnnnnnnnnnnnnnnnnnnnnnnnnnnnnnnnnnnnnnnnnnnnnnnnnnnnnnnnnnnnnnnnnnnnnnnnnnnnnnnnnttatctcaaattatgacaaatttatctacttatttccaaaactcccatatctagtttaagtaakcaaatttcttgccttggcaagcatgttgctttctaattgactcacctgtatccaatttgaattccttaaaatccattctatacattgtaaccatagtgatatttacaaatgtgaaat

SEQ ID NO: 610798 - DNA, 624 bp, Homo sapiens
actcctctgcccagcaatatattcagtgtctaacaactcctaccactatgataagagaggttaggaaagagctgagactaccgtatctgaaagtattacaatatagattgctgctgacagctaaaaataacttgctctgtcctttaaggaaagactgagccataaaacgttttcaaattgcaagacaagtaccacagacacatgagatatatttcttagacttaagacatcatacacattaggcaagataaaatgagcactctctatttaacttagagaaygaaattatcacaaaatttcccttgttgaaaataagtacccagttggcaatttgtcaacgcttttgttcctactgaaattgattgtgaaaataggctgagggatgtggaaggaagggctagaggtggtattcagtgatgagttctgccccgcctcatttgtgaataaatgaatggaagagaaggaaagagaaagagggaaggagggagggaagaagaaaaggaagaaggaaggaagaaaggaggaaggaaagaaggggggagggagggagagagagaaaaaaggagggcgaatgggaaggagagagaaagggagggaggatgggagagcaggagagagggaagg

SEQ ID NO: 610799 - DNA, 514 bp, Homo sapiens
atatacatatctatatatctatatatctagatatatatatatatctatatatctagatatatatatatatctagatatatagatatggagacaggatctcaatattgagacaaggtctcgttctgtcktgcaggctggagttcagtggcacaatctcatctcactgcaacctctgctgcctgggttcaggctattctcgtgcctcagcctctgagtagctgggattacaggtgtgcaccaccacacctggctaatttttgcatttttagtagagatggggtttcaccatgttgtccaggctggtctaaaactcctgatctcaggtgatccgctcgccttggcctcctgaagtattgggattacaggcatgagccattgcacactgcccaatgtcatgtatttttatgtaaaacttcattaatcttccaaagtcaaagacaaaggatgttctaaaaaagtaaacttttaatatgaatgttccaaaatattttgaaatgtaatagtgatttgggaa

SEQ ID NO: 610800 - DNA, 562 bp, Homo sapiens
aatcaccacgatgttttgtcttcacttgttatcctgtggcktgcccatgggcctacacacctgtcactccttgcagctatgagataccagagtacaattatggattttatgtttcattgcatcctcttgcctggcacgtgataggtgtgtttattcagtgaatgaatgaacaaactaatcgaccacagaatgaagtagagcctcgaacctgcattaggattctttgaccacatgagaaaaggcacgaacaataattctagaatttggctcaaagttttcacttggttttcattaaggccagaggcaccctgtggaacaatccaaggaaaaattgcaatggtcattaatctccctaagaaattctaacttttcctgccaaatgttttactaagtcttatgactattcaccagtctagcccattaaaaatcataaggactcttagaaactgcatgctgctccaacttgtcctaaagcactgaagttaccaactgagagccagtcaaaagtctaccattcaacaaagtaatacatgaatataagaaaaattataaagtaaagcca

SEQ ID NO: 610801 - DNA, 562 bp, Homo sapiens
aatcaccacgatgttttgtcttcacttgttatcctgtggcttgcccatgggcctacacacctgtcactccttgcagctatgagataccagagtacaattatggattttatgtttcattgcatcctcttgcctggcacgtgataggtgtgtttattcagtgaatgaatgaacaaactaatcgaccacagaatgaagtagagcctcgaacctgcattaggattctttgaccacatgagmaaaggcacgaacaataattctagaatttggctcaaagttttcacttggttttcattaaggccagaggcaccctgtggaacaatccaaggaaaaattgcaatggtcattaatctccctaagaaattctaacttttcctgccaaatgttttactaagtcttatgactattcaccagtctagcccattaaaaatcataaggactcttagaaactgcatgctgctccaacttgtcctaaagcactgaagttaccaactgagagccagtcaaaagtctaccattcaacaaagtaatacatgaatataagaaaaattataaagtaaagcca

SEQ ID NO: 610802 - DNA, 410 bp, Homo sapiens
gtcatttaaaagtgtgtggcacctcctcccctccttcctgactgtgtctctcacctgttcctgcttttgtcatgtgatgtgcctgctgcccctttgccttccaccatgattgtaagccacctgaggcctccctggaagctgagcagatgcccacgccatgctcctggtaaaggctgcagaactgtgagccaattaaacctttyttcttgataaattatacagtctcaggtatttctttgtaccaatgcaagaatgacttaatacaaatgcacacagattttttaaataccttaaatcttttctgaaataagaggttcccttcagtctttcaatcactcattcttatttttttaaataataagtaggacagttataaaatgtaaagccataaagaaacagataattgtttt

SEQ ID NO: 610803 - DNA, 410 bp, Homo sapiens
gtcatttaaaagtgtgtggcacctcctcccctccttcctgactgtgtctctcacctgttcctgcttttgtcatgtgatgtgcctgctgcccctttgccttccaccatgattgtaagccacctgaggcctccctggaagctgagcagatgcccacgccatgctcctggtaaaggctgcagaactgtgagccaattaaaccttttttcttgataaattatacagyctcaggtatttctttgtaccaatgcaagaatgacttaatacaaatgcacacagattttttaaataccttaaatcttttctgaaataagaggttcccttcagtctttcaatcactcattcttatttttttaaataataagtaggacagttataaaatgtaaagccataaagaaacagataattgtttt

SEQ ID NO: 610804 - DNA, 567 bp, Homo sapiens
attattaataataagatttcacactgactgggtaagtaggccagcatcagtgggctcacaaaatgaagctgttcacttatagaagactgaagtgaatggtgttttgaaatatcaaccatgtaaagatatactcaaagagaagtgcacagttagacaaaaatagtgggaagctcatataagcttttatatttatattttatatttgtaatagtcttattaatatttttgattagtaatttttcatgaacctgtgagaagcttcttagaggagtatatatatagtgaaactaattacatataaatacttatattgctgtagttatatagttataattaaggtacctgtacatcccagtttacctgacagtgcaggtgtaattattaggttagtgcaaaagtaattgtgcttttagccattacttttaaaccaactcatatttgggcaatacaggctatgattcttgtacttaaaatgtagttccagaattcactctttcacttattaarcattgactgtgtactagacccagtgctgagtactggggatgcaaagacacagaggctaca

SEQ ID NO: 610805 - DNA, 617 bp, Homo sapiens
gctcagagcatgatgaaatttagatagggagaaggatttgtggaatgctgaaaaggcattctgaatgtcaaaaatgtgtgacttggagtcatgaatggtagaggagaagttttgactagcacacatgcaaatgtgggcttacatacttcaaaacccagaggtaaaacctgttaaaaatgaatgtggcacattcctcgggaaagcttggacaggtttattcatattaggttatcttaacacaatttgtgcattagagactcatgtygtgacttaattctttcaataattctgtcttcagcaaaagaagttaacaaaaaacaagtgtgctacaaacacaatttcaatgcaagctcagtttcctggtgttcaaaaactgttgatgtgtgttgtcactttaccaatgctgctaataattcagtttggagcccatctatgaagctgaatctggttcctggtaagaacgttttaaattactttaagatgttatagtcggggcagggacttatttatttattcactccctcattcatccccattcaataaacatatgttaaataccctcactgtggtaggccctgggctcaccataggggtatttaaaagaaaagaaataagcc

SEQ ID NO: 610806 - DNA, 515 bp, Homo sapiens
ttcaaacatcaaaattctaccttggcctgaccgtatttctactatattgtctcttccttgcaattatccctttatttcaatgtttccaacacaggggaaaacatcacatgccaggatcccgtaataggtgtcggagagccggggaaagtcatccagaagctatgccggttctcaaacgttcccagcagccctgagagtcccattggcgggaccatcacttacaaatgtgtaggctcccagtgggaggagaagagaaatgactgcatctctgccccaataaacagtctgctccagatggctaaggtgatccttaaagcttccactctgagctcttggtggggcgatctatctggctgatcatatttytcagcacttaggaaaatgggtttggtgctgctttgtgttgctccaaaactacttttatttgtgtatttccaaaggagatgcaaccctagaaatgcaaaaaaaaaaaaaaaaaaaaaaaagcctcaattcaaatactaagacaactaagt

SEQ ID NO: 610807 - DNA, 510 bp, Homo sapiens
ggagaaccactgctctcttcaaagctgtcagacagggacattttcatgtttagaatttttgtcaaatgtgggaagtctcttagaaaggttttctcatgtatgagctgtaatacttgaataaatgttcacagagtagcttttattggactgttaccccaatcctacatctcttatacctttcactttctcgtcatgttttagattatgttcataacacagtgtgacctagggtctggcttctgtgtgttgccacaccgggtaagtccacatagatgtctagtaataattttatatagaagtgattaggaaccatacaaatcacaccctactaagcccaaatyaaatgcatgtccaactcagtttccctttagctagatttcaaaaatgctgtagttagtccactgtcactcaaccccacaccacttatgatgaaggaatatttagagtggaaagagagaattatcctaattctggttaaaatatcttaattttgaaaattttacaaaagca

SEQ ID NO: 610808 - DNA, 490 bp, Homo sapiens
aagaaacaaaccatttgaggatgaacacctaagacacacgtcattgaaggcaccaaatgcttgatcttgcatcatgacctaaaagtctcttctactggattatacattttttgagggtacagactgtgatgcatgtactttagcatcccctatggcactcagctaatgcctggcacaaagcagttattcaataaatatctgttgaattastcactgcctttaattgaaaaatggcattcatcagtcatggttactatttagaaataaacttgaaagtctgtgggcatactctggctctggaggctgcccaattcatgaattgttcattgctcaattaaactcttttaaattaaaaaaaaaaaaagaaataaacttggatagctcaaacaccagcacaaagccagtttgtaaaaattatttaagtatgtttatcctctacacttatcttccagatggaagagttgttgtcccacatagcagatgatagaag

SEQ ID NO: 610809 - DNA, 506 bp, Homo sapiens
agtgcccacaagactataactaaagggattaaatcaattttcaagccagcagctcatggtgctaacattctacctctatgcatggtgggctgcactctggatttgaaatcgccattttttttttttttttcctgctgagccttactaggaaaatcaaactagaggctcaatgctcaccccagcgaacgagcacatgacagttccctagaggaattttctttttttaatctcaaatatcttctaggactttagaaatacataatttaaagagcaggaagctgtataacctatgtcaattcaaccactaaaagtgaaaattttaaatttattgcttctttatgacagattagaaaaactaattctttaagaaatatgtgtgtatatgtgaacacacagatgtagaaaatggatcaataaataygtgattaggtattatatttacttttggcatttctgcaaaatgttaatcactcgattaaaagtaaattacattttgacataactca

SEQ ID NO: 610810 - DNA, 553 bp, Homo sapiens
cacagagccaaaccctatcacccagcaacacctactacaatactgcatagaataaatacttttcaagttattgtttctgaaaaacattatcccaaacataatgttatttaaaaaaataaccattttcttatcctcacagtttctgtgggtactgcagggatagcttgtatctcctctatgacttgtgggacctcgggggggaagactcaaggatgtctggaggtgactcaatggtgggcaggaatcatctgaacacttgcttactcaacgtgagcagtggttgatgccagctgtcagccaggtcctcaggtaggatatactaaacatagctctccatggagctgcttggggttcccttcagcrtggctgttggattctaagagcaagtgtcccaaagaaaactaggtgaacaactttaatgatctagccttctactgtcatcgtaagcctgccaagtttcaaggaaagggagaacagatgtccacctcttaattagagatatgtcaaagtcacgttataataacagcacattggatggaagataatgttgcaa

SEQ ID NO: 610811 - DNA, 534 bp, Homo sapiens
gataatccacataatgggatttaagagaagagagagatcctcaatgtagtgaaatagttggagagatctacttggaggaggtagtatctgatccctaccctcaagggtagacaggaatctggaaaggagggagaggaagtccagcttgcaggtggaactgaatgggcaaaagctcagaggaccattttgagggttcccccgctgcaggttcctgtaccatcatgagccctcccttttttaatgaccctgttgtttctactgtctatgtcttcaggcttttgtgttgtccctcaagctgtgtgtgtatgggggggtgaggggtgtggggtgagtgggtgggtgggtgtatttgaaagaatgaagttcattgtgtggsagaggatagtttgaaatacaagcctgaattctttaagagcacagtccacagtccttgaatttttgacctctactaaatctttcatggttaagtaacagtgtttaaaatatccttgttgatctgaatggactcataataattttactgtgttcaaaact

SEQ ID NO: 610812 - DNA, 258 bp, Homo sapiens
atgatgccccccaagccacaaaaccagcaagtttttattagtgattttcaaaaggggagggagtgtacaaatagggtgtgggtcacagagatcacatgcttcacaaggtaataaaatatcacaaggyaaatggaggcagggtgagatcacaggaccacaggaccagggcaaaattaaaattgctaatgaagtttcaggcatgcattgtcattgataacatcttatcaggagacagggtttgagagcagacaactggtc

SEQ ID NO: 610813 - DNA, 258 bp, Homo sapiens
atgatgccccccaagccacaaaaccagcaagtttttattagtgattttcaaaaggggagggagtgtacaaatagggtgtgggtcacagagatcacatgcttcacaaggtaataaaatatcacaaggcaaatggaggcagggtgagatcacaggaccacaggaccagggcaaaattaaaattgctaatgaagtttcrggcatgcattgtcattgataacatcttatcaggagacagggtttgagagcagacaactggtc

SEQ ID NO: 610814 - DNA, 258 bp, Homo sapiens
atgatgccccccaagccacaaaaccagcaagtttttattagtgattttcaaaaggggagggagtgtacaaatagggtgtgggtcacagagatcacatgcttcacaaggtaataaaatatcacaaggcaaatggaggcagggtgagatcacaggaccacaggaccagggcaaaattaaaattgctaatgaagtttcaggcatgcattgtcattgataacatcttatcaggaracagggtttgagagcagacaactggtc

SEQ ID NO: 610815 - DNA, 496 bp, Homo sapiens
acggtttaaacaggaaaaagaaaggtttgtaactgatccagttagaaattatttgacatctcagccaacatgacatgatgggactaactcaaatgtacaataattacatatgtctattgaacaagctgcagacaaaggttatgggctttcaggggacaagctctctcaaataacccttgcagtgtctgaacagaatrtacactatccagaaaggaagactgattaatccttttaggcaggtgactattcccaactatacatgatttgtaacataatccagaaatgtttattcccagtctgaatttatttttcctaccttcctctgttttgctcttatgagtaatttctgctcttagagaatgctcttctcatcctttttctgataatctttgatatttctatgtaggtggaaggatacctcatgaaagttatattttaatggcagttgttttacttgtcctagatgtggaaatttgtgttccccaggtaggatggt

SEQ ID NO: 610816 - DNA, 615 bp, Homo sapiens
acacaaacattttaaatgaaaggaaaatatcatttttattgaagcatttggagacatatggctgagaatctatttaacaaccactaaaaagacacaagctttcctttttctctcttcatgtcattgtaaatattcgcacatgcttcacttctattatattggcccagcgaatttgaaaatatggtgtgggttacaagagggttaagaaaagcctagaataaactcagattaaggcacaactcrtagagtggtcagggaataataataccctgttaatcttccttttcctcagaagaaccaatggagttttgtgggttattgagatagatgtgtgtgatgtagaagacaggagattttaggactaggaacactagcatgaaatagaatgtgacttcctgtgatggttaattttatgtgttaacaattctagatgtttctgtgaaggtatttcttagttgagcgtaccatttatcagtactctttggattaagcagattaccctccatgctgtgagtgggcctcatccagtcagttgaaggccttaagagaacaaagactgacctcctcaagccaaaagggattctaccaggacactgcctttggactgtctccacc

SEQ ID NO: 610817 - DNA, 664 bp, Homo sapiens
aggtgcatatatgtttaggattgtgatattttcctgttggacaaggcctttaccattacataatatccctctttgtctcttttaactgctgttgctttaaagtttgttttgtctgatacaagaatagctacccctgcttgttttggtgtccatttgcatgaaatgcctttttccacccctttactttaagtttttgtgagtccttacatgttaggtgagtctcctgaagacagcaggtagttggttggtgggttcttatccattctgtggttctgtatttttttaagtggagcatttaggccatttacattcaatgttagtattggataagaggtaccattgcattcatggtgctctttgctgcctgtgtactttggttttattgtttttgctttttaactggtatttttgtttcataggtcctgtgtgatttatgctttaaagasgttctgttttgatgtgtttccaggatttgtttcaagacttaaagctccttttagcagttcttgtagtggtggcttggttgtggcgaattctctcagcatttgtttgtctgaaaaagactgtatctttccttcatatatgatgcttagtttcactggataaataattcttggctggtaattgtttggtttgaggaggctgaagatagggccccaatccc

SEQ ID NO: 610818 - DNA, 491 bp, Homo sapiens
gcagggtggtcttagtaagccaagagtcattacatctgggatgagcccttttcctgaatagatacgagcccactcttttcagggcactgtgttgtcagctcacaagcttacgattgtggctttaagtttcctctttatttttgtcacctggaaacttcactttccttcatgcttagctctatattacttttgttgttgtattttatccaacattactaraagttttatttaagagggattcaaattatctcagttcactgtgtttccagaactggaaacatgttatttattcagtattagaatacctgtttgatccttcttaaaaatgtatttagtatatttctctggtgaaaatctttgtcttttcatctattttgtccatcatttcctctaagctcttaaaatattgcaattaattagtttatagtttttataaaaagactctactaactctaatgcctaaataatctgtggatttgcatctattgttt

SEQ ID NO: 610819 - DNA, 586 bp, Homo sapiens
tagtaatatagtctggatatttgccccctccaaatctcatgtttaaatgtaacctccgatgttggagttgggcctagtggaaggtgtttgggtcatcagggcagattcctcatgaatggctgtcctcacagtaatgagtgagttctctaagagttcacatgagagctggatatttaaaggagcctggcacctcctcctctccttcttgctccctctctcagcatgtgatgcacctgctccccctgtgccttctccatgagtgaaagctccctgaggcctcaccagaagctgagcagatgctggtcccacacttgtgcagcctgaataacttaactgtgagccaaacaaacctcctttctttataaattacctactctcagktattcctttgtactaatgcaaatggattaatacagatagtgtatatcttcttcttctctctctcttttttttttttttatttgagacagattcttgctctgttccccaggggagtatagtggtgggatcttggctcattgcaaactccacctcttgggttcaagcgattctcccgcctcagccttctgagagctgggattacagg

SEQ ID NO: 610820 - DNA, 598 bp, Homo sapiens
cagtggttggtggttttggcagaagcattacatgcaggaaaggcaaatccatatccacactgtctattccactaaggacaaaatgctgccccttccatgatggaagtgatccaatgtaattaacctgccaccaggtagctgactgataacccctgaggatggtgccatattgaggactcagggttggtctctgctgctggcatattgggcacttagcagtggtcatacccaggaaggcttttgtgagtggaggtccatgttgttgagcctatgcatatcctccatccctgactgcatattacagaattatctgtaaaccatgcctgagtttctcttcctttgtcaactgattgtagggtactcccctgtgaggccatggatgcaggctgggagaaagaagacaatataacaggagtaggaacgatgggcatttgggccacctcttcatgtaacatacttatgccttcrggacctgctcaaggctgatcacttatataccatttccatttgatgatggagtgctgctgtgcatgcccaatttttacagttcagtgggtcagacaacatgcagttcatgatagacagcttagtttgcatg

SEQ ID NO: 610821 - DNA, 633 bp, Homo sapiens
aggagagccatctatggatgatggtagggccttgctgtaaaatcgtaaaggcttgagcttcaattcacatatagggtccttccaaaggctccaaaccgcatccctgtcttccactgagacctcaagcaccattggatctgctggatcatatagcccaaatggcagagcagtctgtacaacagcctagacctgttggagaggcttctcctattctgcaccctactcaaaactagtagctttttgggtcatgtggtacatgagacgagtaacacacccaaatgagtaatatgttgcctccaaaatccaactaggtccactaggcattgtgccyccttcttggttgtaggagcggccagaagcaagaatatatattttaccttagaagtaatatcttactattccccaaaacactggacccctagaaatttcagtgaggtagaaggacccagaattttagttgattttatttcccaccctctcacatgcaaatgtcttaataagtccagagtagttgctacttcttcttcattggatccaatcagcataacattattaatgaaatggaacaatgtgataccttgtgaaagggaaaggcaatcaagatctttgtgaaccaaattgtgatacagtgct

SEQ ID NO: 610822 - DNA, 559 bp, Homo sapiens
accatcccaagctctccacgtatgtgatttcatttcatcactgcaaaaaacctggaggccatgtttatccctattttacagataaaaaaaccaaggcacagaacaagttagtggcagaacagagattccaatgaagacctctttgactctgatcctgtgttctcactgcctcttgtactgcctctccgtaagtacattgatcctgccaaacagcttcattccattaatyggttttttaaatttatttttcagaagtggacaatggtgagcaattgtttttccagagcacagacacccatgagtttagacctatcttcagtaattagcttttccaaatattcccatctacctaggtagacatgtgttttaaatcattttcacctgatgctctttctcttccactgaatatccttccttcatgaattacatacattaatgtatcatatatatttgtaaatacatttatgttatatatgtgctatggtctgaatgtttatgtcctcccaaaattcatatgttgaaatcctaaccccttcagtgatggtgttaagaggtgaag

SEQ ID NO: 610823 - DNA, 454 bp, Homo sapiens
ctacacaggcattatatgcatgggcttttgcatgacttttgatgggtcaaagataaatgctcaagcttgtgagcatccaagagacaggtctggaaggatataccagtgtgtcagaactggaaagtgttgcgatctggaagagaagcacaactccagcagagaatggcagggagcttttctgttagtcctgtggaattcaaccatgaacygagaaatcatctcactgggacacacttgcagtcatccatttaaagttaagagccataacagaacaggatttagggtataagtaaataaaaaatgtgccaccaatctggggaaatatcttgctaaataattgccatcttccctatgtgtattagtgcccgtgatcaatagacctgggtgtagatcattttatccatctcttttggaacagattcaccttattcttaaaagccaactcagacactca

SEQ ID NO: 610824 - DNA, 441 bp, Homo sapiens
atttattaggtccttttccrccatggtttggggtaaaagagacagtgactagaaatttatccctcataataagctctatagcagattctattgtaaaggctatggttgcaaaacagactttaaattctcttgtgaaagttatgctaaataatggaattgctgtagattacttactggctaaacagagaagtgtctgtgcagctgctggcacttgtggcctgtggagaaatacatcacatcaggtattacagagattcagctgtaggggattaatgaagagactgcttagttaagtaggcagaccctttatctagcttattctttgatctatttaattttaggtggtttggatatggggatcttgggtaactcttcgtgttatgctccgatattcatgatagtagtctccctgatatactgtattctcttaaaagatttaaa

SEQ ID NO: 610825 - DNA, 617 bp, Homo sapiens
atcttcaataagatagcctgcctttcaaataaatcaaacaactaatcagcagatattaattaaacacctaccatatgcataatcatggtgctacatgagagcacattcaactttttctctaacatatgtatcctccttccacgtgcccaacaagtacataagttgcacagatattttctagaatttggaaagttcttccatatttagagttggaattcatcatcttaaatttccaaaatttgctcccagttgtatcctcgtatgccaagtattttgccacatacccatacttcgaatactggagatagtagcatggtatgttccttctactccaggtcaatcatctcattactttaacttttactcagatgatgtctgcataggattccatttrgagtatcatatagcaatgaaaatgccttgaaaccaaagcctgtgcctttgatttgcccctcagcacctagcagtgtcatgcggatagtgggcactaaacaaatacttttgaatctagtgctaagatgttttgtagataaacttgttaagctcaaaagcagactgaggttttggggagaagtagatgataacccctgtgatcatctcttaactacagttaagga

SEQ ID NO: 610826 - DNA, 543 bp, Homo sapiens
gaagatctgtggctaactgggggaagaagagcattcagggtggtgggaactgcaatgacaaaagaccaaagggggtgcatggttgatgcagagagaacaaagggggcagtggctggagaagtggtcagagcaggagacaggrgaacagactgggtggggcttcccctctttcgtgaatctcccacccaagttaatgtctgtgaagagatggttcttttgtttaggcagataaaatgccttcttcaaggcctatttgaagctgcatttccttcttgaagtattcccctttaatgccaatagttccctatacccagattctcttaactctaaagtatgaatcatgcaatcatttcttgtgctttattgtgagtgactatttcttctgtcagcatctttaaagagattgcaagcaatttaaaggtagaaaacacatcatactttttcttcatcccatatagcacatgatgttaaactcaaggtaatcaagaaagaaatgaaagaaatatataaaactgtcaattaagaaaagacaaagaaatatat

SEQ ID NO: 610827 - DNA, 543 bp, Homo sapiens
gaagatctgtggctaactgggggaagaagagcattcagggtggtgggaactgcaatgacaaaagaccaaagggggtgcatggttgatgcagagagaacaaagggggcagtggctggagaagtggtcagagcaggagacaggggaacagactgggtggggcttcccctctttcrtgaatctcccacccaagttaatgtctgtgaagagatggttcttttgtttaggcagataaaatgccttcttcaaggcctatttgaagctgcatttccttcttgaagtattcccctttaatgccaatagttccctatacccagattctcttaactctaaagtatgaatcatgcaatcatttcttgtgctttattgtgagtgactatttcttctgtcagcatctttaaagagattgcaagcaatttaaaggtagaaaacacatcatactttttcttcatcccatatagcacatgatgttaaactcaaggtaatcaagaaagaaatgaaagaaatatataaaactgtcaattaagaaaagacaaagaaatatat

SEQ ID NO: 610828 - DNA, 602 bp, Homo sapiens
tccacctcaaactgatgcaccagtgtccaccccaaagacactggtggcccaccaattcaggtgatgcatggatcacatataaatgtgacatgccccactgaatgatgattggaactacattatattatttcccagtacccagtcctaactgttctttgagtctgtcccattttcccaccaaaatctttaattctcacctgaggccactgcttgttttaagaacaactccattcaagttctggactygttttacatgcagttacctaatatataaagaggaattttgttcttactaagtagggctgtatgctgtgtaccatgaaaatgcggctgattcttcctgagggatcagggaaagcttcaaaaggtttaggcagaggatgatgttaatgacagtttaggctgatgggataacatgaatagagacaaaaacccctgtaaactatgaagaggtagttgtgtgtttaaagtttataattgttattttttttccctcagtagagattagctcactgctatagcgagctggtatactattgtccacagtatatttttgatttatgttccaaaatctgactgccacactttggtcatgatttccc

SEQ ID NO: 610829 - DNA, 587 bp, Homo sapiens
tctaaaccacttatctcctggaggtattcactgacttaaaaaagaggcagttaaggggcaaagttgccaaacagagctttctcacaatggtggggagataagaattggattttagggttttccaaggagaaaaggccctgaaaaaaactccaagaaattctagaactggaaaaatgcccctcttaaacactccccaaatggcctgaaattaaaaacacaatagattaagaatatgtaacagctatctgaagaaatggttattyatctggaagatagatgaatataaaatatccagactgaagcatacagtgttaggaaaaaaatatagaaaatacagaaaaaagcacaggagacatggaactaggtgacaagacctaacacacatgtaactgaaatacctaaaggagaaaacagagaatgatttagaagtaatatttcaagcattaaaggatgaaaaatgtacaaaatgggtagaaggcatcaaaccatagattcaagacataaaacacagtagtataaatacaaagacaaccacatgtaggaacatcatagtaaaagttctaatagaggagaaatacagaataaat

SEQ ID NO: 610830 - DNA, 608 bp, Homo sapiens
caaagttgccaaacagagctttctcacaatggtggggagataagaattggattttagggttttccaaggagaaaaggccctgaaaaaaactccaagaaattctagaactggaaaaatgcccctcttaaacactccccaaatggcctgaaattaaaaacacaatagattaagaatatgtaacagctatctgaagaaatggttatttatctggaagatagatgaatataaaatatccagactgaagcatacagtgttaggaaaaaaatatagaaaatacagaaaaaagcayaggagacatggaactaggtgacaagacctaacacacatgtaactgaaatacctaaaggagaaaacagagaatgatttagaagtaatatttcaagcattaaaggatgaaaaatgtacaaaatgggtagaaggcatcaaaccatagattcaagacataaaacacagtagtataaatacaaagacaaccacatgtaggaacatcatagtaaaagttctaatagaggagaaatacagaataaatatttgagtaattcaaaagaaagtaggaagagagaaaaaggaacacagaggaggaagaactagaaaatagtaacatgata

SEQ ID NO: 610831 - DNA, 501 bp, Homo sapiens
ccagcctggacaacacggtgaaaccccgtctctactaaaatacaaaaaaatttagccaggtgtggyggcatgctcctgtagtcccagctactcaggaggctggggcaggagaattgcttgaacctgggaggtggaggttgcagtgagccaagatggtgccactgcactccagcctaggtgacagagcaagactctgtctcaaaataaataaataaaataaataaataaaaattataaaaaataaaaaaatgaatttttaaagatttacagttcagaccaaaatattgattttcacttgtaaagttttcttagtactctttttctcttatttttaaagtttatttttgaccagataatgaatgaatatggttcaaaattcagaaagtgaaaaaggatgtataaaagtaagtgaaattttttcctcccactcccaactcccagccacccacttttcctctccttaggcaaagtgttattaatttttgtgtgtatcttccagag

SEQ ID NO: 610832 - DNA, 526 bp, Homo sapiens
aaagtcaggcgcatctgtcaacaggaagaacctgggcatrtctggcttctaaccatagatctgcagtgatcatgtttatcatacagtttctcctagaattcaggggctacttcagaggctaaaaggtagttgaaaaaatgttgctggtggccgagatggtgggattctaaggcattccaatcacctgtggggtcaacagagtagaattttttctctgtacacattttcaaatgtgcaaatatatttcaattcctcatacatgtgatgttaccatcaaaaaggtaggatcaaaagatcctagagggaggattcttcaggcagatggcttacccactgaatccaaagcaagagcatagacctccaaaacaaatctgattatttttatttggcccttgacttttaggcagtggttctcaaagctgggtcctgagaccagcagcatcagcatcactgggaacttgttagaaatgcagacttttttttttcttgagacagggtctcactccgttgcccaggctggagtgta

SEQ ID NO: 610833 - DNA, 526 bp, Homo sapiens
aaagtcaggcgcatctgtcaacaggaagaacctgggcatgtctggcttctaaccatagatctgcagtgatcatgtttatcatacagtttctcctagaattcaggggctacttcagaggctaaaaggtagttgaaaaaatgttgctggtrgccgagatggtgggattctaaggcattccaatcacctgtggggtcaacagagtagaattttttctctgtacacattttcaaatgtgcaaatatatttcaattcctcatacatgtgatgttaccatcaaaaaggtaggatcaaaagatcctagagggaggattcttcaggcagatggcttacccactgaatccaaagcaagagcatagacctccaaaacaaatctgattatttttatttggcccttgacttttaggcagtggttctcaaagctgggtcctgagaccagcagcatcagcatcactgggaacttgttagaaatgcagacttttttttttcttgagacagggtctcactccgttgcccaggctggagtgta

SEQ ID NO: 610834 - DNA, 615 bp, Homo sapiens
aagcttaacattttagagcactactgttcaacagaattttatgcaattatgaaaagttatttgtgcagtccaatacagtagtgactggccataggcagctactgagcactttatatgtggctacatagagttgcatattgctaatagccactgttttgaacagtgtacctacagatggaaaatgaaacatgctatgttagtaactataatattacttatgaatttggtttctttggatcttgytacatgttgggttacattttggtagatggtaactaagagtcagaatcagaacctaaacatttttaaaattcttgctctaacttgaaaacagtttaaaagaaaaaaaatcagtgagactggagcgcctgtaactaagaagttatgtaagaagaatgaaaggagactggatagtcttgagtcacaggaagaagaatggacaaagattgataaaccactatagaagatggagagtgaatgggtgcagcatttctggagaacaattttagcaatattaagatttttaaatgcacatgctccttaatttcctttataagtatttctcttacatatatactcacaaaaaagccaatgttccttgcagcattaccatag

SEQ ID NO: 610835 - DNA, 615 bp, Homo sapiens
aagcttaacattttagagcactactgttcaacagaattttatgcaattatgaaaagttatttgtgcagtccaatacagtagtgactggccataggcagctactgagcactttatatgtggctacatagagttgcatattgctaatagccactgttttgaacagtgtacctacagatggaaaatgaaacatgctatgttagtaactataatattacttatgaatttggtttctttggatcttgctacatgttgggttacattttggtagatggtaactaagagtcagaatcagaacctaaacatttttaaaattcttgctctaacttgaaaacagtttaaaagaaaaaaaatcagtgagactggagcrcctgtaactaagaagttatgtaagaagaatgaaaggagactggatagtcttgagtcacaggaagaagaatggacaaagattgataaaccactatagaagatggagagtgaatgggtgcagcatttctggagaacaattttagcaatattaagatttttaaatgcacatgctccttaatttcctttataagtatttctcttacatatatactcacaaaaaagccaatgttccttgcagcattaccatag

SEQ ID NO: 610836 - DNA, 596 bp, Homo sapiens
ccactataaaactttcactttagacattttcattaaatatactatgaatacattcgagagactaaaagaaaaatctcagtactcactagtcagtactcagtattttgagccttcttaaatacggccagagaactagactgcctcaaagcttcctcccaagttaacagtattaccattcaaagcttttatattactatgttttatacttctagagggagggttgaaactaagtcttatatgatgcctatctcacatagtcccacccaccaagtagggactctactacctgttgaaygtatacattccatggccttgtgcaggaggtttttcttttttgaggcagagtctcactctggagtgcagtggcacgatctcagctcactgcaagctccacctcccgggttcacaccattctcctgcctcagcctcccgagtagctgggaacacaggcgcccgccaccacgcccggctaattttgttgtatttttgtagagacggggtttcacagtgttagccagaatggtcttgatctcctgacctcgtgagccgcccgtctcggcctcccaaagcgctgggattacaggcgtgagccacca

SEQ ID NO: 610837 - DNA, 623 bp, Homo sapiens
tgttaaattaagaaagtgatgtattatttatatagtttctgaatctattatttgatcctcataataatcctccaagctaagtaatattatttctaatttaaagataaagatattaatgatcaaaaacattatgagacttactcaagatcaccattttgggggcatggctgaaactcaagcccatgtgttctgagcataaattcaataaggttctattattcttattctgaaatgtagctacagtgtcagtggatgccaaattcctaagactgtttaacttccaataagacacttggaactccaaagtaaagaaccagataaatgtatgtgtcatattgaagttccaagtactgccagggataggaaaaatacttcttttttggtaagtctgcctttcccagtgtcytaagccttagtgtgtgtgggcagctctcaactctgcctaggatatcctgttgaggaaactgaccaatctgattccctatacaaatggaaagaaatacaagaaaataaacatgcaaaacaaacggccaattaactcttttctgagagattgaagcaaggaagatgctcaaaaaaagtaatttattattttaaatgtagctgtgtgcctttaaatgcaa

SEQ ID NO: 610838 - DNA, 557 bp, Homo sapiens
atttaattctaacctttattaagaacttccctgtgccaggcactacactagggatcaggaagacagaaatggaaggcaaaagtttttgcttttcaagggtcccaagtctggagaaatagtctgcattttgtaaattccataagtkgtttgctgaaggtcatgtcattattagttagtggacagatcaaagaaaactaacctggaatattctaatccaaaaaagtttgtaggtagactttctcctcactaactccttgaaagcattagaatatgctcttctaaggcttgtattcatttgttgggttttcagagcaaggtatacagccacatactgacattgtaagtccaggctcattatgggtgagtcacatgtgcatgttggagaaggacatagggggtttcaaggtgatgaatagctagggtttgcagtcagccatttctgcccttggcacatatctgttatgaggacttgagaagtcatttaatcttgcatggctttattttaaatgggagcactaatacctaccttataagcagttggatagaggatgaaaaaa

SEQ ID NO: 610839 - DNA, 511 bp, Homo sapiens
ctagagataacttgttcactctctattcttctaagggtaactacacaacagaaggctgtatactctcacttttggttgggttggagtagaaatataatttctgtgtcttaatggtattttactcataaatggtgcctgaggtgtactaagcatagaagaacaaatgaaataaatgcttattcttctctgaggaggatattgyactatagtggaagagggcctattatcaaagaactttcagagatatggttaggagaaaaaaagggatgaaaagaaagaaacttatatttgttgcatgtctacatgtactattttatttaatctttccaacaatagctcttacgtatagatttcaataaatcagagaatttgctcaaggatgctcagatggtaagtaacagaattggtatctaatgaaggtctttctgaattcaaagtctactgcctcaagataaggtactgtgtatagaaaatgtatacatgtaaaaattaaaagaaacatagagaatgt

SEQ ID NO: 610840 - DNA, 632 bp, Homo sapiens
tttgagcaaagaagaaactccaggtgaaagtgtttcctaaggttagactttgaattcgatgaatccatatcccttgaatattcttgtagggtatcttctcttcttgttgtcagtgggattctgaaattttattgacatttggcagacattgcggctggaaaattattgtttagaagtctggcttaatttgggagattccttactgtaaacccaggagagatgcattctgagatctgggggaagtctaaagtgctccagtttcctttatatagttagatattgaattttcaatcccccatgtagaaatgtgatgccttttgttgttgaattatctgttattgaacttttatgtgtttgtatttggagctgataacttctgacaatctctgcttaaatgaagattatgttttgtgcaatgaagaaatyccctttctctcacaattagtcagtctaccttctcattttctttttatcttgttcttatgtcaaccatttaattgagatgttaaggtccctcacagttctgagtggcaattttaaaccagatttctccatagacttagaagctagcagcatttgttagatgaggctgatccaattatttaggctgaaaactctggagagataagatt

SEQ ID NO: 610841 - DNA, 640 bp, Homo sapiens
tgcaaagtgcactatccttctctttccgatgtttatatctttaccataacttaaatttccaacagtaactagcaatccacctacacccagtgctgtccattgggttgtagggacaaggtcaagtaaatttttcttaaacataaatagattgaactaattcagatgagatcagattcagattaagacagaaatgaaagtcttatttaataaaacaaagaatagagtagaatggttagagagaagttataaagggccacagccatgttaatgaatgcatgggagatcagggaaaaccaatgccctaatgctgaggagaggagatgatgttataggctgattttatgtatataaaacactgtactgtttcaaaccagccaagagaaatatagcacactagactccagcacattttaaaragtattattttcagtgagcatccattaaaaacaaaatcactccactgtataaagcatgctttgttacagtggaaggtgtatggtgacagttgattctatgggtagaaaatgacctgtggatgatgtcaacgtggctcaggccacttcacaggcacagaatggtgtggattttatggacaatgattgacatcacggaagtctgactggaagtatgcatgtaccac

SEQ ID NO: 610842 - DNA, 646 bp, Homo sapiens
attttacccagcctcatatgtatattgttatgggagaagatgttgacactattgaaaggaacaaggtgggcttatctccagcatgaatatcttttggagtcttgactcaggaaatgacttctttgagatattttcctctccctggacatgtggggtttccttcacctagctctcaaatgtattatggggaatattgccttcacaaagatctggaggttggtagacgttgttccatccaggagaccctgctaacaacccagccgcataagctrgattgtgagtcctaactcttacacatgcaccagggctgagatatctgctgatggtcagcaggttatggcctatatatttgagtagatagaaagctatagtcagagggtttaaacaatttgtccaaagctacggagtggaccacttctatctcattgcatagaccactatttccatttttctgctttcattggctagaaactttgcattcctagatctgaaagttgagcagggttgatctcctttctatactgaaatttaaatatctcaaaccagagtgggagattagataccccctctgttttccttcttacactcataatctgaatatttttgctctcagttttattttggtagttgggatatttgagacgga

SEQ ID NO: 610843 - DNA, 603 bp, Homo sapiens
aatatattatttaataacaacattttaaaaaacactcaccaaagtgaatataaaatatagatgcacttaacaacatatccttaaaatagaaaagcaaaatttgtatcattttcaaaattgggaaacactattgtaagtgggaaatttttaaatatctttattggaacctgatagaatacatagacaaaaatagtaaacaaatttaaccagctttattatatatgtgtgtacatattcccktatatgcacactatattcaaaaattgatcatataatttttagaaaatacaaaaagtacacatatatttacaacatacatagacatttataatatatgcagtcatcaagaatataaaatattttaaagacttgatattggctgggtgcggtggctcaggactgtaatcccagtactttgggaggccgaggcgggtgaatcatgaggtcaggagtttgagaccaggctggccaacatagtgaaatactaaaaatacaaaaattagccagtcatggtggcgcgctcctgtagtcccagttactcgggagactgaggcagcagaatcacttgaacccaggaggtggaggttgtggtgagccgaggtc

SEQ ID NO: 610844 - DNA, 463 bp, Homo sapiens
taaatagactgcattttttatttacagtgmaattaatttagacattggcaataaaacagtataagtgttttgttacttttcatctgttaactatgctaaagaaaaatgttttggggggcagtggttttctcatggactgaacattggaatcacatggggagggaggctataataaatactgatccctggatttcatccgcagggattctaaggaaattggtctctgggatatttaacctggggattgaaatttttaaaagttctccaggtgagtctaatatgcagttcaagctgcactccactgattgagggtctagcaatatttctaccacgtaagtgttacagcctttaaagatgaaatcagaaagacaaatgcttttgcttctgttcaagagttatcaaggagatacaatcttcattgaaaacatagaggctggtgatgtaatcagcacagcagctgtca

SEQ ID NO: 610845 - DNA, 558 bp, Homo sapiens
ccatgtgtactcaatgtttagctcccatttataagtgtatttagttttttaaatgagtgagtacatatcctttgtgtacaagtactgtgatttatgtcattattctcccagaagggacatttagattgtttctaataataataaagttgagtgaatatctttgacttacatttctttgtgcttatcctacaggatattttcatacattatattactattatttctatataagtggtcaggaagtttggttaatgaatggatttcctcttatatgtcaacaaagcttctcacaacttactgcctttcatttcaaggtgaacctaattggaggtattcctctgtgggacgagagctccaaaatcaccagtgcaaccccagtggagggtcctggtccctgctatttctctaatcactcactctagcttgatgaatgttgaagggagatagatgcctgctggctgaataatttctacagagctataatggtaggttatttttaagtgagcaaaacttgrgcagcatattttgataacgaggaggcgagtagagtaacgagca

SEQ ID NO: 610846 - DNA, 681 bp, Homo sapiens
tctcttctcatttctgtcatttccaaccaaaaagtcttgatgaacatgagagaccagagtcacctttagggttatgatgctgcttgtatcaagggccctatctcaggatgaagatggagaagtaacaggtgaaactcaaaaaaggagacctttggatgccaggtagaggaagttaaatttctttatatagtccgaagcattttgagcaaggcagtgkcatggtcaaatctgtcattgaagagattgaccctggtggtaatctatacgagactggagcagaagatggcaggcagaaaaatcagatttggtacaatggtttgcttacacatcagttactaagtactcagaatacttctaacactgctgtgctattgcatttccagagcaatctcacaacattctatctagcttactctctcataataaagcaaaagtgaaataccctgctttacaacagtttaaactactgtgaaaataaaaaatgattcattcactaaacttttgctgagcacctactatatgccaggcagtagagaaacaacagtgcacaaaaatgaagtcttggtccacatgggagaggctgtaaaaggaacaaatttgggggctatcggtttaaaattaaataagtttaattttgaacatattttgatatgcctattagacatccaagtgagacatgaa

SEQ ID NO: 610847 - DNA, 609 bp, Homo sapiens
attgatgatggatagttagttaccttgcacagaatattcagtggcacagacctcccgccatggggttcatggtgaacacatgaaaatgagaagtgacaacatgggaatcagaagacataaataattcaaaggttaagagttattgtaagaagaccatacctgaaagtgaaaattgaacacatcttcagaaatgtgttaacatagcatgctatgaaggaaggcttttcatttagatcaaatagctgttttcactttcatgttcaaattttcatagcatctataaaaagtgaagctatagctgtaaatgttttgcctccttttttttttttttttttttttttttgatattgttgttgagatggagtttcgctcttgttgcccaagctggagtgcaatggcacgatcttggctcactgcaacctctgcctcctgagttaaagcaattctcctgcctcagccttccragtagctgggattacaggtgcccgccatcacatccggctaattttttgtatttttagaagaaacaggatttcaccgtgttagccaggctggtctcgacctcctgacctcaggtgatccacccacctcggcctcccaaagtgctgg

SEQ ID NO: 610848 - DNA, 628 bp, Homo sapiens
gaggaggattgcctgaacacaggaatttgaaaccagcctaggcatcatagtgaaaccctgtctctgtaaaattaaatatatatagttttaaaaaaacataagtcattgcttttgagtgatattttgttttatttttaagtgcaagtaaataacagtgacaaattttctatttttttcyagaaaaattagatgaaatctagatattaattgatgaaatgaataattccccaaggagaatagttatttattcatgaattataaaagacaatttatttataatatgctagaatacagcttaattttgaagcaatttcaggtagggactaataattttcccttatgaattaaattgtaagtgtcatttcaaagatatttttacttcagctttggcttaatggcatttcaaatttctaataattggattatatttaaagattcaaaaggtaaacaatatttaggtttgtttttttcattttataaaccaaaaacacatttccctgatctcttttctcacattcaccaaaggggaaaagaaaagacaatatagttaataataagtgagaaattaaataccattgttttattcctatgccttatttggtagtatgtttcaagagtgttacagttt

SEQ ID NO: 610849 - DNA, 628 bp, Homo sapiens
gaggaggattgcctgaacacaggaatttgaaaccagcctaggcatcatagtgaaaccctgtctctgtaaaattaaatatatatagttttaaaaaaacataagtcattgcttttgagtgatattttgttttatttttaagtgcaagtaaataacagtgacaaattttctatttttttctagaaaaattagatgaaatctagatattaattgatgaaatgaataattccccaaggagaatagttatttattcatgaattataaaagacaatttatttataatatgctagaatacagcttaattttgaagcaatttcaggtagggactaataattttcccttatgaattaaattgtaagtgtcatttcaaagatatttttacttcagctttggcttaatggcatttcaaatttctaataattggattayatttaaagattcaaaaggtaaacaatatttaggtttgtttttttcattttataaaccaaaaacacatttccctgatctcttttctcacattcaccaaaggggaaaagaaaagacaatatagttaataataagtgagaaattaaataccattgttttattcctatgccttatttggtagtatgtttcaagagtgttacagttt

SEQ ID NO: 610850 - DNA, 561 bp, Homo sapiens
ttctcacattcaccaaaggggaaaagaaaagacaatatagttaataataagtgagaaattaaataccattgttttattcctatgccttatttggtagtatgtttcaagagtgttacagtttctttaatggattttaacctatccagatttactatttcttcttgtgggtattgcaatattattttttgaaaaaaatatctttctttaatctatatctttaaatatttaaatttatacaactcatattttaaatttatatctatagttacatttttttcattactaatattctttcattaagcattctctctgtcttaaattttagtctggtaggtagtttgccaattttgtcttttcaaaaactatgcttttcttctccccttaatgtatgattttaygttatcattttgttcctcatcatgttataatacatgcttttcactgttgctcttgaatcccacttcctttggcttcatttttccttttgtagaaaggatgatttgtgattcttaatgtcttaaaagttttgattgtactcactgaaaattttgcagtacataa

SEQ ID NO: 610851 - DNA, 626 bp, Homo sapiens
taacaaaatgaaaatatcagaactttcaaataaattaatttatctctgtgcttaataatatttttcaaaatttaaatgacattataaatggaatgaaattaaaattaccctatatcatatattgtataatgttaataagatcccagtagtacttatttccaaactacccaacatttaagatattatgttacaatagatttttaactttaacttgtacacacacacatatatgtaaatatatatgtatatatatgtgtatatgtatatgtgggtgtgtgtgtgtctgtctatgtgtatgtgtgtgtgtgtgtgtgtgtgtgtrtatatatatatgtatgtatttagagacagagccttgctctgttgcccaggctggagtgcatgcagtagtgcaaagatggctcactgcaacctgacctcctgggctcaggtgatcctcctgcctcaccttctgagtggcagggactgcaggggtgtgcaatcatgcccagctaatttttaaaattttttatagagatgggatcttgttgtgttgcccaggctggtcttgaactcctagtgtcaaatgattctcttaccttggcctcctaaagtgttgggattacaggtgtaagccatagcaccag

SEQ ID NO: 610852 - DNA, 482 bp, Homo sapiens
taccttggcctcctaaagtgttgggattacaggtgtaagccatagcaccaggctttaagttttgacagcaataaaattcatttttatactaaaatatagatgaataaataggtaacttctgtttataataaggtaaacctcttgtgtgctttgaaaagctttgagaaaaaagtcaatcatggaatggttcgagaaaaatatttaaaaagatgcaatatatatttaaacttacataaatttgagtrccagaacaaatcatcttacctttataaattgatggaaatgacattatttggatgggctttaaagcacttgaatttataaatatttggtgagaatgcctaatcacatttatgtttcccttgtttaaaagaatgatcacatgctggcaaaggctaaatatggtctggttacctgatttagcatacaaatatttgcctgggagcaagccgtgtaaccatgcttcattataactggtaatt

SEQ ID NO: 610853 - DNA, 622 bp, Homo sapiens
ccctgcttccttgctgtggtcttctcacaacagccaaagcagcactggtgtgcccttagaaacagaagtcaaatttctaacgttcttttatctaattctaaataaaatcaaactatcttctccttcrtggcttaaatattttggccacccatttatcaccgtggttgaaacaagcaagcagccacgggggcttagaagctgacaggcttagaacacaagaagcatagatggctagtgaaataaaaagtcagcttagaacagaaaacaactaactgcaaaatttagcttttgcttagccagaaaagtccccagcctcaagcagccacgcaattacaaaggcttgcctttaaagtcacctttccacattttagtgctaaagatcatgctaaggggcagatatttaagatgctaataataatggctagcatgaaaaagcatgttaaaccacagcacatgctccagaaacacccctctacatgctctgacggtagttccccttactttcccttactctagagccccataaaagaaacccaccccctaactttccagagcagcccacttcctttttggagcttgctcccttgtgtgcacagctttaataaatactttcttcttactc

SEQ ID NO: 610854 - DNA, 547 bp, Homo sapiens
cagaaaagtccccagcctcaagcagccacgcaattacaaaggcttgcctttaaagtcacctttccacattttagtgctaaagatcatgctaaggggcagatatttaagatgctaataataatggctagcatgaaaaagcatgttaaaccacagcacatgctccagaaacacccctctacatgctctgacggtagttccccttactttcccttactctagagccccataaaagaaacccaccccctaactttccagagcagcccacttcctttttggagcttgctcccttgtgtgcacagctttaataaatactttcttcttactcgttcatgttgtgatttctcttgatttttatcctgggggatcacaagagcccacaggcaatagtaaaaaatggctacccctttctaggcccattggattcattagcaatttttcagacaagtttttttccccacttcaagatacatgttatttcctttccctctgccaagtaaatactcgtaygtctttcacttcattcaaggctctgttcaaatgtgattat

SEQ ID NO: 610855 - DNA, 571 bp, Homo sapiens
cttgactccctcttgcttttagctgaccctctagctgacctccaagctgtcattgttcatttctaagtataggccaagctgactttgagagaaatttagtttatagctkaaccttaaagtaaggatgataatagcctttcccaaaactacttctttcagagaccaaaactacctttgtaaaactaatgaaagactacaaggttaggattatgagaggggcctcaattctgccaagatgtagctaatgataactaccatcattctggaggtcacaagatgtgtaagttccgtaattattactatagataacatcattattgtagaaactaaaattgcttttttaaggtgtcattcagacgtttgcattactgaggactcgctcactctaacccgaacctgtgattcatgaatcaactggtctagtggcaccactcataagctcactcagtgcgcaaggaccgcttgccacacctttgttatttttatcggcatccaattagcagcacctattccctaaactcctgcccaccaaattgaacttaaaaaaaagtctccaaattctgggggagac

SEQ ID NO: 610856 - DNA, 571 bp, Homo sapiens
cttgactccctcttgcttttagctgaccctctagctgacctccaagctgtcattgttcatttctaagtataggccaagctgactttgagagaaatttagtttatagctgaaccttaaagtaaggatgataatagcctttcccaaaactacttctttcagagaccaaaactacctttgtaaaactaatgaaagactacaaggttaggattatgagaggggcctcaattctgccaagatgtagctaatgataactaccatcattctggaggtcacaagatgtgtaagttccgtaattattactatasataacatcattattgtagaaactaaaattgcttttttaaggtgtcattcagacgtttgcattactgaggactcgctcactctaacccgaacctgtgattcatgaatcaactggtctagtggcaccactcataagctcactcagtgcgcaaggaccgcttgccacacctttgttatttttatcggcatccaattagcagcacctattccctaaactcctgcccaccaaattgaacttaaaaaaaagtctccaaattctgggggagac

SEQ ID NO: 610857 - DNA, 651 bp, Homo sapiens
tagcatgcgcctgtaatcccagccattcaggaggctaaggcaggagaatcgcttgaacccaggaagtggaggttgcagtgagccgagatggtgccactgcacaccagtctgggtgacagagcaatactccgtctcaacaaaaaaaaaaaaaaaaaagaaaaaagaaaaagaagttattgcaccattactgaaagtaatgttgttgttatatttaaatatacagaagagctatacattcttcattcattaacttacatactggggcttcacataagtaggtaaacttcctaaaggcatttgagtttattatccttgaaacagcaaaatcattaaattaaatatgttgggcacttaaacagagctctgtgaaatagctatgcaagagctaatcttgggkataagaagaaactagaaaaattaattattgaggaagcagaacactgcaatggctaagttatgatttaaagttttcttaataatataaatgactctaatggaatgaaaaataaggcattttcatcaaggtaagaacagggcagtaatacactttctaggatacagtaaagccaggggcagctcaccagcacatatgggggacagaacgcttcaagttacagtgaacaacttcagatatgattctgaaaagtttaa

SEQ ID NO: 610858 - DNA, 422 bp, Homo sapiens
tggtacaaactttcttcttttttttttaatggattttgctcttgttatttctaccttctgggttcaagtgattctgctgcctcagcctctggagtagctgggattacaggtgcccaccaccactcccagctratttttgtatttttaatagaaacagggttttgccatgttggccaggctggtctcaaactcctgacctcaggtggtccgcctgcctcgtcctcccaaagtgctgggattagaggtgtgaaccaccacgctaggcccttcttcattaaatttttgatagaatttaccaacaatcccatctgggctctttttcatttatttctcacctgtcttctagtagtgtcacatacccatagtacagttctcaaagccaggagattaacactgatgcaataccattaactaaatggtaa

SEQ ID NO: 610859 - DNA, 422 bp, Homo sapiens
tggtacaaactttcttcttttttttttaatggattttgctcttgttatttctaccttctgggttcaagtgattctgctgcctcagcctctggagtagctgggattacaggtgcccaccaccactcccagctaatttktgtatttttaatagaaacagggttttgccatgttggccaggctggtctcaaactcctgacctcaggtggtccgcctgcctcgtcctcccaaagtgctgggattagaggtgtgaaccaccacgctaggcccttcttcattaaatttttgatagaatttaccaacaatcccatctgggctctttttcatttatttctcacctgtcttctagtagtgtcacatacccatagtacagttctcaaagccaggagattaacactgatgcaataccattaactaaatggtaa

SEQ ID NO: 610860 - DNA, 422 bp, Homo sapiens
tggtacaaactttcttcttttttttttaatggattttgctcttgttatttctaccttctgggttcaagtgattctgctgcctcagcctctggagtagctgggattacaggtgcccaccaccactcccagctaatttttgtatttttaatagaaacagggttttgccatgttggccaggctggtctcaaactcctgacctcaggtggtccgcctgcctcrtcctcccaaagtgctgggattagaggtgtgaaccaccacgctaggcccttcttcattaaatttttgatagaatttaccaacaatcccatctgggctctttttcatttatttctcacctgtcttctagtagtgtcacatacccatagtacagttctcaaagccaggagattaacactgatgcaataccattaactaaatggtaa

SEQ ID NO: 610861 - DNA, 422 bp, Homo sapiens
tggtacaaactttcttcttttttttttaatggattttgctcttgttatttctaccttctgggttcaagtgattctgctgcctcagcctctggagtagctgggattacaggtgcccaccaccactcccagctaatttttgtatttttaatagaaacagggttttgccatgttggccaggctggtctcaaactcctgacctcaggtggtccgcctgcctcgtcctcccaaagtgctgggattagaggtgtgaaccaccacgctaggcccttcttcattaaatttttgatagaatttaccaacaatcccatctgggctctttttcatttatttctcacctgtcttctagtagtgtcacatacccatagtacagttctcaaagccaggagattaacaytgatgcaataccattaactaaatggtaa

SEQ ID NO: 610862 - DNA, 623 bp, Homo sapiens
taaattacagtaaaaccttacctgtatataatgattaattggtaagaattttctctttatagacataggctttaagcaaatgttattagtgaaaatagatgcggcttataatagctttctaggaaacaaacaagaccttaaaggaatctttccactcagctcatgcacccccattgtgttacraatggaaaagggagctcttgagaggttaagagggcacacaaatctctggttagtgttctctaatgctgcagacaggatggatgggcgtgggagtgcagtaatgagaaccagcaggacctgacccactgtaattgtggttttataattcactagggcagagagcctggaaaccagtcagaactgatttctcactatctaagtatgatgtttgttcccacttaaatggcaaataataaaaatggcaaatttttttttaaaaaaacctttctttgtgtttacttactaatgaagttttagttacacttaagaaattaggagaagaaaagttaactttattatttataactttacagaacttctatattgtgtagtgtattattcatttctttcaataaataatttttattgaatacataatacagaaattagtaattaatttc

SEQ ID NO: 610863 - DNA, 489 bp, Homo sapiens
tttgaaatggtcatccttactcagaaaaaacaaacaaaaaggtaatgaatttttcagaaatcaaaagatatttcaaaaataatcataaatgatacctgctttttaattatttctgcacatgaactttactttaggcttgccgagtttctacaacctatttcttgattaattgtttgccctttattctgactgaatgatcttcagcaaatatagtgaatatccctcatcatctctaagctaataataacatatatctgactttatggcttaatataatgctattataaaagtccaaatcatctaaggttattaaatattcagctgcttaaaaattggtaagattttgttatattcattamagaaatgcttggcacctgaggaattattaggttaggctggtatgggaagatttgagatagatcttgccctgttttgtattagggtcatggaagcagcagaaaataaaactagaaggaacatttatcatta

SEQ ID NO: 610864 - DNA, 623 bp, Homo sapiens
taaattacagtaaaaccttacctgtatataatgattaattggtaagaattttctctttatagacataggctttaagcaaatgttattagtgaaaatagatgcggcttataatagctttctaggaaacaaacaagaccttaaaggaatctttccactcagctcatgcacccccattgtgttacaaatggaaaagggagctcttgagaggttaagagggcacacaaatctctggttagtgttctctaatgctgcagacaggatggatgggcgtgggagtgcagtaatgagaaccagcaggacctgacccactgtaattgtggttttataattcactagggcagagagcctggaaaccagtcagaactgatttctcactatctaagtatgatgtttgttcccacttaaatggcaaataataaaaatggcaaatttttttttaaaaaaamctttctttgtgtttacttactaatgaagttttagttacacttaagaaattaggagaagaaaagttaactttattatttataactttacagaacttctatattgtgtagtgtattattcatttctttcaataaataatttttattgaatacataatacagaaattagtaattaatttc

SEQ ID NO: 610865 - DNA, 537 bp, Homo sapiens
ataagtgattatgatgtgcattgtattatgtggtatgttatcatcaaaatataagaaattccacaaaaactgtaggaagataaatgtgataggcagcctctaaatggccatctaaaatccttgcctcttggtattcacrtcttgtgttatctcttcctcttaagtgtgaggtggacatattgcttctcttataatgactagaatgtggaagaagtaatgagatgtcatttcagatattaggttataaacagactgtggcttcaatcttgggtgctcattcccaaatccctctctggcttgttcactcttaggaaagccagttgctatgttgtgagctgctctgagcaaatgctaacatggcaagctgctgagggaggctctggccaaagtcagtgaggaactgaggttctcagttttccaggctgtgagacactagaaccttccaacaactacgagtgagcttggaagcagatcttcctttagttgagctgcaaaaggtaccaactgacagcttgactaaacctaatgagagaccct

SEQ ID NO: 610866 - DNA, 537 bp, Homo sapiens
ataagtgattatgatgtgcattgtattatgtggtatgttatcatcaaaatataagaaattccacaaaaactgtaggaagataaatgtgataggcagcctctaaatggccatctaaaatccttgcctcttggtattcacatcttgtgttatctcttcctcttaagtgtgaggtggacatattgcttctcttataatgactagaatgtggaagaagtaatgagatgtcatttcagatattaggttataaamagactgtggcttcaatcttgggtgctcattcccaaatccctctctggcttgttcactcttaggaaagccagttgctatgttgtgagctgctctgagcaaatgctaacatggcaagctgctgagggaggctctggccaaagtcagtgaggaactgaggttctcagttttccaggctgtgagacactagaaccttccaacaactacgagtgagcttggaagcagatcttcctttagttgagctgcaaaaggtaccaactgacagcttgactaaacctaatgagagaccct

SEQ ID NO: 610867 - DNA, 514 bp, Homo sapiens
cacagaaaccatgaaattacatgtattttccaaaccactaagttgttggtaatattgtacacagtaataggaaagtaatgaaataggtgttcatatttttttctaatatttactcttaaaatactacacattaaagaaaactttaacatgaatgytacatttttaagtttttaaggttttctaaaaatatacaagacattttgtctaaagtaaaatcagaggataagtgaaaggagatttctctattgatcattaccaagaggttagcatcttggtaaatatcttaaatatttgaactaaaaaatatacaaattgtcttttaggagaatttgtggttttgcttggggtatttttgtttgtttgattttttttgtttttttttctaaatcagtactgtcttcaaaacaaattcatgtgcttcttaggaaaaccttacataactctgaccaattaccccaaagcagtgattcgttctttgtacacctttaggtggagaagtctggaatgccaatgg

SEQ ID NO: 610868 - DNA, 600 bp, Homo sapiens
gccactgcactccagcctgggcaacagagtgagactctgtctcaaaaaataataatgaaataaaaataaataaataaatgcatttacaagataaatcttgtcatgttttcttccaacsaactccctaaacacctctcatacagaaagacctaaccagccactctgtcactttgtgggggctttaatgcaccttatattatagtatcctactttagaatgcaggcctttaaaccatgataaggaagctgatgaaacctatttagaataaggtacttgtgaattaatatattattctttccagtacaagaaacaattttaccagagggctagccagagaagtcaatgtttaaaatataaatacaagtttactgaaagtaaaatttcaaatatcaataaaagactgagggaaggggattttgatacgtgtctactcagtcacacaattgcataatgctttgtgtaaggaaaaaaattgttaaaatataacaaagaatatacttgaaacttctcgagaatttacattttgaggaagaagtgaaataggaaaatgaaataaacggaaacatctttacatgacatacaagcatatcttgctatatt

SEQ ID NO: 610869 - DNA, 600 bp, Homo sapiens
gccactgcactccagcctgggcaacagagtgagactctgtctcaaaaaataataatgaaataaaaataaataaataaatgcatttacaagataaatcttgtcatgttttcttccaaccaactccctaaacacctctcatacagaaagacctaaccagccactctgtcactttgtgggggctttaatgcaccttatattatagtatcctactttagaatgcaggcctttaaaccatgataaggaagctgatgaaacctatttagaataaggtacttgtgaattaatatattattctttccagtacaagaaacaattttaccagagggctagccagagaagtcaatgtttaaaatataaatacaagtttactgaaagtaaaatttcaaatatcaataaaagactgagggaaggggattttgatacgtgtctactcagtcacacaattgcataatgctttgtgtaaggaaaaaaattgttaaaatataacaaagaatatacttgaaacttctcgagaatttacattttgaggaagaagtgaaataggaaaatgaartaaacggaaacatctttacatgacatacaagcatatcttgctatatt

SEQ ID NO: 610870 - DNA, 604 bp, Homo sapiens
gcaggtttgcggcaacgctgcatcaagcaagtctgttggcatgctttttccaatggcatatgcacacttcatgcctctgtgtcaaattttcataaattcctgagttttttcaagctttattagatctgytatagtgacttgtagctaatgatctttaagttagtatttataattgtgttaggggtaccatgaactatgcccatataagtccacgcacttaatcaataatgtgtgttctgactcctccactgactgtttccccgtctctctcctcatgcctctctattccctgagacacaacaatattgaaattagacccacaatggcctctaagtatttaagtgaaaggaagagtagtatgtctctcattttaaatcaaaagctaaaaaatgattaaacttagtgaggaagtcatgtcaaaaaccaagacagagtaaaagctaggccccttgtaccaaacagcagagttgtggatgtaaagaaaaatttcttgaagggaattaaaaatgctactccagtgaacacatgagtgataagaaagctaaacagccctatttttagtatgcagaaagttttagtggtctggatagacaatgaaaccagc

SEQ ID NO: 610871 - DNA, 604 bp, Homo sapiens
gcaggtttgcggcaacgctgcatcaagcaagtctgttggcatgctttttccaatggcatatgcacacttcatgcctctgtgtcaaattttcataaattcctgagttttttcaagctttattagatctgttatagtgacttgtagctaatgatctttaagttagtatttataattgtgttaggggtaccatgaactatgcccatataagtccacgcacttaatcaataatgtgtgttctgactcctccactgactgtttccccrtctctctcctcatgcctctctattccctgagacacaacaatattgaaattagacccacaatggcctctaagtatttaagtgaaaggaagagtagtatgtctctcattttaaatcaaaagctaaaaaatgattaaacttagtgaggaagtcatgtcaaaaaccaagacagagtaaaagctaggccccttgtaccaaacagcagagttgtggatgtaaagaaaaatttcttgaagggaattaaaaatgctactccagtgaacacatgagtgataagaaagctaaacagccctatttttagtatgcagaaagttttagtggtctggatagacaatgaaaccagc

SEQ ID NO: 610872 - DNA, 552 bp, Homo sapiens
  misc_feature 222, 223, 224, 225, 226, 227, 228, 229, 230, 231, 232, 233,234, 235, 236, 237, 238, 239, 240, 241, 242, 243, 244, 245,246, 247, 248, 249, 250, 251, 252, 253, 254, 255, 256, 257,258, 259, 260, 261, 262, 263, 264, 265, 266, 267, 268: n = A,T,C or G
  misc_feature 269, 270, 271, 272, 273, 274, 275, 276, 277, 278, 279, 280,281, 282, 283, 284, 285, 286, 287, 288, 289, 290, 291, 292,293, 294, 295, 296, 297, 298, 299, 300, 301, 302, 303, 304,305, 306, 307, 308, 309, 310, 311, 312, 313, 314, 315: n = A,T,C or G
  misc_feature 316, 317, 318, 319, 320, 321: n = A,T,C or G
cttacgcatgagcaaagaaagttatttgagataaaattcacccctggtaaaggtgctatgaacatttttgaaatgacaacaaaggattttgaatattccataaagttagttaataaagcagamgcaaatttagaaaggattgactctaattttgaaagaatttctactatgggtaaaatgctatcaaacaacattgtgctggaagaactctttcatgaaaannnnnnnnnnnnnnnnnnnnnnnnnnnnnnnnnnnnnnnnnnnnnnnnnnnnnnnnnnnnnnnnnnnnnnnnnnnnnnnnnnnnnnnnnnnnnnnnnnnncactctaatcagtcagcagccacatcatcaaggcaggaccctttacgagcaaaacgattatgactctctgaagcttgtatgattatttgtattttttgcaataaactatttttaattaacaaatgtacattgttttgttagatacaatgttatttcacattaaatagactagagtatagtgtaaacacaagttttatatgtattgggagaccaaaaaaaaaatgtgtgact

SEQ ID NO: 610873 - DNA, 649 bp, Homo sapiens
ttagataactatgcctcacattgtaaagaataaaagatgtagacagttaatgattcttgggcacataaactctaccaaaatatataatacataaattactggaaattaagaatatcatgttaagggttgtaaaaaatgaggaaagtaaaaaatgatgctttaagaattaaagaaaagagagtatgttaacatgagtggtagttcttaaaatttaagktggcattgcatttctctgaaattttcatggagagtgaagatttctgggctccatttacaaccagagatcataatacttttatgtgtattgggtgggactcaggaatttatatctgtattaagactccaggtgattctgatgaagctggtaccttaactccacctattaaaaacaataaggagtcagataaattttaggaagaatattattattagaaatcatgcttctcagttttttcaaagtgttctttgatgaccttaatgtcccatttgcttttgtcttttctaaatgttgcatgacttatgtttctaagtatgatatggtattatcataaagaaagtaataaaatgatactagatatctcatggaaacctagcagggccttagagccaagtgttgcaaaattaaaggatagctagaatcccaaagaat

SEQ ID NO: 610874 - DNA, 374 bp, Homo sapiens
ctcaccaccaggggatggcattaagccattcataagggatataccttcttgatccagatcctggttctgaccttgaaccaggccccacttgaactctggggattacatttcaatatgggacttggtgggaatatagttctaaaacatatcacctttttttttttttttttggtctgccagtataggccagattataaagcaatgaaatcaaacacccaagtctcaatggtttaattaygtagaagatttattccttactcatgctacaaatcaagtgtaaatcaaaggagggtgctgatgaatcgatgctgatggggcagccacttcatgaaatggcagtggcctgattctaaatattctgcccaaatgtttcc

SEQ ID NO: 610875 - DNA, 374 bp, Homo sapiens
ctcaccaccaggggatggcattaagccattcataagggatataccttcttgatccagatcctggttctgaccttgaaccaggccccacttgaactctggggattacatttcaatatgggacttggtgggaatatagttctaaaacatatcacctttttttttttttttttggtctgccagtataggccagattataaagcaatgaaatcaaacacccaagtctcaatggtttaattacgtagaagatttattccttactcatgctacaaatcaagtgtaaatcaaaggagggtgctgatgaatcgatgytgatggggcagccacttcatgaaatggcagtggcctgattctaaatattctgcccaaatgtttcc

SEQ ID NO: 610876 - DNA, 494 bp, Homo sapiens
attgtcagaaaaaagagaggaagcatatttgtgaataacctgtcaaaaagattattgcaaagtctcttaattgatctttctgactctaagtttctcctttaaaatccattctgtaacctatggacacatgaatccacttaaagcaacactgattactttgttctttcccagaaaacttcaaagcacctcattgtctatttaatatgatacaaaattattagaatgacagttgaagccctccacatcattgcctcttagatgacaccaactcaatatctagcacttaccttacatgaaacctataattcaataaatgtgcactattaactagtcctcaacatgatttttgtttgaggagtaatcaatagtacaaatatcatttattgtcaaacaataaacatggttattactaactccatttcttcacttacatttcygggaacctggatttagaattaactaacactgattaagtagagaatatatgagataaa

SEQ ID NO: 610877 - DNA, 579 bp, Homo sapiens
ccttctgttttgatgaacagcagtgggaatgtgtatatggagctgtggtacagtagtgttttttagctcagcacacaatgttggactactggggcacatattacagtcacatgtatgcaattctaaccaaagtttaattagtttggctttygtaggttaaaaaagagggaatctatatagttaaatcagagtgtagaaagagctaatagcattgcactgactatctcaagaggaagatccttccacaataagtccaggagagccttccacagtaactccagggaagtaattttcatatatatctctttctttgttatccatccatccaatacctaggctagtcttagtgccaattgtttaaagttctttgtcaagagaaccaagaagatagactaaaagaatttttcaaaataatataatgttttagtattttaaaaattattttttgcattcattttatttccagattctttaagaaaataattgcacatttcagggtggagccaagacgactgaataggaacagctcctgtctacagctcccactgtaagcaacacagaagacgggtgatttctgca

SEQ ID NO: 610878 - DNA, 569 bp, Homo sapiens
agggaatagctaatgggtgctaaaaattagaaaaaatgaataatatctagtatttgattacataacagggtgactatagtcaataataacaattatacatttttaaataactaaaatagcttaattggattattttgaacatagaggataaatgcttgaggtgttgaataccccattctccatgatgtaattatttcacattgcatgactgtatcaaacatctcatataccctacgcgcrcacacacacacacacacatatacacatatatatatacccatatatatatacacacacacacacacatatatatatacatactatgtacccatgaaaattctaaaaaataaaattctctggttaaataaataacataaaacacaatcagaaggtttgggttacgtcagctttgctgagtttattgtcattatggcaagttgtattgaggaagaaaatcaccaaaaatataaaatggaaagaaatgtcaattataaaagattaattttcaaactaaaagtaatgcaattataagatggaactataatttataattagtgtttccaaaaatt

SEQ ID NO: 610879 - DNA, 569 bp, Homo sapiens
agggaatagctaatgggtgctaaaaattagaaaaaatgaataatatctagtatttgattacataacagggtgactatagtcaataataacaattatacatttttaaataactaaaatagcttaattggattattttgaacatagaggataaatgcttgaggtgttgaataccccattctccatgatgtaattatttcacattgcatgactgtatcaaacatctcatataccctacgcgcacacacacacacacacacatatacacatatatatatacccatatatatayacacacacacacacacatatatatatacatactatgtacccatgaaaattctaaaaaataaaattctctggttaaataaataacataaaacacaatcagaaggtttgggttacgtcagctttgctgagtttattgtcattatggcaagttgtattgaggaagaaaatcaccaaaaatataaaatggaaagaaatgtcaattataaaagattaattttcaaactaaaagtaatgcaattataagatggaactataatttataattagtgtttccaaaaatt

SEQ ID NO: 610880 - DNA, 600 bp, Homo sapiens
  misc_feature 65, 66: n = A,T,C or G
aaattttgtgaacttcaaagcttgctctcttctagaggatatcctggtgaggctagatattgcannaaagaatatactaccttgacattttaactaacctggtttgtaaaataatatgtaagccttcttatttcgtgactgttcatctttttgatatatttacaatatttagtgctttattattactataatatttcaaaattttggttcatacatattttatgcaatagaagtctgatgaacttaccttacatggaaattttattttattttcttataaaaaggagttttgaaaagaatatagaattgtgaaccgcagaagcttcatgaaggtgtcagctatgagtcgtggggtaaatgtattccaaaaaggaattaacaaatgaacatcccaagtttttacaagaaggaaataacatgatgtatgtctaagtgcttagtattcatttagagttaatttaaagcatctgattgaattttcttccttcyaatctccatgaaacactgaaaattatcagaatgatgactttttaaattaagatatttttattaattattccagagtaaggaacatatggggaataacatgtataactcctc

SEQ ID NO: 610881 - DNA, 610 bp, Homo sapiens
atcttcttagtatctctgtcaaaacttaataattattaggtggatggataaatgaatgaatacatgtataaaagacaaactgtcttgtagaatttagatattttgagaacaatattttatttgcatctcaaatattcaggtctcccaatattatcttttatagtggccattagttagtactttttactgaaatgttaatttatcttttgaaatgacactgaatctcactttagaaagttattacaataactatttcccagtcctcctttaaagttattcaatgtatcctaacatcagtttctataaaattgttccctttgtcttttcatacacattttatcagcmtatctccagagattacaggcatattaaaatgtatttaggttattttattatattactgacaaactaccctttttaatgagcaatatccagaaatgtctaatataaagtatgcctctggtatgtaatttttgaataaataaataaatgaataaaggcaaagaatttttattccagttaaaatatggacactgcaataattttctcaggtaaaatcctttaattggaagcaagaccacaaatggcacaacccaaaccaacctaaaat

SEQ ID NO: 610882 - DNA, 571 bp, Homo sapiens
ttaaaaattatgacattaattcttttttccaaagacagagaacaaattgagttacattatgaggtctcaagtaatactcataagtaagtttatacatgtttgtgtatacataaatataaagagagcaacatccattttatttgcaaaaataaatcccagaaataataataacaataccataaactgtcaaggctaaattaatgttgattttcaatggattttcccaggtaaatgttaagaaactttattgctttatttggctattttagtacagcatattgttttctgtatttgtgctatattatagtkgctcataacaacatacaacacatacgtatcatttactaaaaaaaaatcggagagcagattctagtagtttagcagaaagcaaaatagaacagttaataatcattaacttagactgctgaaggcacctgaacttagagtaaagcatgaagtgcttgtctttgccagcagctctctgatttcatgtcctcatggcaacttgtctcttctagcttacatatggtagccactccaaaatcctagaactacttacacatttcccaag

SEQ ID NO: 610883 - DNA, 571 bp, Homo sapiens
ttaaaaattatgacattaattcttttttccaaagacagagaacaaattgagttacattatgaggtctcaagtaatactcataagtaagtttatacatgtttgtgtatacataaatataaagagagcaacatccattttatttgcaaaaataaatcccagaaataataataacaataccataaactgtcaaggctaaattaatgttgattttcaatggattttcccaggtaaatgttaagaaactttattgctttatttggctattttagtacagcatattgttttctgtatttgtgctatattatagtggctcataacaacatacaacacatacgtatcatttactaaaaaaaaatcggagagcagattctagtagtttagcagaaagcaaaatagaacagttaataatcattaacttagactgcygaaggcacctgaacttagagtaaagcatgaagtgcttgtctttgccagcagctctctgatttcatgtcctcatggcaacttgtctcttctagcttacatatggtagccactccaaaatcctagaactacttacacatttcccaag

SEQ ID NO: 610884 - DNA, 575 bp, Homo sapiens
cccccaacaaaacagggctgtttttggtttctttgttttttcctcactacagatacccgatatctagcataatgttagatatcttgctattaattaaatrtttattatgtaaggaatacatggatgattactccatttggtgatatatcaaaatcagaacatgtagtcatctgactcccaattccagacactaataattgaaattcacaatatgatcctaatgcgttaaatataacttttgtttgttgtctcattcatgattcatttagtagaaaaaaataattcttgtagagattttgttttggtgccaataaattaaaattttcagcattctttctttctttctttcttttttctgagatggagtctcccgctgttgcccagactgtagtgcagtggtgccatctcggttcactgccaccaccacctcccaggttcaagcgattctccttcctcagcctcctgagtagctaggattacaggtgcgtgccaccatgcctggctaatttttgtattttcaatagagatggtttttcaccatgttgctcaggctgatctcaaactcctgacctcat

SEQ ID NO: 610885 - DNA, 575 bp, Homo sapiens
cccccaacaaaacagggctgtttttggtttctttgttttttcctcactacagatacccgatatctagcataatgttagatatcttgctattaattaaatatttattatgtaaggaatacatggatgattactccatttggtgatatatcaaaatcagaacatgtagtcatctgactcccaattccagacactaataattgaaattcacaatatgatcctaatgcrttaaatataacttttgtttgttgtctcattcatgattcatttagtagaaaaaaataattcttgtagagattttgttttggtgccaataaattaaaattttcagcattctttctttctttctttcttttttctgagatggagtctcccgctgttgcccagactgtagtgcagtggtgccatctcggttcactgccaccaccacctcccaggttcaagcgattctccttcctcagcctcctgagtagctaggattacaggtgcgtgccaccatgcctggctaatttttgtattttcaatagagatggtttttcaccatgttgctcaggctgatctcaaactcctgacctcat

SEQ ID NO: 610886 - DNA, 575 bp, Homo sapiens
cccccaacaaaacagggctgtttttggtttctttgttttttcctcactacagatacccgatatctagcataatgttagatatcttgctattaattaaatatttattatgtaaggaatacatggatgattactccatttggtgatatatcaaaatcagaacatgtagtcatctgactcccaattccagacactaataattgaaattcacaatatgatcctaatgcgttaaatataacttttgtttgttgtctcattcatgattcatttagtagaaaaaaataattcttgtagagattttgttttggtgccaataaattaaaattttcagcattctttctttctttctttcttttttctgagatggagtctcccgctgttgcccagactgtagtgcagtggtgccatctcggttcactgccaccaccacctcccaggttcaagcgattctccttcctcagcctcctgagtagctaggattacaggtgcgtgccaccatgcctggctaatttttgtattttcaatagagatggkttttcaccatgttgctcaggctgatctcaaactcctgacctcat

SEQ ID NO: 610887 - DNA, 583 bp, Homo sapiens
tatgaatattattaattcatggcaatgtgcttgttcacatatgtttaataagaacctatgggatgcagttggggaaactggttttcttcctaaggctttaactgaaatggccttgtgagaggttccagcaaagacaatttaggagaacctatatggacaatgwttcttgttgcagattgtataggtaatcaggccaagtatatgggactaaagcttatttggcaggtgggctggtcttgtgatttgtctttggtggcagtaggatactggagagagaaagattgtgtttcaaaaggaaactatagtagtagattaacctttgtttcctgggtagccacgtggacagccatggcatggagctgcccacaacacccctcctcagcatgaagcagctaaaagattgccaggtggattcctcatgattgaggagttgaaaaatagaaaggtaggggtgaattgaaactgacctaattgtcccacagaacttagctttatagcttctgttgaatacacatagaaatgaattctcccagtcttgaaacttgagaaagttcctttgttttattaaagtttctttctcagg

SEQ ID NO: 610888 - DNA, 569 bp, Homo sapiens
tattattaattcatggcaatgtgcttgttcacatatgtttaataagaacctatgggatgcagttggggaaactggttttcttcctaaggctttaactgaaatggccttgtgagaggttccagcaaagacaatttaggagaacctatatggacaatgtttcttgttgcagattgtataggtaatcaggccaagtatatgggactaaagcttatttggcaggtgggctggtcttgtgatttgtctttggtggcagtaggatactggagagagaaagattgtgtttcaaaaggaaactatagtagtagattaacctttgtttcctgggtagccacgtggacagccatggcatggagctgcccacaacacccctcctcagcatgaagcagctaaaagattgccaggtggattcctcatgattgaggagttgaaaaatagaaaggtaggggtgaattgaaactgacctaattgtcccacagaacttagctttatagcttctgttgaatacacatagaaatgrattctcccagtcttgaaacttgagaaagttcctttgttttattaaagtttct

SEQ ID NO: 610889 - DNA, 396 bp, Homo sapiens
gaattctggtcctaaaggtttatctttgtcagatatatcccataaatgattttatatcttgatttttagttcagcttcctacagaaaaatttaaggaatatttgcatcaaattatttattttcttatttttattcttttaacatttagaacaattcygaagctaatatcaagaaactttttttttttttataaactgagatgaatatgcttttacccactggtgatcagcaagaaaaggccctctctttgtaattcttggcttgaataattcattttagtatttctgtttctatcctttaggaaatatttataacaagcttgctgcacttagtagcacttcacatagctaattactgatattaccatagaagctaaaattaaatttgaagcagtaa

SEQ ID NO: 610890 - DNA, 604 bp, Homo sapiens
tgtgactgtgttgaatgtgatatgtgcctttcctcttgttactttgagcattattcgtctttgattattgctcagtttattataatatgctttagggaattctgtttggggttaaatttaatggataatctctctgcttcctgtaactggatattgtcatatttctccatatttggaaaattctcggccattattcctttacatatgctctctaaaccttttttttctcatcttctggggggatttcaattacrcagaggctagtttttatgattgtgtgccataagtctaatatgccttcttcacttgttttgttttccttttttgctcttgtgattgggtaatttcatgtgttctgccatcaagttcataaattcttctgtcaagtctgttgttaaagctttctaatgaactttaaagttcaattattttattctttatttctaggatttcttttttttaattgtttttatttctttgtaaaatttcttatttttttcctggattgttttcatttagttttctattcatatttttttatgattccttaccctttgtttggaggattattttgaattatgtgtaagccattttatagatcttc

SEQ ID NO: 610891 - DNA, 553 bp, Homo sapiens
tgtcattacttccctgagttttcacaatctttgtgtctttacaatgatgattgtatatttgagaagaaagccacctcttccaggttttgcaggtgtccattgatagtgctaggcatttacttcttagtattgaaatttaaacactgacccagttgtttcttctcatttttgggtggacttacaatgagcacagtaactaaaacactgaaatagaactaacacatttccctgtcattgtttcccaktatgagaaagacctaagcaggccacagaacttaatcccaaccttgtcgttgttttgaggccaggtgaagactctacataagcacctgaattttgtggaaaatccaactaggaattcaagccttttcacagatggtgctctctctgacactgtggcaccagcagggctctttaacatggtgtcctcatggttcagagcactgagtatccaccaagatccatacaccattggctgtgatcagtgcccctctctttgttctcaatttatcccagatgtttcagctcttccggtactcccaatgattcccat

SEQ ID NO: 610892 - DNA, 404 bp, Homo sapiens
cacagatggtgctctctctgacactgtggcaccagcagggctctttaacatggtgtcctcatggttcagagcactgagtatccaccaagatccatacaccattggctgtgatcagtgcccctctctttgttctcaatttatcccagatgtttcagctcttcyggtactcccaatgattcccatgggacagaaccagagtgggcttccagtgaagattcccaagccacttcggaaatcaaatgtcaaccactatttccctcatctcattttggcaactgtgggtcctgggaacttttctgtaagtggtataatgccaccttggggaagggatcacgcagtctgaaatgaacatttcccttactggccatggcttcttttaattctgtgggccacgggccccctgg

SEQ ID NO: 610893 - DNA, 518 bp, Homo sapiens
gtcatcaatagtggcaagagctataaaaacatgccaaatctagagcacagagcaatgctaaggagactgcaagagctgggaagaccagtcaccaacaaagcacataggtgtttcagagaaaactctggcattggtgctgtaatccatgctrgcttttttgttgccacagtggtatgtttaaagagctctaaatgggaggacagtattgccagcgtgctgattgaatcttctgacctttgaattcagatgatatcctactggaccacagtgtgtcacagctcactttacaacctgtgcaaacctcttgcttaccacatagccttgctgatgttgctagaggtcgtccctctggcattctttaccaactacgtactctgtggcccctgtgttgcttcttcccttctctgatttcccatgtgcagaaatctgtatggggcctaacccagcctaccttctaactgctctgccctgtagggaatgctgccttccttcttaaagctccttcttgcacaacttgt

SEQ ID NO: 610894 - DNA, 577 bp, Homo sapiens
ttgcatatttgtttcagtgtctaggtgttaaagagttaggcatttactgtagtctttgcagtctgagctgtttgtacttatccttctttgaaggctttccaggtatttgaagggacttgggtgttgtgatctaaatttttggtcactgcagctgtatagggagcacctaaagcccaataactccatatttctcgcagacttgtagaggtaataccttggtagtcttgaataagatctggaagaattctctggattgccaggcagagactcttgttctcttctcttactatctcccaaacaaatggagtgtctctctctttctctctctctctctctgtctctctgtctctstgtgtgtgtgtgtgtgtgtgtgtgtgtgtgtgtgtgtgtgtgtgtgtgtgtgtgtactgagctgcctggagccagaaaagggatgaaataagtacccctatggccaccaccactggaactgcacagggtctgaccggaaatcagcacatcactaggtcttgcccaaggccagctgtaaccagtacctggctaccatctatgtttgctcaaggtcctagggctcaac

SEQ ID NO: 610895 - DNA, 579 bp, Homo sapiens
taagtcaggtttagtggcaagacaggttaagagagagagaaaggaagaagcttggctagcaaaggtagccttatgatgttggtgaagcttccctgagagagcatatagggtaaatatttctttttgaactttaaaaggtgtcagtgtctcctggatcctcggaaaggcatagaaagggaggtagggggtatggctgcattaatggagattctctacagatgcaaatttccctcacttaagacagctttgcaaggccacttctgtcaggatggccaagtggcagctacttcaaaatatttcaaagaaatayattttggggtaaaatattttacttctcttcaacattaatctggaatggtctcaacactagtttatggatgctgatggaagtcatctgatgaaatcagtgaaatgtaagacaaagtggttttaaaaaacagtaagtattcttaagagtatatctttgaaattgcaagtttttttttttcttctctaattctgtgcccgttgtgaaccaaaagcatctaaaacaggtctcgatcaatttagaaagtttattttattaaggctaaggatgca

SEQ ID NO: 610896 - DNA, 655 bp, Homo sapiens
tggatattaaccacttaccagatgtatggtttgaaaatattttctccattctttaggttgtctcttcactctgttgattgttgccttggctctacagaagcttttttgtttgatataagcccatttgtctattttgcttttgttgtctgtgctttggggttcaacatccaaaaaatcattgcctagaccagtgtcatgragcttttcttctgttttcttccagtagttttacagtttcatgccttacatttaagtctttcatcaattttgagttgatttttgcatatgatgtaagataggggtctaatttccttcttccacatgtggatatccagctgtgccaacaattatagaagagactgtcctttccccattgcacgttctcagcatatttgtcaaaaactgattgactgtaaatgtgtggatttattctctttccttaatctatgtgttttttcaattttgatgccttttatttctttctcttgtataattgcactggccaagacatctagtactatgttgaatagaagtggcaaaagtgagcatccttgtcagaggcaaagctggtaacttttcgccattgagtgtaatgttagctgtgggtttgtcatcaataacctttattgtgctgaggtacattccttctatatct

SEQ ID NO: 610897 - DNA, 655 bp, Homo sapiens
tggatattaaccacttaccagatgtatggtttgaaaatattttctccattctttaggttgtctcttcactctgttgattgttgccttggctctacagaagcttttttgtttgatataagcccatttgtctattttgcttttgttgtctgtgctttggggttcaacatccaaaaaatcattgcctagaccagtgtcatgaagcttttcttctgttttcttccagtagttttacagtttcatgccttacatttaagtctttcatcaattttgagttgatttttgcatatgatgtaagataggggtctaatttccttcttccacatgtggatatccagctgtgccaacaattatagaagagactgtcctttccccattgcacgttctcagcatatttgtcaaaaactgattgactgtaaatgtgtggatttattctctttccttaatctatgtgttttttcaattttgatgccttttatttctttctcttgyataattgcactggccaagacatctagtactatgttgaatagaagtggcaaaagtgagcatccttgtcagaggcaaagctggtaacttttcgccattgagtgtaatgttagctgtgggtttgtcatcaataacctttattgtgctgaggtacattccttctatatct

SEQ ID NO: 610898 - DNA, 536 bp, Homo sapiens
cacatgcacacctgtagacatatgaacacacrtcacacaaattaatccttcctctgggatctgaagtggcatacactaattgcaggaggatctaaagcaacgcagcctgcccacatgcctttcttaatcctgtgcaattatacgcaccctgggtgatgacactcgcagaggttattcttaaggcaagattactttcctcaccctgccctcctgctgcaccctcccttttcctgcatactcagctcaggtgggaaatgctctctgggagaaaaattcccaaaattccattgatttgagcctaaggctggcatacagggaggtatgacatttttatgctcttttcccattggcctgtgatccttgtcaacccacctagcttcttccctgtcactgcctctgaccatcctcatctctccttcctctctatccagagaagagccatgggaaggaggcataaaaaatatctactaagatgggagtggattacattaacttcatagatggagaaactgagatctgagggacaagaccttgcc

SEQ ID NO: 610899 - DNA, 569 bp, Homo sapiens
tcagtgctattaggagccttcaaagttggctttgctggttcttaagtgacagtgcaagggctagtacatcctggctgcatcagaaacctctcaagttttaattgctattatttgtgatttcttttattttttttctaattacacgagtagccattaatatgctcattataaacgttcaaatacaaataagtaaaggttctcttcgatcctctcttcagcaccagtcctcataccagaggttaagtctgcttccacactttaaaaaaatatgctttaacattacgtgtgtgaatataaagaaatatgattttttctaaggtagaggatataatgtcttttttctaaggtagaggatataatgacatcataacataacaataatacaaatttttattgctaggccaaacatatatatatgtgtgtatatatatgtgtgtgtatatatatgtgtgtgtgtgtgtgtgtgtgtgtgtgtrtatatatatgcactaacttttaatggatgcttccaaaagggcactattcaatttaaagtcccatcaagaatggtcattagaggccaggcacgg

SEQ ID NO: 610900 - DNA, 513 bp, Homo sapiens
taagtgttctttgtatattgtagatataagtttcttatcagatatataatttgcaagtattttctcccattctatgggttttttgctttcttgatggtgtcctttgcagcgtaaaagttttaattttgatgaaatccaatttgtctattttgtttgtttgtttttgcttgtacttttgggtcagatttaacaaattattgcctaatctgaggccatgaagatttaccctttattttcttctaagagctttattttatgtcatttatatgtgtgtgtgtgtgtgtgtgtgtgtgtgtgtgtgtgtgtgtgtgtgtgtgtgtatatatatttttttttttttttttttttttgagacagtttcccgctgccacccaggctggaatgcagtggcatgaacacarctcattgcagccttgacttccagggctcaagcaatctgccctcctcaggcccccagctagctgggactacaggtgcatgccaccacatccagctacctaagagctttctatt

SEQ ID NO: 610901 - DNA, 585 bp, Homo sapiens
tcaggtaacaactctgatttcatcccactcttccatcagataaatagggacgctaaagcccaaggggaaaagtaattggcaaaaccacaataaacactgacagactaatcagtgcccaaaccccagtctgtgctctttgctctgaaacatggctatagcaagcccatgctttccctcccactcttgatgctcccagactcagcagcctcacttcaaaaagagccattcttggcagtgacaggtatgagaactgcaccagtggaaagcctggcccagtcaggctgttggtacaggtacggtgagcaggaagtcccagggccattgcctatttattggtgatttgcgtatccttttgtactaagtgcctgtttctatctctaaattattttctactagcttgcctgtcttgctgatttgtaagagttctgtatgtattctgaataattgttctttgaaaagcttgtatgtgttgcacatattttaagaccttgctcttaaggtcctcygcgtgtattcactccaggagaaacaaatcatggggaacagaggggctggagaggatggaagcagtatagcactccaaca

SEQ ID NO: 610902 - DNA, 585 bp, Homo sapiens
tcaggtaacaactctgatttcatcccactcttccatcagataaatagggacgctaaagcccaaggggaaaagtaattggcaaaaccacaataaacactgacagactaatcagtgcccaaaccccagtctgtgctctttgctctgaaacatggctatagcaagcccatgctttccctcccactcttgatgctcccagactcagcagcctcacttcaaaaagagccattcttggcagtgacaggtatgagaactgcaccagtggaaagcctggcccagtcaggctgttggtacaggtacggtgagcaggaagtcccagggccattgcctatttattggtgatttgcgtatccttttgtactaagtgcctgtttctatctctaaattattttctactagcttgcctgtcttgctgatttgtaagagttctgtatgtattctgaataattgttctttgaaaagcttgtatgtgttgcacatattttaagaccttgctcttaaggtcctccgcgtgtattcactccaggagaaacaaatcwtggggaacagaggggctggagaggatggaagcagtatagcactccaaca

SEQ ID NO: 610903 - DNA, 607 bp, Homo sapiens
ctgcttctgcaaagacctacagctcaggctgcaacagggccgaaccatgttagcctttgagttaatctctgaagcctcaccagtcaacactggcactgccctctcatgtctagggaatataaatgttgtcacagatttccactgtgttgctcaagccatataaaggcactccctaaacttcaattagacttttctttccacagaagcctgttgtcatcctaattgaccaactaractttaataattcgactgtaacaaaattggaactcattcactatgtggttaatgtacttcacctgtcaagtgtattcccagtgaaatttgttctaattattctccccatctttaagcgttgtgaacaaaggaaatttttgtatggcaataaactatgtgcttcatactttgatcatccttttattttaaccacacaaaatagtgtgctggaatttctgggcttttttaagcttcagcagaggaaagcttcagagtcctgttactagaagcagtgagaatggatgttggctagcaaaatcagttgccaaacatagtctataacatcagttttagaaatcaccccttaggaattagtacaaaaatggaaaatcct

SEQ ID NO: 610904 - DNA, 526 bp, Homo sapiens
accatatggtgcagcaatcccacttttgagtctgtatctaaagaaattgaaatcagtacattgaagagatgtctgcacttccatgttcattgcagcatttattcacaatagccaagttgtggaatctacctaagtgcctctcaacagatggatggataaagaaaatgtggtatatatacacaatggaatattatccagccttaaaaacaagtcatttctgccatttgagacaacatggatggaactggcaaaatgagccaagcgaagactgacaaataccacacattcccacctgtatgtggactctaaaacaactgaattaatagaagcagagagtagaatggtagttaccagaatgtgagsgtgggagaaatggagagatgatggttaaaggataaagaatttaatttagacaggagtaattaggttttgtgtggttttttttttgacatttattgcactgcatggtgaatatggtcaataatggtatattgcatatttcaaacttgctaggtgagtaaatttc

SEQ ID NO: 610905 - DNA, 580 bp, Homo sapiens
gggtgcagtggctcacgcctataatcccagtgctttgggaggctgaggcaggcagatcacttgaggtcaggagttccagaccaggctggccaacatggcgaaacccrtctgtactaaaaatacaaaaattatctgggcatggtgatgtgtgcctatcatcccagccacttgggaggtggagtcaggagaattgcttcaacccgggaggcagaaattgcagtgagctgagattgcgtcactacactccagcctgggtgacagagtgagactctgcctaaaaaaaaaaaaatatatatatatatattatatatatatatattacatttagtgcctattatacagtagatattgtgttaaattctttataggtattatttatgaaatttaatttattcctcagtacaagcttgttgatgtaagttatcatcctcattttacagcaaatatactactaagactttttttttaaagtcttccaacagtttattagaaagaatgtaggcatttaaaaaaatccccactgtcatgaacataaattgaggttttcagccctggtataagctgaatcaaaaaaagaaaa

SEQ ID NO: 610906 - DNA, 387 bp, Homo sapiens
gaattatgtttttttctggtggggaactaccaatagctataaatagaagagattattatggaagtatcatagataaaaagagtgctcrcttcaggagcacatataataatacagaaacaaatttaaagataataaaatatttaggataaaaagaattgtctcttaaaaatgaaaagaaaattatctttatgtatatataacaactataactctcatcaaaaaactacaggaacagcatgttttcaaaagtacaacaatttccaaactatttgaaataaatctatgaataattcaatggccaacattttccaaacaaaccaataaaatgcagagtgtgcatgaagctatctgttacaatctgtggcactgatatttcacaaaagaatt

SEQ ID NO: 610907 - DNA, 387 bp, Homo sapiens
gaattatgtttttttctggtggggaactaccaatagctataaatagaagagattattatggaagtatcatagataaaaagagtgctcacttcaggagcacatataataatacagaaasaaatttaaagataataaaatatttaggataaaaagaattgtctcttaaaaatgaaaagaaaattatctttatgtatatataacaactataactctcatcaaaaaactacaggaacagcatgttttcaaaagtacaacaatttccaaactatttgaaataaatctatgaataattcaatggccaacattttccaaacaaaccaataaaatgcagagtgtgcatgaagctatctgttacaatctgtggcactgatatttcacaaaagaatt

SEQ ID NO: 610908 - DNA, 577 bp, Homo sapiens
actgtgaaggatgaataagagaggaggaaatcaaaaggtttggaaaccaaggctgtgactacttcagttcagtcaagggttaatgaagaaataaactatggtaggagaaaagttacaaaacaaagaaaggtagccaattatgatttctggatttttacttaagatgaatgttagttagaatatagactgagctggctataacaaggagacctaaaactagagcaagtcaaacaagagataattttatttttttcttatataatagaccagaggtaggggcatggccagggtggagaaattactctgcctcataagatcatgcatggtgctrttgaaagaggaaaattgtctctcaaccactctcattctggtctttagaaaggggaatgaggaagtcaaaagcaagaaacttccttttagaaaagtgaccctagaattgtatgcactgcatgcattcacattccattcattgtaagactccaagagaatttttgattcagagtctaaaacttgcttgttcagagcccagaggttttttctcaacattttgtacttacactgtgagtggtatttgaaa

SEQ ID NO: 610909 - DNA, 577 bp, Homo sapiens
actgtgaaggatgaataagagaggaggaaatcaaaaggtttggaaaccaaggctgtgactacttcagttcagtcaagggttaatgaagaaataaactatggtaggagaaaagttacaaaacaaagaaaggtagccaattatgatttctggatttttacttaagatgaatgttagttagaatatagactgagctggctataacaaggagacctaaaactagagcaagtcaaacaagagataattttatttttttcttatataatagaccagaggtaggggcatggccagggtggagaaattactctgcctcataagatcatgcatggtgctgttgaaagaggaaaattgtctctcaaccactctcattctggtctttagaaaggggaatgaggaagtcaaaagcaagaaacttccttttagaaaagtgaccctagaattgtatgcactgcatgcattcacattccattcattgtaagactccaagagaatttttgattcagagtctaaaacttgcttgttcagagcccagaggttttttctcaacattttgtayttacactgtgagtggtatttgaaa

SEQ ID NO: 610910 - DNA, 434 bp, Homo sapiens
gtctcaggattgtggccgcgggtgaggtggatgggagaggggagaatgactttcactgggcaagggagagaggctcctgctctgagactcccctgagaagaggccgaaggaggccctgggtgtgagaatctacaggatgtagagctgggaatcagccaggaccccctccagcagacacggagggaccactgcagagtcataaaggaattcccatcatttcctcatgagacagtcacatcagggtgtgaccatggccttggkatcccccactatggatggagacacttaggtttagaaaagtcagtaagagactttaagtttcagagggcacagctgaaaccactttctttgtttattgattttgtttttctttatttgatttttatttttatttatttattaatttattttgagacagagtcttgctctgtggg

SEQ ID NO: 610911 - DNA, 440 bp, Homo sapiens
gggaaagtctcaggattgtggccgcgggtgaggtggatgggagaggggagaatgactttcactgggcaagggagagaggctcctgctctgagactcccctgagaagaggccgaaggaggccctgggtgtgagaatctacaggatgtagagctgggaatcagccaggaccccctccagcagacacggagggaccactgcagagtcataaaggaattcccatcatttcctcatgagacagtcacatcagggtgtgaccatggccttgggatcccccactatggatggagacacttaggtttagaaaagtcagtaagagacwttaagtttcagagggcacagctgaaaccactttctttgtttattgattttgtttttctttatttgatttttatttttatttatttattaatttattttgagacagagtcttgctctgtggg

SEQ ID NO: 610912 - DNA, 623 bp, Homo sapiens
ttaatagctccttccgaactgtgttcctaaagccctcccaccgccttcctatccattgatttcattatggcataatttggggtgcttgcctaaaattgtaattccagtaagagtagacagtgttttatcaatactgaaccctcaacacctagcacaagatcttgtactcgcaaggacttgtacatttgctaatgaagtgaacaaatattgcattaatttcaaatgtttgytgaactgaatttttgaatgctgtgttgaccaaactactagcagggcaatgtgtttcattcttgaaaagttgtacctttgcattccaaacacaaccttgcctgcttcccagagttccaaaactaaagtaaaacatccaattaatcaatcaattacgcaactgataaatcaaagctagagaagtactctaatcaagcataacttattttcctatctgagatgttttccacattttgtatttgctgaagcagtgcaaaatgttgctgcttaaagacattatgtgacaatctgttttcattcctatgctctaaaaattatgaatagtaattttaatattctttattattttttatattttaaatcagtgttattagttttcccatattaatttattt

SEQ ID NO: 610913 - DNA, 623 bp, Homo sapiens
ttaatagctccttccgaactgtgttcctaaagccctcccaccgccttcctatccattgatttcattatggcataatttggggtgcttgcctaaaattgtaattccagtaagagtagacagtgttttatcaatactgaaccctcaacacctagcacaagatcttgtactcgcaaggacttgtacatttgctaatgaagtgaacaaatattgcattaatttcaaatgtttgctgaactgaatttttgaatgctstgttgaccaaactactagcagggcaatgtgtttcattcttgaaaagttgtacctttgcattccaaacacaaccttgcctgcttcccagagttccaaaactaaagtaaaacatccaattaatcaatcaattacgcaactgataaatcaaagctagagaagtactctaatcaagcataacttattttcctatctgagatgttttccacattttgtatttgctgaagcagtgcaaaatgttgctgcttaaagacattatgtgacaatctgttttcattcctatgctctaaaaattatgaatagtaattttaatattctttattattttttatattttaaatcagtgttattagttttcccatattaatttattt

SEQ ID NO: 610914 - DNA, 623 bp, Homo sapiens
ttaatagctccttccgaactgtgttcctaaagccctcccaccgccttcctatccattgatttcattatggcataatttggggtgcttgcctaaaattgtaattccagtaagagtagacagtgttttatcaatactgaaccctcaacacctagcacaagatcttgtactcgcaaggacttgtacatttgctaatgaagtgaacaaatattgcattaatttcaaatgtttgctgaactgaatttttgaatgctgtgttgaccaaactactagcagggcaatgtgtttcattcttgaaaagttgtacctttgcattccaaacacaaccttgcctgcttcccagagttccaaaactaaagtaaaacatccaattaatcaatcaattackcaactgataaatcaaagctagagaagtactctaatcaagcataacttattttcctatctgagatgttttccacattttgtatttgctgaagcagtgcaaaatgttgctgcttaaagacattatgtgacaatctgttttcattcctatgctctaaaaattatgaatagtaattttaatattctttattattttttatattttaaatcagtgttattagttttcccatattaatttattt

SEQ ID NO: 610915 - DNA, 623 bp, Homo sapiens
ttaatagctccttccgaactgtgttcctaaagccctcccaccgccttcctatccattgatttcattatggcataatttggggtgcttgcctaaaattgtaattccagtaagagtagacagtgttttatcaatactgaaccctcaacacctagcacaagatcttgtactcgcaaggacttgtacatttgctaatgaagtgaacaaatattgcattaatttcaaatgtttgctgaactgaatttttgaatgctgtgttgaccaaactactagcagggcaatgtgtttcattcttgaaaagttgtacctttgcattccaaacacaaccttgcctgcttcccagagttccaaaactaaagtaaaacatccaattaatcaatcaattacgcaaytgataaatcaaagctagagaagtactctaatcaagcataacttattttcctatctgagatgttttccacattttgtatttgctgaagcagtgcaaaatgttgctgcttaaagacattatgtgacaatctgttttcattcctatgctctaaaaattatgaatagtaattttaatattctttattattttttatattttaaatcagtgttattagttttcccatattaatttattt

SEQ ID NO: 610916 - DNA, 394 bp, Homo sapiens
tacaatctccagtgaagaatgagaaytggctgggcgcggtggctcatgcctgtaatcccaacattttggtaggccgaggcaggaggagcacttgaggtcaggagttcaagaccagcctggccaacatggtgaaaccccgtctgtactaaaaaaataaaataaaattagctgggcatggtggcatgcccctgtaatcccagctacttgggaggctgaggtgggaggatggtttgaaccagagaagtcgaggttgcagtgagttatggtggtgccactgcaatccagcctgggcaacagagtgagaccccatctcaaaaaataaacccacacccaaagtgttggtttacagaggctttccaatgcaataggaagcttctggaaactttagggaaag

SEQ ID NO: 610917 - DNA, 586 bp, Homo sapiens
cttccagtctttgtatctacttcgacgtttacatattttattcaacaaaccaatatacatattttattgaaatattcgctacgagcttttctctgtcattttttttcttctaggctaggatttttaagtgctacatagtagtctctcatacagttagttaaaatttatgtaacgaattccctattattgaacatttagattgtaatgttttgtgcttatgaatagtaatgcaatgtattgtacatacatctttatatacatttctgttactttagaatatctagaagtggaattgtcaagttaaaggatatgtgagatctttaaggctttttatgcagattatcaaatatccctctagaaagrtcttgtcagtttgatcaccaacaagaaagagggcatgttttattctcacaaaaaccaggtaattaaaaaaacaaaagcgtcatcagtttgaaaagtgaaaatggtatctcattttctaatttgccttgttttattactagttaggttaaatttttataatgtgtttattggcctgtgcattttttatttgtgaatttattgtgaatttgtgtcgatttttcta

SEQ ID NO: 610918 - DNA, 586 bp, Homo sapiens
cttccagtctttgtatctacttcgacgtttacatattttattcaacaaaccaatatacatattttattgaaatattcgctacgagcttttctctgtcattttttttcttctaggctaggatttttaagtgctacatagtagtctctcatacagttagttaaaatttatgtaacgaattccctattattgaacatttagattgtaatgttttgtgcttatgaatagtaatgcaatgtattgtacatacatctttatatacatttctgttactttagaatatctagaagtggaattgtcaagttaaaggatatgtgagatctttaaggctttttatgcagattatcaaatatccctctagaaaggtcttgtcagtttgatcaccaacaagaaagagggcatgttttattctcacaaaaaccaggtaattaaaaaaacaaaagcgtcatcagtttgaaaagtgaaaayggtatctcattttctaatttgccttgttttattactagttaggttaaatttttataatgtgtttattggcctgtgcattttttatttgtgaatttattgtgaatttgtgtcgatttttcta

SEQ ID NO: 610919 - DNA, 583 bp, Homo sapiens
aatatccctctagaaaggtcttgtcagtttgatcaccaacaagaaagagggcatgttttattctcacaaaaaccaggtaattaaaaaaacaaaagcgtcatcagtttgaaaagtgaaaatggtatctcattttctaatttgccttgttttattactagttaggttaaatttttataatgtgtttattggcctgtgcattttttatttgtgaatttattgtgaatttgtgtcgatttttctacaagcacttattttcttatttattgagtagagctccatattttatragctacataaatatatataatatgctataaaaagccctcctctccagcttgtcttttgctatataattttcttcagggtgctttaatgtcagaatatgtaaatttcccatgctatcaaatctatcaatgttttcttatatagttttctcctttgcttttatgctggtcaaataaatattcctctgtgttttctttcacttcttagtttcatcacactgctttaatacctttggaatttatttcgatttattatttgatatagggaatctaaccatattcttttcaaatatagttaa

SEQ ID NO: 610920 - DNA, 583 bp, Homo sapiens
aatatccctctagaaaggtcttgtcagtttgatcaccaacaagaaagagggcatgttttattctcacaaaaaccaggtaattaaaaaaacaaaagcgtcatcagtttgaaaagtgaaaatggtatctcattttctaatttgccttgttttattactagttaggttaaatttttataatgtgtttattggcctgtgcattttttatttgtgaatttattgtgaatttgtgtcgatttttctacaagcacttattttcttatttattgagtagagctccatattttatgagctacataaatatatataatatgctataaaaagccctcctctccagcttgtcttttgctatataattttcttcagggtgctttaatgtcagaatatgtaaatttcccatgctatcaaatctatcaatgttttcttatatagttttctcctttgcttttatgctggtcaaataaatattcctctgtgttttctttcacttcytagtttcatcacactgctttaatacctttggaatttatttcgatttattatttgatatagggaatctaaccatattcttttcaaatatagttaa

SEQ ID NO: 610921 - DNA, 579 bp, Homo sapiens
cttaacatttgcgtgaccttggataaagcattgaacctcttgaagcctccatttcttcctttataaaacgatggtaggaaaattcctgcttcatagaaatgtaaagatcagtgagtccacacatgaaagtccttggtacagtgcctggcacatatcatgcattctgtaatgttcaagtatcattagtagtagtaagaggagttccaggctctcgagcactccactgtcttctacgctattatctctttttgaccttttagtcttccctaattatcccaaatcccattatctaaatcccagctcccttccttgcttgatttgtgagcttgrcaagtattatctcttggaacatcatctacaaattgttgctagtaataattatgttgcaggaggttaagattaaaagatattttatacatgcatattttatatatgtgtgtgtgtgtgtgtgtgtgtgtgtgtgtgtgtgtgtgtgtgtataatgctccatatgtactaaacactctacagatgctctgggaatgatagattttgttattgttactataacccgggttcacccaggcctcatcagcctga

SEQ ID NO: 610922 - DNA, 411 bp, Homo sapiens
tctactttgctatcaggtcccatggctttgaggatattttcccatgtacactatctttctttatagggtaggctccatcacttcataactgtatgccctgaaacaagttgcctaactcctctgagcattgcttcctcmtccatgaaaaaggacagtgacactaaacgaaggagttgttgtgaggattagcacataggcacagcatcaagcagagtgcccagtgccaataagtatttgatatgtactttgatccacccactttcatcccacctcctttttcctatgtcactggtattgcatttgttgtgcctttgtttggaagggagaatggggctaacccaggggaacacggtacatgttcttttctgtttactgaagatgtaaagtgtgagcataatgttttgcacatgt

SEQ ID NO: 610923 - DNA, 607 bp, Homo sapiens
caaacctactattaattgaatagctctggagaacaggttggctgtgtgaaagagagacttttttaaaattcagtacatctgtatattgtttgccttttctctgccttgagtatgtcttatttttaaaatttaaaaagatatttttaaaaagagatagtgataaatggattggatcctggaacacaaaaaaagacatcagtggagaaactggtgaaattcaaataaagtctggagtgtagttcatagtaagtatgccaacattgctttcttagtcgtgacaaatgcaccgtggaaatgtaagatgttagcaatagaagaaatggtgaaaggtctatgggaacaccgtattrtctttgcaacttttctgtaagtctaaaattattccacaataataaaaaaaattaattaacagagagagtcacacaggcttgtagccaaggtatctttggctgttggaatctttggttccagaaaaattcaggttactacttgagctcccttgctctgagagctctatctctgtcctgcagacccccacacagggagactcccacctggcctcctgaggtctgcagagattatctaagccaggcctacatatagctaa

SEQ ID NO: 610924 - DNA, 608 bp, Homo sapiens
ttgcctgtgtgagtcggttttgccaaatgcttgtagggattttttataattcatcctgagctcctatacccttggtctgctctagaggttgcctctgcctccccctttcccttctacctcacccaaggtctagagccccgaattactttgtggagtaagcactcccaccccttggaacgatttcatttttcatcacgttgtatctaatttattttttccctggaaattcaacgactcctttcacttcactgagcacattttagccttggtcaacccactccccaccttttccccaggggaggtgatggccttttgtatattattattccttctgctcagtttcattgctcttctgcatttgtgcttcctggattggcactttgtcttccatgtttgtctacttttcattacttagagtctagcttgtctactacttcaatgcttttatttcttacaaggcaaatgctgctattgtggattttagttgttrctgtgtgtttaatttcttcgcattcctttcttaccttaatcactgtctgtctatttcagaatctctcctcctgcatttcatcatccatcttctattgatcatgcatatttcttatatt

SEQ ID NO: 610925 - DNA, 588 bp, Homo sapiens
caacaacaaactaaagatataaatcaggaatggaagcgaccgggggaatgtcatcacccagatggaaaggccaagacagacagaactggggttcaaagaagggaaggggacaggaagaggattcctggtttcatatgcagaccacagaacagaatcagttttggagaacaggggctctaattgtgcagtttagagaaaacagagctgttgctacgtgaagaggcagaaccagctgacgttaaaaataggtttggatgacacacaggagtgacacaagatccctgccttcaaatagtcagggggccatcgtgtgggaggagggatggatgtgtctcccggcaccaatggacggccctgggtccaacagtagatgccccaagctacaaaaagcttcttggctgcctcagaagggggcgggctgtgataatttggggtcgctcccagcggagacatggcacaaaccatattaaaaaaggaytgccataggacccaccaccgcctgggcctggggattattaagacaaaagagtcctgcactgagggtcccaggatcaggattccagctctggcggcaaaccacctactgtg

SEQ ID NO: 610926 - DNA, 416 bp, Homo sapiens
ggagccctccgcggccgcacgcagaggaaggctgcctcctgtagcagagcccagccattcgcgggtgcccagttcatcttcrtggggctaaacctgcgggaagagagggaaagggcccttagtttccatggagatcgggtgcccagaggcggagggctcaaggctggagagcagagggacccccatcttttgtgggatcagggtgcccccagcatcttggaggcccactgaggcctgggggggcgcggtttaacctctagcatcagggacttaggcctgggggaggcgctgggaagtggcaggtggggcaggaggggcaggagggttctgcacctgaaggttgtgcacctggattgggggtgtagaagcggggcaggagcgttcaggcctctgggggcgtccaggcccgggcgggg

SEQ ID NO: 610927 - DNA, 416 bp, Homo sapiens
ggagccctccgcggccgcacgcagaggaaggctgcctcctgtagcagagcccagccattcgcgggtgcccagttcatcttcatggggctaaacctgcgggaagagagggaaagggcccttagtttccatggagatcgggtgcccagrggcggagggctcaaggctggagagcagagggacccccatcttttgtgggatcagggtgcccccagcatcttggaggcccactgaggcctgggggggcgcggtttaacctctagcatcagggacttaggcctgggggaggcgctgggaagtggcaggtggggcaggaggggcaggagggttctgcacctgaaggttgtgcacctggattgggggtgtagaagcggggcaggagcgttcaggcctctgggggcgtccaggcccgggcgggg

SEQ ID NO: 610928 - DNA, 410 bp, Homo sapiens
caggagcggccccaccattgaattttgcaaggcgttggtcaagggggaatcttctggcccctcccaggtgggatgaagtaggtctaaagtgamtaatccactccaccatcccaatctccctaagcctttggatcccttcctctacattaaaccaagggagatcaggcatttccacctcgctcacaatgagccatcttttaatccatatttcagcaaaccaatcaaacaaactattagaaccttttttaattccccaagctgcaacattaaaagcagagttcctacttagtgggcccaaatcaataaattcagcctgatccaactctatattccttccccattatcctatgcccttaatatccattcccatgcctgttctccagattgctgtttatataaattagagaact

SEQ ID NO: 610929 - DNA, 553 bp, Homo sapiens
tgcctggggttgtacaggtagtcagtgggagagacaagcacagaattcaagcacagccactaagccctcactcacccttaccaatagtctattaaatacagccttaagtttctgttatatgtccacttggtttattccttctaggagactgcaagctcttagaaaccaagaatcaagtcttacactgttccctaaaaatatctgtcacaatactcttcaggaatatatcctaaaatagcaggatggccaaaacctgaggtttagcaaattgagagaggtagaacagacagacaggcagacaggcagacacacagatggaaacatacaactatttgaagatgggacaatcagaggagggtgagaatcaatggactatcagggaraagaaaaatggagcatctcaaatttaatacttgagctctgatttgtttcagccaactctagtaataagatatgtccttgcagagaaatggctaacatctctcctgatttacacataaaaggatttattgttcttctcacctctgtaaagcaatgttaagatcaacaggat

SEQ ID NO: 610930 - DNA, 631 bp, Homo sapiens
aaaaaaattaccaacaaaaaaaagtccaagacaagattgattcacagcaaaaatctgccagacattcaaagaagtkgcaccaattctattgacactattccacaagacagagaaagagggaaccctccctacatcattctatgaagccagtatcaccttaataccaaaaccaggaaaggacataaccaaaaaagaaaactacataccaatatcactgatgaagatagatgctaagtttcttaacaaaatactagctaaccaaatccaacaacatatcaaaaagataatacaccatgatcaagtgggttttatctaggaatgcaggggtgctttaacatttgcaagacaataaatgtgatacaccacataaacagaatcaaaaacaaaactcatatgatcatctcaatagacgcagtaaaaagcgttagacaaaatccagcatccctttatgatcaaagatctcagcaaaattggcatacaagggacatacttcaatgtattaaaagtcatcaataacaaacccacagccaacataatactgaatggggaaaagttgaaagcattccctctgagaactggaacaaaacaaaaatgctcactctcaccactccttttcaacatagtactggaa

SEQ ID NO: 610931 - DNA, 631 bp, Homo sapiens
aaaaaaattaccaacaaaaaaaagtccaagacaagattgattcacagcaaaaatctgccagacattcaaagaagttgcaccaattctattgacactattccacaagacagagaaagagggaaccctccctacatcattctatgaagccagtatcaccttaataccaaaaccaggaaaggacataaccaaaaaagaaaactacataccaatatcactgatgaagatagatgctaagtttcttaacaaaatactagctaaccaaatccaacaacatatcaaaaagataatacaccatgatcaagtgggttttatctaggaatgcaggggtgctttaacatttgcaagacaataaatgtgatacaccacataaacagaatcaaaaacaaaactcatatgatcatctcaatagacgcagtaaaaagcgttagacaaaatccagcatcyctttatgatcaaagatctcagcaaaattggcatacaagggacatacttcaatgtattaaaagtcatcaataacaaacccacagccaacataatactgaatggggaaaagttgaaagcattccctctgagaactggaacaaaacaaaaatgctcactctcaccactccttttcaacatagtactggaa

SEQ ID NO: 610932 - DNA, 433 bp, Homo sapiens
gaaaaacaaaatctgaggtagttcatcaccactagacctgccttataagaaatgctaagagatattcttcaagtttaaataaaaggatgctaagtagcaatatgagaacatataaaggtataaaactcacaataaacttaagtacatattcaaattttgaatattctaatatgtaatggtgctaagtaaatcatagtgaactttagaataaaagttagtaactacaattacaataacttgttaatggatatgcaatattaaaagatgcaaattttgacatcgatacataaaatatgggaagagggtgaagtaaaagtggagacttttttattatgattgaggttaagatgttaccagcttaaaatagacttttataacagtaatatgtcttatgtaagcctcactrtggtcacaaagaagaatcctgtggtag

SEQ ID NO: 610933 - DNA, 433 bp, Homo sapiens
gaaaaacaaaatctgaggtagttcatcaccactagacctgccttataagaaatgctaagagatattcttcaagtttaaataaaaggatgctaagtagcaatatgagaacatataaaggtataaaactcacaataaacttaagtacatattcaaattttgaatattctaatatgtaatggtgctaagtaaatcatagtgaactttagaataaaagttagtaactacaattacaataacttgttaatggatatgcaatattaaaagatgcaaattttgacatcgatacataaaatatgggaagagggtgaagtaaaagtggagacttttttattatgattgaggttaagatgttaccagcttaaaatagacttttataacagtaatatgtcttatgtaagcctcactatgktcacaaagaagaatcctgtggtag

SEQ ID NO: 610934 - DNA, 587 bp, Homo sapiens
caaaatgccttaaaactttcaaaaaaattgaaataatatcaagcatcttctctcaccacaatggcataaaactrtaaaacaatatcaagaggaatttgggaaactacacaaacacatgaaaacaaagcaagatactctttaatgaccagtaggttaatgacaaaattaagaaagaaattgaaaagtttcttgaaacaaaagttggaagacaacataccaaaatctatgggatacagtgaaagcagtactaatagggaagttaatagctgtaagaacctatgtcaaaaaagaagaaaagcttcaaataaacaacctagtgttccatcttaatgaactagtgaagtaagagcaaactaaaccccctattaatagaagaaaagaaataatacagatcagagaagaaataaatacatttgaaataaagaaagcaatagaaaagattaatgaaatgaaaagttggatttttgaaaagattaaaaaaaactgagaaaactttagccagactaattaagaaaaacagagagaaaacccaaataaataaaaattacagatgaaaaaggagacattacaactagtaattacaatta

SEQ ID NO: 610935 - DNA, 587 bp, Homo sapiens
caaaatgccttaaaactttcaaaaaaattgaaataatatcaagcatcttctctcaccacaatggcataaaactataaaacaatatcaagaggaatttgggaaactacacaaacacatgaaaacaaagcaagatactctttaatgaccagtaggttaatgacaaaattaagaaagaaattgaaaagtttcttgaaacaaaagttggaasacaacataccaaaatctatgggatacagtgaaagcagtactaatagggaagttaatagctgtaagaacctatgtcaaaaaagaagaaaagcttcaaataaacaacctagtgttccatcttaatgaactagtgaagtaagagcaaactaaaccccctattaatagaagaaaagaaataatacagatcagagaagaaataaatacatttgaaataaagaaagcaatagaaaagattaatgaaatgaaaagttggatttttgaaaagattaaaaaaaactgagaaaactttagccagactaattaagaaaaacagagagaaaacccaaataaataaaaattacagatgaaaaaggagacattacaactagtaattacaatta

SEQ ID NO: 610936 - DNA, 550 bp, Homo sapiens
tggtgagttgtataattatttcgttacatattacaatgtaataataatagaaataaaagtgcccgataaatgtagtgagcttgartcatcccgaaacaatccccaccacctacccccattcatggaaaaattgtcttccacaaaaccagtccctggtgtcaaaaaaggttggtgactgctgctttagaagatggttttattcagtacgtatttccaaaaaaatttagaattcattcattcattttttgggaaattgcattaaaatagcggtaaatgttaaaaaaagcaaaatcgtagtctttttggtggaactcctaatatttcatacagttattaaatatttgaagtgaccaaatgtgttcatattaaagatgaccatattaaaataatcattttggggcatcttccttttttttttttttagaccgagtctcactctgtcacccaggctggagtgcaatagtgtgatctctgttcactgcaacctctgcctatcaggttgaagcaattcttctgcctcagcctcctgagtagctgggattataggcat

SEQ ID NO: 610937 - DNA, 602 bp, Homo sapiens
tcaatctacacaaatttgatggcaataggtcaagtttcaggaatgattcttatgcaaatgagttaaacagctaattggaaggatgacaggaaaccttgttctcccagtgatgagtatgagaaagatgatgatacatttaacctatgattcagctgtcctcccttaggaccagaattctttaatagtgcaaagcaaacatcttgagggtcccagaagattaatatctaaataaatggccttctagaagctgtgagtagtagaaagaagccaggaaagtcaaatttatcataagcaagtccaagtgactatattaaccaaaattgcatttcagctcttatatacaaatcagctgccacacttggagatctgtagatgagaaaaagaaagtaaagcaagggtaaaaactgacgttgttactcaggattttagaacaactctgttctgaaggagaaaagacaaaaggycctaagagatctaagagaatttcaaggcacattggtttacttaaatcaccgattgcactcccaaaagcatagcctctttctgaaaggtatttcaagttctgagaagcacaagcctttaacacacaggacactcagggc

SEQ ID NO: 610938 - DNA, 480 bp, Homo sapiens
gcctgtagtcccagttactagggaggctgaggcaggagaatcacttgaacccaggaggcagaggttgcagtgagtcaagattgcaccactgcactccagcctaggtggcagagtgagactcagtctcaaaaaagggcaggggagggggcaggaagctagactatatgcctgcagtcctaggtaatcaggacactgaggcaggaggatcacctgagcccaggatttcagttggagtctagcctggacaacagagccagacccatctcataaaataaggaaagaaaacatctgtgtgtgtgtgtgtgtgtgtgtgtgtgtgtgtgtgtgygcgtgcatgcacgcacgtgccctcccctccttttttttagcccttaagactagtcacactcttatatgctgatatcggcctaaagacatttgtgtgaccatttttacatgctttaatttcccctttgcccagtcctcatttcatagactgct

SEQ ID NO: 610939 - DNA, 498 bp, Homo sapiens
taacaattttactttctaaatatctcttggatctatcyatttgttcctgccaactcaaccctactcaatgttaccatgtatgggaatgtccaataattcaccaatttaatacaagacatataatagttttaaattttatttctaaattgcctataattgagagtatttttctagaaaacagaaaacaataaaaggtatatccactgaaaatatcaatgtttactagagtcttatgtttaaaaaaatcataagcatgcacattacagaacaggcataacctataatatgcacattagttaaattctgtacttataaaaagtctaggggaagtaactgaaaatataaattttaaaatatttctgtagtcatagattaaaaggtaaatgtgtataagcaatataattctcactatattttattctgcagaaataccttaaacgacactgcattgtcaaagaatagtatgtcctctacaattaaaaaaaatacaagaatttg

SEQ ID NO: 610940 - DNA, 498 bp, Homo sapiens
taacaattttactttctaaatatctcttggatctatccatttgttcctgccaactcaaccctactcaatgttaccatgtatgggaatgtccaataattcaccaatttaatacaagacatataatagttttaaattttatttctaaattgcctataattgagagtatttttctagaaaacagaaaacaataaaaggtatatccactgaaaatatcaatgtttactagagycttatgtttaaaaaaatcataagcatgcacattacagaacaggcataacctataatatgcacattagttaaattctgtacttataaaaagtctaggggaagtaactgaaaatataaattttaaaatatttctgtagtcatagattaaaaggtaaatgtgtataagcaatataattctcactatattttattctgcagaaataccttaaacgacactgcattgtcaaagaatagtatgtcctctacaattaaaaaaaatacaagaatttg

SEQ ID NO: 610941 - DNA, 625 bp, Homo sapiens
gttgggtcaaaggaatatgcatttctagcaagctaccaaagggaatgggccacacttggacaaactgatcccagagaccatggttcctcttaccttcaaccatgtaccttccagtcccttgctatcttctgctgtcttgaatcagaacaactcaagcagcagcaacttactttttttttttttttttttgagacagagtcttgctctgtcatccaggctggagtkcaatggtgggatctcggctcactgcaagctccacctcccgggttcacgccattctcctgcctcagcctcccaagtagctgggactacaggcggccaccaccacacctggctaattttttgtatctttagtagagatggggtttcaccgtgttagccaggatggtctcgatctcctgaccttgtgatctgcctgcctcagcctcccaaagtgctgggattacagatgtgagccaccacggtgcctggccagcaactgacttttgacaatgacatttctaggaggtggtgcctccaccatcatctgagaatcatttgttctacgtatagattcctggtccgaattcagaggttctagcagtataggaactttacatttcttagcagaaaaattaatttagga

SEQ ID NO: 610942 - DNA, 625 bp, Homo sapiens
gttgggtcaaaggaatatgcatttctagcaagctaccaaagggaatgggccacacttggacaaactgatcccagagaccatggttcctcttaccttcaaccatgtaccttccagtcccttgctatcttctgctgtcttgaatcagaacaactcaagcagcagcaacttactttttttttttttttttttgagacagagtcttgctctgtcatccaggctggagtgcaatggtgggatctcggctcactgcaagctccacctcccgggttcacgccattctcctgcctcagcctcccaagtagctgggactacaggcggccaccaccacrcctggctaattttttgtatctttagtagagatggggtttcaccgtgttagccaggatggtctcgatctcctgaccttgtgatctgcctgcctcagcctcccaaagtgctgggattacagatgtgagccaccacggtgcctggccagcaactgacttttgacaatgacatttctaggaggtggtgcctccaccatcatctgagaatcatttgttctacgtatagattcctggtccgaattcagaggttctagcagtataggaactttacatttcttagcagaaaaattaatttagga

SEQ ID NO: 610943 - DNA, 625 bp, Homo sapiens
gttgggtcaaaggaatatgcatttctagcaagctaccaaagggaatgggccacacttggacaaactgatcccagagaccatggttcctcttaccttcaaccatgtaccttccagtcccttgctatcttctgctgtcttgaatcagaacaactcaagcagcagcaacttactttttttttttttttttttgagacagagtcttgctctgtcatccaggctggagtgcaatggtgggatctcggctcactgcaagctccacctcccgggttcacgccattctcctgcctcagcctcccaagtagctgggactacaggcggccaccaccacacctggctaattttttgtatctttagtagagatggggtttcaccrtgttagccaggatggtctcgatctcctgaccttgtgatctgcctgcctcagcctcccaaagtgctgggattacagatgtgagccaccacggtgcctggccagcaactgacttttgacaatgacatttctaggaggtggtgcctccaccatcatctgagaatcatttgttctacgtatagattcctggtccgaattcagaggttctagcagtataggaactttacatttcttagcagaaaaattaatttagga

SEQ ID NO: 610944 - DNA, 625 bp, Homo sapiens
gttgggtcaaaggaatatgcatttctagcaagctaccaaagggaatgggccacacttggacaaactgatcccagagaccatggttcctcttaccttcaaccatgtaccttccagtcccttgctatcttctgctgtcttgaatcagaacaactcaagcagcagcaacttactttttttttttttttttttgagacagagtcttgctctgtcatccaggctggagtgcaatggtgggatctcggctcactgcaagctccacctcccgggttcacgccattctcctgcctcagcctcccaagtagctgggactacaggcggccaccaccacacctggctaattttttgtatctttagtagagatggggtttcaccgtgttagccaggatggtctcgatctcctgaccttgtgatctgcctgcctcrgcctcccaaagtgctgggattacagatgtgagccaccacggtgcctggccagcaactgacttttgacaatgacatttctaggaggtggtgcctccaccatcatctgagaatcatttgttctacgtatagattcctggtccgaattcagaggttctagcagtataggaactttacatttcttagcagaaaaattaatttagga

SEQ ID NO: 610945 - DNA, 564 bp, Homo sapiens
aaccaggcaaaattattctaattaccttatcatagaacatatacataattttactacatcttcttttttttaaataattttttttgaaatagaggyagggtctcactatattgcccaggctggtctcaaactcctgggctcgagtgatcctcccacctcagcctcccaaattacagagattacatgcatgagccaccacacctggccgccttcttcttcttttttttgtttttaacaatgaacttgcaagtagtggggaattaaatttaatggaaattagattaaaatttgtggatctccatggcagtacagtgagtgaaaaagtaaatttggcttgggtaatagggagaaactgagaaagaaaagtagatttacttcctaaatattttaatatccagtaacagcaaagctgctaattaaatatgtcaggaataataaacatgaaccaattcaaatcacttcccagaaagtctcactttcactgcagatttgattaaatctcatttgtcttgtcccagcagcttagcagaataaggtaaaatatggaaaggaggattttggggt

SEQ ID NO: 610946 - DNA, 564 bp, Homo sapiens
aaccaggcaaaattattctaattaccttatcatagaacatatacataattttactacatcttcttttttttaaataattttttttgaaatagaggtagggtctcactatattgcccaggctggtctcaaactcctgggctcgagtgatcctcccacctcagcctcccaaattacagagattacatgcatgagccaccacacctggccgccktcttcttcttttttttgtttttaacaatgaacttgcaagtagtggggaattaaatttaatggaaattagattaaaatttgtggatctccatggcagtacagtgagtgaaaaagtaaatttggcttgggtaatagggagaaactgagaaagaaaagtagatttacttcctaaatattttaatatccagtaacagcaaagctgctaattaaatatgtcaggaataataaacatgaaccaattcaaatcacttcccagaaagtctcactttcactgcagatttgattaaatctcatttgtcttgtcccagcagcttagcagaataaggtaaaatatggaaaggaggattttggggt

SEQ ID NO: 610947 - DNA, 564 bp, Homo sapiens
aaccaggcaaaattattctaattaccttatcatagaacatatacataattttactacatcttcttttttttaaataattttttttgaaatagaggtagggtctcactatattgcccaggctggtctcaaactcctgggctcgagtgatcctcccacctcagcctcccaaattacagagattacatgcatgagccaccacacctggccgcctycttcttcttttttttgtttttaacaatgaacttgcaagtagtggggaattaaatttaatggaaattagattaaaatttgtggatctccatggcagtacagtgagtgaaaaagtaaatttggcttgggtaatagggagaaactgagaaagaaaagtagatttacttcctaaatattttaatatccagtaacagcaaagctgctaattaaatatgtcaggaataataaacatgaaccaattcaaatcacttcccagaaagtctcactttcactgcagatttgattaaatctcatttgtcttgtcccagcagcttagcagaataaggtaaaatatggaaaggaggattttggggt

SEQ ID NO: 610948 - DNA, 346 bp, Homo sapiens
caaaaaatgaaaaaaagagaaaaaaaagaaaaaggaaaaaagaaaaatcttgcttggaaggggctggttgtgtgattgttcattcattttggttttggtgaattctctcccttgtatttratgggacagattatgggttccataataacttagatgaagaccattctgggactttgaaaataattctacagtcccaaataattaaagaaagaatggcctaatacttattcattttctattttggagatagtttcagagaaaaatggacaatggtcatcccctaaggttttggtctacttatcctaggagatgctggggtttttggtattcattgggtgtatagtat

SEQ ID NO: 610949 - DNA, 372 bp, Homo sapiens
aaccaatgggaggcccgagcttgttttcctgcaactggatggttccatctggggatgatgggagacagtgacagatcattaggcattagactctcataaggagcacacaacctagatccctcacatgtgcagttcacaatagggttcatgctcctatgagaatctaatgctgccactgatgtgacaggaggtggagctccggtggtaatgcaagcgatggggagcagctgtaaatacagatgaagcttcactcattcacccgccactcatctcctgctctgtactcctggttcctaacaggctacagagtggtacragtccatggctcagggagttggggatctctggtctatatggtattttctttctcat

SEQ ID NO: 610950 - DNA, 570 bp, Homo sapiens
ctggtttggttttcagcaatctcagccccacagctgtagaagttaagtgttgcattctgggcagacatagaagctttyggttcattcattctatgcttgagttaggaacttgtatccctgagttcatccttttcttctcccacttttaccagcaacattaggagcaaccagccagtctcattacacttagtttgacaaaaatgttcaaagacatcctgtgcctcatcacccagatctttgcccttttcaggtgtttaaattaggagtatccaatggtgatattgtgcttatttccattgccacatcatgccaaggatggatagacaatggtattgtatctaggtcaaatttcttagggttttgttttgttttttttgtttttgagatggagtcttgctctgtcacccatgctggagtgcagtggcacaatctctgctcactgcaacctccaccttccgggtttaagcaattctcctgcctcagcctcccaagtagctgggacaacagacgcccgccaccacgcttgactaatttctgtattttagtagagacaggtttcaccatgttggc

SEQ ID NO: 610951 - DNA, 570 bp, Homo sapiens
ctggtttggttttcagcaatctcagccccacagctgtagaagttaagtgttgcattctgggcagacatagaagcttttggttcattcattctatgcttgagttaggaacttgtayccctgagttcatccttttcttctcccacttttaccagcaacattaggagcaaccagccagtctcattacacttagtttgacaaaaatgttcaaagacatcctgtgcctcatcacccagatctttgcccttttcaggtgtttaaattaggagtatccaatggtgatattgtgcttatttccattgccacatcatgccaaggatggatagacaatggtattgtatctaggtcaaatttcttagggttttgttttgttttttttgtttttgagatggagtcttgctctgtcacccatgctggagtgcagtggcacaatctctgctcactgcaacctccaccttccgggtttaagcaattctcctgcctcagcctcccaagtagctgggacaacagacgcccgccaccacgcttgactaatttctgtattttagtagagacaggtttcaccatgttggc

SEQ ID NO: 610952 - DNA, 570 bp, Homo sapiens
ctggtttggttttcagcaatctcagccccacagctgtagaagttaagtgttgcattctgggcagacatagaagcttttggttcattcattctatgcttgagttaggaacttgtatccctgagttcatccttttcttctcccacttttaccagcaacattaggagcaaccagccagtctcattacacttagtttgacaaaaatgttcaaagacatcctgtgcctcatcacccagatctttgcccttttcaggtgtttaaattaggagtatccaatggtgatattgtgcttatttccattgccacatcatgccaaggatggatagacaatggtattrtatctaggtcaaatttcttagggttttgttttgttttttttgtttttgagatggagtcttgctctgtcacccatgctggagtgcagtggcacaatctctgctcactgcaacctccaccttccgggtttaagcaattctcctgcctcagcctcccaagtagctgggacaacagacgcccgccaccacgcttgactaatttctgtattttagtagagacaggtttcaccatgttggc

SEQ ID NO: 610953 - DNA, 577 bp, Homo sapiens
atattagaattatcatgaagtacacagtctttttcttttaatgygtcagttctctgtatctgttatcaccataagtacaggtcaatcagatatcttttaaaattgaatctcagtcaaggaaagattcccttgtaactgcttttaacatttagtaacctgacacttgcaattctttcaaatgtcatacttttctagagtacttctatttcagaagctttacaattcttctacagattataggactatgctcattaatacaaccatttgttttgaataagtatgaatattagaagtcaaaatgaactgaacttctgctaagtcccaaaaataacatgagaaagtgtttttattgcctaactgcagatgctaaataaatataaataagggccctcattcttagtcttccacaatcaagcagagtctttggagggtgcttcaacaggacagtaggcactagtttagggtacatttctaagttcatctaagtataacttgttcactcattccgtgcctatttactgtgcttctactacggtgacaggcactgggctaattgctgcagatgcagtgccgagca

SEQ ID NO: 610954 - DNA, 540 bp, Homo sapiens
cctctccctctcttttttcctcaaattagtaccaggactattgagaaatgcagaagtcaaccctcctctctagtatgcaacacttttgtgactttattatggatgaaattgtttcagctctaatatactgtagaaatcagatgatacttgcttttgtgttacatttttgaaatgacttaaatcttacagggagtcatttattattgatttaaacaccctaagcagccataaggaaaagctttagcgcaataagcaaataactacaaaatcacctcaactactttttgtaaataaagcagaaaggtcatctgttttgttragtctaattaaacaatctggatctgactaagctgtcacaaaatatacactttcacagccttgagattcaaatgatattttactatagacacttaatttactaatctatatggttaactttgtttgcttaatttctcaacacagatactaaaaatttgtaacagatgagtcactaagaaacttgactgcctgaatcagatagtgtaagaacataatttagac

SEQ ID NO: 610955 - DNA, 469 bp, Homo sapiens
cccttgcccctaacccttggaaaacaccgttccactttctatttctatgagtttatctacttcaggtaccacatataggtggtatcatagagtatttggctttttgtgctaggtttatttcacctagcataatgtcctctatgttcaaccatgttgaagcagatgatagagtttccttctcttttcaattctggataatattccattatttttatatatcacagtttgtttatccatttatttgttgatgggtatttgggttacttacaactcttggctattttaaatagtgccactatgaatatgggtatgcaaatagctcttcaaattcctgctttgaattrttttggatacataccaaaaagggattgcaagaccatatagtaattctgtttttaatttttttgagaaccttcatactgttttccatagtggctacaccatttcatgttttcaccaacagtgcaca

SEQ ID NO: 610956 - DNA, 575 bp, Homo sapiens
tgagggtgcagggagctatgatcatgccactgccctccagcctgggcaatagagtgagaccctgtctcttaaaaaaaagaatagaattttagggcatggaaggccaaagcagaactagggaattttctggtagaaacagcatcatcccagattggtgggagatttagagacatgtcatctttgttgatgtacctgtgtggcacactagctaaaaaagatagccagagctaaggtatggtcaagcaggaaggcaaagcaccagattataacacagcctgaaaatctgaggctccatgtgatttcaaaatgatggcgtagcctcagtctgttcccctccgcccagtcctctacatgactatgtataaaacagacaccctaaaaacctgcctcattcaaaaatcaaaaatagaaaatcaaaaccacaataagctaccaattcasactcatatggatggctactataaaaatataaaatggaaaataacaagtcttggtgtggatatggagaagttgaaacactctgcattgctggtgggaaggaaaatggtgcagccactttggaaaagagtttggcg

SEQ ID NO: 610957 - DNA, 567 bp, Homo sapiens
agaattcatgagaggaagctatgtttattttcccttgatgacccgaccactatggaataaaacacgtaggtacattttctacagagayggatccaagactgtgactgtctcattgtgcctgtagtggagggctgccagggctctcctttgctggttataaggagctgccttgtgtcacaaaccaggtgattaccatgggttaaacaactaagggcagggtggagagtgaccaagcagtggctccctgagctcgtgacggtgctaaccttttcaaaggtgagcgccgtatatattcatttcagcaagtcacttaatgagcttttggattttttcagcacaaattaaaggcacctacctggatttttaaatcacttggtaatgccacctaatccccctgagtggaagaaaattaaaaacaagagccacagcatttccttagaacatcttgatgtaaagttaatgattctttgagagagactaaatagcagactatttcaatattcggaaacactggaaaatacattccaccatgctatacatacatgggaaaacaaaaaactatttatt

SEQ ID NO: 610958 - DNA, 535 bp, Homo sapiens
cacagttccatatggccggggaagcctcaggaaacttacaatcatggtggaaggggaagcaagcaccttcttctcaaggtggcaggagcatgagaagagcaaaggaggaacttccaaacacttataaccatcagatctcatgagaactcactcactatcatgagaacagcatagttctcagcatagttcaccccactatcatgagaacacccactatcatgagaacacccactatcatgaggacagcatagttctcagcatagttcgcccccatgatccaaacacctctgtctttcgacagacacgtggggattacaaatygaaatgaaatttgggtggggacacagagccaaaccatatcagcatggtactgccataaaaacagataaatgtaccagtgggacaggatagagagtcataaataaacctacacatttacaggcaattgatttttgacaaaagtgccaagaacacacaatggggaaaggacagtccctccaataaatggtattgggaaaatgggaacattccacat

SEQ ID NO: 610959 - DNA, 527 bp, Homo sapiens
gacgctacttatgaagggaaggcctttctgagaagataacacatgaactgaggataaatttcattatattaagtattaggtaaattttgtcattaagtatattaagtatgaattattagcatttcattattaagaattagagataaaagttttcaaatgtgtcaaaaaattttataaacaaaattattctagagcacaaatataatacattttcctcaaattaccacttcttttttatctagtgtacagttgtttgcatcaattcttagttgaaataaatttcactgatattcccaggttgtttttaaatctttctcagccacargagaagccaagtggccctatccactgtcatgtatatcctgtgattttgatgacctcttggttttcttcccaaattgtgtttagggctctatgtcttatttttattagaagccagatcgtttcaaatggctgtcgtgtgtcgtcaggtaaagtctaagcaaacctagtttttttcttcctttcttctctctgattatatatta

SEQ ID NO: 610960 - DNA, 202 bp, Homo sapiens
caggactgggcaggaaccccagtgccctgtgggccaggctggctgggagcccccacgctgggcccaggaaaggccaggctggctttagtgtggcccaggtcccagagccttcccctggtttggttagggagctatggggccaaaaggagccagacttttagggargaaattgaattctcagtcagtatgctgggtggggcgg

SEQ ID NO: 610961 - DNA, 578 bp, Homo sapiens
gtaagagttttagccagtcctggcaacatacagagaccctgattcygtaaaagtaaaaataataaaatcagtggggtctggtggtgcgcacctgtggtcccagctactcaggaggctgatgtgggaagattgcttgagcctaggaggttgagactgcagtgatccatgattgtgccattgcactgtagcctgggcaacagagcgagaccctgtctggaaaaaaaaaaagagtttcagttgctccatatctttgtcagcacttaatacactgatcttctcaattttagccattctagtggatatgaagataccctaacatggtaattaacattttctgatgatgatgttgaggatcttttcatgtgctttttggccatatgtatatcttcttctattttctgattccaattttttaaattaaaattgttttaaacttttatttaaaactttttttagagatagagtctcactatgttgcccaagctggtctctaactcctgtcttcaagtgattgtctctcttcagcctctgaatttccatttttaatggcttgcttgtttatgagatttgtaagagtt

SEQ ID NO: 610962 - DNA, 578 bp, Homo sapiens
gtaagagttttagccagtcctggcaacatacagagaccctgattccgtaaaagtaaaaataataaaatcagtggggtctggtggtgcgcacctgtggtcccagctactcaggaggctgatgtgggaagattgcttgagcctaggaggttgagactgcagtgatccatgattgtgccattgcactgtagcctgggcaacasagcgagaccctgtctggaaaaaaaaaaagagtttcagttgctccatatctttgtcagcacttaatacactgatcttctcaattttagccattctagtggatatgaagataccctaacatggtaattaacattttctgatgatgatgttgaggatcttttcatgtgctttttggccatatgtatatcttcttctattttctgattccaattttttaaattaaaattgttttaaacttttatttaaaactttttttagagatagagtctcactatgttgcccaagctggtctctaactcctgtcttcaagtgattgtctctcttcagcctctgaatttccatttttaatggcttgcttgtttatgagatttgtaagagtt

SEQ ID NO: 610963 - DNA, 578 bp, Homo sapiens
gtaagagttttagccagtcctggcaacatacagagaccctgattccgtaaaagtaaaaataataaaatcagtggggtctggtggtgcgcacctgtggtcccagctactcaggaggctgatgtgggaagattgcttgagcctaggaggttgagactgcagtgatccatgattgtgccattgcactgtagcctgggcaacagagcgagaccctgtctggaaaaaaaaaaagagtttcagttgctccatatctttgtcagcacttaatacactgatcttctcaattttagccattctagtggatrtgaagataccctaacatggtaattaacattttctgatgatgatgttgaggatcttttcatgtgctttttggccatatgtatatcttcttctattttctgattccaattttttaaattaaaattgttttaaacttttatttaaaactttttttagagatagagtctcactatgttgcccaagctggtctctaactcctgtcttcaagtgattgtctctcttcagcctctgaatttccatttttaatggcttgcttgtttatgagatttgtaagagtt

SEQ ID NO: 610964 - DNA, 574 bp, Homo sapiens
ctccttgcccatgttcacttgttgaattaaaccttgtggggttttacaggcaatctcagctttttatttgtaagatattttagcgccctgagtaaactcttgctttctccaatatgaaaggtgtgagcccaytcaaggaagggtttgggattctggtgtaaggggatcgggtgggaggtgtacacaaagaactctccattgcaagagccatggaggactctggtgtttccttttgctgctggaggagggcaggcggaggggtgagttgggctgctctggtagttctgctgactcacgatgtccaccctgcttttggttgtccctcttcatgggtcatggcagcctgagtgacattgtgttactggctagcgggaacattcttactcctggctttctgtggtgacatacctcctgagaaagtgaagcctgcatatgtctctgtgttggctgctgtgggactcagatgcctggagtccctgtaaggaactgagtgccaaaatctagcaggatacagtttgtgacagaacaggaagaggtcaagagaaatgggaaattaagaaaatgtgagtaaaac

SEQ ID NO: 610965 - DNA, 583 bp, Homo sapiens
tgtgtacacatcgaaatagagagtggagtaatagacattggagacaaggaagtgtgggaaggggtgagagatgaaaaattactgcatgggtataatgtacactatgtgggtggtggctatgctaaaaacccagacttcactactacacaatatatccatgtaataaaactgtacttataccctctgaatctataatttgtgaaaactgcattcaaatttaactttttgctgcttttcagaactgctctctggcttccttacctctctgacyggctgtcaccctcatgcattcagctgcctaagattgacctggattcttcctcaatcagggctaaccttggcccagagactcaatatcaagaaatagttcaagtcaaagttatcctcagtaagaagaataaaattggaggaattacaatacctaactttaagttatactacagtgccatagtaatcaaatgacatggtactggcataaaagctgacatatagatcagtggaacagaatagagaacccagagataaacctatacatctaccatgaactcatttttgataaatgtcccaagaatatacattagag

SEQ ID NO: 610966 - DNA, 610 bp, Homo sapiens
attcttttattgatatggctgtgttcttcagcaatctctgaaatcagtaatttctgatgaggtgtaggtgggtttsttttataaattcaaaacccttggggagtcagcaataaaatgttaaaagaaaaataaagttcccaacaggcaaataacccttgagatgttgacccacgccaccccttgacctcctgccctggaataactgatgtaataggggactgcaacagatagagtaaaaaatgaggcatctattgtaattccagaaccgtatattagaagatccctggcacctaggcctgagactttacaaaagacgaggatcgtccttatccctggatgtgacttggggagaaaggaaaaaactgtgtcagctagaatatatcattttagaagaaaagcatttgttctaaagcagactttagtcttagcatagaaaacaagtaccatccaaagaagtctttgggattatggatgtggcagcttgcaaaaaaataaaaaacatgaacgttaattaagtatctctttaagcctcaaactcttcatgaattctgaaatttatcttctaaagtaattcagtctctcttttcattctcacatctatttacgttag

SEQ ID NO: 610967 - DNA, 610 bp, Homo sapiens
attcttttattgatatggctgtgttcttcagcaatctctgaaatcagtaatttctgatgaggtgtaggtgggtttcttttataaattcaaaacccttggggagtcagcaataaaatgttaaaagaaaaataaagttcccaacaggcaaataacccttgagatgttgacccacgccaccccttgacctcctgccctggaataactgatgtaataggggactgcaacagatagagtaaaaaatgaggcatctattgtaattccagaaccgtatattagaagatccctggcacctaggcctgagactttacaaaagacgaggatcgtccttatccctggatgtgacttggggagaaaggaaaaaactgtgtcagctagaatatatcattttagaagaaaagcatttgttctaaagcagacttyagtcttagcatagaaaacaagtaccatccaaagaagtctttgggattatggatgtggcagcttgcaaaaaaataaaaaacatgaacgttaattaagtatctctttaagcctcaaactcttcatgaattctgaaatttatcttctaaagtaattcagtctctcttttcattctcacatctatttacgttag

SEQ ID NO: 610968 - DNA, 527 bp, Homo sapiens
gagtttgcagtgagccaagattgtgccactgcactccagactggtgacagagtgagaccccttctcaaaaaaaaaaaaaaaaaaaaaaaaaaaaaaaaaagtgtgtcttcattcagataaccaccatcatgagtttgttgtcaagcacctttctttttttactatgcttatataatgtatttacaaaaaatgggattatactctacagtcttctttatgacctaacatttatctgatcatatatattttataagatcttttacatcatcatttcacatgttttaatggaatggacatagagatttaattacatagtcacttattaatagatatttarattggttccaagaccatccacatagtatatgaatatttatatatctccataattggttccttgggataaatttacagagagaaatgttggatcaaattttttttaacttttaaggcttctcttgagattgaaaaatttgcccaccagaagagttttataaatttatatttctagcagcaaagtatgaaaa

SEQ ID NO: 610969 - DNA, 590 bp, Homo sapiens
cagagacacataaaaagctgtctttcctgaatcacaaacagcagtagaaaaaaaaaacaggagaaagtaactaaaaggtcatttcacactcacagcattctgagtttggggttttcctttttcctttggccactacactgcattccatttgtatgttgttttcttgatttagtcaagaaaagcaagcaaatcaaacacaattacttgccygagttcccctagcttagcatcatgagaatctgcagttgtttttaatgcatttgggatgctccttcaggctatcaacaaactctctcctatgtttatgaatttatttactactttggtgttcctactctcttcactcttccagatgggtttcaatggcatctctccaccttccctaccgtatgtaaaagagcacacctgatgttcaccctctgttgttgctctgcattagcacaagaacaaaatgagcagaggcattttaaaacataagaaacatacatactagacatgttttgaaagcagtaaaagacttggtaaatttttcttgttttctgattaagttaacagaagtttttaaacagtcaacacatattaaatttaca

SEQ ID NO: 610970 - DNA, 590 bp, Homo sapiens
cagagacacataaaaagctgtctttcctgaatcacaaacagcagtagaaaaaaaaaacaggagaaagtaactaaaaggtcatttcacactcacagcattctgagtttggggttttcctttttcctttggccactacactgcattccatttgtatgttgttttcttgatttagtcaagaaaagcaagcaaatcaaacacaattacttgcccgagttcccctagcttagcatcatgagaatctgcagttgtttttaatgcatttgggatgctccttcaggctatcaacaaactctctcctatgtttatgaatttatttactactttggtgttcctactctcttcactcttccagatgggtttcaatggcatctctccaccttccctaccktatgtaaaagagcacacctgatgttcaccctctgttgttgctctgcattagcacaagaacaaaatgagcagaggcattttaaaacataagaaacatacatactagacatgttttgaaagcagtaaaagacttggtaaatttttcttgttttctgattaagttaacagaagtttttaaacagtcaacacatattaaatttaca

SEQ ID NO: 610971 - DNA, 590 bp, Homo sapiens
cagagacacataaaaagctgtctttcctgaatcacaaacagcagtagaaaaaaaaaacaggagaaagtaactaaaaggtcatttcacactcacagcattctgagtttggggttttcctttttcctttggccactacactgcattccatttgtatgttgttttcttgatttagtcaagaaaagcaagcaaatcaaacacaattacttgcccgagttcccctagcttagcatcatgagaatctgcagttgtttttaatgcatttgggatgctccttcaggctatcaacaaactctctcctatgtttatgaatttatttactactttggtgttcctactctcttcactcttccagatgggtttcaatggcatctctccaccttccctaccgtatgtaaaagagcacacctgatgttcaccctctgttgttgctctgcattagcacaagaacaaaatgagcagaggcattttaaaacataagaaacatacatactagacatgttttgaaagcagtaaaagacttggtaaatttttcttgttttctgattaagttaacaraagtttttaaacagtcaacacatattaaatttaca

SEQ ID NO: 610972 - DNA, 561 bp, Homo sapiens
agaattcaaatgcattcaattttttaatactccaaataaaattaaatttattttgtcattacttagatcattgaaattgagaacaagctaaaattataatagaaaatataaaatgcagttcagaaaagtaaaaacgttaaaattttaaaaatagaaattttgttgtagtaaaggaatatttgtcaagtaggagggtaagatatactttatataatagtatgttcacttgatttacactcaagtatttagaccttttgtacrtgaatattcttattctggggtccaaatatgttgcaggcaggactgtttatgtaccctaaaaaaagagaaatatgtagaaaaaaattctttaatatgcaaagctgtatctctaagaccctaagccactgtgccatgtgaattttgccactttgtcactggaaagcttggtactataattgaaacagctgtatctattggtgtctatgttataagacatctcccacccagccacatgcccaaggaagatcgctgggctctaaaaggggaaggtgttttcttactgactgaagagtgaagtga

SEQ ID NO: 610973 - DNA, 675 bp, Homo sapiens
ctgatatcacattcctgccccattatttgaagctctcggttgtctctttcctggcttcatttttgagactttcagtcctacgtcttttcttacaggctcctttaattgataacctcttagaacccacagtttccatcaacaacatcccatcctttcctgtccccgaaaaagtacactacatctttggatcttgacatatgctgttgtttctgccacatcttccctgctacctaccagatagcctctcattccaccttggttgagacagccactaatttttaaaatacaagaagtggagattctgagacattgccatatattcaaagtaggtgaaataaatctcagtccacaaaaggactaaaactgcctagtgtctgactgtaaatacaggctgaacatccctatgctaaaaatcaaacattcaaaatgctccaaaattcaaaactttttaagtgttgacatgatgtcacagccaaaatacaggcacacracacagtttattcagtctcccccaaggaaaaaagatcctcctagtctctttcagctgcaatatattttctgtgtgtgtgcagattcccccactcaagcatgcccacaaagggcaataaaatggtatctgtgcaggctggacacatcaatggcagtttccccacaatgccccatattgtgccaaga

SEQ ID NO: 610974 - DNA, 622 bp, Homo sapiens
tctcattgtacaatccactgacaattttcacctcccttgatagaaacttcatcctttcctactttttcaggggactgttaatctttctcattcacaatctatttcccaagccatgtgaattccaattattcatgtttaacaccttctttgctttgtatactgagaaaagctttgaaacatataggcagaagccctgtgctgctacctacgacttcagaaatacttgaatgtatgtttccataataattcatagcagtaactcacaatactgtagcacatgctgcaacttcaaatgaatggataattggtcagggaattatggaggaaaccagataaatartgaagtatctgcatagtctgaggtacacaggttttcctagatgggatagcataagacacgccgcttcctgtgagcatgaggacaggcactcttgtcctctgaactgacagatcggtatctgatgaccaacagtgattctcctcaacttaacggggttttaaaaaaataaatttaaggggtacaagtgcaattttggtatgtgcatatattgcactgtggtgaaatcttggcttttaatgtatccttaattatccttaattttaatgtatccttaattttaat

SEQ ID NO: 610975 - DNA, 590 bp, Homo sapiens
actttgagaatcttggctaaatgtcataaagtccaawctagtaatgtggctaaagagctaaaggcacctgcgcaggaccatgctgaagagggttctaaagtcaggctgcctttgtgtgcctcttggctttgccagtaacattacctgtgcatcttgggggaagttatttagtttctctttgtttcagatgcctcagctgtaaactgggagcatgagtagtacttacctaataagaatagcgaaagtaccatgtgagacgtgtgtaagatttttagaatagtttttttggtcagcgttagttatttttaaaatgcccatcttccctcttactgctatctcttcttccctttttcccttccttacccttcttttctgggtcttcatactcctgactgaagatctgatatattcatgataacaatgcagtattctctggacctaccctttctcctgcccacagttgaaaaccttgtcacctgggccctccatgtaggacacaatgaagtaattcatattaagatgtttaatgactgaaaatgtctatgcatgttcttttaacagaacacaaggtcttaattcaaaagaagtga

SEQ ID NO: 610976 - DNA, 472 bp, Homo sapiens
ccacaattaaatctaattgaccttaaatttcaatattgtgttcagaccccatatactccattgcttattttcatatgtaacctagatgcaaattaaatcctttcatgctcctgatagctaaatattsttttataagacccttgctaaatccatgccttacgatttctggtaattttaagaacctttcactcagagtctatttttctgcatctcttttatccttcatcaaccagagttcaaaattattttcctgcttatttcagagtaggtctcaaatgcctctcctcccctaaacttgcatacctaactcataaaagtactcaagagaacaaaggaggcttcatctccttatatagcagttgggggccattgctagcaaaaaagaaaaaatagagacgataaggggagaatggaaggtcactggtctacaatgtttttccctgcatattttttaatcaaaatttatttaagt

SEQ ID NO: 610977 - DNA, 606 bp, Homo sapiens
gtggttgcaggagttgggggaaggggaaatgggaagttgctgttcaaggggcttaaagtgtcagttatgcaagacaatctagagacctgttgtacagcattgtgcctatagttagcctatagatactcattatacactgaaaattttgttgagatctcatgttaagtgttcttatcatgataataacggttgtgaggaagagactggaagggatttggtgaaagtgctgagcccagatgtctggaagagcacttctcggcagcaggaagggagtgggcagtgggtgtgggtgtgggtgaatgataaggaagaattccactgaatcaattatttttctcaggcccagatgagttcgtgaattatttaacagtagagacaaattttggtaccgtgaccatgtaaaaaactgacacttggaaacctgagcgtgtcaaagaagggtttttcttcatctacagtttcagcttrtacattttatgtaaacaaccatgagaggggagtgagcctacctacgaatgtggaaggtgcagtaaaatagctactacaaaggaattacctttcacatgaatacagttttatatatttgtcaaagcctgaagccacggt

SEQ ID NO: 610978 - DNA, 588 bp, Homo sapiens
tattgacggtaactatgttgatacttccattggaatgtcttattttcatcctaacaactgtaaggaagacattattttttctattttacgggtaaaaaatgtgagattcatagagatcaaatgtcttgccctgtattacacagctaagtaatagagacaggagcaggatttgagtctaggttgatctgacctaaagcttgtagtcatttcaatgactaattactgattattgtattgattataaaaactagccattagaataatgaaatgcaaagaactgtgtaattaagaagaagactgaagacttgcaaatctggagctttaaaaagtattcttaggtttcctaaatccaaggcccaaactgaactgactttggaactgccacccactgaaggcatgaaagaacttgtctgaacctaaaaggttcacctgacttccaaaacaaaaataaacaaacatcctaaagaggaagttaacatgatccagtgtactacaaggtaatattataaatgtccaggatacaatccaaaactacycaatatacaaaggaaaatctcaccgtttctcaaggacagacagttaacagat

SEQ ID NO: 610979 - DNA, 572 bp, Homo sapiens
tttatatatgtgtgtgtatgtgtatatgtgtgttttatataatcctaaattaaatttaccattctctaataaagattatgaattattaagatgagaaaawaaacttttcccagcaatttttatataatataaaatgtccaggttttacctagaaatgtgctctacactcaatgaattatagttgttacaagtatattgacagttattgagttagactaaacagtctaccaattgtgatctcagtaacaccgtgagatctaagatgactcacccatgcccaccaaacaaacatgcttaggaaataaatatatttacatcatagattatatttttaatggctataaagcctcacagaaggctatgttatagttttatgagagctatgtaaatgtacataacaggttcaaatgagaacatgtgttctttgatttcagtttgatattctacacttccaaaacaagagttcttaaactcactgtttcaataatttaaagtcaaaataataatttaaataaattagaatgaggattataagcacaaaataataacttaaagtgacataaggtaagcac

SEQ ID NO: 610980 - DNA, 591 bp, Homo sapiens
gaggactttgtttattatattcttttttctttattattttcttactgggttatttcaaaatatctttcttcaggttctgaaattctttcttctgcttgagctggtctattgttgaagctttctaatgtattttttatttcattccatgaattcttcagtttcaggattcctgtttgtttgttkgttatgatacctctttagtaaatttctcattcatattctgaattggttttgtgatttatttgtattatctgaattctctcatatcttactgagtttcttgaatatcattttgaattctttctctaggatttcataaatttctttttctttggaatttcctgctagaccataattttgtttctttggagatgtcgtatttgcttgctttcttcatggttcctatatccttatgttgatatctgcacatctggtataattgatgctacttctaattttttgaatttgcttttgcagtggaggatacttttatgaagatatgtctgtggtgtttgttgggtagggcactttggcctgattctgggtgcatgcagtagtgtactctctatataatttcttaagctttaaaca

SEQ ID NO: 610981 - DNA, 625 bp, Homo sapiens
atttctcattcatattctgaattggttttgtgatttatttgtattatctgaattctctcatatcttactgagtttcttgaatatcattttgaattctttctctaggatttcataaatttctttttctttggaatttcctgctagaccataattttgtttctttggagatgtcgtatttgcttgctttcttcatggttcctatatccttatgttgatatctgcacatctggtataattgatgctacttctaattttttgaatttgcttttgcagtggaggatacttttatgaagatatgtctgtggtgtttgttgggtagggcactttggcctgattctgggtgcatgcagtagtgtactctctatataatttcttaagctttaaacagcatcagttgtatctatgatttcctcagcagcttagggtgtagttgtttgtggaggctgtrgtaaagttttgttggagatagagatgccaggtgggccagtcctttgggctctgtggtggcaatggtgggccaagtctgcctgtctttggacccctatctggcataggctagtaccagttgtagcaagtccaggcataccaatttttgagtttccaggtggctttcttgggtgccagc

SEQ ID NO: 610982 - DNA, 588 bp, Homo sapiens
tcttggaatttaacatgtcagtacagtttttttacattattaactgaagaaaagggtaccctttacaaactttttaagattaggaaacaaaaagaagttacaaggagccaaatcaagactgcatgatgcactcctgctgatttcccatagaaactctgaaaattgcacttgtttgataaggggaatgagcaggaacattatcaagtcagaggactctctgatgaagctttcctgggcatttttgtgctaaagctttagcggactttctcaacacactctcataataagcagatattatcgttctttggttctccagaaagtcagcaagcataatgccttgagcatcccacaaaactgttaccatgacctttgctcttgaccagttctcttttgctttgactggaccacttctacctcttggtagccatttttttgattgtgctttgtttttaggatagttaagttttatctcctgttacagttgttcaaagaaatacttaaaggtctttatcctacttgtttaaaatttctgttgaaagctctgctctcatatgcagccratatgggtgcattgattttggcacccat

SEQ ID NO: 610983 - DNA, 613 bp, Homo sapiens
tattaggccttattcattctttctaattaatttttttgtaccattaaccacccctacctctctccaactcctcaataccttttccaacctcttgtaaccatctttctactctctgtctctatgagttcaattgttttgaattttagatttcacaaatgagtgagaayatgctgtttgtctttttctgtgcctgtcctatttcatttaacataatgacttccagttacatcaatgttgttgcaaatgacagggtctcattcttttttatggctgaatattactccattgtgtacaagtactgcattttctttatcaattcatctgttgttggacatttaggatgcttccaaatcttggctactgttaacagtactgcaacagacgttagagtgtagataactcttccgtagatcgatttcctttcattggagtatatacccagcactgcgattactagatcaaatggtagatatatttttagttttttgaggaacctccaaagcattcttcttactgggttgtactaatttacattcccacaaacagtgtatgagggttcctttttctccacatcctcgccagcatttgatattgctaaagtttagataaaagc

SEQ ID NO: 610984 - DNA, 613 bp, Homo sapiens
tattaggccttattcattctttctaattaatttttttgtaccattaaccacccctacctctctccaactcctcaataccttttccaacctcttgtaaccatctttctactctctgtctctatgagttcaattgttttgaattttagatttcacaaatgagtgagaatatgctgtttgtctttttctgtgcctgtcctrtttcatttaacataatgacttccagttacatcaatgttgttgcaaatgacagggtctcattcttttttatggctgaatattactccattgtgtacaagtactgcattttctttatcaattcatctgttgttggacatttaggatgcttccaaatcttggctactgttaacagtactgcaacagacgttagagtgtagataactcttccgtagatcgatttcctttcattggagtatatacccagcactgcgattactagatcaaatggtagatatatttttagttttttgaggaacctccaaagcattcttcttactgggttgtactaatttacattcccacaaacagtgtatgagggttcctttttctccacatcctcgccagcatttgatattgctaaagtttagataaaagc

SEQ ID NO: 610985 - DNA, 613 bp, Homo sapiens
tattaggccttattcattctttctaattaatttttttgtaccattaaccacccctacctctctccaactcctcaataccttttccaacctcttgtaaccatctttctactctctgtctctatgagttcaattgttttgaattttagatttcacaaatgagtgagaatatgctgtttgtctttttctgtgcctgtcctatttcatttaacataatgacttccagttacatcaatgttgttgcaaatgacagggtctcattcttttttatggctgaatattactccattgtgtacaagtactgcattttctttatcaattcatctgttgttggacatttaggatgcttccaaatcttggctactgttaacagtactgcaacagacgtwagagtgtagataactcttccgtagatcgatttcctttcattggagtatatacccagcactgcgattactagatcaaatggtagatatatttttagttttttgaggaacctccaaagcattcttcttactgggttgtactaatttacattcccacaaacagtgtatgagggttcctttttctccacatcctcgccagcatttgatattgctaaagtttagataaaagc

SEQ ID NO: 610986 - DNA, 684 bp, Homo sapiens
tgagttccatttattaaaggcatacctaaagccaaaagaatgttgaaggtaaaaagatagaaaaatatatcctgggcactaatcaaaaaactaagctgacatagctatattgatattttaaaaaatatttcaagggaaaaattgttagtgaagaactaagttgtatgggtaggaagagctgaattttcttaagtaagatgctaccatcctaaattcatgtatttcaaataaataacctcaaaatgtgtaaagcaaaaattgatgaaacatcagggagaaaatgacaaatctgccatctttgtggaagatttcaacactcctatctcagttatcaaaatatccaggagacaaaaaaattcagtgaatatatacaagatttgaataacataattagcatttgatactattgatatatagaacttttcacccaatcatagacagtacatattattctcaagcaaacatgtaacmtgtgtaaaatctgatcacatggttcaggggtccccaatccctgggccacaggctagtaccagtccttggcctgttaggaaccaggcagcacagtagcgggtgaatgacttgcaagagaacaaagcttcatctatatttacagccacttcccattgctggcatcaccgcctgagctccgcctcctgtcagatcagtggcagtattagattatca

SEQ ID NO: 610987 - DNA, 430 bp, Homo sapiens
cacaagtcattacatcgcccgggtgaagtctgaatttaaaaaatcaagttcaatgtatgtaagcttctgaaacaaaagcaacacattatcctaactttaaagaagagaaggagggagagaaggaagagggactagaaggagaggaagtggaggggggaaacaatattctttcaatctaaggggttaaaggagcaacagtaaggatttctttacagaagacttcttatctcttgtgaatttagtacactcattggtgctctacagattgaatgagaggtggaatgatatcatccagctaggtactgtttgatgaatctgcttttttcaaactggtgaatcaccaaatggctgcttcaggtaaaargttgcatgcttgactaaacctcatctctacaaaaaatacaaaaattagccaggcatgatggtgtgt

SEQ ID NO: 610988 - DNA, 619 bp, Homo sapiens
agactggtctccaactcctgacctcgtaacctgcctgcctcagcctcccaaaatgctgggattacaggcttgaaccactgcgcccggccatacctacgtattttaaatatattcgtatatgcctmtaatatgtaaaaatgaaccccaaagatcctgatataatttatctaaaatataattgtctaaaatataatttggacaaattattttaccatataaatgacttcatcaattttcagatatcctgcccacattggccaaattctacattttgtggggaaagggaaaagaagaaatagacatagagatggccaagtgctatggtttggatatggttgttttcaccaaaactcatgttgaaacttgatttctgctgtggtgatgttgggaggtggggcctatgggaggtgtttaggttgtatggtcagatcccccatgaatggcttgctgctgtcattgcagtagtgaatgagttctcactcttgtgagactggattagttcttaggggaatagatgagtttccttgagagtgagttgttgtaaagccaggacgccactcaggtttcctcttctttgctcctgtgtgcttcccctttggtctctgtggcaccacacaaa

SEQ ID NO: 610989 - DNA, 619 bp, Homo sapiens
agactggtctccaactcctgacctcgtaacctgcctgcctcagcctcccaaaatgctgggattacaggcttgaaccactgcgcccggccatacctacgtattttaaatatattcgtatatgcctctaatatgtaaaaatgaaccccaaagatcctgatataatttatctaaaatataattgtctaaaatataatttggacaaattattttaccatrtaaatgacttcatcaattttcagatatcctgcccacattggccaaattctacattttgtggggaaagggaaaagaagaaatagacatagagatggccaagtgctatggtttggatatggttgttttcaccaaaactcatgttgaaacttgatttctgctgtggtgatgttgggaggtggggcctatgggaggtgtttaggttgtatggtcagatcccccatgaatggcttgctgctgtcattgcagtagtgaatgagttctcactcttgtgagactggattagttcttaggggaatagatgagtttccttgagagtgagttgttgtaaagccaggacgccactcaggtttcctcttctttgctcctgtgtgcttcccctttggtctctgtggcaccacacaaa

SEQ ID NO: 610990 - DNA, 434 bp, Homo sapiens
gagacaatgagtatttaccaaggacgaaggctttaattggtattgcagcggaggagaaccagagatctatctgaaataatctccctgaaccaattaaaattgggttgttatatagagagggaggtgggaaaattagggaaaggtaaggaagcaatcatgatggataagaggtctggtgtctcattgtctggatgtggtgatctgattaatttcagctccttgcctgagggacgattttgtgaggaaggaayttaggtaagacaaatgtaagtttcaagttttaagaccaagagggtcaacttctatgtttatttgaaaaaaaaaacagtaaatatcagttctatgggacaattgggtcagtttcaccccccttttctatttttcaatttctcaatcatgggaaatctggtagtcagtctttctgggtgctttat

SEQ ID NO: 610991 - DNA, 575 bp, Homo sapiens
atagctaacatcataattaatagtaaaaattgaatgcttcctccctcttctaggaccaggaacaaggtaaagatattttaccttacctcttttattcaacgttgcactggtggaaataactagtataatatgaaagacaaatgtataaaatacgtccaattttgaaaggtagaagtaaaagctatctgtatttccatatcaaatgcctatactccaggggaaaggagtttaccaaagccttataacaaacacacgggttaaggacacttactcaactccagtctttttagccttcctgtctcayctaagtgtgggaatagctaagaaaaaaacgtgtaaagaacatatcaaggggaaacaaccactacaagctggagaattaatcataacattataaaatgcattacttccctttactggtacatcaataaatccttagtatatcaacaggagattttagctgagaaagcagtactgtgcagactatatttaataagtagtttctaggtaaatgtaaagacaataggaataaaaaaaactcactagagaaaattggaacgtctggcatctacagg

SEQ ID NO: 610992 - DNA, 545 bp, Homo sapiens
tcttctagtttggatgagaccttggtgaaattatttcttttgcagaaatgccctttgtcacgatgaatatgttgtgcatattttaaatggttaccttttccatctccttgccataaaaaggaagattttagggtttttttttttctctttaccatgagaaactggtgagttcctggaggtaaaacttacaaaaatgtggactttcccttagaaatatgacccccagacatttatcacttttgctgtagtgcacactcagcctccatcaattttttataattattgttttagtgatcctgtcagtttatggttctatcttctkctctaggtaagctgatatcctctgtggcttctgaattcatcattcacttcaagttttcagtggcagtttggcactgtcacctcaattctctaactggtccaagaaaaattcctgcttgaattaagtgatatattatgaccacaaattagaaaacaatattataaagttaaatttctcccccaaatgatctgtatatgtagattcaacaaaatacaggatagga

SEQ ID NO: 610993 - DNA, 545 bp, Homo sapiens
tcttctagtttggatgagaccttggtgaaattatttcttttgcagaaatgccctttgtcacgatgaatatgttgtgcatattttaaatggttaccttttccatctccttgccataaaaaggaagattttagggtttttttttttctctttaccatgagaaactggtgagttcctggaggtaaaacttacaaaaatgtggactttcccttagaaatatgacccccagacatttatcacttttgctgtagtgcacactcagcctccatcaattttttataattattgttttagtgatcctgtcagtttatggttctatcttctgctctaggtaagctgatatcckctgtggcttctgaattcatcattcacttcaagttttcagtggcagtttggcactgtcacctcaattctctaactggtccaagaaaaattcctgcttgaattaagtgatatattatgaccacaaattagaaaacaatattataaagttaaatttctcccccaaatgatctgtatatgtagattcaacaaaatacaggatagga

SEQ ID NO: 610994 - DNA, 530 bp, Homo sapiens
tcctgcttgaattaagtgatatattatgaccacaaattagaaaacaatattataaagttaaatttctcccccaaatgatctgtatatgtagattcaacaaaatacaggataggacatctcttcatttatttctgggttctctattctgttccattggtctatatgcctattttggggaagtttcaacattttatatacatacataatacttacatacaaagtcaacattgtgataatgcacttttgtggcatcaaattkataaaaaatacataaaatcaattagaaccctccaaaagtctctacacaatttcaacctccagtattggaaatgaagtgaagatgaaatatagtatagcaaattgcaaaaaaaaagtactgataatttaaaatagtgaagaaacctgaaaaaagaaaaagaagataaaaatgactaaaaagaaaatttttaacatatgaaaaagtgtatcacagggatagtttatgggcagtttcacagagatactccctaagagataactgacttttatga

SEQ ID NO: 610995 - DNA, 530 bp, Homo sapiens
tcctgcttgaattaagtgatatattatgaccacaaattagaaaacaatattataaagttaaatttctcccccaaatgatctgtatatgtagattcaacaaaatacaggataggacatctcttcatttatttctgggttctctattctgttccattggtctatatgcctattttggggaagtttcaacattttatatacatacataatacttacatacaaagtcaacattgtgataatgcacttttgtggcatcaaatttataaaaaatacataaaatcaattagaaccctccaaaagtctctacacaatttcaacctccagtattggaaatgaagtgaagatgaaatatagtatagcaaattgcaaaaaaaaagtactgataatttaaaatagtgaagaaacctgaaaaaagaaaaagaagataaaaatgactaaaaagaaaatttttaacatatgaaaaagtgtatcacagggatagtttatgggcagtttcacrgagatactccctaagagataactgacttttatga

SEQ ID NO: 610996 - DNA, 489 bp, Homo sapiens
ttactcaaaactgtcattgtggtttgaaaatttattttttttttctgcaaagttcaccagatcttcaaatgagcatttacaaaatgctttactattttgagttwttaatacaaaaatgagtagaaaagttctaaaatttttggattcaaccagggtattaattgtacatagttaataaaaaatagtggggacagttggaagtgccattcattagacacagcgaagcatatttctatattagggttagtggtaaatataagaaaatcagagaagtttaccatttaatgtgttttgtaacactgaagaaaccaaaatatgaacaagtatctttggttcagaaggtcgctgagcttgtggaattctttatattctctgacaggcattttttgaaggcaagtatggcacctatgtatgaaggagcagaaatacatgattgaataatttggcaggggagagttcttgtgtttttcacctgcatttttacttatt

SEQ ID NO: 610997 - DNA, 489 bp, Homo sapiens
ttactcaaaactgtcattgtggtttgaaaatttattttttttttctgcaaagttcaccagatcttcaaatgagcatttacaaaatgctttactattttgagtttttaatacaaaaatgagtagaaaagttctaaaatttttggattcaaccagggtattaattgtacatagttaataaaaaatagtggggacagttggaagtgccattcattagacacagcgaagcatatttctatattagggttagtggtaaatataagaaaatcaragaagtttaccatttaatgtgttttgtaacactgaagaaaccaaaatatgaacaagtatctttggttcagaaggtcgctgagcttgtggaattctttatattctctgacaggcattttttgaaggcaagtatggcacctatgtatgaaggagcagaaatacatgattgaataatttggcaggggagagttcttgtgtttttcacctgcatttttacttatt

SEQ ID NO: 610998 - DNA, 489 bp, Homo sapiens
ttactcaaaactgtcattgtggtttgaaaatttattttttttttctgcaaagttcaccagatcttcaaatgagcatttacaaaatgctttactattttgagtttttaatacaaaaatgagtagaaaagttctaaaatttttggattcaaccagggtattaattgtacatagttaataaaaaatagtggggacagttggaagtgccattcattagacacagcgaagcatatttctatattagggttagtggtaaatataagaaaatcagagaagtttaccatttaatgtgttttgtaacactgaagaaaccaaaatatgaacaagtrtctttggttcagaaggtcgctgagcttgtggaattctttatattctctgacaggcattttttgaaggcaagtatggcacctatgtatgaaggagcagaaatacatgattgaataatttggcaggggagagttcttgtgtttttcacctgcatttttacttatt

SEQ ID NO: 610999 - DNA, 578 bp, Homo sapiens
gtctggttattgctcagctggtagaattaagcagatttttgcttttgcagcaccaattataattaacatktaaacttgtatcattcggcgttaagtaaccttgtacatttaactaatcatagcctttttaaaaggtaataatttcagagatcccattcattgtcttgtaagaaacacaataagaaggaatgatattcagcttccccctatgccaagtctgtataacccatggttctccagagagtaataagcaataggatatgtatgtagatatatgacagagaacttaggggaaatggctcatgtaattatgatagctgggaagtccaatgacaggctttatgcaagtggagaccctgggatgctggtagaattgttcaggattttaaaagcctcagaacctagggaggctgcagtaaattctgcaatccaaaggctggcaagcctaaaattctgatgactgaggcaccagaagaagactattttagttctcagggagagacaaattctccttctaaattttttctctccaggccccaggtgattggatgatgttgaccaataacaagggcagattt

SEQ ID NO: 611000 - DNA, 578 bp, Homo sapiens
gtctggttattgctcagctggtagaattaagcagatttttgcttttgcagcaccaattataattaacatttaaacttgtatcattcggcgttaagtaaccttgtacatttaactaatcatagcctttttaaaaggtaataatttcagagatcccattcattgtcttgtaagaaacacaataagaaggaatgatattcagcttccccctatgccaagtctgtataacccatggttctccagagagtaataagcaataggatatgtatgtagatatatgacagagaacttaggggaaatggctcatgtaattatgatagctgggaagtccaatgacaggctttatgcaagtggagaccctgggatgctggtagaattgttcaggattttaaaagcctcagaacctagggaggctgcagtaaattctgcaatccaaaggctggcaagcctaaaattctgatgactgaggcaccrgaagaagactattttagttctcagggagagacaaattctccttctaaattttttctctccaggccccaggtgattggatgatgttgaccaataacaagggcagattt

SEQ ID NO: 611001 - DNA, 592 bp, Homo sapiens
ttatcttgtgttgaatatgcagcttttatgtgagtgaaggactgctaaaagaaaggcacatctaaatattctaatacaatgcaaggaaaagcccagttattatatgaaaacttaaagcaaaaggaagatgaaggatctaaagctgaaaattttaataccagcaagaaatggtttgataacttcagaaagacaaattctggcttaaaacrtttttagaaattttggcttaaaaatatcaagaaaagaggagaagcatcttctgctgacctagtagaagcagaccaggtcccagctaccattaagaaaatcattgaggacaaagtatatctacctgaatgagtttttagtgcacacaaaagtaccctattctgaaataaaatgccacaaaaggacattcattaggataaaagagaggtgagtacgaggattagagataggatagtataactcttctgttttgtgtaaacgtggtcagatttatgataaggactgcccttatctataatgttgctaaccctggagcattgaagggaaaagataaatgccagttgccagtcttttggttgtaaaacaagtaggctgggacaataag

SEQ ID NO: 611002 - DNA, 592 bp, Homo sapiens
ttatcttgtgttgaatatgcagcttttatgtgagtgaaggactgctaaaagaaaggcacatctaaatattctaatacaatgcaaggaaaagcccagttattatatgaaaacttaaagcaaaaggaagatgaaggatctaaagctgaaaattttaataccagcaagaaatggtttgataacttcagaaagacaaattctggcttaaaacgtttttagaaattttggcttaaaaatatcaagaaaagaggagaagcatcttctgctgacctagtagaagcagaccaggtcccagctaccattaagaaaatcattgaggacaaagtatatctacctgaatgagtttttagtgcacacaaaagtaccctattctgaaataaaatgccacaaaaggacattcattaggataaaagagaggtgagtacgaggattagagataggatagtataactcttctgttttgtgtaaacrtggtcagatttatgataaggactgcccttatctataatgttgctaaccctggagcattgaagggaaaagataaatgccagttgccagtcttttggttgtaaaacaagtaggctgggacaataag

SEQ ID NO: 611003 - DNA, 592 bp, Homo sapiens
ttatcttgtgttgaatatgcagcttttatgtgagtgaaggactgctaaaagaaaggcacatctaaatattctaatacaatgcaaggaaaagcccagttattatatgaaaacttaaagcaaaaggaagatgaaggatctaaagctgaaaattttaataccagcaagaaatggtttgataacttcagaaagacaaattctggcttaaaacgtttttagaaattttggcttaaaaatatcaagaaaagaggagaagcatcttctgctgacctagtagaagcagaccaggtcccagctaccattaagaaaatcattgaggacaaagtatatctacctgaatgagtttttagtgcacacaaaagtaccctattctgaaataaaatgccacaaaaggacattcattaggataaaagagaggtgagtacgaggattagagataggatagtataactcttctgttttgtgtaaacgtggtcagatttatgataaggactgcccttatctataatgttgctaaccctggagcattgaagggaaaagataaatrccagttgccagtcttttggttgtaaaacaagtaggctgggacaataag

SEQ ID NO: 611004 - DNA, 500 bp, Homo sapiens
ggcaccgttcaagcccacatggaatcccacaggcttttgatccctgagtaggccactgtcagctactcaccaccccaccaaagagaaagaccaggtactttcatgtaccccaaagatagaaactacatccatggtattgtggagcagccagactgtgcaccacgtgactttccaactctgctgctccctaccaaatgaggcttgccaccttctggccccaagcacacccataccatctccatctgaacgctggccacagttcagcattcttttgagagcaccactcccagaggtcactgacaagccctttacagctgcctccacccytgctgcccctacgccagggagggaatggggaggctggacacattctggcactgtcagcacagataactgcagatgaggtacagaacagcaacagattttatgccccacagctccccaccttcactgcttcctgctaaatgggccttgtcatctttaggcctccagtgcacctg

SEQ ID NO: 611005 - DNA, 516 bp, Homo sapiens
  misc_feature 61: n = A,T,C or G
agttttgacttgtatttctagaatgatcaatgatgctgagtacctttttatatgcctgctntgcaaatgttatgttttcttttgagaaatgtatcttcaaatcttttgccaatttttgatcagattattagactttttcttatagagttgtttcagcttcctatatatttcagtttttaatctcatgacagatgggtagtttgcaaatattttctcccattctgtgagttgtctcttcacttgtttattggawcctttgctgtgcagaagcttaagttgatgtgatctcatttgctgtttctgctttggttgcctgtgcttgtgaggtattgctcaataagtatttgcccagaaaaaatgtccaggagatttttcccaatgttttcttgtagtaggttttatagtttgaggtttttgatttaagtctttcatccacttttatttgatttttgtataaatgggggtctggtttcattcttctgcatatgattatccacttttcccaaaaccgtttat

SEQ ID NO: 611006 - DNA, 516 bp, Homo sapiens
  misc_feature 61: n = A,T,C or G
agttttgacttgtatttctagaatgatcaatgatgctgagtacctttttatatgcctgctntgcaaatgttatgttttcttttgagaaatgtatcttcaaatcttttgccaatttttgatcagattattagactttttcttatagagttgtttcagcttcctatatatttcagtttttaatctcatgacagatgggtagtttgcaaatattttctcccattctgtgagttgtctcttcacttgtttattggatcctttgctgtgcagaagcttaagttgatgtgatctcatttgctgtttctgctttggttgcctgtgcttgtgaggtattgctcaataagtatttgcccagaaaaaatgtccaggagatttttcccaatgttttcttgtagtaggttttatagtttgaggtttttgatttaagtctttcatccacttttatttgatttttgtataaatgggggtctggtttcattcttctgcatrtgattatccacttttcccaaaaccgtttat

SEQ ID NO: 611007 - DNA, 572 bp, Homo sapiens
ctttaatttatttcatcaatattttatagtttttgttatagagatttttcacttctttgtttaatttctaggtatttaattttatgtgtggccattgtaaatagtgtatagggattacttttttacattgttcattattggaataaagaaattctacttattttttatgttgattttgtgtccttgaactttactaaatttgtttatcagttctaatagttttcctgyggagtctttaggttttttttttcaaatataggattatatcatcttaaaacaaggataattgaatttcttcatttccaatttgtgtgtcctttatatctttctcttgtctacttgctctagctaaaacttccaatattatgttgagtaactgtggtgacagtgggcttccttgtcatgtcccacatcttaaaggaagggctttatgtatttctccattcagtatgatactacctgtgggtctgtcatatattttattgtgttgaggtatgttctttccatcctgttttaagaaggtttttatcatgaagatatgttgaattctgtgaaatgccttttcaacatca

SEQ ID NO: 611008 - DNA, 386 bp, Homo sapiens
cataaaagttggtatgttgtgtttttattatcatttgttttaaaacatttcaaattttcttcttaatttcttcattgacccactggtcattcaggagaatattgtttaatttccaggtaattgtatagttttaaasgtccatcctgttattaatttctagcttttttctattgtggttagggaagatatttgatattatttcaattttttaacattttaagacttgttttttgacctaacatatggtctattcttgagaatgatccatgtgctgagaaaaagaatgtgtattctgaagctcttcaataaaatactctgtaaatatctgttaaatccatttggtctatagtgcagattaagtctttgttaatgtttgtttctttgtg

SEQ ID NO: 611009 - DNA, 497 bp, Homo sapiens
agttttccattggcatagaatgtttttcccatccctttactttcagtctatgtgtgtctttataggtgaagtatttttcttgtatgcaacagattagtgggttttgttttttcatccattcagccagtctaggtctttygattggaaagtttagtccatttatatgaaagagtgagagagagagagagagagtttgttattaggaattatctcatgttgctactaattggataaatcccaaggtctgcagtcagcaagctacgtaccaagggaagctgatggtatagcttcagtctgagtctgaagtcctgagaaccaagaaaacaagtaacataagttccacttcaagtctgagtatgaaggcaggagaagaaaatctcagatgaaagacaggcagagaaactaatttctctcttaatcattttgatccattcaagccttcaacagattggatgcaacctgcctacattgggaaaggcaacccgttttactcagtc

SEQ ID NO: 611010 - DNA, 497 bp, Homo sapiens
agttttccattggcatagaatgtttttcccatccctttactttcagtctatgtgtgtctttataggtgaagtatttttcttgtatgcaacagattagtgggttttgttttttcatccattcagccagtctaggtctttcgattggaragtttagtccatttatatgaaagagtgagagagagagagagagagtttgttattaggaattatctcatgttgctactaattggataaatcccaaggtctgcagtcagcaagctacgtaccaagggaagctgatggtatagcttcagtctgagtctgaagtcctgagaaccaagaaaacaagtaacataagttccacttcaagtctgagtatgaaggcaggagaagaaaatctcagatgaaagacaggcagagaaactaatttctctcttaatcattttgatccattcaagccttcaacagattggatgcaacctgcctacattgggaaaggcaacccgttttactcagtc

SEQ ID NO: 611011 - DNA, 578 bp, Homo sapiens
taattgaatcatgggggcggcttccctcatgctgttctcgtgatagtgagttctcatgagatctgatggttttataaggagctttccccttagctcagcactgattctctctcctgccaccttgtaaagaggtaccttctgccatgattrtaagtttcctgaggccccccagccatgtgaaactatgagtcaattaaacctcttttcttgataaactacccagtcttcggtacatctttattagcagtatgagaatggactaatacaagccctcaacagaatcacccttagtacttcatttatagcaatacaaacttttctaagtcttcacttcaatactgttacagactctgtccattactttattcccaacctgcttccacatgttttttaaaaaaaaaatttgtaggtacatagtaggtatatatatttatgtatatatttatggggtgcataagatagtttgatacaggcatacaatgcataataatcacatcagcataaatgaggtatttgttttaggaatgtcctactcctatagtaccaatttctttctcagtaaattttgtgctgctaca

SEQ ID NO: 611012 - DNA, 578 bp, Homo sapiens
taattgaatcatgggggcggcttccctcatgctgttctcgtgatagtgagttctcatgagatctgatggttttataaggagctttccccttagctcagcactgattctctctcctgccaccttgtaaagaggtaccttctgccatgattataagtttcctgaggccccccagccatgtgaaactatgagtcaattaaacctcttttcttgataaactacccagtcttcggtacatctttattagcagtatgagaatggactaatacaagccctcaacagaatcacccttagtacttcatttatagcaatacaaacttttctaagtcttcacttcaatactgttacagactctgtccattactttattcccaacctgcttccacatgttttttaaaaaaaaaatttgtaggtacatagtaggtatatatatttatgtatatatttatggggtgcataagatagtttgatacaggcatacaatgcataataatcacrtcagcataaatgaggtatttgttttaggaatgtcctactcctatagtaccaatttctttctcagtaaattttgtgctgctaca

SEQ ID NO: 611013 - DNA, 611 bp, Homo sapiens
cataataatcacatcagcataaatgaggtatttgttttaggaatgtcctactcctatagtaccaatttctttctcagtaaattttgtgctgctacaatattatacctgagactaggtaattcataaaratcagaaactttttctcatggttctgaacgctgggaagttcaaaatcaaggcaccagcatttggtctgttgaggggcttcttgctgtgacttcacatagtagaaggcagaagagcacactagccgaatgctttgtgaagcctcttttacaaggaccttaatgtcgttaatgagaaaaagagcagccttcatggcctagtgatctcttaaaggtctcactacttaataattgcccaaacctgatttttagaggggacacattcaaaccatagcattctggtaagtctttaggatcctttcaaaaatgccggtggggagataaacagtataaatttttgacagtgtacgcgagtccttcctggagaagtcacagtctcccttttattcaaggggttctgagtctgtgaattggatcaagtctggggattaattaaaggggttgactgtttttttttttattcaagttagactttttctcacttga

SEQ ID NO: 611014 - DNA, 512 bp, Homo sapiens
gatcaactagccaacaccataggtctatgagtcagattcttttgattactgctttgactctgctatccattatgagaaacataaccccactgcctttagtagctgagtgctgtcatgtgatccctgccacccagagatctaattactgccattgcatttagttttcccaattcggggactgcagtccccasgataaggtctggcctacagagaaaagtgaacacagagctgctcaaaaattccaagcctcctctcacagatctatttcttacagtagtggtgagagatgtgtctactggaaactctcggtcatgttaactaagtcttaattttatgaataaaggcctactctgcaatatgcctaagcttttcaaccactttatctatatttaacttaggcaggttgggaatttccaattcactcactgtaggctatcttttggttcatgcttcagtcaaccaaccaaataaactgtgaaagtactttataactctctgattcacagcattaa

SEQ ID NO: 611015 - DNA, 512 bp, Homo sapiens
gatcaactagccaacaccataggtctatgagtcagattcttttgattactgctttgactctgctatccattatgagaaacataaccccactgcctttagtagctgagtgctgtcatgtgatccctgccacccagagatctaattactgccattgcatttagttttcccaattcggggactgcagtccccaggataaggtctggcctacagagaaaagtgaacacagagctgctcaaaaattccaagcctmctctcacagatctatttcttacagtagtggtgagagatgtgtctactggaaactctcggtcatgttaactaagtcttaattttatgaataaaggcctactctgcaatatgcctaagcttttcaaccactttatctatatttaacttaggcaggttgggaatttccaattcactcactgtaggctatcttttggttcatgcttcagtcaaccaaccaaataaactgtgaaagtactttataactctctgattcacagcattaa

SEQ ID NO: 611016 - DNA, 512 bp, Homo sapiens
gatcaactagccaacaccataggtctatgagtcagattcttttgattactgctttgactctgctatccattatgagaaacataaccccactgcctttagtagctgagtgctgtcatgtgatccctgccacccagagatctaattactgccattgcatttagttttcccaattcggggactgcagtccccaggataaggtctggcctacagagaaaagtgaacacagagctgctcaaaaattccaagcctcctctcacaratctatttcttacagtagtggtgagagatgtgtctactggaaactctcggtcatgttaactaagtcttaattttatgaataaaggcctactctgcaatatgcctaagcttttcaaccactttatctatatttaacttaggcaggttgggaatttccaattcactcactgtaggctatcttttggttcatgcttcagtcaaccaaccaaataaactgtgaaagtactttataactctctgattcacagcattaa

SEQ ID NO: 611017 - DNA, 512 bp, Homo sapiens
gatcaactagccaacaccataggtctatgagtcagattcttttgattactgctttgactctgctatccattatgagaaacataaccccactgcctttagtagctgagtgctgtcatgtgatccctgccacccagagatctaattactgccattgcatttagttttcccaattcggggactgcagtccccaggataaggtctggcctacagagaaaagtgaacacagagctgctcaaaaattccaagcctcctctcacagatctatttcttacagtagtggtgagagatgtgtctactggaaactctcggtcatgttaactaagtcttaattttatgaataaaggcctactctgcaatatgcctaagcttttcaaccactttatctatatttaacttaggcaggttgggaatttccarttcactcactgtaggctatcttttggttcatgcttcagtcaaccaaccaaataaactgtgaaagtactttataactctctgattcacagcattaa

SEQ ID NO: 611018 - DNA, 556 bp, Homo sapiens
tctattttatttttctatatttagtgaattttatgtctatatcttatttatagtggtcagtgaaccatatgctatatacattttgggcttattcttttctgtcttttttcttaaaagcctccatattttatgcttttactgatcattcattcactctacaaatatttcttgtatatctaatatatatacctggaattttgctggacacaaaaaatagaataataaagaaaacaaataagatcttttttctaatgaaatatacaggggaatttagaaagtgtagcatctctatttattaagaattctagatcagtgggcatataggcctagatttaaaaaactaastttatcacttgctagctattttatcttgattaaatgacttaatccccataaacctcagtttcttaacctataaaattgggagaaaataatacctgcttcataagattgcatgagatttaaatagtttacataaaggaattacatgtacatgttaaaattgcttgataaaaagttgacactttcaaaatttgccttactccaggcaaatcag

SEQ ID NO: 611019 - DNA, 603 bp, Homo sapiens
ggcctcatctccccagctttatcagggtcttttcacactccaccattctaacattcaatgtcccattctttcctaatctaagccctcactttactttaacagtagacatgctgtgaggctttgagttcaacctgtattgtaattcacacactcaaaggatgaggttttgtatttgattttcagcagcctcagtcaagcagtgacaggcaataaggatcctcttcagagcacatataaaaacatacatgatatttgtctcagtaatataggtagcttcccctttttggtctgttttgtagggttttcatataagtgtttaggctgaaataaaatattttctaaagtaatctgttgcaattttatttcttatgtatttaaagccatcattgacttccatctcacttattcattataatttttctgaaattttcaatgcatcccatatattaatattgagatattcttacttaaagtctaaaagcagctcaaaaatatgcttttcaaatgaatctattctatggcttcawaaaatttgagagtcacagaattaatatagacagatcttcccaatattttcttttccttttttaattttagtttttt

SEQ ID NO: 611020 - DNA, 556 bp, Homo sapiens
tctattttatttttctatatttagtgaattttatgtctatatcttatttatagtggtcagtgaaccatatgctatatacattttgggcttattcttttctgtcttttttcttaaaagcctccatattttatgcttttactgatcattcattcactctacaaatatttcttgtatatctaatatatatacctggaattttgctggacacaaaaaatagaataataaagaaaacaaataagatcttttttctaatgaaatatacaggggaatttagaaagtgtagcatctctatttattaagaattctagatcagtgggcatataggcctagatttaaaaaactaactttatcayttgctagctattttatcttgattaaatgacttaatccccataaacctcagtttcttaacctataaaattgggagaaaataatacctgcttcataagattgcatgagatttaaatagtttacataaaggaattacatgtacatgttaaaattgcttgataaaaagttgacactttcaaaatttgccttactccaggcaaatcag

SEQ ID NO: 611021 - DNA, 507 bp, Homo sapiens
catatacagcataatgtctggcacctggtgagcactcacatttgtgcattaatgcaatatatgcaaactttcgtgatagtatttttactaatattattaattttgctcttaaaattgatgctaaatattgtgttttgttcttgaaattgattataaacagttttagtattkgacattaaccaggttaattgcagccaacacagaaagacaaatcagagaacatatgcacttgctatagtttcagctagtatttgaaggtaactctggaaataattaattgaaattacagaagccaaaaataagaagagtcatacatttggaaaggattaatttggataaattaattctagggggataaaatatgcatctatattctgagtaacttacagaaaataaggacccaaacatttgtctaggtggttatatgccagaaccactatctaggaagtttaagtgttgtgtataacatttgtaaaggcagtgctagatttaatttaaagataatat

SEQ ID NO: 611022 - DNA, 507 bp, Homo sapiens
catatacagcataatgtctggcacctggtgagcactcacatttgtgcattaatgcaatatatgcaaactttcgtgatagtatttttactaatattattaattttgctcttaaaattgatgctaaatattgtgttttgttcttgaaattgattataaacagttttagtattggacattaaccaggttaattgcagccaacacagaaagacaaatcagagaacatatgcacttgctatagtttcagctagtatttgaaggtaactctggaaataattaattgaaattacrgaagccaaaaataagaagagtcatacatttggaaaggattaatttggataaattaattctagggggataaaatatgcatctatattctgagtaacttacagaaaataaggacccaaacatttgtctaggtggttatatgccagaaccactatctaggaagtttaagtgttgtgtataacatttgtaaaggcagtgctagatttaatttaaagataatat

SEQ ID NO: 611023 - DNA, 599 bp, Homo sapiens
tttttctatcctctgggttgtctttttatttcctgacagtatcttttgcagtataaatcttttaattttatgaagttcatcttttttgttattgtttatgtgcttttggtgtcattgcctaacccaatgtcatcaaattttacatgtatttgatctaagggttttatwgtttagctcttacatttgaggatttgatccattgtgagttaatttttgcatgtgaaataaaatggagttccaacatttttaagatatttaaaattccaattccaattgtttactgtcattatatagcaatatgactgacttttgtatactgaccttgtatcctgcaaattttccacaatgacttcttagttctaagagtggtttttgtagtttataaaaaatgactctctatagcaattatgctgttggtgaatagagagtttttgttttccttcttttctgaacagtatgtcttttacgtccttttcttgttgcactagctataacttaaaatattattctaaataggggtatttagacttgagatctgcaattgagttgctttcaattttaagggaaaagcattcagtctcgcaccagtaattgtgata

SEQ ID NO: 611024 - DNA, 599 bp, Homo sapiens
tttttctatcctctgggttgtctttttatttcctgacagtatcttttgcagtataaatcttttaattttatgaagttcatcttttttgttattgtttatgtgcttttggtgtcattgcctaacccaatgtcatcaaattttacatgtatttgatctaagggttttatagtttagctcttacatttgaggatttgatccattgtgagttaatttttgcatgtgaaataaaatggagttccaacatttttaagatatttaaaattccaattccaattgtttrctgtcattatatagcaatatgactgacttttgtatactgaccttgtatcctgcaaattttccacaatgacttcttagttctaagagtggtttttgtagtttataaaaaatgactctctatagcaattatgctgttggtgaatagagagtttttgttttccttcttttctgaacagtatgtcttttacgtccttttcttgttgcactagctataacttaaaatattattctaaataggggtatttagacttgagatctgcaattgagttgctttcaattttaagggaaaagcattcagtctcgcaccagtaattgtgata

SEQ ID NO: 611025 - DNA, 556 bp, Homo sapiens
tctattttatttttctatatttagtgaattttatgtctatatcttatttatagtggtcagtgaaccatatgctatatacattttgggcttattcttttctgtcttttttcttaaaagcctccatattttatgcttttactgatcattcattcactctacaaatatttcttgtatatctaatatatatacctggaattttgctggacacaaaaaatagaataataaagaaaacaaataagatcttttttctaatgaaatatacaggggaatttagaaagtgtagcatctctatttattaagaattctagatcagtgggcatataggcctagatttaaaaaactaactttatcacttgctagctattttatcttgattaaatgacttaatccccayaaacctcagtttcttaacctataaaattgggagaaaataatacctgcttcataagattgcatgagatttaaatagtttacataaaggaattacatgtacatgttaaaattgcttgataaaaagttgacactttcaaaatttgccttactccaggcaaatcag

SEQ ID NO: 611026 - DNA, 599 bp, Homo sapiens
tttttctatcctctgggttgtctttttatttcctgacagtatcttttgcagtataaatcttttaattttatgaagttcatcttttttgttattgtttatgtgcttttggtgtcattgcctaacccaatgtcatcaaattttacatgtatttgatctaagggttttatagtttagctcttacatttgaggatttgatccattgtgagttaatttttgcatgtgaaataaaatggagttccaacatttttaagatatttaaaattccaattccaattgtttactgtcattatatagcaatatgactgacttttgtatactgaccttgtatcctgcaaattttccacaatgacttcttagttctaagagtggtttttgtagtttataaaaaatgactctctatagcaattatgctgttggtgaatagagagtttttgttttccttcttttctgaacagtatgtcttttaygtccttttcttgttgcactagctataacttaaaatattattctaaataggggtatttagacttgagatctgcaattgagttgctttcaattttaagggaaaagcattcagtctcgcaccagtaattgtgata

SEQ ID NO: 611027 - DNA, 599 bp, Homo sapiens
tttttctatcctctgggttgtctttttatttcctgacagtatcttttgcagtataaatcttttaattttatgaagttcatcttttttgttattgtttatgtgcttttggtgtcattgcctaacccaatgtcatcaaattttacatgtatttgatctaagggttttatagtttagctcttacatttgaggatttgatccattgtgagttaatttttgcatgtgaaataaaatggagttccaacatttttaagatatttaaaattccaattccaattgtttactgtcattatatagcaatatgactgacttttgtatactgaccttgtatcctgcaaattttccacaatgacttcttagttctaagagtggtttttgtagtttataaaaaatgactctctatagcaattatgctgttggtgaatagagagtttttgttttccttcttttctgaacagtatgtcttttacgtccttttcttgttgcactagctataacttaaaatattattctaaataggggtatttagacttgagatctrcaattgagttgctttcaattttaagggaaaagcattcagtctcgcaccagtaattgtgata

SEQ ID NO: 611028 - DNA, 441 bp, Homo sapiens
attatcatttggctggatcctactgtgtaattatgtattagacattttatatattgctgcattcaatttgctastattttgttgagattctcctatgttcatgagtatatttgtctatagtcttctttatcataatattgtatttgtttgtggtttaattatcagtgtaatgctgggctcataatgagttggaaaatatttcttactctgctagtttctgaaaaagacatgtggtatttaatgcttccttaagtatttggcaatatcaactagtgaaaccttcaggatctggagattactgttttctttcttctttgtttcaaggtgttacatacaagctctaattatttaaaagatatggggttatttagagtttctattcttaaaacgagttttgataggtagtgtatatcttggaactactctatgtcccctatgttg

SEQ ID NO: 611029 - DNA, 603 bp, Homo sapiens
caaaccacatcaaaatcctaatcaaaattacagcaaactggtgtgtaaatattgatatagtaattgcaaagtttgtataaaaatggaaacaatctagaayatccaacacaatactgaagaagaactaagttggaagacttacgccacttaatttcaagacctactctaaggctacactgtattgacaaaagaataggaaaatagatcaataaaaaagtataggcatcccatatacagacccacaaaaacatagtcaattgatctttgataaaaaccaaaggcaattcaatggagtaaggatagttttttaaacaatggaggctggaagaattgtacacccatatgaaagaaaaacaaaaacatgcacgccaaccttataccttacacaaatacacacgtacacacaaacacaactcatggagggtatgtctaaaggaaacaggaaacaactgaaaaagctctaaatggctaaagctggaacaatttaagcaacaaaataaataaagttatatttggttataactgaaagtatgaaataggtattcatcagtccatagttatgtaaaccagtgattaaataaataaatattttgggaagaacac

SEQ ID NO: 611030 - DNA, 556 bp, Homo sapiens
tctattttatttttctatatttagtgaattttatgtctatatcttatttatagtggtcagtgaaccatatgctatatacattttgggcttattcttttctgtcttttttcttaaaagcctccatattttatgcttttactgatcattcattcactctacaaatatttcttgtatatctaatatatatacctggaattttgctggacacaaaaaatagaataataaagaaaacaaataagatcttttttctaatgaaatatacaggggaatttagaaagtgtagcatctctatttattaagaattctagatcagtgggcatataggcctagatttaaaaaactaactttatcacttgctagctattttatcttgattaaatgacttaatccccataaacctcagtttcttaacctataaaattgggagaaaataatacctgcttcataagattgcatgagatttaaatagtttacataaaggaattacatgtacakgttaaaattgcttgataaaaagttgacactttcaaaatttgccttactccaggcaaatcag

SEQ ID NO: 611031 - DNA, 514 bp, Homo sapiens
aggtgactcttggcagggtccctagataacttcaggatgggagttggttgccagaaaaaccaaccacatgattaggcagaaaaaaattttcaaccccactttattaccttcaaggaagggagaagggctgaagattgagttaaataacttggccactgatgtaattaagcatgygtacatggtaaaacttccacaaaaaaaaaaaaaaaactctgtacaatgagacttggagagcttcttgcctggtaaacatgtttatgtaatgggaggatggcacaccccaagaacaccgggacagaaatgttgtgctactgcactcccttgccttatgtatctcttcatctgactgtttatttatgtaatttataatacaacagtacccataatataacacttgcctgagagttttgtaagtaattctagcgaattatcataatttaagggaaaccctacatttatagttggtcagttgaaagtgcaggtggcacccagaacttgggactgacatttaaag

SEQ ID NO: 611032 - DNA, 285 bp, Homo sapiens
ccccggtgctagttcagaagtgcgttctaaagggtcatctccattgttttttctccccaaattaatctcaatttggtttgcttgtgcatttgcatgagaaactgaactcttgtattcatagataaatgagagactgagttttctcagttctgaagagaaagggcattttactyctctcagctgaaaggcactcctaggtgaccagtcattgagtgagagtgtttgaggggttgaccccttgtaacctgtagcaacccgagagggaacccctaacaaaattagttt

SEQ ID NO: 611033 - DNA, 581 bp, Homo sapiens
acacgccactttcaggcaccccggtgctagttcagaagtgcgttctaaagggtcatctccattgttttttctccccaaattaatctcaatttggtttgcttgtgcatttgcatgagaaactgaactcttgtattcatagataaatgagagactgagttttctcagttctgaagagaaagggcattttactcctctcagctgaaaggcactcctaggtgaccagtcattgagtgagagtgtttgaggggttgaccccttgtaacctgtagcaacccgagagggaacccctaacaaaattagtttcagaaggctaatccaggagatacatataggaggtggtcattccattctttgtgtcctcctggaggtgttagacctctggagggagaaactgaggcacataaargggcagaaatgactcagtggtgacacactatagagttccacccacaatcagcacattttgacacactacactaaagcctaggccacagtccagtgtctccattaaaataagtagtgggaaacaaataatctaagaatgaggaaaacacaaagagaatgacccattttcagaaaaa

SEQ ID NO: 611034 - DNA, 499 bp, Homo sapiens
gaattctgttttctcaacttacttctgcttgtctctcctwtctcttgtcaccctctgcttcatgagggatataaaatagtttctaacagcctgggattccttaaagaaaacagagaaggtgccagactggtacccatggctgagaaacctgaagatggttcacatcacagaactctgtgaagacacctcacagtaccagcccagagcctggtagccctgctggctggctagatccagaaaagaaaaaaacaattgttacagttcagctctcaggaagccacatccctagtaaaagtgggagagcactacatcaagggagcacattatgggacaaaaaattctgaacagtagccttgagccccagatcttccctctgacataacctatccaaatgagaaggaaccagaaaaaaattcttgtaatatgacaaaacaaggtcctttaacacccccaaaaaatcacactagctcaccagcaatggatccaaacccagaagaaa

SEQ ID NO: 611035 - DNA, 534 bp, Homo sapiens
tcaaaatcatacaaatacatgaaaattaaataacctgctgataaggatcattgcgtcaacaaggaaatcaagatggaaattgaaaaattctttgaactgaatgataatagtgacaaaacctatcaaaaactctgggatacagcaatggcagtgataagaggaaagttcatagccttaaattgcctayatcaaaaagtctggaagagcacgaatggacaatctaaggtcacaccacaaggaactacagaaacaagaacaaaccaaacccagcagaaaaaaaagaaataaccaagattggagcagaacttaaataaaattggaccaaaaaatacaaaagataaatgaaacaaaaagctgtttttttgaaaggatatataaaattgatagatcattagcaagattaaccaagaagagagaatatccaaataagctcaattagaaacaaaatgggagatattacaaccaacagcacaaaaatacaaaagattattcaaggctactatgaaaacctttacatgcataaactagaaaacc

SEQ ID NO: 611036 - DNA, 534 bp, Homo sapiens
tcaaaatcatacaaatacatgaaaattaaataacctgctgataaggatcattgcgtcaacaaggaaatcaagatggaaattgaaaaattctttgaactgaatgataatagtgacaaaacctatcaaaaactctgggatacagcaatggcagtgataagaggaaagttcatagccttaaattgcctatatcaaaaagtctggaagagcrcgaatggacaatctaaggtcacaccacaaggaactacagaaacaagaacaaaccaaacccagcagaaaaaaaagaaataaccaagattggagcagaacttaaataaaattggaccaaaaaatacaaaagataaatgaaacaaaaagctgtttttttgaaaggatatataaaattgatagatcattagcaagattaaccaagaagagagaatatccaaataagctcaattagaaacaaaatgggagatattacaaccaacagcacaaaaatacaaaagattattcaaggctactatgaaaacctttacatgcataaactagaaaacc

SEQ ID NO: 611037 - DNA, 534 bp, Homo sapiens
tcaaaatcatacaaatacatgaaaattaaataacctgctgataaggatcattgcgtcaacaaggaaatcaagatggaaattgaaaaattctttgaactgaatgataatagtgacaaaacctatcaaaaactctgggatacagcaatggcagtgataagaggaaagttcatagccttaaattgcctatatcaaaaagtctggaagagcacraatggacaatctaaggtcacaccacaaggaactacagaaacaagaacaaaccaaacccagcagaaaaaaaagaaataaccaagattggagcagaacttaaataaaattggaccaaaaaatacaaaagataaatgaaacaaaaagctgtttttttgaaaggatatataaaattgatagatcattagcaagattaaccaagaagagagaatatccaaataagctcaattagaaacaaaatgggagatattacaaccaacagcacaaaaatacaaaagattattcaaggctactatgaaaacctttacatgcataaactagaaaacc

SEQ ID NO: 611038 - DNA, 534 bp, Homo sapiens
tcaaaatcatacaaatacatgaaaattaaataacctgctgataaggatcattgcgtcaacaaggaaatcaagatggaaattgaaaaattctttgaactgaatgataatagtgacaaaacctatcaaaaactctgggatacagcaatggcagtgataagaggaaagttcatagccttaaattgcctatatcaaaaagtctggaagagcacgaatggacaatctaaggtcacaccacaaggaactrcagaaacaagaacaaaccaaacccagcagaaaaaaaagaaataaccaagattggagcagaacttaaataaaattggaccaaaaaatacaaaagataaatgaaacaaaaagctgtttttttgaaaggatatataaaattgatagatcattagcaagattaaccaagaagagagaatatccaaataagctcaattagaaacaaaatgggagatattacaaccaacagcacaaaaatacaaaagattattcaaggctactatgaaaacctttacatgcataaactagaaaacc

SEQ ID NO: 611039 - DNA, 557 bp, Homo sapiens
aatatctgatgaacatatatgcaaaaatcctcaacaaaatgctagctaaccaaatccaacagcattttaaaaagataatacatcatgatcaagtgaatttcataccagtgatggagacatggtttaacatatgcaagtcaataaatgtgatacatcacataaacaaaatttcttttaaaaaaatcacgyaatcaactaaatagacaaagagaaagcatttgatagaatccagcatccctttaagattaaaaccctcagcaaaatcagcatacaagggacataccttaaagtaatgaaagccatttatgacaaacccacaaccaacataatactgaagagagaaaatttgaaagcattacctctgaggaatggaacaagacaaggatgtccactctcaccacttctagtcaacatattactggaaatactagccagagctatcagacaagagaaaataataaagagcatccaaaccactaaagaggaagtcaaacagtcactgtgtactgatgatatgatcatataccttagaaaacacaaaagaagcccctccacaa

SEQ ID NO: 611040 - DNA, 527 bp, Homo sapiens
gtttattaagatttgtttacatacttgatttaaattcctttggttgtatatgcacaagtggaattgctgaattgtataagtgtctgtttaatttttggagaaacattgtgttattgaatattataatatttttgaatattataaagcttcatgaaaactatttaatatttaatgaaacataaataatgtgttagaatagatamaagtggaagctaaaattttgtttcataaaagggccttttaagtcagtggtgaaagatatgttagtcaataaatagtgtcagaacataaattatttttgtaacaaagaaggacttctatttcatcattcagattgaaataaatgccagtttaagaaaatgttttaatgagacatttggcatcttttgataatgttacacaaacacacaagtgaactttagaataatctatgaggaaattcctttctaggaatacaaggtacatattatcaatgttcactaatatctgaatgtagtcttctgtttacacagtttggttgcacttcc

SEQ ID NO: 611041 - DNA, 527 bp, Homo sapiens
gtttattaagatttgtttacatacttgatttaaattcctttggttgtatatgcacaagtggaattgctgaattgtataagtgtctgtttaatttttggagaaacattgtgttattgaatattataatatttttgaatattataaagcttcatgaaaactatttaatatttaatgaaacataaataatgtgttagaatagataaaagtggaagctaaaattttgtttcataaaagggccttttaagtcagtggtgaaagatatgttagtcaataaatagtgtcagaacataaattatttttgtaacaaagaaggacttctatttcatcattcagattgaaataaatgccagtttaagaaaatgttttaatgagacatttggcatcttttgataatgttacacraacacacaagtgaactttagaataatctatgaggaaattcctttctaggaatacaaggtacatattatcaatgttcactaatatctgaatgtagtcttctgtttacacagtttggttgcacttcc

SEQ ID NO: 611042 - DNA, 527 bp, Homo sapiens
gtttattaagatttgtttacatacttgatttaaattcctttggttgtatatgcacaagtggaattgctgaattgtataagtgtctgtttaatttttggagaaacattgtgttattgaatattataatatttttgaatattataaagcttcatgaaaactatttaatatttaatgaaacataaataatgtgttagaatagataaaagtggaagctaaaattttgtttcataaaagggccttttaagtcagtggtgaaagatatgttagtcaataaatagtgtcagaacataaattatttttgtaacaaagaaggacttctatttcatcattcagattgaaataaatgccagtttaagaaaatgttttaatgagacatttggcatcttttgataatgttacacaaacacacaagtgaactttagaataatctatgaggaaattcctttctaggaatacaaggtacatattatcaatgttcactaatatctgaatrtagtcttctgtttacacagtttggttgcacttcc

SEQ ID NO: 611043 - DNA, 546 bp, Homo sapiens
aagaaacagtgctgatcaatttaatgcttacaattaaatcatttttcacatgtatagtcataaagaaatcacaacaactaatacaaacagaataaagtgtgtttgctgcatttttgctaaaaaaamcagctttcattattcaataagaaaaaaatagaaacttgaacaaagacataaatgaccaattggcatgtatcaatatttaatgtcattaacaattcaaaaaatcaactttggggtaactatggaagtctatactttactaaaaagattgacaaagaataaggagtttactggaaaaataccagagtattcatctactgttgatgcactcttatagcgtaagatgtgaatatatctgtcaaattttatgaggtcctttccttgacaaaccaaatttacatctaagaataaatgttatcgcgctagtcacaaaaatacagacaggcacatgctcaccaggtgggctttgacaaagtaatggtatagggataggacagagtgatgtatcatcatcagactacataaggcctcatatctatgcta

SEQ ID NO: 611044 - DNA, 592 bp, Homo sapiens
tatctttcatgtcaacatcttgtacttaygttttatacatttctgtgaagtgttttagacattttaggcttttatgagattgtcagtgatttttaattatgtttaagctgtttgtttccaatataaagaaataaaattgattttaatattttaatcctgtctcagttttgaaagattcactttttaattctgacagtctattattattttctacataggtaaatatgtgtccatgaataatgaaattttatttatcccttataaattcttagatctttatttctcttttgcactttgtttcattcgtcaagactttgagtaaaatataaaattaggatgacaaactctcttcagtttaccaggcactttccaagttttatcactgagagccccatgtgctgaaaaacattttagtctctataaaactgaaaaccttaatcactctgtaagatatatgtggataacaggcatttatgtctgttttttgttctcatagagaaaaatttttaacattttactatcaaacatgatctgtggttttggtagaaacattaatctactaaagatttcctcttctattcataattacatt

SEQ ID NO: 611045 - DNA, 592 bp, Homo sapiens
tatctttcatgtcaacatcttgtacttatgttttatacatttctgtgaagtgttttagacattttargcttttatgagattgtcagtgatttttaattatgtttaagctgtttgtttccaatataaagaaataaaattgattttaatattttaatcctgtctcagttttgaaagattcactttttaattctgacagtctattattattttctacataggtaaatatgtgtccatgaataatgaaattttatttatcccttataaattcttagatctttatttctcttttgcactttgtttcattcgtcaagactttgagtaaaatataaaattaggatgacaaactctcttcagtttaccaggcactttccaagttttatcactgagagccccatgtgctgaaaaacattttagtctctataaaactgaaaaccttaatcactctgtaagatatatgtggataacaggcatttatgtctgttttttgttctcatagagaaaaatttttaacattttactatcaaacatgatctgtggttttggtagaaacattaatctactaaagatttcctcttctattcataattacatt

SEQ ID NO: 611046 - DNA, 592 bp, Homo sapiens
tatctttcatgtcaacatcttgtacttatgttttatacatttctgtgaagtgttttagacattttaggcttttatgagattgtcagtgatttttaattatgtttaagctgtttgtttccaatataaagaaataaaattgattttaatattttaatcctgtctcagttttgaaagattcactttttaattctgacagtctattattattttctacataggtaaatatgtgtccatgaataatgaaattttatttatcccttataaattcttagatctttatttctcttttgcactttgtttcattcgtcaagactttgagtaaaatataaaattaggatgacaaactctcttcagtttaccaggcactttccaagttttatcactgagagccccatgtgctgaaaaacattttagtctctataaaactgaaaaccttaatcactctgtaagayatatgtggataacaggcatttatgtctgttttttgttctcatagagaaaaatttttaacattttactatcaaacatgatctgtggttttggtagaaacattaatctactaaagatttcctcttctattcataattacatt

SEQ ID NO: 611047 - DNA, 587 bp, Homo sapiens
gtgttcattttggtaactgttgtttttcaaccactctgactaacatataatatcacatccattkgctcgactcttttttttgtaatatactcttaagatgttttgatatttacaagttatgcagtaatacattcctgaatttgtgtgtattcatggtgtattcttttttctgatcagttttgcaacagtgttaccacttttactactctatactccaaaaaataccttagacatggctgattatctctgttgtatatttgcttgccagtttattgttttcagtttctatttcttctttcttctttggatttagttatatgttcttttactaatgtcataaggtgaatgcttaatgttttaagacagatcattgtatttttgactttgtggttttctatgtaaatgaatttaagactgcaaaacttcctctatgcacgtattttagctgtgtctcaccaattttaagatgtaggatttccattttattcagttcacaatactttatattattatgatttattctttgatacataatacaacagagtatttctgattttccaaaagaattaagagattttccagttatc

SEQ ID NO: 611048 - DNA, 532 bp, Homo sapiens
aggccctcagaaaaagccttactacatcaatggagatttttttctacagattcatatctctcccacaaaagatagcatttcagcaaattccaacctttttaaatagccatcttgaaatacgtcaamgaaaatatattttggagtgaaatattttggtttctttcaaagttcataacactttacagatattaccaccatgataggtgatggaactcagagaaatgtgactgctttccattcttaaccagaacatccctgttaaaggacaagacccaaggatcaatgcaaatggccaaacttcttgtagtcaccttggcactggatgccctatccaacaaatgtcctgttttgcaaattttactaattctgggccactgactaagagcttccccctttggggtaaagcactcatagattcctgactcacatataccgaaaattttaatcaagtttatgaatatctctagactactaaggctgtaaaacaaggctttaccaggacacttatctttttgagttccagatattaatg

SEQ ID NO: 611049 - DNA, 532 bp, Homo sapiens
aggccctcagaaaaagccttactacatcaatggagatttttttctacagattcatatctctcccacaaaagatagcatttcagcaaattccaacctttttaaatagccatcttgaaatacgtcaacgaaaatatattttggagtgaaatattttggtttctttcaaagttcataacactttacagatattaccaccatgataggtgatggaactcagagaaatgtgactgctttccattcttaaccagaacatccctgttaaaggacaagacccaaggatcaatgcaaatggccaaacttcttgtagtcaccttggcactggatgccctatccaacaaatgtcctgttttgcaaattttactaattctgggccactgactaagagcttccccctttggggtaaagcactcatagwttcctgactcacatataccgaaaattttaatcaagtttatgaatatctctagactactaaggctgtaaaacaaggctttaccaggacacttatctttttgagttccagatattaatg

SEQ ID NO: 611050 - DNA, 609 bp, Homo sapiens
tcttctcctgtggctgtgcttgtatgtgagaaacaaactgccctcgatttcatctatcaagagtcagtcatatgtttggccatctccataactctagggmattccttcctcaccaacagagttattagttgatgatataacaaaagacaacctacaaaatgtaagaaattatttgtagacaatatatttgataagagactagtatctggaatatataaagaatactgaaaactcaataataaaaaaagaaattactcatttttaaatgggcaaaggatgtgaataaacatttcttcaaagctacgcaaatggccagtaaatacatgaaaagatgttcaacatcattagttattagaaaaattcacaagcaccaaaactggttatgcactaagatggctataataataaaagacaataacaagttttgacaaggatgtggatgaactgcaactcctctacataactggtgggataggaaaattgtacaattactttggaaacctactttttaatttttctaaatgctaaatatataattagtatatgatccagcaatttcaatacttagctatacattccagagagttgaacatttatgcttacacaaaa

SEQ ID NO: 611051 - DNA, 609 bp, Homo sapiens
tcttctcctgtggctgtgcttgtatgtgagaaacaaactgccctcgatttcatctatcaagagtcagtcatatgtttggccatctccataactctagggcattccttcctcaccaacagagttattagttgatgatataacaaaagacaacctacaaaatgtaagaaattatttgtagacaatatatttgataagagactagtatctggaatatataaagaatactgaaaactcaataataaaaaaagaaattactcatttttaaatgggcaaaggatgtgaataaacatttcttcaaagctacgcaaatggccagtaaatacatgaaaagaygttcaacatcattagttattagaaaaattcacaagcaccaaaactggttatgcactaagatggctataataataaaagacaataacaagttttgacaaggatgtggatgaactgcaactcctctacataactggtgggataggaaaattgtacaattactttggaaacctactttttaatttttctaaatgctaaatatataattagtatatgatccagcaatttcaatacttagctatacattccagagagttgaacatttatgcttacacaaaa

SEQ ID NO: 611052 - DNA, 609 bp, Homo sapiens
tcttctcctgtggctgtgcttgtatgtgagaaacaaactgccctcgatttcatctatcaagagtcagtcatatgtttggccatctccataactctagggcattccttcctcaccaacagagttattagttgatgatataacaaaagacaacctacaaaatgtaagaaattatttgtagacaatatatttgataagagactagtatctggaatatataaagaatactgaaaactcaataataaaaaaagaaattactcatttttaaatgggcaaaggatgtgaataaacatttcttcaaagctacgcaaatggccagtaaatacatgaaaagatgttcaayatcattagttattagaaaaattcacaagcaccaaaactggttatgcactaagatggctataataataaaagacaataacaagttttgacaaggatgtggatgaactgcaactcctctacataactggtgggataggaaaattgtacaattactttggaaacctactttttaatttttctaaatgctaaatatataattagtatatgatccagcaatttcaatacttagctatacattccagagagttgaacatttatgcttacacaaaa

SEQ ID NO: 611053 - DNA, 602 bp, Homo sapiens
ttgacaaggatgtggatgaactgcaactcctctacataactggtgggataggaaaattgtacaattactttggaaacctactttttaatttttctaaatgctaaatatataattagtatatgatccagcaatttcaatacttagctatacattccagagagttgaacatttatgcttacacaaaaacctgatatgatacttcatagaagcatcttccaaaataataaaaaagtatacaactcaaatgtccaaaagctgattaatgaataaaggaatatgacatagttataaatgggatggtattttgtgatgaaagggaatgaaatactaatacatgctataactttccaaaacaatataacatgggaaagagatatataatttgctgtggactcagtaattattctaaatgacttttgttttagcatgtttaattttgttttttaatgctgtctgttaatttttctggctttccaaccatgcagtagctgcatgtttatcaccgcaaatcttaatcataagggcaaatcttaatcataagrgcaaatcttaatcataagagcaccagcagtgatggttctaggcagcagtgctgttttcag

SEQ ID NO: 611054 - DNA, 618 bp, Homo sapiens
gcagtagctgcatgtttatcaccgcaaatcttaatcataagggcaaatcttaatcataagggcaaatcttaatcataagagcaccagcagtgatggttctaggcagcagtgctgttttcagagttacatagtataacaataatctctccttgttattaccccacaaaatcaagataattcagtggcaacatagagagtaagtgccttctctattggtcatattatcttactttcagcctcattgttgcaaaggcctcagcagctaatgttgaatatgatgacacaaaattattttgtcaaataaaggcatttgaatttactgactatttgaatacctggaacagaggcaggcaaacttcagcccacaggccaacttgacctataaactgtttttgtaaatgtggctttgttagaacacagccaggtccattagttcataaattatcaatggctgatttcacatcataatagcagagttaagtagttaagacagatgatctgcgcacagagccaaaratatctaccctctggctctttacagagtagatttgctgacctattgtctacagtgagaatgttggatctgtaagaaccgtaagaattgtctagttcatgacc

SEQ ID NO: 611055 - DNA, 607 bp, Homo sapiens
tttattagtttctgtaatcaaacccatgtacataagaccttacatatttaatacagtgtgttacccctgtacaaatcgaaaaaaataagtttaatgtttgtagaccaatatggccgttaatttctgtacaatgccaactcaacacagtaaactggggtactttttccaaagttgacagcacatctaaagtttccaaaaattgaaattatatatatgtgtgcatatatatatatagatcaataacagcagtatgttacggatcaatagcagcaacagtttttccaggttctgcggtcatctgaacaaaattatagagacatccagcacactccatttaaaaaaatggcggggggaggtaaaaaacaaaaccccagaaaactacaaagttctgttactgttgtggtacctggcaccattttttaaaattagcttctgaatcatcatgtggaaagaaaacattctagaataacctaattaaaaacagctcttataaagtatggtcamtactaagtatcataaagcaagtacaagatattttacattcacagaggtatgatacagtactgtcctatatctataatactagaggatacaattaaaaaggcat

SEQ ID NO: 611056 - DNA, 555 bp, Homo sapiens
ttctgcggtcatctgaacaaaattatagagacatccagcacactccatttaaaaaaatggcggggggaggtaaaaaacaaaaccccagaaaactacaaagttctgttactgttgtggtacctggcaccattttttaaaattagcttctgaatcatcatgtggaaagaaaacattctagaataacctaattaaaaacagctcttataaagtatggtcactactaagtatcatmaagcaagtacaagatattttacattcacagaggtatgatacagtactgtcctatatctataatactagaggatacaattaaaaaggcattattcgagagttgattctacttttccagaagggggcccaaaggacggcatgacacagctctgtaaagaaatgcaccttcttaggatttcctttaattaggggcacagttctaggtagtcactgttcttcatgaacatcagctaaaaactggtgtgattcaagtaaaactcctgaaacactggccaaccctcctggtgtctgtcacggaaaagtagaagaaaagtcaccccctgc

SEQ ID NO: 611057 - DNA, 529 bp, Homo sapiens
ggaagggccttatatttcatttagttcatcaattcaaatgctaatcactttccagaaacaatcttataaacacaaaaatagtttttaaccacatatctgaacattcatggccatgtcaagttgacacataaaattaactatcagaagtctaccccttgtcaacttggtacccatatccatctcaaataaagacaatagyaatatcataattctgcctaacataatgcaattatcctgaatacattgaaaaatgcactaacctcttccccagaagaggaggtaaaatctttgagtgatgtttacttttcctgatattccttagcttaaatgctatgatataagattaacaacactaggaaacttttacataaagtctattcatcttatgttacttgataagacaaaagagagggaagaaaacaaatatatttgctgtgtatatgcacatgaacatacacacacacaaatgcattcttaaaaacctaagaaaatactcatgatgattaaacccctcaattctctaactggc

SEQ ID NO: 611058 - DNA, 626 bp, Homo sapiens
tctggaaaaccttgccccacccctgcaaagtcttgacacccagctggtactgtaattgtgtcttcaaaaggccacttatctattttatcaagctagctgcttcaggatggtgrataacatgggcctattgccactcttcgtttgctatgaagtgagtttcttgataagaggcaatgctgtatggaatattataatggtggatcaagcattctataagcccacagattgtagtttagacaaaagcactgcatgcaggaaaggcaaattaaaaactgtagtaaatgcctactccaatataaacaaaatatttccctttccatgactgaggtggcctaatgtaatcaacatgtcactaggtaccattggctgatcactctgggaaatggaagtatattgagaactcaatgttgatctgtgctgctgaaatattgaatcccgataggaaaggcttagagaaatattgacaacataaattatagtgtatcagggtccttcctggagaagatataaccttttaattatataaggggttctgggtctgtaaactggcccaattctggaaactgattgaggggctatgattctatactttaatgattcaagttagacttttgttcatttaacct

SEQ ID NO: 611059 - DNA, 626 bp, Homo sapiens
tctggaaaaccttgccccacccctgcaaagtcttgacacccagctggtactgtaattgtgtcttcaaaaggccacttatctattttatcaagctagctgcttcaggatggtgaataacatgggcctattgccactcttcgtttgctatgaagtgagtttcttgrtaagaggcaatgctgtatggaatattataatggtggatcaagcattctataagcccacagattgtagtttagacaaaagcactgcatgcaggaaaggcaaattaaaaactgtagtaaatgcctactccaatataaacaaaatatttccctttccatgactgaggtggcctaatgtaatcaacatgtcactaggtaccattggctgatcactctgggaaatggaagtatattgagaactcaatgttgatctgtgctgctgaaatattgaatcccgataggaaaggcttagagaaatattgacaacataaattatagtgtatcagggtccttcctggagaagatataaccttttaattatataaggggttctgggtctgtaaactggcccaattctggaaactgattgaggggctatgattctatactttaatgattcaagttagacttttgttcatttaacct

SEQ ID NO: 611060 - DNA, 560 bp, Homo sapiens
aaaattgcattaatatataaaaagataagcatgagaattcatcattgctgacaaayatttctgatgaaactaagttgatatgcatttattcttcatagttggtaaaatctaggccttaatttactttatatcatttaataaagtatttttaattctaattggagcacttaaatgataaaaagagatagatatttgactttgctttacccagaattctttttaaggtttatgatattttttagaaaagaaatatagctggacccagtggctcatgtctgtaatcccagcaatttgggaggctgaagcaggatgatcacttgcgtccaggagtttgagaccagcctgggtaatacagtgagaccccacctctagtataaattaaaaaaaaatttaaaaagaataaaaataagagtaaatataatttaaaattcctcctttaaatatatatttttaattttgatttttgtgggtacacagcaggtgtatatatttatggactattattttgaaagtcaaatgaaaattttatcatttaaaccttaagaagctttaatataagt

SEQ ID NO: 611061 - DNA, 560 bp, Homo sapiens
aaaattgcattaatatataaaaagataagcatgagaattcatcattgctgacaaacatttctgatgaaactaagttgatatgcatttattcttcatagttggtaaaatctaggccttaatttactttatatcatttaataaagtatttttaattctaattggagcacttaaatgataaaaagagatagatatttgactttgctttacccagaattctttttaaggtttatgatattttttagaaaagaaatatagctggrcccagtggctcatgtctgtaatcccagcaatttgggaggctgaagcaggatgatcacttgcgtccaggagtttgagaccagcctgggtaatacagtgagaccccacctctagtataaattaaaaaaaaatttaaaaagaataaaaataagagtaaatataatttaaaattcctcctttaaatatatatttttaattttgatttttgtgggtacacagcaggtgtatatatttatggactattattttgaaagtcaaatgaaaattttatcatttaaaccttaagaagctttaatataagt

SEQ ID NO: 611062 - DNA, 560 bp, Homo sapiens
aaaattgcattaatatataaaaagataagcatgagaattcatcattgctgacaaacatttctgatgaaactaagttgatatgcatttattcttcatagttggtaaaatctaggccttaatttactttatatcatttaataaagtatttttaattctaattggagcacttaaatgataaaaagagatagatatttgactttgctttacccagaattctttttaaggtttatgatattttttagaaaagaaatatagctggacccagtggctcatgtctgtaatcccagcaatttgggaggctgaagcaggatgatcacttgcgtccaggagtttgagaccagcctgggtaatacagtgagaccccacctctagtataaattaaaaaaaaatttaaaaagaataaaaataagagtaaatataatttaaaattcctcctttaaatatatatttttaattttgatttttgtgggtacacagcwggtgtatatatttatggactattattttgaaagtcaaatgaaaattttatcatttaaaccttaagaagctttaatataagt

SEQ ID NO: 611063 - DNA, 614 bp, Homo sapiens
ataaattaaaaaaaaatttaaaaagaataaaaataagagtaaatataatttaaaattcctcctttaaatatatatttttaattttgatttttgtgggtacacagcaggtgtatatatttatggactattattttgaaagtcaaatgaaaattttatcatttaaaccttaagaagctttaatataagtctcagattttcaaataggtatctgakaatatacatgtgattttatttcttttagaaaataaagcaaataaaacagagtaaacacaaaggaggatcaactagttgaaaatgtttattataccttatccagaacgtcatgccaggtacataagctgatattttgaatacagctagtataaactgactcaaatgtaattttcttcaagtcattcagtttaataagttattatgatttagattggcatttcactgttacccactctatgtagttttcagaaacctccattaattaactttggttactctgaaaattattagaagagaaactcatgtcttctttgtacattgtgggttacacagttccgtgtccattacttcaaccttgtcttttaacttacatatctcctcagaatttatttgcacttgct

SEQ ID NO: 611064 - DNA, 580 bp, Homo sapiens
gtagtgttgttaaatcaagtttagcctaaagctgcctccttacaaattttaagtttgtcctaaaagtttctctgcacattgtgaactataaaaagtggaagtgtaaacacatcatagcctacacttgtgccaatcaccgagttttgcccaatcaaatgtagccaactgtttgaattgtgttcaaataaggcaaatgctgagctatagccaatccagctccttctgtacctcattttcattttctgttcgtcacttttctttttctgtcccataaatcttccaccacgtggctgcagtggagtctctgagcatactctggcttggtaggccacctgattcgtgaattgttcattgctcaatgaagtgggatccataatagagtttcaaacaacccccaggagtgctgagtgaccaagcaagctacctgccaractcactgtgttcattgctctctcagagaagctaggaatcgtggtaagatctctgctagattctgaggctctacggatttgggttttaagctctctgagtttcttcaagcaaatttctgatccaaactgggtttggaagtcacaataga

SEQ ID NO: 611065 - DNA, 558 bp, Homo sapiens
taaccaatccggctgtttctgtaactcacttccattttctgtacgtcactttctcttttttttttttttttgkcaataagtcttcttcccccacatgactgtgctggagtctctgagcatactctggctcagaaggctgcccaatttgtgaatcattcattgctcaattaaactcttttaaaatttaatttggtggaggtttttattttatcaatgtctacaatgggaaacttttctcagtaaaaatggatgcagtaatatgggtggtctttctctcacattatgccacctttatggggtgagaaaataagaactttattcccagtaggatacacaaaatgagagtagtgaatcatagcagtggtagaggcaatttttgtcaacaaagaaaaaaattttcaagtgcaacatatttaagtgagcatgcacaggcgagataggtgtaatataggtaaacatgattttcagggcttgtacaatcagattaacaatcctgctaaaaatttcccaagcataaatccttaatatgtggtgaacatagaatctgtgttagagagg

SEQ ID NO: 611066 - DNA, 576 bp, Homo sapiens
taaatgttaagactacagaaaaaaaatatgcgtatctaagggctaatcactattagccatcctgtttcaattatttgtaaattcaaggttgggaaaatttaaatgtatttattttccaagaagcatttctagctatctggcttatttgctgctaccaataattagggaaaatgtacattttgggamtaattgataaataaattaaagtcatagctgaaaattgtattgcattcattaaagtgtctcaattagattgaaacatgttctggtaacctgtgagtagcaattctcactgtccatttatttttcagttcagacaaacctacaattcattgatatgataataaaatgctttatttggagtacatagtttttatcgagtttagaatatgggataatccattcaccattttatctataatcttcctgaaaaacatcaccatcaataattaaaactagtgtttataacatagtatcaagattaccagcatcattcatcatgattatgatccacagacattttaaattattaggcctaatagtttctctttatataattcacactatttgtactac

SEQ ID NO: 611067 - DNA, 576 bp, Homo sapiens
taaatgttaagactacagaaaaaaaatatgcgtatctaagggctaatcactattagccatcctgtttcaattatttgtaaattcaaggttgggaaaatttaaatgtatttattttccaagaagcatttctagctatctggcttatttgctgctaccaataattagggaaaatgtacattttgggaataattgataaataaattaaagtcatagctgaaaattgtattgcattcattaaagtgtctcaattagattgaaacatgttctggtaacctgtgagtagcaattctcactgtccatttatttttcagttcagacaaacctacaattcattgatatgataataaaatgctttatttggagtacatagtttttatygagtttagaatatgggataatccattcaccattttatctataatcttcctgaaaaacatcaccatcaataattaaaactagtgtttataacatagtatcaagattaccagcatcattcatcatgattatgatccacagacattttaaattattaggcctaatagtttctctttatataattcacactatttgtactac

SEQ ID NO: 611068 - DNA, 576 bp, Homo sapiens
taaatgttaagactacagaaaaaaaatatgcgtatctaagggctaatcactattagccatcctgtttcaattatttgtaaattcaaggttgggaaaatttaaatgtatttattttccaagaagcatttctagctatctggcttatttgctgctaccaataattagggaaaatgtacattttgggaataattgataaataaattaaagtcatagctgaaaattgtattgcattcattaaagtgtctcaattagattgaaacatgttctggtaacctgtgagtagcaattctcactgtccatttatttttcagttcagacaaacctacaattcattgatatgataataaaatgctttatttggagtacatagtttttatcgagtttagaatatgggataatccattcaccattttatctataatcttcctgaaaaacatcaccatcaataattaaaactartgtttataacatagtatcaagattaccagcatcattcatcatgattatgatccacagacattttaaattattaggcctaatagtttctctttatataattcacactatttgtactac

SEQ ID NO: 611069 - DNA, 491 bp, Homo sapiens
ggcacacaacctagtgagacaatggaatggccaagggaatgcttccgccaccccacttccaataccaggcaatgcagctcacagctcttaaagagactccttcctcccacttgaggaaaagagagggaagagtaaagaggactttgtcttgcaacatggagaccagctcacccacagtaatagggcaccaggcagagtcttcaggtccccattacaggctctaggtcctggatgacatttctagtcataccctgagccagaaggaaactcgctgccttgaagagaaggacccagtcctaatagtatacatcatcttctgactaaagggctcttgggtcctgaataaacaatcgcagtagtccagtagtacctggcatgrgctttgggtgggactctgagacctgctagcttaaggtgtgacccagaacatttacagatgtggtggctatgaggacagactccttctgctcttgagaagcagaaagaaaagg

SEQ ID NO: 611070 - DNA, 613 bp, Homo sapiens
aatacatagggagtaaaataagaattaaatagaaacaacaataagttaaaaagtggagggattaagttaaaatatagagtttttataaattttccttttgcttttttatttatgtaatcaatgttaaattttcttcagtttataataatgggttataagatagtatttgcargcctcatggtaacctcacatgaaatacatactacaggtaaacaaaattgaaaaacaataaattaaaacataccaccagagacaataatcttccctgaaaggaagacaggaaagatggaagtaaagaagagaagaccacaaaacaactagaaaacaaataacaaaatagcaagagtaattccttcgttatcaataataacattaaaaataaaagaaactctccaatcaaaatacatagaatggatgaatgaatttttaaaaagctagacctaataatctattgcctacgagaaacacatttcccctataaagacacacaaagactaaaactaaagagatggaaaaagacactccataaaagatactccctgttaaatagacggtgctggcatagttgactagccctatgcagaagaatgaaacttgaaaaaaacgtacaaaa

SEQ ID NO: 611071 - DNA, 613 bp, Homo sapiens
aatacatagggagtaaaataagaattaaatagaaacaacaataagttaaaaagtggagggattaagttaaaatatagagtttttataaattttccttttgcttttttatttatgtaatcaatgttaaattttcttcagtttataataatgggttataagatagtatttgcaagcctcatggtaacctcacatgaaatacatactacaggtaaacaaaattgaaaaacaataaattaaaacataccaccagagacaataatcttccctgaaaggaagacaggaaagatggaagtaaagaagagaagaccacaaaacaactagaaaacaaataacaaaatagcaagagtaattccttcgttatcaataataacattaaaaataaaagaaactctccaatcaaaatayatagaatggatgaatgaatttttaaaaagctagacctaataatctattgcctacgagaaacacatttcccctataaagacacacaaagactaaaactaaagagatggaaaaagacactccataaaagatactccctgttaaatagacggtgctggcatagttgactagccctatgcagaagaatgaaacttgaaaaaaacgtacaaaa

SEQ ID NO: 611072 - DNA, 613 bp, Homo sapiens
aatacatagggagtaaaataagaattaaatagaaacaacaataagttaaaaagtggagggattaagttaaaatatagagtttttataaattttccttttgcttttttatttatgtaatcaatgttaaattttcttcagtttataataatgggttataagatagtatttgcaagcctcatggtaacctcacatgaaatacatactacaggtaaacaaaattgaaaaacaataaattaaaacataccaccagagacaataatcttccctgaaaggaagacaggaaagatggaagtaaagaagagaagaccacaaaacaactagaaaacaaataacaaaatagcaagagtaattccttcgttatcaataataacattaaaaataaaagaaactctccaatcaaaatacatagaatggatgaatgaatttttaaaaagctagacctaataatctattgcctacgagaaacacatttcccctataaagacacacaaagactaaaactaaagagatggaaaaagacactccataaaagatactccctgttaaatagacrgtgctggcatagttgactagccctatgcagaagaatgaaacttgaaaaaaacgtacaaaa

SEQ ID NO: 611073 - DNA, 446 bp, Homo sapiens
ttgccagtttttaattttcacaaaaatcttatgagaraggcatattattttttacttagataagaaaactgtggctcaaaaagattaagcttaaaagtagtgtaattacctatgaatatatgtttttattactttaaacacaagatgtataggaaagacatacatatacactcactaacagaaatgtgcatatacatacatctacaatgcacctaaataaaaattttgtggcagaacagctctcagtcaaatttaaaagaaaataaagtttctattcaccactacataatgcaaattcactctcttctcccttcttcctgactctccactgttaccctgaatcatcaacgtcctttgttgtagtctataattaaaaatattccaattatttatctgaacttcttatataaatattacttgaaagtttgcgactatttttttgaatt

SEQ ID NO: 611074 - DNA, 445 bp, Homo sapiens
tgccagtttttaattttcacaaaaatcttatgagagaggcatattatttyttacttagataagaaaactgtggctcaaaaagattaagcttaaaagtagtgtaattacctatgaatatatgtttttattactttaaacacaagatgtataggaaagacatacatatacactcactaacagaaatgtgcatatacatacatctacaatgcacctaaataaaaattttgtggcagaacagctctcagtcaaatttaaaagaaaataaagtttctattcaccactacataatgcaaattcactctcttctcccttcttcctgactctccactgttaccctgaatcatcaacgtcctttgttgtagtctataattaaaaatattccaattatttatctgaacttcttatataaatattacttgaaagtttgcgactatttttttgaatt

SEQ ID NO: 611075 - DNA, 446 bp, Homo sapiens
ttgccagtttttaattttcacaaaaatcttatgagagaggcatattattttttacttagataagaaaactgtggctcaaaaagattaagcttaaaagtagtgtaattacctatgaatatatgtttwtattactttaaacacaagatgtataggaaagacatacatatacactcactaacagaaatgtgcatatacatacatctacaatgcacctaaataaaaattttgtggcagaacagctctcagtcaaatttaaaagaaaataaagtttctattcaccactacataatgcaaattcactctcttctcccttcttcctgactctccactgttaccctgaatcatcaacgtcctttgttgtagtctataattaaaaatattccaattatttatctgaacttcttatataaatattacttgaaagtttgcgactatttttttgaatt

SEQ ID NO: 611076 - DNA, 446 bp, Homo sapiens
ttgccagtttttaattttcacaaaaatcttatgagagaggcatattattttttacttagataagaaaactgtggctcaaaaagattaagcttaaaagtagtgtaattacctatgaatatatgtttttattactttaaacacaagatgtataggaaagacatacatatacactcactaacagaaatgtgcatatacatacatctacaatgcacctaaataaaaattttgtggcagaacagctctcagtcaaatttaaaagaaaataaagtttctattcaccactacataatgcaaattcactctcttctcccttcttcctgaytctccactgttaccctgaatcatcaacgtcctttgttgtagtctataattaaaaatattccaattatttatctgaacttcttatataaatattacttgaaagtttgcgactatttttttgaatt

SEQ ID NO: 611077 - DNA, 577 bp, Homo sapiens
tttatgtataatgatacaaaagtgataatatttaatttggcaaaatatcaagtatgaaattcacgtccatttatttatttaccttttattttacctgttttggagttagaataatcacattgttgaagaatgtctttaaaattattatttggatggtactcactggttttcctgctggaagaaaatgacattaataagcatttttaatgaacaagaatcaggctttagtcaagtttaccatgcttagtaaggtcatacagatatgtatgatgcaaaagaaatgtgcattcagtagaaattatccttggagtacccacacagccattctgttttccacattcagtacagtagtcaatacattatgtatttaatactttattataaaatagccwttgtgttagataattttgcccaattataggctaatataagtgtcccaagcacatttaggctaaactataatgtaggctaaactataattgttcaataggttaggtgtattagatgcatttttgacttatggtatgttcaagctatgatgagtttataaagatgtaacaccatcgttaagtccagg

SEQ ID NO: 611078 - DNA, 532 bp, Homo sapiens
atctatgtctttttggtttttggtagctaatttatttttattcctgaataatattctattgaatggatgtaccacagtttgtccattcatccactmaaggacatattatttgcttccaggttttggtaattatggataaagcagctataaccatttgcaataggatttctttgtgcatgcatgtttttacactttattttattttattttattttattttattttattttattttattttatgcatttagttgttctactagttatgtagtggttctcattccaatttctaatgacacatgatgtgcagcatgtttttacatacttcttatttaccttcatttatagatatatattccatgttggggtgtcattatatatgtggatacatatatgtgttaataggcccctagtgtatgattcttctcctatatgtgttatctttaaagtaacataaatacatattcacattctaactatactactttcagtctcgatcactaggagccatagttatctcatctataagaaat

SEQ ID NO: 611079 - DNA, 532 bp, Homo sapiens
atctatgtctttttggtttttggtagctaatttatttttattcctgaataatattctattgaatggatgtaccacagtttgtccattcatccactcaaggacatattatttgcttccaggttttggtaattatggataaagcagctataaccatttgcaataggatttctttgtgcatgcatgtttttasactttattttattttattttattttattttattttattttattttattttatgcatttagttgttctactagttatgtagtggttctcattccaatttctaatgacacatgatgtgcagcatgtttttacatacttcttatttaccttcatttatagatatatattccatgttggggtgtcattatatatgtggatacatatatgtgttaataggcccctagtgtatgattcttctcctatatgtgttatctttaaagtaacataaatacatattcacattctaactatactactttcagtctcgatcactaggagccatagttatctcatctataagaaat

SEQ ID NO: 611080 - DNA, 532 bp, Homo sapiens
atctatgtctttttggtttttggtagctaatttatttttattcctgaataatattctattgaatggatgtaccacagtttgtccattcatccactcaaggacatattatttgcttccaggttttggtaattatggataaagcagctataaccatttgcaataggatttctttgtgcatgcatgtttttacactttattttattttattttattttattttattttattttattttattttatgcatttagttgttctactagttatgtagtggttctcattccaatttctaatgacacatgatgtgcagcatgtttttacatacttcttatttaccttcatttatagatatatattccatgttggggtgtcattatatatgtggatacatatatgtgttaataggcccctagtgtatgattcttctcctatatgtgttatctttaaagtaacataaatacrtattcacattctaactatactactttcagtctcgatcactaggagccatagttatctcatctataagaaat

SEQ ID NO: 611081 - DNA, 532 bp, Homo sapiens
atctatgtctttttggtttttggtagctaatttatttttattcctgaataatattctattgaatggatgtaccacagtttgtccattcatccactcaaggacatattatttgcttccaggttttggtaattatggataaagcagctataaccatttgcaataggatttctttgtgcatgcatgtttttacactttattttattttattttattttattttattttattttattttattttatgcatttagttgttctactagttatgtagtggttctcattccaatttctaatgacacatgatgtgcagcatgtttttacatacttcttatttaccttcatttatagatatatattccatgttggggtgtcattatatatgtggatacatatatgtgttaataggcccctagtgtatgattcttctcctatatgtgttatctttaaagtaacataaatacatattcacattctaactatactactttcartctcgatcactaggagccatagttatctcatctataagaaat

SEQ ID NO: 611082 - DNA, 589 bp, Homo sapiens
ctacaaacctgtacagcatgtgacagtactgaatactgtaggtaactggaacacaatggtatttttctagctaaacatatctaaacatggaaacagtacactatattatggtataaaagtgtataaacatggtacacctttgtagggcacttaccctgaatggaactcrcagaaagttgctctggcttagtcagagaatgagtggtgagtgaatgtgaaggcctagcacatcactatatactatggtagatgttatagacattgtactcttaggctacactacatttgttttaaaaactaaagcaatttcactataacgttatgatggctatgacatcacaaggtgatagaaaatttttagctccattatacataatattttggtaccactgttgcatatgtggtccataattgaccaatatgttgttatacagtgcaaaactatatcataaaataaaaaagaaaatggaaaaggaaaagcaagttaaaaagtaaacagaacataggaaataatacacatcagagaggatatcagtaaaatagcagggaggaaaacaaagaaaaacaaagacacaaattaccaatttga

SEQ ID NO: 611083 - DNA, 589 bp, Homo sapiens
ctacaaacctgtacagcatgtgacagtactgaatactgtaggtaactggaacacaatggtatttttctagctaaacatatctaaacatggaaacagtacactatattatggtataaaagtgtataaacatggtacacctttgtagggcacttaccctgaatggaactcacagaaagttgctctggcttagtcagagaatgagtggtgagtgaatgtgaaggcctagcacatcactatatactatggtagatgttatagacattgtactcttaggctacactacatttgttttaaaaactraagcaatttcactataacgttatgatggctatgacatcacaaggtgatagaaaatttttagctccattatacataatattttggtaccactgttgcatatgtggtccataattgaccaatatgttgttatacagtgcaaaactatatcataaaataaaaaagaaaatggaaaaggaaaagcaagttaaaaagtaaacagaacataggaaataatacacatcagagaggatatcagtaaaatagcagggaggaaaacaaagaaaaacaaagacacaaattaccaatttga

SEQ ID NO: 611084 - DNA, 570 bp, Homo sapiens
aaaataaaataataaattttctgaatctattatagatgttatggcggtgtctgagtacctaacaaatggattgatttaggaaaaatacacatattttgaaagtgtttatacagtagtgttctgctctgtgctcttcagaaaaatagaaaaaataggatatatatatttgtatacatacacatatgtgtgtctgtttattatatatatakagagagagagaggagagagagagaaaaattatgaggaattggctaatgtgattacaaaggctgagaaaaccaaaatttgtgttgtgggccagctgccttaagccccaggaaagcctatggtgcagatggattccaagacagtttgttggagagaatttcctcttgcttggaaaggctagtctttttgttccgtttgggcatttaattgattacataatgcttatccacatgatgaagggaaacatgtttattcaaagttcaccagaactagttttaatattaatctcatccacaaataccctctaaattaacacataaaattaactatagggattagctactgtgatagacacagacaagt

SEQ ID NO: 611085 - DNA, 570 bp, Homo sapiens
aaaataaaataataaattttctgaatctattatagatgttatggcggtgtctgagtacctaacaaatggattgatttaggaaaaatacacatattttgaaagtgtttatacagtagtgttctgctctgtgctcttcagaaaaatagaaaaaataggatatatatatttgtatacatacacatatgtgtgtctgtttattatatatatagagagagagagaggagagagagagaaaaattatgaggaattggctaatgtgattacaaaggctgagaaaaccaaaatttgtgttgtgggccagctgccttaagccccaggaaagcctatggtgcagatggattccaagacagtttgttggagagaatttcctcttgcttggaaaggctagtctttttgttccgtttgggcatttaattgattacataatgcttatccacatgatgaagggaaacatgtttattcaaagttcaccagaacyagttttaatattaatctcatccacaaataccctctaaattaacacataaaattaactatagggattagctactgtgatagacacagacaagt

SEQ ID NO: 611086 - DNA, 599 bp, Homo sapiens
tatatctcattatgttctaacacccacttgctgggaatgtgaacatttctttctgtgcctacatcacattgtgctctttctccycctccatgctaagctattgaattcttaaatattacttcttctaggaaaacttttctcttcttttatcctccctaattgtgcaattaacaccacaaataactgtctcatagtcctctactatatgatcaatgtgttacattgtagtgcaatagattacttattcctttggtttgctcaaaataccacgtacatccagaaggtcacaaaccctgtttttgtaattgtatcttgagtaaagtgtattgtctgatttagatgaggtgcttatagcagacattcagtgctcactatttctgtgcttctccttattttcatatgtgtgtttgtggccatgtgtcaaaatcacacttaaactgaactgggaaaactctcttcatgacattgaatccctgagttactggatgataattggataacactaaacaccatctgacgtcgtgtaactaataaataaattttgttggactatgccactgaaattttatggtcaaaatgattacagcagcataatttgt

SEQ ID NO: 611087 - DNA, 599 bp, Homo sapiens
tatatctcattatgttctaacacccacttgctgggaatgtgaacatttctttctgtgcctacatcacattgtgctctttctccccctccatgctaagctattgaattcttaaatattacttcttctaggaaaacttttctcttcttttatcctccctaattgtgcaattaacaccacaaataactgtctcatagtcctctactatatgatcaatgtgttacattgtagtgcaatagattacttattcctttggtttsctcaaaataccacgtacatccagaaggtcacaaaccctgtttttgtaattgtatcttgagtaaagtgtattgtctgatttagatgaggtgcttatagcagacattcagtgctcactatttctgtgcttctccttattttcatatgtgtgtttgtggccatgtgtcaaaatcacacttaaactgaactgggaaaactctcttcatgacattgaatccctgagttactggatgataattggataacactaaacaccatctgacgtcgtgtaactaataaataaattttgttggactatgccactgaaattttatggtcaaaatgattacagcagcataatttgt

SEQ ID NO: 611088 - DNA, 599 bp, Homo sapiens
tatatctcattatgttctaacacccacttgctgggaatgtgaacatttctttctgtgcctacatcacattgtgctctttctccccctccatgctaagctattgaattcttaaatattacttcttctaggaaaacttttctcttcttttatcctccctaattgtgcaattaacaccacaaataactgtctcatagtcctctactatatgatcaatgtgttacattgtagtgcaatagattacttattcctttggtttgctcaaaataccacgtacatccagaaggtcacaaaccctgtttttgtaattgtatcttgagtaaagtgtattgtctgatttagatgaggtgcttatagcagacattcagtgctcactatttctgtgcttctccttattttcatatgtgtgtttgtggccatgtgtcaaaatcrcacttaaactgaactgggaaaactctcttcatgacattgaatccctgagttactggatgataattggataacactaaacaccatctgacgtcgtgtaactaataaataaattttgttggactatgccactgaaattttatggtcaaaatgattacagcagcataatttgt

SEQ ID NO: 611089 - DNA, 599 bp, Homo sapiens
tatatctcattatgttctaacacccacttgctgggaatgtgaacatttctttctgtgcctacatcacattgtgctctttctccccctccatgctaagctattgaattcttaaatattacttcttctaggaaaacttttctcttcttttatcctccctaattgtgcaattaacaccacaaataactgtctcatagtcctctactatatgatcaatgtgttacattgtagtgcaatagattacttattcctttggtttgctcaaaataccacgtacatccagaaggtcacaaaccctgtttttgtaattgtatcttgagtaaagtgtattgtctgatttagatgaggtgcttatagcagacattcagtgctcactatttctgtgcttctccttattttcatatgtgtgtttgtggccatgtgtcaaaatcacacttaaactgaactgggaaaactctcttcatgacattgaatccctgagttactggatgatarttggataacactaaacaccatctgacgtcgtgtaactaataaataaattttgttggactatgccactgaaattttatggtcaaaatgattacagcagcataatttgt

SEQ ID NO: 611090 - DNA, 537 bp, Homo sapiens
atgtacattaagtaaatgtgatagaataaggatcgtcctaaaacaaattttcagccccaagtgctttaaatgaggaattctaccaaaatttaataataaatwataccgaacacatgttcacatgtgtttatcacagcactattcacaatagcaaagacatggaatcaacctaaatgttcatcagtgatcgaatggataaagaaaatgtgatacatatacaccaatgaatactatgcaaccattagcaagagtaagatcatttcttttgcaggaacatggatggagctggacaccattattcttaacaaactaacacaggaacagaaaatcgaatactgcatgttctcacttgtaagtggaatctaatcaacgagtatgtatggacacaaggaaggtaacttttcatctccttttagattttttggacatcggggtctacttgagggtgaagagtaggaggaagttgaggatcaaaaaactacccattgggtagtatgcttattgcctgggtgataaaataatctgcataacaaaccc

SEQ ID NO: 611091 - DNA, 592 bp, Homo sapiens
tgccacaggcaaaatgatcttaccagaggtggaattcaatctcaggcacattgactggcaatccctggagaaagtaggtggctgcccaagaggcaggccaggccacatgcttccaaaactatctcygtaactatgcagaatgttaccactcatgcaaaattggatggagacagaaactgaaagccatgactttatatggctagaaatccaaaatattataaggaaatttatgcagagaaaaaataaaaataaaatgtgaggaaaggaagggccatagcaaaggatgtttgtcatctaagttgtgacgctcaaaacctgctgtgccatttttctgtttatggctttgtttcaacaaagttctggccttagtgttataggagaaaagacccatgtcagccctgtggcacaacaaaggggttaattaaaaatggacttaatcccaggtgctatatgtcacattttgtttatccattcatcaaccaatagatacttgggttgcttgcaccttttggctgttgtgaataataatgctatgaagaagggtatacaaatatgtgtttaaattgctgctttcaattattttgggtagagt

SEQ ID NO: 611092 - DNA, 537 bp, Homo sapiens
atgtacattaagtaaatgtgatagaataaggatcgtcctaaaacaaattttcagccccaagtgctttaaatgaggaattctaccaaaatttaataataaataataccgaacacatgttcacatgtgtttatcacagcactattcacaatagcaaagacatggaatcaacctaaatgttcatcagtgatcgaatggataaagaaaatgtgatacatatacaccaatgaatactatgcaaccattagcaagagtaagatcatttcttttgcaggaacatggatggagctggacaccattattcttaacaaactaacacaggaacagaaaatcgaatactgcatgttctcacttgtaagtggaatctaatcaacgagtatgtatggacacaaggaaggtaacttttyatctccttttagattttttggacatcggggtctacttgagggtgaagagtaggaggaagttgaggatcaaaaaactacccattgggtagtatgcttattgcctgggtgataaaataatctgcataacaaaccc

SEQ ID NO: 611093 - DNA, 517 bp, Homo sapiens
acaccaatgaatactatgcaaccattagcaagagtaagatcatttcttttgcaggaacatggatggagctggacaccattattcttaacaaactaacacaggaacagaaaatcgaatactgcatgttctcacttgtaagtggaatctaatcaacgagtatgtatggacacaaggaaggtaacttttcatctccttttagattttttggacatcrgggtctacttgagggtgaagagtaggaggaagttgaggatcaaaaaactacccattgggtagtatgcttattgcctgggtgataaaataatctgcataacaaacccccatgacacaggtttacctatgtaacactcctgcacttgtacccctgaagttaaaataaaagtaaaattaaaaaaaaaaattgaaaagaagggaacacttcccaactcattctattaaccagcattatgacaacaccaaaaccagatagatagatagatagatagatagatagatagatagatagacagacagatag

SEQ ID NO: 611094 - DNA, 574 bp, Homo sapiens
ctgacaggtacctgtaatcccagctactygggaggctgaggcaggagaatcgcttgagcctgtgaggtggaggttgcagtgagctgagatcgtgtcactgcactccagcctgggcaacagagtgagaccctgtctcaaaaaataaataaataaataattaaaatatctacagaacctgtgaaactggacattcttgcttgaaacaaaagatttttatgctttagagacctctttgtggaaaatttagaatctacttcttgatcaaccttgaacagacagcaactaatatataactagttttgttactgttatcgtttttgctgtttgctatgccctgggaattggaggtatttattgtgatggaatataggaagacattaggaagtagttatttgaattaggaattatgcttctaaattaattttgtaaataaaagtacaaaaatggagttgttattttcatgtatcttcaaatctatagaatgtttgtttactacgaagtgttttatttcttaaaggattcacattcttcccacttagaaacggtaagagtgagttccttgacctagatagaa

SEQ ID NO: 611095 - DNA, 498 bp, Homo sapiens
agcctggccaacaagatgaaaccccacgtctactaaaaatacaaaaattagctcggcgtgctgacaggtacctgtaatcccagctactcgggaggctgaggcaggagaatygcttgagcctgtgaggtggaggttgcagtgagctgagatcgtgtcactgcactccagcctgggcaacagagtgagaccctgtctcaaaaaataaataaataaataattaaaatatctacagaacctgtgaaactggacattcttgcttgaaacaaaagatttttatgctttagagacctctttgtggaaaatttagaatctacttcttgatcaaccttgaacagacagcaactaatatataactagttttgttactgttatcgtttttgctgtttgctatgccctgggaattggaggtatttattgtgatggaatataggaagacattaggaagtagttatttgaattaggaattatgcttctaaattaattttgtaaataaaagta

SEQ ID NO: 611096 - DNA, 574 bp, Homo sapiens
ctgacaggtacctgtaatcccagctactcgggaggctgaggcaggagaatcgctygagcctgtgaggtggaggttgcagtgagctgagatcgtgtcactgcactccagcctgggcaacagagtgagaccctgtctcaaaaaataaataaataaataattaaaatatctacagaacctgtgaaactggacattcttgcttgaaacaaaagatttttatgctttagagacctctttgtggaaaatttagaatctacttcttgatcaaccttgaacagacagcaactaatatataactagttttgttactgttatcgtttttgctgtttgctatgccctgggaattggaggtatttattgtgatggaatataggaagacattaggaagtagttatttgaattaggaattatgcttctaaattaattttgtaaataaaagtacaaaaatggagttgttattttcatgtatcttcaaatctatagaatgtttgtttactacgaagtgttttatttcttaaaggattcacattcttcccacttagaaacggtaagagtgagttccttgacctagatagaa

SEQ ID NO: 611097 - DNA, 498 bp, Homo sapiens
agcctggccaacaagatgaaaccccacgtctactaaaaatacaaaaattagctcggcgtgctgacaggtacctgtaatcccagctactcgggaggctgaggcaggagaatcgcttgagcctgtgaggtggaggttgcagtgagctgagatcgtgtcactgcactccagcctgggcaacagagtgagaccctgtctcaaaaaataaataaataaataattaaaatatctacagaacctgtgaaactggacattcttgcttraaacaaaagatttttatgctttagagacctctttgtggaaaatttagaatctacttcttgatcaaccttgaacagacagcaactaatatataactagttttgttactgttatcgtttttgctgtttgctatgccctgggaattggaggtatttattgtgatggaatataggaagacattaggaagtagttatttgaattaggaattatgcttctaaattaattttgtaaataaaagta

SEQ ID NO: 611098 - DNA, 574 bp, Homo sapiens
ctgacaggtacctgtaatcccagctactcgggaggctgaggcaggagaatcgcttgagcctgtgaggtggaggttgcagtgagctgagatcgtgtcactgcactccagcctgggcaacagagtgagaccctgtctcaaaaaataaataaataaataattaaaatatctacagaacctgtgaaactggacattcttgcttgaaacaaaagatttttatgctttagagacctctttgtggaaaatttagaatctacttcttgatcaaccttgaacagacagcaactaatatataactagttttgttactgttatcgtttttgctgtttgctrtgccctgggaattggaggtatttattgtgatggaatataggaagacattaggaagtagttatttgaattaggaattatgcttctaaattaattttgtaaataaaagtacaaaaatggagttgttattttcatgtatcttcaaatctatagaatgtttgtttactacgaagtgttttatttcttaaaggattcacattcttcccacttagaaacggtaagagtgagttccttgacctagatagaa

SEQ ID NO: 611099 - DNA, 498 bp, Homo sapiens
agcctggccaacaagatgaaaccccacgtctactaaaaatacaaaaattagctcggcgtgctgacaggtacctgtaatcccagctactcgggaggctgaggcaggagaatcgcttgagcctgtgaggtggaggttgcagtgagctgagatcgtgtcactgcactccagcctgggcaacagagtgagaccctgtctcaaaaaataaataaataaataattaaaatatctacagaacctgtgaaactggacattcttgcttgaaacaaaagatttttatgctttagagacctctttgtggaaaatttagaatctacttcttgatcaaccttgaacagacagcaactaatatataactagttttgttactgttatcgtttttgctgtttgctatgccctgggaattggaggtatttatygtgatggaatataggaagacattaggaagtagttatttgaattaggaattatgcttctaaattaattttgtaaataaaagta

SEQ ID NO: 611100 - DNA, 517 bp, Homo sapiens
acaccaatgaatactatgcaaccattagcaagagtaagatcatttcttttgcaggaacatggatggagctggacaccattattcttaacaaactaacacaggaacagaaaatcgaatactgcatgttctcacttgtaagtggaatctaatcaacgagtatgtatggacacaaggaaggtaacttttcatctccttttagattttttggacatcggggtctacttgagggtgaagagtaggaggaagttgaggatcaaaaaactacccattgggtagtatgcttattgcctgggtgataaaataatctgcataacaaacccccatgacacaggtttacctatgtaacactcctgcacttgtacccctgaagttaaaataaaagtaaaattaaaaaaaaaaattgaaaagaagggaacacttcccaactcattctattaaccagcattatgacaacaccaaaaccagatagatagatagatagatagatagatagatagatagatagayagacagatag

SEQ ID NO: 611101 - DNA, 615 bp, Homo sapiens
ttaattatatgtttaaaactaactaaaagaacagaatttttgtgtaacagaaagataaatgcttgaggatatggatactccattttacatgacatgattattacaatttgaatgcctgtattaaaacacctcatgtaccccataaatatatacacatactatatacacataaataaataaataatgtttaaaaatttaggtagcaagattgtgcactgaaggagaacaccaggaatagatactgtgtccataggcttccattttacaaatattgctgaaatgctctgagacagaagtataataatgttgtcaattaatatataaagtctgcaaatttagcatagattttcatttcttcatcttattttctacagcattcccaaaatatgcttaaaatatttgtgggctcttgattagaraagaaaacaattctgtcacacaattgttaatagtgattaatttttcattacaaataaaaagttactgttatttttatttttattttttaagaattatcaatttattcttacaatagctgaacacattgtatatgccttttatttctatattctttaatcagacaacttcaaaagatgagtatatatagattgaata

SEQ ID NO: 611102 - DNA, 575 bp, Homo sapiens
atagctaacatcataattaatagtaaaaattgaatgcttcctccctcttctaggaccaggaacaaggtaaagatattttaccttacctcttttattcaacgttgcactggtggaaataactagtataatatgaaagacaaatgtataaaatacgtccaattttgaaaggtagaagtaaaagctatctgtatttccatatcaaatscctatactccaggggaaaggagtttaccaaagccttataacaaacacacgggttaaggacacttactcaactccagtctttttagccttcctgtctcacctaagtgtgggaatagctaagaaaaaaacgtgtaaagaacatatcaaggggaaacaaccactacaagctggagaattaatcataacattataaaatgcattacttccctttactggtacatcaataaatccttagtatatcaacaggagattttagctgagaaagcagtactgtgcagactatatttaataagtagtttctaggtaaatgtaaagacaataggaataaaaaaaactcactagagaaaattggaacgtctggcatctacagg

SEQ ID NO: 611103 - DNA, 502 bp, Homo sapiens
tctgatgatctctcattaaatacatatatattaaagactactgtgtatttgtagaaaattaacccctttatttatttatttatttatttattaagagatggagttttcactcttgttgcccaggctgaagtgcagtggcgcgatctccactcactgcaacccccacctcccaggttcaagcaattctcctacctcagcctcccgagtagctgggwttacagacacaagccaccacgcctggctaattttttttttttttggatttttagtagagactgagtttcaccatgttggccaggctggtcttgaacttctgacctctggtgatccacccacctcaacctcccccaaaactgagattactggcatgagccaccgtgcccggcccctttattgttatgtaatacctcttttaatgttttatttcttgttttgaaatctactctgtctgaaatcagtgtagctaagccatccttttcttaaactagtgttatcatggcat

SEQ ID NO: 611104 - DNA, 486 bp, Homo sapiens
ttctttttgtttcttttttaggtttattttagccaacctgaggaaacaaaagcctactgttaggatattcatgggaaaatagggaagccttttttttcctttagtgaaatcctatgtgcctatagagctttttcacactttctagagaaggtaagcatctcttcctgagaaagagtggggataatatgtctgggctcaattctgcctgttgtagggaagggtgtgccggtgggtcaccttttgaggttaagaaygagtaataagaccttgaggattcttttttttttttttttttgagacagagtctcgctctgtcacccaggttggagtaaagtggcgtgatctcggctcactggaccctccgcctcccaggttcaagtagttctcccgcctcagcctcccaagtagctggaattacggagtcccccaccatgcctcgctaatttttgtatttttagtagagatggagtttcacattattggccg

SEQ ID NO: 611105 - DNA, 486 bp, Homo sapiens
ttctttttgtttcttttttaggtttattttagccaacctgaggaaacaaaagcctactgttaggatattcatgggaaaatagggaagccttttttttcctttagtgaaatcctatgtgcctatagagctttttcacactttctagagaaggtaagcatctcttcctgagaaagagtggggataatatgtctgggctcaattctgcctgttgtagggaagggtgtgccggtgggtcaccttttgaggttaagaacgagtaataagaccttgaggattcttttttttttttttttttgagacagagtctcgctctgtcacccaggttggagtaaagtggcgtgatctcggctcactggaccctccgcctcccaggttcaagyagttctcccgcctcagcctcccaagtagctggaattacggagtcccccaccatgcctcgctaatttttgtatttttagtagagatggagtttcacattattggccg

SEQ ID NO: 611106 - DNA, 486 bp, Homo sapiens
ttctttttgtttcttttttaggtttattttagccaacctgaggaaacaaaagcctactgttaggatattcatgggaaaatagggaagccttttttttcctttagtgaaatcctatgtgcctatagagctttttcacactttctagagaaggtaagcatctcttcctgagaaagagtggggataatatgtctgggctcaattctgcctgttgtagggaagggtgtgccggtgggtcaccttttgaggttaagaacgagtaataagaccttgaggattcttttttttttttttttttgagacagagtctcgctctgtcacccaggttggagtaaagtggcgtgatctcggctcactggaccctccgcctcccaggttcaagtagttctcccgcctcagcctcccaagtagctggaattacggagtcccccaccatgcctsgctaatttttgtatttttagtagagatggagtttcacattattggccg

SEQ ID NO: 611107 - DNA, 584 bp, Homo sapiens
agatcgcttgagcccaggaattcaagactagtctgggcaacatggcaaaaccccatctctacaaaaaatacaaaaattagccgtgtgtggtagcacgcmcctgtagtcccggctacctgggaggtggaggtgggaggatcacctcagcctggggaggttaaggctgtagtgagctgtgatcataccactgcactccagcctgcttggtagagtgagaccctgtctcaaaaaaataaataaaaattaaaaaggaagtgaccagttcattcatagttattaacacttctgcttgtgtgtcacttctactcgccttcacttggctgaagaaagtcatatggccaggcctgccagcaatgtggtagagaagtgtggttaattcttccatctggagatgctataagtcacgtgacaatgggggatataatcctctttcagggaggttagcgaataattgaaaacaatataatctaacataatggaagactatatttaactcaaaaaatttaatggcctgtgttctgattcagaaatagtttttagaattggttaaatctgcactttgggttttattttgaaaagattat

SEQ ID NO: 611108 - DNA, 440 bp, Homo sapiens
atgcaaatttcaaaggatcaaaatcacatagggtatgttcttttaccmcaatagaattaaattagaaatcaagactataaagcaatcaggaaaatccccaaatatgtgggaattaagcaaggtgtattctaaatagtacacaagtcaaaaaagaaaccagaggctgaggtgggaggattgcttcaggccaagaatttgagaccagactgggcaacatagagagattcccgtctttacaaaaaaaaattagctgagcatggtggcatacacctgtagtcccagctacttgggaggctgaggcgggaggatcacttgaggagttggaggctgcagtgagccatgactgcaccactgcattccagcctgggtgacagagtaagacccgaaaaaaaaaaaaaaaaagacaaagggaaggaaggaaggaaggaaggaaagaattc

SEQ ID NO: 611109 - DNA, 671 bp, Homo sapiens
gctgtggcagaagttttaggagcttccacttggccctttctccacaggtgagagaaccagaatcctgactatgatagtatcacatcagaagcatcagacttctataaatttcatgtagtctttagaatactcccattaataacacatccatacaaacatcactttagaaaaaatttaatgtaaccaaaattatgactgataaaatcagattttgtgattttatataatttttggaacatttacatcaataatacaccaataaatataactgaaagaagatctagtttcactatcatttgacaatsaccacatcagcttaatcatttagcatctctacaagataagaaatacatcctttgagagtctccaggggcccaactggaaaatcccaaagttaactttaggtcagtaagacttaatttagaattttgatcctggggaaacctgtcaaagatgtcaaaaagtttgaaatacttgatcaaaacagaatcacaggtcactgtaaaataatagtcatttacttaaccagagtgataattaaaagagttccaaagcaacatagaaagttaaatggatggaggctgggtgcagtggctcatgcctgtaatcccagcactttgggaggccaaggtgggcagatcacttgaggtcaggagtttgagaccagcctg

SEQ ID NO: 611110 - DNA, 671 bp, Homo sapiens
gctgtggcagaagttttaggagcttccacttggccctttctccacaggtgagagaaccagaatcctgactatgatagtatcacatcagaagcatcagacttctataaatttcatgtagtctttagaatactcccattaataacacatccatacaaacatcactttagaaaaaatttaatgtaaccaaaattatgactgataaaatcagattttgtgattttatataatttttggaacatttacatcaataatacaccaataaatataactgaaagaagatctagtttcactatcatttgacaatcaccacatcagcttaatcatttagcatctctacaagataagaaatacatcctttgagrgtctccaggggcccaactggaaaatcccaaagttaactttaggtcagtaagacttaatttagaattttgatcctggggaaacctgtcaaagatgtcaaaaagtttgaaatacttgatcaaaacagaatcacaggtcactgtaaaataatagtcatttacttaaccagagtgataattaaaagagttccaaagcaacatagaaagttaaatggatggaggctgggtgcagtggctcatgcctgtaatcccagcactttgggaggccaaggtgggcagatcacttgaggtcaggagtttgagaccagcctg

SEQ ID NO: 611111 - DNA, 671 bp, Homo sapiens
gctgtggcagaagttttaggagcttccacttggccctttctccacaggtgagagaaccagaatcctgactatgatagtatcacatcagaagcatcagacttctataaatttcatgtagtctttagaatactcccattaataacacatccatacaaacatcactttagaaaaaatttaatgtaaccaaaattatgactgataaaatcagattttgtgattttatataatttttggaacatttacatcaataatacaccaataaatataactgaaagaagatctagtttcactatcatttgacaatcaccacatcagcttaatcatttagcatctctacaagataagaaatacatcctttgagastctccaggggcccaactggaaaatcccaaagttaactttaggtcagtaagacttaatttagaattttgatcctggggaaacctgtcaaagatgtcaaaaagtttgaaatacttgatcaaaacagaatcacaggtcactgtaaaataatagtcatttacttaaccagagtgataattaaaagagttccaaagcaacatagaaagttaaatggatggaggctgggtgcagtggctcatgcctgtaatcccagcactttgggaggccaaggtgggcagatcacttgaggtcaggagtttgagaccagcctg

SEQ ID NO: 611112 - DNA, 571 bp, Homo sapiens
aggcgggctgacccatgtgccaagcggtgtggatggggcaggcaggacaagctctgaaaattgactgctggattcaccgtggagacctggggtgcagattcctgtgcccagggttgtcagatgcggcggygttgaatgaaggaaggtggtggtaccaccaggaaagacagcgactgtctcctcaaagccccagaggggacttagatgcctggcaaagagagttgatcctttaagggtcttatttaactctttgttcctcaggcaacttttcaggaaaaaccctgtgttaaaaaaaatagtaagagaaatacatccttaaacataaaaactcaaataggcccggctcactggctcacacctgtaatcccagcacttcactttgggaggccgaggcgggcagatcacctgaggttgggagctcgagaccagcctgaccaacatggagaaaccccgtctctactaaaagtacaaaaattagctgggcatggtggtgcatgcctgtaattccagctactcaggaggctgaggcaggagaatcgcttgaacctgggaggcggagattgcagtgagc

SEQ ID NO: 611113 - DNA, 567 bp, Homo sapiens
tattaaagtaattttttcaagattgggcattttattccagggaaagtatttgtaatagattctaatttatgaatttattcaaatttaatatctgtaggcaggatcatctctggatattaaatacttggaaagtttatattccatgaagtcagaagtctgacctctaagcatgggcctaccacttctcggcctggtgatcatgagtaaatcagttttccaacctgcaatttttaatttgcaaaatggagatratggtaatacctacctcataagactgtggtgaaaatttaataaacttatacatgtaataagccaaacatagctcctggcatatgtagacattcaataaatgctattttcaaagaaactaggggtgaataattttacatctttaaataaggaaagtttttccatgcaatggtgctaaagccagaaaccataaatgaaaatattactgtatttaactgcataaaacaaagtttttaaataacaaacacattgcaatcaaggataaaagataacacctggagaaaaagatttgcaacatatgtgccaggaaaagggtaa

SEQ ID NO: 611114 - DNA, 564 bp, Homo sapiens
aagacatgcattcaacttaagtgcccatcaaaggtagactggataaagaaaatgtggtacatgtacatcatggaatactacacagccttaaaaaagaataagatcacatcctttgcagcaacatggatgaagctggaggccattatcttaagtgaactaacacaggaacagaaaaccaaacaccgcatgttctcacttataagtgagagctaaacatttagtacacatggacacaaagaaggaagcaatagacaccagggcctacttgagggtgggaggagggtgagaatcaaaaaccacctattaggtactatgcttatcacctaagtgacaaaataatgtgtacatcaaaccccctcaatatgcaatttacctatagaayaacactacacctgtacccctgaaactaaaataaagtaaaaaaaaaaaaaaagagttgtcaattttctttattcctgtcattttcttagtacctccaaatctgtttattttttattttttatttatttatttatttttttgttttattttatttattattatttttttttttgagatgcagtc

SEQ ID NO: 611115 - DNA, 582 bp, Homo sapiens
ggtgtggtggcaggcgcctgtaatctcagttactcgggaggctgaggggggagaatcacgtgaacccgggaggcagaggttgcagtgagcggagattgcaccaccacactccagcccagacgacagtgtgagactccatcaaagaaagaaagagagagagacagacagagagagagagagagaaaaaaagaaagaaagaaagaaagaaagaaagaaagaaagaaagaaagaaagaaagaaagaragaaagagagagagaaagagagaaagagagaaaaggagtcaatgaactttttctgtaaaggacccaacagtgaacattttaattttaggcttttttaggctttgtgtgtcataaggaaactgcagcaattactcagatctgccactggggtacaaaagcagccaaagacaacatgtaaacaaataaacaatttcaatatacatttatttttcaaaaatgagcagtaggctggatttggcctaaaagctgtaatttgccaactgctaaactagaggataaaggtacatccggatgtttgcggtgattggtgagattttgattctcccctttagaaagaa

SEQ ID NO: 611116 - DNA, 519 bp, Homo sapiens
ctacatactgcataattccaactatataatgctcggaaaaagtcaaaacgatggmgatagtaaaaaggctgatagctgctgggggttagaggggctggaagcatgaataggcagagcacggaggatttttagggcagggaatctactctgtatggtagtataatggtgaatacatgtcattacacatttgtccaaactcatggaatgtacaacaccaagagtgaaccctaatgcaaactatggactttgggtgatgatatgtcaaaggattgaatttgattttttttaaaagaaattctggctaattccatcatcagggcaagtctcagaaggtaaaagaagatcataaaaaggcaatatgtaaattgaacattgtatctgtaagcacatggcccgtcagtggggcagggcactcccaggctggtgggggtgggccctcaagcaagccacttctttctttgctgttttacttcagtctgaatgtcagtttgagttctacggtttaagatctatgttaaa

SEQ ID NO: 611117 - DNA, 558 bp, Homo sapiens
agatcagcctgggaaacatggcaaaacctcgtcttcacaaaaaatatgaaaattagccaggcatggtggcatgyacctttagtcccagctactggggaggctgagactggaggatcacttgagcccagggaggtcaaggctgcagtgagccaagattgcaccattgcactccagcctgggtgacagcgtgaggccctgtctcaaaaaataaaaataaaagtaaatgtccaggccagacaaaagtgtttcaaagtggtgcaatgtgtctagtttggagtttgagagacagatcttagcagaatacaggtagtaatcaaggtcacagacatatatagggagtcagcggaatgagaagagaataaacagtcaaggaggaaagactgatgctatggtttccatgtatgtgtccctccaaaatttacatgttggaacttaaaccacaaggtgaaggtattaagaggtgaggccacctggaggtgattaagccatcagggctctgccctcatgagtgggatgagtgtctctataaaagggcttgagggagtgagttcacctctt

SEQ ID NO: 611118 - DNA, 558 bp, Homo sapiens
agatcagcctgggaaacatggcaaaacctcgtcttcacaaaaaatatgaaaattagccaggcatggtggcatgtacctttagtcccagctactggggaggctgagactggaggatcacttgagcccagggaggtcaaggctgcagtgagccaagattgcaccattgcactccagcctgggtgacagcgtgaggccctgtctcaaaaaayaaaaataaaagtaaatgtccaggccagacaaaagtgtttcaaagtggtgcaatgtgtctagtttggagtttgagagacagatcttagcagaatacaggtagtaatcaaggtcacagacatatatagggagtcagcggaatgagaagagaataaacagtcaaggaggaaagactgatgctatggtttccatgtatgtgtccctccaaaatttacatgttggaacttaaaccacaaggtgaaggtattaagaggtgaggccacctggaggtgattaagccatcagggctctgccctcatgagtgggatgagtgtctctataaaagggcttgagggagtgagttcacctctt

SEQ ID NO: 611119 - DNA, 359 bp, Homo sapiens
cactatcttggaagcagagagcaagtgctcaccagacatggactctgctgacaccttgattttggacttcctagcctccagaactgttgtctgtaaattatccaatacaaggtaaattttgttataacagcaaataaacgaagacaactagcgaccataaatagcaaaaaagaagagaaataaaaaggaaaagccaaagagatagaaaggaaataagaagagtgggaaaccatattaatacttaagatttgtggccaggtatggtggctcactcytgtaatcccagcactttgggaggccaaagtgggaggatcacttgagcccaggaattcaagaccagcctgggcaacatagcaaaa

SEQ ID NO: 611120 - DNA, 359 bp, Homo sapiens
cactatcttggaagcagagagcaagtgctcaccagacatggactctgctgacaccttgattttggacttcctagcctccagaactgttgtctgtaaattatccaatacaaggtaaattttgttataacagcaaataaacgaagacaactagcgaccataaatagcaaaaaagaagagaaataaaaaggaaaagccaaagagatagaaaggaaataagaagagtgggaaaccatattaatacttaagatttgtggccaggtatggtggctcactcttgtaatcccagcaytttgggaggccaaagtgggaggatcacttgagcccaggaattcaagaccagcctgggcaacatagcaaaa

SEQ ID NO: 611121 - DNA, 415 bp, Homo sapiens
taccacattttccagaaaagcaattacctgtctcctcctgacaccgaagccccatcctataaaaccctcaagggtatggtccaacttttacacatctccacatctstagaacctagaatggttttctgacacattgtatctatttggtccctcaatatatgttttttcaaaaaaattgaaatcaagggaagaaagacactcaaatgagaggaaatgatcagctctgtgaaatacttccaagaagccaagtcaaaacgttgtacttctaaacaagacagtcaatttgcaatggcaagagaacttagtaaactaaaagaggcagaaaccaaataacgctgggagtgaattgagacagtagggaaagaaaaagtagatttctcttctgagaactttgtcagtgaagagttacatcact

SEQ ID NO: 611122 - DNA, 415 bp, Homo sapiens
taccacattttccagaaaagcaattacctgtctcctcctgacaccgaagccccatcctataaaaccctcaagggtatggtccaacttttacacatctccacatctgtagaacctagaatgrttttctgacacattgtatctatttggtccctcaatatatgttttttcaaaaaaattgaaatcaagggaagaaagacactcaaatgagaggaaatgatcagctctgtgaaatacttccaagaagccaagtcaaaacgttgtacttctaaacaagacagtcaatttgcaatggcaagagaacttagtaaactaaaagaggcagaaaccaaataacgctgggagtgaattgagacagtagggaaagaaaaagtagatttctcttctgagaactttgtcagtgaagagttacatcact

SEQ ID NO: 611123 - DNA, 415 bp, Homo sapiens
taccacattttccagaaaagcaattacctgtctcctcctgacaccgaagccccatcctataaaaccctcaagggtatggtccaacttttacacatctccacatctgtagaacctagaatggttttctgacacattgtatctatttggtccctcaatatatgttttttcaaaaaaattgaaatcaagggaagaaagacactcaaatgagaggaaatgatcagctctgtgaaatacttccaagaagccaagtcaaaacrttgtacttctaaacaagacagtcaatttgcaatggcaagagaacttagtaaactaaaagaggcagaaaccaaataacgctgggagtgaattgagacagtagggaaagaaaaagtagatttctcttctgagaactttgtcagtgaagagttacatcact

SEQ ID NO: 611124 - DNA, 463 bp, Homo sapiens
ctctgcctcctgggttcaggcgattcttctgccttagcctcctgagtagctgggattgcaggtgtgcaccaccatgcccagctattttttgtatttttagtagacacggggtttcaccatgttggccaggatggtcactatctcttgacctcgtgatccgcccgcctcggcctcccaaagtgctgggattaccagcgtgagccactacacctggccttcatgcgctcttttattattgttaatagtttgycaatgaattcagctcctccagtgtttttcttagttttattgttctagattgttttcttagaatacaatatgctgtcttaacctataaataaaggattctcttcttttcagaaaaaaacagtaaatttttgaatttttaaaatatattttctattatcatatattgattacataattgttttttcctcatactcagtaacagcaattatgcgta

SEQ ID NO: 611125 - DNA, 581 bp, Homo sapiens
cgtttatcctagagtagaatatctggtgaaaatatcccttaaacataaagaagaaataaagacattctcagataagcaaaaggtgaggaattttattatgccagacctgtcctacaagaaatgctaaagggaatatttcaatcaaaaaaygaaattcatgaacaataaataatcacctgaagacacaaatctcactggtaatagtaagtacatagaaaaatacagaatattaaaacactgcaactgggttgtgtaagctaatatcctaagtagaaagactaaataatgaactaatgaaacataataactacagattttcaagacatagtctgtacaataagataaaaatagaaacaacaaaaagtttgaaagcagaagggaaaattaaggtggagagtatttatgagttttctttggcttgtttgtttatgcaaacagtgttaagttgttttctggttataagatagtatttgcaatccttatggcaagttgaaacaaaaaaattaaagaatctggaaattaaagaatatgcccctgaatgcacagtggatcaatgaagaaattaaaatattttgtgaaac

SEQ ID NO: 611126 - DNA, 581 bp, Homo sapiens
cgtttatcctagagtagaatatctggtgaaaatatcccttaaacataaagaagaaataaagacattctcagataagcaaaaggtgaggaattttattatgccagacctgtcctacaagaaatgctaaagggaatatttcaatcaaaaaatraaattcatgaacaataaataatcacctgaagacacaaatctcactggtaatagtaagtacatagaaaaatacagaatattaaaacactgcaactgggttgtgtaagctaatatcctaagtagaaagactaaataatgaactaatgaaacataataactacagattttcaagacatagtctgtacaataagataaaaatagaaacaacaaaaagtttgaaagcagaagggaaaattaaggtggagagtatttatgagttttctttggcttgtttgtttatgcaaacagtgttaagttgttttctggttataagatagtatttgcaatccttatggcaagttgaaacaaaaaaattaaagaatctggaaattaaagaatatgcccctgaatgcacagtggatcaatgaagaaattaaaatattttgtgaaac

SEQ ID NO: 611127 - DNA, 581 bp, Homo sapiens
cgtttatcctagagtagaatatctggtgaaaatatcccttaaacataaagaagaaataaagacattctcagataagcaaaaggtgaggaattttattatgccagacctgtcctacaagaaatgctaaagggaatatttcaatcaaaaaatgaaattcatgaacaataaataatcacctgaagacacaaatctcactggtaatagtaagtacatagaaaaatacagaatattaaaacactgcaactgggttgtgtaagctaatatcctaagtagaaagactaaataatgaactaatgaaacataataactacagattttcaagacatagtctgtacaataagataaaaatagaaacarcaaaaagtttgaaagcagaagggaaaattaaggtggagagtatttatgagttttctttggcttgtttgtttatgcaaacagtgttaagttgttttctggttataagatagtatttgcaatccttatggcaagttgaaacaaaaaaattaaagaatctggaaattaaagaatatgcccctgaatgcacagtggatcaatgaagaaattaaaatattttgtgaaac

SEQ ID NO: 611128 - DNA, 446 bp, Homo sapiens
ctggggagaaattcaagcctgctgcagaaatttgcaaaaataataaggagccaaagttaatcaccaagacaatggggaatatatctccggggcatgtcagaggccttcatgacacccccacccatcacaggcccagaagcccaggagggaaaaatggtttgatggacctggatcaggtccctgctgctctatgcagcctcaggactgtatcccagctgcttcagctccagctgtggctaaaaggggccaacaaacagcttggtccattgcctcaraggttgaaaccccaagccttggtggattacatgtagtcttgggcctgtgggtgcacacaagtcaagaattgaggtttgggaacctacaactaggttgcagaggatatatgaaaatacctggatgtccaggcagaagtttgctgcaggggggagcccacatggagaacctct

SEQ ID NO: 611129 - DNA, 446 bp, Homo sapiens
ctggggagaaattcaagcctgctgcagaaatttgcaaaaataataaggagccaaagttaatcaccaagacaatggggaatatatctccggggcatgtcagaggccttcatgacacccccacccatcacaggcccagaagcccaggagggaaaaatggtttgatggacctggatcaggtccctgctgctctatgcagcctcaggactgtatcccagctgcttcagctccagctgtggctaaaaggggccaacaaacagcttggtccattgcctcagaggktgaaaccccaagccttggtggattacatgtagtcttgggcctgtgggtgcacacaagtcaagaattgaggtttgggaacctacaactaggttgcagaggatatatgaaaatacctggatgtccaggcagaagtttgctgcaggggggagcccacatggagaacctct

SEQ ID NO: 611130 - DNA, 616 bp, Homo sapiens
tctgtctctcttctcccctactggtattttatctgtgatcaattcccaaatgaactgcttttgctgcaatcctatctcaagcttaccttctgggagaatctgcatcaagatagctgttttctggatgtagagagccacatccttgtaatgatgggggaattgtgttccaaatgtaggagtataaacactttctaccttgttcctcactgtaagaatttcaaactccatcttaggtcatagttgactggcacatgaaaatgaatgaagcatatgatagatgctcaaatgggtgttgttaaagacataatattgatgggcctattaggtgtaggaaatgtgtattccataccatagattttctgtgaatcaactttggataagtaggtcatctaaatttatattgtgccaccttttgtgtaggtaaaaacacatacacatacactggcatartgtacatgtaatgtatatagtgtatatgtaacagatatgcattgcttttgtaatatatgtattataaaatattgtatattgtatgctaaaattgtatattatgtaatgcatcatatattacaaatatgtgattaataatatatattataatatatgtaatgaatag

SEQ ID NO: 611131 - DNA, 541 bp, Homo sapiens
ccattatcttacagattagaaaactaagtcctagacaggttacaaagttaggcggcattcacagtcaaagttaggctgtgagtcagtgtgaaacgtaggataagattctcattcccagatcaggaattttttttctttaattcataaactacaagagcctctttcctccaaccaacaaataccacaggatgtgtacaggcagaattgtctgggcctggtgtggtgcttggggaaagcatttaataaacacttgctaaaaygagctgaatcaccagggagcagcacctcaattccttatttcactcaggttgaacctgaacaaggtgtgactctaaggtctaacctaacctgactacatcttgtgaggaatgcgcagccagaatacactagtcttaagtgagaaggcctgattttccaactaagagatctctgattcagagagcaggatcctggctttcctccagggctgatgggaggatgaggcagacactgcatagccccgagctatgtggtatcaggccagaggcaacaagctcagatc

SEQ ID NO: 611132 - DNA, 623 bp, Homo sapiens
tgaatttttaccaaatgcgagataaatagcagaaattgtgcataagaaagaatggattctcttccttatgctgagaacaggcctctctcccaacaatgaggagctcttcccctgaggaggagaaaggatcttgtttagggctttgacctccattgaaggacagtgttcagattgtcatcaayaagcagagagaacaaagaggtaccagaacagggagcaaggctctactaacccagtgagacaatgacacctagggcattaagtggctgaaatctactgaatcaaaaatcctcggctaaagggagacaggaatctgtattttagagaagttccccaagcaactcttacgtgaggccagattttaataccagggaattagtccagttcttcagttagctagaggagcttgggagtgggtgagaaacaaagctgggtttcagaacaattcagtgacaagcctagatgacccaggtggtgatataacagcaagactcggacccaaatcccatatgatgttgtgaggtgtggcaggtttgcttgtggagaaaccaaggcaggaaagcaagagtggtcgggccagagttttgcaaagcccaactgctgccaacaagaccctgaaacaa

SEQ ID NO: 611133 - DNA, 623 bp, Homo sapiens
tgaatttttaccaaatgcgagataaatagcagaaattgtgcataagaaagaatggattctcttccttatgctgagaacaggcctctctcccaacaatgaggagctcttcccctgaggaggagaaaggatcttgtttagggctttgacctccattgaaggacagtgttcagattgtcatcaataagcagagagaacaaagaggtaccagaacagggagcaaggctctactaacccagtgagacaatgacacctagggcattaagtggctgaaatctactgaatcaaaaatcctcggctaaagggagacaggaatctgtattttagagaagttccccaagcaactcttacgtgaggccagattttaataccagggaattagtccagttcttcagttagctagaggagcttgggagtgggtgagaaacaaagctgggttycagaacaattcagtgacaagcctagatgacccaggtggtgatataacagcaagactcggacccaaatcccatatgatgttgtgaggtgtggcaggtttgcttgtggagaaaccaaggcaggaaagcaagagtggtcgggccagagttttgcaaagcccaactgctgccaacaagaccctgaaacaa

SEQ ID NO: 611134 - DNA, 576 bp, Homo sapiens
ctgccaacaagaccctgaaacaaatggcaggcctccgagatgagatacacttgaagccccagagactgggatgctaaattggctggctccagatgcctcactttgatgactggaaggagaggtgagaaagggtgtaattacatagcttcacttaggtgtggctcaggacctgggccagattggagtctgtaggtgagagggcttgtaagacccaactgtaaggggaagcagcaggaaaaacaaggccaagaataactcacaggcaaaaaacaaaaagcttatccctgcgcttgccccttgcaaaacacatgtgcctattarccgctttcctcaatcccctttgcatcacatattttaaaaaatgggccagatgtcagggggagctggataccttcctgacaggaccctaatttgcagcataaccttggacaagtgagtctcgtagtcctctggaccttgagcttccttatctagcaactggagacagcaatgcttacccataatggtgatgtgagagtcaaatgagttaacactgagaaaccttaaatgctatacaaatataagggatggcattgt

SEQ ID NO: 611135 - DNA, 576 bp, Homo sapiens
ctgccaacaagaccctgaaacaaatggcaggcctccgagatgagatacacttgaagccccagagactgggatgctaaattggctggctccagatgcctcactttgatgactggaaggagaggtgagaaagggtgtaattacatagcttcacttaggtgtggctcaggacctgggccagattggagtctgtaggtgagagggcttgtaagacccaactgtaaggggaagcagcaggaaaaacaaggccaagaataactcacaggcaaaaaacaaaaagcttatccctgcgcttgccccttgcaaaacacatgtgcctattagccgctttcctcaatcccctttgcatcacatattttwaaaaatgggccagatgtcagggggagctggataccttcctgacaggaccctaatttgcagcataaccttggacaagtgagtctcgtagtcctctggaccttgagcttccttatctagcaactggagacagcaatgcttacccataatggtgatgtgagagtcaaatgagttaacactgagaaaccttaaatgctatacaaatataagggatggcattgt

SEQ ID NO: 611136 - DNA, 576 bp, Homo sapiens
ctgccaacaagaccctgaaacaaatggcaggcctccgagatgagatacacttgaagccccagagactgggatgctaaattggctggctccagatgcctcactttgatgactggaaggagaggtgagaaagggtgtaattacatagcttcacttaggtgtggctcaggacctgggccagattggagtctgtaggtgagagggcttgtaagacccaactgtaaggggaagcagcaggaaaaacaaggccaagaataactcacaggcaaaaaacaaaaagcttatccctgcgcttgccccttgcaaaacacatgtgcctattagccgctttcctcaatcccctttgcatcacatattttaaaaaatgggccagatgtcagggggagctggataccttcctgacaggaccctaatttgcagcataaccttggacaagtgagtctcgtagtcctctggaccttgagcttccttatctagcaactggagacagcaatgcttacccataatggtgatgtgagagtcaaatgagttaacacygagaaaccttaaatgctatacaaatataagggatggcattgt

SEQ ID NO: 611137 - DNA, 666 bp, Homo sapiens
taatgacatttgttcagttcccattcttcctgaccccttcrtagaactcatcattgagtcttcttctctcttaagtcctttgagccatattactctcattttccttttgcccattttaatttgttcttctctcttctttgctagctcttcaaagtcttctttctaggcctcaactaccctttactctgaataccctttcatgacctcaactggtcttttgtgtggttaattttcaagtcttcttctagctcttgccctcactaaaccttccctttaccatgtctaaagctgaagtcagaaatatggtatgtactggacagagcagtgagtagaatttagaagacctggtagtttcagtcacatctcaactactacctaactgggtaaactaaggcaagttacttctcattggctctcagattcttcatgaattacagggcttgactagaatcagtggctcttccacacacttccctcaataaatggcaattccaacttcgaattgttcaggccagaatgcttggggtcatcttcgactgctatttttttcatacaccatatcaatcaagcagcaaatcctattggctccatcttcaaaatatatcccagaatttgaccacttctcaccatctccacagctccaccctgtttcaatccactatgatt

SEQ ID NO: 611138 - DNA, 666 bp, Homo sapiens
taatgacatttgttcagttcccattcttcctgaccccttcgtagaactcatcattgagtcttcttctctcttaagtcctttgagccatattactctcattttccttttgcccattttaatttgttcttctctcttctttgctagctcttcaaagtcttctttctaggcctcaactaccctttactctgaataccctttcatgacctcaactggtcttttgtgtggttaattttcaagtcttcttctagctcttgccctcactaaaccttccctttaccatgtctaaagctgaagtcagaaatatggtatgtactggacagagcagtgagtagaatttagaagacctggtagtttcagtcacatctcaactactacctaactgggtaaactaaggcaagttacttctcattggctctcagattcttcatgaattacagggcttgactagaatcagtggctcttccacacacttccctcaataaatggcaattccaacttcgaatygttcaggccagaatgcttggggtcatcttcgactgctatttttttcatacaccatatcaatcaagcagcaaatcctattggctccatcttcaaaatatatcccagaatttgaccacttctcaccatctccacagctccaccctgtttcaatccactatgatt

SEQ ID NO: 611139 - DNA, 666 bp, Homo sapiens
taatgacatttgttcagttcccattcttcctgaccccttcgtagaactcatcattgagtcttcttctctcttaagtcctttgagccatattactctcattttccttttgcccattttaatttgttcttctctcttctttgctagctcttcaaagtcttctttctaggcctcaactaccctttactctgaataccctttcatgacctcaactggtcttttgtgtggttaattttcaagtcttcttctagctcttgccctcactaaaccttccctttaccatgtctaaagctgaagtcagaaatatggtatgtactggacagagcagtgagtagaatttagaagacctggtagtttcagtcacatctcaactactacctaactgggtaaactaaggcaagttacttctcattggctctcagattcttcatgaattacagggcttgactagaatcagtggctcttccacacacttccctcaataaatggcaattccaacttcgaattgttcaggccagaatgcttggggtcatcttygactgctatttttttcatacaccatatcaatcaagcagcaaatcctattggctccatcttcaaaatatatcccagaatttgaccacttctcaccatctccacagctccaccctgtttcaatccactatgatt

SEQ ID NO: 611140 - DNA, 601 bp, Homo sapiens
gggctggtgctgaaagagttaatggacaatgctcagagccccagagcgcagagctattctaagacaacacataacargaataccaagggtccatgaacccagagggagcaaaactgctgctgcctaacggcgcctgaaagcatgttgacacactgcatgtggttacacatgaaaggcaagtgaataggaaaagcagttttgaatcccaccccattctaattttggactggctctgggcacctactggaggactgggccacaccccagtcactctgtaaaatgacccttcagttccttcactctctctattctgtggcctcagttaaccccttctctgccttcttaagggccataagagacatcagtaaaagaggactatcaaggaattatcaagatccagaagtaaacctaagtgattggggtcatcctgtaacgagaagattcccagtctggagtcagatgatccccactagtatctaccatccccaagcatgtgatctgaagccttcaacagccaggttcataaatgcaaaagagagcagtttctgtaagtgtgaggcttcaagaccccaaaccaccttgcatcagaatcacctggaat

SEQ ID NO: 611141 - DNA, 601 bp, Homo sapiens
gggctggtgctgaaagagttaatggacaatgctcagagccccagagcgcagagctattctaagacaacacataacaagaataccaagggtccatgaacccagagggagcaaaactgctgctgcctaayggcgcctgaaagcatgttgacacactgcatgtggttacacatgaaaggcaagtgaataggaaaagcagttttgaatcccaccccattctaattttggactggctctgggcacctactggaggactgggccacaccccagtcactctgtaaaatgacccttcagttccttcactctctctattctgtggcctcagttaaccccttctctgccttcttaagggccataagagacatcagtaaaagaggactatcaaggaattatcaagatccagaagtaaacctaagtgattggggtcatcctgtaacgagaagattcccagtctggagtcagatgatccccactagtatctaccatccccaagcatgtgatctgaagccttcaacagccaggttcataaatgcaaaagagagcagtttctgtaagtgtgaggcttcaagaccccaaaccaccttgcatcagaatcacctggaat

SEQ ID NO: 611142 - DNA, 601 bp, Homo sapiens
gggctggtgctgaaagagttaatggacaatgctcagagccccagagcgcagagctattctaagacaacacataacaagaataccaagggtccatgaacccagagggagcaaaactgctgctgcctaacggcgcctgaaagcatgttgacacactgcatgtggttacacatgaaaggcaagtgaataggaaaagcagttttgaatcccaccccattctaattttggactggctctgggcacctactggaggactgggccacaccccagtcactctgtaaaatgacccttcagttccttcactctctctattctgtggcctcagttaaccccttctctgccttcttaagggccrtaagagacatcagtaaaagaggactatcaaggaattatcaagatccagaagtaaacctaagtgattggggtcatcctgtaacgagaagattcccagtctggagtcagatgatccccactagtatctaccatccccaagcatgtgatctgaagccttcaacagccaggttcataaatgcaaaagagagcagtttctgtaagtgtgaggcttcaagaccccaaaccaccttgcatcagaatcacctggaat

SEQ ID NO: 611143 - DNA, 601 bp, Homo sapiens
gggctggtgctgaaagagttaatggacaatgctcagagccccagagcgcagagctattctaagacaacacataacaagaataccaagggtccatgaacccagagggagcaaaactgctgctgcctaacggcgcctgaaagcatgttgacacactgcatgtggttacacatgaaaggcaagtgaataggaaaagcagttttgaatcccaccccattctaattttggactggctctgggcacctactggaggactgggccacaccccagtcactctgtaaaatgacccttcagttccttcactctctctattctgtggcctcagttaaccccttctctgccttcttaagggccataagagacatcagtaaaagaggactatcaaggaattatcaagatccagaagtaaacctaagtgattggggtcatcctgtaacgagaagattcccagtctggagtcagatgatccccactagtatctaccatccccaagcatgtgatctgaagccttcaacagccaggttcataaatgcaaaagagagcagtttctgtaagtgtgaggcttcaagaccccaaaycaccttgcatcagaatcacctggaat

SEQ ID NO: 611144 - DNA, 524 bp, Homo sapiens
gtgctggttttttaagcatagactccttttttaaaataaaaatcttgcatagagcctcaatatatgaaacagatcaaagcagtatttttattggtataaatctgcttttaaagtacaaatttatagagtacttattatactgtcagtcaatgagaacaatgaggctgttttcatgaactaaaaatattgagatcaggattatgaatcagttatagtttkatattcatttcagcatctggttttggtttaggtagtcagtccaatatcaagaaaattctgattagcatagataagttattgtaatcttgagctttaaattgatttagatggaaaaaagaagatatttttgttttaaagttgagtcactatcatcacctagcagctattccccttcataaatattaattggataagccccaacatgtataataggcatcgcaacaactgatgatgagatggtatgatattaagcatgttgattttcgctacccaaccacggtctaacatgaacccagcctaggccc

SEQ ID NO: 611145 - DNA, 524 bp, Homo sapiens
gtgctggttttttaagcatagactccttttttaaaataaaaatcttgcatagagcctcaatatatgaaacagatcaaagcagtatttttattggtataaatctgcttttaaagtacaaatttatagagtacttattatactgtcagtcaatgagaacaatgaggctgttttcatgaactaaaaatattgagatcaggattatgaatcagttatagttttatattcrtttcagcatctggttttggtttaggtagtcagtccaatatcaagaaaattctgattagcatagataagttattgtaatcttgagctttaaattgatttagatggaaaaaagaagatatttttgttttaaagttgagtcactatcatcacctagcagctattccccttcataaatattaattggataagccccaacatgtataataggcatcgcaacaactgatgatgagatggtatgatattaagcatgttgattttcgctacccaaccacggtctaacatgaacccagcctaggccc

SEQ ID NO: 611146 - DNA, 586 bp, Homo sapiens
ccctggcagctgcctggctgcagtggaataacagcagttacaacttaactagaggcagaggatggaaagacattaaattcagttgggagggaagagcaaatggaagctagacaaaagcggctcattaggackctgcacgggcatgggctctctgggagatgctgctggtctcaccaggctgcccttgaacctgtaaaccttcctgactagctctatgtagaccctgttgatgagctctatgcctataagtctaatgaacagaagtaacacggcccacagagtgtatgagtgtgggtggagggggtgtgggcagggggtagaatctgggagagaaaagttacccttcaaaaaacttttacctgtttttggtaatttccctttcctctccattcttactacctctacccctattcataccctcaccgtctgcttcactgtcctaaactgtgactttaattatggcactttcctgttgaagaacctaaaatacctctcattttttttccccaaggtaaaatccaccttcctcagttttgaaatttaaaaaatgcttctatttcactaagtatgcttactatacgtcagt

SEQ ID NO: 611147 - DNA, 586 bp, Homo sapiens
ccctggcagctgcctggctgcagtggaataacagcagttacaacttaactagaggcagaggatggaaagacattaaattcagttgggagggaagagcaaatggaagctagacaaaagcggctcattaggactctgcacgggcatgggctctctgggagatgctgctggtctcaccaggctgcccttgaacctgtaaaccttcctgactagctctatgtagaccctgttgatgagctctatgcctataagtctaatgaacagaagtaacacggcccacagagtgtatgagtgtgggtggagggggtgtgggcagggggtagaatctgggagagaaaagttacccttcaaaaaacttttacctgtttttggtaatttccctttcctctccattcttactacctctacccctattcataccctcaccgtcwgcttcactgtcctaaactgtgactttaattatggcactttcctgttgaagaacctaaaatacctctcattttttttccccaaggtaaaatccaccttcctcagttttgaaatttaaaaaatgcttctatttcactaagtatgcttactatacgtcagt

SEQ ID NO: 611148 - DNA, 626 bp, Homo sapiens
aatcagctatatggccataagcaagctacttaatccttctgggcctcaaatgaggataacaccagccacacagkttgttgtaggctaacaggcaatatatttacagatatttggtaccatgtagacactttaaaaaaatactaatatagctccaaatccactgacctctgcccttcagctcccagaatgtccttttccttaaatgtttcctatgcctctcacctgttggaattggaccagatcttcaagatccagattaaattcttagcctctgggaagccagccaaccctgcaatcctagactccagtgaccctggcctctacttagaaacacactaatctacagctttcatatgacaaggaatacgcttcttcattctatgacttgccatgtcatatcaccccaaccagactagcttctcactcttctttacatccctcagcattaggccttgctcacagcaggcatttaataaatttcagttgactgattgataccacaaatacagattccagcctctcaggaaataaaacatttaggctgaatactgacctaagtcaagtgggtagatggggccagtgaagccatttgttttgcttactctatggccaaagggaggctggga

SEQ ID NO: 611149 - DNA, 626 bp, Homo sapiens
aatcagctatatggccataagcaagctacttaatccttctgggcctcaaatgaggataacaccagccacacagtttgttgtaggctaacaggcaatatatttacagatatttggtaccatgtagacactttaaaaaaatactaatatagctccaaatccactgacctctgcccttcagctcccagaatgtccttttccttaaatgtttcctatgcctctcacctgttggaattggaccagatcttcaagatccarattaaattcttagcctctgggaagccagccaaccctgcaatcctagactccagtgaccctggcctctacttagaaacacactaatctacagctttcatatgacaaggaatacgcttcttcattctatgacttgccatgtcatatcaccccaaccagactagcttctcactcttctttacatccctcagcattaggccttgctcacagcaggcatttaataaatttcagttgactgattgataccacaaatacagattccagcctctcaggaaataaaacatttaggctgaatactgacctaagtcaagtgggtagatggggccagtgaagccatttgttttgcttactctatggccaaagggaggctggga

SEQ ID NO: 611150 - DNA, 626 bp, Homo sapiens
aatcagctatatggccataagcaagctacttaatccttctgggcctcaaatgaggataacaccagccacacagtttgttgtaggctaacaggcaatatatttacagatatttggtaccatgtagacactttaaaaaaatactaatatagctccaaatccactgacctctgcccttcagctcccagaatgtccttttccttaaatgtttcctatgcctctcacctgttggaattggaccagatcttcaagatccagattaaattcttagcctctgggaagccagccaaccctgcaatcctagactccagtgaccctggcctctacttagaamcacactaatctacagctttcatatgacaaggaatacgcttcttcattctatgacttgccatgtcatatcaccccaaccagactagcttctcactcttctttacatccctcagcattaggccttgctcacagcaggcatttaataaatttcagttgactgattgataccacaaatacagattccagcctctcaggaaataaaacatttaggctgaatactgacctaagtcaagtgggtagatggggccagtgaagccatttgttttgcttactctatggccaaagggaggctggga

SEQ ID NO: 611151 - DNA, 626 bp, Homo sapiens
aatcagctatatggccataagcaagctacttaatccttctgggcctcaaatgaggataacaccagccacacagtttgttgtaggctaacaggcaatatatttacagatatttggtaccatgtagacactttaaaaaaatactaatatagctccaaatccactgacctctgcccttcagctcccagaatgtccttttccttaaatgtttcctatgcctctcacctgttggaattggaccagatcttcaagatccagattaaattcttagcctctgggaagccagccaaccctgcaatcctagactccagtgaccctggcctctacttagaaacacactaatctrcagctttcatatgacaaggaatacgcttcttcattctatgacttgccatgtcatatcaccccaaccagactagcttctcactcttctttacatccctcagcattaggccttgctcacagcaggcatttaataaatttcagttgactgattgataccacaaatacagattccagcctctcaggaaataaaacatttaggctgaatactgacctaagtcaagtgggtagatggggccagtgaagccatttgttttgcttactctatggccaaagggaggctggga

SEQ ID NO: 611152 - DNA, 610 bp, Homo sapiens
agccctgggtttataccttgcaaatggttcctttcccaaggctactattaattcagctcagaaaggaagaaaggaatgccaattcaaatattttttttctccrcaagtatgtggtagggaatgactagtggaaagcctatgaagtgggccaataagatattctttcttttattttttctttccaacttttattttaggttcaaggggggtatatgtgcaagtttgttacatgggtaaattgcatgtcatgggggtctggtgtacagataattttgtcacccaggtaatcaacataatatctaataggattttaaaaattgtgtcattgctccacccaagaacctctgtgactagaaatatctctgtacctttttaaagagtcttcctgagtcctcgctgacttgtacaaatcgaggaatgatattattcaggtagatgtcactcagggtggtatggtccctgctttcccgcttcacctggtttaagaggagattccagcagttgactggagagagaacattctgatccttcctgtgaagaaacatcaaggaaaagaagtcattgttgatacgcagccagggcaacatctacaactatagtccgtgtccta

SEQ ID NO: 611153 - DNA, 610 bp, Homo sapiens
agccctgggtttataccttgcaaatggttcctttcccaaggctactattaattcagctcagaaaggaagaaaggaatgccaattcaaatattttttttctccgcaagtatgtggtagggaatgactagtggaaagcctatgaagtgggccaataagatattctttcttttattttttctttccaacttttattttaggttcaaggggggtatatgtgcaagtttgttacatgggtaaattgcatgtcatgggggtctggtgtacagataattttgtcacccaggtaatcaacataatatctaataggattttaaaaattgtgtcattgctccacccaagaacctctgtgactagaaatatctctgtacctttttaaagagtcttcctgagtcctcgctgacttgtacaaatcgaggaatgatattattcaggtagatgtcactcagggtggtatggtccctgctttcccrcttcacctggtttaagaggagattccagcagttgactggagagagaacattctgatccttcctgtgaagaaacatcaaggaaaagaagtcattgttgatacgcagccagggcaacatctacaactatagtccgtgtccta

SEQ ID NO: 611154 - DNA, 610 bp, Homo sapiens
agccctgggtttataccttgcaaatggttcctttcccaaggctactattaattcagctcagaaaggaagaaaggaatgccaattcaaatattttttttctccgcaagtatgtggtagggaatgactagtggaaagcctatgaagtgggccaataagatattctttcttttattttttctttccaacttttattttaggttcaaggggggtatatgtgcaagtttgttacatgggtaaattgcatgtcatgggggtctggtgtacagataattttgtcacccaggtaatcaacataatatctaataggattttaaaaattgtgtcattgctccacccaagaacctctgtgactagaaatatctctgtacctttttaaagagtcttcctgagtcctcgctgacttgtacaaatcgaggaatgatattattcaggtagatgtcactcagggtggtatggtccctgctttcccgcttcacctggtttaagaggagattccagcagttgactggagagagaacattctgatccttcctgtgaagaaacatcaaggaaaagaagtcattgttgatacrcagccagggcaacatctacaactatagtccgtgtccta

SEQ ID NO: 611155 - DNA, 605 bp, Homo sapiens
acccaacctaacgcagtatgagtggctgaaacccagccagggtaagaaagtggcctggaaaagggtgagatgaatccatgtggactgaattcagccctggccaacctgctgcatcccaagttgaatagtttccacgtccctgagatgggtctgttcagagttgctagctggcagctgctctcctggcagtacaggaagacaaattcatggcatagctagcccaacagctgctacagctccgggggaggtgatgagtgcccrctgagatgttctgggcagagaatgaactattctgggaccagtcctagagtcagcaaaatcaaggctacagttcaccaactgaatgaaaatacagtactattgtcactccagagacccaggaaaccaagagcactttctctgtcccagcttctttgaattccattgattcttgtcctcacacttggccccatcttgtctatttccaagggtatgacctcagtttcagcccacattaacctcaccactggactcctttcttaacaggtcctcctccttccagtctctctgctccaattgatcatatgcatcgttgccatagttacccttggaaagcacagccataa

SEQ ID NO: 611156 - DNA, 605 bp, Homo sapiens
acccaacctaacgcagtatgagtggctgaaacccagccagggtaagaaagtggcctggaaaagggtgagatgaatccatgtggactgaattcagccctggccaacctgctgcatcccaagttgaatagtttccacgtccctgagatgggtctgttcagagttgctagctggcagctgctctcctggcagtacaggaagacaaattcatggcatagctagcccaacagctgctacagctccgggggaggtgatgagtgcccgctgagatgttctgggcagagaatgaactattctgggaccagtcctagagtcagcaaaatcaaggctacagttcaccractgaatgaaaatacagtactattgtcactccagagacccaggaaaccaagagcactttctctgtcccagcttctttgaattccattgattcttgtcctcacacttggccccatcttgtctatttccaagggtatgacctcagtttcagcccacattaacctcaccactggactcctttcttaacaggtcctcctccttccagtctctctgctccaattgatcatatgcatcgttgccatagttacccttggaaagcacagccataa

SEQ ID NO: 611157 - DNA, 494 bp, Homo sapiens
taaactgcaggtaagactgtaaagtggtgcagccatgttgaaaaacactcttgcacttcctcaaataattaaacgtggttaccacataatccakcaattccactacaaggtgtatacccaaaagaaatgaaaacacatgtccacctgtatataagtttatatacagattgttatagcagcattattcataatagtaaaaaaagctggaaacaacacaaatgtcagtcaatggatgaataaacaaaatgttgtagagctagacaatgggatattaattcattcttaataaaaagtgaagcactgatatgtgctacaatatggatgaaccttgaaaacatcatgccaagttaaataagtccatcacaaaagactacatactgtatgattccattcttatgaatgtccagaatagggatctaaagagacaaaaaatagaataattgttgcttagggctaggtatggggaatagggacggggacggggtatagagggg

SEQ ID NO: 611158 - DNA, 499 bp, Homo sapiens
tgtattagaatggccaaatattaaaaactgacaataccaattcttggtgaggctgtaaaacaacaataactctcatccattgctggtggggaatacaaaatgatacaaccactttagaaagtttggcagttgcttacaaagctgaacatagttttactatacagttcagtagtcatgctcctatgtatttactcaactgatttgaaaacttgcatccacacaaaaacytgcatttcaatgtctatagcagctttactcataatcacccaaaactggaaacaagcaagatgtccttcaataggagaatggataaacatactgtaatatatccatacaggtggaatattatttagtaataaaatgaatgagccaagaaaccatgcaaagatatgcatgaatattaaataaatatttctaactgaaagaagccagcctgaaggctatactgtatgattctatttatgtgacattctgaaaaaggcaaaattgtagagataac

SEQ ID NO: 611159 - DNA, 499 bp, Homo sapiens
tgtattagaatggccaaatattaaaaactgacaataccaattcttggtgaggctgtaaaacaacaataactctcatccattgctggtggggaatacaaaatgatacaaccactttagaaagtttggcagttgcttacaaagctgaacatagttttactatacagttcagtagtcatgctcctatgtatttactcaactgatttgaaaacttgcatccacacaaaaacctgcatttcaatgtctatagcagctttactcataatcacccaaaactggaaacaagcaagatgtcyttcaataggagaatggataaacatactgtaatatatccatacaggtggaatattatttagtaataaaatgaatgagccaagaaaccatgcaaagatatgcatgaatattaaataaatatttctaactgaaagaagccagcctgaaggctatactgtatgattctatttatgtgacattctgaaaaaggcaaaattgtagagataac

SEQ ID NO: 611160 - DNA, 499 bp, Homo sapiens
tgtattagaatggccaaatattaaaaactgacaataccaattcttggtgaggctgtaaaacaacaataactctcatccattgctggtggggaatacaaaatgatacaaccactttagaaagtttggcagttgcttacaaagctgaacatagttttactatacagttcagtagtcatgctcctatgtatttactcaactgatttgaaaacttgcatccacacaaaaacctgcatttcaatgtctatagcagctttactcataatcacccaaaactggaaacaagcaagatgtccttcaataggagaatggataaacatactgtaatatatccatacaggtggaatattatttagtaataaaatgaatgagccaagaaaccatgcaaagatatgcatgaatattaaataaatatttctaactgaaagaagccagcytgaaggctatactgtatgattctatttatgtgacattctgaaaaaggcaaaattgtagagataac

SEQ ID NO: 611161 - DNA, 499 bp, Homo sapiens
aaaaaaaaaaaaaaattaaaaaacagaggctgaactttctaacatagcagcttaccattgaaggagcctgctcctaagtgtggtgagctgtcatctgagctatgtaagcatcacgtaggcaagaggttctcaatagagagcagttctcctcttgggacatttgtcagtgtctagggtcatatttggttatcacaactggggaaaggctgctactagcatctagtgtgtagaggccagggatgataggaatcacacacagacagcaccccctcccccagaacaataaagaactatctggcccaaatggcaatagttccaaggcygagaaactctaacataggcaaacatttgctacaaaaagaaaaactactaaaatcccctctttctctgagacttctatgattggagaatgcatgctcaattattaaaatagcatgctgactatatcaggtgattggccctttgcatatagccttgaatacatttttaaagattgcaa

SEQ ID NO: 611162 - DNA, 499 bp, Homo sapiens
aaaaaaaaaaaaaaattaaaaaacagaggctgaactttctaacatagcagcttaccattgaaggagcctgctcctaagtgtggtgagctgtcatctgagctatgtaagcatcacgtaggcaagaggttctcaatagagagcagttctcctcttgggacatttgtcagtgtctagggtcatatttggttatcacaactggggaaaggctgctactagcatctagtgtgtagaggccagggatgataggaatcacacacagacagcaccccctcccccagaacaataaagaactatctggcccaaatggcaatagttccaaggctgagaaactctaacataggcaaacatttgctacaraaagaaaaactactaaaatcccctctttctctgagacttctatgattggagaatgcatgctcaattattaaaatagcatgctgactatatcaggtgattggccctttgcatatagccttgaatacatttttaaagattgcaa

SEQ ID NO: 611163 - DNA, 556 bp, Homo sapiens
aagcaaaaggaaggaagaaagctctctggtggagagaggggtctcgaaaaaatgggttgcagaactgcagtaaaatgcaaggtttttatagaggagctattgggggtcagtgtctgatttacatagggcatgtaatactggttagggctgggtgtgtcatttgcataaggtgagaatttttggcagtcgccaccccaaacttttagtgcacatgtgggctccttaacctaagttactccatgttgcttatctcttcctactgcacatgtgttaagggccaggggcagaaccctccaaggtagacatgcctgttcccgggtagctcttcttattagtgctactacaagtaccccactgtgcaagcctcctcatctgagtatttccaagaaragaatggaatgtgctcactgggcccactgtatgtcagtgaaacatgttgattatacaggaggcccctttccatgttagaattcgccttccttatctgtgtttgcagccctgatccttcaggctgcctttgttagaaagaaatgttttgagaggccgaggcaggtgg

SEQ ID NO: 611164 - DNA, 643 bp, Homo sapiens
taggatgcttaatcagctgtctttactgttcaggccaccaggcagaggtgagaggagagccggtccctctgagatcaaattccagaaactgctgcagtggtacattttgttcacacaacaattaaactggttaaacaatcgcctgaccctgggattgctggcttggagccccgggtttgggtttcttatctaacaggagcctacaacaggagagtcagctaggatgccttaggcctggtaaggggacattttccttctttatcttaaaggcccagcatctcactggtgaatctgatctggccaaagctaagtggaatcagggcacttcctcggagtccttcacgatgcaggtttgggctaaaggcttggaatcattactgcacagattcccctaagtgaatggttctcaacctggctgcccatcggaatcttctggggaccctttaatgctctccgatgcccaggctgcagscccgaccaattacatcagcatctctgggagagagacacaggcatcagtgtgccttcacgaagaccactttagagaaggttaaacattttcaaatgagttttgctcagacaaaaggtgagagtatgactaagattcttcctcattggcaaatcaggccaagaattactgggg

SEQ ID NO: 611165 - DNA, 603 bp, Homo sapiens
gtgggcaacatagtgagacctcttctctacaaaaaaacataaaaattagctgggcatggtggcacgtgcccgtagtcccagctacctgggagactgaagtgggaggatggtttgagcctgggagattgaggctgcagtgagattgcacctttgcactccagtctgggttgacaaagcgaccctgtgtcaaaacaaaataaaacaaaaaccccaaaacattatttttgcctttgtaattgaacagcattctgtggggagatattctgaaatgacaccaacatattgttcctcacagaccctcactcgttagccttagcatctgtagarcactctgcctgaatcagcttccactgtggtgatggcctattgagattttctatttctatcagtccttcttcatttattagttggcattctactgtaagaagcattttcctttctccctattcattcaataactcactcactcactcattcattcatgtaagtatgaattcattgatttcttttcatccaatgggttgtatccactgacatcactattttcatactcaaatcctcccagatttggctagtaggagccccttcaagatagatactgtg

SEQ ID NO: 611166 - DNA, 603 bp, Homo sapiens
gtgggcaacatagtgagacctcttctctacaaaaaaacataaaaattagctgggcatggtggcacgtgcccgtagtcccagctacctgggagactgaagtgggaggatggtttgagcctgggagattgaggctgcagtgagattgcacctttgcactccagtctgggttgacaaagcgaccctgtgtcaaaacaaaataaaacaaaaaccccaaaacattatttttgcctttgtaattgaacagcattctgtggggagatattctgaaatgacaccaacatattgttcctcacagaccctcactcgttagccttagcatctgtagagcactctgcctgaatcagcttccactgtggtgatggcctattgagattttctatttctatcagtccttcttcatttattagttggcattctactgtaagaagcattttcctttctccctattcattcaataactcactcactcactcattcattcatgtaagtatgaattcattgatttcttttcatccaatgggttgtatccactgacatcactwttttcatactcaaatcctcccagatttggctagtaggagccccttcaagatagatactgtg

SEQ ID NO: 611167 - DNA, 548 bp, Homo sapiens
ggaaaaaaagaccaggcacctgagtgatgaaatagctcccctcagtgtcctttccatggtattacagaaggactcgggacatctgttttcccgcggaagcaaaggmtcgtctttctgatgattgctacgtagtgagagtccatgggaggcacttcttggtgaaccttccaatcacaaactaaaaccatggcacagaaatcagcacagttagaaatgggctgacatatgcagattggtagctggaatttgcccaagtggggaggaaaaaactgtgtctgaaaatcttttaaaataaaatacattatgcatatgaaaaggaataaagaattacgtaatgagaagttggattcccacccaaaagattgaaaaataaatcattgctgaatcagctgaagcccccagtgtatccctcttgggacatcttccttttcccccatggcaaccactaacctgaattttctacttatccttctttcccttttctttatagcatccacaaactttagttcagtttttcatgattttgtatttcatttaaatgatattat

SEQ ID NO: 611168 - DNA, 677 bp, Homo sapiens
gagaagttggattcccacccaaaagattgaaaaataaatcattgctgaatcagctgaagcccccagtgtatccctcttgggacatcttccttttcccccatggcaaccactaacctgaattttctacttatccttctttcccttttctttatagcatccacaaactttagttcagtttttcatgattttrtatttcatttaaatgatattatactgcaggttttcttctgcagcttcccttaccatgcagcatcatgctgtgagcttacatggtcattattggtagctttagttcatttattttcactgctatatagaattattggagaagtatttttattcattccctatttgttggacatttggatcattttcaaatttttctaacacaaacaatgctgttacaaactttgtggtacaggacccagtgtttatatgtgtaagaatttttttttctgattgcatgaatgtacctacaagtaggactgctgaatggaaggggtctacacatgttcaacttaagagattatattaaattgctctacaacatggttgcaccattttttgcttcccccagtaatatattaagaactccaggggctgggcatggtagctaatgcctattatcccagcactttgagagtccaaggtggaaggagttcaaataaggagttcaa

SEQ ID NO: 611169 - DNA, 530 bp, Homo sapiens
gaagcaaatagatccctagcacaaaatggcatttttttctttcccttcccctctcctcctctcctcttccatcctttcccatgagtaaatgcatacccttctagattaaatcctggatctccactrataaatccttatattttctgacttgtgcaactttggtacatgttgttccctctgtcacgtggactttttactggggtcctcattctccatctggtaaaatcatgttcatcttttcaagatccatcgcaaatgtcactcctactttgagaagcttctatcagtccgtttctgtgttgccataaagaaatacctgaggctgggtaatttataaagaaaagagatttaataggctcatagttctgcaggctgcacaggaagcatggggctggcatctgcttcttgtgagggcctcaggaagcttgcagtcatggtggaaagcgaagggaagcaggaatatcacatgggaagagcgcgagcaagagagtgatcgggggaagccccagacttttcaaaaaccagatctt

SEQ ID NO: 611170 - DNA, 530 bp, Homo sapiens
gaagcaaatagatccctagcacaaaatggcatttttttctttcccttcccctctcctcctctcctcttccatcctttcccatgagtaaatgcatacccttctagattaaatcctggatctccactgataaatccttatatttyctgacttgtgcaactttggtacatgttgttccctctgtcacgtggactttttactggggtcctcattctccatctggtaaaatcatgttcatcttttcaagatccatcgcaaatgtcactcctactttgagaagcttctatcagtccgtttctgtgttgccataaagaaatacctgaggctgggtaatttataaagaaaagagatttaataggctcatagttctgcaggctgcacaggaagcatggggctggcatctgcttcttgtgagggcctcaggaagcttgcagtcatggtggaaagcgaagggaagcaggaatatcacatgggaagagcgcgagcaagagagtgatcgggggaagccccagacttttcaaaaaccagatctt

SEQ ID NO: 611171 - DNA, 530 bp, Homo sapiens
gaagcaaatagatccctagcacaaaatggcatttttttctttcccttcccctctcctcctctcctcttccatcctttcccatgagtaaatgcatacccttctagattaaatcctggatctccactgataaatccttatattttctgacttgtgcaactttggtacatgttgttccctctgtcacgtggactttttactggggtcctcattctccatctggtaaaatcatgttcatcttttcaagatccatcgcaaatgtcactcctactttgagaagcttctatcagtccgtttctgtgttgccataaagaaatacctgaggctgggtaatttataaagaaaagagatttaataggctcatagttctgcaggctgcacaggaagcatggggctggcatctgcttcttgtgagggcctcaggaagcttgcagtcatggtggaargcgaagggaagcaggaatatcacatgggaagagcgcgagcaagagagtgatcgggggaagccccagacttttcaaaaaccagatctt

SEQ ID NO: 611172 - DNA, 585 bp, Homo sapiens
ttgcctgcttctgtttactgagaagtcagaatttagtccactgggagatactactctggctgtcagtatacctgggttctagccccaagggttaccgtgggtgacagcatcattaagctgaagacagtagcaggctgagatcctgtggtccacagcaaggagtgggaataaactcagagaatctctacccaaaggggccttgggctgagtaggagaagccctttgtgcatgtcctgactaatacataataagaagatttggggktagcagcaaggatgggccactagaacttgattgttaaactcaagagtcatgttggggtcactgcagtgagcagggcagactgggaggggtgagagcctgggatcttatgctcctgttgtgatagcctagcaagactctaaaaaagaggccagcccagcacacaaaacagggcatcaggagcaactggttacagcaagtctcagcccagggaaccagcaggagtcaaggcagagcccacgtggatgaagttagctcaacggaagggatatagaagaaggtgtattctcaggcagaaagagtccagttgccagactgggattg

SEQ ID NO: 611173 - DNA, 634 bp, Homo sapiens
tatttatagcgaccttgggtatgtaggaattacagccaggtgaaggcacaaaaattaaccctgtaggagaaaagttggacaagcagccaccacagaaaggttgatttcattcccctcttgattcctttggtcagatatatctctaaacactttctcagttgagtctagacaaaagagaccaaaggtattgcagatttcatttgacgtatcctaaaagaagtagaatattgaaaatacccagcatgatgcattgttcctcataggcactctataaataaaaatttcctgcctttctttttgtctgcctctttacatagattttttttttaatactttcagttctgggatacatgtgcagaacgtgcaggtttgttacataggtatacacatgccatggyggtttgccacacccattaacccatcatctacattaggtatgtctcctaatgctatccctcccctagtcctcccattccccagcaggccccggtgtgtgatgttcccctccctgtgtccatgtgttctcattgttcaactcccacctgtgagtgagagcatgtggtgtttgattttctgttcctgtgttagtttgctgagaatgatggtttccagcttcatccatgtccctgcaaag

SEQ ID NO: 611174 - DNA, 596 bp, Homo sapiens
catatttttcatcctgtttagcgcagcactataaaccttgactaacaccataggacccatacaaagtgccactagtgttgttggaaaagctcccaagaaactgatgaaagtcataacattacaaaaaaaaaaagttgaattgcttgatgtgtaccatagattgcagtctgcagctgtggtttcctgccatttcagataggtgattcatatcataaacagaatacatgaacttacattatcaataaatacaatatagcactgtaaatacattttatcttttctatgaatttcttaataacattttttctctggctttattgtaaaagtataatatatataatattataacatacaaaatatgtgctagttgactgttattggtaaggcttccattcaacagtagactatttatagttacattttcagagagtcaagtgtttttttttttattattatactttaagttttagggtacatgtgcacaatgtgcaggttagttacatatggatacatgtgccatgctggtgygctgcacccactaactcttcatctagcattaggtatatctcccaatgctatccctcccccctcccccc

SEQ ID NO: 611175 - DNA, 415 bp, Homo sapiens
taaaatatatttatgtcctgcygattgagtatattcatcattcagaaccatgatagacagcaaaatcgcagcaacattatcctatatcaataatatgcgtttaatctaagtttaaaaataacttatctgagataatttttctttctttgctccttccaagaattcagttccaacttgatttgcgagtggaatgaaggttccgagatagttttaagttaaaatttttaaccaggacacagaagaacaggaataattcttcagacctgcagtatatgtttcgccagagatcaattgttggatgtctttggttcagagttgcttgtacatccaacatgttccataagaatgggcttaaataaatgcactctcttgaataattggacatacagcaattatataattcatctcttatcct

SEQ ID NO: 611176 - DNA, 483 bp, Homo sapiens
accttgtctattgtgaatgatgctgcaatgaacatggaagtttatatatctctttgacatactgatttcatttcttttggatatatatctgatagtgagattcctgggttatatggtaattctatttttaatttttgagaaaccttcataccrttatctatagtggctcaactagcttacatacccatcgacattgtatcaaggttctcttttttccacatcctcgccagcacttgttatctttcatctttttgataatagccattttaacaggaatgcagtgataacttattgtgatttttatttacgttttcctgataatgtgctgttgaattttttttcatatacttggccatttgtatgtcgtcttttgagtaatgttttcagttttgttgcccaatgggttacttattttctagctattgagttaaattcattatatattttaaccctttatcagatgtatggttctcaattattttc

SEQ ID NO: 611177 - DNA, 416 bp, Homo sapiens
ggagggaggggggtgtaaaatctatagcagcagcagcagacagatgagaaaccraagtggcacagtggggcatgcaggcagaaagaaaatccccgtgcctgtcttgggcagttttggggagggcagggggttgcagtcatatttagggatattaaaggtccagtgaccatctatgtcaggcttccactcagtggagacacttgactatgaatgattgtgaaagcaattgaagcatggtagccccggtatgtgcagccagagaacaaacacatataaaaagatctatgactggaggaaaaaaatgatacatataaaaagatctacgatgggcgaaaaaaaatgatcttggggaagataagacaagagtccaataagttcaccaaaagatcctgcaatcttatgaaaaattgagtatg

SEQ ID NO: 611178 - DNA, 416 bp, Homo sapiens
ggagggaggggggtgtaaaatctatagcagcagcagcagacagatgagaaaccgaagtggcayagtggggcatgcaggcagaaagaaaatccccgtgcctgtcttgggcagttttggggagggcagggggttgcagtcatatttagggatattaaaggtccagtgaccatctatgtcaggcttccactcagtggagacacttgactatgaatgattgtgaaagcaattgaagcatggtagccccggtatgtgcagccagagaacaaacacatataaaaagatctatgactggaggaaaaaaatgatacatataaaaagatctacgatgggcgaaaaaaaatgatcttggggaagataagacaagagtccaataagttcaccaaaagatcctgcaatcttatgaaaaattgagtatg

SEQ ID NO: 611179 - DNA, 416 bp, Homo sapiens
ggagggaggggggtgtaaaatctatagcagcagcagcagacagatgagaaaccgaagtggcacagtggggcatgcaggcagaaagaaaatccccgtgcctgtcttgggcagttttggggagggcagggggttkcagtcatatttagggatattaaaggtccagtgaccatctatgtcaggcttccactcagtggagacacttgactatgaatgattgtgaaagcaattgaagcatggtagccccggtatgtgcagccagagaacaaacacatataaaaagatctatgactggaggaaaaaaatgatacatataaaaagatctacgatgggcgaaaaaaaatgatcttggggaagataagacaagagtccaataagttcaccaaaagatcctgcaatcttatgaaaaattgagtatg

SEQ ID NO: 611180 - DNA, 565 bp, Homo sapiens
agggagcacactgcaaatgtgacataactagttggtttttttttttttttttttgagattttatcttgctatgctgcccagactggagtgcagtggctattcacaggcatgatcatagtgccttgcagcctcaaactcatggcatcaagcaatcctcctgtcccagcctcttamgtagctgggaatataggtgcaggctgccatgcctggcaatgatttataagtgatgttgaccttgattacctggctgaggtagcgtttgtcaggtttctccactgaaaagctactttaaaaaaatccctttttcataatgcactctttggaaagaagtcactatgggtggctcagagttaaggagtagggattgacactccacttccttgagggtaacatatttacataaatcacttggaatttttcacgcgagatttgtttcttttccctcgttcattaatttactcaatcacttatttatatcagtatggacccatggacatttaatttatactttgggttatgatacagtactactttatcctgttgctaaattgcttctgccctggcc

SEQ ID NO: 611181 - DNA, 549 bp, Homo sapiens
actttccctgaggggcatcctttaaaatctgggtatratgttgcaccttgaaactcagttgttcaaaattattctttctttctcaacctttaacttccacatcaactctttctctccctaaacaaaatcactaaaccaaagaagcaaaagtctataaggccacagttttgtgaattaaatatccatccttttccccatctgtttgcgtttatcctactctctttcctcttttggaagcagctctgttccaggaactggcaaatcgatttggctctttttgctttcctctttgctcacagggaatctcctctttgaaaaccagaaaggttctccaaatatagcaaatgctttcctcatctccatccatcctagttacccctctcctcctctcctcccactctcctgctctgtcccactgctccacccctgactctgctaacctcatgccgattatacttctgtagtttcattaagtggatagttttcccctcttcagaagcattcctgagtcaagaacaccctgaatgcactggaagttgttcaagtctt

SEQ ID NO: 611182 - DNA, 537 bp, Homo sapiens
aagctaatgataaaaaagagttgcttatattttaaaatgacatttcaaagctggtgctcttggatgatatgaaaataaatgccactgtgctyagaaatcaggcattacttgcacacaagggaactgcggatctgaaaataaattttgattgtgtttatattacatagtaatatacatataaataaagcattattagagatgtaatagccaaatcttccaccaattagattagatattaatattgtttatttaataaatatgaaggaaacaataccaaaatggttatcattgagtttatctgtacaacgctgaaacagagaacaaatactgacctagtaccttcaaaaatgccccatgtgctgaatgtgaggattaggcaaggtttatctttgtgcaatgaagacacatagtattctcctctgaacgtgcatcatctgtcattttcttctgaatgtggatcatctctagggatgagtgtggctgctgggaaaagtttgtggaaatagctttcaaaacattgaattacagctggaacac

SEQ ID NO: 611183 - DNA, 575 bp, Homo sapiens
attcttacatctcagctcaacagaaccatgcagtatgtacttcatctgctgctctagtagggggttaaaggtgatgctattattctacctttcattttaattcatgaaatgaaataattttataagcggaatttactatttagtaacccatcagtgaagttcacacaggaaagtcaggataaatgcttgattattcccttttatttactgggttttcaaataatgacttggctacctatcatcctccattggtgaataatttggggcttttcagtaattttctgcaattattttttattgagatgtaattcacatatcatacaattcaccctttaagtgtaaacwcagtggtttttagtatattcacagagctataaaaccatcaccactaactccagagaattttcatgacccgaaaaagaaaccccatacccattcccactcccatctcccctccctacagtccctggcatccattaatccaccttctatcactacagatttgcctgtcctgaacatctcacagaaatggaatcacacatgtggcctcctgcacctggcttccttgatgcagc

SEQ ID NO: 611184 - DNA, 572 bp, Homo sapiens
ttttcttctctgttcaggtggaggcatttcatacattttttaccaggaccagacaaccttggcaaatcatctagaaagcacagtaaatgtgaaaatgtgattaaataaacaggtgttggatttcacaatactgttttattttttttcctcaaaagacatctgcttaccaatctcagtgttactggggctgaaggccatgctctttccaatgatgggactacactcaagtgctaatttattacaattacaagtttcccttcaccactgctgatggcataatttgaccacaagtgttttgcaaatatatcacacctggtattccaggacccacttcaaccactggcttgactcagaattttccaacagggacrattagcatgtgccacctgctggaaacactagccacacctgaagtgaaaggagaatcctggaaagtcttcccctggagctaccagactccccactctcgagtctggtggacacggcactgtcaggacccctcccctcggcagagagtggtggtcggctgcaggtctgcccaccgtctgacgggattccagctctgccccagt

SEQ ID NO: 611185 - DNA, 538 bp, Homo sapiens
cgtagcctcctctgtccctgggtccatggcccacagagcgctgctgccggcgggaactgtcagtcaagccgggctcccagctgcagggccgtgacctgcgggacacacggggcgcaggctccttcgggattccaggcgcagggaggcggcctctgcctggactcggctgccgggcgctgccctcacagagcacagaccggaaactatggctccccgcagctgggatgcgggaaccacggaaatgcgcgaggcccggctcggtgctgtcaggagcattggggtctccgcccccgatcctggcgcctccctccttttcccgctaggcctccaccttcctctgggccccggctctggtagcaccatgtccccctccatttgcccctccagcccctrgagactctctgaggcttcccaatggggtgggggtgcagtgagacctccattcttttcttcttctttttttttttttttgagacggagtctctttctgtcgcccaggctggagggcagtggcgcgatctcggctcactgcaacctc

SEQ ID NO: 611186 - DNA, 624 bp, Homo sapiens
acagtgttgattgaaatattaatttttaatttttgtgggtacatagtaggtatatatatttatggggcacatgacattttgatacacacakgcaatggataataatcacatcagggtaaatgggatatccatcgcctcaagcacttatccttcatgttacaatccaattatactattgtagttatttttaaatttacagttattattgactatagtcactctgttttgctatcaaatactttttcttattcattctctctattttttgtacccattaaccatccccactcccctcacctaacccccactacccttcccaggtaattatccttcttctatctccatgagttcaattgttttaatttttaactcccataagtaagtgagaacataagtttacctctgtgcctggcttatttcacttaaaataatgatctccagttccatccatgtcgttgcaagtgactgaatctcattcttttttatgggtgaatacaccattgtgtatatgtaccacattttcttcgtccattcagctgttgatggacactttggacactgttctccatagtggttgtactaatttacattcccaccaacagtgtacaagggttcccttttctc

SEQ ID NO: 611187 - DNA, 368 bp, Homo sapiens
tcaaagacagattagagtccatstaagcaactctgaagttgtatagaagaaagtgaagaatgatttacttaaaatggttcatattttttaaattgaattatagtgaaggagaaatttttttccaactccttgccatgttattagagaagtgaaaaagaagccagtggttctcaattttggccacacattaacatacctgtagattctcattttaaatatcctgatgcccaggtaacactctcaacgacttaattcagaacttccccagatgatattttgtgagttgcatttgaggaccactgaaccagaagcttcctatgcttgtgatatgtcactaagtcatgattacatatatcatcagcagggca

SEQ ID NO: 611188 - DNA, 429 bp, Homo sapiens
ctattcctatgtggagtgagcagctacccaactcccagagcccagacgggctgagtagccagggcttgactggccatgagcactgcctaaggggtctaggatacttcacagggtacagtagccagacaaggagtggtggtgacaagtgatctcagggggctgaccaatggagcaaggtccagccagagcatgggacagcatccaagaaycaagctgcccagagaggtgtgagagctctggtcttacaaggtacaactcagatcaggacactaaccacagcatgatagctgtttagtaaaccagaccctgccaatacaggagataaaggaaacaacaacaggctgaagacacccagaacccctggctcatcttcatctcacctaaaccaggttgatggtagcaaatcccaggtcctaatcactgctgtgc

SEQ ID NO: 611189 - DNA, 429 bp, Homo sapiens
ctattcctatgtggagtgagcagctacccaactcccagagcccagacgggctgagtagccagggcttgactggccatgagcactgcctaaggggtctaggatacttcacagggtacagtagccagacaaggagtggtggtgacaagtgatctcagggggctgaccaatggagcaaggtccagccagagcatgggacagcatccaagaacsaagctgcccagagaggtgtgagagctctggtcttacaaggtacaactcagatcaggacactaaccacagcatgatagctgtttagtaaaccagaccctgccaatacaggagataaaggaaacaacaacaggctgaagacacccagaacccctggctcatcttcatctcacctaaaccaggttgatggtagcaaatcccaggtcctaatcactgctgtgc

SEQ ID NO: 611190 - DNA, 429 bp, Homo sapiens
ctattcctatgtggagtgagcagctacccaactcccagagcccagacgggctgagtagccagggcttgactggccatgagcactgcctaaggggtctaggatacttcacagggtacagtagccagacaaggagtggtggtgacaagtgatctcagggggctgaccaatggagcaaggtccagccagagcatgggacagcatccaagaaccaagctgcccagagaggtgtgagagctctggtcttacaaggtacaactcagatcaggacactaaccacagcatgatagctgtttagtaaaccagaccctgccaatacaggagataaaggaaacaacaacaggctgaagacacccagaacccctggctcaycttcatctcacctaaaccaggttgatggtagcaaatcccaggtcctaatcactgctgtgc

SEQ ID NO: 611191 - DNA, 564 bp, Homo sapiens
gaaccaagctgcccagagaggtgtgagagctctggtcttacaaggtacaactcagatcaggacactaaccacagcatgatagctgtttagtaaaccagaccctgccaatacaggagataaaggaaacaacaacaggctgaagacacccagaacccctggctcatcttcatctcacctaaaccaggttgatggtagcaaatcccargtcctaatcactgctgtgcatgaaactctgagcatgctttccaaattattggcattggctcaaaaatgggcaaagctgagctggtaagtaaaaggcctcattataacagtgcagaagctaggaggtaagggctaaggtgaagattctaggcagacagcatgattcagaggtgactcaagtagactgtagtaggaaaccttaagcaggaagccttgagtctgcagcttaagccactgcttcagtgtctacggtgaaagattcacttatatttgaaacacttttctttaaaaaacagagagcaaagattagacaggaaataaccaagaaagacacgtgaccttaccccagaaagacaaagg

SEQ ID NO: 611192 - DNA, 564 bp, Homo sapiens
gaaccaagctgcccagagaggtgtgagagctctggtcttacaaggtacaactcagatcaggacactaaccacagcatgatagctgtttagtaaaccagaccctgccaatacaggagataaaggaaacaacaacaggctgaagacacccagaacccctggctcatcttcatctcacctaaaccaggttgatggtagcaaatcccaggtcctaatcactgctgtgcatgaaactctgagcatgctttccaaattattggcattggctcaaaaatgggcaaagctgagctggtaagtaaaaggcctcattataacagtgcagaagctaggaggtaagggctaaggtgaagattctaggcagacagcatgattcagaggtgactcaagtagactgtagtaggaaaccttaagcaggaagccttgagtctgcagcttaagccactgcttcagtgtctayggtgaaagattcacttatatttgaaacacttttctttaaaaaacagagagcaaagattagacaggaaataaccaagaaagacacgtgaccttaccccagaaagacaaagg

SEQ ID NO: 611193 - DNA, 613 bp, Homo sapiens
tccctccaattgctatactagtcacccaataagggcagctccacatctccttcccaaggtgtctgcaagatgatttatttcagagataaaagcaactaagccacctagaawcgcagcttcttgggacctgaaaaagtcacgtcgcaggttccttctcctccacttccataacccgcctctttctgtgcatgattataaaagtgttaattacccactataattcacctttgtttttcacacagtactaaaaagcaattcaagcctgctgaatggaggccaggctccctgctctaacatggtcattacaaagaaaaagataacatttgctggtcattacaaagaaaataacatttgctggcctcagagagttacaggcaaacacagctagacctgattgtcccagggtgaatgtgtctaaggatctacctctccatcaagtttacagtaatcagcgactttcacaccgctgcctaaattctaatcacaatgggtcaacagagcacaacaatttgtgctcttcccccccagagcctgagagaaattaggccacacctagtgaaataggcaaaaaaatgtaaacacctgatgtttctctatcctcagcacccagcag

SEQ ID NO: 611194 - DNA, 613 bp, Homo sapiens
tccctccaattgctatactagtcacccaataagggcagctccacatctccttcccaaggtgtctgcaagatgatttatttcagagataaaagcaactaagccacctagaaasgcagcttcttgggacctgaaaaagtcacgtcgcaggttccttctcctccacttccataacccgcctctttctgtgcatgattataaaagtgttaattacccactataattcacctttgtttttcacacagtactaaaaagcaattcaagcctgctgaatggaggccaggctccctgctctaacatggtcattacaaagaaaaagataacatttgctggtcattacaaagaaaataacatttgctggcctcagagagttacaggcaaacacagctagacctgattgtcccagggtgaatgtgtctaaggatctacctctccatcaagtttacagtaatcagcgactttcacaccgctgcctaaattctaatcacaatgggtcaacagagcacaacaatttgtgctcttcccccccagagcctgagagaaattaggccacacctagtgaaataggcaaaaaaatgtaaacacctgatgtttctctatcctcagcacccagcag

SEQ ID NO: 611195 - DNA, 613 bp, Homo sapiens
tccctccaattgctatactagtcacccaataagggcagctccacatctccttcccaaggtgtctgcaagatgatttatttcagagataaaagcaactaagccacctagaaacgcagcttcttgggacctgaaaaagtcacgtcgcaggttccttctcctccacttccataacccgcctctttctgtgcatgattataaaagtgttaattacccactataattcacctttgtttttcacacagtactaaaaagcaattcaagcctgctgaatggaggccaggctccctgctctaacatggtcattacaaagaaaaagataacatttgctggtcattacaaagaaaataacatttgctggcctcagagagttacaggcaaacacagctagacctgattgtcccagggtgaatgtgtctaaggatctacctctccatcaagtttacagtaatcagcgactttcacaccgckgcctaaattctaatcacaatgggtcaacagagcacaacaatttgtgctcttcccccccagagcctgagagaaattaggccacacctagtgaaataggcaaaaaaatgtaaacacctgatgtttctctatcctcagcacccagcag

SEQ ID NO: 611196 - DNA, 613 bp, Homo sapiens
tccctccaattgctatactagtcacccaataagggcagctccacatctccttcccaaggtgtctgcaagatgatttatttcagagataaaagcaactaagccacctagaaacgcagcttcttgggacctgaaaaagtcacgtcgcaggttccttctcctccacttccataacccgcctctttctgtgcatgattataaaagtgttaattacccactataattcacctttgtttttcacacagtactaaaaagcaattcaagcctgctgaatggaggccaggctccctgctctaacatggtcattacaaagaaaaagataacatttgctggtcattacaaagaaaataacatttgctggcctcagagagttacaggcaaacacagctagacctgattgtcccagggtgaatgtgtctaaggatctacctctccatcaagtttacagtaatcagcgactttcacaccgctgcctaaattctaatcacaatgggtcaacagagcacaacaatttgtgctcttcccccmcagagcctgagagaaattaggccacacctagtgaaataggcaaaaaaatgtaaacacctgatgtttctctatcctcagcacccagcag

SEQ ID NO: 611197 - DNA, 416 bp, Homo sapiens
attgattggaattacaaagcaacaggtctgtctttcttaatgaagtggaacccagaatcattcctaagggggtatgggtggggttgyggcaaattagctacctacttatagccaacccctgagacatatttctacacaggtgaaaccaggggagaacacacattaggcagccaggaagcaggagaataagtcacaaaatggcagccagaagcctgagaggtactgggggaatgtgggcagggatgatcaaccttgggaatgggtttgcttggagaggtttcgtggcctttctgcattgttatagaagagtttcagactttcaaacaaaataccatttggcagcagccacatcctttttatatttctttccctttctaagtcatggtccatatattgagcaatgggccaaaacaagg

SEQ ID NO: 611198 - DNA, 416 bp, Homo sapiens
attgattggaattacaaagcaacaggtctgtctttcttaatgaagtggaacccagaatcattcctaagggggtatgggtggggttgcggcaaattagctacctacttatagccaacccctgagacatatttctacacaggtgaaaccaggggagaacacacattaggcagccaggaagcaggagaataagtcacaaaatggcagccagaagcctgagaggtactgggggaatgtgggcagggatgatcaaccttgggaatgggtttgcttggagaggtttcgtggcctttctgmattgttatagaagagtttcagactttcaaacaaaataccatttggcagcagccacatcctttttatatttctttccctttctaagtcatggtccatatattgagcaatgggccaaaacaagg

SEQ ID NO: 611199 - DNA, 526 bp, Homo sapiens
atttttcttactagtctttgtgtagatgtatgttttcatttattttgggtagaagcctagaagtgaaattgtggagctatatggtaaatgtacaattttcattgatttgaggcacctgaacaggattaagaagtaggaagctgaaagtaasccatatgggaatggtacacatggttgaggatatagcagagaattccaggaaaaggaagattactgagaagaaagatagaaatgcattaagagaaaaattcatctacttaatagtttgtacttcaatatatgcaggaagcctaaacattttatgtaatcacaaaattgtctcaatctattataatagtagaatttcacctggatcatagcatacaccattaggcatgtgtggatggacaagtacagtgataagggcatctataaaggtacctaagtctgccaacagcctacatggttgtccacttttacagagccattaagtttaatcatgacaagaatttgcctttaacaaaaaattccatttcaaagattcaat

SEQ ID NO: 611200 - DNA, 511 bp, Homo sapiens
agctaaaaaaacacaggatattgacagacgtgttgtcctttttcattaattttttgttattcctttctcagagctaactgataaaggacacaggtgagaaaaaaatatcaagtagagatgaagagaagtgtcaaaaagaaataaaatttcaaagtaaaagatkaagtaacctttgcccactgagatacactaccaagtgagtcatctgtccctaaatctaacagctaccaacttctaaagaggaattgaagcagcttacagtgagggagagagacagagagagcgcgagaatgaatacaggaatatagccaggtgggttaaagtaaagataagaaaaatatctgcaactccataactccatcagaaaaggagaaacatgaatggactaggaactaaagataaagaagttactgcaactgaatgctgaaattcgttctggcctttctcgcaattaagaaaataattcatgatgggttacaaatctctccttgtgtaaaagaaaatgtggcac

SEQ ID NO: 611201 - DNA, 484 bp, Homo sapiens
ataagtcaggctattgacaggagttatttctgccaatcctacccccaactgcaggaaatctaattggtcctccagggaatttgcaatcaagataattttttttttaagacagagtcttgctctatcacccaggctggagtgtagtggcttgattctgactcactgcaacctccgcctcctgggttcaagtgattctcagcctcccaagtagacgggattacagacatgtgccaccacacccagctaatttttgtatttttaatagagatggggtttctctgtgttgaccaagttggtcttgaactactgrcttcaagtgatccacctgcctctgcctcccaaaatgctgggattacaggcgtgagacatcacgcctggccaagataatcttaagtcatatttttatcttccaaggacatattttagagggtgggaatgagaaatggccagcactgctggcaaagactttcagcccttccctccc

SEQ ID NO: 611202 - DNA, 516 bp, Homo sapiens
gagcttcagcatgtgccctcccccaaccacctgcagacttccccaccatcaacatcccccaccagagtggtatgtttgttacaattgaatgtacactgacacatcgttatcaccaatagttcatagttttacattagcgttcactcttgctattgtacattctgtgggtttggacaaatgtataatgacaygaatccgccattacagtatcatatgggatattttcactgctctaaaagtcctctatgctccacttattcatccctccttcctctcaacccctggcaatcactgatctttttactatctctgtgtttttgctctttccagaaggccatatagttggaatcttacaatatgcagccttctcagattgtcttctttcacttagttatgtgcatttaaatttcttccatgtgtcttttcatggcttggcagctcatttctttttggcactggataatattccattgtctggatgtaccacagtttatttattcattcacctactgaagg

SEQ ID NO: 611203 - DNA, 609 bp, Homo sapiens
taaatatttttggctttacaactgcttaatctgcatgagcaatgaaagtggctgtatccccatgaaacttggtttatgaactgaaatatgaatktcatgtaattttcacgtgtcataaaatattattttttacatgttttcaagcattaaaaatgtgaaaaacactcttagtcattggccatacaaaaacagatggcaggccagatttggtccacaggtcatagtttgccaacccctgatgtagaggaataattgtgaaatcttatccccggggggaaatgatttcagagcgacctatcaattactgaaagcctcaaaactgacttgaaattcatccctttatttaacttgtgcaacaagaatctggaagcaatgaatggggaagccatgagtatgtgacctactgctgcttagctaaacactgccttgaggtggagaggatggagttctttgagtcaaattcaccgattccttctgttaaactgcctttcacctaatatttctgtcagaggatctagaaactatggtgattgatgccatagaaacacacagcgagagagcagggtgatgagtttgtggattgtggcatggctgagaggcaaaaagctt

SEQ ID NO: 611204 - DNA, 550 bp, Homo sapiens
tgcacacagtctcttgcctgctgccatgtaagacatgcctttgctcctccttcactttctgccatgattgtgaggcctccccagccatgcagaactgtgagtctattaaaccactttttctttataaattacccagactggggtatttcatcatagcagtatgaaaatggactcatacactgtgattaaatatgaaaacttatggttataaaattagaagctagtttaaaaatattcttcatcacttccaaatttggaaacattttactaaaccaactccttgaagtaatcattgggattcatgactayggtgaaaaaatcatatgttgctgcaaatataaaaaaaaactttttttcaaagatttactcaataaagaaattgtacttatgtttaagtacatacaccatgtggaataggagaattctgaggtcaagagagctaagattcagtaatcaggcaattagcgttctccagagaaatggaatcaataggatgaatatatttaaaaagacacttattataaggaattggctcacatgattatgaagg

SEQ ID NO: 611205 - DNA, 570 bp, Homo sapiens
aaatctcatgttaagatgtaatctccaatgttggagctggggcctggtgggaggttttgggtcatggaggcagatgcctcatgacctggtgctgtccttgtgatctccgctttcatgttgctcaaatgaatgggcataataagcgagcaattaagccagagcttcactccttgttttttgttttttggtttttttttaagagacagggtctcattctgttgccaaggctggagtgcagtgatgtgatcatagcttactgtgacctcaaacccctgggctcaagtggccttctcaagtgagtgagttctcacaagatctggttgtttaaaagcatgtggcacctttgccacccacttgctctttcttgctcccactctctccatgtgatatgcctgcttccayttcaccttcctccatgaataaaggctctctgaggccttcctagaagccaagcagatgccagtgccatgcttcctgtacaccctgcagaaccacaagccaattaaacctcttttctttataaatacccagcctcaggtatattttgtagcaatgcaaaaatggcctaac

SEQ ID NO: 611206 - DNA, 466 bp, Homo sapiens
aatcatcaaatggactcgaatgaaatcatcatcaaacggaatcgaatggaatcattgmatggaaaggaatggaatcatcatggaatggaaatgaatggaatcactgaatggactcgaatgggatcatcatcaaatggaatcgaatggaatcatctaatgaacttgaaaggaatcatcatcaaatgaagtcaaatggaatcaccaaatcgacatgaatggaatcatcattgaatagaatcgaatggaatgattgaatgggctagaatggaatcatctttgaatggaatcaaagggaatcatcatcgaatggaatcgaatggaaatgtcaaccaattgaatcaaatagaatcatcatggaattgaatcgaatggctcactgtcgaatcaaatcaaatggaatcatcatcgtatggaattgaatggaaacattgaaaggaattgaatggaatcatcattgaatggaacc

SEQ ID NO: 611207 - DNA, 466 bp, Homo sapiens
aatcatcaaatggactcgaatgaaatcatcatcaaacggaatcgaatggaatcattgaatggaawggaatggaatcatcatggaatggaaatgaatggaatcactgaatggactcgaatgggatcatcatcaaatggaatcgaatggaatcatctaatgaacttgaaaggaatcatcatcaaatgaagtcaaatggaatcaccaaatcgacatgaatggaatcatcattgaatagaatcgaatggaatgattgaatgggctagaatggaatcatctttgaatggaatcaaagggaatcatcatcgaatggaatcgaatggaaatgtcaaccaattgaatcaaatagaatcatcatggaattgaatcgaatggctcactgtcgaatcaaatcaaatggaatcatcatcgtatggaattgaatggaaacattgaaaggaattgaatggaatcatcattgaatggaacc

SEQ ID NO: 611208 - DNA, 466 bp, Homo sapiens
aatcatcaaatggactcgaatgaaatcatcatcaaacggaatcgaatggaatcattgaatggaaaggaatggaatcatcatggaatggaaaygaatggaatcactgaatggactcgaatgggatcatcatcaaatggaatcgaatggaatcatctaatgaacttgaaaggaatcatcatcaaatgaagtcaaatggaatcaccaaatcgacatgaatggaatcatcattgaatagaatcgaatggaatgattgaatgggctagaatggaatcatctttgaatggaatcaaagggaatcatcatcgaatggaatcgaatggaaatgtcaaccaattgaatcaaatagaatcatcatggaattgaatcgaatggctcactgtcgaatcaaatcaaatggaatcatcatcgtatggaattgaatggaaacattgaaaggaattgaatggaatcatcattgaatggaacc

SEQ ID NO: 611209 - DNA, 634 bp, Homo sapiens
aggaatggaatcatcatggaatggaaatgaatggaatcactgaatggamtcgaatgggatcatcatcaaatggaatcgaatggaatcatctaatgaacttgaaaggaatcatcatcaaatgaagtcaaatggaatcaccaaatcgacatgaatggaatcatcattgaatagaatcgaatggaatgattgaatgggctagaatggaatcatctttgaatggaatcaaagggaatcatcatcgaatggaatcgaatggaaatgtcaaccaattgaatcaaatagaatcatcatggaattgaatcgaatggctcactgtcgaatcaaatcaaatggaatcatcatcgtatggaattgaatggaaacattgaaaggaattgaatggaatcatcattgaatggaaccgaatgaaatcatcaacgaatggaatccaatgtaatcatcatagaattgaaaccaatggattcattaaatggactcgaatggaatcatcgagtggactcgaatggaatcatcatcaaatgaaatagaatgcaatcatcaaatggaatcgaatggaatcatcatcgaatggaatctaatggaataatagaatgaactcgaatggaaacatcgcatggagttgaatggaatcatc

SEQ ID NO: 611210 - DNA, 634 bp, Homo sapiens
aggaatggaatcatcatggaatggaaatgaatggaatcactgaatggactcgaatggratcatcatcaaatggaatcgaatggaatcatctaatgaacttgaaaggaatcatcatcaaatgaagtcaaatggaatcaccaaatcgacatgaatggaatcatcattgaatagaatcgaatggaatgattgaatgggctagaatggaatcatctttgaatggaatcaaagggaatcatcatcgaatggaatcgaatggaaatgtcaaccaattgaatcaaatagaatcatcatggaattgaatcgaatggctcactgtcgaatcaaatcaaatggaatcatcatcgtatggaattgaatggaaacattgaaaggaattgaatggaatcatcattgaatggaaccgaatgaaatcatcaacgaatggaatccaatgtaatcatcatagaattgaaaccaatggattcattaaatggactcgaatggaatcatcgagtggactcgaatggaatcatcatcaaatgaaatagaatgcaatcatcaaatggaatcgaatggaatcatcatcgaatggaatctaatggaataatagaatgaactcgaatggaaacatcgcatggagttgaatggaatcatc

SEQ ID NO: 611211 - DNA, 634 bp, Homo sapiens
aggaatggaatcatcatggaatggaaatgaatggaatcactgaatggactcgaatgggatcatcatcaaatggaatcgaatggaatcatcwaatgaacttgaaaggaatcatcatcaaatgaagtcaaatggaatcaccaaatcgacatgaatggaatcatcattgaatagaatcgaatggaatgattgaatgggctagaatggaatcatctttgaatggaatcaaagggaatcatcatcgaatggaatcgaatggaaatgtcaaccaattgaatcaaatagaatcatcatggaattgaatcgaatggctcactgtcgaatcaaatcaaatggaatcatcatcgtatggaattgaatggaaacattgaaaggaattgaatggaatcatcattgaatggaaccgaatgaaatcatcaacgaatggaatccaatgtaatcatcatagaattgaaaccaatggattcattaaatggactcgaatggaatcatcgagtggactcgaatggaatcatcatcaaatgaaatagaatgcaatcatcaaatggaatcgaatggaatcatcatcgaatggaatctaatggaataatagaatgaactcgaatggaaacatcgcatggagttgaatggaatcatc

SEQ ID NO: 611212 - DNA, 526 bp, Homo sapiens
aatggaatcgaatggaatcatctaatgaacttgaaaggaatcatcatcaaatgaagtcaaatggaatcaccaaatcgacatgaatggaatcatcattgaatagaatcgaatggaatgattgaatgggctagaatggaatcatctttgaatggaatcaaagggaatcatcatcgaatggaatcgaatggaaatgtcaaccaattgaatmaaatagaatcatcatggaattgaatcgaatggctcactgtcgaatcaaatcaaatggaatcatcatcgtatggaattgaatggaaacattgaaaggaattgaatggaatcatcattgaatggaaccgaatgaaatcatcaacgaatggaatccaatgtaatcatcatagaattgaaaccaatggattcattaaatggactcgaatggaatcatcgagtggactcgaatggaatcatcatcaaatgaaatagaatgcaatcatcaaatggaatcgaatggaatcatcatcgaatggaatctaatggaataatagaatga

SEQ ID NO: 611213 - DNA, 526 bp, Homo sapiens
aatggaatcgaatggaatcatctaatgaacttgaaaggaatcatcatcaaatgaagtcaaatggaatcaccaaatcgacatgaatggaatcatcattgaatagaatcgaatggaatgattgaatgggctagaatggaatcatctttgaatggaatcaaagggaatcatcatcgaatggaatcgaatggaaatgtcaaccaattgaatcaaatagawtcatcatggaattgaatcgaatggctcactgtcgaatcaaatcaaatggaatcatcatcgtatggaattgaatggaaacattgaaaggaattgaatggaatcatcattgaatggaaccgaatgaaatcatcaacgaatggaatccaatgtaatcatcatagaattgaaaccaatggattcattaaatggactcgaatggaatcatcgagtggactcgaatggaatcatcatcaaatgaaatagaatgcaatcatcaaatggaatcgaatggaatcatcatcgaatggaatctaatggaataatagaatga

SEQ ID NO: 611214 - DNA, 526 bp, Homo sapiens
aatggaatcgaatggaatcatctaatgaacttgaaaggaatcatcatcaaatgaagtcaaatggaatcaccaaatcgacatgaatggaatcatcattgaatagaatcgaatggaatgattgaatgggctagaatggaatcatctttgaatggaatcaaagggaatcatcatcgaatggaatcgaatggaaatgtcaaccaattgaatcaaatagaatcatcatggaattgaatcgaatggctcactgtcgaatcaaatcaaatggaakcatcatcgtatggaattgaatggaaacattgaaaggaattgaatggaatcatcattgaatggaaccgaatgaaatcatcaacgaatggaatccaatgtaatcatcatagaattgaaaccaatggattcattaaatggactcgaatggaatcatcgagtggactcgaatggaatcatcatcaaatgaaatagaatgcaatcatcaaatggaatcgaatggaatcatcatcgaatggaatctaatggaataatagaatga

SEQ ID NO: 611215 - DNA, 526 bp, Homo sapiens
aatggaatcgaatggaatcatctaatgaacttgaaaggaatcatcatcaaatgaagtcaaatggaatcaccaaatcgacatgaatggaatcatcattgaatagaatcgaatggaatgattgaatgggctagaatggaatcatctttgaatggaatcaaagggaatcatcatcgaatggaatcgaatggaaatgtcaaccaattgaatcaaatagaatcatcatggaattgaatcgaatggctcactgtcgaatcaaatcaaatggaatcatcatcgtatgsaattgaatggaaacattgaaaggaattgaatggaatcatcattgaatggaaccgaatgaaatcatcaacgaatggaatccaatgtaatcatcatagaattgaaaccaatggattcattaaatggactcgaatggaatcatcgagtggactcgaatggaatcatcatcaaatgaaatagaatgcaatcatcaaatggaatcgaatggaatcatcatcgaatggaatctaatggaataatagaatga

SEQ ID NO: 611216 - DNA, 550 bp, Homo sapiens
atcgaatgtaatcgaatggactcatccaatggaatcaaatggaatcatcaaatggaatcgaacggaatcatcatcaaamggaaccgaatggaatcattgaatggaatcaaaggcaatcatggtcgaatggaatcaaatggagacatcattgaatagaattgaatggaatcatcacatggaatcgaatggaatcatcgtaaatgcaatcaagtggaatcatcgaatggaatctaagggaatcatcgaatggaactgaatggaatctttgaatggattcgattggaatcatcatcgaatggacttgaattgaattatcgaattgatttgaatggaatcatcatcgaatggaatccaatggaatcatcgaatggaatcgaatggaatcatcattgacttgaattgaatggaatcatcaaatggactcgaatggaatcatcatagaatggaatcgaatgcaattatcgaatggacttgaatgaaatcacctttgaatggaatcaaagggaatgatcgaaaggaatcgaatgccatcatcattgaatttaatcga

SEQ ID NO: 611217 - DNA, 566 bp, Homo sapiens
taatcgaatggactcatccaatggaatcaaatggaatcatcaaatggaatcgaacggaatcatcatcaaaaggaaccgaatggaatcattgaatggaatcaaaggcaatcatggtcgaatggaatcaaatggagacatcattgaatagaattgaatggaatcatcacatggaatcgaatggaatcatcgtaaatgcaatcaagtggaatcatcgaatggaatctaagggaatcatcgaatggaaytgaatggaatctttgaatggattcgattggaatcatcatcgaatggacttgaattgaattatcgaattgatttgaatggaatcatcatcgaatggaatccaatggaatcatcgaatggaatcgaatggaatcatcattgacttgaattgaatggaatcatcaaatggactcgaatggaatcatcatagaatggaatcgaatgcaattatcgaatggacttgaatgaaatcacctttgaatggaatcaaagggaatgatcgaaaggaatcgaatgccatcatcattgaatttaatcgaaaggaatcatcgaatggaattgaa

SEQ ID NO: 611218 - DNA, 566 bp, Homo sapiens
taatcgaatggactcatccaatggaatcaaatggaatcatcaaatggaatcgaacggaatcatcatcaaaaggaaccgaatggaatcattgaatggaatcaaaggcaatcatggtcgaatggaatcaaatggagacatcattgaatagaattgaatggaatcatcacatggaatcgaatggaatcatcgtaaatgcaatcaagtggaatcatcgaatggaatctaagggaatcatcgaatggaactgartggaatctttgaatggattcgattggaatcatcatcgaatggacttgaattgaattatcgaattgatttgaatggaatcatcatcgaatggaatccaatggaatcatcgaatggaatcgaatggaatcatcattgacttgaattgaatggaatcatcaaatggactcgaatggaatcatcatagaatggaatcgaatgcaattatcgaatggacttgaatgaaatcacctttgaatggaatcaaagggaatgatcgaaaggaatcgaatgccatcatcattgaatttaatcgaaaggaatcatcgaatggaattgaa

SEQ ID NO: 611219 - DNA, 550 bp, Homo sapiens
atcgaatgtaatcgaatggactcatccaatggaatcaaatggaatcatcaaatggaatcgaacggaatcatcatcaaaaggaaccgaatggaatcattgaatggaatcaaaggcaatcatggtcgaatggaatcaaatggagacatcattgaatagaattgaatggaatcatcacatggaatcgaatggaatcatcgtaaatgcaatcaagtggaatcatcgaatggaatctaagggaatcatcgaatggaactgaatggaatctttgaatggattcgattggaatcatcatcgaatggacttgaattgaattatcgaatkgatttgaatggaatcatcatcgaatggaatccaatggaatcatcgaatggaatcgaatggaatcatcattgacttgaattgaatggaatcatcaaatggactcgaatggaatcatcatagaatggaatcgaatgcaattatcgaatggacttgaatgaaatcacctttgaatggaatcaaagggaatgatcgaaaggaatcgaatgccatcatcattgaatttaatcga

SEQ ID NO: 611220 - DNA, 550 bp, Homo sapiens
atcgaatgtaatcgaatggactcatccaatggaatcaaatggaatcatcaaatggaatcgaacggaatcatcatcaaaaggaaccgaatggaatcattgaatggaatcaaaggcaatcatggtcgaatggaatcaaatggagacatcattgaatagaattgaatggaatcatcacatggaatcgaatggaatcatcgtaaatgcaatcaagtggaatcatcgaatggaatctaagggaatcatcgaatggaactgaatggaatctttgaatggattcgattggaatcatcatcgaatggacttgaattgaattatcgaattgatttgaatggaatcatcatcgaatggaatccaatggaatcatcgaatggaatcgaatggaatcatcattgacttgaattgaatggaatcatcaaatggactcgaatggaatcatcatagaatggaatcgaatgcaattatcgaatggacttgaatgaaatcacctttgaatggaatcaaagggaatgatygaaaggaatcgaatgccatcatcattgaatttaatcga

SEQ ID NO: 611221 - DNA, 568 bp, Homo sapiens
aattgaatcaccatagaatggaatcgaatagaatcatcgaatgaactcaaatggaatcatcattgaatggaatcgaatcatcaacgaatggaattgaatggaatcatagaatggaatccaatgtaatcrtcatcgaatggaatcatcatgaaatgaaatcaaatggaatcatcgtatggactccaacggaatcatcatcgactggaattgaatagaagcatcgaatgaaatcaaatggaattatcatcgaacggacccatatggaatcatcattgaattgactcatatggaatcatcgccgaatggattccaatggaataatcatggaatggattcgaatggaaatatcatctaattgaatcaaatagaatcatcatggaattgaatcgaattgctcaccgtcgcatggaatcaaatggaatcatcgaatggaatcgaatggaatcatcatcgaatggaatgaaatggaatcatccaatggacgagaagtgaatcatcattgaatggaatcgaatagaatcatcaagtgaaatccaatggaatcatcatcgaatagaatcgaattgaa

SEQ ID NO: 611222 - DNA, 568 bp, Homo sapiens
aattgaatcaccatagaatggaatcgaatagaatcatcgaatgaactcaaatggaatcatcattgaatggaatcgaatcatcaacgaatggaattgaatggaatcatagaatggaatccaatgtaatcgtcatcgaatggaatcatcatsaaatgaaatcaaatggaatcatcgtatggactccaacggaatcatcatcgactggaattgaatagaagcatcgaatgaaatcaaatggaattatcatcgaacggacccatatggaatcatcattgaattgactcatatggaatcatcgccgaatggattccaatggaataatcatggaatggattcgaatggaaatatcatctaattgaatcaaatagaatcatcatggaattgaatcgaattgctcaccgtcgcatggaatcaaatggaatcatcgaatggaatcgaatggaatcatcatcgaatggaatgaaatggaatcatccaatggacgagaagtgaatcatcattgaatggaatcgaatagaatcatcaagtgaaatccaatggaatcatcatcgaatagaatcgaattgaa

SEQ ID NO: 611223 - DNA, 481 bp, Homo sapiens
aatcatcattgaatggaatcgaatcatcaacgaatggaattgaatggaatcatagaatggaatccaatgtaatcgtcatcgaatggaatcatcatgaaatgaaatcaaatggaatcatcgtatggactccaacggaatcatcatcractggaattgaatagaagcatcgaatgaaatcaaatggaattatcatcgaacggacccatatggaatcatcattgaattgactcatatggaatcatcgccgaatggattccaatggaataatcatggaatggattcgaatggaaatatcatctaattgaatcaaatagaatcatcatggaattgaatcgaattgctcaccgtcgcatggaatcaaatggaatcatcgaatggaatcgaatggaatcatcatcgaatggaatgaaatggaatcatccaatggacgagaagtgaatcatcattgaatggaatcgaatagaatcatcaagtgaaatcc

SEQ ID NO: 611224 - DNA, 440 bp, Homo sapiens
aatcatccaatataagagaattgaatcaccatagaatggaatcgaatagaatcatcgaatgaactcaaatggaatcatcattgaatggaatcgaatcatcaacgaatggaattgaatggaatcatagaatggaatccaatgtaatcgtcatcgaatggaatcatcatgaaatgaaatcaaatggaatcatcgtatggactccaacggaatcatcatcgactggaattgaatagaagcatcgaatgaaatcaaatggaattatcatcgaacggacccatatggaatcatcattgaattgactcatatggaatcatcgccgaatggattccaatggaataatcatggaatggattcgaatggaaatatcatctaattgaatcaaatagaatcawcatggaattgaatcgaattgctcaccgtcgcatggaatcaaatggaat

SEQ ID NO: 611225 - DNA, 440 bp, Homo sapiens
aatcatccaatataagagaattgaatcaccatagaatggaatcgaatagaatcatcgaatgaactcaaatggaatcatcattgaatggaatcgaatcatcaacgaatggaattgaatggaatcatagaatggaatccaatgtaatcgtcatcgaatggaatcatcatgaaatgaaatcaaatggaatcatcgtatggactccaacggaatcatcatcgactggaattgaatagaagcatcgaatgaaatcaaatggaattatcatcgaacggacccatatggaatcatcattgaattgactcatatggaatcatcgccgaatggattccaatggaataatcatggaatggattcgaatggaaatatcatctaattgaatcaaatagaatcatcatggaattgaatcgaattgctcaccgwcgcatggaatcaaatggaat

SEQ ID NO: 611226 - DNA, 343 bp, Homo sapiens
catcacagaatggaatcgtacggaatcatcatcgaatggaattgaatggaatcatcaattggagtcgaatggaatcatcaaatggaatcgattggaagtgtcgaatggactcgaatgaaatcatcatcgagtggaatcgaatggaatcatcgaaaggactcgaatcaaatcctaaaatggactcgaatggaatcatckaatgcactccaatggaatcaacatcgaatggaccctaccggaatgatcaaatggactcgaatggaatcattgaatggaaatgaatggaatcattggttggactcaaatggaattatcgaacaggctcaaagggaatcatcgaatg

SEQ ID NO: 611227 - DNA, 349 bp, Homo sapiens
tggaatggaatggaatcgtcatcaaatggattcaaatggaatcattttcgaatagaatcgaatggaatcattgaatggaatcatcatcaaatggagtccagaggaatcactgaattgaatggaattatcattgaatggaatcgaatagaatcatcgcatggaatcaaatggaattatcatcaaatggaatcgaatgatatcatcgaatgcactttaatggaagcatcaacgaatggaattgaatggtatcatcgaatggactcgaatggaatcatcktcgagtagaatctaaaggattcactaagtggactccaatggaataatcattaaatggaatcgagtggaatca

SEQ ID NO: 611228 - DNA, 586 bp, Homo sapiens
tgtcccctccaaaattcagattttgctaatgtgatagtattaagaggcagggcctttgagagatgatttaggtcatgagggctcctctctcattaatgggattaggcctttattaactgcctttcagctttatstttatcacctgtctttcagctagttttgctagttttctagcttattcttcttctccagccaagggagcacactgcattccactcctacagcggatgtagcctcaccagacaactgaacctaccctcaccttgatcttgaacttttagcctccagaactatgagaaatacatttcagttccttataaattatgcagtcccgggtattatgctgtagcagtacaagaaaactaggagagcattgttttgtaagagtatctggctctatcagagggcatttaaaggtcagatgactcaacttcagcaaaagaattagccctcaggtgagttactgcttctttctggttatgaccctttagactttccagaagtgttttcaaaaaccaaaaacctaaaatagtattaggacaactgcctataaaagttttataatatcaaaatttttataagaaaa

SEQ ID NO: 611229 - DNA, 535 bp, Homo sapiens
gcagggagcgggaggtggtccstgggcgggagggggagcagccgcagatccaggccagaggccaaggcagctgccatggtgcttatgtcatcccagaagtggtcataagagcccccccaccccccaagggccctggaattccagaaggggtcaaaggtcaacctccctctagctcccatagaagaagttgcaaggcgagaaggggtggaggcaggggttcttcccattctgcccacaggaccccagagccagccccctcagagccacaggagctgggccaaggaagcctaaggctccagggcaggaggagcctccagcccagcctttctcccagcaaggccctcccatgtacctgggcggagcagcggcttcagactgccccctgaccttccagccagaggtgattcaagctggggaagggactccctgggtcctgacaaggtccttctgaaggcagcacccacacagccatggcccagaggaaagacagaccctcccccccgccgccccgcaaccacacaaggcccctgagagc

SEQ ID NO: 611230 - DNA, 247 bp, Homo sapiens
atctaccagagagactgtattaacgagctaatatatgtaaatggctcagcacagtgtctggcacataatatgtgctaaaaatgtttgctcttattaagaaatttgggtggttgtaatcatacacaagcatktgctgtggccaatttcctctgaagagtctcacattctttttcaaaagtttttgtccatcctctgaactaacgtggggaaaagctagtcaaggtttccctgtgctgatggagtggtt

SEQ ID NO: 611231 - DNA, 575 bp, Homo sapiens
tttaaaaagaatgaatgcacttccccagacaagagattgtttttcacctcaatagtaaccagatccaaaatttgagcaattcccatgacgaccctaaaaagatggcctgatttcttgcatccacctagacaaagccccagagtaacttagtctctgtgttatcatgcagccaatttatgtcattcctagcccctctggcctcttctggggaaaaaagaatgccatctgatgaatgtagccttatcagtgttccagattataaggctatagcgaggcctagttatttasctgccaataatcatggtttccattccagtttcaagaagatctatgacacaacagcaacaacaacatcaacaaacctgtagatcacgaacgctcaaaaatgtttttccatttggaaatcaatctatgtaagaaaatccgctgggcacagtggttcatgcctataatcccagcactttcggaggccaaggtgggcagatcacctgaggtcaggagatcgagactgtcctggctaacagggtgaaaccctgtctctactaaagatacaaaaaattagccgggtgtggtgg

SEQ ID NO: 611232 - DNA, 592 bp, Homo sapiens
gccacccccattgtgcaaactggcttttccctccagcaatttcgagtggctgtctattttgtatagcgaaaggaggtttttgtagtggatgacaaatcttgagctaaaaaagaaacatagtatgactcaaacagtgagctgagtttacatagaaattataggcctgtgctgctgtttggtaagattttggaactaattactaggtattcccaaaacaacacttctctgggcatcacgtgcatttctgaaaatttcctgagggtgattgctggccaagagcatttcctgcatgaaaatccraacagtttcttttttattgttacactctgatgcaagatttctaagaatctttctgtgaatcaaagacttcactagaaataatgctgtgtggagtccctttactacctagggacctattcagctaaacaagcatttctgttgcaatgtaaatcaactttctggaatcaaagagattccagtttaaatttgtctataacacacatgagtgtgagtagagtggttgaatggggaaagcccagtcttgaactgacatgtcttagaacactgaaaaatgtcacaagttatgtctgtg

SEQ ID NO: 611233 - DNA, 456 bp, Homo sapiens
cattgtctcagcccaaaatctccttaagctgataagcaacttcagcaaagtctcaggatacaaaatcaatgtgcaaaaatcacaagcattcttatacaccaaaaacagacaaacagagagccaaatcatgagagaactcccattcacaattgcttcaaagacgaggtaactttttttggggacagggtctagcttggtcacccagactggactgcagtggtgcacttacaccttactgcagctttgaacttcagagttgaagtgatcctcccacctcagactcctgagctgggactacagttgcatgccacmacacctggctaattttttaattaatgttatgtggagatggagtctcactatgttgactaggctggtctcacactcctggcctcaagcaatcctcctgcctgggcctcccaaaatgttaaaatttaaattagaaggtgagatttc

SEQ ID NO: 611234 - DNA, 439 bp, Homo sapiens
aaacagtaaatttcattatataccacttattatatgtatattgtgatattgtgataaaagtagtatttgcattatcatggaaatctaacaattttcattttcactgtctcttgacagtagtttaatgttttaatatttaattcccattacaactcctcaacgctctttccaatttctgtctctttcctcaaaaatccaaacgccctgttttctctcactttctgtatatattgtacatacacaatatatataccgctttatggattcatccacctttatggatttatyatagcaaaaatgcctgaaaattcctgaattaattgtatgtccatttaaaattttctgtctgttttcactcatcccattttttagctttaacatatgtatctctgctatactccttcttactctctttcaggagatcttgttttcagctcta

SEQ ID NO: 611235 - DNA, 489 bp, Homo sapiens
ttttttttttttttttttttggttggtaggctatttattactcatttaatttcaragcttgttattggtctgttcagggaatcgatttctttctggttcagtctggggagggtatatgtgtccagaaatttatcctctcttctagactttttagtttacatgtatagaggtgttcatagtagattctaatggttgctcgtatttctgtggggtcagtggtaacatttccttcatcatttgtaattgtgttcatttggagcttttctctttttttctttattagtctagctagtggcctatatatcttattaattttttcaaaaaaaaaaacagctcctggattcattgatcatttgaataggtttccctgtctcaatttccttcagttcagttctgatgttagttatttctggtcttctgctatctttgatttgctcttgcttatcttattctttcagttgtaatgttaggttaatttgagatctttct

SEQ ID NO: 611236 - DNA, 489 bp, Homo sapiens
ttttttttttttttttttttggttggtaggctatttattactcatttaatttcagagcttgttattggtctgttcagggaatcgatttctttctggttcagtctggggagggtatatgtgtccaraaatttatcctctcttctagactttttagtttacatgtatagaggtgttcatagtagattctaatggttgctcgtatttctgtggggtcagtggtaacatttccttcatcatttgtaattgtgttcatttggagcttttctctttttttctttattagtctagctagtggcctatatatcttattaattttttcaaaaaaaaaaacagctcctggattcattgatcatttgaataggtttccctgtctcaatttccttcagttcagttctgatgttagttatttctggtcttctgctatctttgatttgctcttgcttatcttattctttcagttgtaatgttaggttaatttgagatctttct

SEQ ID NO: 611237 - DNA, 489 bp, Homo sapiens
ttttttttttttttttttttggttggtaggctatttattactcatttaatttcagagcttgttattggtctgttcagggaatcgatttctttctggttcagtctggggagggtatatgtgtccagaaatttatcctctcttctaractttttagtttacatgtatagaggtgttcatagtagattctaatggttgctcgtatttctgtggggtcagtggtaacatttccttcatcatttgtaattgtgttcatttggagcttttctctttttttctttattagtctagctagtggcctatatatcttattaattttttcaaaaaaaaaaacagctcctggattcattgatcatttgaataggtttccctgtctcaatttccttcagttcagttctgatgttagttatttctggtcttctgctatctttgatttgctcttgcttatcttattctttcagttgtaatgttaggttaatttgagatctttct

SEQ ID NO: 611238 - DNA, 605 bp, Homo sapiens
gctacaattcaagatgagatttggctgaggacacagccaaaccatatcagtagggcataactcaagatggaaaaatagaataaatgactaatcctaggatagtttaataggataccttaatttctgtcctactttccaaaaagtttctggagccaatgtctgaagtgtcctttcaatggaacctggtggataggcaagagtggtgatgaatattgggaaggtgaccgtggaacagtaggagcaggacgtctctaaaggtacagtaaactccttcttcaaagaaaacatccacatattggttgatcagatatttgatcattagctccaataagttttagctattggtaattaattgtgattcaatggaatgttatatagccatgaaatcatatatatatatatatatatataattttttaacagatgtttgtgatatgttggtagacaaagaaggtaaagatttggaaaaaatttgcaaggatwtataccaaaatgtttacaatgacaatctctctctttttttattttttttttgtttttttttgagatggagttttgctctgttgcccaaggtggagtgcagtggcgtgatctttgcacactgc

SEQ ID NO: 611239 - DNA, 545 bp, Homo sapiens
ccctggtgctcttgtttgactgtttgatcttccctttccttttcagccactamctttgcccatgaccctattccccttcaacttctgctaactcctgattaagggcagtttaattctctctcttttcctgtaattccttaagaccttaacattgggacttcacctcaatgaaagcgctccattttcctaaaaaagatagctctttttacaagagaaactgaagttttcaccactgaaatcacatttgaaaatataactgtaaacacatatccattccaatgcatttatttatttatttatttattttgaggcagagtctcactttgctgcccaggccggagtgcagtggtgcgatcttagctcactgcaacctccacctcctgggtttaagtgattctcatgcctcagcctcccaagtagctgggactacaggcaacacacccggctaatttttgtatttttagtagagatggggtttcaccatgttggccaggcaggtctagagctcccaacctcaggtgatctgcccacctcagcctctgaaa

SEQ ID NO: 611240 - DNA, 528 bp, Homo sapiens
atcttttcctcttgaaacctcatccatgaaatgggaatgttaatatctattttgtaaacttgttttgaatattagagatacatatttagtataaattaggaatttattaaaatagtagatctattattaattactggtagtaacactgctttcaattttatcatcattytgaaaaaacctacaaggaatatcaattttctttaggaggggagatacctttctaccactgaataccaacactgtacctggttctaatgaagatgaaagacaaaactcttaaaattttcaggccccatgacataagggaaatagctcctggataataatcaatacttggtcaaagtatgtccatctgagaattctgatgaaggtggtgacaagggcttgagggtttgacctagggaattagagaattcctggaaccaaaatatggaaaagatctcccacacctcttctgatgccttatctgacagatgaggaaattgaagcccacgaggttaaaggtcctgattaagatcactcaggtca

SEQ ID NO: 611241 - DNA, 547 bp, Homo sapiens
atgcagtgctgcgatctcggctcactgcaacttccacctcccagattcaagtgattctcctgcctcagcctcccaagtagctgggattamaagcacacaccaccacgcccaactaatttttgtatttttagtagagacggggattcaccatgtttgccaggatggtcttgatctcctgacctcgtgatctgcccaccttggcctcccaagagagccatttttttcttaacactccacttcgaataaattgttctactgttttttttttttgcttccattgtcacagtcaagaggttttatgttacacaaattgttctttgtgtgaccttttatctccagctgctgccttcttcttcttcttcttcttcttcttcttcttcttcttcttcttcttcttcttctccttcttcctcttcctcttcttattcttgttcatcttcttcctcttcctcttcttttttttttattatactttaagttctgggatacatgtgcagaatgtgcaggtttgttacataggtatacacgtgtcatggtggtttgctgc

SEQ ID NO: 611242 - DNA, 547 bp, Homo sapiens
atgcagtgctgcgatctcggctcactgcaacttccacctcccagattcaagtgattctcctgcctcagcctcccaagtagctgggattacaagcacacaccaccacgcccaactaatttttgtatttttagtagagacggggattcaccatgtttgccaggatggtcttgatctcctgacctcgtgatctgcccaccttggcctcccaagagagccatttttttcttaacactccacttcgaataaattgttctactgttttttttttttgcttccattgtcacagtcaagaggttttatgttacacaaattgttctttgtgtgaccttttatctccagctgctgccttcttcttcttcttcttcttcttcttcttcttcttcttcttcttcttcttcttctycttcttcctcttcctcttcttattcttgttcatcttcttcctcttcctcttcttttttttttattatactttaagttctgggatacatgtgcagaatgtgcaggtttgttacataggtatacacgtgtcatggtggtttgctgc

SEQ ID NO: 611243 - DNA, 547 bp, Homo sapiens
atgcagtgctgcgatctcggctcactgcaacttccacctcccagattcaagtgattctcctgcctcagcctcccaagtagctgggattacaagcacacaccaccacgcccaactaatttttgtatttttagtagagacggggattcaccatgtttgccaggatggtcttgatctcctgacctcgtgatctgcccaccttggcctcccaagagagccatttttttcttaacactccacttcgaataaattgttctactgttttttttttttgcttccattgtcacagtcaagaggttttatgttacacaaattgttctttgtgtgaccttttatctccagctgctgccttcttcttcttcttcttcttcttcttcttcttcttcttcttcttcttcttcttctccttcttcctcttcctcttcttmttcttgttcatcttcttcctcttcctcttcttttttttttattatactttaagttctgggatacatgtgcagaatgtgcaggtttgttacataggtatacacgtgtcatggtggtttgctgc

SEQ ID NO: 611244 - DNA, 633 bp, Homo sapiens
ttaaatttctttttcagctagttaattattggtgtacaggaacactattggtttttgtatgytaattttgtatcctgaagttttactaaattccttcatcagttctaagagtttactggtgaagtctttaggtatatatatatatatatatatatatatatatatatataattgtgtcacctgtgaagagggatggtttcacttcctcttttccagtttggataccgttcattgctttctcttgcctaattgtgctggctagaacttatagtatgtgttgaataagagtagtgaaagttagcatatttgtcttgttccaatttttagaggaaaggcttttatcttttccccatttagcaggatgtttgctgtgggtttgtcatatatgacctttattgtgttgaggtatgttccttctatatttaattgttgggagtttttatcatgaagatatgttaagttttagaaaatgcgtttactgtatctattgagtaatcttatgtttttttcattctgtgagatgtggtatatcacatttattgatttgaatatgttgaaccatttttgctttcctgggataaatcccactttatcatgttgtgtaatctttttggtgtgttgttggattcagtt

SEQ ID NO: 611245 - DNA, 633 bp, Homo sapiens
ttaaatttctttttcagctagttaattattggtgtacaggaacactattggtttttgtatgctaattttgtatcctgaagttttactaaattccttcatcagttctaagagtttactggtgaagtctttaggtatatatatatatatatatatatatatatatatatakaattgtgtcacctgtgaagagggatggtttcacttcctcttttccagtttggataccgttcattgctttctcttgcctaattgtgctggctagaacttatagtatgtgttgaataagagtagtgaaagttagcatatttgtcttgttccaatttttagaggaaaggcttttatcttttccccatttagcaggatgtttgctgtgggtttgtcatatatgacctttattgtgttgaggtatgttccttctatatttaattgttgggagtttttatcatgaagatatgttaagttttagaaaatgcgtttactgtatctattgagtaatcttatgtttttttcattctgtgagatgtggtatatcacatttattgatttgaatatgttgaaccatttttgctttcctgggataaatcccactttatcatgttgtgtaatctttttggtgtgttgttggattcagtt

SEQ ID NO: 611246 - DNA, 608 bp, Homo sapiens
gtttcctagccaaggaaattgaggcctggagaggagaaaccacttgctccgggtcatatagatctccattttgaaatcacttgtatctgcagttgatttggccctatgatatctgtgacatctggtaacttgtacacttatactaaggcttacattctaacctaacttttcatggggccttatctcccagttagactattaatatgtataaggatttgctgaacggttgtgtgaataagctttcttaagtgatcaaggaaggcttcctgaaggaactgggaccctgaatgaggaggcagggagggcaatgacttttcctgtgtcatcctacacaggtatgtgacaacttgtaggcaggaagtccctcaycccacaccccacctgcattcaggtagaattgactcagggtcaggatatagaagcttgatctatggcccatctaatgaataaatgtcacttgtgttcttaatctatatggcttggactctttataaaagctccaagataaaggatggggactagaagctttcaagcctacaaggactccagggaaggacaaggaccatagttggaggcttgaatggggcaggaatggggagagtgaccaa

SEQ ID NO: 611247 - DNA, 478 bp, Homo sapiens
ctctcattctcttgctagtatctaattgaatcttctagaagctacatggcatgtggtataacaacagatgtagatatgagaatccagctgtcttgtattaggctagacattaaagagatttgcagaatgtaaaacaatttttttgttctgaaaaatatggttatttttcataaaaatgttaagatataataggcttattatttttatttttttaattttatttttatttttatttatttatttatttttgagacggagtttcactctttttgcccaggctggagtgcaatggcgcaayctcagctcactgcaacctccgcctcccgggttcaagcgattctcctgcctcagcctcccgagtagctgggattacaggcacctgcaaccatgcccggctaattttgtatttttagtagagacggggtttctccatgttggtcaggctggttttgaactcccgacctcaggtgatccaccc

SEQ ID NO: 611248 - DNA, 478 bp, Homo sapiens
ctctcattctcttgctagtatctaattgaatcttctagaagctacatggcatgtggtataacaacagatgtagatatgagaatccagctgtcttgtattaggctagacattaaagagatttgcagaatgtaaaacaatttttttgttctgaaaaatatggttatttttcataaaaatgttaagatataataggcttattatttttatttttttaattttatttttatttttatttatttatttatttttgagacggagtttcactctttttgcccaggctggagtgcaatggcgcaacctcasctcactgcaacctccgcctcccgggttcaagcgattctcctgcctcagcctcccgagtagctgggattacaggcacctgcaaccatgcccggctaattttgtatttttagtagagacggggtttctccatgttggtcaggctggttttgaactcccgacctcaggtgatccaccc

SEQ ID NO: 611249 - DNA, 461 bp, Homo sapiens
gttctgaacctaaagtgtattctcagctttataagaccatagtacattgcatgttctaatcagtgaaagcactaggatattacataagtggtactttttataattcataaagaagtagtctgtcagaaaagagggagaaaacatgccagatcctggcttagcagttgcagtaacaggtttggcactctaaatccttatgattgttttttgaatcattaagccacaaagtttcagactctctgtcttgagttttccctgtgttttctggtagcaycaaggataaagtatgcagcatggtgctgtggaaatattttgcacttgaaattaaagagatctgggtttatatccaggatttgaactagcttaacagctctgcatccttgagcaaatgatatctggtttcctaaagtgtaaaatggggatactatacaattaaaaactcattaaaaaactacagataa

SEQ ID NO: 611250 - DNA, 501 bp, Homo sapiens
tcttgtttctgcttttaatatttgctcactcattgtaaaacattactctttgttatttatttgtataagtaaccttatctcacttgtaggtaatcagaagtcttttagagaaataggtagataaatattcacacatatacacacatatgtaggtattacattactaacataaatcaaatgattcctgaattaaaacttgtgaaacatcaccaaaggagcaaatatgctttatggcagctatttatactagagacccctttcacttatctctagtttgtgactgcctatgagatgattgatattgttatatgcctgcagtgcttttctaattctttctagtaaaggattattgtactcctgttaaatgtttcagaattctatttagaccttttatctttacttgaagaatattagcattggcattaaaaagcaaaagttttcaatcaaagaaacacatataaayaagttttagattgccacctaagcataggtatttacata

SEQ ID NO: 611251 - DNA, 390 bp, Homo sapiens
tttgatagggattgcgttgaatctgtagatcrctttgggtagtatgaacattttaacaatattggttcttccagtctatgaatatagaatatctttccatttgttggtgtccttttcaatttcttgcatcagcatgtgatagttttcaatatcgcaatctttcacatcttaaattaattcctaggtatttatttgtggttattgtaagtggtattacattttttatttccttttcagattgttcatcactgctggcatatagaaatgctactgattcttatatgttgatgttgtgtcctgcaattttactaaatttatcagtcctaataattttctggtgtagtctttaggttttattaaatataagatcatagcatctgcagacaaaga

SEQ ID NO: 611252 - DNA, 407 bp, Homo sapiens
ccctgggcatttctttactgggagactttattacagcttcaatcttyttacttgtatattgatatttttattcaggtttaggaaattctctgttatcctgctgaataaactttctacccctatctctgtctctacctcctctataaggacaataactcttagatttgccctattgaggctgttttctagatcctgtaggcattcctcattggttttttatctttcttcttttttctcctctctgtattttcaaattaagctcactaattctttcttctgcttgatcatttctgctattaaaagactcgtgttcttcagtatgccaattgcatttttcagctccagcatttctgcttgtttctgtttaatcattttaatctctttgttaaatgtatctgatagaattc

SEQ ID NO: 611253 - DNA, 557 bp, Homo sapiens
aggcaaagacttcatgaccaagaacccaaaagcaaacggaacaaaagcaaagataaatagatggaacttaattaaatgaaaaagtttcttcatagcaaaagaaataatcagcaaagcaaacagacaacccacagaataggagaaatcttcacaatctatacatccgacaaaggactaatatccagaatctacaaggaactcaaacaaatcagcaagaacaaaacaagcaatcccatcaaaaagtgggctaaggacatgaataaacaatttttaaaagatgatatacaaatagtcaacaaacatgaaaaaatgttcaacatcactaattatcagggaaatgcaaatcaaaaccccaatatgttaacacctcactcctacaagagtggccataattaaaaaatcaaaaaataataaatggtgtggatgtggtgaaagggaatacttttacactgttggtgggaatgtaaactagtacaatcactatggaaaacygtgtggagattccttaaagaactaaaagtagatctaccatttgatccagtaattccactcctggg

SEQ ID NO: 611254 - DNA, 591 bp, Homo sapiens
ttataaagggtttctgataccaaaaaactggaaaacttttgtctttgttctttaacactataattttcattccattttcacaactatgtgcttgttatctaggaagattcaagctaaaaaataagattgataattagccacaaattcaatatagaaacacattactaaattacataaaaggtgtattgctctctctcttttttaatttttataataatggaccagaaaatgtatatcatcatttgaattttttccccctaactctgaacctggaaatatcttgtgcatatgtcccttttttcaacaccttcaaatctggttcatcatcatcatcatcatcagggctacagggtcacatctatctgaaaatttacataaatgaatgatagaaacataatatttgtcctttgggaagcatgagtttaaattcctaaaggaaatgtccacgtgttttgaagtaaataagaatttactttttctgctagaaagtatattatttcatcttgtactattttatttgactttcatgaatttctgtcttgtattttcaaargaaatgtattccctaacaacttcgtatttccacagtgt

SEQ ID NO: 611255 - DNA, 230 bp, Homo sapiens
ttttaagataattttttctccacaaatcaagaaaatgcaatttatttataacaaacattttaagtaaaaagaagtagtcatagagaacwaaaatatgttgtaaaaataatatgacattaattttggctttttggctcatgttcttaaacaggcaaaactcgttgccaaagatgtagctaaaaatagaggaaagcaaatattatgtaaataaaattatttgtttaattgaa

SEQ ID NO: 611256 - DNA, 486 bp, Homo sapiens
aagccccttgtggaattatgtgaataagatttctaggaatataaaaaatttcaaactaattggaaacaaagcatcaggatcttactaatttgattgctaagacacgagtgtgggatcaaagaagtaaaatgtgaacagtaytcctcaatacaagtagcttcatttagaaaaggagataataaccaaaaaagaatatttatcactggcagcttgtgattaatatttcatttacagtgttccttgcatttaaatctcctccattactcgcacttataagccttcttcgtgctgtcatcacctttcatatcctccccactgttaagaaatatgtgactgagataactgcatcatatcccacaaatgctgcggtctgttaaactgagagagcaatattcagtagtgcactgatgctgacacagattttactaagaacaatttcacctggggataactctcttcacctagctatcgaagccagcattactg

SEQ ID NO: 611257 - DNA, 486 bp, Homo sapiens
aagccccttgtggaattatgtgaataagatttctaggaatataaaaaatttcaaactaattggaaacaaagcatcaggatcttactaatttgattgctaagacacgagtgtgggatcaaagaagtaaaatgtgaacagtactcctcaatacaagtagcttcatttagaaaaggagataataamcaaaaaagaatatttatcactggcagcttgtgattaatatttcatttacagtgttccttgcatttaaatctcctccattactcgcacttataagccttcttcgtgctgtcatcacctttcatatcctccccactgttaagaaatatgtgactgagataactgcatcatatcccacaaatgctgcggtctgttaaactgagagagcaatattcagtagtgcactgatgctgacacagattttactaagaacaatttcacctggggataactctcttcacctagctatcgaagccagcattactg

SEQ ID NO: 611258 - DNA, 651 bp, Homo sapiens
atgttgtcttacatacaaaaataatttaaattattctaaggtatcttgtttgtcattatcagaagcataagtttgacarttacttactacaaaacaatgatatgtgaaattctttatcatttgtgatctgttttgccattgacctcacaaaatcatcttttaaaaacgtacttgattatacccaacaatattgtttcacttgaacaataagaatgtcttgtttctttgtgccattcttgaaacttttacattgtaattggttaaatgaaagaaattaacatgtattttaaactggtgtcacaaagcagtgcttaataaatacatatatgataaaagaaaaattgtaatatccatcaatatgtctatccaagcatctaatatattctatactgcaaataaaaatgctcatatttataaacatgtcttttgttctctcaaagcaaatagttatgtttaataaaaaagacataagctcttacagtcagtaatagtcactgatatctctcagaattagtcaatgaagattgtgactgctatgatgctattttcttatcagtgcaagcccaggaagagaataattagtccagatctgtcaagggactctgactccatcagaagagtactttaaaaagtgatctgggcacaaaaatt

SEQ ID NO: 611259 - DNA, 651 bp, Homo sapiens
atgttgtcttacatacaaaaataatttaaattattctaaggtatcttgtttgtcattatcagaagcataagtttgacagttacttactacaaaacaatgatatgtgaaattctttatcatttgtgatctgttttgccattgacctcacaaaatcatcttttaaaaacgtacttgattatacccaacaatattgtttcacttgaacaataagaatgtcttgtttctttgtgccattcttgaaacttttacattgtaattggttaaatgaaagraattaacatgtattttaaactggtgtcacaaagcagtgcttaataaatacatatatgataaaagaaaaattgtaatatccatcaatatgtctatccaagcatctaatatattctatactgcaaataaaaatgctcatatttataaacatgtcttttgttctctcaaagcaaatagttatgtttaataaaaaagacataagctcttacagtcagtaatagtcactgatatctctcagaattagtcaatgaagattgtgactgctatgatgctattttcttatcagtgcaagcccaggaagagaataattagtccagatctgtcaagggactctgactccatcagaagagtactttaaaaagtgatctgggcacaaaaatt

SEQ ID NO: 611260 - DNA, 651 bp, Homo sapiens
atgttgtcttacatacaaaaataatttaaattattctaaggtatcttgtttgtcattatcagaagcataagtttgacagttacttactacaaaacaatgatatgtgaaattctttatcatttgtgatctgttttgccattgacctcacaaaatcatcttttaaaaacgtacttgattatacccaacaatattgtttcacttgaacaataagaatgtcttgtttctttgtgccattcttgaaacttttacattgtaattggttaaatgaaagaaattaacatgtattttaaactggtgtcacaaagcagtgcttaataaatacatatatgataaaagaaaaattgtaatatccatcaatatgtctatccaagcatctaatatattctatactgcaaataaaaatgctcatatttataaacatgtcttttgttctctcaaagcaaatagttatgtttaataaaaaagacataagctcttacagtcagtaatagtcactgatatctctcagaattagtcaatgwagattgtgactgctatgatgctattttcttatcagtgcaagcccaggaagagaataattagtccagatctgtcaagggactctgactccatcagaagagtactttaaaaagtgatctgggcacaaaaatt

SEQ ID NO: 611261 - DNA, 651 bp, Homo sapiens
atgttgtcttacatacaaaaataatttaaattattctaaggtatcttgtttgtcattatcagaagcataagtttgacagttacttactacaaaacaatgatatgtgaaattctttatcatttgtgatctgttttgccattgacctcacaaaatcatcttttaaaaacgtacttgattatacccaacaatattgtttcacttgaacaataagaatgtcttgtttctttgtgccattcttgaaacttttacattgtaattggttaaatgaaagaaattaacatgtattttaaactggtgtcacaaagcagtgcttaataaatacatatatgataaaagaaaaattgtaatatccatcaatatgtctatccaagcatctaatatattctatactgcaaataaaaatgctcatatttataaacatgtcttttgttctctcaaagcaaatagttatgtttaataaaaaagacataagctcttacagtcagtaatagtcactgatatctctcagaattagtcaatgaagattgtgactgctatgatgctattttcttatcagtgcaagcccaggaagagaatrattagtccagatctgtcaagggactctgactccatcagaagagtactttaaaaagtgatctgggcacaaaaatt

SEQ ID NO: 611262 - DNA, 537 bp, Homo sapiens
ccattttagtgcattaattacaagcaccttttttttttttttttgagacatagcctcactctgtcacccaggcttgagttcagtggcactatctcagctcactgcaatctctgcttcctggttcaagcgattcttgtgcctcagccctcccgagtaactgggattacaggcacacaccaccatgcccagctaatttttttgtatttttaatagagatggggtttcattatattggttaggttggtcttgaactcctgacytcaagtgatctgcctgccttggcctcccaaagtgctgggattataggcatgagccaccgcgtctggcatacaaacttttgattacagtttgacacctgttgatggacagaaaatggagtaaccgtccaggcaggaatgttctagtctgtgtgacagttacagttcattttataaataaacaattgactttttttggtagttatggtccctaccctcagtgctgtatctctatttggtattcaaacaaatccagggaatctgcaaggctgaagggcag

SEQ ID NO: 611263 - DNA, 629 bp, Homo sapiens
ttatgtgcctgctgatgtaactcagcactacctttgaagtattttcacacaaaaaattaacaagaatatgaatctaatggatcaatttgcaggagatgcagaagatagaagataaattacacaacactgtgcaaaaacaatcagcccattccagaagggagaaattttacaggacaaatgattcatggaaaaagatcagagaaaaggacataatcatccattgaaagtgaattgggaaaaaatataaaatagctacaatgtgtggacttggttttgattctgaattgaaaactaactataaaaagtaattgagctttcaagctatgatgatgtctccacgagaataaggctcttgaaaaagacaccttcatccctctcaggcagagawgaaggaacccaagaagcactcagggttaagccccaattcctactgcatagatgtaagatgcccaggatgtgacacatttggggggggcttcggccacgcacacattgcggttttgggtgttgagtgctgtgctactcttagccagtttgcagaaggaaaagcaaggctcacagaaggatgctcctctgacagagcagcactgaaggcaccctgaatcaacaagagtgggaaaccatcccaa

SEQ ID NO: 611264 - DNA, 468 bp, Homo sapiens
atttctagaattttttcttttttgtcatttgacctatattacttcttcttgtttctacacagctattcactcacaagatacgayagaagagatttaaaaaattaccataataattgacctattatcctctgagtctcatcatctgataaagatttattctcaattatataaaaatcatcagttattgttaaataagaaactcagtatatgtagactcctccagtctcttggatttacatatatagttttaattgtacaatattattgtaaaagttaatatcctttcaatgtatctgatttaaaattaccacagagcattgtgggattaaaggagtactgtgtcaagagaacactgaattttattctatataattcaatggaaggaatcagaaaacagcagctccctgcagggccccaaatggttaattaacattatgtgagtgacagacttgggatctctgagctgat

SEQ ID NO: 611265 - DNA, 603 bp, Homo sapiens
accacggtagttttgacctcagaggttgatgacatgttggaaatttgcatacgtttacaccacacaggctgaggctagggtatgggagtcgatcgcttggctcctgagcaaagctatatctgtggtttcttgttctctactcttctgaaatgatacaactttattcctttgtaaaaaaaagagactgaaagaaagccaactactagtcctgataatgcatgtaaaaacaaagtgaggaagatgtatttagaatttatgttttgtacaaacagtggaattatcagggaaatgcaaattaaaactacaatgagatactaactcactcctacaagaaggagaaaaaaktcaaaaaacaatagctgctggtgtggatgtgataaaaagggaacacttttacactgctggtgggaatgtaaattagtacaaccactatgaattccttaaagaactaaatgtagaactaccattcaatccagcaatctcactattaggtatctacccaaaggaaaagaagtcattatatgaaaaagacacatgtgcgtgcatggttatagcagcccaatttgcaattgcaaagatatggaatcaacctaaatgcccact

SEQ ID NO: 611266 - DNA, 466 bp, Homo sapiens
atgaaatttgacttttctaattctactgcgaaatcacatagtgagtgtgtaaaagtgatggtgtgtgatcctcttcacaaatttctattcccttccttatctgttgggagacattagacacattcatttgaaaaattgttcttttcaaccagttcttttatttccatacaccatttaaaaagtaattcccactgcatstacacaaagttaaaatatattaatttgcttcaatatagcattttctttattgtgtgccagaaaaatatcacggaaattttcctgtactgaaaagcaaataccgcttttccacttgggcagcctctcccatccaatcgtcattcacatacaccttcatcattcactgggttctcactgagcactccctcttagccatgcaggtgctcacagatgtaccccaaagaggagcggcgtgcaaagcaacatgtcttcaaattcaaaagtgaca

SEQ ID NO: 611267 - DNA, 466 bp, Homo sapiens
atgaaatttgacttttctaattctactgcgaaatcacatagtgagtgtgtaaaagtgatggtgtgtgatcctcttcacaaatttctattcccttccttatctgttgggagacattagacacattcatttgaaaaattgttcttttcaaccagttcttttatttccatacaccatttaaaaagtaattcccactgcatctacacaaagttaaaatatattaatttgcttcaatatagcattttctttattgtgtgccagaaaaatatcacggaaattttcctgtactgaaaagcaaataccgcttttccacttgggcagcctctcccatccaatcgtcattcacatacaccttcatcattcactgggttctcactgagcactccctcttagccatgcaggtgctcacagatgtaccccaaagaggagcrgcgtgcaaagcaacatgtcttcaaattcaaaagtgaca

SEQ ID NO: 611268 - DNA, 197 bp, Homo sapiens
cggcggggcccggcctcgaggaccgcccccagggcggggagtggtgtgagccgcggcgccgccagcaaactttcctcctccgaattcttgaccgagagccttggaaccacwttctgcccaaatctgtacacgccggagccagggagccgcccgccgcccggggagcggagtggggaaagagggggtggagaagggac

SEQ ID NO: 611269 - DNA, 606 bp, Homo sapiens
cgttttctattggtgtgtaacaaattacccccaaacacagtagcttggcacagcaaatgtgtgtgacctctcacagcatctgagggtctggaaactagtaaggtggggctgactcaggggctctcacaaggtygctgtcaagtcagggctgcagtcacctgaaggcttgactggggctggaggagccacttccaagtgtgctcacagtgttcatggcttcaggccctcactggctgttggctagagtccccatggcctctccatagactgtctgcatgtccttttgacatgagagctggcttgagaattagtgatctgatagatgaggggagagagagagagagggagaacatgagaactaatcttaaaaataaactccactgggttctgctgtgtcctattggtcacatagatcaactctgccacagtgtgggaggggactacaccaagggtgaacaccaggaggtggggaccatcacaggccatcttgaaggtcactgaccacattccccaatcaaaggcctgcctccccaacacagcccaccaccactacctcagtcagagaactggggactcaggaacttaaagccatctcaaagaaataca

SEQ ID NO: 611270 - DNA, 547 bp, Homo sapiens
aaaaaagagatacattcaatgattccgcttacataagaatccagaagagtcaaaactaacctaaagttatagaaaacaaaccagtgattgcctggggctggggtggggtgactgactgaaaagggaccaagggaactttgtgaggcaatgaaaacattctactcctctgtttaggagaccaggttccatgttaattaaaacccacagaacygtacacttaaaaataggtgtactttattgtatgtcaataatatctcaaaatagtggatttaaaaagaaaaaacagattgacaaaagtttttttttcaaagttcttaagttttctagtggcttcccacaggacgggaaacaatctcttaattcacaaaaatgttttatctgtattgtcttctgacctgttgtatacacacaaacgtaagaattcttaagaaagaaaacctttaaaaatcatcacttttgtgcttacagatgagtcagacaaaagccttattttaactgtgattatacacctaaaagaacttttaaaattaataccaagcgtaagctt

SEQ ID NO: 611271 - DNA, 547 bp, Homo sapiens
aaaaaagagatacattcaatgattccgcttacataagaatccagaagagtcaaaactaacctaaagttatagaaaacaaaccagtgattgcctggggctggggtggggtgactgactgaaaagggaccaagggaactttgtgaggcaatgaaaacattctactcctctgtttaggagaccaggttccatgttaattaaaacccacagaaccgtacacttaaaaataggtgtactttattgtatgtcaataatatctcaaaatagtggatttaaaaagaaaaaacagattgacaaaagtttttttttcaaagttcttaagttttctagtggcttcccacaggacgggaaacaatctcttaattcacaaaaatgttttatctgtattgtcttctgacctgttgtatmcacacaaacgtaagaattcttaagaaagaaaacctttaaaaatcatcacttttgtgcttacagatgagtcagacaaaagccttattttaactgtgattatacacctaaaagaacttttaaaattaataccaagcgtaagctt

SEQ ID NO: 611272 - DNA, 547 bp, Homo sapiens
aaaaaagagatacattcaatgattccgcttacataagaatccagaagagtcaaaactaacctaaagttatagaaaacaaaccagtgattgcctggggctggggtggggtgactgactgaaaagggaccaagggaactttgtgaggcaatgaaaacattctactcctctgtttaggagaccaggttccatgttaattaaaacccacagaaccgtacacttaaaaataggtgtactttattgtatgtcaataatatctcaaaatagtggatttaaaaagaaaaaacagattgacaaaagtttttttttcaaagttcttaagttttctagtggcttcccacaggacgggaaacaatctcttaattcacaaaaatgttttatctgtattgtcttctgacctgttgtatacacacaaacgtaagaattcttaagaaagaaaacctttaaaaatcatcacttttgtgyttacagatgagtcagacaaaagccttattttaactgtgattatacacctaaaagaacttttaaaattaataccaagcgtaagctt

SEQ ID NO: 611273 - DNA, 530 bp, Homo sapiens
ttttattatgggtatatgatctgaagttctaagtgaagggtttgctttaaatattggcttatcctcatgataatacaattttattctaagagacgggtcttgctatgtggctggagtgcagtggctattcacaggcacgattatagagcactacagcctcgaattaccaggctcaagcaatcccccgcctcagcctcccacgccgctgggactacaggcacaccccaccacacccagcagtaaatgtaattttatgtataataaytcaatttatgtaaattttgatgaatacagccatcttgtaatgtgatattaatactgtaattatcaatcaacatgtaagttagcaaccgtgtgcaaaattaggctctgtggcaacacacaacaaaactgaacagcctaccttggagattataatccagtttggaagacattatgtatgtatctcaaccctccgcactactgatttcttgggccagataattcttcactgtggcaggctgtcctgtgtactgtaggatgtttggtag

SEQ ID NO: 611274 - DNA, 625 bp, Homo sapiens
agaatgaactatccttctcaaccttttttccaaaaacctaatatacattctttctttgattgcccacaagtccttgaaaaatacttatccttcctatgtgtccacctgactacctaagatgtagacagaggccaaaaagccctatcaaaatattccctccaaattgactattccctaatcaccgttctctgggtacagttaccaacctcatatactttaccctacactactttcactcggttaataatccaccatgtaatcctcaatcttatcccttgtcagataatttgatcccttgactgacccatttggcaactgagtaaaagagtgaactaaaattaatttgctgagttcattcagatgctgatgatcactgcttacyctattaaatgctcacagctcactcaatagtccacttaagaaacagtttcagggatcaatgttaccacagacaatcttattttttagttagatcctttatacaaaagtggaatatgtatccatctataaccaattttcatttctcccattagttctcaaagatgatcaactgtgcttttataatcatactcacatacttataagtgtactctgggctgtcaacttctgcacctgaaacctgaat

SEQ ID NO: 611275 - DNA, 533 bp, Homo sapiens
gaaagtctgtaatgagggattatatttgtactcagacaccagcattagaatgccattctattatagtaagagtaaattacggccagacgcagtggctcacacctgtaatcccagcactctgggaggccraggtggacggatcactggaggtcaggagttcaaggccagcctgaccaacacagagaaaccccgtctctactaaaaatacaaaattagccgggcatggtggcacatgcctgtaatcccagctactcaagaggctgaggcaggagaatcacttgaacccgggaggcggaggctgcgatgaggggagatcgcgccattgcactccagcctgggcaacaagaggaaaatgccatctcaaaagataaataaataaacaaaaaataagagtaaatactttaaaattagatgtaaaattcaaaaattcaaaacacaaaatgtttatgggggaaaggtcgttatccttattttattcagcagaaaagtgacctgcaaagagtatggtctagtaccagaaactgagacctaaa

SEQ ID NO: 611276 - DNA, 533 bp, Homo sapiens
gaaagtctgtaatgagggattatatttgtactcagacaccagcattagaatgccattctattatagtaagagtaaattacggccagacgcagtggctcacacctgtaatcccagcactctgggaggccgaggtgkacggatcactggaggtcaggagttcaaggccagcctgaccaacacagagaaaccccgtctctactaaaaatacaaaattagccgggcatggtggcacatgcctgtaatcccagctactcaagaggctgaggcaggagaatcacttgaacccgggaggcggaggctgcgatgaggggagatcgcgccattgcactccagcctgggcaacaagaggaaaatgccatctcaaaagataaataaataaacaaaaaataagagtaaatactttaaaattagatgtaaaattcaaaaattcaaaacacaaaatgtttatgggggaaaggtcgttatccttattttattcagcagaaaagtgacctgcaaagagtatggtctagtaccagaaactgagacctaaa

SEQ ID NO: 611277 - DNA, 533 bp, Homo sapiens
gaaagtctgtaatgagggattatatttgtactcagacaccagcattagaatgccattctattatagtaagagtaaattacggccagacgcagtggctcacacctgtaatcccagcactctgggaggccgaggtggacggatcactggaggtcaggagttcaaggccagcctgaccaacacagagaaaccccgtctctactaaaaatacaaaattagccgggcatggtggcacatgcctgtaatcccagctactcaagaggctgaggcaggagaatcacttgaacccgggaggcggaggctgcgatgaggggagatcgcgccattgcactccagcctgggcaacaagaggaaaatgccatctcaaaarataaataaataaacaaaaaataagagtaaatactttaaaattagatgtaaaattcaaaaattcaaaacacaaaatgtttatgggggaaaggtcgttatccttattttattcagcagaaaagtgacctgcaaagagtatggtctagtaccagaaactgagacctaaa

SEQ ID NO: 611278 - DNA, 533 bp, Homo sapiens
gaaagtctgtaatgagggattatatttgtactcagacaccagcattagaatgccattctattatagtaagagtaaattacggccagacgcagtggctcacacctgtaatcccagcactctgggaggccgaggtggacggatcactggaggtcaggagttcaaggccagcctgaccaacacagagaaaccccgtctctactaaaaatacaaaattagccgggcatggtggcacatgcctgtaatcccagctactcaagaggctgaggcaggagaatcacttgaacccgggaggcggaggctgcgatgaggggagatcgcgccattgcactccagcctgggcaacaagaggaaaatgccatctcaaaagataaataaataaacaaaaaataagagtaaatactttaaaattagatgtaaaattcaaaaattcaaaacacaaaatgtttatgggggaaaggtcgttatccttattttattmagcagaaaagtgacctgcaaagagtatggtctagtaccagaaactgagacctaaa

SEQ ID NO: 611279 - DNA, 449 bp, Homo sapiens
ctgccaactaaatacacatgtatagcctatcaaaatacttaaagaatattgtgaaaattcacagaaacataacaaaatcaaagtcataactcccccatataccctttccgaagaagatcatgactttcaaaaggtccacttgctgaaagttcagtaactggaatactgtcctttagctcagatccaagtcctctggcattctacaacacaaataaaaaacattattaaatagaaaaaaaatttaaacacacacccagacagctgtgtcaaaaatattgtttaagtaggagacagaaaaataagaggccctcaaaaagtccagactagacaattacagcaagccttaaacatyatgatatgatagagacacacatggtacaatgaaaataccaaatttaaaagtgggaaggattcctgaggtgatctctgaatgctgtcagtttgaaagg

SEQ ID NO: 611280 - DNA, 449 bp, Homo sapiens
ctgccaactaaatacacatgtatagcctatcaaaatacttaaagaatattgtgaaaattcacagaaacataacaaaatcaaagtcataactcccccatataccctttccgaagaagatcatgactttcaaaaggtccacttgctgaaagttcagtaactggaatactgtcctttagctcagatccaagtcctctggcattctacaacacaaataaaaaacattattaaatagaaaaaaaatttaaacacacacccagacagctgtgtcaaaaatattgtttaagtaggagacagaaaaataagaggccctcaaaaagtccagactagacaattacagcaagccttaaacatcatgatatgatagagacacacatggtacaatgaaaataccaaatttaraagtgggaaggattcctgaggtgatctctgaatgctgtcagtttgaaagg

SEQ ID NO: 611281 - DNA, 606 bp, Homo sapiens
tagtgtggactgtcactaacctactttgtgactgccagcaaagcaccaacctctctggccttgtttactcatctgcaccaaggagctgaactcctaccaggactacaaatgctccttgacttatgatggggttacttcctaataaatccatcttaaattgaaaatgtcaaaagtcaaaaacacatttaacacacctaacctactaaacatcaggccttagcctagcctaccttaaatgtgctcagaacacttacactagcctacagtcggccaaaatcatctaatacaaagcctactttattaaaaagtactgggtatctcatgtaatttaytgaatactgtactgaaagtgaaaaacagaatggctgtattggtactcaaatatggcctctactgactgtgtatggatttcacaccatcataaagtcagaagattgttgaaccaccagaagttggggaccttcagcagagatgtgtgattgttgctttccaaatgtatcttctattacttctctatatgaacattctcctccttctggactgctttattgtaaagtaacaaggtttcaacgcacaaagaaaaggtgaattctgacttctggattg

SEQ ID NO: 611282 - DNA, 606 bp, Homo sapiens
tagtgtggactgtcactaacctactttgtgactgccagcaaagcaccaacctctctggccttgtttactcatctgcaccaaggagctgaactcctaccaggactacaaatgctccttgacttatgatggggttacttcctaataaatccatcttaaattgaaaatgtcaaaagtcaaaaacacatttaacacacctaacctactaaacatcaggccttagcctagcctaccttaaatgtgctcagaacacttacactagcctacagtcggccaaaatcatctaatacaaagcctactttattaaaaagtactgggtatctcatgtaatttactgaatactgtactgaaagtgaaaaacagaatggctgtattggtactcaaatatggcctctactgactgtgtatggatttcacaccatcataaagtcagaagattgttgaaccaccagaagttggggaccttcagcagagatgtgtgattgttgctttccaaatgtatcttctattacttcyctatatgaacattctcctccttctggactgctttattgtaaagtaacaaggtttcaacgcacaaagaaaaggtgaattctgacttctggattg

SEQ ID NO: 611283 - DNA, 580 bp, Homo sapiens
gtgtgtgcaaattacagggaggcagtattgtaccccaaatagggggaaaactgtctaacgcttaggacactgtttcttaaacctgagtcatgtacagactccctaatagaaaaaattctcgcaaatttccagggtttacgaattgtttttctataacagttcttagttatggacaaacatacaactaggtataaagttcttatgcttacagttatacacatttacaaattaagtttgtaaactgaatgtataaatgtatacattaaagacaagcaaagctataatgtcaacaatatttaaataaacaaccttcttttaatgggagagatgatgttttgctgaagcaaaatcgtcattcagagcatgaatatggtatsgatggcttttgccttgggcagttgtagaccgctgtgtgaattgtgataacacaaaccaaacacatttctttttctgaaccatagagaaatcttcatttatgaagtatgctataaggttactttccttcactaaaattgacatcatggttacctattaggaccaattctgttcttttttaattcactcccagttaaagtggatc

SEQ ID NO: 611284 - DNA, 586 bp, Homo sapiens
gcggctgcactattttacattcacgccagcaatgtacaagggttcccctttctcctcaccttacacttaatttctgtttttaatacaattttttttaaatatgaggaattaactaggtttagtcagtgtttctctaaacttattctgaaaatcactactcagaatcatctggaggggcaggtgcttataaaaatgcagactcctaaccccacctcagaccaagtaggacccctgagactggggtcacaaagtgtgattttgtgtgtgtgtgtgtgtgtgtgtgtgtgtgtgtgtgtgtgwgatacagggtctcactctgttgcccaggctggagtgcagtggtgccatgactgctcactgtagcctccaactcctgggtgcaaacaatcctcctgcctcagcctcctgggactacaggtgtatgccaccatgcccagctaatttttaaattttttgtagagattgggtctcactgtgttgcccaggctggtcttgaatcccagcttcaagcgatcctcctgctttggcttcccaaagtgctgggattacaagcatgagccactgtgcacggcctgaagtgtggctt

SEQ ID NO: 611285 - DNA, 558 bp, Homo sapiens
tgaacattagcgttttaaggtaaagcatgatggttcataccttttaaaaaaatagagaatgggtcacatcagctttctccccyggtggcatctctcggcattctactgaatccctcagacacaggaacgagagtagcccagatgaatgtactcaagcaggacatagtccagacttcccagctagtctcaaacaaaacagcagaataaaaaccacaacatcccatggaatttctgtaaacagacataatgttaagcaaatggccatctaacctatgtggtacttggccagttgttacaggaaaggggtcctgatccagaccccaagagagggttcttgcatctcatgcaagaaagaattcagggtgagtccatagagtagagtaaagcaagtttattaggaaagtaaaggaataaaagaatggctactccatagacagagcagccctgaggactgctggttgcccattcttatggttatttcttgagtatatgctaatcaaggggtggattattcatgcctcccctttttggaccatatagggtaacttcctgacattg

SEQ ID NO: 611286 - DNA, 552 bp, Homo sapiens
gttgcccaggctggagtgcaatggcgcgatctcagctcactgcaacctctgcctcccaggttcaagtgattctcctgcctcagcctcccgagtagctgggattacaggcgtgcaccaccacacccagctaatttttgcatttatagtagaaacagggtttcaccatgttggccaggctggtctygaactcctgacctcaagtgatccatgtgccttggcctcccaaagtgctgggattataggcatgagccaccactctcagctctaattaattatttttaacacctgtcatcattcttgagtccactttatgcaggtctttagtctgaggtgcacaaagttaaaaggggccatttttggtgaccccatgtttccatattctaacatccaatttcctttactcaatgctatttactcaatgtcatagtcattagggccacacttaagtgaatagtgcagtcttcctttatcctgggcacatactgctctggcttggatgtggtttatccccaccaaaactcatcttgaaatttgatccccaacatggtcgtg

SEQ ID NO: 611287 - DNA, 552 bp, Homo sapiens
gttgcccaggctggagtgcaatggcgcgatctcagctcactgcaacctctgcctcccaggttcaagtgattctcctgcctcagcctcccgagtagctgggattacaggcgtgcaccaccacacccagctaatttttgcatttatagtagaaacagggtttcaccatgttggccaggctggtctcgaactcctgacctcaagtgatccatgtgccttggcctcccaaagtgctgggattataggcatgagccaccactctcagctctaattaattatttttaacacctgtcatcattcttgagtccactttatgcaggtctttagtctgaggtgcacaaagttaaaaggggccatttttggtgaccccatgyttccatattctaacatccaatttcctttactcaatgctatttactcaatgtcatagtcattagggccacacttaagtgaatagtgcagtcttcctttatcctgggcacatactgctctggcttggatgtggtttatccccaccaaaactcatcttgaaatttgatccccaacatggtcgtg

SEQ ID NO: 611288 - DNA, 544 bp, Homo sapiens
ttgcatagagtgcaattcagaaacgacacacggctgggtgcagtttgggaccagcctgggcaacatggcaaaaccctgtctctacaatcaatataaaaattatctgggcatggtggtgtgcaactgtggtcttagctactcaggaagctgaggtgggaggatggcttgagctagggaggatgaagctgcagtgagccaagatagattgtgccactgcattccagtctaggtgacatagtgagaccccgcctccaaaaaaaaaaaaaaaaaaaaaaagaaagggggaaaagragaaaggaaacgacatacgatatatgtaagactgaaactttcttgctgcatgagatatggtattgtgaaatgattcagattttggcttctgagctcagattgcctaggtccaaatcccactctggcacatagctgggtgatcttggacagctccctcagcctattagtttcttcatctgtaaaatgggatgctgatcgtgtatctttcattggctattgctgtgtgcattaaatgagttagtacctgtaaagt

SEQ ID NO: 611289 - DNA, 619 bp, Homo sapiens
aaatatttattcttcttttaaataatagtgtctttattattttaaaaaaatagaaatgagttgcatatccttaagcaagaaaagaaagaaaaattcaaggcacacctcacactatatacaaaaactaaygcaagtagatcataaacttaaatgtaaaacctagaaatttatatcttttagaaaaaaagaaaggaaaaacttttgtgactttgggttatgcaaatattttttagaaaacagagtctataaaagaaaaaatatgaattggacatggttaaaattaagaacataacctcttcaaaatgttctgttaggagaatgtgaaacaagccctagactgtgggggaaattgcctatcatttagctcataaaagaattatagaaagaaaaggcagagtggctggcaagatggctgaataggaacagctccagtctgcagctcccagtgagatcaacacagaaggcaggtggtttctgcatttccaactgaggtacctgctcatctcactgggactggttaggtagtaggtgcacaccatggagggctagatgaagcaggttagggcattacctcacccgggaagtgcaggggtcagggaacaccctcccatagccaagg

SEQ ID NO: 611290 - DNA, 600 bp, Homo sapiens
gatcctccagctacagagtacatgtcattgttcatgaagcacttgccyaacaggaacttaaatattaattgtgaaaaaacagcatggggtaagaatctttgatgaactaaaattactgttgtgccatgatgtgaagggcctttaattttgccatctgggtcgaattgacaagaatgactaagaattgtagcttggagaattggtgaactttgcatatggacaattaactaaaaaagaacaagccagtttggaaaattgtgggtatctctgaaaatgaagtgtctgcctaccttcatattatgcagtcatttttccatcagagacacatttcttgcagcgaatggtagtttgggctgtaatcaagattagtgttgatgcatttggacctaagtaaagattgcaacatcctctaggagccgtggccctgatcacaggatctctcggtattttccaaacactcttccattccctacacttcctattacaacaagagagcattttgttatatctctgacaggaaatgtaaatctctcatccatgttatttaatagctcttcatctctgatagaaaataaagataataaatcagaagtatttata

SEQ ID NO: 611291 - DNA, 547 bp, Homo sapiens
tcataattaaaaatgagctgctcaagttaggacccaaattataatttttaaaatgtaattttctttgtgtctaacaatttgcaatttttcatagcataagcacattcattaatatgacccattcacagcaatatttagctgtcttttatgtaagtttatatgtgtgtgtatatatatgacgaaggtttatatatacacacacacacatatggcatgatttactcacaagttaacattttaacaattcaatatgaaatgtaattatataagatgctattttaaatcattttctcttttattctatgctgtcctttattttgccatatcttatccgttttccaaatgaacatagttctctttagcacagattttatgcttagtagtgattagtttcccagctttgtgtttcaacttctgattagatgtgaggcacctcacaaatattgcctgttaactccacagaatgacggtttgtgagcgtgttagagttcgaaaactacaagattcagtttgctacagctygagactatgaatcccccccaaaaaa

SEQ ID NO: 611292 - DNA, 588 bp, Homo sapiens
cagtgctgtttttatagtgtatttagaagattagttgtcctacagtaacatttatttaatcactggagtgctaattgcattttacattccataacatcttaatggttgggctggccatgacatgctgattgaaatttaaatgaaatagtgaaaaaaatagcatactctatttaaaacaatggaagttgagaacactctatagattaactggcttgctaagtatctttggcattaaatttgcaaacacaatatagagaaattgaattgttatttgccataattagtctttttctagaaaaatatcactagawaaaattgagaaaactagtgataagaggagcaattaatatattattctttaaacatttataatttatatattttatgtagtcatattcatttattaatttgtacctattacatgttgtatgtaatacattatagacatgtatattaaatgttgtatattaaatattatatattatatattttatgtgtatacattatatgaaatacatttattatatagatatatgtctaatatatataaaataaaacaattatatataaatataatgaaatataatt

SEQ ID NO: 611293 - DNA, 468 bp, Homo sapiens
gtggtgagcagcagcccagggcaggtgggcagggtgcatacacagcggttggccgggtctcatgtgcgtgcctcagggaagtccaaggtacggtgggtttctaagggtgtggccagcccagcatgtgtaacagcagcagcagcagaggtggcaatggcagctccataagttataggaaaattataggaaatttcagaggcaacattaaaataacattatataatattgtattggccaggtacggtggctcacacctgtaatcccagcactttgggagccaaggtgggtagatcacttgaggccaggagttcaagaccagcctggccaacatggtgaaacctcctgtctactaaaaatacaaaaattagccaggcatggtggcacatgcctataatcccagctacttggaagggtgaggcaggagaattggttgaamctgggaggtggaggtaatggtgagctgagatc

SEQ ID NO: 611294 - DNA, 610 bp, Homo sapiens
ccaagaggcagagaaatgaactcgcactagttttgctgaaagagatttaaaatggacttggaatccattaaaacagacttggagtattaacagtaaaacagacttggacttaagacagacctggagcattactaggcacaggagcagggttgtaaagttacacccgtctttgccagtgttcttcacccgtttccacattagatgtattagaggtgtctcaccacctgccattcctgagctgaaactaatccatgataacttccctttcttttcattttataactcactcctttctcctatttaatgtagaatatttcagaaaacttggcattcatatgattaacctcagagaagatgcttttaaaaccaaaataacaccttcgatgctacacatgacccggagagaaccagatcagtccaggtgttacatgatcctaagatgccaagagctgataagatgagattactggtgagatccccaagaacaaaccccaaatcagcaggaaagtttgggttgccaggctcatgcctccctctcttgttatcatgccyattgtttgtcacaggaggtaggcttatcccagtgatgagtgagtgctaagcccaaacc

SEQ ID NO: 611295 - DNA, 610 bp, Homo sapiens
ccaagaggcagagaaatgaactcgcactagttttgctgaaagagatttaaaatggacttggaatccattaaaacagacttggagtattaacagtaaaacagacttggacttaagacagacctggagcattactaggcacaggagcagggttgtaaagttacacccgtctttgccagtgttcttcacccgtttccacattagatgtattagaggtgtctcaccacctgccattcctgagctgaaactaatccatgataacttccctttcttttcattttataactcactcctttctcctatttaatgtagaatatttcagaaaacttggcattcatatgattaacctcagagaagatgcttttaaaaccaaaataacaccttcgatgctacacatgacccggagagaaccagatcagtccaggtgttacatgatcctaagatgccaagagctgataagatgagattactggtgagatccccaagaacaaaccccaaatcagcaggaaagtttgggttgccaggctcatgcctccctctcttgttatcatgcccattrtttgtcacaggaggtaggcttatcccagtgatgagtgagtgctaagcccaaacc

SEQ ID NO: 611296 - DNA, 500 bp, Homo sapiens
caaccttgccctaacacgtagaagacctagaaggagccagtgctgcctgggagttctcactcacagcagactttgtgagttttgtggataccctwcgtttgctagactccaaaatcttacatgattacattaagctctgttgtcctaatttcatttaaatcatgcaaccaacaagagtattaataactaatgtttacttagtacttaagacatgcaggactccatgcagaaaatctcacatgacttttacaacttcatccccacaacaagcttacagcttagaacgactattatcaccgtttcacagatgatgtgtggcgcagagacatggtgatgaataggagaaatgaacttatattttgtgggcactgtccattattctttccactatttcttgctactggtaagggtaggtataaaagatcctaaagttgtgactaatgaggattttcatggcagacaactgcctctacctcaacatgggctgctctcttggcttg

SEQ ID NO: 611297 - DNA, 500 bp, Homo sapiens
caaccttgccctaacacgtagaagacctagaaggagccagtgctgcctgggagttctcactcacagcagactttgtgagttttgtggataccctacgtttgctagactccaaaatcttacatgattacattaagctctgttgtcctaatttcatttaaatcatgcaaccaacaagagtattaataactaatgtttacttagtacttaagacatgcaggactccatgcagaaaatctcacatgacttttacaacttcatccccacaacaagcttacagcttagaacgactattatcaccrtttcacagatgatgtgtggcgcagagacatggtgatgaataggagaaatgaacttatattttgtgggcactgtccattattctttccactatttcttgctactggtaagggtaggtataaaagatcctaaagttgtgactaatgaggattttcatggcagacaactgcctctacctcaacatgggctgctctcttggcttg

SEQ ID NO: 611298 - DNA, 567 bp, Homo sapiens
tttgtctggccaaaccaatgtatcatttgaaaattatctgatttataaatttggtttactcacaaagtctactgcatatatgcccagtgaatttctgaaacaaaaaacacaaaatcatttggcagcatttattcctttggaagctatattttgggatctatttatatttttctgtaatgtttaatcatgccaaacaatatgatccattaatcatgtaggataatattaaaattccagtgtgtcattaaagttttacaaatgaatcaattaaagttatgaataattcagagatctaatatccacttagctgtcaatataaccaaatacaatcattcactgaaaattttttgctttgttctttgctgctcaaagtttggtctgtgagccataagtgccctggtcacctgggaacttgtttgaggtagaaaaccccaggcaccacctacatctcatgtaacaaaatccttagctgattcgtgcgcaccttaacatttgagaagggcttcctagggatatataaagatataccatacaaatrttgcaaatttatggtcaaaaaggatcagg

SEQ ID NO: 611299 - DNA, 535 bp, Homo sapiens
tttacatgttaaaaaatatatctaaacactgcattttattcttagagcttacctttgtgcagtgatgtggaagatgtattgacatgttaatgaactaatgtttcaagttctgctgaacatttaattttaaaagatgtgagggggccgtttaagaggtctgtttttggctgcttgggaaaccactttttgactttctatgtgacttcattctccctcctacaccgtggcaggcccaggtccttgctagcatcaggctgtgcacagcttgggtggagctgctgggagctgcaaggctgctgctctcctcctttccaggtgcattaacctgaattcgcctatagagtgaagcgattaaccgaattcaaaattatctcaaataggacagagcttttgtagacatacctgacatttttatatttcaagggaggctggaggagaaagaacatcatagacaacagaactaactgccaagattagctgctgctctgttgttctgytgagagagaaagaaaaagaactagaatttttatatgta

SEQ ID NO: 611300 - DNA, 576 bp, Homo sapiens
tattgtttgtttttgggacggagtctcgctctattgctcaggctggagtgcagtggcaccacctcagcttactgcaacctctgcctcccagattcaagtgattctcctacctcagcctcccgagtagctgggactacaagcatgcatcaccacgcccggctaatttttgtattttgagtagagayagggtttcgccatgttggccaggatgctctctaaatcctgacctcaagtgatctactcaccttggcctcccaaagtgttgggattatagacatgagccaccacgcccggcccccgttaaattttaaataagaattttgctctaaatctttttacttaatttacatatcttgatgcatttgcttggagagctatattccctaaaagaagtaagatcttcagcagtaatatatcatattgtgacccagaactctttagcttaatgataatgataggattttaaaatttaatgctccattctatgtcattttacaccttaacaataaaaatattattcatatctagaatgcaaacactgatagttgatatttatcgtgaacttattagatgcca

SEQ ID NO: 611301 - DNA, 596 bp, Homo sapiens
ccctggcacaccttcctccatctcactctcctaggctccaatatggggggctctaagaagggaaggaaataagggtacgtttttggttctttccttgttgttccttgaaggtaatcaaagacagcacatgatgtggaagaccctggtgcctccctagcatcctccacgcttcctcagattctgcctcctgtggcccatccaactgtttctggatgctggtctcttcccccagggacaaccccctagatactgtcatagtaggatggctcaagcccagctatgttctacatcatccagtccaccccccagaaacagcagcctcatcaaaccacctgtggcaggaaagggctgctacgtccactactgtgtcttctctaagcctgatcttctcacacacccggctctctgccccgacccttcrtctcagagaaacttaggaacacatgagcaaatcttagccttatctgatgtccaactaaaaaacaagatataatttccccctcttggcagatatcgtatgcctgacaatagcttctcttggaacaccactcagtcggctttgggaagataaaaacatgttccacagaaaacagagg

SEQ ID NO: 611302 - DNA, 454 bp, Homo sapiens
cccaggtgtaatacctagacgatctcttaagatttgtatcttacaaaggatctatcatttttttgtgagtaaaatataagtatcaayttttttattattcatatactttttatgtttttatgctaaggcagtgtgtgacagtttaaggaagatgttctatttacagctattaataatttactcttgcaacttttgttaaaatatttatacaaataagttgtgcatgataattgccttgattacatttagatactgagctgtgaaataagcaagcatttgttcagaaagcaggagaggttaaaatgttattagaaatggctgagactagaggaggtcagaactgggatgaactaagtcctgaggtctgtgtgctttgggtgtgcccctactccttcattttggagaggacctatcaggggacattgactagtgcgcttttaggacagaaaaggct

SEQ ID NO: 611303 - DNA, 621 bp, Homo sapiens
ctaacatactttaaacccaattaataattattattagcatttattaagcatttgtttattaaacaccagtattattctagtacttcatacttattatctcacttaatctctcaaaactctgagcgaggtatyatttttagagatgaggacacagaggtggtgaggtaatctgacccagagaatagaataggtcaggcttcgagcccaggtagtccatctcataagctcaggctggtcaggactgcaccgtgctaccgcagctagacatgaatctacgcaggtggggcaggggtgagaagctcaggtcccccgccttctccacacctgccaccccccagcccaaagagctgtccaaccagctcagtgtttaaaatccgagtcacttctcacgcatggaattctcacacaccacccgcaagttttgtattgattttttttcctgaagatttttaaatcatttgaaaggtatatttactctctttcaaaacccatgttttgaattaaccatttattcattcattgaatcaacatttaccgaaagtcttctgtgctccaggcatttggaataaataaataaaaccacagctcaaattatcttggggcatgatatgattaaatagt

SEQ ID NO: 611304 - DNA, 621 bp, Homo sapiens
ctaacatactttaaacccaattaataattattattagcatttattaagcatttgtttattaaacaccagtattattctagtacttcatacttattatctcacttaatctctcaaaactctgagcgaggtattatttttagagatgaggacacagaggtggtgaggtaatctgacccagagaatagaataggtcaggcttcgagcccaggtagtccatctcataagctcaggctggtcaggactgcacygtgctaccgcagctagacatgaatctacgcaggtggggcaggggtgagaagctcaggtcccccgccttctccacacctgccaccccccagcccaaagagctgtccaaccagctcagtgtttaaaatccgagtcacttctcacgcatggaattctcacacaccacccgcaagttttgtattgattttttttcctgaagatttttaaatcatttgaaaggtatatttactctctttcaaaacccatgttttgaattaaccatttattcattcattgaatcaacatttaccgaaagtcttctgtgctccaggcatttggaataaataaataaaaccacagctcaaattatcttggggcatgatatgattaaatagt

SEQ ID NO: 611305 - DNA, 621 bp, Homo sapiens
ctaacatactttaaacccaattaataattattattagcatttattaagcatttgtttattaaacaccagtattattctagtacttcatacttattatctcacttaatctctcaaaactctgagcgaggtattatttttagagatgaggacacagaggtggtgaggtaatctgacccagagaatagaataggtcaggcttcgagcccaggtagtccatctcataagctcaggctggtcaggactgcaccgtgctaccgcagctagacatgaatctacgcaggtggggcaggggtgagaagctcaggtcccycgccttctccacacctgccaccccccagcccaaagagctgtccaaccagctcagtgtttaaaatccgagtcacttctcacgcatggaattctcacacaccacccgcaagttttgtattgattttttttcctgaagatttttaaatcatttgaaaggtatatttactctctttcaaaacccatgttttgaattaaccatttattcattcattgaatcaacatttaccgaaagtcttctgtgctccaggcatttggaataaataaataaaaccacagctcaaattatcttggggcatgatatgattaaatagt

SEQ ID NO: 611306 - DNA, 621 bp, Homo sapiens
ctaacatactttaaacccaattaataattattattagcatttattaagcatttgtttattaaacaccagtattattctagtacttcatacttattatctcacttaatctctcaaaactctgagcgaggtattatttttagagatgaggacacagaggtggtgaggtaatctgacccagagaatagaataggtcaggcttcgagcccaggtagtccatctcataagctcaggctggtcaggactgcaccgtgctaccgcagctagacatgaatctacgcaggtggggcaggggtgagaagctcaggtcccccsccttctccacacctgccaccccccagcccaaagagctgtccaaccagctcagtgtttaaaatccgagtcacttctcacgcatggaattctcacacaccacccgcaagttttgtattgattttttttcctgaagatttttaaatcatttgaaaggtatatttactctctttcaaaacccatgttttgaattaaccatttattcattcattgaatcaacatttaccgaaagtcttctgtgctccaggcatttggaataaataaataaaaccacagctcaaattatcttggggcatgatatgattaaatagt

SEQ ID NO: 611307 - DNA, 622 bp, Homo sapiens
ttactacacatgagaaactatagagttcttacaggaaagtcatgaaacaaagaacaacaataacaaacaggaacaatagcaaactgtgaagaatgggatctggtttccagagttgctacatcatattatctaaaatattcagtttcaaaaaaatcatgatacatgtaaacaaacaggggaatatggccccaaaacaaggggataaaatcagtcatgaatttttttattataatttttgtccctgaaaaagtccatgaattagaattcctagtcaaaaatttgaaataactttaaattataatttaaagccattacaattattttcaaagaccaaaagtaaaccatgaatacacatttaaagaaaaacatgagaatgatatatcagcaaatagataacatcaacttaacatataaattatttaaaaaatcgaaattctagagctctaagatacaataactgaaataaaaaatttgctagggagactttttctatgttacaaaattagccaacttttattgagagcttaaaacatattaaaatacatattaaatacayattaaaatgtattgtaaatgctttatttttctctttttttaatttaattttaatttctgggataca

SEQ ID NO: 611308 - DNA, 590 bp, Homo sapiens
aaaaataaagtacacatgcatgagggaaataagaaatatcaatggttcataagattttagacacaaataataaaaattaaatggctaccaagaaatagactagcacataaaaatactgctacagcaacatggcaaaatgccacaaattagcaaaagtattcatatttgtctacaccacacttacaatctttggagtgattttctcctaaatcatcaagcacaatacagttcacaaaactgatyccaaatcttgcaaatattagatatatattgcatcttttcttaacaaatgtagcactgtggtaaaaataggatatgatttggttgcattttcacacaatactgtgcttgagtcatgctcgcagaatacctccatctgcaacagctgttttactccttaaaaaaaaaaatggaaaaggaaaaaacccaacttctccagaataagcaaacagtccctaatcttgtcaccctggatgtctgacaagtactaataactatgactaggttttgataacttccttgatttgttttcagggttattattattttgctggaaaagggccttgtgagagccaatgattgtattggaa

SEQ ID NO: 611309 - DNA, 404 bp, Homo sapiens
agtgaagccaataatgacaattraaaggcaaaagattttcttttagttaagcctgagacatgttcagagcttctcaagaaatatgtatttgtgaaacctaacccagggacattacttgtattttatagtgcggttatggttgaatttaatcttgttaacagtagcatttatactaataattatcattggaagactacatttgtataagactaagtataatacaacataagtgtaagtgatgtaatagtaagtgatgtaataattccatataatgtagttttcatatgataattattaatatgaataataatattccagtaagtgaccttagatttctggatttccattttcccttccataaaagctaaaagttggatgaaaattgaatttctaaaatgtcttct

SEQ ID NO: 611310 - DNA, 599 bp, Homo sapiens
ctacaaatttaagcatttccacgacctcttcttcaggtttgatagtttgctagaatgacttacagaactcaggaaacagaactcctgatgattactggtttattataaaggatacagctcaggactatccaaatggaaaaggtgcctaggacaaggtatggcaggagggtggtggtggtgacacaaaacttctctcccagaacactgatgtgttcatcaactggaagctctgtgaactctgttgtttagggatttttatcagtttaattatgtaggcacgattgattatatcattggtattcatggtcaaactccctctccagcccctctccactccctcgaggttgaaatttttggccttctaaccaagtaggtttttttttttttttttttaagcaaccagccccctttctccttcagtcatctcattagcatacaaaaaacagttgtcactcagaaaattccaagagttttaggacctctatgccaggaaccagagcaaaagaccaaatatatatatatatatatttcattataccacayctatatccaaccatatcaacaattacgttaaatgttaaaaaatgtagtctgccact

SEQ ID NO: 611311 - DNA, 544 bp, Homo sapiens
cacatttgggagacatgcatgaacctgtttagtgggttcaaattgcagagtggtggtagataacaccggaacggtgtcttagtccactttgcattgctacaaaggaatacctgaggctgagtaattgataaagaaaagaggtttattaatacttggctcatagttcggcccactgtacatggcaccagcatttgcttcactggtgagggcctcaggaagcttccacttatggcaaaaggcaaaggggagtcagcgtcacatggttggagaggagtaaagttgggggaggggatttcaggcttttaacccaccagtattcccatgaactaatagggtaagaatgtgctcaatcctgggagagtgacaccaagccattcatgaaggatccacccccatgacccaaacacctcctactaggccccacctccaatactggggatgaaattttaacataakatttggaaggggcaaatatccaaactatatcaaatggcaagtagagatgagatctgatggaaagcattcctaatatgcattcataaaa

SEQ ID NO: 611312 - DNA, 390 bp, Homo sapiens
ccacgtgacccaaacacctcccactagtccctacctccaacactggcaatcacagttcaacatgagatttgtaggggacacagagccaaaccatctcacgatgtaagctttcttgggctgaaaagctaggctgtgtgtgataaggagatagtaatctgttgtgttatacttgcctctcacttctcactcacccatgaaccccattttaagaggtacttagaatcctctgtaatgaatgagagccaaaagaccctcttcacatcacactggctttcttatgttgtcctgggattttgatctagaactttgaatctggctttgccactcyggctattttccacgctgtttactactctcttcactttgatggatgccttaattcaggttatc

SEQ ID NO: 611313 - DNA, 548 bp, Homo sapiens
cgaattcaacattctcctccacgttgccccctgataaatttgccaattcttaagcaccacagggcctagtggccaagcagagctttcaaatttcaagctcagagctttcagcaagttcacaaggatgagaaaataaaaactgatgtttaagaaccatcaaggtaaatgccttggcttaaagttagaccgcagaaaggctatgtcctaggattaagaacaaaccaaaatatgccagaccttacatgggcctaaattccatcacacatcatcttaatcattgattaaatcaaggtgatctacccttacactaactgcctaccaacagaaagaaaatcctctctggaaggagtataaaatcatccaaatgtcaacaattttayatacctaatatccagcattcaatcaaaaattactaaccatgccacgggacaggaccaaattactgaaaaccaaaaaccagtacaatgacaataaaaagaagacaatggaaatggattcacagccaggtacagtgaccatgcttgttgtcccagctactcatgaggctt

SEQ ID NO: 611314 - DNA, 559 bp, Homo sapiens
ataatggtaccacttcactccagcctgagtgacagaagaagtctccaaatcttcaaaaagaaaaaaaagaaaggaaggaaagggaaggaaaggaagaaaataaaagaaagaaaaaagaaaaggattcacagacaatcacataatggagttatcatttatggccaagaaacatgaaatakttcctccaaataacaatcgtactgacagctaacttctcaccatcaattatgaaagaaaataactttcaagctatatttctatgcccagaaaaaataatcatcaaaagtaaaggagaaattttgcaagatgaaaacattctggagattggttgcacaacgacgtaactatatttaacacttctgaattacatacttaaaaatggttacaacggtaaattttacgttgagtattttaccacaatttttttaaagtgaaggaaacaggaaaaagtaaagtgaaggagaaagtggcttttgtggtatgaaaattgtaaagttctttttaaaaaaggaaagaagaaacaaaaagatttttaaacaaacaaaaactaagagaattc

SEQ ID NO: 611315 - DNA, 465 bp, Homo sapiens
ttactctccaggcattcatctcaccacacccagatagcaagaaatatctatttaacatatatattatcacactagcctcaaaacaagttttgctaagtatgaaattatataggcaatacctggcctcctttcctaacacagtaaaatggaargttaaaagtccttagttgcatattttagattatctgagcagcaggtgtttcattactgcaatgtactacaattgatatactactgtaccttattcataaaactaaatactgttttgagaaagcaataaattcagtattttagttctagaatttaacaactaatgtatgctgaaagagaattttcataatgtacatgtgacttttcacttgaaaaagtattttggacatgggtgtattagtagaaggtattcaaacttattccccatataaatagaattagattatctgtgagcaccaatattgaaggcttaat

SEQ ID NO: 611316 - DNA, 427 bp, Homo sapiens
  misc_feature 207: n = A,T,C or G
acagaaataacaactacagagttcacttgstttatgggacagtacctttctttttggaaactcctgggctagtgggaaaacatgaactgatcctcagtggcaaatagactgatcaaagcaaattagtagaaaaattaagacaaaacagtaatcacaatgatacaaataatctcagattgataaaaatagagaatattcttaccacanacacagttgtactcaccatcaaatacaacaaccacacccatcagaagaacctaattatttatcagacacaaattttatctggtctagtagcttgtgtctgtttgtcatttaaatgtaattagaaagggagtgtgaatgtcttctatggtgtggatcttaaaaagttaagcagacacttgggacatgtctattttggaaacttttgtttatgaatttctgt

SEQ ID NO: 611317 - DNA, 427 bp, Homo sapiens
  misc_feature 207: n = A,T,C or G
acagaaataacaactacagagttcacttgctttatgggacagtacctttctttttggaaactcctgggctagtgggaaaacatgaactgatcctcagtggcaaatagactgatcaaagcaaattagtagaaaaattaagacaaaacagtaatcacaatgatacaaataatctcagattgataaaaatagagaatattcttaccacanacacagttgtactcaccatcaaatacaacaaccacacccatcagaagaacctaattatttatcagacacaaattttatctggtctagtagcttgtgtctgtttgtcatttaaatgtaattagaaagggagtgtgaatgtcttctatggtgtggatcttaaaaagttaagcagacacttgggacaygtctattttggaaacttttgtttatgaatttctgt

SEQ ID NO: 611318 - DNA, 628 bp, Homo sapiens
tgactgtatgacccatcgcttcactaattgagccttgtcttacttcagtagagactcctatggggttttttttacccagcttgactccagatttttcatttcattttcattccattactgttgggagaaataaagatttggaagaaagagtcaaggacaatagatcttataaagttgcttcatcagaaacctactggggattacttttgctgtaagacagaaatttcctcctacttaatatttttttttwaatttggaacccatctatttcaacagatgtaaaatagaccttggttggaaaaggaaaggcagagagggaatatctgcttatggatattagtgattgaggataatgcactttatgtatgcccttttctgtagttgaagatgaatataatagtgtgtggacaacacaacctttccttaagtaaatgcgcatgtaaaagtggcttacattcccatgtaggatacaggaagaataatatttgattctgtgacatgagcgcatcaatttagaaaaatttgtttcagctcacaatttgccatttcgcctgtgatggctttttcttttaatggtgagacttaagttgtgacacttgacaagccttcataaggaaatacatcaatt

SEQ ID NO: 611319 - DNA, 634 bp, Homo sapiens
acgtatccttacccctaatttgaatatgttacattgttgtcagaaataatagaagccagagaagaatcttttattagcataggatattggattttccataatttattctatccaagttggaagatttgggtattagaaatctatctttccttggtaacatgtatatttcctactgaaataggtcaaaatattgccatatgtatgataggttttataaactttttttttgtaattgatttgatttttttttttttggtaattatgtttgctacaggaaagtaaatgagagagatgtgccaaaagctacaattagtcggtacagttctgatgacactttggacaggtaaggggcttttgaaccatataaatggaatgcataacatattaaatacattttctaataaagttatgaagtatttaaaagtttaccaaaataaggtttgaatcactgatattttattcccagggatggagggctctaagaattgaattatcttcttcagatstcactaaatcttggctagatgcatttccaaaatctttttaatagtagattgatatgaaatattcttagagacactgatttgagtacagctagggtgggtactgtgcagaatctgttagttcaatatag

SEQ ID NO: 611320 - DNA, 631 bp, Homo sapiens
aagcctcttgtcctatttttgtaaatgttcacgagagaatctaattcataacagcaagacatggcatgtaaagtttttaatttaaataaaacctttggcccttctagcttatttctaagcttgcttcttggtcattgtgatttcaaccattgggatattgatgttttctgtcttctttcttctcttgctaagaatggaaataaccaatacagtgttttgaattatcaagatatgccaagcagattatcctttgaagtcttcttgtcagaacatgttttcttttcattttaatcaagactgaatcagaattttagctttataactgttgttcctcatcacattcctctgtctctcctcctacctctgatcaaattcctgcttcactrgtttccccattttccatgttcaaacctctttcatcttaaaaaatgtagttcctaaaaatttgatagcctaatcttacaaacctactcagctgacacccttcctctctttccatctcagccaacattctcggaagagttgatgatgcttttcatctccattttctgcttcctatcaccattagttcatggaaacagctctccctaagtcactgatgaccttgcttatatcagtctgtatgatcttg

SEQ ID NO: 611321 - DNA, 498 bp, Homo sapiens
atgtcttcatttttcaagttcttaaacactttcttgtttttgagacttttaaaagagtggtagcatttgccggacgtgagccaatggagggaataataggagccatctggagaaatattcaggtgcatcacaaggaactagagaaataacagttctggaaagttgaatttctttctgatttcagaacctaccattaaatttttgtattctgtttttggtawattcaaatgattctaactgtgtatttaggtgacttggagattcagtggttaaatggcatgtaaagctcatttaagaacctcatggaagccaaactaaagtacttgcttaacagacagtatgaatatttatgaatgttattcattattctcatttaggaacaataatgaagccaccactagaaatgaatgtgctttttttctggaatcatttttaaagatagaaaagaaaataatatttgataaaattaaagtagtagaaacgcatctgggaaaatta

SEQ ID NO: 611322 - DNA, 531 bp, Homo sapiens
attttgggttcacaggattgatttcttctaagctctgtctctcctttgcttataatgtgtttcctcctttgtttttacttggtcttccctttgtgcctgtgtcctactttttttttttttttgagatgaagtcttgctcttttcccccaggctggagtgcaatggcgcaatctcagctcactgcaaccttcacctcctgggttcaagcgattctcctgcctcaggctcctgagtagctgggattacaaccatgtgccaccatgcccagctaatttttktgtttttagtagagatggggtttcaccatgttggccaggctggtcttgaactcctgacctcaggtgatctgcccgcctcggcctcccaaagtgctggattacaggcttgagccactgtgcccggccctattctcctcttcttataaggataccagccatattgggttacaacccaccctcatgacctcattcaaacttaattacctccatgaggatcgcatctccaaatacaatcacattccaaggtaagggg

SEQ ID NO: 611323 - DNA, 542 bp, Homo sapiens
gaatgggagcatgcctagtaatgacagttaaaattctgtcttttccaaaatagtactgtttccattgtagagtaactgaattcaattatctaaactgtgtgtttttgttagcaacatgtgaatttatttaatggtagtgtgcaatttttagtaggagttactggaatttttctaagaacgttgattcacctcagatcacattgtttttcagatacagtctgttggattttaacaaaaaccccatagctaatcacaggtgaaaataatgataccatgtaactattttcattgatggtgttggtttttgtcttagatctagcacaacaatgtgtttcttagcaaacactccctgtattcaagcagacattgtcacacacttagaggaagagatgaaaaaggctgtataggaccatccataaagtacagaggggatacttgcagaccagtaaccaacttctacgttagttaaattgaaagcaatttatatcataacttgartgagtgaggttggaaaaaatgttcttgacaatgaagatgcttaa

SEQ ID NO: 611324 - DNA, 637 bp, Homo sapiens
tcatatggtgcgaagagaggtcactttgaggtattcagctggtggatggcttctcttacatgtccccttggcagggatcactagaagtctggctcagctggggctattcaccatggtggctacataatggcttctccagtatggtgatttcaggttagttgaatttttacattatagctcaagactagcaaacatagtgtttgaagaagcttgagtggaagcttcaagacttatgaccaagattagaagtcctggaatgtcacttctaccattttctactgctcaagaaagtcactaagaccagcccaaatccaaggagagaggaattagatttcaactctcaacrggagaagtaccatactaaagactatatgaccatctttggtaaggtataatctatgatgtcttctattcttggttttcaaactttttataggctatgtatatgttagatcttttcattctagcctatatgtttacactttttacagtggctttttttcattttttttctccccatgctttagtggatatattctataaaacttccttctgatttctaattttttcttttgctatgtctaaattggagttaaccccatctattggattttaatttttttgttattgtagtgcc

SEQ ID NO: 611325 - DNA, 545 bp, Homo sapiens
tgaccatctttggtaaggtataatctatgatgtcttctattcttggttttcaaactttttataggctatgtatatgttagatcttttcattctagcctatatgtttacactttttacagtggctttttttcattttttttctccccatgctttagtggatatattctataaaacttccttctgatttctaattttttcttttgctatgtctaaattggagttawccccatctattggattttaatttttttgttattgtagtgcctatttacagactttttacttagatgtaattttttttgtagatgctagttctctagtgaaattttccatcttgtcatttattttcttagatatatttacaatgatttccaagaccacaagtaataactgtaatatctggatcacctataggactgcttccattgtctgttttctctattatatgccagatattttgtcttttccaggcataccttgtagtttttaaattgagtgccagacattgtgtttgaaaaattgtataaataatttgaggctttcat

SEQ ID NO: 611326 - DNA, 545 bp, Homo sapiens
tgaccatctttggtaaggtataatctatgatgtcttctattcttggttttcaaactttttataggctatgtatatgttagatcttttcattctagcctatatgtttacactttttacagtggctttttttcattttttttctccccatgctttagtggatatattctataaaacttccttctgatttctaattttttcttttgctatgtctaaattggagttaaccccatctattggattttaatttttttgktattgtagtgcctatttacagactttttacttagatgtaattttttttgtagatgctagttctctagtgaaattttccatcttgtcatttattttcttagatatatttacaatgatttccaagaccacaagtaataactgtaatatctggatcacctataggactgcttccattgtctgttttctctattatatgccagatattttgtcttttccaggcataccttgtagtttttaaattgagtgccagacattgtgtttgaaaaattgtataaataatttgaggctttcat

SEQ ID NO: 611327 - DNA, 490 bp, Homo sapiens
tttaagattttatttttcacatcacatttctcttccatattgtctaatcccagctacacttattattatcccccctcatttcattcatgcctgatccttttgtttactctgcctctccagcttggagctcctgtgtgtttatgactatgtttgtagcaatgcttttgtaatagtaagcagaccttccactgattcagcaaagacttattgagcacctattwtgtgccaatcagagtgctagattttgtaggtaagataatgataatcctgctgagctctttgaagttaggggtatgtcttcttcctcctggtattccctagagctgaacacacacctgacccatgatagagcttccataaatcattattaaaagtatagcctagacaatcctaagcaaaaagaacaaagctggaggcatcacactacctgacttcaaactattctacaaggctacagaaccaaagcagcatggtactggtaccaaaacag

SEQ ID NO: 611328 - DNA, 579 bp, Homo sapiens
taagaagagaaaaatgccatgccaatcaaacagaagagaatgtaagaagcaacaagttatcatccaagagaaatgaattatgcagtactaaagtaaacactgcactccacagggacacctctcattctgttccttttttcttggaagttcctgcatgatgaaccttttagaaaaccatcaataagtcccagggactgactcttgagaggatcttcatatamcttctaaaacctacatttagtcatagaaaactaatgatatttatcaacaacattgtgtattaaagagcttgaccactgggcacagtaagtgtgcctgagaagaggagaactactaattgtgcttatggttttgttcttagatatacctcatgtatgaataaataaaatgtattaacagtttactaagagttaacttttagatagcaccttagcaaaattgcaggccctgttctaagtgctttttctgtgttaacacagttgatcctcgcaatgaccctatgggaaaggtactgttttattattctcgttttacaggtgagaaaactgagaaaagaggagttaaatgacttgccaaaag

SEQ ID NO: 611329 - DNA, 540 bp, Homo sapiens
gtggctgtcgctaaatttaaaaagaagaaaaagctatttgaaaattaaatgtaatgtttcctgatgtttcagacagaataatgtattttactttttactacttataaattcatttgcatagtgaattcaatatatatttcattttactctgcttaaatctcactaaccaaattacttcatttttctcttctaaaagtagtagtgcaagtacatcaaatgtatttttttgtgtctatcacttcaaaatgttttcagtaccaatttagcaatttttttaaaggcaaacaaagtgatatgaatcttaagacatatcagtggtatattctttccgaaaaacctaagtaaatataactgtataaactatagcctaayacaaatattttaaatgtttttggaaactaaattaataattatattctatatataagaaccaccacctccataagataagcaattattataaacaggtactaattttaattattttccctattaaaaacaatcacatattatttttaagtcagattaagttggattaag

SEQ ID NO: 611330 - DNA, 468 bp, Homo sapiens
ttttttttttttttctgaccatgataataaagatgtttccctctgaggcaaaggttggacaggttttctggcagctcctttaaaagactggagttttcaaagcttgtggttccttctctgtgatgcaaactcactgtgtgtgtgcagcatccacctgtcttgcttctgctttaaccctgtgagactttggaggagagaggggaccaatacaaacatgaaggtcatgatgtctgttgtgcaatgaataatgaaacctttaatctctgaccctgtaaacttaratattttgctgtctatggaactatcaggctaatttgttagcttgcaagtagggtaaaatatcagaccctttgtagttcttgacccaatggagattgattccttggtattagagcatttcttctctagtggagaagacagaaagtgaaacagttacttacagtatccttgataattgttatgatggta

SEQ ID NO: 611331 - DNA, 524 bp, Homo sapiens
aatttgaggctttggatactgttatcttccttgagagaagattacttttgatttacgctggtgctggtgtgtaggcttgggaccctggcagtcacagattgttacaatccaactaagaatagggatgatttgaagttgtgcctggtctctgcaaggacttacctatatcggtttttgttttaattgaaatgaaattcacaatagctatagttcrccattttaactatttaaaagtatacagtttagtggttttagtatacaattttcccttcgtatccttgggagattagtttcaggacctcccatggataccaaaatctacggatgctctaatcccttaaggaaaatggcttaatatttacatataacctatgcatatcctcccatatcctttaaataatctctagattacttataatggcctatacaatgtaaatgctgtgtaaatagttgttatactgtgttgtttacgaaatagtgactagaaaaatgtttgtgtatgttcattacagacactgtcatcc

SEQ ID NO: 611332 - DNA, 612 bp, Homo sapiens
agagggcataatgcagctctgtatttacaatgttgtataatcatcatctacttaattctagaatacttccattacattaaaaagaaacccctcatctcccaatttcctcatctcatcaacccctggcagtccagtaatctacagatttacatattttaaatggaatcrtacaatatggtctgttgctactgccttctttctacttaatatatttggcctttttttgtaacccttacttttggggtatacttacttgcaacaattcttggaagtctgtgaaccctagctttgtctcactgttttcatgggcatattaaaatctttgttcaggttctcagccctccaactgttgtttttacagtgggcatttatcttgagagggaaagtagcctaaagtctgggcttacatctctgggtttcctttctctcttgatctgcctttgcagtcctagttttcttggtagctctctgatgtcttcaagtattgtttttatgttttatccatctttctgattcccagctcattggaattagactatgtaaatatttgctgaatgactaaattcatttattgaaacattatttattgaatggaaaatatgtgccaagtac

SEQ ID NO: 611333 - DNA, 365 bp, Homo sapiens
ttatcccaggagtgcaagatttgctcatcaataaaaaaaaaaaactcaaatgacataattccccatatcagctgactaaaaatgaaaagccacatgatgatgtcaaaagatacagaaaaagcatttgcaaaattcaaaaatattcattataaaagctctcaacaaactagaaatagaatttcctcaaccagatattcataaaaggcatctataaaaaacctatagctaacatcatacttaatggkgaatgactgcatggtttccacactaaggtcataaataaagcaaagatgttctctctgactacttctattcagtgttatcatggatgctcaaccaaatgcaaaacaggaagaaaaatgaat

SEQ ID NO: 611334 - DNA, 656 bp, Homo sapiens
atttaagaaagactaatgaacacaagataattatttactcaatttttggtgaatcagtgatggcagttgtaatggtggtgagttaaatcaagaaataaaggtttgcaaagcaaaaattgtaaggagcacctcctcccctcatacagttcacaatcccacagatatggcagctcactgagtgctactgtactgcatcatttattgctgtgcatttggatgattatcctagacttgacagatgtttacaatcatttgtcttcattcattcattcattcattcattcattttttcaatctgcttattccagttcagagtcatgggcagctagagcctatctgggtgggaactcacctggtacaggatgccatcccatgacagggcacactcacacccacaccgattcccacactcactcatagtgggaccatgtgaacctcacacagatgamcctcacaggcacacctttgggatgtgggaggaaagcagaggtgccagagagaaccatcatggacaatggggagagcatgaagactccacacaggcaggggccccagcctggaatcaatgttttttctcaccaatgttataactaaacaactttgaatgaaacaactttattcaaagacctgctgtatacacacacatatacacacac

SEQ ID NO: 611335 - DNA, 570 bp, Homo sapiens
aagaaaaagggaaaattggacttgatcaattatttcaaagtcaaaacaatgactaataaattaactgatcaattttaaaagttttatgtttcaaagagcaacatcaagaaagtgaaaagacaaaccacagaatggaagaaaatttttcttatatatctgatagggtacttttgtatagaatatatcaagaatgcatgcaacttaacaataaaaagacagtggcccaatttaaaaatgggcaaagggtctgaatagagatttctacaaagaagattaactaatggacaatagacactgaaaaagatacttaaaaatcatgcctataaataatcccagcacttgaggaggctgaagygggtggatcacttgaggtcaggagttcaagaccagcctggccaacatagtaaaaccccatctctactaaaaatacaaaaaatgagctgggtatagtggtgtgtgcctgtaatcccagttacctgggaggctgaggcaatagaataccctgaaacaggaggcagaggttgcagtgagccgtgattgtgccattgcacaccagcctgggcaatagag

SEQ ID NO: 611336 - DNA, 572 bp, Homo sapiens
tctattgtgacacccatctagtaatattttatttctgatatttcattttatacttctaaaatttctatttgattttttatagtttccatttatctatcattattttttatttgtccgtttgttacaaatgtattttattttgtgctttggagcatggttagaattgctgttttaaaattcttgattgcaaaattaaatatgtgaattttcttggtctccattgaatataagtcatgctttcttgtgttttgcatgtctggtaattttgaattgtaaagtggacattgtgagtaatacatcataggcattttaggattctgttttattcctgtgaatatattgtttttattggtggtggtggtagtggcattggtatatgtgttcagcagggaagttacttttctagactcacctrtaaactttgaactcctcttcagtggcagcaactagaatgtcttttcatttctttttgctttagtgagattgcatgcatttcataccatacaggaagaacttaggggttagtaaaagatttgcggaaagccatacgtgacggcacttgttatttcagc

SEQ ID NO: 611337 - DNA, 471 bp, Homo sapiens
ctgcacaggcaacattgttcctaaatatctcagaggatttttttttaagtagaaacatgycatgtattttccagagagactgtgaccttaagtgatcaacccataactatgcagcgaagcatgggagactaggaggagccctgtgcttttgtatctaaagcttatcgccatctcgcgctgtacccaaaacggtcaccgttccagctctctgtggtaattagtaacaatgctatagttgatggaataaaaataacacatataatgatggttacaaacacaccctgacctgtgccaaggagagcagtgattcatgaaaaatcaataaataaacccattgatgtggtcacaataaatccgtacataattaagaagaaccttttctaaataaaaactacaaaggaaataaaaacaggtttggaaaagaggaaaaagtctgataatagcgttatggtactcatcattaaagaaaac

SEQ ID NO: 611338 - DNA, 653 bp, Homo sapiens
gaatcattgcaaagtgattaagatcatgggcttccaagtcagtcacgatgggtttcaactattaatacatgtaatagtttaaagacagctctaaatttgttgcctctccrcttattcctctctccttgattctgggcaggtccctgtaactagctttgacaaagagaacacagtggaagtgatcctgcccaccccttttccaaggtagaccttaaaagacctgtagcttccactattgtgcctcctagaagcctgtaccatgtaagaattctaactaccatgggaacatcatgctgtgaggaagcccaagctagccatttgggagagaggaaggccacgtagagaagcaccaagaaactagacatgtttgtgaagcctacttgaactttccagcccaactccagctgaatgcatccaagtgaatggccccagctgatcccctgtggagcagaaccaccctgctgactcctgactgaatccctgatccacagaattgtgagcaataatatgactgttgttctaaatcacaaagttgaggcataatttgttaatcagcaatagataactgaaacagagtataagaggattggaggaccaaactcacagtgcaggctacatatactatcactgagcaattgggtcagaatggcaag

SEQ ID NO: 611339 - DNA, 653 bp, Homo sapiens
gaatcattgcaaagtgattaagatcatgggcttccaagtcagtcacgatgggtttcaactattaatacatgtaatagtttaaagacagctctaaatttgttgcctctccgcttattcctctctccttgattctgggcaggtccctgtaactagctttgacaaagagaacacagtggaagtgatcctgcccaccccttttccaaggtagaccttaaaagacctgtagcttccactattgtgcctcctagaagcctgtaccatgtaagaattctaactaccatgggaacatcatgctgtgaggaagcccaagctagccatttgggagagaggaaggccacgtagagaagcaccaagaaactagacatgtttgtgaagcctacttgaactttccagcccaactccagctgaatgcatccaagtgaatggccccagctgatcccctgtggagcagaaccrccctgctgactcctgactgaatccctgatccacagaattgtgagcaataatatgactgttgttctaaatcacaaagttgaggcataatttgttaatcagcaatagataactgaaacagagtataagaggattggaggaccaaactcacagtgcaggctacatatactatcactgagcaattgggtcagaatggcaag

SEQ ID NO: 611340 - DNA, 571 bp, Homo sapiens
ctacactacactacctcccggcttccagaatggggactgcttggtgccagacctggatgcctaccaacacaaattaaaggaataagacacctcctagatgggaaggcaggacactcaagagtgagaatkgtgagaactttaaagggatcatcacctctgcaggagaccaaaaatctgccccagaaagagcagctaccccaacagatgtttccctcacattcagaaagtctttgattctgtgttaccatgagactccagactctgtctctcccacatcccaccccgatcccagcccaggacctctgctgctccccatgagaaatactccctctctcctctcagtcccatccagaaatacagccatgccttatttaaagttgtgaatccctaactggacactctgtggaaaccaagctgatcaggtcaacttatattaaaaaatggatgtggaggtgagactaggaagcaactgcttaatgggcacgaggttttcttttagggtgataaaaatgttttggaactagacagaggtggtggttgaacaacattgagagtgtactaaatgccactg

SEQ ID NO: 611341 - DNA, 571 bp, Homo sapiens
ctacactacactacctcccggcttccagaatggggactgcttggtgccagacctggatgcctaccaacacaaattaaaggaataagacacctcctagatgggaaggcaggacactcaagagtgagaatggtgagaactttaaagggatcatcacctctgcaggagaccaaaaatctgccccagaaagagcagctaccccaacagatgtttccctcacattcagaaagtctttgattctgtgttaccatgagactccagactctgtctctcccacatcccaccccgatcccagcccaggacctctgctgctccccatgagaaatactccctctctcctctcagtcccatccagaaatacagccatgccttatttaaagttgtgaatccctaactggacactctgtggaaaccaagctgatcaggtcaacttataytaaaaaatggatgtggaggtgagactaggaagcaactgcttaatgggcacgaggttttcttttagggtgataaaaatgttttggaactagacagaggtggtggttgaacaacattgagagtgtactaaatgccactg

SEQ ID NO: 611342 - DNA, 491 bp, Homo sapiens
aaataaaatcactaataaaaattaaaacatcttgcccctcctcccaaggtctatgagggaaaaggaaatagcctctctttacccaactaggtttcttgggtcttcaagtggaaagtgtgtgaaaccaagataagagggaatcaaacagaatgtctgatcttcaattttcagggccgggaatcctccctgtggcatctttcacacactgytttcgaatgctgcttatcctgagtcacgtttggctcccactgagagtgagctgtggagggtagagaagtgtctgatacttctttgcctccccttcagaacttcataacagtcacacctgtttgacatttgaaggcctttactttaacatacattttctcattgactaggcccccaataaatatggttggttgacggaaaatgggtaaggagatctctagaacaaaaaagaaattggaatttgaccaaaataacagaccgggtacttgccattggggctgtca

SEQ ID NO: 611343 - DNA, 603 bp, Homo sapiens
  misc_feature 448: n = A,T,C or G
gttagccttttgggtttgttttgcttttgatattwgaaatttcttttccaagcatttcacattagtttatgattatattaaatatttgcctggtttccaagtcaggtctacaaaacaagaaatattatgaagggtctgtctccccctccaccttgtttccttcctctccctttagagaaatgttgctgcttcaagtttttgttttgtccttccattttaaaagttaatgcctctacttttcttagagaaatgggagtataagctacatactcttctcccaaattataaaccaaattttttttctagtcaagttcccgatgcttgtagaggaaggtctgacctcagactttgcacgtcatcatcatcacccaatttgaaacaagttatttctgcttttttgtcaagggtctattactatttgtaggcattgctttgctttgttctattnagttttgctttgttctgtttggagacagagtctctctctgttgcccaggctgcagtgcagtggcacaatctcggctcactgccacctccgcctcctgagctgaagcaattcttgtgcctcagcctcccaagtagctgggattacaggagtgtgcc

SEQ ID NO: 611344 - DNA, 501 bp, Homo sapiens
ttgttaaatgacagttgaaactataacatcaggattttaagaagtggaagtttagatggtgtattatgcgttaatgagagacaaataaagtatgtatccagtatatactaatctcttaagtgaattaaagactgaataattcacacataatagcttgtgattgagattatttctatttttaagagaaggaattaaatcaaaatstgactgggcaggagtaaaatggtgattaagcaaataaggaatttttgttgcaaatttgaattagaatatatatatatgtattccacccgcccccctcaagatggagtcttgctctgtcgcccaggctggaatgcaatggtacaatctcggctcactgcaagctccacctcctgggttccagtgattctcctgcctcagcctcctgagtagctgggattacaggtgcctgccaccatgcccggctaatttttgtatttttattagagacggggtttcatcacgttggccaggctggtc

SEQ ID NO: 611345 - DNA, 501 bp, Homo sapiens
ttgttaaatgacagttgaaactataacatcaggattttaagaagtggaagtttagatggtgtattatgcgttaatgagagacaaataaagtatgtatccagtatatactaatctcttaagtgaattaaagactgaataattcacacataatagcttgtgattgagattatttctatttttaagagaaggaattaaatcaaaatctgactgggcaggagtaaaatggtgattaagcaaayaaggaatttttgttgcaaatttgaattagaatatatatatatgtattccacccgcccccctcaagatggagtcttgctctgtcgcccaggctggaatgcaatggtacaatctcggctcactgcaagctccacctcctgggttccagtgattctcctgcctcagcctcctgagtagctgggattacaggtgcctgccaccatgcccggctaatttttgtatttttattagagacggggtttcatcacgttggccaggctggtc

SEQ ID NO: 611346 - DNA, 547 bp, Homo sapiens
aacccagcaattcctcttctggatagaatgcacaaaaataagtgcatatgtttaccaaaacacatatataagaatgctcatgataacttcatttgttgtgactccaaactagaaacaacccgagtgtctatcagtagtagaaagacaaataamtggtggtaaagtcaccctatggaatactacaaagtaatgaaaaagggaaagaactccacgtagcaaaaaggtgagtctcttagacataattctgaaagaagtcagacatacacaaaagagccgctaccgtataattctgtccataagaagttctacaacagcaaacataacaaagggatcaatgtcagaatagcagttactcttaggtaggttctgaattagagaaggcacagtgggaggctgaaagtgttgagtatctggacctgggtggtggttacctgagtgtatacatatgtcaaaattcactggccgggcgcggtggctcacgcctgtaatcccagcactttgggaggccgaggcgggcggatcacgaggtcaggagatcgagaccatc

SEQ ID NO: 611347 - DNA, 417 bp, Homo sapiens
tagaagtcaattttatctccaagmatttctacttcctaaaccattagcaagagactcaaaacaacttcaccaaactattggacctccagtgttaacttgccaacataaaaatctgaaaaactttgtaatcactatcagaaatacaaaagagagaataaattcccaggtaaaaggatttaccgaaaagaattactttatgacaattaggatgaaggttatgagctagaagttcagcataatatgagagggtagtattaaaatcatattttagaaacttctttaatgggaactccatatcatgagtttcaaattcttattggctgtttactcatgttgcctatcatatacatttcttgtttttccccttcctatgtttccaacctaatttgactcattccaataggcatgccatggtgc

SEQ ID NO: 611348 - DNA, 602 bp, Homo sapiens
aatgtcattgtgcaatgcattactcacatgtttgtggtgatcttggtgtaaacagacctactatgctgccagctgtataaaaggatagaccctatgatgacatacggtacataatacttgataagaaatgatgatgttactagtgtatgcatatactgtacttttaatcgttattttagaggtattccttctacttattttaaaaatgttaactgtaaacagcctcaggcaggtccttcaggaggtacccagaagaaggcaytgttatcataggagatgacagctccatgcatgttattgcccctgaagaccttccagtgggacaagatgtggaggtaaaagacagtgatattgatgatcctgaccctgtgcaggcctaggctaatgtgtgtgcctgtgtcttagtttttaattaaaacatttaagaagtaaaataacatactttttaattgaaaaggcctaagaataaggatataaggaaagaaagtatttttgtacagctacgcaaactgttagtattttaagctaaggtttattacaaaagagtcaggaagtcaaacaatttaaaagtttataatgtaaagaaattaaagctgacatta

SEQ ID NO: 611349 - DNA, 602 bp, Homo sapiens
aatgtcattgtgcaatgcattactcacatgtttgtggtgatcttggtgtaaacagacctactatgctgccagctgtataaaaggatagaccctatgatgacatacggtacataatacttgataagaaatgatgatgttactagtgtatgcatatactgtacttttaatcgttattttagaggtattccttctacttattttaaaaatgttaactgtaaacagcctcaggcaggtccttcaggaggtacccagaagaaggcactgttatcataggagatgacagctccatgcatgttattgcccctgaagaccttccagtgggacaagatgtggaggtaaaagacagtgatattgatgatcctgaccctgtgcaggcctaggctaatgtgtgtgcctgtgtcttagtttttaattaaaacatttaagaagtaaaataacatacttyttaattgaaaaggcctaagaataaggatataaggaaagaaagtatttttgtacagctacgcaaactgttagtattttaagctaaggtttattacaaaagagtcaggaagtcaaacaatttaaaagtttataatgtaaagaaattaaagctgacatta

SEQ ID NO: 611350 - DNA, 278 bp, Homo sapiens
tatgtaccctagaacttaaagtataataaaaaatatatatataaataaaataaactattgtttgtttaaaatctgttttatctgacacaggaatagaaacctttgttctcttttgttttctatttgcatgataaaactttctccatctctttactttgagcctatggatgtaattacatgtgagatgagtctcttaaaggcagcagaagattccaccttgtttttttctaattgrgtttgtcactctatgtcttttaagtggagcattttggccattt

SEQ ID NO: 611351 - DNA, 566 bp, Homo sapiens
taaaaaaatatattcaattcctcagttgcttcagaaattcaaaatacagcacgttatctttattcatcgtgtatttccatctagaaaagagggcacttggttaacagtaaactgaagagctaaaaattgagataaatgagataaacacaaaaaataggatctttaattcccctacctttatggtcacacactcagagtaccttggaatgagcacaccagaaaaaatgactagcacaacacagccaataccacagaactgaaatggcatctttgytgtaacatgatgaagcagaaaaactgccttcaggggtcaaaagaccaaagatgagattaaggttccttccttaatgtggtctaagagtcaatgatttctaaagatataataatttatgtttgtattttactatatccttcttcattagatttaatatatttggtcttgaatgagaaatctgtgggagaagaaacaatgtttggagctacaaaaaggatgaaaagctaattgatgatatatagttttttgcttttcttttttttaaaaaaaaagctatttctaagtcacatgt

SEQ ID NO: 611352 - DNA, 566 bp, Homo sapiens
taaaaaaatatattcaattcctcagttgcttcagaaattcaaaatacagcacgttatctttattcatcgtgtatttccatctagaaaagagggcacttggttaacagtaaactgaagagctaaaaattgagataaatgagataaacacaaaaaataggatctttaattcccctacctttatggtcacacactcagagtaccttggaatgagcacaccagaaaaaatgactagcacaacacagccaataccacagaactgaaatggcatctttgttgtaacatgatgaagcagaaaaactgccttcaggggtcaaaagaccaaagatgagattaaggttccttccttaatgtggtctaagagtcaatgatttctaaagatataataatttatgtttgtattttactatatccttcttcattagatttaatatatttggtcttgaatgagaaatctgtgggagaagaaacaatgtttggagctacaaaaaggatgaaaagctaattgatgatatatagttttttgcttttcttttttttwaaaaaaaagctatttctaagtcacatgt

SEQ ID NO: 611353 - DNA, 616 bp, Homo sapiens
gttctggaatcagggactccaagagcctgcttgttgctctatccctctgcggccaacctggtacctaaggtgcaagacaaagtcctctttactttcccctctgcttctctaaagcaggagtctcatctcatagccatcacagctaggaatgtgctgaggtttacctgaagctagcaagtctcagagtcccaccaaaggcccctgacatactgttacagtacatagctagtgaggcatgagcagagcaggagagggcactcccctgataggaatgtcaggtgactatcaggtgttgggaggcagttgtcacactgtctctctaaaatagtaattggtcacagcgagcaccagggaaaggcagtctcccaatagatagaaacacttgaaactggtgatcagcagattcccaataagatctcaggagttcagtgggtgggctcaagcatgcatattaagaggcaaaatatcagagatgaactggtatatgactttccagggacattccactagtaagggaagaatgtctcaagtgagcrtgtgtacaactccactacacactgcacatgctcatttcccaagtgcttgcaggccactgcacatgtggacagcccacccc

SEQ ID NO: 611354 - DNA, 435 bp, Homo sapiens
gtcctggctttataacaacctgcccttctgagaactaacccattcccaagagacctaatccaagactaattcaagaactcactcactaccatgagaacagcaccaagccattcatgagggatcmacccccatggcccaaatacctcccactaaactcacctcccaacgctgccaccttggagatcaaatttcaacatgagtttttgggggaaataaactcaaaccatactcaaatcatagcaatctccaaaaccatgaaagctggcagggttgccataaccacactttaattattttaactctgttatctaaggatcccgggaacacaagcaataaaaattttaactcaaaaactttgcagagacgtctcaattctcatttaaagccttaatgtcattatgatgttggatttcttagccatcctaaaggctgtag

SEQ ID NO: 611355 - DNA, 435 bp, Homo sapiens
gtcctggctttataacaacctgcccttctgagaactaacccattcccaagagacctaatccaagactaattcaagaactcactcactaccatgagaacagcaccaagccattcatgagggatccacccccatggcccaaatacctcccactaaactcacctcccaacgctgccaccttggagatcaaatttcaacatgagtttttgggggaaataaactcaaaccatactcaaatcatagcaatctccaaaaccatgaaagctggcagggttgccataaccacactttaattattttaactctgttatctaaggatcccgggaacacaagcaataaaaattttaactcaaaaactttgcagagacgtctcaattctcatttaaagccttaatgtcattatgaygttggatttcttagccatcctaaaggctgtag

SEQ ID NO: 611356 - DNA, 614 bp, Homo sapiens
acaaaactcactctgtttatagacaggaatgttatgccacatgatcccacctgaggagtaggttcacaggtggtttttatcttgcttatctgtattgctaaatttttcttaaatgaacatatcattaaaaagtcaatataggccaggcatggtggctcatgcctgtaatcccagcactctgggaggccgaggctggcagatcgcttgagctcaggagttcgagaccattctgggcaacatgaagaaatcccatctctacaaaaattagctgggtgtagtggtgtgtgactgtagtcccaactactcagaaggctgagatgggaggatcacttgaacctggaagacagaggytgcagtgagctgagatcgtgccactgcactccagcctgggcaacagagcaagaccctgtctcaaaaaaaaaaaaaaaaaagtcaatataaaagacatttgaaacaaataaataaatacaaaagtcacaggaactgatggcactgagcaggcccttatgagatgccaaggtgggggttccatggcagaattgggcacctggggaaaatgtttattaaaaatagcaggaagacaacaaaggcaaatgtcatgtgtgttactgtgt

SEQ ID NO: 611357 - DNA, 396 bp, Homo sapiens
gtaacatactccacaattaaaacatttaagaagaagagtagcattgctttaccttttacaaatcactttaatattgggcttaatgtaagacagctggattctcatatctgctttggcatttaatctgctgcaatctgctagtagaagtatatatatattttaaaaacccagcctcattaggatatgtaattgcaaaacagaaactcacagagccctgaaatgaatctcagagaccccaggaatgttcagccaaggttgttktttttttttttccttgaggcagagtctcactgtgtcattcaggctggagtgcagtggcacaatcacggttcactgcagccttgacctcctgagctcaagcgatcctcctgcctcagcctcccaagtagctgggac

SEQ ID NO: 611358 - DNA, 595 bp, Homo sapiens
ggtggttttgaactcctgacctcaagtgatccaccagaatgcattttaagtggctctgagtaacaaacttcccagtgttgatgatggcccagtacataacctagactgatgacaattstcagcccatattatggtggctttagccactgcaaagctgtataaggtacagaatagcactagttatatatgttttcatatttcttttctctttgtgatatgaatccactacaatgcactaaaagagtatttatttactgctgtatttttgttttccatgatagctattgcttcccaaagttaacgtaaaaatagtttactactgttaacttgcttggttaacccaacttatgaactacgttagtacggtaaatgttttatataaacagtttttgaaggcacagcacaagtcaaaagtccacagaggcaatgtgacttaatttctggaaaattaagagtttcatgaacatctaagaaatgaaatagatgaacatatatttaatagttagtggcattaaaatcaaacattaaggctaatttcaatgtacttatctcacttgaccagttaaaatggttttcaactcgtaaaattctgcct

SEQ ID NO: 611359 - DNA, 595 bp, Homo sapiens
ggtggttttgaactcctgacctcaagtgatccaccagaatgcattttaagtggctctgagtaacaaacttcccagtgttgatgatggcccagtacataacctagactgatgacaattgtcagcccatattatggtggctttagccactgcaaagctgtataaggtacagaatagcactagttatatatgttttcatatttcttttctctttgtgatatgaatccactacaatgcactaaaagagtatttatttactgctgtatttttgttttccatgatagctattgcttcccaaagttaacgtaaaaatagtttactactgktaacttgcttggttaacccaacttatgaactacgttagtacggtaaatgttttatataaacagtttttgaaggcacagcacaagtcaaaagtccacagaggcaatgtgacttaatttctggaaaattaagagtttcatgaacatctaagaaatgaaatagatgaacatatatttaatagttagtggcattaaaatcaaacattaaggctaatttcaatgtacttatctcacttgaccagttaaaatggttttcaactcgtaaaattctgcct

SEQ ID NO: 611360 - DNA, 595 bp, Homo sapiens
ggtggttttgaactcctgacctcaagtgatccaccagaatgcattttaagtggctctgagtaacaaacttcccagtgttgatgatggcccagtacataacctagactgatgacaattgtcagcccatattatggtggctttagccactgcaaagctgtataaggtacagaatagcactagttatatatgttttcatatttcttttctctttgtgatatgaatccactacaatgcactaaaagagtatttatttactgctgtatttttgttttccatgatagctattgcttcccaaagttaacgtaaaaatagtttactactgttaacttgcttggttaacccracttatgaactacgttagtacggtaaatgttttatataaacagtttttgaaggcacagcacaagtcaaaagtccacagaggcaatgtgacttaatttctggaaaattaagagtttcatgaacatctaagaaatgaaatagatgaacatatatttaatagttagtggcattaaaatcaaacattaaggctaatttcaatgtacttatctcacttgaccagttaaaatggttttcaactcgtaaaattctgcct

SEQ ID NO: 611361 - DNA, 595 bp, Homo sapiens
ggtggttttgaactcctgacctcaagtgatccaccagaatgcattttaagtggctctgagtaacaaacttcccagtgttgatgatggcccagtacataacctagactgatgacaattgtcagcccatattatggtggctttagccactgcaaagctgtataaggtacagaatagcactagttatatatgttttcatatttcttttctctttgtgatatgaatccactacaatgcactaaaagagtatttatttactgctgtatttttgttttccatgatagctattgcttcccaaagttaacgtaaaaatagtttactactgttaacttgcttggttaacccaacttatgaactacgttagtacggtaaatgttttatataaacagtttttgaaggcacagcacaagtcaaaagtccacagaggcaatgtgacttaatttctggaaaattaagagtttcatgaacatctaagaaatgaaatagatgaacatatatttaatrgttagtggcattaaaatcaaacattaaggctaatttcaatgtacttatctcacttgaccagttaaaatggttttcaactcgtaaaattctgcct

SEQ ID NO: 611362 - DNA, 525 bp, Homo sapiens
gcacttagctttcttttctttgagggagaaggggtttgctttaactacttaatgtcgtttgtttaaataaatcactaggctggtcccgttgcggtggtgtttgcagctaattgrtcacagccagagatttgtttcttctccactcgcactgtgtcacttgactagctttaaaattaaaaacagaaagtactatattcctaaaaggaagtgttgctttcatttttgtctgggggtggagggaatcattcctggcccatctttttagagcgcgttgccagaaaaaagtaagatttcaatgaagggtagctctttcctgagagagtgggatgtggggaaacaggaataagaaagaaaaaggaaaattttcctaaggaatgaagaaagttgctgaagaaatgtggaacagtagggtgaggagggggaagagccctcagcccccatcacacagcatctctgtcactccagcggcccagtaccttgcatccagcccgcaccctcgccgcccccacgaagttcagcgaattc

SEQ ID NO: 611363 - DNA, 574 bp, Homo sapiens
caagggccatgcactgtactcaccaaaattcctcccaaagcctggtgtgtgctaagctgccaggaagcagccaatcaataccttcattaccaaatatatcgagaagagtgcatgaagctggagtctgctgaactccttcccaccccggggccatggcccaggttggaatgccccatccatgacttttcacccttgcctgcttcttgcagctcacccttcagttcaaatgcaacctcttctaagaaggcgtcctcagtcactcctctaaagctgtcttccaagcactgtctccaaataaccatttttaattctctatagggcactcatagttcttctatttattttcaatgtgttatttttatttttatttttgtcttttcccaggagagtgtaagcttgatgacaacagaaagactttctgtctggttcaccactgtatccctcctattaaaacagtgtccagaagagagtatgtgatgggttaaatgaatggatgaatgaatgaaacaaatgaataaagtatagagaaatactctgtacttatraggcactcacaatctattaagaaaaacag

SEQ ID NO: 611364 - DNA, 581 bp, Homo sapiens
gtgtgaccccaagccagggctgaactgatctttaaatgttataatcacctggaagaacttgatgatctgtaagccactgagacatataagagaactaaaaacttctgagaatgtttttttccattttgctaaatatttttaaaataattttattatttatgaattcaatactcttgggtcaataatattcactgtttggcatgaattatcatttaaacacataaataacttgtaccttagtttggtttgcctggcattgcatagttgttattcacagaaaaactgagaaaaaattataatgcatgcccactcaaatgtaaaacttctgtaacaaggagaggagggagaagccatcatacagatatgtgagtagcaacatctatgtgcttccatgttacaaaaagaaagattattaaaattsctagaaagtatagttttacatttagctatgcagctcttcgatttattaaaacataaattaaatcatcattctcagtaaactatcgcaagaacaaaaaaccaaacaccacatattctcactcataggtgggaattgaacaatgagaacacatggacacagg

SEQ ID NO: 611365 - DNA, 404 bp, Homo sapiens
gaattctaggaaatagagatagttcagatctgcatattaaaatcccaaatcagttccttccagaagggtcgggaatgtgactgcccctgtatgtactgttggttgccagagcagctgggaagggagagggaaccatttatcataaatccctcctggggtgcctcatcacaccctctttgtgttgggcaaacgcttcacctctataarcgcaaaggcatggtaaagaccttatcacatagagtcatgaagaatgaatgatcaaggtgtcaattgggccaaaatctgcagtttaaaggaggaagactcaagacttggaagcaacaaacataaatactgctgggccactggaaccagtgaactgaacgggtgtgggtttcgagcagctttcccaacctcggcactgc

SEQ ID NO: 611366 - DNA, 484 bp, Homo sapiens
gtgcagctacattccattaaagtcatggcaatttcagtgagtgacactttgaagccacatcatttgtctttctctggctgactttccttgaaggtggtcaggaatattgacttgccttaatctcttacttcacaatggggcttgaatttcactttctcagatatgtttgaggttagtatttgaaccaatttgatttatgaatattttactcaaatagacgtcttggtctttgaaatatcttcctattgccttttaaaaacatcttggctggacacagtggcctgcacctgtagtcccagcactttggtaacctgaggcagacrgattgcctgagctcaggagttcaagaccagcctgagcaacatggccaaaccctgtctttaccagaaatacacacacacacacacacacacacacacacacacacacatgcacacacacacacatacaaataggcatggtggtgcatacctgtggtcccagc

SEQ ID NO: 611367 - DNA, 630 bp, Homo sapiens
cctttctctttctaaattgggacctggtggctggtgtccctctcaccttctgcgggtaaagtggtggccagggacctggctagccttgggttcaagggcttgtgggaagggaggagatggaggccgacgagatgatagaagaggctctttgtgctatgctcagggcaaagcccacctcctctgatagctgtgatgccattgggatagtttttgcaggtgcagagcaggcgggggacctgtttgtatttagattatggatgcttttcttagagttargatcacaaggcattgaaaagattaacttgtgttagaatcgatgggcctagaatgaatacacagtgtcttttattgtgaagacacaggaggaaggaaatgaagaggctactggagcaacagtgtcacctgtcactgaacagggacccagaacccctcatgcttggacacatgctttaagtaatgctgtaactataccagaccaatctggctcggcttttatgtaacaaagttgtcagttgtttttcagttgccatgggctgcccccaggttgaaggtcacataccctgtgcgtgtgcagatggaccaagcatccaaccacaggcggaacctaagtgttttgacagattagcagga

SEQ ID NO: 611368 - DNA, 621 bp, Homo sapiens
agtcttgctatattgcccaagctggtctcaaacttttgggctcaagtgatcctcccacctcaacatctcaaagtgctgggattataggtgtgaaccactgtgctcggctctgaactctagtttttgtctctttaggaccctaaaactattgaagttaatgattagttttttaatgtggcttatttctgcttggtttatgtgatggttaattctgtctgggctaagggatgcctagaaacctggtaaaaccttaattctgagtatgtacctgagtgtgtttccagaagagactggcatctgaatcagtaaactgagtaaagaatatggctctcaccactctgtgtgtgtgtggggggggcaccatgcaatttgttgagggctggaagagaacaaaaggcaaaggaagggccaatttgctgtctatgtttgggtcgcgacatccatcttctcctaccctcagacatgagtgctcctggttctcaggcctwtggacttggaccaggacttgtattatgccattgtttcccagccccattcccttccaggtctcagtacttcatattcagactgaatgacatcactggctttcttgggtctcgtttgcaaacagcaggttgtggg

SEQ ID NO: 611369 - DNA, 457 bp, Homo sapiens
gtaggtttttgttacctaccaccaaaaagcatacctaatagatacaggaagctgaygcagtggttcggttgagaggcatgtagacctgacagatccacaatgtccattcgtgaactctcttttcaagtgggaaaacactagggctggtttggaatctctgggatgtaaaaggcatgagtagtttgaaaaagtatattcaaaaggtgaaaaaacaaaaattatataatgttatccacaaccttcaatttcctatttatagttaaggaacccccccaacctcgtgctacagtttttgtagcataagctgcagaaagtaaagctgacaaactgtcgacaggaaggactgtggacttgcagaagacagagaggagaagggatgtgtggttaacagagtgtgtgatgaggccgggcatggtggctcacacctgtaatcccagcacttagggaggccaaggcc

SEQ ID NO: 611370 - DNA, 457 bp, Homo sapiens
gtaggtttttgttacctaccaccaaaaagcatacctaatagatacaggaagctgacgcagtggttcggttgagaggcatgtagacctgacagatccacaatgtccattygtgaactctcttttcaagtgggaaaacactagggctggtttggaatctctgggatgtaaaaggcatgagtagtttgaaaaagtatattcaaaaggtgaaaaaacaaaaattatataatgttatccacaaccttcaatttcctatttatagttaaggaacccccccaacctcgtgctacagtttttgtagcataagctgcagaaagtaaagctgacaaactgtcgacaggaaggactgtggacttgcagaagacagagaggagaagggatgtgtggttaacagagtgtgtgatgaggccgggcatggtggctcacacctgtaatcccagcacttagggaggccaaggcc

SEQ ID NO: 611371 - DNA, 457 bp, Homo sapiens
gtaggtttttgttacctaccaccaaaaagcatacctaatagatacaggaagctgacgcagtggttcggttgagaggcatgtagacctgacagatccacaatgtccattcgtgaactctcttttcaagtgggaaaacactagggctggtttggaatctctgggatgtaaaaggcatgagtagtttgaaaaagtatattcaaaaggtgaaaaaacaaaaattatataatgttatccacaaccttcaatttcctatttatagttaaggaacccccccaacctcgtgctacagtttttgtagcataagctgcagaaagtaaagctgacraactgtcgacaggaaggactgtggacttgcagaagacagagaggagaagggatgtgtggttaacagagtgtgtgatgaggccgggcatggtggctcacacctgtaatcccagcacttagggaggccaaggcc

SEQ ID NO: 611372 - DNA, 645 bp, Homo sapiens
aaatatcacttacaggcatggatgaatgaacaaaagctgaacggatacttttcccctccatcctttagaggtggaggctcctgaattactgttttaccacctctttgtcatatctgaaatctagttcagagaagaaaatcatgcaaataattagaattgccacttattgaagatctttctatatgctgctggctttaaagaattttactttcctaatattattttcctgttactattgctgcataaaataaaagatcaccccaaaaattagtggcttaaatcaaccattttcatgtattctcagattgtgagggtgaggatactgaaaagagcacaaagggttagctagtcacaatgtctggggtttctgctaggaaaactagaatactggaagtgacttgatggttgacagctggaattatctggaatgtctcctttcrtgtagctgacagttaatgctgaccattagtaggaacctcagttgggtctgttggcagtaacacccacatgtggcttctccatgaggctgcttgagcttcctcttaacaaggcagcctcagggtgcttgaacttcttacatagtagcaccagattccaaatgtgaatacctcatctaacaaggcagaagatgtaggatttttatgc

SEQ ID NO: 611373 - DNA, 327 bp, Homo sapiens
agaattgcttgagcccagaagtttgagaccagcctgggcaacatagtgagattccatctcttaaaaattttgtcttaattagccaggcatggtggagtgctcctgtgrtcccagctactctggaggatgaggtgggaaggtcgcctgggagctggaggtgagcctgggagctgacggagctgaggagagccatgatcacaccattgcactccttcctgggcaacagagagagaccctgtctcaaaaaaaaaaaaaaaaaaaaaaaagaaagaaagaaagaaaaagaaagaaagaaaaaaggaatgttcatttcagtgatccctaatt

SEQ ID NO: 611374 - DNA, 591 bp, Homo sapiens
tttgcaaactaggaaacttccttcttcaatttatgctcacaaaattctaccttatctctattactctgatcaaaactataattaacaacccaattttataattatttatttaatacctaactcttccactataatgcaatttccactacagcaaagaacatattgtttcatttgactttcatttatcagaggcctggtgtttatcactgtgataggcacatagatgttaccaaatgatacttactgagtgcatggataaatgaatcaatgtatgttatcgctaatgtcagatgatctgatttttaaattttgaattaccatttaccgtgatggagttgaccatctagaactgagatgcttgctgctgaataaatggttcactttgaactttaaacctttggctaagggtatttgttattattattattctctctaaaaatctgtgctacttgtctcttccaggattttgccttcctagcttgtcaaatctatcttaaaaaaaaaaamaaaaaaactctagtttgacctgctgttacccacattctgctctgactttgtgtccaaacttactcattcttatgtgggaaagtt

SEQ ID NO: 611375 - DNA, 605 bp, Homo sapiens
aacacaagggttatgttctgccaaaaaatgggacacattttaaagtgtttgctaatttttatatcaatttttaccaacttcttaatgctgagaggaaaaaataaactcatcaggcatttaaggtaatttaatttcagtatttatcataattttaccctttgtatactctgacttggtcatacaggtaattttagtgcaaattctatgtagtgatggattttattatatatagattattaaataattactcaataatagattgtatcaagtataaaaatatcaattaattaaacaaacttcaaataatacatctgattataagtaatatattttattatatatattatcaagcaatattaggctatagattatgagatttatttgtgactggtaytttcctatatattttccatgatttatcaaatctcatgtttccaaaaacttttcaatgccttgttttccttcagtaatgatccgataacctaagagacttgaacagtaattcaatttactgatctttatgtatatacatatatacataaagttaaaaaataagttagaatgttatgcttatattgtattctgcttctgactagagagtagca

SEQ ID NO: 611376 - DNA, 595 bp, Homo sapiens
aatcatccccatgatccaatcacctcccactaggtccctcccttcacaacaggggattacaatttgagatgacatttgggtggggacacagagccaaaccatatcaatagttcttccgtcytttttccttctcagctttacttgacaccatttccccttcctaatttgcttcttaatgcttattataaattaaaaattttcagtaatttgtttgtgtctatttcttccagtcaattttaagtttacaaaaggcaatgaccatgacatttaaaaaaattttttgaattcccatagaataagtaagtgctcactaatattttaaaagggcaaaacattttcctgccactcccagttttcttgcgtgactctttaggaggtcatgttataaggtattcagccatgtgtccttaagatatcttctagaggcttcctcaaatataaacaccccgaccccatgtggtaaaatggtaaaggctgatacagaaatgagtatttaaatattcaagacaaactactatgaattaactgcccacatttaattcacagcttttaaactctttttatttttctgacacataattgcaaaataattaag

SEQ ID NO: 611377 - DNA, 487 bp, Homo sapiens
aaacatgagtagattgatcagactacatcttcaggagtttcagcccttattttatttacatcaatataaacatctctcccaatcattgaaatatcatgcagtcagccatcatttccagtgctcagtgggaagatgtgggtaggatactttctgacatgtagtatatttttggagaccatttttgcgtatcttaacaaagtgacatctaygttatcttgtagtttctactatttattagctctgtgcacaagctacataattcacagttttttgtgagggttaaaaatgattatagatgtaaacgaacattgtagattttagagtaataaaatataggtgtatgactacaatatttaaaggaatagtctacatgtatttcttaggtccacccaaatttattcctaagctagtctgataactgaatcaacatcccttcatcaaaagaaaaattcagtgcccacatgtattttaactggtctagtagaga

SEQ ID NO: 611378 - DNA, 595 bp, Homo sapiens
aatcatccccatgatccaatcacctcccactaggtccctcccttcacaacaggggattacaatttgagatgacatttgggtggggacacagagccaaaccatatcaatagttcttccgtcctttttccttctcagctttacttgacaccatttccccttcctaatttgcttcttaatgcttattataaattaaaaattttcagtaatttgtttgtgtctrtttcttccagtcaattttaagtttacaaaaggcaatgaccatgacatttaaaaaaattttttgaattcccatagaataagtaagtgctcactaatattttaaaagggcaaaacattttcctgccactcccagttttcttgcgtgactctttaggaggtcatgttataaggtattcagccatgtgtccttaagatatcttctagaggcttcctcaaatataaacaccccgaccccatgtggtaaaatggtaaaggctgatacagaaatgagtatttaaatattcaagacaaactactatgaattaactgcccacatttaattcacagcttttaaactctttttatttttctgacacataattgcaaaataattaag

SEQ ID NO: 611379 - DNA, 643 bp, Homo sapiens
ttaagttaaacaatagaaaaaatttggtataaccatgagaaatgtccacattatataaagtatagcattaaaataatatttttgaagaatttacaacatggaaaagttcaaaattcaacacaatgaaacatgaagtaaaaaatcattgcaacagtatgcctcttacaaatgtattcttgcctcaccatttctgagaaagaagggaacccattatttcaagtgttcaagaaaatttctaagcaatttaagtgttattgactgatgggtgattcagttatcaaaatgcaaatagttggattagaaattcatctcctttccttgccaagcttcttctcagaataataactttcatagcagaaagtcacacaaagaaatttaaaaagcagattttattatctacatatggaaagaatcaatctcaaagtattcactggaaataataattatatagcaattaatatgtaacttcaaggaattatactaaataatctgtggatgtgaaagatatataagacataactccctctatagattctataatctyatgtgggatatagtgaaaatgaaaaatagcaatgaagatctaaattaaaaattaagaatatcgaacacgagagaaaattaacatgtataaagtgtctac

SEQ ID NO: 611380 - DNA, 607 bp, Homo sapiens
ccaaatgcaatataatgaatagtctctaatgacactgaaagatgcagctgtgctgtaacacttttccccgtgtgcccaaaagtgctaagcagagtagtgagcacatatttggtgctaaacaaattattgttgattgatgatagctgccaagtcctgagtcaactgtaacatttaggagagaccatggaattgttcgaaaattatataagataaaagttataaagataaaggtttttaagtgataaacaattgagaggttatattataaatargatgaacagtatgactttatacttacaacttctaaattggaaaaattgatataaataaataacttgatatagaggcagattttttaatatatccccagtattccagtaaatcttggcctataacgaacatcatagtgagctgatgacaaatattggttgaataaatgaataattaaatatgtgacacagatttatactcatttattagatattagaagtgttaaactgaatttaaaggacaagggaataaatacaataatgaggccggttaaataatgtataactgaaagatggaagtgagcagagtgacacggaaagtattgacagagagatgg

SEQ ID NO: 611381 - DNA, 607 bp, Homo sapiens
ccaaatgcaatataatgaatagtctctaatgacactgaaagatgcagctgtgctgtaacacttttccccgtgtgcccaaaagtgctaagcagagtagtgagcacatatttggtgctaaacaaattattgttgattgatgatagctgccaagtcctgagtcaactgtaacatttaggagagaccatggaattgttcgaaaattatataagataaaagttataaagataaaggtttttaagtgataaacaattgagaggttatattataaataggatgaacagtatgactttatacttacaacttctaaattggaaaaattgatataaataaataacttgatatagaggcagattttttaatatatccccagtattccagtaaatcttggcctataacgaacatcatagtgagctgatgacaaatattggttgaataaatgaataattaaatatgtgacacagatttatactcatttattagatattagaagtgytaaactgaatttaaaggacaagggaataaatacaataatgaggccggttaaataatgtataactgaaagatggaagtgagcagagtgacacggaaagtattgacagagagatgg

SEQ ID NO: 611382 - DNA, 607 bp, Homo sapiens
ccaaatgcaatataatgaatagtctctaatgacactgaaagatgcagctgtgctgtaacacttttccccgtgtgcccaaaagtgctaagcagagtagtgagcacatatttggtgctaaacaaattattgttgattgatgatagctgccaagtcctgagtcaactgtaacatttaggagagaccatggaattgttcgaaaattatataagataaaagttataaagataaaggtttttaagtgataaacaattgagaggttatattataaataggatgaacagtatgactttatacttacaacttctaaattggaaaaattgatataaataaataacttgatatagaggcagattttttaatatatccccagtattccagtaaatcttggcctataacgaacatcatagtgagctgatgacaaatattggttgaataaatgaataattaaatatgtgacacagatttatactcatttattagatattagaagtgttaaactgaatttaaaggacaagggaataaatacaataatgaggccggttaaataatgtataactgaaagatggaagtgagcagagtgacayggaaagtattgacagagagatgg

SEQ ID NO: 611383 - DNA, 612 bp, Homo sapiens
taaataaattattgatcattgtcagaattttcttctcgaatattttgaattcctaggggtcttaaacttcaaaacctaatcattcagataattccttattccttttcccaattgggatatgtatgtgacaagttcacctgtcatcctcccaggatgcccatcttaggtagacaaactgagatacatagcttcccatgatcatcctgtacaattatagcaacttcttaaaatttgtgaattacaaaattcacagagaatttcttccatatacctgtactgatcagccgtatctccaaagcaggtcacttttaggcatggtaggactatggtctagaataggatataaaaagagaacacacttcggtctgaaggcttttcaagagaaagacacgtggtccagaagatcttaggaatcctcactataatccaagctcaaactcttkcaatttgctccagagtgacacctgtttggggagatttagtcttccaatgtaaaagagtcctcataacaatggcagaaacagaaaccagaatcagattgctttgaactgcactcatctgtgaaaagctttcataatctagctaaaatatatcctgctgaactatgattat

SEQ ID NO: 611384 - DNA, 612 bp, Homo sapiens
taaataaattattgatcattgtcagaattttcttctcgaatattttgaattcctaggggtcttaaacttcaaaacctaatcattcagataattccttattccttttcccaattgggatatgtatgtgacaagttcacctgtcatcctcccaggatgcccatcttaggtagacaaactgagatacatagcttcccatgatcatcctgtacaattatagcaacttcttaaaatttgtgaattacaaaattcacagagaatttcttccatatacctgtactgatcagccgtatctccaaagcaggtcacttttaggcatggtaggactatggtctagaataggatataaaaagagaacacacttcggtctgaaggcttttcaagagaaagacacgtggtccagaagatcttaggaatcctcactataatccaagctcaaactcttgcaatttgctccagartgacacctgtttggggagatttagtcttccaatgtaaaagagtcctcataacaatggcagaaacagaaaccagaatcagattgctttgaactgcactcatctgtgaaaagctttcataatctagctaaaatatatcctgctgaactatgattat

SEQ ID NO: 611385 - DNA, 560 bp, Homo sapiens
aacaagactgtagaagactgttaatgcaatagctacaccgtattatgcagtcgtattgaaaagtgagctaccaatgatgggggttgtttgtgaggttaggcgtgagaacattcccagagaaggtaacctctgatgtcagcattgaaggagaaatcagatcaagctcaagattcctgattccaagtaaatggtgtttccgttaagctgaactataaaatgtgggttacwtaaacagaaatgcagaaaggcacttggtactccctagcaatggcctccttttgactgacgacttaaaatatgaaataagaatgaagatgcacagagacatggatgcaaattaatagaaatgtgtgtgttcatctgaattttaaaagactggttgatgtctgactgtgtcttatcttccccaagaaagagagcaaacgtttttgcaaattttggtcctatctgtctctgctgttgagacttccaccaaaccccactcacagagcacacatagtgctgtagcacctacaccacaagggctcagaagctcccctgctaccaagaagccccaccat

SEQ ID NO: 611386 - DNA, 599 bp, Homo sapiens
tacccttcactcctgtggtaaacagaattgtaagatctcaaaattcttgccctgacccccagcataatgctcctgttgattcttcccttgaatgtgggtggaagctgtcaatatgatgggatattactctctgtattaggttacacaaaagtgaaaaaatactgtgtggcaaaagtgcaaaaaaagaaaatctttttgtcgtttttttttccattgcacaatttgtttacttatttattttaataactttttgggagcagttttaggtttacagaaaaattgtgataaaaagatcagataggttcccatatacccccttcatctgcccacacagtttccgctattatcttatcttttatatcctacatcttacattagtgtgaggcttttgttacaattgatgagccaatattgatatttattaactaaagtccatagtttacccctctcctcatctctcaattctgttctcgccttctggaactattagtctattagtcrtttattttacctacttatgggtctattctccatattctttaaccttttcatcccctttcaccatcatctcctctttatatctgttttaaattttttat

SEQ ID NO: 611387 - DNA, 512 bp, Homo sapiens
tgtctcctgaatgtcattctgattatttttatggcagctttctttgctttgatctgcaggggttgtttctcggaactatgcattctcaagttatttttgtgtatggattacctcaaagtcaaccttgcaggacatcccagacctcctgcygctggactttttcctcaagttcttttcccttcctgacatactttggcaaatcttccttactactacacatacattcctctgtttgagtccacttttagtttatcttgcccagagaaattgaaatttatcaattttcattcataataattcactatccctcaaaatcgactttctgaaattagcacgcaaagccctcaactttgtgctttctctgcatcttcacccttgtggctgatgactgcagagaaaattgtacagccttgcaggtcagccctataaactcattatctccagataccaggcaaatcattctatttccctactcagcgattttctactctccagaggaatatttaaaatgt

SEQ ID NO: 611388 - DNA, 512 bp, Homo sapiens
tgtctcctgaatgtcattctgattatttttatggcagctttctttgctttgatctgcaggggttgtttctcggaactatgcattctcaagttatttttgtgtatggattacctcaaagtcaaccttgcaggacatcccagacctcctgccgctggactttttcctcaagttcttttccctkcctgacatactttggcaaatcttccttactactacacatacattcctctgtttgagtccacttttagtttatcttgcccagagaaattgaaatttatcaattttcattcataataattcactatccctcaaaatcgactttctgaaattagcacgcaaagccctcaactttgtgctttctctgcatcttcacccttgtggctgatgactgcagagaaaattgtacagccttgcaggtcagccctataaactcattatctccagataccaggcaaatcattctatttccctactcagcgattttctactctccagaggaatatttaaaatgt

SEQ ID NO: 611389 - DNA, 586 bp, Homo sapiens
tactttccagctccctctttcctagttaccttcctcttattttacagaagaaagacatacttctcacccacccaaaatttaatgtgcattgattgagcatgtaaactctttgggagcaccaaacaaaaagataactgatataaatgttgagaaatactggtatggctattgagaaagtgaatggctagcaaataaattatttcgtaagtcaagcaatttccatttctttgcattcaacaaaattaagtttattaaagataatttttgacaatagatcaaattcaaaacagaattaatattaaactctgtctaattttggcaataagtaacattctcccaaaggtagagggattaaaattttaaaagcccgtctgttacattaagctatacattgccaataaagttgtacttcttttgtcagtaacaattttttcagaatttgaaatgtagttatatagatttattcaagtgttcaataataaaaattttattgacaactcattctagaaaaataattaacacttaaaaccttatmggaaatgtttaaaattaaattataaccattttataactaaaatgcattatt

SEQ ID NO: 611390 - DNA, 426 bp, Homo sapiens
attaaaaagaaaaaaatggcacaaaatttttagagttgtgcaagagatatatcaaatatttttaaatagataatgacgagcattgaatctcggtattattcagactctaatggatactattaagagtaatacaacagacaatttaaaatggcaaaatttacaatatgctgaaaattacattttgcaacggtttaaacttatgatgaatgtttatgtcaattcacaagtatatgagatgatatacaattttacaaaattattttgggagtgtttgaggaacaaagtttggtaaccactagactaggtcattrgtatttctatccaaggttactgcactaccctctagtattctttctgcttcacagtcatgcctcactcaaaaatgttttcacaacagtagccagagctttcttgcagacaaaaatt

SEQ ID NO: 611391 - DNA, 542 bp, Homo sapiens
acttaaggtaattcacatctttaaaaaaccatgaccaaacttttaaatctagaaatatgagatgagatgaaactaaatatgagaatgtgggaataactaattattcccccatgttgtgtcttgaataaatctttattcttcaggattcaaaataaatcaaactttcaccaagagtcagtcttttcacattcatctaaattctctcccactcacttttatcccatgaggaaattctatgctcttgcaatttccctgttaacatgtatgacaagctgacttgtcatttgcatatttttaatttaatatgtgtatttaccactagactgtaaacttcctaagtatagatagcatgtcagcctgtctrtttacttatcattatatccttgagagatagcatagtacctagcatacagtaggaatgagttaaagaatatttaataaaaatctctaaaatcaatcattttgatctaggatgctgtaaaagaagtgttgaaaaaagctgagaaaatatttggaaaattattataaatttggaggtacag

SEQ ID NO: 611392 - DNA, 528 bp, Homo sapiens
tattttaataatacaaatcactattatttgtttaatatattattatacattagcaattactacaaaggtaattaagaaagtgttgttagcattccatattttatgtagactcagtccccttaatagaaattcttcagatagtttgagaataaattagagaccctaatataatggctagcacagttacctttgtttctcctaatcaattacaaccaagctccatgattgctattaggggaatcagagggtagactcgattggggcataattatgagtcagttttgcaggaattggttgagagattcactatgatttccaagctataatatgcttcttttggagtcagtcattaatgtatttattacatttgtttatgttttactttccctgaatgactaactttacatatataytaatcaaataaaatcacccttattaatcaagtatgtaggttttcttgttgttgctaatgttaaatttaccttcttggtctttacaccttttttaaataagtgtaaagattataag

SEQ ID NO: 611393 - DNA, 396 bp, Homo sapiens
gtttgatggtacaaccacactaatatttattgatccttttaactccacaggaatgttttcttttgatagttcattaccttagtaatttggatctatcacaaatatgattacattatattcttatactgtatttgattattttatttaagagggcaattaatccatagggaaagaagtgatttttctcctttataaccagtccctactgttactggaaaaaaaaaaaaaaaaacacacctggtgccctagagtgtctgaactayaatataaaaccatcatgtataactcagtacagtacaacttcagtaggacttacaactttgagaagacctaaagaccaagtacctttgctaggaaccagacatgtgacatgcatccttgaaaggacttgaaaaa

SEQ ID NO: 611394 - DNA, 510 bp, Homo sapiens
attgctgcctgagctcctgtcagatcagtggcagcattagattctcacaggagcgcaaactctattgtgaactgcccgtgcaagtgatgcaaaggatctagattgtgcgcttcttatgagaatctaatgccttatgatctgaggtggaacagtttcatcccaaaaccatcctcaccccatccrtggaaaaactgttttgcatgaaacctgtccctggtgccaaaacggttgggggccactgattcccagtggaggatccccaacaggagagggacagcccactccttcaggctgtaattcaacttcttattcaagaatgtgcctgggatataactagtaaaatataattgtaattgctattcacattataaatccactgctttctaaacttttccatgaaactgataaaattaaaatttcagtttacagttttaatttgcataaatagtgaacacaacatttgaaagtaacacaaattaagagcaaccattagtgaattcagtttttttc

SEQ ID NO: 611395 - DNA, 510 bp, Homo sapiens
attgctgcctgagctcctgtcagatcagtggcagcattagattctcacaggagcgcaaactctattgtgaactgcccgtgcaagtgatgcaaaggatctagattgtgcgcttcttatgagaatctaatgccttatgatctgaggtggaacagtttcatcccaaaaccatcctcaccccatccgtggaaaaactgttttgcatgaaacctgtccctggtgccaaaacggttgggggccactgattcccagtggaggatccccaacaggagagggacagcccactccttcaggctgtaattcaacttcttattcaagaatgtgcctgggatataactagtaaaatataattgtaattgctattcacattataaatccactgctttctaaacttttccatgaaactrataaaattaaaatttcagtttacagttttaatttgcataaatagtgaacacaacatttgaaagtaacacaaattaagagcaaccattagtgaattcagtttttttc

SEQ ID NO: 611396 - DNA, 521 bp, Homo sapiens
ctcagcccctgctaatggactgtatgggggccacgtttctctggtgctgttttgmtgcagcactgtgcttagggagaacaggcctttctatgagactttcaggccgaatgggctacacaggaagaagtgagttacaactctccttggcctaggactttcctagacctatctggtcatttatttcattcccaacatcttccaccaaaggttgcgcccatgaagagagaaagggaaagaagaacttcctcttggacacccacaaaaggctttagtctgtttcaaaactcttctttcacctgttctcatatttttaattttattttcaggtgagaatgagtctaccacatcttcacatatgtgctcctattttttggtttatttatgatccatggtgtaccccagtcctccaagctctagcattaatacttgaaattgagacaaccaaccaaccaaacacaaaaactctttttttttctctctcaacaaagcttggctcttgaaaatcaaaggcactttggctt

SEQ ID NO: 611397 - DNA, 558 bp, Homo sapiens
tgaggatacatataaaaagttgcagattccaatgatctccagaaaaccttgaatttcaaccaaattgtggaaattgagagatatgcccgcagccaccataacagacaggtcctggtacagatttgttagtaatttcaatgattcatttatatagccattcttcttagagttttataatagttggtgatttttaatcaacatagaaatcatgtatagcctaaatgaaaagggaaaaatgtccatctctttgagtaggctgtttgggtttcattcctggctccacctcttgctagatgggtaactttacatgagtaaaagttttacttgagtaaaacctctctgtggctgttttctcatccgtgaaaagrggatagcaatactatctgtctcctatgatttttgaaggattaaataaaataatacatggaaagcctttgggaaatccattagcacatagtcagtttacataaaatattactatgacactatgaagaaaacaaaagaaaatgcagaaaagtgaaagaaagaaaataaaatgacactccctgccaaagagcc

SEQ ID NO: 611398 - DNA, 598 bp, Homo sapiens
acttagcctcctgagtatctgggattacaggcgtgcaccaccatgcccagctaatttttatatttttaatagacacggggtttcgccatgttggccaggatggtctcgaactcctggcctcgagtgatcttcccactttgacctcccaaattgctggcctttgggaggccaagttgggaagattataggcctggctgacttgtttttttaaagctacctcattgagaatgggcaaagaagttatgttggcatgtggtctcattttccaggactttcccgtgaaatattttaccctgggggcctttgaytcaccccattgtaaagtttggcagttttgaaagttcagagggtactttatgggctataaatgcagaaaaacagaaaaactttacctagggtaaatgacataggacctcactgctgtgatcgctctgtctgggtggattgccccttttaaagaaatcttaaacataattagacaaatcttttctgattatcaaaggaacatgctcattattttgatattggaaaatacagaaaattacaaaaaagtaaaaaataagtaaaaaatatcttctaatctcattacttggaggaa

SEQ ID NO: 611399 - DNA, 550 bp, Homo sapiens
tttaaaatattgcttgcttttagttttaatccatttcctcctccctttcccaaccctatcartatatagaacaactgctcagaaaactgttggtttccaataatgcagttattaactatgacctttgtgtcttgtctttaaaccttcccccgcataatccagtcttccctttgacatctctgatggttagctcctcttactggccaactggtgcctctgccacatgggagtgccattacacagtaaaattaatacctccttccaggatttatttagcttcttctgacacactcaaaagagcaagggaacacatgtcttgctttcccttgggaaggtcaagtattagatgattaaactggtaggaagcatttgaatatcctcagtaaacaagctttgtatttaggctcatagatgtttttttgaagttcttcattgcatttattttcaaagttagtttgagagagcttttaccagttacttggaagttatgtgccattattgctttccttattgcttaaaaaacaaaaaaagaatttaaaatcagctacca

SEQ ID NO: 611400 - DNA, 620 bp, Homo sapiens
tttcattgtgcatgcatcatacatacacaaaaacatagttcctcttttggattataattctctaaactttggaggcacaatatagtagcttgatactcttcagtctctgaaaaagagtaacagttgcagtaattaatataaagactaaggagtaaatcagaaagaatccaaagggttcttgtgtttatcttgaacttaagttacaggttaaatgttttcccagtcagcaaaatggagattgtgaggaaagggggtgggaggaagagctagatgacatgagattctttatagctcatggaagataagatataaatttctagattttcccctattaactccataaaaatataaggttctctaaacagctggaagttcctgatctaaattccattgcatgctttgatccctaacgatgtrtcttcgcaaagttcctgcagcgctgggagaccagcaaggcacagatgtctcctaaaaagccgccatcgagtgcaggagtttgaagaggcgaagcgacggcgttgctttcacctgctctgctcgagagacttgctggccgcacaccggcagcacgttcctgcctagccttgcacacccaggctttgaccctcccaagcagacag

SEQ ID NO: 611401 - DNA, 612 bp, Homo sapiens
cactcattcattcatttagtaaatactgaaaatctgctaagtgttggttaaatgtattagatgcatatttataattatttgttttcatatctatttcttccattagactaygcaattcaaactccaagaacaggacttgtgctatcctctcttgcgtttacattgcctatagcattgcctagcatgtagtaaatgcataatgaatgactgttaaatgaatgacagattgacaatatattggaaagctaaacacctagtttctgaataaaacaatcaccatttatagaaactttttgaatacaccaaatcttttgatagcagaaatagctctatatctatattcatttaatggaatcggatgtcacaaaaatacgaattctgctctgttcatataggtggatacgtaattaaaaaaaaggaaacaaacctgaaaatgttgtgcctctgtaccaaaagcaataatattaaaatatattgagcctttactatgtgctagaggtattggaactctttaaatgcattaactgagttaatcctcataacaacccttctatttaagacgtaaaaaattgaggtgcagaaagtttaaataacttgctgaatgtcccactt

SEQ ID NO: 611402 - DNA, 612 bp, Homo sapiens
cactcattcattcatttagtaaatactgaaaatctgctaagtgttggttaaatgtattagatgcatatttataattatttgttttcatatctatttcttccattagactatgcaattcaaactccaagaacaggacttgtgctatcctctcttgcgtttacattgcctatagcattgcctagcatgtagtaaatgcataatgaatgactgttaaatgaatgacagattgacaatatattggaaagctaaacacctagtttctgaataaaacaatcaccatttatagaaactttttgaatacaccaaatcttttgatagcagaaatagctctatatctatattcatttaatggaatcrgatgtcacaaaaatacgaattctgctctgttcatataggtggatacgtaattaaaaaaaaggaaacaaacctgaaaatgttgtgcctctgtaccaaaagcaataatattaaaatatattgagcctttactatgtgctagaggtattggaactctttaaatgcattaactgagttaatcctcataacaacccttctatttaagacgtaaaaaattgaggtgcagaaagtttaaataacttgctgaatgtcccactt

SEQ ID NO: 611403 - DNA, 548 bp, Homo sapiens
gaaatacaacttttaggtataccatggattacttakgcttttgtgggttggactggggactaataattacgtagagccctttatatggggaaatgatactcagtttgggaataagaaataaggtgtcaggagctaaagaaggggacaaaaagatgtgttggatgggaaatcaaggacccaactacatggttgctgaataaactaataaagaaaagctatcactaagatgaagcaaacatagaggtgtttcaggggcagctatagctcagtggttttcaaaggaaaccacatttggggccacaagacatctctcagcttgaacctattggtggagctcaggcttatgatatattgttaagatgaactgagcaatactcacttgcaattagaatcctatacaatttgttagagtaagaccaggaagagtaagactggatagtggtctgccatttgagggcacctaataagcattttctgtgcataattactgctcacacactttgcccttttatctcatcatagaaatagactgaataaggtataattta

SEQ ID NO: 611404 - DNA, 417 bp, Homo sapiens
accttaaacaaatgtaaggtttctctatttgattaagagtctgtagggatttagtcatccttttctttctggtgcagaggagacacmcttacaaatgaagatttcccttatagatacagatttctcttacaaaagggtaactttcctgagcttctgtatctgcagtttgtgagaataaccagcttaaagtaatcaatatgccaaagaggcatatattttttatttttatatactttaagttatgagatacatgtgcagaacatgcaggtttgttacataggtatacacatgccatggtggtttgctgcacccatcaacctgtcatctacattaggtatttctcctaatgctatccctccccttaccccctacccccaccccgacaggccccagtgtgtgatgttctcctccctgtgt

SEQ ID NO: 611405 - DNA, 590 bp, Homo sapiens
tataagctttcagaaaaaagtatattcaatatgcttgaatatggttttctgtttaatacaagaggcttagtgttccaatttgctaaagtctcacccacttgtcatcatcaggcagctaattcataatgtcttggtaaatctaaagagatagaaaatcataactttttttttttagacagagtcttgatctgtcgcccaggctggagtgcagtggcgctatctcagctcactgtaacctctgcctcccagggtcaagcgattctcctgcctcagcctcccgagtagctggaattacaggcacccgccaccatgcccsggtaatttttgggggtgtatgtgggggggaatttagtagagacggggtttaccatgttggccacgatggagacctaactttttaattaagaaccaagtatttcctatatccctgcttcctgtgatgattaattttttgtggcaacttagttgggccatggtacccagatatttagtcaaacattaaacatattggatgtttctgtgagagggtgtctgtggatgatttaaattggtgaactttaagcaaagcagactgccttccataatgtagc

SEQ ID NO: 611406 - DNA, 539 bp, Homo sapiens
agaaaatatttttgtagatatagacacaataattataaaatgctcatgaaatggtaaaggaactataatagctagaacagttttgaaaaaaaaaaagtaggaggaatcagtctacctgattataaaacctaatttatagctatagtaattaggatatgttattagaggaggtatagacacatagatcaatggaatagaatgaagatcccaraatagactcacacaaatatgcccaattgctaaccaaggtgcaaaaaaaaaaattaagatatacagccttttcaacaaatgaacctggaaaaattggatattgataggtgaaaactatagaacttgacctcaacttcataccttatataaaaatttacttaaaatgaaatatgaactcaaatataaaacaaaaaattataaaaccattgcggaaaaaaaaacatgagaaactcttaattttctagggctaggctaggagctgttagacttgacaccaaagaacaattcatgaaaggaaaattgataaattggacatcatcaaaattaaa

SEQ ID NO: 611407 - DNA, 650 bp, Homo sapiens
gtcccctagcacaacacagctactgtactaaaacatggccagactgctttttaaagcaggtccctgatccctttcctcctcactgggtgggacctcccaaacaaggtgatctccagccacctcccacaggtgtgtttgggccagcaacaaggctgtacctcccaggaatggagcttccagagaaaagggcaggccaccatcttgttgttttgcagcattcattgttgatacctccaggtactggaaaatttgaggtgaccaaggactggagcaggcccaagcataccacagcagccctacagaaaagtggccaggctgttacatgggtgtctgttcccatatctcctcackgggcaggtcctccaaccaccccatcagggctactgagccagcagcagctctgcaactccctgggcagatctcccaggggaaactaaaaggctctgccactgcctctgcagcggaactgcacttgctacccttggactaatgaaggagcaaagaccccaagtgccttatccacacctctaacaagctgcagtcgacccaaggacaggaggccagcctgtctcccataaatctcacccatccctgctgcttgtcatctgacagggaaccccaaatgtgggcccattctcacctgattacat

SEQ ID NO: 611408 - DNA, 650 bp, Homo sapiens
gtcccctagcacaacacagctactgtactaaaacatggccagactgctttttaaagcaggtccctgatccctttcctcctcactgggtgggacctcccaaacaaggtgatctccagccacctcccacaggtgtgtttgggccagcaacaaggctgtacctcccaggaatggagcttccagagaaaagggcaggccaccatcttgttgttttgcagcattcattgttgatacctccaggtactggaaaatttgaggtgaccaaggactggagcaggcccaagcataccacagcagccctacagaaaagtggccaggctgttacatgggtgtctgttcccatatctcctcacggggcaggtcctccaaccaccccrtcagggctactgagccagcagcagctctgcaactccctgggcagatctcccaggggaaactaaaaggctctgccactgcctctgcagcggaactgcacttgctacccttggactaatgaaggagcaaagaccccaagtgccttatccacacctctaacaagctgcagtcgacccaaggacaggaggccagcctgtctcccataaatctcacccatccctgctgcttgtcatctgacagggaaccccaaatgtgggcccattctcacctgattacat

SEQ ID NO: 611409 - DNA, 443 bp, Homo sapiens
atcattgagattcaggagaatggcaaaatccaatccagggaaactgagaaccaaaataaaatacaggagctaaaggatgaaacagccagcataaaaaagaacctaatgaatctggcagagctgaataatacaaggatttccatgcaatcacaagtattaacagaataaaccaagctgaggaacgaatctcagaacttgaagactggctctgtgaaataagacagtcaaaataaaaaagaagaaaaataaagaaaaaataaaagagaatgaacaaaaccccccaagaaatataggattatataaagaggccaaatctatgaatcactgaaatccctgaaagggakggggagaaagcaaacaacttgaaaaacttatttcaggatattgtccaagaaaacttcccaaaccttgctagagaggacaacagtgaaattcagaagata

SEQ ID NO: 611410 - DNA, 586 bp, Homo sapiens
caggagctaaaggatgaaacagccagcataaaaaagaacctaatgaatctggcagagctgaataatacaaggatttccatgcaatcacaagtattaacagaataaaccaagctgaggaacgaatctcagaacttgaagactggctctgtgaaataagacagtcaaaataaaaaagaagaaaaataaagaaaaaataaaagagaatgaacaaaaccccccaagaaatataggattatataaagaggccaaatctatgaatcactgaaatccctgaaagggatggggagaaagcaaacaacttgaaaaacttatttcaggatattgtccaagaaaacttcccaaaccttgctagagaggacaayagtgaaattcagaagatagagaactcctacaaaattctatacaagaagatcagccccaagacatacaatcatcagattttccaaggttgaaatgaaagagtgttaaaggtagctagagagaacaggcaggtgacctacaaagggaactccaatcaggctaacagctgacctctcagctgaaaccctacaagccagaagagattagtgatctatattcaacattc

SEQ ID NO: 611411 - DNA, 490 bp, Homo sapiens
ctgaaaaacttggaactccttcaagcagaggattatttttacaaaataacattcaatatttccattatatctgtttatttttaggcattaggtagctataaaaaatcactttggggccaattttgatgtacttcttaaatataattgtaccaaataagaaaatatatttttcatatttcatgcactctcagatgcacttttttttttttttttttttttacattttaagctctttgaagtcaggattcttctaatgatggaaaacaacttacaaattgctgtctgctaggttgcagtaatgaaacagttgtaattacctgcatgaaattagtctgaaaactctcctttggaactttagtgtragattcagaaagtcaaccacgaatatttatggtatgaggaaccgggtcatggaagaaaattctccagaccgtgggggagtattcttttaaggaaagtgcatgacaccgacattgattttgcaaaggag

SEQ ID NO: 611412 - DNA, 478 bp, Homo sapiens
gccaccatgcccagctaattttttttttttttttttttttttttttttttttttgtagagacgggatttcactgtgttagccaggatagtctcgatctcttgacctcgtgatccgcccacctcgtcctcccaaagtgctgggataacagatgtgagccaccgcacccaggcttttttaactctattatactttaagttcagggatacatgtgcagaacatgatggtttgttacataggtattcatgtgccatggtagtttgctgtacctaccaacccatctaggttttaagccctgcatgcattaggtatttgtcctaatgctctccctccccttgccscccaccctctgacaggcccctgtgtgtgatattcccctccctgtgtccatgtgttctcgtttttcaactcccacttataagtcagaacatgcagtgtttggttttctgttcctgtgttagttgctgaggatgatggttt

SEQ ID NO: 611413 - DNA, 604 bp, Homo sapiens
aatatttgcaactgtgaaaaacaagttgtgccatactacatggcacagacacaaaatattatactaatatgttgtacattcggaagaatgtgaatcaatcagtatgtttttagattgtattttgccttacagaaagcctttattgtaagactctgatttccctttggacttcatgtatattgtacagttacagtaaaattcaacctttattttctaattttttcaacatattgtttagtgtaaagaatatttatttgaagttttattattttataaaaaagaatatttattttaagaggcatcttacaaattttgccccttttatgaggatgtgatagttgctgcaaatgaggggttacagatgcatatgtccaatataaaatagaaaatatattaacgtttgaaattaaactgagctgttttgtcttcttttatcttgtttctttcaagtgtaagaaactacattttatgttaagggtaacattttaatgaaatagttaatcacttgtctatagaattattttatgattgccgctttaaagtaagctggatttgatgatttttcagagacaattctarcaatcaagagaacatttaacttact

SEQ ID NO: 611414 - DNA, 399 bp, Homo sapiens
cctggttagctggttaagcagcagaggcccagccacctcccacatggtgcaggaagcagtgtctccatggagtctattcctgtgttcatcctgtgtgccttgccttccctgcctgggctgcagtgagcaggtacagaagtgaagcagccatggtccctgccctcaacaactcagygttgaacacaagttatgttgtggagaagccaccctcctcccactgctggtggtcggtttcctgaaattccctccagccaattctgaagtgcccttctggaaagcccaagagaagagctctagaaggtcggggccattcaccatgacatgatgttacctgagtgtgccagaggtgaacccaaagatcccaagcaagcactgatgtattcctagcatctaccccca

SEQ ID NO: 611415 - DNA, 399 bp, Homo sapiens
cctggttagctggttaagcagcagaggcccagccacctcccacatggtgcaggaagcagtgtctccatggagtctattcctgtgttcatcctgtgtgccttgccttccctgcctgggctgcagtgagcaggtacagaagtgaagcagccatggtccctgccctcaacaactcagtgttgaacacaagtkatgttgtggagaagccaccctcctcccactgctggtggtcggtttcctgaaattccctccagccaattctgaagtgcccttctggaaagcccaagagaagagctctagaaggtcggggccattcaccatgacatgatgttacctgagtgtgccagaggtgaacccaaagatcccaagcaagcactgatgtattcctagcatctaccccca

SEQ ID NO: 611416 - DNA, 608 bp, Homo sapiens
tccatctctgtgatgacagattggctagtgactgccggggccagggccctggggagcgccacataatacagagcaggcagccccgacaggaaggccagatgcttgtgccgtaaagttgtctccagtttctcaatggcttccacagacaagactcggagcagcttagggtgttcagtgacagtacctggtaaagcctgttgctgctgatcaagggccgttggcatccagggcataactttgtgatgcaggtcygggtcacttgctgtctgcagttccaggaactggctttctggaatgcagggaaaaaggagccactgccaggaccccagaaattctgcagtcccaggacctgtgtacacaggcggggatcttgccctggtggatttgtccacatttggagtcgatgtggctctgcagtattgccttgacctgagttaacaagtgtggcctggggatggacactggggccgcaatgggtgacagcacatcgcaagccccgttggcctctagggctacaggctgggggatgctcacgttggctagggctgtgctgctgctggacacagtctgctgatcagtggaggtaaggagcaactggatggactgct

SEQ ID NO: 611417 - DNA, 520 bp, Homo sapiens
atatttgaagtgctgaaggaaaaaaacttttaccctagaatagtatatctagcaaaaatatccttcacacatgaaggagaattaaacactttcccaggcaaacaaaagctgaggaatttcatcaataccagacctgtcctacaagaaatgcttcagtctaaaagaaaagaacattaatgagcagcaaaaaatgatccaaatgtacaaaacttactggtaattgtaactacacagaaaaacacagatgaaacaatcaaaaataataactccaacaacttttcaagacatagtacaataagaaatagaaacaacaacaaagttaaaaagcagggtattggtggatcacttgaggccaagagtttgagaccagactgrtcaacatggtgaaaccctgtctccactaaaaatacaaaaattgactggctggtgcatgcctgtagtcccagctacttaggagggtgtggcatgagaattgcttgaacccaggaggcagaggttgcagtgagccaagactacgcca

SEQ ID NO: 611418 - DNA, 627 bp, Homo sapiens
tagtttttaaattttgatttcaaaatgtattaaagacttaaatataagacgtcaaaccatgaaactacattggggaaactctccaggacattggactggccaaaaatgtatggagtaatactctacaagtacagtcaaccaaagcaaaaaaagataaatgggatcacactaagttaaaaagcttccgcacgcaaaggaaacaatcaacaaagtgaagagacaacccacaaatggaaaaaatgtttacaaacgatctctctgayaagaaattaatatttgcaaactattcatctgacaagagctctggaatatattaggagcactctataggaaacaaatcaaataatctgatttataaatgggcaaaatacctgaactgatatttgtcaaaagaagacataccaatggcaaacaggtctaagaaaaggtgctcaacataagtgatcatcagataaatgaaaacctatctgaatgaaaatgaaaatgaaaatgaaaatcactacaatgagatatcgtcttgccccagttaaaatagtttttatccaaaagacaggcaatagaaatagctggcaaggatgtggagaaaaaggaacccttgtacactgttgagggaatgtaaattagtaa

SEQ ID NO: 611419 - DNA, 627 bp, Homo sapiens
tagtttttaaattttgatttcaaaatgtattaaagacttaaatataagacgtcaaaccatgaaactacattggggaaactctccaggacattggactggccaaaaatgtatggagtaatactctacaagtacagtcaaccaaagcaaaaaaagataaatgggatcacactaagttaaaaagcttccgcacgcaaaggaaacaatcaacaaagtgaagagacaacccacaaatggaaaaaatgtttacaaacgatctctctgacaagaaattaatatttgcaaactattcatctgacaagagctctggaatatattaggagcactctataggaaacaaatcaaataatctgatttataaatgggcaaaatacctgaactgatatttgtcaaaagaagacayaccaatggcaaacaggtctaagaaaaggtgctcaacataagtgatcatcagataaatgaaaacctatctgaatgaaaatgaaaatgaaaatgaaaatcactacaatgagatatcgtcttgccccagttaaaatagtttttatccaaaagacaggcaatagaaatagctggcaaggatgtggagaaaaaggaacccttgtacactgttgagggaatgtaaattagtaa

SEQ ID NO: 611420 - DNA, 591 bp, Homo sapiens
tattagtttggtagaaaaagtgtggacttaagtagcagagagaactgttttaatttctggctataccatatactagctatgacagctaaaaatttcatcagcctttgtgaggctcagctttctccattataaattgtagatgagatttacctcattttttttgtgagaattaagtgtgatgatgtacctgaagttccaatcacattgccacttaatcacaaagccatttagttactattccacaaaaaataagggaggatcaaatatgaaatatacttctcmgtattttaggtaaaataaagtgatattctttatcatgcattgaaattgttttacacttactttccaagtccaccttactgttaaatactatagttttgaaatatagtatttcagttctgctcttccagtgtcccaaatccaagatatggctgccattgagatacaagactctggcttcatgtccctaggacagatttgacaagtggcttgttttaactcagctgtttaagttccacacttgacctttctggccagaaatataattgattcatgttttgacattccttgtgcatgtggactctaactgtg

SEQ ID NO: 611421 - DNA, 625 bp, Homo sapiens
  misc_feature 28: n = A,T,C or G
aattaaatgtatgataaataacctaccnaattaagattaatagatagtaygaaataaattttatttgttgttgcacaaagcttttttaaaaaactattcagcattttatcgattttagtaaacatcattaaaatagcaaaatcctatcagttcaatgagaacttaaaatagaattgaaggatattataatgtattaagagagatattactgcaaaagccagtgaaatctgttatataataatgacacacatacctacagctacactaccctaccccctacacatacacactaaaaacacaaaaaggtaaaattatgtgtttgatgtttgaattttagtaactcagataatctttcagaaccctgcattgagaggcagactggccaaatgagcctcaattgcttcatcagggaactaagggaagtattacctctcgtaagagttttcaatctggcttaaaaaataattgctgatgcacatatacatgtccttagacttcttccttacctttttgaaggctttagctccacgcctgcctattcaccaagtacaagcaactggtgcaagaccacctagcatgttccaactgaagattaaattaccacaaaacttttaactatttgtat

SEQ ID NO: 611422 - DNA, 558 bp, Homo sapiens
gcttgtaatttctgttagcaatgggtaatayactgcaaagaaagagaaataggttattttttaaaaagaacccactgaaaaaaaatatgaacaaaaaacctagggaaattaaagatagaaaataagctttattgcttaaggaataagcatgggagactgggaaattattagtatggggaaaaattgaggataagagataaagccaaagtcatagctaattattagttgatttggaatcaataaaatttccatgtgtaattttttggttgctgaaaaccttagttataacatttggtcttatatttaatttaatcttcataattctgtgaagatagtatttccaattctcgtatatgaagataaaaagccaggtttatgaatgttacaatgtttgctcatgtcacagtgttggtcagcagcagaagtgagatataaacccagatctgtctgagccccaagcctgtgttctttccactttcctatgctcatcctattccctctctacagagtgaagcaacattattataaggttctatataatgcaatgtgatttaacac

SEQ ID NO: 611423 - DNA, 591 bp, Homo sapiens
tttttgcagcagctgatattatcagatgtaggtttgaaaaattttctcaagtttcaggatacaagacatttaagggtaccagagtgtatatagaaaaaccagtaggcttttgagcagtagtcaaggccagagaatggtatatgggacccaaggtatggaagtggtggccatgagactagatgaataaaatttggattttgaactattacatgggcctttgtactttaactagtgaaattaggctcttctgtgtctgaagtgagttgatgaagtacggattacactgaagatttttccaggaaagcaaggaaaaaaatgcctctactgtgtatatttgactggcagtcaaatgggatggagaaagaaggaagctgcttctcattgtactctatgacaggtgaccagtaaagggccacrcacagagataaataacactgaaagaggaccaggtttaggaaggcagactcagcagcactgtaatatagtggttcataaatgagtctttggacccagcatgcatgggtttaactactgggtctgagatgtattaactgtatgaacgtggacaatttatttatacctattattccc

SEQ ID NO: 611424 - DNA, 369 bp, Homo sapiens
ggctgaaatctaagcttccaacatgaaaaattagcaatgctctggatggaataaagttcttgaataaaattaaaagtgattctccagtgaatacwcagatcataaaaaatatgaaacagccctattgctcatgttgagaaagtttttattttctggattgaagatcaaaccagccacaacatccccttaagccaaggcctaattaagagaaggccttcactttttaattctatgaaggctgatagagatgacgaagctgcataagacaatttgaagctagcagagtttagttcatgaagtttaaggaaagatgctctcttcataacataaaagttcaaggcgaagcagcaagtgctgatgcagaagctg

SEQ ID NO: 611425 - DNA, 614 bp, Homo sapiens
aaatgaaacaacttgttttttgatgagctgaacatatgtgacatttatagtgaatttataagaccctgacagagtgctgagagagtgtggcagcattggagttctgacaagctacagcaggaagaaccaaaacagaggtgttaaggccatgctctctcaacaaagcatccaagaaaacaaaacctctgtgcctttgtcagtcagggctctccagrgaaacagaaccaataggatgtctgtgtgcctgtgtgtgtgtgtgtgtgtgtgtgtatgtgtgtgtgtgtgtagagagagagagagagttttaaggaattggcttacctgattgtaaggactggcaagtcctaggtaagaggtgatattgcagctggagtccagaggttgtctggaggcaaaattccttctttcctagagaacttcagttttctttctttctcttacagccttcaactgattggatgaggcccacccacgttatagagtttaacctgctttactcaatgtttactgatttaatattggttacctctaaaaaatacctgcactgcaacatcaagactagtgtttgaccaaaagctgtttaccatggcctagccaagttgacacattgcagt

SEQ ID NO: 611426 - DNA, 614 bp, Homo sapiens
aaatgaaacaacttgttttttgatgagctgaacatatgtgacatttatagtgaatttataagaccctgacagagtgctgagagagtgtggcagcattggagttctgacaagctacagcaggaagaaccaaaacagaggtgttaaggccatgctctctcaacaaagcatccaagaaaacaaaacctctgtgcctttgtcagtcagggctctccagagaaacagaaccaataggatgtctgtgtgcctgtgtgtgtgtgtgtgtgtgtgtgtatgtgtgtgtgtgtgtagagagagagagagagttttaaggaattggcttacctgattgtaaggactggcaagtcctaggtaagaggtgatattgcagctggagtccagaggttgtctgraggcaaaattccttctttcctagagaacttcagttttctttctttctcttacagccttcaactgattggatgaggcccacccacgttatagagtttaacctgctttactcaatgtttactgatttaatattggttacctctaaaaaatacctgcactgcaacatcaagactagtgtttgaccaaaagctgtttaccatggcctagccaagttgacacattgcagt

SEQ ID NO: 611427 - DNA, 554 bp, Homo sapiens
accactgcactccagcctgggtgacagagcgagactccatctcaaaaaaaaaaaaaaaaaaaaaaaaaaattcaaagaaggtaaaaggcacagaaacctgcagaatcatataatcctccagattgtgtttagacaatgcctagttttacattgaagacatccagaatcttggttgattttaaagaataatttatttccttacactttattactacttctgtttctgtttcatacatcactgaaggttaaaagggaaagctaaaatattaatgttaatgtttaatttttaagaagtactacatttgaaatgctaataatatactaacttcacataaatgcatgttaggaagaaaaataaatgaagcatagagtcattttaataatttacaggtttcccaagactatcaagtaaaatgttaactttataggaaaatttctgttagtctaaagtttattataatatatgtaacttctgaaatagtttcaatcttggcctaattttaaacttcagtgcaaagttaatttaataggcctcakgaagctaatcttatttt

SEQ ID NO: 611428 - DNA, 589 bp, Homo sapiens
tgagctccaatccaatatgaccagtgtccttatgaaaaatggaaatggaggtgcagagacacacagagaaggaagacgctgggacaacatgcaggaacaacgcctcaggaagacagaggcctagactgttacacctgcaaggccagggctgtttactgggttcctccctgaccccacatcccacctggggctgaacccgacccagaccttaccacccactgctgctacactgccataaatccctttttcaaaaaaattaaaatatttatttgacaaataaaaattctatatatttaaggtatactatgtgaygatttgatataggtatacactgtgttctgattaccacagtcaagttgattaacacatccatcacatcacacatagttaccatgttgatggcagaggggagtgaagtcattgaaaatctgctctcttaccaaattccaggtaaataacacagtatcattatgtatcaccatgctggatcatcatgctggatcccttttgtttcatggggttgtatcaccatgaaacagtatcaccatgctggatcccttttgtttcatggggttgttgaaaaaagact

SEQ ID NO: 611429 - DNA, 393 bp, Homo sapiens
tgtggaaccctgaagagagacacgttctgggctgggatggcagcaawaccacatcactccagaattccaatcagagacccgagagcagccattcccccaggcctctcatccctatcatccccggacatgtcttcaaatcgtatgccgttgatcctcagatcaatctgtccttttctgggctctctacactcccatccgcccatgcactccccactactcttcttccttccccacagttttttttctgtgcactctttgaccctcataaagaagggaagggaaaaggaggggaggggaagggaagggagggaaaggaaaaagaaaggagagagggaagggggatgaggttgaggggaggaaagaaggaagaaaaaagactactttaatcttatc

SEQ ID NO: 611430 - DNA, 583 bp, Homo sapiens
ttgccttcacaggttctgcaaacagctgactattgctggggaaaaccccccagctgtgcgggtgkggtccctattcatggtctccatcctggggtctgtatgctacgaggacaatggtccttagccttgaatgaatatgggaatcatcaggtggattctttaacatactgcttagttcctactctcttgaggttcggatttaagtggtctgggcaggtgtttccagtgtagaaatgtactattactagggactcttgttgttccctgtcaaaatctttttccattccacatcctctactacacacacataaacatttcctaccttaattccacttttcccttatcacttttttgtttgtttgtttgtttttgagacaggctcttgctttgtcacccaggctggagtgcactggctcgatcacagctcattgcagcctcgatcttccagactcaagcaatcttccttagttttccgagtagttgggactacaggcacacaccactacaactaggtaatttttgtatttttttgtagagacaggggtctcactgtgttgcccaggctggtctcagactcctgcac

SEQ ID NO: 611431 - DNA, 607 bp, Homo sapiens
ttttacccacccacactttatgtttttgatgctttttatattgtgtaacccttaatgaattattgcagctttaactatttttaatagtttgttttaaccactgtaataaatgttacttaaamactaccaccacagttttaaaatttgacttacttttgtacttacttttgacttaaactttttgtacttacttttactagtgagtttcaaactttcttatgtttctgtgttactaattaacatccttttctttcagcccaaagaacttcctttagcatttcttgtaagacacttctgagagtaatgaactcttgactttgtgtgtgtgtgtctctgcaaaagtccttttctcttttccttctgtagaagagctttgctgtgtattcttggttgacagtttttgttatgttttgtttttttcctttcagcacttgaatatatcatcccgctcttccctggcctgtaaggtttctgctgtgatgtctgcttctagtattaatggaattcccttatatgtgacatgcttcttttgtcttgatgctcttttgctgcagaatactctttttgtccttgaattttcaaagtttgataataatatgtcttggtg

SEQ ID NO: 611432 - DNA, 607 bp, Homo sapiens
ttttacccacccacactttatgtttttgatgctttttatattgtgtaacccttaatgaattattgcagctttaactatttttaatagtttgttttaaccactgtaataaatgttacttaaacactaccaccacagttttaaaatttgacttacttttgtacttacttttgacttaaactttttgtacttacttttactagtgagtttcaaactttcttatgtttctgtgttactaattaacatccttttctttcagcccraagaacttcctttagcatttcttgtaagacacttctgagagtaatgaactcttgactttgtgtgtgtgtgtctctgcaaaagtccttttctcttttccttctgtagaagagctttgctgtgtattcttggttgacagtttttgttatgttttgtttttttcctttcagcacttgaatatatcatcccgctcttccctggcctgtaaggtttctgctgtgatgtctgcttctagtattaatggaattcccttatatgtgacatgcttcttttgtcttgatgctcttttgctgcagaatactctttttgtccttgaattttcaaagtttgataataatatgtcttggtg

SEQ ID NO: 611433 - DNA, 607 bp, Homo sapiens
ttttacccacccacactttatgtttttgatgctttttatattgtgtaacccttaatgaattattgcagctttaactatttttaatagtttgttttaaccactgtaataaatgttacttaaacactaccaccacagttttaaaatttgacttacttttgtacttacttttgacttaaactttttgtacttacttttactagtgagtttcaaactttcttatgtttctgtgttactaattaacatccttttctttcagcccaaagaacttcctttagcatttcttgtaagacacttctgagagtaatgaactcttgactttgtgtgtgtgtgtctctgcaaaagtccttttctcttttccttctgtagaagagctttgctgtgtattcttggttgacagtttttgttatgttttgtttttttcctttcagcacttgaatatatcatccygctcttccctggcctgtaaggtttctgctgtgatgtctgcttctagtattaatggaattcccttatatgtgacatgcttcttttgtcttgatgctcttttgctgcagaatactctttttgtccttgaattttcaaagtttgataataatatgtcttggtg

SEQ ID NO: 611434 - DNA, 559 bp, Homo sapiens
tgactttgtgtgtgtgtgtctctgcaaaagtccttttctcttttccttctgtagaagagctttgctgtgtattcttggttgacagtttttgttatgttttgtttttttcctttcagcacttgaatatatcatcccgctcttccctggcctgtaaggtttctgctgtgatgtctgcttctagtattaatggaattcccttatatgtgacatgcttcttttgtcttgatgctcttttgctgcagaatactctttttgtccttgaattttcaaagtttgataataatatgtcttggtgtagtcttgcttggattgaatctgattagagacctttgaccttcctgtgtatgaaaatgtaaattttcccccagattgataaaactttttctgcctgccttcctgcctgccttttttccttccttcctgtcttcctttcttctttgctccctccctccttccttgtttctgctactgtttcctctctctctctatctctttctttacaataaaaacttgmtctattagccaggctggagtgcaatagcatgatcatggctcactg

SEQ ID NO: 611435 - DNA, 515 bp, Homo sapiens
gagaggattaacatctttacattactgagtcttcatatccataaatgagaatttacacagatctccttatatacctcatagtaawgttttaacctttcttttcccatgtagcttgtacatttcttacccctctcctgcctgccagtggtattttatgccttctaaatctattataaacagtatttgcttcttttcattttaactgataacttatacaaagggaggtatttctgattattaaattaatttccaaaaaaaagtattaaaaaatgtgagctgttgaatctttttttttttttttttttttgagacagagtttcactcttgttacccaggctagagagcagtggcatgatctcggctcaccacaacctctgcctcccgggttcaagtgattctcctgactcagccttccgagtagctgggattacaggcgcctgccaccacatctggctaatttttttgtatttttagtggagatggggtttcagcatgttggccaggctggtctcaaa

SEQ ID NO: 611436 - DNA, 515 bp, Homo sapiens
gagaggattaacatctttacattactgagtcttcatatccataaatgagaatttacacagatctccttatatacctcatagtaaagttttaacctttcttttcccatgtagcttgtacatttcttacccctctcctgcctgccagtggtattttatgccttctaaatctattataaacagtatttgcttcttttcattttaactgataacttatacaaagggaggtatttctgattattaaattaatttccaaaaaaaagtattaaaaaatgtgagctgttgaatctttttttttttttttttttttgaracagagtttcactcttgttacccaggctagagagcagtggcatgatctcggctcaccacaacctctgcctcccgggttcaagtgattctcctgactcagccttccgagtagctgggattacaggcgcctgccaccacatctggctaatttttttgtatttttagtggagatggggtttcagcatgttggccaggctggtctcaaa

SEQ ID NO: 611437 - DNA, 515 bp, Homo sapiens
gagaggattaacatctttacattactgagtcttcatatccataaatgagaatttacacagatctccttatatacctcatagtaaagttttaacctttcttttcccatgtagcttgtacatttcttacccctctcctgcctgccagtggtattttatgccttctaaatctattataaacagtatttgcttcttttcattttaactgataacttatacaaagggaggtatttctgattattaaattaatttccaaaaaaaagtattaaaaaatgtgagctgttgaatctttttttttttttttttttttgagacagagtttcactcttgttrcccaggctagagagcagtggcatgatctcggctcaccacaacctctgcctcccgggttcaagtgattctcctgactcagccttccgagtagctgggattacaggcgcctgccaccacatctggctaatttttttgtatttttagtggagatggggtttcagcatgttggccaggctggtctcaaa

SEQ ID NO: 611438 - DNA, 515 bp, Homo sapiens
gagaggattaacatctttacattactgagtcttcatatccataaatgagaatttacacagatctccttatatacctcatagtaaagttttaacctttcttttcccatgtagcttgtacatttcttacccctctcctgcctgccagtggtattttatgccttctaaatctattataaacagtatttgcttcttttcattttaactgataacttatacaaagggaggtatttctgattattaaattaatttccaaaaaaaagtattaaaaaatgtgagctgttgaatctttttttttttttttttttttgagacagagtttcactcttgttacccaggctagagagcagtggcatgatctcggctcaccacaacctctgcctcccgggttcaagtgattctcctgactcagccttccgagtagctgggattacaggcgcctgccaccacatctggctaatttttttgtatttttagtrgagatggggtttcagcatgttggccaggctggtctcaaa

SEQ ID NO: 611439 - DNA, 599 bp, Homo sapiens
gcctgccaccacatctggctaatttttttgtatttttagtggagatggggtttcagcatgttggccaggctggtctcaaactcctgacatcaggtgatcaacctyccaaagtgctgggattacaggcatgagccaccacgctggcccaggtgattttcttatgtgtgttttcaaggatcaaataataataatttttacttggttcctattttttatgcctcttgtttagtctcttctctaattgaaatactctttgtatcataggaaaataaggatagaccctagtgagaagggcctaaaattctttttcagggttacaggaatgaaggaataaataaatctttattgccacaaaataaaggaaactccaaactcagcctctctgagaccaaattataaaaaaaagtcatacatagaatttgagaatatcatagcaccattaagagggaaagaggaaaggagattatgtggttttgcattgataatatactgtgatgtataagtattaaaacatttttgtatctctgaatagaaactttagtcaggcctctctccttgaactcctaagatggagccaaacaaaattttctatttgcttt

SEQ ID NO: 611440 - DNA, 599 bp, Homo sapiens
gcctgccaccacatctggctaatttttttgtatttttagtggagatggggtttcagcatgttggccaggctggtctcaaactcctgacatcaggtgatcaacctcccaaagtgctgggattacaggcatgagccaccacgctggcccaggtgattttcttatgtgtgttttcaaggatcaaataataataatttttacttggttcctattttttatgcctcttgtttagtctcttctctaattgaaatactctttgtatcataggaaaataaggatagaccctagtgagaagggcctaaaattctttttcagggttacaggaatgaaggaataaataaatctttattgccacaaaataaaggaaactccaaactcagcctctctgagaccaaattataaaaaaaagtcatacatagaatttgagaatatcatagcaccattaagagggaaagaggaaaggagattatgyggttttgcattgataatatactgtgatgtataagtattaaaacatttttgtatctctgaatagaaactttagtcaggcctctctccttgaactcctaagatggagccaaacaaaattttctatttgcttt

SEQ ID NO: 611441 - DNA, 613 bp, Homo sapiens
tttataatccaaacttgacagcctctctctttgcaattttacaactttcagcaaattccccatattctctccatctcagtctgaacagccatttcacatcttacagctcactgttttttgtgtatctcatccattatccatgtttttgtttgcattacttttgctttctgaaatatcctcctgaattattttccaacaactcatgaggtaacgctttctccaaggcctgtcattctcaagtgtcttcrggtctgtgtcttataactgaacactcacaagaaccatctctggtttgttttgtgggttctctcttcagtagcattaacatttttttcaccatgcaaattctgtatagttggtcacagagtaggaaatgaagctattaaatggttataatttgccagtcacagtgatggaggatgaaggagatgcaaagataaagccctatccccaaaaaccttttagctcaaaacgatggaaggctgagtcctgaaccctcatagcactacatttcattgctttagtccaaaacaagtccaagagatgtgcagagccaggaaggatcattttcagtgtggttgttcaaaaaaggcatcctgggagaggatgaatt

SEQ ID NO: 611442 - DNA, 613 bp, Homo sapiens
tttataatccaaacttgacagcctctctctttgcaattttacaactttcagcaaattccccatattctctccatctcagtctgaacagccatttcacatcttacagctcactgttttttgtgtatctcatccattatccatgtttttgtttgcattacttttgctttctgaaatatcctcctgaattattttccaacaactcatgaggtaacgctttctccaaggcctgtcattctcaagtgtcttcgggtctgtgtcttataactgaacactcacaagaaccatctctggtttgttttgtgggttctctcttcagtagcattaacatttttttcaccatgcaaattctgtatagttggtcayagagtaggaaatgaagctattaaatggttataatttgccagtcacagtgatggaggatgaaggagatgcaaagataaagccctatccccaaaaaccttttagctcaaaacgatggaaggctgagtcctgaaccctcatagcactacatttcattgctttagtccaaaacaagtccaagagatgtgcagagccaggaaggatcattttcagtgtggttgttcaaaaaaggcatcctgggagaggatgaatt

SEQ ID NO: 611443 - DNA, 418 bp, Homo sapiens
ctacattttaacttgattacctctgtaaaaaacttatatccaattaaggtcacattctgaggtactgggagttaggattccaacatatgtctttgggaaaccacaagtcaatccaggatagagatgcagggatgaaaggcaggcacagtgactttgaaaggaagctcacactgtgaggrggcaccaggaaagtaaatcacttgttccagtgaagctcaacacgctcctacacaaggtaagatcatgagagttgacatctgtcattttaagtgttctggattagtaagaaccttaacctttacgctctttccccacaggctagtaacctttcagagtaagcaaaattggcaaatggcattgccttggctatggtttccctctgaactgcttaacttggtaacaaaaatgctgacggtac

SEQ ID NO: 611444 - DNA, 570 bp, Homo sapiens
taatgaaaaagcctttcaaagttgtctttccaaagggaagattaatacactatttcttagagataccatctaaaaaagttagtatctttctttcttttttcttttttggaaactcgcggtggtggtaatgtgagtgagtttgtcaatctttgcccctactgtgaatttgagaagcagaggaagagaaaaagagaaagacccccccgccccctgcctcccgcctcccgcctctgcccctctctctakcacacagcaggcgcgcaaggagtgcagtgttagctgctgctggactgagctcctcatcctacacttgcaggggttgctcttttggacagaaagctggaataaaacataaattttagacttccaccaaggccaggactagggtgaagggactaacgcactagtctcaggagcaactgttaagtaacgctaatcctgaatgaatgaaatagttttaaaattgaatgtaatcgcaaagaaaaaaaacccatgatagacaaaatattaaaactttaaataaaggcttgcactcgcacaacccaggctcaccggcctctccctgctcct

SEQ ID NO: 611445 - DNA, 399 bp, Homo sapiens
ccattctcctgcctcagcctcccaagtggctaggactacaggcacccgccaccaggcctgactaattttttktttttttttttttttttttttagcagggacggggtttcaccatgttagccaaggtggtctggatctcctcacctcctgatccacccacctcagcctcctgaagtgataggattataggcgtgagcctgtaaccgcgcccagcctttttttttttttttttttaactccctgttgcatttcttggtgttttctgtatttgagcacatttaatgcattgcacattggaccaaataaatatgttctggcatttgttataggcagtatggctatgaaacataaacaatttaacttttcgtttttctgtttatttttcttaagtctgtgatt

SEQ ID NO: 611446 - DNA, 399 bp, Homo sapiens
ccattctcctgcctcagcctcccaagtggctaggactacaggcacccgccaccaggcctgactaattttttgtttttttttttttttttttttagcagggacggggtttcaccatgttagccaaggtggtctggatctcctcacctcctgatccacccacctcagcctcctgaagtgataggattataggcgtgagcctgtaaccgcrcccagcctttttttttttttttttttaactccctgttgcatttcttggtgttttctgtatttgagcacatttaatgcattgcacattggaccaaataaatatgttctggcatttgttataggcagtatggctatgaaacataaacaatttaacttttcgtttttctgtttatttttcttaagtctgtgatt

SEQ ID NO: 611447 - DNA, 399 bp, Homo sapiens
ccattctcctgcctcagcctcccaagtggctaggactacaggcacccgccaccaggcctgactaattttttgtttttttttttttttttttttagcagggacggggtttcaccatgttagccaaggtggtctggatctcctcacctcctgatccacccacctcagcctcctgaagtgataggattataggcgtgagcctgtaaccgcgcccagcctttttttttttttttttttaactccctgttgcatttcttggtgttttctgtatttgagcacatttaatgcattgcacattggaccaaataaatatgttctggcatttgttataggcagtatggctatgaaacataaacaatttaacttttcrtttttctgtttatttttcttaagtctgtgatt

SEQ ID NO: 611448 - DNA, 578 bp, Homo sapiens
gttatgtcttcttggagaactgaccgcatttttattatgtaattactctctttatttctgataattcttcttgttctgaagtgggatgtgtcattaatagagctactcctgctttctttggattactgttagcatgctattkttgccagtgggctgtttcaggttcttgactttgctgcacaaaaaactttgagaacgagtccaaagtaacagtaagcaaaagagtttattgcaaagcaaaagtacactctgacagctgatcagagcaggctgctcaaaggtgagacagccctgtctgatgcagggggatcgccctttatgggagatttacatgattattcatggaggggtgggaaggggtgttctgatgagtatgttatgggtagtcccctggctgcacaggtgctgtggttgtacatgctaggacttaacattgcatgtatcattagcatcttaaatctccacccaggggtgtttttcttttactattatagtgaatataggtcagtccaaggacactaatcatgggtttctgtgcttgtgtgaatttgggaattctctcttctatttttctacct

SEQ ID NO: 611449 - DNA, 515 bp, Homo sapiens
taaaatgagcttcttgtagacagctgggtcttgttttttgatttactatgacagtctctgtattttaattggtgtgttttagaccattgacagttaagatgattattgatatagcaattaatatgtaccatctgtgttaatgatttttctttgccgtccttgctcttagttatttttgtcgcgcatagttttctactttttgtgttttaattgagcactttatataatttcattttctctcctcccttagcatatcaattatacttttttaaagttttaaaacattagtcctagagttcgcartatatttttacaactaatccaagtacactttcaaatgacactataccacttcacaggtagaagatatattaataacacaatattcctaattcttccttcctttcccttttatcattgctatctctcacttcatgtacacaaaagtatgcaaaagcatatatatatgcgtacataaccatatattgttgctattattattttgagcaaactat

SEQ ID NO: 611450 - DNA, 515 bp, Homo sapiens
taaaatgagcttcttgtagacagctgggtcttgttttttgatttactatgacagtctctgtattttaattggtgtgttttagaccattgacagttaagatgattattgatatagcaattaatatgtaccatctgtgttaatgatttttctttgccgtccttgctcttagttatttttgtcgcgcatagttttctactttttgtgttttaattgagcactttatataatttcattttctctcctcccttagcatatcaattatacttttttaaagttttaaaacattagtcctagagttcgcaatatatttttacaactaatccaagtacactttcaaatgacactataccacttcacaggtagaagatatattaataacacaatattcctaattcttccttcctttcccttttatcattgctatctctcacttcatgtmcacaaaagtatgcaaaagcatatatatatgcgtacataaccatatattgttgctattattattttgagcaaactat

SEQ ID NO: 611451 - DNA, 515 bp, Homo sapiens
taaaatgagcttcttgtagacagctgggtcttgttttttgatttactatgacagtctctgtattttaattggtgtgttttagaccattgacagttaagatgattattgatatagcaattaatatgtaccatctgtgttaatgatttttctttgccgtccttgctcttagttatttttgtcgcgcatagttttctactttttgtgttttaattgagcactttatataatttcattttctctcctcccttagcatatcaattatacttttttaaagttttaaaacattagtcctagagttcgcaatatatttttacaactaatccaagtacactttcaaatgacactataccacttcacaggtagaagatatattaataacacaatattcctaattcttccttcctttcccttttatcattgctatctctcacttcatgtacacaaaagtatgcaaaagcatatatatatgcgtacataaccatatattgttgctrttattattttgagcaaactat

SEQ ID NO: 611452 - DNA, 553 bp, Homo sapiens
gcactttgggaggctgaggtgggcaaatcactaggtcaggagaccaagaccatcctggccaacgtggtgaaaccccgtctctactaaaaatacaaaaattagctgggygtggtggcatgtacctgtaatcccggctacttgggtggctgaggcaggagaattgcttgaaccagggagttggaggttgcagtgagcagagatctcgccactgcactccaggctggtgacagagtgagactccatctcaaaaaaaaacaaaaacaaaacaaaacaaaacaaaaccccttaaaatagtaataagaaaaacagaaaaggatacacagtttcagtagtgttgtacctaggaccattggttgctagttagaccaaccccaaaaggatctcccaccaattaaagtttacataggcttaggagagaagagtagatctggtggagtcaacaggaagggccagtagagaaaaccccattggcactgcaccctcagctttccaaaacccagaccttgcctgaccaggagtaggagaggttgccctgctgcatgggggctgctgc

SEQ ID NO: 611453 - DNA, 553 bp, Homo sapiens
gcactttgggaggctgaggtgggcaaatcactaggtcaggagaccaagaccatcctggccaacgtggtgaaaccccgtctctactaaaaatacaaaaattagctgggtgtggtggcatgtacctgtaatcccggctacttgggtggctgaggcaggagaattgcttgaaccagggagttggaggttgcagtgagcagagatctcgccactgcactccaggctggtgacagagtgagactccatctcaaaaaaaaacaaaaacaaaacaaaacaaaacaaaaccccttaaaatagtaataagaaaaacagaaaaggatacacagtttcagtagtgttgtacctaggaccattggttgctagttagaccaaccccaaaaggatctcccaccaattaaagtttacataggcttaggagagaagagtagatctggtggagtcaacaggaagggccagtagagaaaaccccattggcactgcaccctcagctttccraaacccagaccttgcctgaccaggagtaggagaggttgccctgctgcatgggggctgctgc

SEQ ID NO: 611454 - DNA, 547 bp, Homo sapiens
attcttattcccaatgctggcaatattgttcattgatggatcygtgtgagagacacacaggaatatacaattgcatcttattttataggtagagatggctttttcttagaacatattatacatgattacaagtgtaaaaatatggtgaaataattttatttgcttttcaaatgatttttgttgctaaaaactaaaattaaaaatagagaacaagtatcctaaatgtttttgaaactattatcatagcaattctcagactatcaagactatgaactattttccatgatagcacactaatcataacaatcataaccatttgtatgtgcatatctaatatctaatattcagggataaggtcatacagattacccagtttaatgctcacagattcttatgtgaaaaaatatatatttggtcatagttaaaatggacaaaataagtgaatctgtctgatggtcagatagtaaatatgtcaaacaaacaaatgattacaattttcagttagaataacaaaagcacttagatcactgacttaataatagtgatt

SEQ ID NO: 611455 - DNA, 547 bp, Homo sapiens
attcttattcccaatgctggcaatattgttcattgatggatccgtgtgagagacacacaggaatatacaattgcatcttattttataggtagagatggctttttcttagaacatattatacatgattacaagtgtaaaaatatggtgaaataattttatttgcttttcaaatgatttttgttgctaaaaactaaaattaaaaatagagaacaagtatcctaaatgtttttgaaactattatcatagcaattctcagactatcaagactatgaactattttccatgatagcacactaatcataacaatcataaccatttgtatgtgcatatctaatatctaatattcagggataaggtcatacagattacccagtttaatgctcacagattcttatgtgaaaaaatatatatttrgtcatagttaaaatggacaaaataagtgaatctgtctgatggtcagatagtaaatatgtcaaacaaacaaatgattacaattttcagttagaataacaaaagcacttagatcactgacttaataatagtgatt

SEQ ID NO: 611456 - DNA, 428 bp, Homo sapiens
gtgctttccagctaaactgaagcctcaggtgacataccatggctctcacagctaattaatgaaaaagctggaaccatcacccacatttcttaattcctacttcagttcatttaataatgctagaataaggcaaagtcacacttttctcattttgtgttgataaacattgtattctaatggttagtaaaatattaataatgcattcatgagcactttaaaataattaagtacarctgttcacataggcagttatcgatactaatttaaataagaaacagttttgcatgttacatcattatctgtaatcttctgaaaataacagggacaaaagcagtatcatccttgcctaatgtcatctgctagtgaggggatgcagacctaagtgactaagttgattccggctgagaatcaaaggaaaaggtccatag

SEQ ID NO: 611457 - DNA, 428 bp, Homo sapiens
gtgctttccagctaaactgaagcctcaggtgacataccatggctctcacagctaattaatgaaaaagctggaaccatcacccacatttcttaattcctacttcagttcatttaataatgctagaataaggcaaagtcacacttttctcattttgtgttgataaacattgtattctaatggttagtaaaatattaataatgcattcatgagcactttaaaataattaagtacagctgttcacataggcagttatcgatactaatttaaataagaaacagttttgcatgttacaycattatctgtaatcttctgaaaataacagggacaaaagcagtatcatccttgcctaatgtcatctgctagtgaggggatgcagacctaagtgactaagttgattccggctgagaatcaaaggaaaaggtccatag

SEQ ID NO: 611458 - DNA, 428 bp, Homo sapiens
gtgctttccagctaaactgaagcctcaggtgacataccatggctctcacagctaattaatgaaaaagctggaaccatcacccacatttcttaattcctacttcagttcatttaataatgctagaataaggcaaagtcacacttttctcattttgtgttgataaacattgtattctaatggttagtaaaatattaataatgcattcatgagcactttaaaataattaagtacagctgttcacataggcagttatcgatactaatttaaataagaaacagttttgcatgttacatcattatctgtaatcttctgaaaataacagggacaaaagcagtatcatccttgcctaatgtcatctgctagtgaggggatgcagacctaagtgaytaagttgattccggctgagaatcaaaggaaaaggtccatag

SEQ ID NO: 611459 - DNA, 553 bp, Homo sapiens
acatacttgtattctttctttacattatcataaaaatgttttaaattattgtcaaaatggaataaaattgaaaaatactcctgtataaaactggagaacaagtcaaagagcagyctggatggaaatgtcttaagtggcttcaatttgggtccggccggatgttcatatcacactatttacacacagtcactcccattctctgcctactcacagctttagccctgcagaatattaattttctaaagcatgataacaacgtctgtcattcatgcagcatttaatgtctcagatactattatttccattttattacataacccctgtacaacccagttcatttcctaactctgcttgttttttagtgtttacatttctacagggctaaatataatgatgttgctttaccaacggtcttttttcttcctgttattgttcatctccttccatccctgtgttttctgggacctataactgtgctctctgtttcaatggctaagatgtctgatatttagaatctctctttgatgctgtgaagttaccttctcctctcatt

SEQ ID NO: 611460 - DNA, 553 bp, Homo sapiens
acatacttgtattctttctttacattatcataaaaatgttttaaattattgtcaaaatggaataaaattgaaaaatactcctgtataaaactggagaacaagtcaaagagcagcctggatggaaatgtcttaagtggcttcaatttgggtccggccggatgttcatatcacactatttacacacagtcactcccattctctgcctactcacagctttagccctgcagaatattaattttctaaagcatgataacaacgtctgtcattcatgcagcatttaatgtctcagatactattatttccattttattacataacccctgtacaacccagttcatttcctaactctgcttgttttttagtgtttacatttctacagggctaaatataatgatgttgctttaccaacggtcttttttcttcctgttattgttcatctccttccatccctgtgttttctgggacctataactgtgctctctgtttcaatggctaagatgtctgatatttaraatctctctttgatgctgtgaagttaccttctcctctcatt

SEQ ID NO: 611461 - DNA, 553 bp, Homo sapiens
acatacttgtattctttctttacattatcataaaaatgttttaaattattgtcaaaatggaataaaattgaaaaatactcctgtataaaactggagaacaagtcaaagagcagcctggatggaaatgtcttaagtggcttcaatttgggtccggccggatgttcatatcacactatttacacacagtcactcccattctctgcctactcacagctttagccctgcagaatattaattttctaaagcatgataacaacgtctgtcattcatgcagcatttaatgtctcagatactattatttccattttattacataacccctgtacaacccagttcatttcctaactctgcttgttttttagtgtttacatttctacagggctaaatataatgatgttgctttaccaacggtcttttttcttcctgttattgttcatctccttccatccctgtgttttctgggacctataactgtgctctctgtttcaatggctaagatgtctgatatttagaatytctctttgatgctgtgaagttaccttctcctctcatt

SEQ ID NO: 611462 - DNA, 558 bp, Homo sapiens
tgacttcataaataaccaagaagagcttggttcaccacttttttggtcccttagtggcggaaaatktggtgggggagggggtctgggagtggtggattcctttttaaaattttaatacttggagcacagccgagataattaacagaattctaaaatgttcttttcacgaagatttcttttataatgtcccaagtgaaaatcattttttattactcacaggtaattctttattcatgcattttctgttacattttcttataacttagtcttcaaatagttttatatgtcattcagactgtcttacatagctatgctattaccaatcagtccttttcttattcatcattctagcttcacttataattggttgaaccatatatttgccagttttgtagatcaaatacagttgaatattagcagcttcatctggattaactgagtgctgtactgttttctgtaggaacaacagatggcaagtggaggtttccggtaaaacaaaacaaatagaacaaatagtgactggacaaaagcaaattttattttctcccttccaaaatt

SEQ ID NO: 611463 - DNA, 428 bp, Homo sapiens
ttgtttgcttgaaaattgtctttattttatgtgaacttctgaaggctgtttcagcttgctggagaatacggtctgtagttattttctttcggccttttaaagatggcattctattgttttcatgatrtttattaagaaatcaataggtaattgatttttatcctataagggaaatgtgtatttttcttctggttacttttgagaatttattctttgtctttgattttcagcagttttgccttgatgtggctattttagttttcactgaatttgtcctctttggatttcactaaatttcttttttctgtgcattgattattagattgggtaattcttcactgttacttcttcaaaatattgcctctgtctcgcatttcctttcctcctttctgagactccaattacatctgtctgagatgtttgtatct

SEQ ID NO: 611464 - DNA, 428 bp, Homo sapiens
ttgtttgcttgaaaattgtctttattttatgtgaacttctgaaggctgtttcagcttgctggagaatacggtctgtagttattttctttcggccttttaaagatggcattctattgttttcatgatatttattaagaaatcaataggtaattgatttttatcctataagggaaatgtgtatttttcttctggttacttttgagaatttattctttgtctttgattttcagcagttttgccttgatgtggctattttagttttcaytgaatttgtcctctttggatttcactaaatttcttttttctgtgcattgattattagattgggtaattcttcactgttacttcttcaaaatattgcctctgtctcgcatttcctttcctcctttctgagactccaattacatctgtctgagatgtttgtatct

SEQ ID NO: 611465 - DNA, 428 bp, Homo sapiens
ttgtttgcttgaaaattgtctttattttatgtgaacttctgaaggctgtttcagcttgctggagaatacggtctgtagttattttctttcggccttttaaagatggcattctattgttttcatgatatttattaagaaatcaataggtaattgatttttatcctataagggaaatgtgtatttttcttctggttacttttgagaatttattctttgtctttgattttcagcagttttgccttgatgtggctattttagttttcactgaatttgtcctctttggatttcactaaatttcttttttctgtgcaktgattattagattgggtaattcttcactgttacttcttcaaaatattgcctctgtctcgcatttcctttcctcctttctgagactccaattacatctgtctgagatgtttgtatct

SEQ ID NO: 611466 - DNA, 428 bp, Homo sapiens
ttgtttgcttgaaaattgtctttattttatgtgaacttctgaaggctgtttcagcttgctggagaatacggtctgtagttattttctttcggccttttaaagatggcattctattgttttcatgatatttattaagaaatcaataggtaattgatttttatcctataagggaaatgtgtatttttcttctggttacttttgagaatttattctttgtctttgattttcagcagttttgccttgatgtggctattttagttttcactgaatttgtcctctttggatttcactaaatttcttttttctgtgcattgattattagattgggtaattcttcactgttacttcttcaaaatattgcytctgtctcgcatttcctttcctcctttctgagactccaattacatctgtctgagatgtttgtatct

SEQ ID NO: 611467 - DNA, 606 bp, Homo sapiens
tctatgttggtcacgctggtcttgaactcccagcctcaggtgatccgccctccttggcctcccaaagtgcttggattataggcatgagccactgtgcctggccaagtattgcttttataatagaaaattgtatctgtattttatttttaaaattcataatcaaatctatattgctatagctttkttaactaagatttggcagaacaactcccttacattcaagagttttaatgaacattttagtcttcccatttcagttgggctaacagtgatattaggaataaaataaatttttaacattcaaaatttcaaactcttacatatgcccatacagcacagcatgaacctggaaaacagcctgaacagcaattaccagtgtggatgtagtgtaatcctcccttggagaactagctgcataccgctgcattaaacttcgctttttgacaaaagaaaggttgtttattagtactctataagcaggatgggggcttttatcacacagtggcttggaaatgaagattatagcatctataaatttattacaagccatgaaacaggcttcaatcctgcaccttcagggtggaaatgactcaagcacgctcacta

SEQ ID NO: 611468 - DNA, 606 bp, Homo sapiens
tctatgttggtcacgctggtcttgaactcccagcctcaggtgatccgccctccttggcctcccaaagtgcttggattataggcatgagccactgtgcctggccaagtattgcttttataatagaaaattgtatctgtattttatttttaaaattcataatcaaatctatattgctatagctttgttaactaagatttggcagaacaactcccttacattcaagagttttaatgaacattttagtcttcccatttcagttgggctaacagtgatattaggaataaaataaatttttaacattcaaaatttcaaactcttacatatgcccatacagcacagcatgaacctggaaaacagcctgaacagcaattaccagtgtggatgtagtgtaatcctcccttggagaactagctgcatacygctgcattaaacttcgctttttgacaaaagaaaggttgtttattagtactctataagcaggatgggggcttttatcacacagtggcttggaaatgaagattatagcatctataaatttattacaagccatgaaacaggcttcaatcctgcaccttcagggtggaaatgactcaagcacgctcacta

SEQ ID NO: 611469 - DNA, 566 bp, Homo sapiens
aagcttcatgttagccccctcagttctaagctcctgtccttctggacccaagcagaaggactacccacccattaactcaggcaccagtctagcctacccaaggactctggcagtaggcatgctcatggaccccaccagctgactgaaccagaatccctggaagggctaaccaatgaagggtttcactattgaagccagtctggaactcctgaaagaggtacttactctttccaatgcacaaacaccagagccacagaaaagcagaatcaagaattacagacaagcagcaaaacaaaataccaccaaagaacaaagcactagtaactgatcttacaaaagctcctaagaattcaaagtcactgtcttaagaaagttcagtaccartacatgaaaaaaacatgaagttaagcagagagacagaaataaaaaaaaaaaatccatggctgaggaatacagtgaatgaaatgaacaatgcaatagagagtaataatagactttatcaagcatgaccctgatctttcttgatcaagagagaatctatgaactgaaagacaggacatttgaaa

SEQ ID NO: 611470 - DNA, 566 bp, Homo sapiens
aagcttcatgttagccccctcagttctaagctcctgtccttctggacccaagcagaaggactacccacccattaactcaggcaccagtctagcctacccaaggactctggcagtaggcatgctcatggaccccaccagctgactgaaccagaatccctggaagggctaaccaatgaagggtttcactattgaagccagtctggaactcctgaaagaggtacttactctttccaatgcacaaacaccagagccacagaaaagcagaatcaagaattacagacaagcagcaaaacaaaataccaccaaagaacaaagcactagtaactgatcttacaaaagctcctaagaattcaaagtcactgtcttaagaaagttcagtaccagtacatgaaaaaaacatgamgttaagcagagagacagaaataaaaaaaaaaaatccatggctgaggaatacagtgaatgaaatgaacaatgcaatagagagtaataatagactttatcaagcatgaccctgatctttcttgatcaagagagaatctatgaactgaaagacaggacatttgaaa

SEQ ID NO: 611471 - DNA, 632 bp, Homo sapiens
taacagctgtgcatagcaacgtgctctctggttgtataacagagaatgagatggaacagttcacaagtggtcagtgagcaaggccaagagcaagttacacaccctgtctattggcaaatacaaagtcygaatagacttctcatgatcccagtgtgaataaacagaagaagaccttggacaaaaggaggaaaactagaaattttgagaaaatggagaaagtatatacatgttaaaattatttactataagaaccaaaagaatatttcagaaaagcagttaccatcctcaataggacacaaaagacctctatgaatcagaaatagaaatctataaaggaagaaaaagctgagatataagaagcaaactaaatcagataaagtaggatgacaaaaaaactaaaagactaactatggctgtatgatctatattggaaatatttaatcttcctaagcctcttttttgtcatctatatggttggtgtaatggtattttacacaactgctttgagagttgtgtgttaagtgccaagaaaaagtgcttgactcacagtagcttgctaaagaatgttagcttggattactatagttacccatctctacaggatcccagattctacaagtcatttatagcag

SEQ ID NO: 611472 - DNA, 632 bp, Homo sapiens
taacagctgtgcatagcaacgtgctctctggttgtataacagagaatgagatggaacagttcacaagtggtcagtgagcaaggccaagagcaagttacacaccctgtctattggcaaatacaaagtctgaatagacttytcatgatcccagtgtgaataaacagaagaagaccttggacaaaaggaggaaaactagaaattttgagaaaatggagaaagtatatacatgttaaaattatttactataagaaccaaaagaatatttcagaaaagcagttaccatcctcaataggacacaaaagacctctatgaatcagaaatagaaatctataaaggaagaaaaagctgagatataagaagcaaactaaatcagataaagtaggatgacaaaaaaactaaaagactaactatggctgtatgatctatattggaaatatttaatcttcctaagcctcttttttgtcatctatatggttggtgtaatggtattttacacaactgctttgagagttgtgtgttaagtgccaagaaaaagtgcttgactcacagtagcttgctaaagaatgttagcttggattactatagttacccatctctacaggatcccagattctacaagtcatttatagcag

SEQ ID NO: 611473 - DNA, 564 bp, Homo sapiens
tttcacttgccacatgggccatgtctttcagaaactgattgcctaatgaaattatagaatttaatactcataaaatcatacaaataaaaaataattctataattatttaaatatctaaacaatgtgcacaaagtaactatatatcaggatacagtgatcacataaaattcataggcaaaactaattgtgtattacatttttgatatataaaattagaagaatctggctacattgcacggtggtgtcgggtttggtaattgcgcagaatacccttaggtctagaattacatcgaccaaatggaacaaatctaggcctgcatgtcctatttggcttagctagctctccacccactctcttagggttgtgtccattgtctgggctgagcaagcacaagaacagcactgatgatacttaggggtttcctcttctctaacttcccatggaattgacacctatccttcagcagatgttgaattgtgccctcaggattactcactctagttcacaattaatctctccctgttctgactctgacaggtmcttaaaaccaagtgaagtatttt

SEQ ID NO: 611474 - DNA, 533 bp, Homo sapiens
ccctgaactgagtatttttgaaggtttttcagataatctgatgtgcgaggttagtttgttttactattcagttgtttggaatagtagagcattatatgaggctcttactggaggcttaatggtattaagagattaaaagctttcacattgtttggttttcacatctataaataaaacaagttrttatcattttgtaatatttagcttatatacatttttgtgagagttttgtgggacttggaaagtgtatggactagcatcagacacaaattatttttccatatttctcacttggagtttcagatagcagcattttaatcatctcttccattaaaccaagattacacaaaagcgtttgaggacactgaggactggcacttctaattttgctttagaaaccagtactcaaaatgtttggtttggaggtcagttacactgctgcttttgataatcagccattaaaaaaattttggggacatttctcagagtctcatccccatatttttgttcttaacacatctcaccacaaactc

SEQ ID NO: 611475 - DNA, 569 bp, Homo sapiens
acagtcatttgttcttgactatttgcaaatcatttcaggaagacatggtgaaacatcctacactgtgagtggcagaaccccatgtgcactgcaatctcatttcctaccctccagaggagtatataaacttttcctacataaataatggccacatttttgtatcgatacattgtaagttctaagatgtgtgtgttttttttaagaagaattaaaatagaaaagcatatacctaaaagatgttcctcgggatatatctgcatatattctctactcttgtcattttaaataaaaatacagtggtcccttgatatcctcaagagattrggtccaggaccccagaggataccaaaatcagcacatattcaagtaatcctgtggaaccagagtatacaaaaagtcagtcctccatatctgcgggtttttcatcctgtggctactgtattttgatccacatttcaatgcagatgctgattttttttaattaaaagaatctctatataaggggatgcacacagctcaagctcatgttgttcaagtgtcaaccgtacttttttatttctgtccaatat

SEQ ID NO: 611476 - DNA, 569 bp, Homo sapiens
acagtcatttgttcttgactatttgcaaatcatttcaggaagacatggtgaaacatcctacactgtgagtggcagaaccccatgtgcactgcaatctcatttcctaccctccagaggagtatataaacttttcctacataaataatggccacatttttgtatcgatacattgtaagttctaagatgtgtgtgttttttttaagargaattaaaatagaaaagcatatacctaaaagatgttcctcgggatatatctgcatatattctctactcttgtcattttaaataaaaatacagtggtcccttgatatcctcaagagattgggtccaggaccccagaggataccaaaatcagcacatattcaagtaatcctgtggaaccagagtatacaaaaagtcagtcctccatatctgcgggtttttcatcctgtggctactgtattttgatccacatttcaatgcagatgctgattttttttaattaaaagaatctctatataaggggatgcacacagctcaagctcatgttgttcaagtgtcaaccgtacttttttatttctgtccaatat

SEQ ID NO: 611477 - DNA, 465 bp, Homo sapiens
actctaccacacctatggtttgcaaactttggaaatgtctgtatatgccattatgcatggtattactactattatgttgttaaaagcactttgaaggcaatttatgtgacttatatatagttagtattttaatctggacattctccagtttatgcaaagattaaaactcagcagcttcattttacagaattggcatcttttatatggctatggggactgcttggtgtctataaattataatgtatatttgttggactgaaatcaaacttaaaatgttccacatttcaagtgtttttattctgagcagtacttacaaaaaataatgccatagttgtgtctaattctgtatagttcagcactctccacaggctrtcaatctctgatttgatctacttttaccagatttaacagatccttgaatttactttactgtctacgcttcctttttgctcacattgggaatca

SEQ ID NO: 611478 - DNA, 509 bp, Homo sapiens
ttattcctcaaagacctaaaaacagaactaccattagacccagcaatcccattactgggtatatatccaaaggaatataaattgttctattataaagacacacgcacacatatgttcactgcagcactattcacattaacaaagacatggaatagacctaaatggccatcaatagtaaagactggataaataaaatgttgaacatatacaccagggaataagatgtagccataaaaaggaacgagatcatgtgttttgaaggaatatggatggaattgaaggccattatccttagcaaatcaatgtaggaacgaaaaaacaaatgccacattctctcacttgtaagtgcaagctaaatgatgagaacacatgcacacaaagaagggaacaacagacactgggccctacaagagggcagaaggtcgggggagggagaccatctggaaaartaactaatgagtcataggcttaatgcctgggtaatgaattaatctgtaaaacaaaccccc

SEQ ID NO: 611479 - DNA, 614 bp, Homo sapiens
ttagtccagaagttttaataatattctttgctggttgaaattcatgtttaatatgatgtaaattacttgataagcaaattaagaactatgctactacagactccaaataagacgcaagaaaaatgaggggaaatacattaaaggaagatcttaaaaaacagctgcacagaagataaattatttttccaggagttttaaacatagttgcttttgtttgtttgctttgctgttttttcttaataattgttttagtaagctcaggctgctatataaaaataagataggcgctggtctgaacaatagacatttatttcttatagttcttgaacctggcaagtctgaggagggtcatcttctgggctttcaaagggctgcctttttcctatgtacgtacatagygaatagaaagtgttagctctctggtctcttcctgtaagagcattaatcccatcatgaagaccccatccttatgggctcatctaaacctaattacttccaaaggtcccacctccaaatgctaacacattgagagttaaggcttcaatatattaattttggggaaacaagacacagtccatatcaaatatatatatatatatatgtaatatatatgt

SEQ ID NO: 611480 - DNA, 614 bp, Homo sapiens
ttagtccagaagttttaataatattctttgctggttgaaattcatgtttaatatgatgtaaattacttgataagcaaattaagaactatgctactacagactccaaataagacgcaagaaaaatgaggggaaatacattaaaggaagatcttaaaaaacagctgcacagaagataaattatttttccaggagttttaaacatagttgcttttgtttgtttgctttgctgttttttcttaataattgttttagtaagctcaggctgctatataaaaataagataggcgctggtctgaacaatagacatttatttcttatagttcttgaacctggcaagtctgaggagggtcatcttctgggctttcaaagggctgcctttttcctatgtacgtacatagcgaatagaaagygttagctctctggtctcttcctgtaagagcattaatcccatcatgaagaccccatccttatgggctcatctaaacctaattacttccaaaggtcccacctccaaatgctaacacattgagagttaaggcttcaatatattaattttggggaaacaagacacagtccatatcaaatatatatatatatatatgtaatatatatgt

SEQ ID NO: 611481 - DNA, 614 bp, Homo sapiens
ttagtccagaagttttaataatattctttgctggttgaaattcatgtttaatatgatgtaaattacttgataagcaaattaagaactatgctactacagactccaaataagacgcaagaaaaatgaggggaaatacattaaaggaagatcttaaaaaacagctgcacagaagataaattatttttccaggagttttaaacatagttgcttttgtttgtttgctttgctgttttttcttaataattgttttagtaagctcaggctgctatataaaaataagataggcgctggtctgaacaatagacatttatttcttatagttcttgaacctggcaagtctgaggagggtcatcttctgggctttcaaagggctgcctttttcctatgtacgtacatagcgaatagaaagtgttagctctctggtctcttcctgtaagagcaytaatcccatcatgaagaccccatccttatgggctcatctaaacctaattacttccaaaggtcccacctccaaatgctaacacattgagagttaaggcttcaatatattaattttggggaaacaagacacagtccatatcaaatatatatatatatatatgtaatatatatgt

SEQ ID NO: 611482 - DNA, 567 bp, Homo sapiens
catacaatttggtagacaccagcacaaatgacaagaaaaacttggtaaagttgaagagactgcctttgttatatctaatattctatcaccccagatctatcttctcaaatctccacattacttagcctaaccctrtttttctgttttctagaggaacccaccacattgatcaggttgatttattcacattttcccaaaaatgctaggtagattccttcctaaatccattagtaagttatagtctgtattccccatggatgaactgtgttcaccagttatgactcttaggaggaacttcatagaagatcttcagtggcatctattggtacatgttggacattaactaaaaatgtatagttttagcaaccaacagattctattcttatacctgttggtcatgtccaggcagttatgtgtaaaataattacacaatgtttcaaaatttcaagatgtttgcctacctatatagtgtccttcactctcctccccagctctccaaataatatccataattcaaagaccagttaaatcctacaggcatattcacagaataactgccctgaaaac

SEQ ID NO: 611483 - DNA, 515 bp, Homo sapiens
agttgaagagactgcctttgttatatctaatattctatcaccccagatctatcttctcaaatctccacattacttagcctaaccctgtttttctrttttctagaggaacccaccacattgatcaggttgatttattcacattttcccaaaaatgctaggtagattccttcctaaatccattagtaagttatagtctgtattccccatggatgaactgtgttcaccagttatgactcttaggaggaacttcatagaagatcttcagtggcatctattggtacatgttggacattaactaaaaatgtatagttttagcaaccaacagattctattcttatacctgttggtcatgtccaggcagttatgtgtaaaataattacacaatgtttcaaaatttcaagatgtttgcctacctatatagtgtccttcactctcctccccagctctccaaataatatccataattcaaagaccagttaaatcctacaggcatattcacagaataactgccctga

SEQ ID NO: 611484 - DNA, 509 bp, Homo sapiens
cttggctggcagaatggaacagaaatagaarctaaaagatctagatattgatgtagtgatcaaaggcatacagctggtttactttgttataataatattttatgtggtacatgaagactttgatcccttgacaaatgtcatttgtaggtgagcaattattaataggattgtaagtcttaatatgcaaggatcaccattaataaaagtagattattgtaaagtgaattagcaataattttacttatgaataaaaacttatactatttcaggtcattttcttattgtttcttgaaaaaagaagtcctttataagtccagttaaatattacctaatttttgcatcaaatttcatggtaaacaaggcttattttcttactttactgatgtctaaaagctaaatttcactggtgatatatcatttgtttaagactaggtaactgataacctaagctgagacccaaaatttgtatttttctttattacaagcacaatattttccatcatggtata

SEQ ID NO: 611485 - DNA, 588 bp, Homo sapiens
cttggctggcagaatggaacagaaatagaagctaaaagatctagatattgatgtagtgatcaaaggcatacagctggtttactttgttataataatattttatgtggtacatgaagactttgatcccttgacaaatgtcatttgtaggtgagcaattattaataggattgtaagtcttaatatgcaaggatcwccattaataaaagtagattattgtaaagtgaattagcaataattttacttatgaataaaaacttatactatttcaggtcattttcttattgtttcttgaaaaaagaagtcctttataagtccagttaaatattacctaatttttgcatcaaatttcatggtaaacaaggcttattttcttactttactgatgtctaaaagctaaatttcactggtgatatatcatttgtttaagactaggtaactgataacctaagctgagacccaaaatttgtatttttctttattacaagcacaatattttccatcatggtatattacatcttgctaaagaagctgtgcttctttagccagacaattgaaaagcataaacattggtttactagaaagattttt

SEQ ID NO: 611486 - DNA, 588 bp, Homo sapiens
cttggctggcagaatggaacagaaatagaagctaaaagatctagatattgatgtagtgatcaaaggcatacagctggtttactttgttataataatattttatgtggtacatgaagactttgatcccttgacaaatgtcatttgtaggtgagcaattattaataggattgtaagtcttaatatgcaaggatcaccattaataaaagtagaytattgtaaagtgaattagcaataattttacttatgaataaaaacttatactatttcaggtcattttcttattgtttcttgaaaaaagaagtcctttataagtccagttaaatattacctaatttttgcatcaaatttcatggtaaacaaggcttattttcttactttactgatgtctaaaagctaaatttcactggtgatatatcatttgtttaagactaggtaactgataacctaagctgagacccaaaatttgtatttttctttattacaagcacaatattttccatcatggtatattacatcttgctaaagaagctgtgcttctttagccagacaattgaaaagcataaacattggtttactagaaagattttt

SEQ ID NO: 611487 - DNA, 588 bp, Homo sapiens
cttggctggcagaatggaacagaaatagaagctaaaagatctagatattgatgtagtgatcaaaggcatacagctggtttactttgttataataatattttatgtggtacatgaagactttgatcccttgacaaatgtcatttgtaggtgagcaattattaataggattgtaagtcttaatatgcaaggatcaccattaataaaagtagattattgtaaagtgaattagcaataatttyacttatgaataaaaacttatactatttcaggtcattttcttattgtttcttgaaaaaagaagtcctttataagtccagttaaatattacctaatttttgcatcaaatttcatggtaaacaaggcttattttcttactttactgatgtctaaaagctaaatttcactggtgatatatcatttgtttaagactaggtaactgataacctaagctgagacccaaaatttgtatttttctttattacaagcacaatattttccatcatggtatattacatcttgctaaagaagctgtgcttctttagccagacaattgaaaagcataaacattggtttactagaaagattttt

SEQ ID NO: 611488 - DNA, 588 bp, Homo sapiens
cttggctggcagaatggaacagaaatagaagctaaaagatctagatattgatgtagtgatcaaaggcatacagctggtttactttgttataataatattttatgtggtacatgaagactttgatcccttgacaaatgtcatttgtaggtgagcaattattaataggattgtaagtcttaatatgcaaggatcaccattaataaaagtagattattgtaaagtgaattagcaataattttacttatgaataaaaacttatactatttcaggtcattttcttattgtttcttgaaaaaagaagtcctttataagtccagttaaatattacctaatttttgcatmaaatttcatggtaaacaaggcttattttcttactttactgatgtctaaaagctaaatttcactggtgatatatcatttgtttaagactaggtaactgataacctaagctgagacccaaaatttgtatttttctttattacaagcacaatattttccatcatggtatattacatcttgctaaagaagctgtgcttctttagccagacaattgaaaagcataaacattggtttactagaaagattttt

SEQ ID NO: 611489 - DNA, 528 bp, Homo sapiens
ccccgctgtaccgcttcagacagtgaagaaggtrgcaggtgttggataacaagaatgacgtcatctcaaagtcatcactgtgcttcttcaggacttccttaatgccgttggtggtggaggtcatcagggagtgcaccttgagatcatcattggtttggtccgcgagccggatgcacatgtagaggatgtaggcggggatacagggcactgtgtccaacagcatctggggcttcaagtctgtcaccaggttgaggatgaggagggcctcgccctctttgtggcacttcaacatgccctggaaatccttttctttccactgaactgtgacctgcctgttgaactcatggcacttcctgtcactctgggccaacgcctgggcagcttcttcacgtaaatcttcagttgcttttagagcttcctctcattcttttcctcttactttatttttcaccacagaacttcctatcaactagtatgttgaatattttgcttattaactttgtttattgtcttctccctcgattagaa

SEQ ID NO: 611490 - DNA, 553 bp, Homo sapiens
tccccgctgtaccgcttcagacagtgaagaaggtggcaggtgttggataacaagaatgacgtcatctcaaagtcatcactgtgcttcttcaggacttccttaatgccgttggtggtggaggtcatcagggagtgcaccttgagatcatcattggtttggtccgcgagccggatgcacatgtagaggatgtaggcggggatacagggcactgtgtccaacagcatctggggcttcaagtctgtcaccaggttgaggatgaggagggcctcgccctctttgtggcacttcaacatgccctggaaatccttttctttccactgaactgtgacctgcctgttgaactcatggcacttcctgtcactctgggccaacgcctgggcagcttcttcacgtaaatcttcagttgcttttagagcttcctctcattcttttcctcttactttatttttcaccacagaacttcctatcaactagtatgtygaatattttgcttattaactttgtttattgtcttctccctcgattagaatattagctacttgagtacaaggat

SEQ ID NO: 611491 - DNA, 251 bp, Homo sapiens
aaactacctgtcattagagctaatttcttagcaaattattcataaaagtttataactttgtgaggcattacrgacaccaaaactaatgatttggcatttccatgggccaatttgtctaaagaactatcttttacactttactgttttttaataagcaatacagtgctcaaaaagtcttttataccaagtccagtaggttgataacattgagtataactgagcattgctttgtgtctaccctcaggcaaatc

SEQ ID NO: 611492 - DNA, 251 bp, Homo sapiens
aaactacctgtcattagagctaatttcttagcaaattattcataaaagtttataactttgtgaggcattacggacaccaaaactaatgatttggcatttccatggsccaatttgtctaaagaactatcttttacactttactgttttttaataagcaatacagtgctcaaaaagtcttttataccaagtccagtaggttgataacattgagtataactgagcattgctttgtgtctaccctcaggcaaatc

SEQ ID NO: 611493 - DNA, 251 bp, Homo sapiens
aaactacctgtcattagagctaatttcttagcaaattattcataaaagtttataactttgtgaggcattacggacaccaaaactaatgatttggcatttccatgggccaatttgtctaaagaactatcttttacactttactgttttttaatargcaatacagtgctcaaaaagtcttttataccaagtccagtaggttgataacattgagtataactgagcattgctttgtgtctaccctcaggcaaatc

SEQ ID NO: 611494 - DNA, 627 bp, Homo sapiens
tcagcactatgcaattgcatatacctgtcgtgtttggtctacagaggctaaacatcatgtaatagtttttatgcattttgttcataggttactgggtgctttaaggcaaaactgaatgagtttccaatagtccaaaactacaagaaatacagacacaaagtgcctggggttatcctcaaatgaagttagatttgaattgcattcaataaccttttttacaatgtgtagatgctcaaagcaaatacaatagtttctctttgcctctgtgacttgagttcatagtgttgtgtttaaatataacttttgtaatgtctacttcactgaagaaccttttaaaaaatttgacttataatggttttctgtaacaacctatggtgcttggtttgtaaagtaaaacaggaactcaatttagtacctactgaataataacattttttaactgagattccactcataaagcacctaaatgtttaaagttaaagcatattatgttgatattaaatttaaaaagaacaagttagagaagaaataaagaaaaaaaacttcggagaataaactgcttccaagtatacaagyactaaacaggctatacactggtatgctcattataaataaaaacattcattc

SEQ ID NO: 611495 - DNA, 455 bp, Homo sapiens
gtgcttattcaaacttctcttctcttcttcagaggcaaacctgtataatttctttggtttgtttgttttaagacgtagtcttactctgttacccaggctagagtgcagtggtacaatgtgaggtcactgcaacctccgcctcccgggttcaagcgattctccggcttcagcatcccaawtaactcaggattaaacccttataatttctatcatgaatgattaattttgttcatcttcaaattccaataattagaattcctacagaatgtgtgtgtgagtgtgtatatggttattttctttagcataaataaatatttgagatttagccaaatatttgtgcgtatcatttgtttatttttcctcatatttctgagttgcctatgtatttgtcagagtttgcttattcattagtctgttagtgaatattcagattgctttcagaattagcttttaca

SEQ ID NO: 611496 - DNA, 455 bp, Homo sapiens
gtgcttattcaaacttctcttctcttcttcagaggcaaacctgtataatttctttggtttgtttgttttaagacgtagtcttactctgttacccaggctagagtgcagtggtacaatgtgaggtcactgcaacctccgcctcccgggttcaagcgattctccggcttcagcatcccaattaactcaggattaaacccttataatttctatcatgaatgattaattttgttcatcttcaaattccaataattagaattcctacagaatgtgtgtgtgagtgtgtatatggttattttctttagcataaataaatatttgagatttagccaaatatttgtgygtatcatttgtttatttttcctcatatttctgagttgcctatgtatttgtcagagtttgcttattcattagtctgttagtgaatattcagattgctttcagaattagcttttaca

SEQ ID NO: 611497 - DNA, 463 bp, Homo sapiens
gtgtgatgttccccttcctgtgtccatgtgttctcattgttcaattcccagctatgagtgagaacatgcggtgtttcgttttttgtccttgcgatagttgactgagaatgatgaattaaaataaaaatgcatgcactttcaaatgtacttagtgcaacatattgaacttacattccagttttcctggaattacttgygtcttgagctaaaggctgtatttggtataacagggaaggaaagaaattatttttcctataaaattagtttaaaaacacatataattaaacaaaataaaaatattatcccatcttttaaagaacatttactaagtcacagatattacccgaagtttagaatatcacctaagaacaattgtttaaaaattatttagggaaaatgaagcaaaattgtttttacaatctgagattttaacagctgttcttttaactcctgttcttcagct

SEQ ID NO: 611498 - DNA, 434 bp, Homo sapiens
ggttgaggcttcagtgaaccaagatcacacctctgcacttgagcttgggtgacagaktaagaccctatctcaaaaaataaattataaactgattcacaataactttggttttgtcactaatatgctgaatatttttgttacaactaatatgcaaaatgcaaactggctatcactaccattctgataatggaattagctgtcctacatacctgatgacctaatgcttaacctaatctttctctttcccactttgatttggaaacttgttacaagagagttctttacctcaaagtcttaaggaattcaagacaagactagagtatgttaagataccacaaaaaaaaaaatatatatatatatagcaagagctttcttgagtaagcaaattttatacatataaaaataatttacatgcaaatgaccaagaggaaagg

SEQ ID NO: 611499 - DNA, 434 bp, Homo sapiens
ggttgaggcttcagtgaaccaagatcacacctctgcacttgagcttgggtgacagattaagaccctatctcaaaaaataaattataaactgattcacaataactttggttttgtcactaatatgctgaatattttygttacaactaatatgcaaaatgcaaactggctatcactaccattctgataatggaattagctgtcctacatacctgatgacctaatgcttaacctaatctttctctttcccactttgatttggaaacttgttacaagagagttctttacctcaaagtcttaaggaattcaagacaagactagagtatgttaagataccacaaaaaaaaaaatatatatatatatagcaagagctttcttgagtaagcaaattttatacatataaaaataatttacatgcaaatgaccaagaggaaagg

SEQ ID NO: 611500 - DNA, 434 bp, Homo sapiens
ggttgaggcttcagtgaaccaagatcacacctctgcacttgagcttgggtgacagattaagaccctatctcaaaaaataaattataaactgattcacaataactttggttttgtcactaatatgctgaatatttttgttacaactaatatrcaaaatgcaaactggctatcactaccattctgataatggaattagctgtcctacatacctgatgacctaatgcttaacctaatctttctctttcccactttgatttggaaacttgttacaagagagttctttacctcaaagtcttaaggaattcaagacaagactagagtatgttaagataccacaaaaaaaaaaatatatatatatatagcaagagctttcttgagtaagcaaattttatacatataaaaataatttacatgcaaatgaccaagaggaaagg

SEQ ID NO: 611501 - DNA, 588 bp, Homo sapiens
ctgaatatttttgttacaactaatatgcaaaatgmaaactggctatcactaccattctgataatggaattagctgtcctacatacctgatgacctaatgcttaacctaatctttctctttcccactttgatttggaaacttgttacaagagagttctttacctcaaagtcttaaggaattcaagacaagactagagtatgttaagataccacaaaaaaaaaaatatatatatatatagcaagagctttcttgagtaagcaaattttatacatataaaaataatttacatgcaaatgaccaagaggaaaggttaagtgactctggtgtaaataattagtttactgattctgccagagcatattaacaaaaattcactttggcaaaattatatggatttaaagaagtaacaagtgggtttctctaaagcacagtttggctttttactagaatatcaagtcacctttttgggtgaggagagtacaatgggagtgggcagctggtgcaaataaacatttaaaattacttaaaacttcaacaaatgggatccgtatttaaatgtgttttggtctgtcttccctttgttttttc

SEQ ID NO: 611502 - DNA, 434 bp, Homo sapiens
ggttgaggcttcagtgaaccaagatcacacctctgcacttgagcttgggtgacagattaagaccctatctcaaaaaataaattataaactgattcacaataactttggttttgtcactaatatgctgaatatttttgttacaactaatatgcaaaatgcaaactggctatcactaccattctgataatggaattagctgtcctacatacctgatgacctaatgcttaacctaatctttctctttcccactttgatttggaaacttgttacaakagagttctttacctcaaagtcttaaggaattcaagacaagactagagtatgttaagataccacaaaaaaaaaaatatatatatatatagcaagagctttcttgagtaagcaaattttatacatataaaaataatttacatgcaaatgaccaagaggaaagg

SEQ ID NO: 611503 - DNA, 607 bp, Homo sapiens
ttcagtgaaccaagatcacacctctgcacttgagcttgggtgacagattaagaccctatctcaaaaaataaattataaactgattcacaataactttggttttgtcactaatatgctgaatatttttgttacaactaatatgcaaaatgcaaactggctatcactaccattctgataatggaattagctgtcctacatacctgatgacctaatgcttaacctaatctttctctttcccactttgatttggaaacttgttacaagagagttctttacctcaaagtcttaaggaattcaagacaagactagagtatgttaagataccacaaaaaaaaaaatatatatatatatagcaagagctttcttgagtaagcaaattttatacatataaaaataatttacatgcaaatgaccaagaggaaaggttaagtgactctggtgtaaataattagtttactgattctgccagagcatattaacaaaaattcactttggcaaaattatatggatttaaagaagtaacaagtgrgtttctctaaagcacagtttggctttttactagaatatcaagtcacctttttgggtgaggagagtacaatgggagtgg

SEQ ID NO: 611504 - DNA, 578 bp, Homo sapiens
agtaagcaaattttatacatataaaaataatttacatgcaaatgaccaagaggaaaggttaagtgactctggtgtaaataattagtttactgattctgccagagcatattaacaaaaattcactttggcaaaattatatggatttaaagaagtaacaagtgggtttctctaaagcacagtttggctttttactagaatatcaagtcacctttttgggtgaggagagtacaatgggagtgggcagctggtgcaaataaacatttaaaattacttaaaacttcaacaaatgggatcygtatttaaatgtgttttggtctgtcttccctttgttttttctaatccattccaacaatgcaaacctcagccactgtcaagggcaatctcagactggaggttgctgcctagggtgaggttctagcaagactgacaagcagagctcagggaaaagtctgcatgggaaaacagagccagacttagaaggcattgctgatgaattccattttcttactacagaagagctagcaaaaactgcaatatgatgtgtaaagtcagtgtaatcttatggacattataccaag

SEQ ID NO: 611505 - DNA, 556 bp, Homo sapiens
ttgttccctctaaatctcatgttgaattgtgatacccccaatgttggtggtaggtctggarggaggtgattggatcatgggggtggatttctcagaaatggtctagcatcctgtccctggtgctgtccttgtgagagtgagtgaattcttgcaagatctatttgtttaaaagtgtgtggtgcttcccctgccttgccaggtgatgtgcctgcctgctccttcttcatcttctgccatgaataaagcctcctgaggcctcaccagaagctaggcagatgccagaatcatgtttgtacagcctgcagctatacaaacctcttttcaaagctcttttctttataaattacccagtctcaggtatttcttcacagcaatgtaagaatggcctaatacagcaaattggtactgagacatggggcattgctataaagatacttgaaagtgtggaagtgactttggaactaggtaatgggcaggagttggaagagtttggactgctcctaatacaggaagatgaaggaaagttctgaatttcttagagactagttaaatggtt

SEQ ID NO: 611506 - DNA, 556 bp, Homo sapiens
ttgttccctctaaatctcatgttgaattgtgatacccccaatgttggtggtaggtctggaaggaggtgattggatcatgggggtggatttctcagaaatggtctagcatcctgtccctggtgctgtccttgtgagagtgagtgaattcttgcaagatctatttgtttaaaagtgtgtggtgcttcccctgccttgccaggtgatgtgcctgcctgctccttcttcatcttctgccatgaataaagcctcctgaggcctcaccagaagctaggcagatgccagaatcatgtttgtacagcctgcagctatacaaacctcttttcaaagctcttttctttataaattacccagtctcaggtatttcttcayagcaatgtaagaatggcctaatacagcaaattggtactgagacatggggcattgctataaagatacttgaaagtgtggaagtgactttggaactaggtaatgggcaggagttggaagagtttggactgctcctaatacaggaagatgaaggaaagttctgaatttcttagagactagttaaatggtt

SEQ ID NO: 611507 - DNA, 548 bp, Homo sapiens
ccacagaaaaacaggcagttaatttttaaagggctccagctctttctctttctcagggggaattgggttttctcacatacaactgagtttctgcttacacattctttaatttcttttaattcctgttccacttggaccagggccagggcatcactgtcctgtaccacccccaggagggtgttccttgcatcctggcccttctagctccagccttggttcaaagggctgcagatagagctcaggtcatggcttcagwgggtgcaaactataagccttggtggcttccatgtggcgttaagcctgcaggtaagcaaagtgcaagagtgaaggaggcttggcattctctgcctaaatttcagaggatgtatgagaaaggctggatgcccagggagaagactatgcacggctggagctctcaaagaggacctcttctaggacagtgccaagtggaaatgtggggttggaggccccactcagggtcctgactgggggggcggcctagtggagctgtgggaggggggctgctgccctccagatcccagaatgat

SEQ ID NO: 611508 - DNA, 548 bp, Homo sapiens
ccacagaaaaacaggcagttaatttttaaagggctccagctctttctctttctcagggggaattgggttttctcacatacaactgagtttctgcttacacattctttaatttcttttaattcctgttccacttggaccagggccagggcatcactgtcctgtaccacccccaggagggtgttccttgcatcctggcccttctagctccagccttggttcaaagggctgcagatagagctcaggtcatggcttcagtgggtgcaaactataagccttggtggcttccatgtggygttaagcctgcaggtaagcaaagtgcaagagtgaaggaggcttggcattctctgcctaaatttcagaggatgtatgagaaaggctggatgcccagggagaagactatgcacggctggagctctcaaagaggacctcttctaggacagtgccaagtggaaatgtggggttggaggccccactcagggtcctgactgggggggcggcctagtggagctgtgggaggggggctgctgccctccagatcccagaatgat

SEQ ID NO: 611509 - DNA, 548 bp, Homo sapiens
ccacagaaaaacaggcagttaatttttaaagggctccagctctttctctttctcagggggaattgggttttctcacatacaactgagtttctgcttacacattctttaatttcttttaattcctgttccacttggaccagggccagggcatcactgtcctgtaccacccccaggagggtgttccttgcatcctggcccttctagctccagccttggttcaaagggctgcagatagagctcaggtcatggcttcagtgggtgcaaactataagccttggtggcttccatgtggcgttaagcctgcaggtragcaaagtgcaagagtgaaggaggcttggcattctctgcctaaatttcagaggatgtatgagaaaggctggatgcccagggagaagactatgcacggctggagctctcaaagaggacctcttctaggacagtgccaagtggaaatgtggggttggaggccccactcagggtcctgactgggggggcggcctagtggagctgtgggaggggggctgctgccctccagatcccagaatgat

SEQ ID NO: 611510 - DNA, 355 bp, Homo sapiens
aggatgtgggacatggtttcaaaggagattattttggaacatcgagttttaatgactgccctgctgggatttgaacttgtgtggggcctgtagcccctttcttttggccaatttctccttttgtaatgggaatgtttacccaatgcctgtaccccaattttatcttagaagtaaataacttgttttgattttacaggckcatcagtggaagggacttgccttgtctcagaagaaactgcactttcgagtgatgccgaaacaggttgagacttttgggggactattgagaagggatgattgtattttgcaatgtgagaagaacatgagatttgaagggccagggatggaatgaaat

SEQ ID NO: 611511 - DNA, 355 bp, Homo sapiens
aggatgtgggacatggtttcaaaggagattattttggaacatcgagttttaatgactgccctgctgggatttgaacttgtgtggggcctgtagcccctttcttttggccaatttctccttttgtaatgggaatgtttacccaatgcctgtaccccaattttatcttagaagtaaataacttgttttgattttacaggctcatcagtggaagggacttgccttgtctcagaagaaactgcactttygagtgatgccgaaacaggttgagacttttgggggactattgagaagggatgattgtattttgcaatgtgagaagaacatgagatttgaagggccagggatggaatgaaat

SEQ ID NO: 611512 - DNA, 560 bp, Homo sapiens
cctgcttgctgctgctctggccatgtgacataccttcttttgcttcaccttctgccatgtgtaaaagctccctgaggacccttcttgaagtcaagcaactgccaatgcaaagcttcctgtacagcctgcagaactgtgagccaagtcaatcttttttttcagtataaattatgtagtgcttaggtattcctttatagtaacgcaagaatgccataatacaaggcataatggtttgcattttaaaaatgaaaattaaatttttgtaatttatcatgaaaagatgaaatgwgttaataatgagcaatatctacatgttgtcttagaggtgctgacaatctgtcaaggaattacatgcattgatcaagcagtttaccttcaagttgaataacaagatattcctatctaacataacaaaattttgacattatttgggagactggaaataatgctaaataatatcagattgtcaaagtcaaataaatatagagacaaacatctgaaattaaaatgttttatttgagatacaagtattacaatttcacacatacatgcagaatggg

SEQ ID NO: 611513 - DNA, 391 bp, Homo sapiens
aaaacggtatgtatttctctttgagaaagttcactggcaccagtaaggtttttgagagctggcaggctctgataggtgagggacagtggtgggtaaagctagtcttagtgttcaagaggttgtttcagtaaccatttgataaaactggtttcagcttaaagcaggtaatttcagcagccaggcatgcagagaattaygcttttggagtggtgtttttgccctgaatgcctcctccccctggcttgttgatggttttatttggtgtgataagaatgacccaattcatatgatcaatttttacatttaaccctttccatcaagatctttctcttaaagcatcaaccatgtttatagttgtacaaagactacaagttaggtttaatcatccctt

SEQ ID NO: 611514 - DNA, 391 bp, Homo sapiens
aaaacggtatgtatttctctttgagaaagttcactggcaccagtaaggtttttgagagctggcaggctctgataggtgagggacagtggtgggtaaagctagtcttagtgttcaagaggttgtttcagtaaccatttgataaaactggtttcagcttaaagcaggtaatttcagcagccaggcatgcagagaattatgcttttggagtggtgtttttgccctgaatgcctcctccccctggcttgttgatggttttatttggtgtgataagaatgacccaattcatatgatcaatttttacatttaaccctttccatcaagatctttctcttaaagcatcaaccatgtttatagttgtacaawgactacaagttaggtttaatcatccctt

SEQ ID NO: 611515 - DNA, 608 bp, Homo sapiens
gttaggtttaatcatcccttagtgctaggatggacctgtcccagttgctccgtcccacatctgggaaaggtatggaggtctacatcaggtctatgtcaagatttatggcttmaaatgtctatccaaggaaaaaataaaactgaccagtaatcccaggagagaaacataccttggcaaattcgaagatatttctaattttatttaacaattttaaaattaattaatgtatcaaagattcacctaactcatgtcaaataaaatatgtttgcactaattaatatatattttatgtgaacattcctttatttaaaccatccttttttcctagaatgatggattaggggctttcagtgtgcctcagccacttggaagtagaaaaataagcataaagataaactttgtgagcttcaattcaagaagaaaaataggaattcacaggaatacagaaaaacactccagaccctgtggagggggaggtgggaaagcagactctgtgatagcatttggttcataaaagggagtgaaactccagtacaagagaagagcagccagtctccctctgcaactcacattttcactggggatctgtgcaatccagattaagggag

SEQ ID NO: 611516 - DNA, 500 bp, Homo sapiens
aataaaactgaccagtaatcccaggagagaaacataccttggcaaattygaagatatttctaattttatttaacaattttaaaattaattaatgtatcaaagattcacctaactcatgtcaaataaaatatgtttgcactaattaatatatattttatgtgaacattcctttatttaaaccatccttttttcctagaatgatggattaggggctttcagtgtgcctcagccacttggaagtagaaaaataagcataaagataaactttgtgagcttcaattcaagaagaaaaataggaattcacaggaatacagaaaaacactccagaccctgtggagggggaggtgggaaagcagactctgtgatagcatttggttcataaaagggagtgaaactccagtacaagagaagagcagccagtctccctctgcaactcacattttcactggggatctgtgcaatccagattaagggagagcactctgtttctcccaagcctt

SEQ ID NO: 611517 - DNA, 619 bp, Homo sapiens
cttggcaaattcgaagatatttctaattttatttaacaattttaaaattaattaatgtatcaaagattcacctaactcatgtcaaataaaatatgtttgcactaattaatatatattttatgtgaacattcctttatttaaaccatccttttttcctagaatgatggattaggggctttcagtgtgcctcagccacttggaagtagaaaaataagcakaaagataaactttgtgagcttcaattcaagaagaaaaataggaattcacaggaatacagaaaaacactccagaccctgtggagggggaggtgggaaagcagactctgtgatagcatttggttcataaaagggagtgaaactccagtacaagagaagagcagccagtctccctctgcaactcacattttcactggggatctgtgcaatccagattaagggagagcactctgtttctcccaagccttggagctagcacaaaagtggctgagagatggggaaagaggaaagacactcagaaaagctgcaggcatttccccagacctgggactgagagaaggatgacctttttaatctgggctcatacaaagtcaatcattttttggtgcctggcaatggtggcc

SEQ ID NO: 611518 - DNA, 586 bp, Homo sapiens
tagtgggaagagagttgctaaagcagaggtttctcaaggatggtgagacttgcagccaagaacagctttgcaacctggaactggtctgtgtgtgtcattgctgggtgtctcagcctgctcccttggtcagttgagagagtactccatcagctccaagaaacaagagggaggtgaaccccattccccaggagacctaaactttggtgaggaccagccctaagggaaggaggaatacagcttgccaaagccaccccttgggtcaaaggaaacaygatcacgatatcagctgctgaaaggggcacaccaaagcctgggaacagatttagagaggtggtcatctcttgccctctgtccccttcctagtgcactgctgcagatccagcagtggtcatcctgttggggcccaaggaacgtgggctgaaagaggctgcttcttaggtttctccagcagctctgcccctgctgaagactagtacacactgggacagggtgcttttggcacttcgtcacttctgcacctgtcgaggacaagtacacagaggagaagaccctgcagccagctgttactcttaagcaccttctactg

SEQ ID NO: 611519 - DNA, 586 bp, Homo sapiens
tagtgggaagagagttgctaaagcagaggtttctcaaggatggtgagacttgcagccaagaacagctttgcaacctggaactggtctgtgtgtgtcattgctgggtgtctcagcctgctcccttggtcagttgagagagtactccatcagctccaagaaacaagagggaggtgaaccccattccccaggagacctaaactttggtgaggaccagccctaagggaaggaggaatacagcttgccaaagccaccccttgggtcaaaggaaacatgatcacgatatcagctgctgaaaggggcacaccaaagcctgggaacagatttagagaggtggtcatctcttgccctctgtccccttcctagtgcactgctgcagatccagcagtggtcatcctgttggggcccaaggaacgtgggctgaaagaggctgcttcttaggtttctccagcagctctgcccctgctgaagactagtacacactgggacagggygcttttggcacttcgtcacttctgcacctgtcgaggacaagtacacagaggagaagaccctgcagccagctgttactcttaagcaccttctactg

SEQ ID NO: 611520 - DNA, 586 bp, Homo sapiens
tagtgggaagagagttgctaaagcagaggtttctcaaggatggtgagacttgcagccaagaacagctttgcaacctggaactggtctgtgtgtgtcattgctgggtgtctcagcctgctcccttggtcagttgagagagtactccatcagctccaagaaacaagagggaggtgaaccccattccccaggagacctaaactttggtgaggaccagccctaagggaaggaggaatacagcttgccaaagccaccccttgggtcaaaggaaacatgatcacgatatcagctgctgaaaggggcacaccaaagcctgggaacagatttagagaggtggtcatctcttgccctctgtccccttcctagtgcactgctgcagatccagcagtggtcatcctgttggggcccaaggaacgtgggctgaaagaggctgcttcttaggtttctccagcagctctgcccctgctgaagactagtacacactgggacagggtgcttttggcacttygtcacttctgcacctgtcgaggacaagtacacagaggagaagaccctgcagccagctgttactcttaagcaccttctactg

SEQ ID NO: 611521 - DNA, 581 bp, Homo sapiens
aaaatttactataggaatttcaaaaaacagttcacagccttagcaacagactagaccaaatagaagaaataatttaagagctcaaagaccagacctttgaatcaacccagtcagacaaaaataaaaaaagaatttaaaartaatgaaccaaacttttgagaaatgtaggattaggtaaaggaacaaaatctatgacttattggaattttctttttttgagacagaatctcactctgttacccagtctgtaatgcagtggcatgatcttggctcactgaaacctccacctcctgggttcaagcaattctcgtgcctcagcctcccaagtatctgagattacaggcgtgtgccagcatgcctcgctcatttttgtatttttagtagagatggggtttcgccatgctggccagttaggtctcaaacttctggcctcaggtgatcctcccaccttggcctcccaaagtgctgggattactggcatgagccactgtgcccggatgacttattggcatttctaacagagaagaagagaaagtgagcaacttgggaaatgtttttgaggatatattcagaaaactgtc

SEQ ID NO: 611522 - DNA, 581 bp, Homo sapiens
aaaatttactataggaatttcaaaaaacagttcacagccttagcaacagactagaccaaatagaagaaataatttaagagctcaaagaccagacctttgaatcaacccagtcagacaaaaataaaaaaagaatttaaaagtaatgaaccaaacttttgagaaatgtaggattaggtaaaggaacaaaatctatgacttattggaattttctttttttgagacagaatctcactctgttacccagtctgtartgcagtggcatgatcttggctcactgaaacctccacctcctgggttcaagcaattctcgtgcctcagcctcccaagtatctgagattacaggcgtgtgccagcatgcctcgctcatttttgtatttttagtagagatggggtttcgccatgctggccagttaggtctcaaacttctggcctcaggtgatcctcccaccttggcctcccaaagtgctgggattactggcatgagccactgtgcccggatgacttattggcatttctaacagagaagaagagaaagtgagcaacttgggaaatgtttttgaggatatattcagaaaactgtc

SEQ ID NO: 611523 - DNA, 614 bp, Homo sapiens
tttgaaaatgtacacaatacactgtaatatccaatgcatacatcaaagtaaatatattttattctaggataattattaaaacattaagaaatrctctttaatcatatatgttaaaacttgtagaaaatcaataacatacaagtaaagaagatcaagaagtcaaaaaaagtaattccaagtgtagaaagcatggtgaaaagtgatggaagaaaactgcagaaatttaaaatgtgaaattaaaatatataattattaatcaaaatacataattcttaattaaaatacataattcttcattgaaccccgaatctgtcaggacatatgtgtgatcttggataacgcattcaacctcctgaacactgaatttccttgactgtaaaatgttttagagatgttcctcacccggttgcatgaagcaaacctctgtgtgttaaggcacttcccacagcatctgcgacacagaacagtggcatctgtgctcttcgtagtctctgaacacagacccacagcagtatattttgtggtttttttttctatataaaaggctttgaaaatgtcccacagcttcctcagtaagtgactgtcaaaaggggcagccttcaaaagtagaattc

SEQ ID NO: 611524 - DNA, 614 bp, Homo sapiens
tttgaaaatgtacacaatacactgtaatatccaatgcatacatcaaagtaaatatattttattctaggataattattaaaacattaagaaatactctttaatcatatatgttaaaacttgtagaaaatcaataacatacaagtaaagaagatcaagaagtcaaaaaaagtaattccaagtgtagaaagcatggtgaaaagtgatggaagaaaactgcagaaatttaaaatgtgaaattaaaatatataattattaatcaaaatacataattcttaaytaaaatacataattcttcattgaaccccgaatctgtcaggacatatgtgtgatcttggataacgcattcaacctcctgaacactgaatttccttgactgtaaaatgttttagagatgttcctcacccggttgcatgaagcaaacctctgtgtgttaaggcacttcccacagcatctgcgacacagaacagtggcatctgtgctcttcgtagtctctgaacacagacccacagcagtatattttgtggtttttttttctatataaaaggctttgaaaatgtcccacagcttcctcagtaagtgactgtcaaaaggggcagccttcaaaagtagaattc

SEQ ID NO: 611525 - DNA, 507 bp, Homo sapiens
cagcaaatgctgcatggagccctggatttctacgtggaaagctagaagaagggagagctgaatcaggatgtaatcaccctttccaaagaggtcagtccagtactaccmtgtgctcctgggcaagctctccaggttgagggaacaggagcaggggttatgtcaggtgaaggttggagtgagagacctcccaggaggtgtagaatattccactagggacatctcatacccttccaggattagaccttgaggcctggagatccccaggcaattagtattgaaggtcgaaaggccaatgacaggaataggaaggcccactgtgtcattcacaaagcacttccaaacccatcaccacaggtgaccctcacaacaaccctgtgagacctgcaggacaggggctctcacaaaggaggtgtcgggaatgtcaagattttaacaccttctccaagtcaggatcaggaaacgctgtcccagcactgacctatattccctatgcttcctcccacaaaa

SEQ ID NO: 611526 - DNA, 520 bp, Homo sapiens
tctacgtggaaagctagaagaagggagagctgaatcaggatgtaatcaccctttccaaagaggtcagtccagtactaccatgtgctcctgggcaagctctccaggttgagggaacaggagcaggggttatgtcaggtgaaggttggagtgagagacctcccaggaggtgtagaatattccactagggacatctcatacccttccaggattagaccttgaggcctggagatccccaggcaattagtattgaaggtcgaaaggccaatgacaggaataggaaggcccactgtgtcattcacaaagcacttccaaacccatcaccacaggtgrccctcacaacaaccctgtgagacctgcaggacaggggctctcacaaaggaggtgtcgggaatgtcaagattttaacaccttctccaagtcaggatcaggaaacgctgtcccagcactgacctatattccctatgcttcctcccacaaaacagcttagggtgactgataacttgtgggcagagaccctcac

SEQ ID NO: 611527 - DNA, 507 bp, Homo sapiens
cagcaaatgctgcatggagccctggatttctacgtggaaagctagaagaagggagagctgaatcaggatgtaatcaccctttccaaagaggtcagtccagtactaccatgtgctcctgggcaagctctccaggttgagggaacaggagcaggggttatgtcaggtgaaggttggagtgagagacctcccaggaggtgtagaatattccactagggacatctcatacccttccaggattagaccttgaggcctggagatccccaggcaattagtattgaaggtcgaaaggccaatgacaggaataggaaggcccactgtgtcattcacaaagcacttccaaacccatcaccacaggtgaccctcacaacaaccctgtgagacctgcaggacaggggctctcacaaaggaggwgtcgggaatgtcaagattttaacaccttctccaagtcaggatcaggaaacgctgtcccagcactgacctatattccctatgcttcctcccacaaaa

SEQ ID NO: 611528 - DNA, 520 bp, Homo sapiens
tctacgtggaaagctagaagaagggagagctgaatcaggatgtaatcaccctttccaaagaggtcagtccagtactaccatgtgctcctgggcaagctctccaggttgagggaacaggagcaggggttatgtcaggtgaaggttggagtgagagacctcccaggaggtgtagaatattccactagggacatctcatacccttccaggattagaccttgaggcctggagatccccaggcaattagtattgaaggtcgaaaggccaatgacaggaataggaaggcccactgtgtcattcacaaagcacttccaaacccatcaccacaggtgaccctcacaacaaccctgtgagacctgcaggacaggggctctcacaaaggaggtgtcgggaatgtcaagattttaacaccttctccaagtcaggatcaggaaacgctgtyccagcactgacctatattccctatgcttcctcccacaaaacagcttagggtgactgataacttgtgggcagagaccctcac

SEQ ID NO: 611529 - DNA, 305 bp, Homo sapiens
tttaaaactcacacttttttaaaaawtttatttttatttttaatttatatgagtacatggtaggtgtatatatttatggggtacatgagatagtttgacacaggcatgcaatgtgtaataaacatatcagggtaaatggggcattcatcacctcaagcaagggaaatgccagctgcttataaaaccatcagatcacatgagaactcacttactatcatgagaacagcatggggaaactgccgccatgattcagttacctctcactgggtccctcccaggacacatgaggattatggaaattacag

SEQ ID NO: 611530 - DNA, 305 bp, Homo sapiens
tttaaaactcacacttttttaaaaattttatttttatttttaatttatatgagtacatggtaggtgtatatatttatggggtacatgagatagtttgacacaggcatgcaatgtgtaataawcatatcagggtaaatggggcattcatcacctcaagcaagggaaatgccagctgcttataaaaccatcagatcacatgagaactcacttactatcatgagaacagcatggggaaactgccgccatgattcagttacctctcactgggtccctcccaggacacatgaggattatggaaattacag

SEQ ID NO: 611531 - DNA, 305 bp, Homo sapiens
tttaaaactcacacttttttaaaaattttatttttatttttaatttatatgagtacatggtaggtgtatatatttatggggtacatgagatagtttgacacaggcatgcaatgtgtaataaacayatcagggtaaatggggcattcatcacctcaagcaagggaaatgccagctgcttataaaaccatcagatcacatgagaactcacttactatcatgagaacagcatggggaaactgccgccatgattcagttacctctcactgggtccctcccaggacacatgaggattatggaaattacag

SEQ ID NO: 611532 - DNA, 408 bp, Homo sapiens
accacatcaacaaaacaccagaggagccaactcaacaaacctcaatgcacggcacttcctggaccctaggtgctcagggccccctgagctgccctggggcagaacactggccagtgcttycccaacaactcccccatgcacagatgcctggtggacacacttcccttaaccctgctcagctggagctcagcccccatcctagtacctcttcctcctcctccagggcaggaaaaggaaacccaactccaaacccatggagaatcctcatcttgggtgaggccttggcttgggactcagcccctttgtcaggcctgcgaggagctccatcttcccctgtttccctgccccatgagaccctgggcctctgggaaagagttgagggtgtcatccactcagcaggtaccgcat

SEQ ID NO: 611533 - DNA, 424 bp, Homo sapiens
aacccaactccaaacccatggagaatcctcatcttgggtgaggccttggcttgggactcagcccctttgtcaggcctgcgaggagctccatcttcccctgtttccctgccccatgagaccctgggcctctgggaaagagttgagggtgtcatccactcagcaggtaccgcatgatctttgggaaggatttgtgttatacctgyccctggtgggatagaagcctccagagctgggcagtatttgggctgtagaaacctgagaagcccctgacccatcatgcatcagagcccactcccaagatgtggagccatcagctggaagagctgggcagtggcaggggaccccggaccctgaggccttcctcccttccatcaggtgaccctaccatgtggcctcagctctagagaggtgggccctagctgga

SEQ ID NO: 611534 - DNA, 546 bp, Homo sapiens
aatctattttcttgatttttaaaagtcaatgtactctcaaagaaacaagactattattcgtagattctgttatttgaaaatatttactgrtcatttttaccttacaccaagtgatctccagctcatggaaaaatatgtaaagttgcccagcttcattaagcttaaactcttctgaaggagaaaagaagcaatggagtagggacattaaagcaggagtttggtgatatggctgagacttctacttgcacactgtggtagctgtgtggagactggattgaaaaaggggcaatgacagaagcttaaattagtatcaaatatggcaatcctataattttaagggtccttgaaataagagtgtataatagttctcattatttccccaagaaatctgtgcacttggccttgtgtggaaagcgctatagttaccaagtggtgggggtgggaaggtgaattttcaacaacatttggaattactacactttaaaggtaaagctggcaggaattccatacacatcagatctgaaaatgtgtgtgtgtgtgtgtgtg

SEQ ID NO: 611535 - DNA, 546 bp, Homo sapiens
aatctattttcttgatttttaaaagtcaatgtactctcaaagaaacaagactattattcgtagattctgttatttgaaaatatttactggtcatttttaccttacaccaagtgatctccagctcatggaaaaatatgtaaagttgcccagcttcattaagcttaaactcttctgaaggagaaaagaagcaatggagtagggacattaaagcaggagtttggtgatatggctgagacttctacttgcacactgtggtagctgtgtggagactggattgaaaaargggcaatgacagaagcttaaattagtatcaaatatggcaatcctataattttaagggtccttgaaataagagtgtataatagttctcattatttccccaagaaatctgtgcacttggccttgtgtggaaagcgctatagttaccaagtggtgggggtgggaaggtgaattttcaacaacatttggaattactacactttaaaggtaaagctggcaggaattccatacacatcagatctgaaaatgtgtgtgtgtgtgtgtgtg

SEQ ID NO: 611536 - DNA, 445 bp, Homo sapiens
taaaacaaattaaacttaaacaatagaaccttttattttgagatgcaaaagcatgaatcaaagacatctgtaaagcttaaatgtattcagattgtaaagctaacccatgtaaaccaaactaggccaggaattagactatattagygccccagactcccccaagtgtcccttcctaaaagaagctcctctcaccctaagttacatgtataatttttttgctgtgcttcaaaaaggtatagcatgtatgcatctctgaacaacataccttagattttttttggcctgctttgataattactatgaaaacctctttctgtattattttgtgccacactccttttgttcaacatatgtttatgagtgacagccctgttgtgccagcgggttgtaatttattattttcacggctcaataaaattgaatggttaatatagatgagaatttt

SEQ ID NO: 611537 - DNA, 528 bp, Homo sapiens
gctaatataaaggtgatggaattcactatcaaaacttttcagagacttagaaaaaatatggaaaattagtgaaaatgtaacagaatgaggcttgaaatcaagataattaaactgcaaactttaagaaggcaggaaagatatcctttacttagtttgtcttgtccaactaatggttagttgaatgccatgcacataacgcatccctctgagtacttattgaataaatgtagaatgtcattctggaataaattgaggcaagaaactagagggatagcagtgtgaaaagtgagattaatttatttggtatagagtcagtaaatttaagtgggccatttgaaacaacaagcttaaaagaaaaccaaataagcattttcaatgcatagaaatgcaaccatttttctccttctgtactttatccattcaaacattgcttgaaaaaaaatataactttcagtcttgcttttttatctccaccaaactcagataattttggtcrttgatgacctaagctaattcctattttagaat

SEQ ID NO: 611538 - DNA, 177 bp, Homo sapiens
gtcacagtatttccacttccaggcctatacaaataaataaaatcagtrttatacacagaataggtacacacacacacacacacacacacacacacacacacacaagcgttcagatataaagatttcaactgtagcatcatttgtaataaacaatattggaaacaatgttggtatata

SEQ ID NO: 611539 - DNA, 637 bp, Homo sapiens
acttctccccaaaattaatctttgtaactagtgcatccaaagtaaaacccagtaaggtttgatttagatwttgacaagctaattctagaatttatgtaaactctaaaaatattaaaattcagttaataatttattgaggaaggaagaatatattacaggaaatattataagacttaattaatgcaatgtggtattaacaaagtaataaataatcaatgaaatggaataggtagactacagtaaggaaaatataagaacccatgatatgtaagaagctagtattatagatcagtggtgaaaaataaatttgccaataaatgagagtgagaaaactggctatacatatggaaaataattaaagagattctttaccttatataatatgtaacaatcaattccttggtgatcaatatttaaatgtaaacccaggtaaaaattacagaaaacccgacagtaaaacaaagaaaatggcttgcacatgtgctttataaaatgtaaaatataagtgtccaccatacatatttagaatcactttaacttatttttaacacaaaaatgcaaatgaaaatgttttatatgtacattattacttatacaacagattgaccaaaaacagtctgacaagaaagacttctgg

SEQ ID NO: 611540 - DNA, 637 bp, Homo sapiens
acttctccccaaaattaatctttgtaactagtgcatccaaagtaaaacccagtaaggtttgatttagatattgacaagctaattctagaatttatgtaaactctaaaaatattaaaattcagttaataatttattgaggaargaagaatatattacaggaaatattataagacttaattaatgcaatgtggtattaacaaagtaataaataatcaatgaaatggaataggtagactacagtaaggaaaatataagaacccatgatatgtaagaagctagtattatagatcagtggtgaaaaataaatttgccaataaatgagagtgagaaaactggctatacatatggaaaataattaaagagattctttaccttatataatatgtaacaatcaattccttggtgatcaatatttaaatgtaaacccaggtaaaaattacagaaaacccgacagtaaaacaaagaaaatggcttgcacatgtgctttataaaatgtaaaatataagtgtccaccatacatatttagaatcactttaacttatttttaacacaaaaatgcaaatgaaaatgttttatatgtacattattacttatacaacagattgaccaaaaacagtctgacaagaaagacttctgg

SEQ ID NO: 611541 - DNA, 380 bp, Homo sapiens
ttaaacaacagtagaatgtggtagattcatacagtggaatactacactttagaaaaacatagataactttatttagatatgttaatgtggcttactctcacaaacktaatatgcagtggtatgattaagtcacaaaaggatatgtacaatataattcagtttaaataaagttcaagaacacaaaacagcaagttggattgtttataaaatgtttactggacactaaatctataaagataataatagaaattattttaacacatccttcaattacctttcattcctccagaaatttgttgaaacctcttgaatgcctatgacctttctcatttcctccactgtttaatttccttttatactttgtttaaaactttgaatgg

SEQ ID NO: 611542 - DNA, 380 bp, Homo sapiens
ttaaacaacagtagaatgtggtagattcatacagtggaatactacactttagaaaaacatagataactttatttagatatgttaatgtggcttactctcacaaacgtaatatgcagtggtatgattaagtcacaaaaggatatgtacaatataattcagtttaaataaagttcaagaacacaaaacagcaagttggattgtttataaaakgtttactggacactaaatctataaagataataatagaaattattttaacacatccttcaattacctttcattcctccagaaatttgttgaaacctcttgaatgcctatgacctttctcatttcctccactgtttaatttccttttatactttgtttaaaactttgaatgg

SEQ ID NO: 611543 - DNA, 380 bp, Homo sapiens
ttaaacaacagtagaatgtggtagattcatacagtggaatactacactttagaaaaacatagataactttatttagatatgttaatgtggcttactctcacaaacgtaatatgcagtggtatgattaagtcacaaaaggatatgtacaatataattcagtttaaataaagttcaagaacacaaaacagcaagttggattgtttataaaatgtttactggacactaaatctataaagataataatagaaattattttaacacatccttcaattacctttcattcctccagaaatttgttgaaacctcttgaatgcctrtgacctttctcatttcctccactgtttaatttccttttatactttgtttaaaactttgaatgg

SEQ ID NO: 611544 - DNA, 414 bp, Homo sapiens
ttttctaaataagttcaaaaatattttgctttaaaatataagtagtgattaaatttctaagaattgagcaatagttkaatgttataaatttagttttcatgaatatttctctctccacatttcttcttctcaacttgctcatatcccttcaaatgacaaaatacttagaagtatttgagtcaagttagatatatttttgaagatattatttgcttatttatctatgagaggtcaacaacaacttccatgaatattaggaaagcaaatatcggtagctctattcacttcaatattgaattcacctatatctgaaatttaaatgtcagtgataagactgacagaaagtgacaatttctttaggtaacacagcactaagtggcaatactttaatattgtcactgttacatttttcag

SEQ ID NO: 611545 - DNA, 414 bp, Homo sapiens
ttttctaaataagttcaaaaatattttgctttaaaatataagtagtgattaaatttctaagaattgagcaatagtttaatgttataaatttagttttcatgaatatttctctctccacatttcttcttctcaacttgctcatatcccttcaaatgacaaaatacttagaagtatttgagtcaagttagatatatttttgaagatattatttgcttatttatctatgagaggtcaacaacaacttccatgaatattaggaaagcaaatrtcggtagctctattcacttcaatattgaattcacctatatctgaaatttaaatgtcagtgataagactgacagaaagtgacaatttctttaggtaacacagcactaagtggcaatactttaatattgtcactgttacatttttcag

SEQ ID NO: 611546 - DNA, 414 bp, Homo sapiens
ttttctaaataagttcaaaaatattttgctttaaaatataagtagtgattaaatttctaagaattgagcaatagtttaatgttataaatttagttttcatgaatatttctctctccacatttcttcttctcaacttgctcatatcccttcaaatgacaaaatacttagaagtatttgagtcaagttagatatatttttgaagatattatttgcttatttatctatgagaggtcaacaacaacttccatgaatattaggaaagcaaatatcggtagctctattcacttcaatattgaattcacctatatctgaaatttaaatgtcagtgataagactgacagaaagtgacaatttctttaggtaacacagcactaagtggcaayactttaatattgtcactgttacatttttcag

SEQ ID NO: 611547 - DNA, 603 bp, Homo sapiens
gatgatcacagtaaccttaggtatttcttaattctccataataaatatagcatctgagtctaatttcttctgggagatttattaacttttaagatagyatgtgtcacttacataatctaacaatgcattttgcatactaaaatgatgaaacattcttaatgaatttaaatagctactttatcagaaacaggagtcataggttgaatttttatgtgagtagtagagctaagaatatttgtaaaacagctctccatgatgggctccaacaggatgaagtaagaccacctatcaaggaagtaagatcaatcccaaaatgaactgtacatgaaattctgctctaagatctttttgctttttaacatgatttcagaaaaggctaatttttgtaatggactacaatacttgttttgctacataagctttcaggattttttttcttttatttttattttaaaattaatttttgagcagcattcttgactgcaagaaagcttctgtcagtttcccaaattactcaaataacatgtattttacactgaaaatcatgagctccttaactcaaagcttttccttgttgtttttgtaactatttaccatacaatt

SEQ ID NO: 611548 - DNA, 603 bp, Homo sapiens
gatgatcacagtaaccttaggtatttcttaattctccataataaatatagcatctgagtctaatttcttctgggagatttattaacttttaagatagtatgtgtcacttacataatctaacaatgcattttgcatactaaaatgatgaaacattcttaatgaatttaaatagctactttatcagaaacaggagtcataggttgaatttttatgtgrgtagtagagctaagaatatttgtaaaacagctctccatgatgggctccaacaggatgaagtaagaccacctatcaaggaagtaagatcaatcccaaaatgaactgtacatgaaattctgctctaagatctttttgctttttaacatgatttcagaaaaggctaatttttgtaatggactacaatacttgttttgctacataagctttcaggattttttttcttttatttttattttaaaattaatttttgagcagcattcttgactgcaagaaagcttctgtcagtttcccaaattactcaaataacatgtattttacactgaaaatcatgagctccttaactcaaagcttttccttgttgtttttgtaactatttaccatacaatt

SEQ ID NO: 611549 - DNA, 603 bp, Homo sapiens
gatgatcacagtaaccttaggtatttcttaattctccataataaatatagcatctgagtctaatttcttctgggagatttattaacttttaagatagtatgtgtcacttacataatctaacaatgcattttgcatactaaaatgatgaaacattcttaatgaatttaaatagctactttatcagaaacaggagtcataggttgaatttttatgtgagtagtagagctaagaatatttgtaaaacagctctccatgatgggctccaacaggatgaagtaagaccacctaycaaggaagtaagatcaatcccaaaatgaactgtacatgaaattctgctctaagatctttttgctttttaacatgatttcagaaaaggctaatttttgtaatggactacaatacttgttttgctacataagctttcaggattttttttcttttatttttattttaaaattaatttttgagcagcattcttgactgcaagaaagcttctgtcagtttcccaaattactcaaataacatgtattttacactgaaaatcatgagctccttaactcaaagcttttccttgttgtttttgtaactatttaccatacaatt

SEQ ID NO: 611550 - DNA, 603 bp, Homo sapiens
gatgatcacagtaaccttaggtatttcttaattctccataataaatatagcatctgagtctaatttcttctgggagatttattaacttttaagatagtatgtgtcacttacataatctaacaatgcattttgcatactaaaatgatgaaacattcttaatgaatttaaatagctactttatcagaaacaggagtcataggttgaatttttatgtgagtagtagagctaagaatatttgtaaaacagctctccatgatgggctccaacaggatgaagtaagaccacctatcaaggaagtaagatcartcccaaaatgaactgtacatgaaattctgctctaagatctttttgctttttaacatgatttcagaaaaggctaatttttgtaatggactacaatacttgttttgctacataagctttcaggattttttttcttttatttttattttaaaattaatttttgagcagcattcttgactgcaagaaagcttctgtcagtttcccaaattactcaaataacatgtattttacactgaaaatcatgagctccttaactcaaagcttttccttgttgtttttgtaactatttaccatacaatt

SEQ ID NO: 611551 - DNA, 635 bp, Homo sapiens
ttaccatacaattacttgtaaatgaaatgtataacataaatatgcgcttacataaagggaaatgtttaaatattttttaaacttctgaaaaaagataaaactctccgtttttaagaacattgtatctttcattttatccttctttctcctccaaatatattaataactatccttctatttgttacattcttttacttaaagggactaaagtataaatcaggtaattaatacacaaaactttattctgtcccttgcttgtagcactacttcattccagtttcctcagagtttattatataaatcagacagatttgtaaataagtattttacagtctacatttatttgattatgaaaatggaaacatagaataaaatgtgaacagataataagctttacttgtgtgtttctccatcttttcaagttgatcaggtatatggatggcattttaaataatgtgttaaatttagagaatacrttaaatagaaaagaaaattgtgggaaataggaaagcctttccattaagggtttagatataaaatgttctattcagttacaaactgaacctaaaatgagaggtttttttttgtttaactgaaagagctagagagttaaatttttaaaaaaggggggtttc

SEQ ID NO: 611552 - DNA, 635 bp, Homo sapiens
ttaccatacaattacttgtaaatgaaatgtataacataaatatgcgcttacataaagggaaatgtttaaatattttttaaacttctgaaaaaagataaaactctccgtttttaagaacattgtatctttcattttatccttctttctcctccaaatatattaataactatccttctatttgttacattcttttacttaaagggactaaagtataaatcaggtaattaatacacaaaactttattctgtcccttgcttgtagcactacttcattccagtttcctcagagtttattatataaatcagacagatttgtaaataagtattttacagtctacatttatttgattatgaaaatggaaacatagaataaaatgtgaacagataataagctttacttgtgtgtttctccatcttttcaagttgatcaggtatatggatggcattttaaataatgtgttaaatttagagaatacattaaatagaaaaraaaattgtgggaaataggaaagcctttccattaagggtttagatataaaatgttctattcagttacaaactgaacctaaaatgagaggtttttttttgtttaactgaaagagctagagagttaaatttttaaaaaaggggggtttc

SEQ ID NO: 611553 - DNA, 635 bp, Homo sapiens
ttaccatacaattacttgtaaatgaaatgtataacataaatatgcgcttacataaagggaaatgtttaaatattttttaaacttctgaaaaaagataaaactctccgtttttaagaacattgtatctttcattttatccttctttctcctccaaatatattaataactatccttctatttgttacattcttttacttaaagggactaaagtataaatcaggtaattaatacacaaaactttattctgtcccttgcttgtagcactacttcattccagtttcctcagagtttattatataaatcagacagatttgtaaataagtattttacagtctacatttatttgattatgaaaatggaaacatagaataaaatgtgaacagataataagctttacttgtgtgtttctccatcttttcaagttgatcaggtatatggatggcattttaaataatgtgttaaatttagagaatacattaaatagaaaagaaaattgtgggaaataggaaagcctttccattaagggtttagmtataaaatgttctattcagttacaaactgaacctaaaatgagaggtttttttttgtttaactgaaagagctagagagttaaatttttaaaaaaggggggtttc

SEQ ID NO: 611554 - DNA, 527 bp, Homo sapiens
gttacatgctcttcactattagcccctctctcccataaaaaagtgctgtgaatgytttggtacaagttttttatgtacatatactttcatttccctacaaattgattggcagtcatatgataggtgcatacgtcaaaatattttaaaaactgacaaggctttttccagagtcattgtactaatttcctttaccattagcagtgcatgtatgttggttgtcctctatagttttgccaacacttggcatggccagcctttttaactttagccattcttttttctttctttctttctttctttttttttttttttgagatgaagtttcactcttgttgcccaggctggagtgcaatgtgcaatggcacaatctcggctcactgcaatctacacctcctgggttcaaacagttctcctgcctcagcctcccaagtagctgggatataggcgcacatcaccatgcccagctaatttttgtatttttagtagagatggggtttccccatgttggtcaggctggtctcgatctc

SEQ ID NO: 611555 - DNA, 527 bp, Homo sapiens
gttacatgctcttcactattagcccctctctcccataaaaaagtgctgtgaatgttttggtacaagttttttatgtacatatactttcatttccctacaaattgattggcagtcatatgataggtgcatacgtcaaaatattttaaaaactgacaagsctttttccagagtcattgtactaatttcctttaccattagcagtgcatgtatgttggttgtcctctatagttttgccaacacttggcatggccagcctttttaactttagccattcttttttctttctttctttctttctttttttttttttttgagatgaagtttcactcttgttgcccaggctggagtgcaatgtgcaatggcacaatctcggctcactgcaatctacacctcctgggttcaaacagttctcctgcctcagcctcccaagtagctgggatataggcgcacatcaccatgcccagctaatttttgtatttttagtagagatggggtttccccatgttggtcaggctggtctcgatctc

SEQ ID NO: 611556 - DNA, 527 bp, Homo sapiens
gttacatgctcttcactattagcccctctctcccataaaaaagtgctgtgaatgttttggtacaagttttttatgtacatatactttcatttccctacaaattgattggcagtcatatgataggtgcatacgtcaaaatattttaaaaactgacaaggctttttccagagtcattgtactaatttccwttaccattagcagtgcatgtatgttggttgtcctctatagttttgccaacacttggcatggccagcctttttaactttagccattcttttttctttctttctttctttctttttttttttttttgagatgaagtttcactcttgttgcccaggctggagtgcaatgtgcaatggcacaatctcggctcactgcaatctacacctcctgggttcaaacagttctcctgcctcagcctcccaagtagctgggatataggcgcacatcaccatgcccagctaatttttgtatttttagtagagatggggtttccccatgttggtcaggctggtctcgatctc

SEQ ID NO: 611557 - DNA, 527 bp, Homo sapiens
gttacatgctcttcactattagcccctctctcccataaaaaagtgctgtgaatgttttggtacaagttttttatgtacatatactttcatttccctacaaattgattggcagtcatatgataggtgcatacgtcaaaatattttaaaaactgacaaggctttttccagagtcattgtactaatttcctttaccattagcagtgcatgtatgttggttgtcctctatagttttgccaacacttggcatgrccagcctttttaactttagccattcttttttctttctttctttctttctttttttttttttttgagatgaagtttcactcttgttgcccaggctggagtgcaatgtgcaatggcacaatctcggctcactgcaatctacacctcctgggttcaaacagttctcctgcctcagcctcccaagtagctgggatataggcgcacatcaccatgcccagctaatttttgtatttttagtagagatggggtttccccatgttggtcaggctggtctcgatctc

SEQ ID NO: 611558 - DNA, 424 bp, Homo sapiens
ttgcctacttttattagagttactacatttattatcaagttttgagagttcttatattttctggacacaacttttttgccagacatatattttgcaaatattgttctcagtagtgtcttatatttctatttgttttacagtgtttcctgaggaacatatgttttacattttgatgaactcgagttgtcaatttctactttgatgaaacmtggtgtttgtgtcatgtctaagtagtattgaggtcaaagacttttctatattttctcctatacgtaatttttcttcctttttttcactttgtttttacattttacatttaggcatatgatctgtactaaattaatttttgtatcatgagttacgtgttaaagttctactttttgcatatgagcatctaattgttccagcagaatttgttgaaggg

SEQ ID NO: 611559 - DNA, 591 bp, Homo sapiens
tactgtagccttataagctttggcattagattgtgctaatccttcaaaaatattcttatttttaagaattattttggctattttagactctttgcatttctwctgaagttttaaaattagtgtgtaaattcctataaacaatgcctaataatattttaattgggattgtattgaatctatatttagggataatcacattttaccatgtgaattttctaacccatattcatattacatctttccatttatttaagtcttctttaactttctgcagtgttttgagttttagtgtaccagactcacatcatttgatagattaattcctaattcttctacatttttcatgatattattaatagtacttttattttaattttttattgttcattgctggtatatggaaatattagtttaatatgttgctttttttcttttttatgttgctaactcacttattatagccagcagtgtttttgtagatttcagtggactttctacatagacatgccgtctataaataaaaccaatctacattttcctttcccatctgtaattcttttgtttatgttttttgtctattttacttggtag

SEQ ID NO: 611560 - DNA, 591 bp, Homo sapiens
tactgtagccttataagctttggcattagattgtgctaatccttcaaaaatattcttatttttaagaattattttggctattttagactctttgcatttctactgaagttttaaaattagtgtgtaaattcctataaacaatgcctaataatattttaattgggattgtattgaatctatatttagggataatcacattttaccatgtgaattttctaacccatattcatattacatctttccatttatttaagtcttctttaactttctgcagtgttttgagttttagtgtaccagactcacatcatttgatagattaattcctaattcttctacatttttcatgatattattaatagtacttttattttaattttttattgttcattgctsgtatatggaaatattagtttaatatgttgctttttttcttttttatgttgctaactcacttattatagccagcagtgtttttgtagatttcagtggactttctacatagacatgccgtctataaataaaaccaatctacattttcctttcccatctgtaattcttttgtttatgttttttgtctattttacttggtag

SEQ ID NO: 611561 - DNA, 632 bp, Homo sapiens
attttaattgggattgtattgaatctatatttagggataatcacattttaccatgtgaattttctaacccatattcatattacatctttccatttatttaagtcttctttaactttctgcagtgttttgagttttagtgtaccagactcacatcatttgatagattaattcctaattcttctacatttttcatgatattattaatagtacttttattttaattttttattgttcattgctggtatatggaaatattagtttaatatgttgctttttttcttttttatgttgctaactcacttattatagccagcagtgtttttgtagatttcagtggactttctacakagacatgccgtctataaataaaaccaatctacattttcctttcccatctgtaattcttttgtttatgttttttgtctattttacttggtagaacgtctagtggaatgttaaaacaaagtgctaagagttaatggactcatcttgttcctgaaatagggggaaataaactgatttttcttcattaagtatgatgccagctattgtttttacatagatatcttttattaggatattcttgaatttcttctagacagtaataacttagatcttgttttattgatcca

SEQ ID NO: 611562 - DNA, 487 bp, Homo sapiens
taatgtcaaagagaaccagagccagagggtaattaaagcagtaaagaaagattttattcagaaattatygcaacacaggaaaagagactttagtagagaaaggagctcaattccaaatacaagcacacatggaaatttatagcaaaagagcagtgtgagggggtcagtggatggaaaattactaagaggagacatcaaaagtaggggaactcttgctaaaccaaattaacaggattcttgctgaaggcagctcagggtgatcagatatcaagattctgtctatatggacttaaggattcttgttaaaagtgagctatggagactaggcaaggggcctaggtgaagatctagttgagaggagagctcaaaaatctgactaaagtttgatgaaggagagagtctttgccagcatttgtgttaattttttttaattagtaaaagtgaggcttatttgcattcttcaaggacttaccaattaataagctat

SEQ ID NO: 611563 - DNA, 552 bp, Homo sapiens
actgtgttatctgtttcataatcattaaaccatttcttgattatcatcttgtataaaatgttgctatcaagaagtctattatcaatataaacttcttatccttttaccttcatgctcaaataattaatattattttttattttaatttttgttcttagaaataaccgttacatgggtattactattctttgcctaagttctatgtttagaaaatttttagatgtttttaatctctcaatttctgttttttactcttatttttatactctatatctcttactatagttcgtaccacttctatttgattttatgtaccttcaaattttttttttctaaaaactattttctaaaaattatcttacttgtctcagattatctgattctctgattaattttgattttgttccarttgtttttcttcagggtaagtatttttcttttgggagtgagcattattgatgatttcttgttgtagtttattgatattaagatcttacaatacttccttttatcttcattttatctttgccattaagtccagctggtactggc

SEQ ID NO: 611564 - DNA, 552 bp, Homo sapiens
actgtgttatctgtttcataatcattaaaccatttcttgattatcatcttgtataaaatgttgctatcaagaagtctattatcaatataaacttcttatccttttaccttcatgctcaaataattaatattattttttattttaatttttgttcttagaaataaccgttacatgggtattactattctttgcctaagttctatgtttagaaaatttttagatgtttttaatctctcaatttctgttttttactcttatttttatactctatatctcttactatagttcgtaccacttctatttgattttatgtaccttcaaattttttttttctaaaaactattttctaaaaattatcttacttgtctcagattatctgattctctgattaattttgattttgttccagttgtttttcttcagggtaagtatttttcttttgsgagtgagcattattgatgatttcttgttgtagtttattgatattaagatcttacaatacttccttttatcttcattttatctttgccattaagtccagctggtactggc

SEQ ID NO: 611565 - DNA, 543 bp, Homo sapiens
aatctatatttaattgataattgctttataaaataatctgattacttttggtataaaggataacatattccactaatactgtgaagtttcagtgatataaacacttagaaatcatctgctctgttatggaaaaaaacatctagaagtatctttcagattgaaaaatgtttttaaggtgctggaataacrgtacctcttgcagatttgtctagcattacccaatgtttgtgattgctgagtaatattagtgaaataagtatgcaaatcttttaataactgaatagaatccttccctgaacaatttcccaggtgttattgctgttgctatcttattaaatattcaatgccatctattatatcctatacagagtcaaataataagcttacataaactaatatttaatataatactaataaatttaagatgatataaagcagaataaaataacatttcagaataaaaagactttgaagcttccttgtattacttgataagatttaggtacagtctcaagaaaacatttttttttccttcttctgcat

SEQ ID NO: 611566 - DNA, 543 bp, Homo sapiens
aatctatatttaattgataattgctttataaaataatctgattacttttggtataaaggataacatattccactaatactgtgaagtttcagtgatataaacacttagaaatcatctgctctgttatggaaaaaaacatctagaagtatctttcagattgaaaaatgtttttaaggtgctggaataacagtacctcttgcagatttgtctagcattacccaatgyttgtgattgctgagtaatattagtgaaataagtatgcaaatcttttaataactgaatagaatccttccctgaacaatttcccaggtgttattgctgttgctatcttattaaatattcaatgccatctattatatcctatacagagtcaaataataagcttacataaactaatatttaatataatactaataaatttaagatgatataaagcagaataaaataacatttcagaataaaaagactttgaagcttccttgtattacttgataagatttaggtacagtctcaagaaaacatttttttttccttcttctgcat

SEQ ID NO: 611567 - DNA, 543 bp, Homo sapiens
aatctatatttaattgataattgctttataaaataatctgattacttttggtataaaggataacatattccactaatactgtgaagtttcagtgatataaacacttagaaatcatctgctctgttatggaaaaaaacatctagaagtatctttcagattgaaaaatgtttttaaggtgctggaataacagtacctcttgcagatttgtctagcattacccaatgtttgtgattgctgagtaatattagtgaaataagtatgcaaatcttttaataactgaatagaatccttccctgaacaatttcccaggtgttattgctgttgctatcttattaaatattcaatgccatctattatatcctatacagagtcaaataataagcttacataaactaatatttaatataatactaataaatttaagatgatataaagcagaataaaataacatttcagaataaaaagactttgaagcttccytgtattacttgataagatttaggtacagtctcaagaaaacatttttttttccttcttctgcat

SEQ ID NO: 611568 - DNA, 571 bp, Homo sapiens
aggtacagtctcaagaaaacatttttttttccttcttmtgcatcagctcatctacaaaccaatttatttctgaaataggccccaggggcaggctggttggtgactgtagtgggggatatctgactggccactcaaggaaattgctatggacttttaatcttattttgattaagttctgtgcagattgtgtctgccaggctagcactaagattactgtttctgagatcttttggctgctatcagactggactcaattttttttctacattctcaaggttaagttgaaacagtattacccattatttataaatggtaagtgtttaggttttgccttgtgttacaaactagaatgttaataaaaatactatatttaacaagttgcaagtttatgaaagtcattgtttttgaaagaaagttttagataaaaaaaaaaacaaaagaaagcaaaagaaaaatcctttaaggggaaacaatgtctttatgtgtttaaagtttcaaaaggtaatttataaagaaatcaaatatagttaaaaataactaatcaaagatgaatatttagtgtagaggaaca

SEQ ID NO: 611569 - DNA, 568 bp, Homo sapiens
caaataataagcttacataaactaatatttaatataatactaataaatttaagatgatataaagcagaataaaataacatttcagaataaaaagactttgaagcttccttgtattacttgataagatttaggtacagtctcaagaaaacatttttttttccttcttctgcatcagctcatctacaaaccaatttatttctgaaataggccccaggggcaggctggttggtgactgtagtgggggatatctgactggccactcaaggaaattgctatggacttttaatcttattttgattaagttctgtgcagattgtgtctgccaggctagcactaagattactgtttctgagatcttttggctgctatcagactggactcaattttttttctacattctcaaggttaagttgaaacagtattacccattatttataaatggtaagtgtttaggttttgccttgtgttacaaactagaatgttaayaaaaatactatatttaacaagttgcaagtttatgaaagtcattgtttttgaaagaaagttttagataaaaaaaaaaacaaaa

SEQ ID NO: 611570 - DNA, 550 bp, Homo sapiens
ataaaaatactatatttaacaagttgcaagtttatgaaagtcattgtttttgaaagaaasttttagataaaaaaaaaaacaaaagaaagcaaaagaaaaatcctttaaggggaaacaatgtctttatgtgtttaaagtttcaaaaggtaatttataaagaaatcaaatatagttaaaaataactaatcaaagatgaatatttagtgtagaggaacatggatatggataaactgtagaatattttatttatctttttctttcagcaaagatctaaccaaaattagagaaatgatgtgttttattctagaaccatcacaatacaaacaataatatgttgtttttcatcttgtattggataaacactattaatcccaataatccattcctctttgcttcttcaattaaaatcccgtgtattatataaatacctccctctaccctctgcagtgtaggagaatcagggaaatctcatcccatctcccgaaacagagatgtatcctgtatgtaccttgccaatgatggcaacttcttttcctttgtcgagatataa

SEQ ID NO: 611571 - DNA, 584 bp, Homo sapiens
acaaaccaatttatttctgaaataggccccaggggcaggctggttggtgactgtagtgggggatatctgactggccactcaaggaaattgctatggacttttaatcttattttgattaagttctgtgcagattgtgtctgccaggctagcactaagattactgtttctgagatcttttggctgctatcagactggactcaattttttttctacattctcaaggttaagttgaaacagtattacccattatttataaatggtaagtgtttaggttttgccttgtgttacaaactagaatgttaataaaaatactatatttaacaagttgcaagtttatgaaagtcattgtttttgaaagaaagttttagataaaaaaaaaaacaaaagaaagcaaaagaaaaatcctttraggggaaacaatgtctttatgtgtttaaagtttcaaaaggtaatttataaagaaatcaaatatagttaaaaataactaatcaaagatgaatatttagtgtagaggaacatggatatggataaactgtagaatattttatttatctttttctttcagcaaagatctaaccaaaatt

SEQ ID NO: 611572 - DNA, 542 bp, Homo sapiens
gaatattgttctggaggggtggatagatagatgataaatagacagatgatagatagatagatagatagatagatagatagatagatagatatacatttatacaccacatttactttatccatttgttgttagatgagtatttaggcagattccatatcacggctattttgaatgatgcttcaatatccctgggtgcagatgtctctttgtcatactaatttcattttttttttattacgtacgcagtagtgggattgctgggtaatataatagttctcttttttattttttgtggaaactccatrctgcttttcataacagctatactattttatattcccaccaacagtgtataactttcctctttctccacattatcgtttccatttgttatattttgtcttcttgataatatccatcatttaaactggggtaaggtaatagctcattgtgggtttgttttgcatttttctgaggcttaatgatgttgagcatttctttatatattttttggccatttgtatgtcttcttttgtccattt

SEQ ID NO: 611573 - DNA, 574 bp, Homo sapiens
tgtttgtgagtagatttttctcttcccaccacctggaggctaaaatgtaaaccagagacccaagaatagccactcattccttgcatttttaaccttgcaaggtaagaagtaggcagagagtctgaaattattcctgtcggatggatagatttttggaatccaatggtaaagtgggaagtgacaagctaaagcagagcccagcagcattccagaaaatgcctgtgcatgctttgctggcagtggccagyggtcatgactgacaggacaatagccacatgaaaagcagaacttcctttttctgatattggttctgacttgctctctgattcctgcctgagcctggttcacctacttttttttcaattctaagagctgcgttgtgcttttccaacacattcatttttgcttgctttaaattccaagtaatttctattgtctttaaacaactgcctacctaaaataattattaaatatgtagctaaaacactaaattaaataaacttacattgttttccttgctgtaagaattctctaagcctttcttattttaatatgcatcatgaacctccagttg

SEQ ID NO: 611574 - DNA, 574 bp, Homo sapiens
tgtttgtgagtagatttttctcttcccaccacctggaggctaaaatgtaaaccagagacccaagaatagccactcattccttgcatttttaaccttgcaaggtaagaagtaggcagagagtctgaaattattcctgtcggatggatagatttttggaatccaatggtaaagtgggaagtgacaagctaaagcagagcccagcagcattccagaaaatgcctgtgcatgctttgctggcagtggccagcggtcatgactgacaggacaatagccacatgaaaagcagaacttcctttttctgatattggttctgacttgctctctgattcctgcctgagcctggttcacctacttttttttcaattctaagagctgcgttgtgcttttccaacacattcatttttgcttgctttaaattccaagtawtttctattgtctttaaacaactgcctacctaaaataattattaaatatgtagctaaaacactaaattaaataaacttacattgttttccttgctgtaagaattctctaagcctttcttattttaatatgcatcatgaacctccagttg

SEQ ID NO: 611575 - DNA, 443 bp, Homo sapiens
acctgttggaatcttaacatttagaacagatatattgatcagtgtataatttttggattatcaaagatgggaataaaattgagctataatatataaaataagaggatttatatatgtttgtttttttactccccatctcacctgctacttctttatggatcacagttatcccacttgatggaatttttctcctttcatccattacttttttatttaaagtattccctctcctaggatgtaagtttctatagactraaatgttgttatttaatggtaataagccttattttcaggttgctttacagaattttggctttgtcttttgttttcttcactgtacttttcttactccactcagaatttgttgacctgcttaaatctgcttatatctgtcttcaatcagtactaaaaacattctctattatttccttagttattgcctt

SEQ ID NO: 611576 - DNA, 488 bp, Homo sapiens
acaacaaaacttaaaaccaaaaaagtactggaagtctcagaagtatttagcagttattcttgctccttcaaatgaaaagatgctttatcgtatcctctatggagagaattctgactatttatcaaagaccttacatttattcaccttttgccctaacaatttcataacttaaaaatacatacaacaatttacaatatagcattttttgtaaagggaaataatcagaaagaatctaagtgttcaacaatagggcayttgttgaattatgatacaatcactcaataaggtcttcatagagcccattaaaatgatgttattgatatctatttattaataggagaaatcatttagaatttttggttaagacctttaactaagcacaaagtctatgaaataatgtgcacaacattccatattttcataaggggaatgacttttaaaactaccctgcaatcgtctcattttacacaaatgtctaggcaggtttg

SEQ ID NO: 611577 - DNA, 488 bp, Homo sapiens
acaacaaaacttaaaaccaaaaaagtactggaagtctcagaagtatttagcagttattcttgctccttcaaatgaaaagatgctttatcgtatcctctatggagagaattctgactatttatcaaagaccttacatttattcaccttttgccctaacaatttcataacttaaaaatacatacaacaatttacaatatagcattttttgtaaagggaaataatcagaaagaatctaagtgttcaacaatagggcacttgttgaattatgatacaatcactcaataaggtcttcatagagcccattaaaatgatgttattgatatctatttattaataggagaaatcatttagaatttttggttaagacctttarctaagcacaaagtctatgaaataatgtgcacaacattccatattttcataaggggaatgacttttaaaactaccctgcaatcgtctcattttacacaaatgtctaggcaggtttg

SEQ ID NO: 611578 - DNA, 551 bp, Homo sapiens
taggcacccccttcaacattgcattgtcacttggaaatagaaaattagaattttggtcataaactattagactataataagaatataatgagtttaataattatgtcaccagccaatctatgaggcccctcctatcttatagaagggaaagttaatacaaagagagattacagagcttaaccaagatcaccctgtgaatgtagggcagagtaggtaagaaatgctacaaccatttctgtcctttcctcccaagatattttcctccaaatgcagtgtaatgcaaatgtagttcaatgtaatataatatgatgcaatacaatgtatgtgatgtgatgcgatgtaatgtaatatattgtaatrtgacatgatgtaaatattcatgtaaatcacctagaacagtgcttgtcatacagcaggtgctaaatcaatgttaatgctttcaggtccaaaaaaataagtccagtatttcccactctgcttggttttataagggaaaaaaatacagcttgaggatgagaaagaaatgcacttgaattttgggaaaacaggca

SEQ ID NO: 611579 - DNA, 695 bp, Homo sapiens
taggtgctctcttttctcgaactccttgacctcaagtgatccgccaaagtgctgatattacaggcttgagccaccgtgcctgtgtgctcccttttcttttttttctctttttctaaattgagaaattggactcttcgttgtttgcctttccttcttattcatttcaactgcagttcaaaatactgcataatgaatgaatattgagatagcccttgcattggttatgacatttgcttccaaaataagaattttcacattctgattgtatcacagatttttatttttatctgggaaattattgaggctgacactgccttgatttggcaggagcatggagttctctttggccccaataaaattgcaatagggkttgggcccagctcagatgttccttctttcaaatcacttttgaggtcacatagtagaatagagcaattttggtgactgtaagtttgggtgacttcccaaagttcccgaagttgggtgacttcccaactttggtgactgtgacctctaggaaaatatagacattatgtggcaatacagtttactggtactgcatatatatagtctgtgtatgacacacacatgtacaacaagtttcatgaaaaaatacttagatctactatctgcaatgccctctgatattttcatttaatgttttatttttctaaaaatggtcaagacccagggca

SEQ ID NO: 611580 - DNA, 636 bp, Homo sapiens
tgtatgacacacacatgtacaacaagtttcatgaaaaaatacttagatctactatctgcaatgccctctgatattttcatttaatgttttatttttctaaaaatggtcaagacccagggcataaactttatgatctgctagttcatcatgactcttgaggtctgcaaaaaacaaaacaaaaaaaaacaactggcttcagagccatctaccactaactagctgagttaacttgggcaaataatttaccaagtagccaggattaaatcatatcctcctagatggcctggatgatctatgaataattttttaaactggggatgggtattttgtttttgttttatgaaagcagtgttcagggtctacctaaatgatcaatgaggcaaacggaatttgcctttctctaaagttgctgatgggaattgagggtatttgctcagcttgstgctcagtgatttgcgtattagtaatgtgaggattcgtgtttttgttcatctttcccacctgtttctacccttcagccattcattttcccatacaattgatcaactacccggagattgaaaaacaggctgtgtttagaaaaagagaaattttattacctcagaaaaatatgtaaagcaaaacagatggttaatg

SEQ ID NO: 611581 - DNA, 574 bp, Homo sapiens
gtgtccagtagtccccaaaagatcagatcatttcccttttcccaatgcacagttaccttgggaaatgacaggaggcatcacactacctgacttcaaaacatactataaagctatagtaactgaaacagcatggtcataaatacagacatatggataatgaaacagaatagacaacccaaaaataaatcatgtatctatagccaactgatttttgacaaaggtgtgaagaatacacattgggaaaagcacagtttcttcaatatatgatgttakaaaaactgaatatgtgtatgcaaaagaataactagatctctatctcttaccacatacaaaactctgctcaaaagaaattaacaacttgactgtaagacctgaaactatgaaaatactagacaaagccataggggaaatgctttatgacattgatctggctaaagattaattggataagaccttaaaagcatagacaacaaaagcaaaaatagacaaatggatttacataaaactaaattgcatctgcgcagcagaggaaacaatcaacagagcaaagagacaacctacaggatgggagaaa

SEQ ID NO: 611582 - DNA, 574 bp, Homo sapiens
gtgtccagtagtccccaaaagatcagatcatttcccttttcccaatgcacagttaccttgggaaatgacaggaggcatcacactacctgacttcaaaacatactataaagctatagtaactgaaacagcatggtcataaatacagacatatggataatgaaacagaatagacaacccaaaaataaatcatgtatctatagccaactgatttttgacaaaggtgtgaagaatacacattgggaaaagcacagtttcttcaatatatgatgttataaaaactgaatatgtgtatgcaaaagaataactagatctctatctcttaccacatacaaaactcwgctcaaaagaaattaacaacttgactgtaagacctgaaactatgaaaatactagacaaagccataggggaaatgctttatgacattgatctggctaaagattaattggataagaccttaaaagcatagacaacaaaagcaaaaatagacaaatggatttacataaaactaaattgcatctgcgcagcagaggaaacaatcaacagagcaaagagacaacctacaggatgggagaaa

SEQ ID NO: 611583 - DNA, 574 bp, Homo sapiens
gtgtccagtagtccccaaaagatcagatcatttcccttttcccaatgcacagttaccttgggaaatgacaggaggcatcacactacctgacttcaaaacatactataaagctatagtaactgaaacagcatggtcataaatacagacatatggataatgaaacagaatagacaacccaaaaataaatcatgtatctatagccaactgatttttgacaaaggtgtgaagaatacacattgggaaaagcacagtttcttcaatatatgatgttataaaaactgaatatgtgtatgcaaaagaataactagatctctatctcttaccacatacaaaactctgctcaaaagaaattaacaacttgactgtaagacctgaaactatgaaaatactagacaaagccayaggggaaatgctttatgacattgatctggctaaagattaattggataagaccttaaaagcatagacaacaaaagcaaaaatagacaaatggatttacataaaactaaattgcatctgcgcagcagaggaaacaatcaacagagcaaagagacaacctacaggatgggagaaa

SEQ ID NO: 611584 - DNA, 527 bp, Homo sapiens
ttaattttcttcccttagtgacttgtttgaccaatagaaggcagtgaaagtgagattctgggattttcataggctagtttgggaagcttatgaagtaaagcagcttccgccttggtctcttagaacgtttgctcgcacggtgcttgctttcagaacctgctgccttgctgtgagctgtccaagtgatgaccacctacaggtgttcagacctaacaaacaaacggagaatgcaggatttatttcaaaaaatgctacggatacaactaggctatttgttaaaaaaattaaaagtaaaagcagatcctcttctttcactttaccacaatataaatggcaggtaaattagagatttaaatgtagtacttagaatttagaagaaataactacatgaaattttcctcatttacgcmtggaaagtacttttgtgtgtaagaataatggaagaataacgcaaagcaaaatatctgtcaattttgaaaacaaaaattattttaaacctattttttaatggacaaataataattgta

SEQ ID NO: 611585 - DNA, 569 bp, Homo sapiens
tgaaacttttacatgagacagtggaagatctcaatttacctactgttgaaggataccaacagtaatagaatgtcttatattgtatttaccatgtgtcaatctgtgttctaagaattttatgaaaacttatttaatagtagcaatattatgagacagggactatcttcctcatttacaagtaagaaaattgaggcatagacaggttaagatattttccaaagatcacacagttgatgggtgttagagctgggattacaactcagacttggttagtctaaacatgaagctatacttcctttcatagtactaactcaaagatgcactgtgagcctgaaatgaacaaagcatttaatacgtagcatggtgtctgtcaacattaatacataatacatattacattaatacatattaactagtgctttatcatcagtacattctcatattcctcagagccttttctatctccaaggaaagtgtcccttttcatcttggtcaatttaaaacayttatgactgtctgtttatcttgggctgatgccaagtcctcagtctagctggccttagtcctga

SEQ ID NO: 611586 - DNA, 580 bp, Homo sapiens
tagctaacatttacagaacatttaccttaaaccagggacttttctgtgttatcacatttaaatcaataactctatgaggctattattactactactaytattattattattattatttcacttttacaaatttgaaaacaggcacggaaagtttaagttcataaagagcaaaatatcaatttaagtcacatttatctggtgccaaagattatactattagccactatatgacatgactccccagattaaaaccaagccatcttattcatggtaataagacctattgatgagctatataaccaaggaatctgcctgctgaaagggaggtcagaggtcatttggttcagtaattttcactttgggggacacatactcttgctgatctccagagacttctcagtacatagaataatggttttaggaaaataattgtctagatcctcaatttccacagttctcttttctaaactcttcttatctttaagatgtcacctagtgcataatcttgtttcccatgtaacaaatgaaaactaaatggtaatataattgatgttgattttgacttactttagtaataagt

SEQ ID NO: 611587 - DNA, 396 bp, Homo sapiens
aaggaaattggggtattgttaggaygtgaaatggatgctggtcagaaaaaacaaaacaaaccaaaccaaattatccctacactaaacttaccaattgccttttcttctctttaccttgtaaacctgtcagtgcccagtcactgtagacaacctcaccggcaacatgctgcccacacctagaataggagcccatggggcagaataatggagaccgtcccattccttacagtttgtataatgcttgctcaagtatattgaactctgccagtcctggaatcaaaacattttagtcttagaacaagaactgagaggttttcatactgactttcactcattctccattctccttaattctcctcaaatgcatagaaatcctgtgtttcatgtgttcattca

SEQ ID NO: 611588 - DNA, 393 bp, Homo sapiens
ttaaaaatgaaattagtttgttaataggtctattttaaccaccacaaatcattgaggtagaaaggagttgaggataggacagacaggtaagaatgttaacaagccaacttaaggaccatcagagctggccccatgggtctccccaagtgatagctcccactatgacacacagatgggtccattgtgtggaccaatagcaccatagtggccactcctttcactatctgtmttgcctctgaatcctcagaacaatcctgggaagcatataaagtaatcctcattttacatctaacaaaaacagagaagttaaataccttgcctaaggttacacagcatgttgcagagtgggaatttgcacaaaagtcatccggttccaatacaatgtctttctgc

SEQ ID NO: 611589 - DNA, 377 bp, Homo sapiens
atcttttattattctactataaagcttcaagatgggcagagagcttataatttcctaaccttatttaaccaaaaaatgctgcttttctctccccagccttaytattttttaaattatttttttatttttttgagacagagtttcattctgttggtccggctggagtgcagtggcatgatcatggctcactgcagcctcgacttcccaggctcaggtgatcctcccaccccagcctcccgagtaactgggactagggcacgtgccaccatgcccagctaatttctgtattttttctggtggagatggggtctcgccatattgctcaggcttgcctcctactcttggggcttaagcgatccgcccactttggacttcca

SEQ ID NO: 611590 - DNA, 606 bp, Homo sapiens
gcagatgaagttgggaggtggagaagaggtgtgtttgtactggagagagaggtagactacagggtcaagaagtcagagctggccagaagcaggtgcccatggtgctggagtacaggggcaggattcttgtcccttccagcagagagagggaatattcctaagaataaaatcagaggtatacaaacaggagcaacagcatgggtaatccactaattcctctgcaacacaggtaacaccggtctcatctaaaagctgatactcaggtcttttgcaagtaaggtctcttattgacattttacaactttatgagacaagttgcgttttttctttaggacacttactggtatttttaattacacatatatttgcgattatttatttcatgcttatctctccaattaaactacaggctccatgagggcaggcatcatatttgtttactttatgttttgcatgtagtaggcactaaacaacaattgcctgttgaataaataaaagtagtgtcaccctttcttacaggtgacaaacctgtatcaaaagtttttttggccaasttcaccttgctaataagtggtaggtctgggtctttacaggtgaccgaagctt

SEQ ID NO: 611591 - DNA, 587 bp, Homo sapiens
ggtactaagaacctttggacagaaactcaagaaattggcattagtagttgcctctaaggaggagaactggttaggcaggtgcaagagtgggcgtagaagggcaacacccactttcactgcatatccttttgtaccttttgattttggcactgtaggcattaattatctacacaaaagttttaatttaaaaaattcaatcctcacaccctgttatttctcctacatcatcttttagattatttgtttacattatttgacatttaaacattgacttttggccaggcacagtggctcgtgcctgtaatcccagccctttgggaggctgaagcaggaggattgttgagcccagaagttcaaggctgcagtgagctatgatcatgccactgcacttcagcctaggtgacagagtgagaccctgtctctaaaaacaaacaaacagagaagttgcattttttccctaaaaagtaagttggagtcatgtaaaatttgataggcctctaacggctgatttttctttaaagtattaaacwtaaaaaatactcaaaatctaaagatacaacattattagacaattaacattatttact

SEQ ID NO: 611592 - DNA, 670 bp, Homo sapiens
tgacaatgtataggcataactcttagaaaaatagatcatgtaaacactgtcagattatttccccacactttctttttcttgccagcaccattataaaattatagagggcttccatatatcgggacctgcatcatgcaaaaatggttggggtggagtgggagtagaggttccaaacttctagtggctttatggagaaagcctcactgtccctattacctgaactcttacctctgaggtggttgggttttgtttgtttgttygtttgtttttggttttggttttttcgagacatggtctcactctgtaacccaggctggagtgcaatggcacaatctcggctcactgcaacctctacctcccaggttcaagtgattctcccaccttagtctcctgagtagctgggactagaggtgcacgccaccacacccgggtaatttttggttttgtttttgtgtttttatacagacaggtttcgccatattgcccaggctggtctcaaactcgtgaactcaagtgatctgtctgcctcaacctcccaaagtgctgggattacaggcgtgagccaccatgtccagcctcaagatagttgttacacgcttctttattttgcccttcacctactttctcctctgaattatctttcctcagctccttcttctcatgcatttac

SEQ ID NO: 611593 - DNA, 463 bp, Homo sapiens
acttttttctgaattaaaaacagggtccataatacacaactagcactagtcactgactagtagtaggtgctaatactgtctagcagagagacagctatgaatcaaaccatcactaaatactcacaaactaagtgctgtaaaggaaaaggactgggtaccatgagcatgtataataacgtaaatcccatatgtctgggggaataaaggaagacttccctggagaggtgacttctgagctgagaattgaaagatgagtaggtattaatcagragtggagagaaattaccaaactgagccgagcatatgagcaaagacacaaggtgggagggaatttagcatattggaggaaggaagagaaaaatctatgtgctacagctggaatgtcagtgatattgttaaccttgttttaaagctgagggtcagctcctggctgagagccctgacacaggtaagggctccataa

SEQ ID NO: 611594 - DNA, 463 bp, Homo sapiens
acttttttctgaattaaaaacagggtccataatacacaactagcactagtcactgactagtagtaggtgctaatactgtctagcagagagacagctatgaatcaaaccatcactaaatactcacaaactaagtgctgtaaaggaaaaggactgggtaccatgagcatgtataataacgtaaatcccatatgtctgggggaataaaggaagacttccctggagaggtgacttctgagctgagaattgaaagatgagtaggtattaatcagaagtggagagaaattaccaaactgagccgagcatatgagcaaagacacaaggtgggagggaatttagcatrttggaggaaggaagagaaaaatctatgtgctacagctggaatgtcagtgatattgttaaccttgttttaaagctgagggtcagctcctggctgagagccctgacacaggtaagggctccataa

SEQ ID NO: 611595 - DNA, 583 bp, Homo sapiens
cattgggttcttctcacaacatgtggggattatgggaactaaaattcaagatgatattcgggtggggacacaaccaaaccatatcattatcctttcagttgtatccttcctattgtgacttaatgtttcttgaattttataatattgtctgccttattgcaatagtgttcagatcctcatcagaagtggtcattgacgggtaagttggagatcagggaataggtttggcattgtcagacaagactaatgaatatcaattgataaagaatgggttgttaatattatgggggatagtctaaagcatattacattactgtataatgctgtattctatataattgtatattactttacaatattctagaaatatggtgaaactaatacatgctttaaaagaaattatatttttattgccttttgaaagtttacatttaatttttattttactttattttgcgttttgcttttamaagattattgatttgctatagcccaagaggtagtaggtgaaaagcttaaagtagttaataatctgagattatttttcctcccttctgtttttctttttttttttttttttttt

SEQ ID NO: 611596 - DNA, 395 bp, Homo sapiens
  misc_feature 307: n = A,T,C or G
gtgagactctgtattaataaacaaacaaacaaacaaaagctgcccgtgaaagggaaaaggatcaataaatgggtattccaaaaagtcaaaagtcacacaaatatcaagccaaaataaactggtttcctgactggaaatcgamcccaggctatggcagcaaaacacagaactttaagcactgaactgcaaggtagagcagactttattgtgcatcctggaagggatccagagcaggcagtttgagcttatgaagaattttaactttgtttcgggtcaaattttgctctttaatttagttaagagaatnttttttccctacacaacacacataatattgtcaagagaattttaagggtagccatgacactattatgtgtgtttgttttaatttgatc

SEQ ID NO: 611597 - DNA, 462 bp, Homo sapiens
gacagaacctgctgtgtgcccaacttgctgatccctccatccttctagacaaaggcttcataagccagggaccttgggtttgctcacaaggcagcccctcacctagtaggcattagttcattatgtatatgtatatgtagtcctcaggttgtattccttaaatatatataatttaaggatatgtattatatatatatataaatatatatgtaattccttaaatatataattttaatacaattttttttttttttgagacagactctcactctgtctcccaggctggagtgcagtggcaccatcttgrctcactgcaagctccacctcccaggttcacgccattctcctgcctcagcctcccaagtacctgggactaccggcgcccgccaccacgccaggctaattttttttttttttgtatttttagtagagatggggtttcaccgtgttagccaggatggt

SEQ ID NO: 611598 - DNA, 574 bp, Homo sapiens
acataacataagacttacccacttaacaaactcttaagtgtacagtgcagtattgttaattacatgtacattgttttatagcagatctctagggcttttttaaatcacgtgtgactagaattctatattcgttaaacagcaacctcccattcccctctccctgcagyccctggaaaccaccatcctattttctgtttctatgagttcagctactttagataacctcatataagtggtaaccatgcagtatttgtcctttcgtgattgtcttcacatagcataatgttttcaaggttcatccgtgttggagcatatgacagaatttccttcttttttagggtgggataatagtatatggtatatgtatacattttctttttttatatatatatactttaagttctggggtacatgtgcagaatgtgcagttttgttacatagtatacacgtggtgtggtggttggctgcacccatcaacctgtcacctaccttaggtatttctcctaatgctatccctcccctagccctccatcccccgacaggccctggtgtgtgatgttcccctccctgtgtc

SEQ ID NO: 611599 - DNA, 482 bp, Homo sapiens
  misc_feature 1, 2, 3, 4: n = A,T,C or G
nnnncctatttcatatccctttcaatttccaagtctcccactggcctcttgcctctgtgtctgccaccacttaaatccygcccactctttttcctattccttactgattgccctaggaaccctaatttaatgaggcaccctctgtgacatcactaggcttacaacaagttatgataattctcattttatggatgaagaaacagaactttggaggtcagttacaagcccatctagatagaaagttacagagcgcatgagaatttattccaagcctaaatgattccaagaacaccaggagtctttgcctcaacctaacactacttccatcacttcactctgcctccctggaagtaaccaggagggtgtttactgtgggctgccaaggggaaaaggaagcatgaaccaaatgggaggagggacagcaaagaggacaggcaaacaaccacaggtagatgagctatgattttcaagtaaaaaggact

SEQ ID NO: 611600 - DNA, 416 bp, Homo sapiens
ctgaactagaaacaacccaaaggtccatcaactggcgaatagatcaataaattgcagttcgaccatatgttggaatactaggtgcagggaaaagaaacctacgactgatgtccacaatgacatgaattaatttcaaaagcattctgtaaagtgarggaagcagactccaatggctaaataccaggtgattctgtttaatgacaacctggaaaaagccaaactgcaggcacagaaatgaaatcagtggttgccaggggctagggaacggggaggggatccactgcaaaggggcacaggcaactttctggggctagagaaatgttcaatatctttttgttgttgttgtgtctagagatggggtcttgccatgttgccgaggctggtctcgaactcctgggctcaagtgcaggcaggag

SEQ ID NO: 611601 - DNA, 494 bp, Homo sapiens
cagtgagctgagatcatgccactggccactaactccagcttgagtgacaagagtgaaactccatcttgggggaaaattaaaaaaaaaaaagaacttggagaaggagaagttgatctgattgctcaggtcaygtaccaatcatggctgagctggaacctatcactcccttccttccccctttccacctcccgatgccagcagagcctgcctctggctctcacgcatcattctgtgctggtcattgttaaattagagtagaacttaagtaccataaaatctcaagtgcacagtttggtggatttttgcttaggtatacactcacagaacacccacctagatcaggatgtagaacctttctagcatcttagaagggatccttcataatggaccccttctagtcaataccatccccctcccaagggaaacaattattctcatttctatgaccatagtttaaagttgcctagttttgaacttcatattcatggactcgt

SEQ ID NO: 611602 - DNA, 626 bp, Homo sapiens
tcaaaaaaaaaaaaaaaaagaaaagaaaaagaagttaggtcattgtagaccagttkctacagactacctcagagagatacagtgccctcagaaagcacattcttttgggtttctaatacaatagaatcaatgtattatttttttttttgtttttagtttttagatacaagattttgctacattgcccaggctggactcaaagtcctgggctcaagggatcctccagccttccccatacctgggactacaggtgcacaccaccaagtagtggcacaccgtttggtgcccgaccaagaaccaatatattattgaagaaataaaggattcgttgacatgcatcacagacacacatcaaaaatttgtacacttagatcatttttttaaaatctttttgtcgtactcctctgcctttaactataatttttaaaaatactaaataaatgatatgcttgggaagaaaagcaaatactaccaaactatgtaaggcaaatgatgaaaatggctccatcaccttccttgttcctgtctcctcacctaccacatcctcatgctcatgagctggcccatagctctccagcacacctctgtgtgtaaatgagcttgcatagattttttttaaatgatac

SEQ ID NO: 611603 - DNA, 630 bp, Homo sapiens
actctgccaatagtcctctatctttaacagaggaagaagggttgaaaagccaatagcagagggttttgatactatatgtccctggcttaaccccatttgataacttcccactttgtatgaccttgagtatgttgttttacttctccaagcccagtttcctcatctcagaaatagggaagtaacattgcttaattcacaggggcttttttagtgacaagtgaatgttgatgtatttgtgctgctcttagcactgtgccaggaacgtaatgactgcattcaataaatgatacacattcattaattctttccagctgaaataaatctattttggcccatgatggcccattaggtcttgtaacatgaggcctgaccccaataccctccttttgtgtaacttgtactgtatcttctaagtaaccaaggatgcagcaagctcctctgccctgccctggtcatcttcgcagagatcatgactctctcactgtctggcccacagtatcactgcccctctggagcactggaatgatcctgctaacacctaggaagatccgtctgtaaagtatgctagacttacygcatttgtactttcaacctttgagagtttgtatgcatctatgtgtgctgctacat

SEQ ID NO: 611604 - DNA, 576 bp, Homo sapiens
tgccaccatgcccaattaatttttgtattttttgtaaagacagggctttgccatgttgcctaggctggacttcatctcctaagatcaaatggtctgcccacctcggcttcccaaagtgctgggattacatgcatgagccactatgtctgccccattgtctcattttgacttttgatcttcrcagccctgagatgaattaagacagatactaatatgcctattttacataagaggaaattggagtttctgtagatgacagaattgctccaaatcacatagcatgcaaatgaaaatattttgattgaagccgacttttgattccaagaccaatattctgattgtattatagttgtttccttctatctctgcttacagataaatatttcttaaatgcattcttggttacctgatgatatttctgtcctgtcatttttatacctgggcaaccatgtactatttaaaattgggttattctaggctgggcacgaaggatgcttgtaatcccagcactttgggaggccaaggcagacagatcacctgaggtcaggagttagagaccatcctggccaacatggt

SEQ ID NO: 611605 - DNA, 602 bp, Homo sapiens
gtggtggcttgcttgtaatcccagcactttgggaggccgaggaagggagatcgaggccatcctggctaacatggtgaaaccccgtctctactaaaaatacaaaaaaattagccgggcgtggtggctggcacctgtaatcccaactactcaggaggctgaggcaggagaatggccggaacccaggaggcggagcttgcagtgagccgagatcatgccactgcactccagcctgggcgacagagcgagactccgtttcaaaaaaaaaaaaaaaaaaaaaaaaaaaagcaggagtttctaaayaacattttcagaaaattgtgggtattctgtagtactataccaaaatttagcatctggtagtttcttaagggttacttgaaatatagaatccaaaatcatatcaatgaacttttcatacttaattacaagaaaatctattaatccatcttgtactttaaatggatattttacctgtttattttcaaggaacatatatgaacatttatcaaaacacagtttaggaaaactgcctttctgattatgtatatcttgtcttaatgttgttctgctgcctgtgtcatgaatattaagttcaagttggc

SEQ ID NO: 611606 - DNA, 475 bp, Homo sapiens
aggttgaaaaagtctgacatgttttgagaaacatgaattttaaaatccatattcaaaatatatcttcatgaaattttcagcacattaagtctaaatagaggtgttgaaaacgtctagggagaaggggaaaaygcctataaggatgaaggaccacactgcagactgacgagattttccatcagctatcctggatgctaaggaaactttgggtccaggcttttcaaatgccgagaagtaattttctcaaaggtgaaatacagtgcgaattcaactattaagtcaaggatgggggcaaaagggaggcattttcacactgaaattgatcaaacaaggtataatggtataagcatattatttgtatttacgtatataaccaccagaaaaactaaacatatcaatagttgaaagtgtaggcctgggaaacatagcaaaaccccatctctacaaaaaatagaaaaattagctgaccatggtg

SEQ ID NO: 611607 - DNA, 541 bp, Homo sapiens
ctcacacttacaaaggtgcaaaartaagtgggctacagatccaaaatcagcagtgccaggcaaaacaatgtttctagtactcctctttttaggattgccaaacaccggagcagaagctcaaggaatcagaatgaagaagaaaatcttgtttttatcttcagcttttcaaggtgtcaatcgatgtatgttaattttctggaataataacctaaaacttaaaatcggtttgagaagaatttcccagaaagatgttaacattggcctatgtatttagtggctgtttggtaaaggccacactgcatcctggctcctctagcagaaggggcatctgagacactctttcagcaaaacgtagatgtgtctccctagtctctgtgtttatttcaggttgacagtctccttagtagactcctgaactgtggcttctgctgatgcttctgaagcttctgtccctgagacctattgaggagaaacactctttccatgtgcttcacggtgctatctttcgtttgctttgggatatggcaggccaagtgtatag

SEQ ID NO: 611608 - DNA, 476 bp, Homo sapiens
ccatctttcataactcggaaaattcccctcatacataaataatccaattttatttcctttgccaagtgttataaaaattttccaggttgtaagtttttcccatctttgcatccctataacagtttattcaaatgtatataatagaaatttctgcttcccgtctagaaggrgtaatatctatgtagactttctaatattcataccaggtttaccctcctgcatgacacaaccaacatatggacaaaatacatgaaacaacacttttaagggaattaggcaacaaaggataatgattcctgagagacatgaaataaatgaggtaagccctctgactgtcctaccatacagccttgagagtatttccaggctgttgcacagggcgggagacccaaggtgaagcccaggggactccctggatggagaatacacagctaagagtcaagaacaccaaggtggctagagttctcaggaccaga

SEQ ID NO: 611609 - DNA, 575 bp, Homo sapiens
atttggcaagagtgagaaaggaaagttctggaacaggtggggcagctggccagcrttcagtagccacactcatccccaaacagtgtatgcgacatttagtcactgaggctatgaacattctgctatcagataggatgtgttcccatctcacacggtgtcttccatatgtctcaaaatgttgacaaccttaagaaaccacgaaaagagcaaataaaaagtgaggaagagagagattacccaggacaaacaaagggatggagcccagctgttctccagcctccctgaggacaaagggttcctcctgtgaactgtccgagcccatgatcttattctgcttagcacctcctaccgtagagtgtgcttgtttgtatacggagttaatgttccctactgaaccataatcatctggagcccgcagcctgcctctttcatctttgagtccccttaagatgagccttgtacttagtaggaactcagtgactgtgtgttgaaagcacagagggcctggaaaccgcagtggcaggcatataaatcacatagaattaaggttcattttcttgagggttgttgaatga

SEQ ID NO: 611610 - DNA, 571 bp, Homo sapiens
atggctcagcataccaaaatctgtcaatggaatacaccacattaacataacaatggacaaaaaccacatgatcatctaagttgatgaagaaaagcatgtgacaaaactcaatgccctatcataataaaaacactccacaaattaagaatagaaggaaattacctcaacataataaaggtcacataggaaaagcccacaggtaacatcatactcaatggtgaaaaactgaaggcttttcctttaagctcaggaacaagacaagaatgcccactcttgccacttgtactaaacayactactggagtcctagctagagtaattagataagaaagggaaacaaaaagcatctcaatccaaaatgatggagcaatagtgtctctgttcacagatgacatgatcttatatacagacaatcttaaagattctacaaaaaattagaactaataaacaaatttagcaatgttgcagtatacaaaatcaacactcaaagtcagatgcgtttttatacactaataatgaacaatgcaaaaggaaattttaaaaaatcaaatttacaatagcatcaaaaagaa

SEQ ID NO: 611611 - DNA, 571 bp, Homo sapiens
atggctcagcataccaaaatctgtcaatggaatacaccacattaacataacaatggacaaaaaccacatgatcatctaagttgatgaagaaaagcatgtgacaaaactcaatgccctatcataataaaaacactccacaaattaagaatagaaggaaattacctcaacataataaaggtcacataggaaaagcccacaggtaacatcatactcaatggtgaaaaactgaaggcttttcctttaagctcaggaacaagacaagaatgcccactcttgccacttgtactaaacatactactggagtcctagctagagtaattagataagaaagggaaacaaaaakcatctcaatccaaaatgatggagcaatagtgtctctgttcacagatgacatgatcttatatacagacaatcttaaagattctacaaaaaattagaactaataaacaaatttagcaatgttgcagtatacaaaatcaacactcaaagtcagatgcgtttttatacactaataatgaacaatgcaaaaggaaattttaaaaaatcaaatttacaatagcatcaaaaagaa

SEQ ID NO: 611612 - DNA, 613 bp, Homo sapiens
gaattcttgaacaatcttaacatttaaatggaatgaaattgtcagcaggctttgtacaacactcrttgtatctccagcagtgagtgctaaccccctcttacagaggagaaaactgaggccccatgtcacatatctggtagagagaagagcccataatgaactagtggttcctggccccggtgattccgggcccagtgctctaggagggcaatggtggaacaatagtattgttcctaaactgcatcaaaggacatttgcaagaataagctcaaagtgttgctattcctgttttttttttttttaattggaaagcaagtgaaggtcagaagggagccatttattgtaccagccttttgggaaatgaaacactcagatatataagccccatggtggcctcataaagagtgcaaaaatctcttctcaagtctataaaagtgaagttagttctattaactggaaaggaaatctgtgagagaatgtgactcatttgttctccacccataataccttcaagaacctgccctgtccctaatctgagtggggtggctcccagaggccacatgatgcccctccagggctgatggggccacagtcacccggctgagagaaaatc

SEQ ID NO: 611613 - DNA, 594 bp, Homo sapiens
aagtttttgttagtgattttcaaaaggggagggagtgtatgaatagggtgtggaccacagagatcacgtgcttcacaaggtaatagaatatcacaaggcaaatggaggcagggcgagatcacaggaccacaggactggggtgaaattaaaattgctaatggagttgcgagcatgcattgtcattgataatgtcttatcaggacacagggtttgagagcaacaatggtctcaccaaaatttattaggcgggaatttcctcgtcctaataagcctgggagcactacaggagactggggcttatttcatccctamagctgtgaccataaaagatggccgcccctgaagtggccatttcagaggcctactctcagggacgcattctctttctcagggatgttccttgctgagaaaaagaattcagcaatatttctcccatttgcttgtgaaagaagagaaatatggctctgttccacccagctcaccggcggtcagagtttaaggttatctctcttgttccctgaacattgctgttatcctgttcttttttcaaggtgcccagatttcatattgttcaaacacacatgctctacaaac

SEQ ID NO: 611614 - DNA, 618 bp, Homo sapiens
gatgtggccattcctcaaacacctaaagatagaaataccatttgattcagcaatcccattactgggtatatacccaaaggaatataaatcattctattataaagacacktgcatgtgtatgttcactgaagcactattcacaatagcaaagacatggaatcaacctaaatgcccatcaatgatagattggataaacaaagtgttgtacatatacaccgtggaatactatgcagccacaaaaagaatgagatcatgtctgctgggacatggatggacctagaggctattacacttagcaaactaacacaggaacagaaaaccaaatactgcatcttctcacttgtaagtgggagctaaatgatgagaacacatggacacgtaggaacaacagaaactggggcctataggagggtggagggtgaaaggaggaagaggatcaggaaaaataactaataggtaataggcttaatacctgggtgatgaaataatctgtccaacaaaaccccatgacacacatttacctatgtaacaaacctgcacagatacccctgtatattttattttaagataacttaaaaaaaaagttaaaaaacaaattaggctacagtatgagaaaat

SEQ ID NO: 611615 - DNA, 383 bp, Homo sapiens
gctaagatttacttttagtaagcctttaacactagttagtccaaggagcagacaagatgttcctttagactcattgtcttgaagggaaatgaagtgaccctttttgtagtcctgtccactctggaagggcagcactggtgcagaagaraccgagtggccaccgcaagcccttctgcatagaataagctgttcatggaatgaggcagttggaggccttggaatcttgtcgttattttcttgtggtgtcaattggattagaatctgtaattttggaaattagattgttgttaattaatgcatatttctgtagttgcttcctttagcttagtggtaaaaaaaaaaaaaaaaaaagaaaaagaaaaagaaaaattggccaggcacag

SEQ ID NO: 611616 - DNA, 383 bp, Homo sapiens
gctaagatttacttttagtaagcctttaacactagttagtccaaggagcagacaagatgttcctttagactcattgtcttgaagggaaatgaagtgaccctttttgtagtcctgtccactctggaagggcagcactggtgcagaagaaaccragtggccaccgcaagcccttctgcatagaataagctgttcatggaatgaggcagttggaggccttggaatcttgtcgttattttcttgtggtgtcaattggattagaatctgtaattttggaaattagattgttgttaattaatgcatatttctgtagttgcttcctttagcttagtggtaaaaaaaaaaaaaaaaaaagaaaaagaaaaagaaaaattggccaggcacag

SEQ ID NO: 611617 - DNA, 383 bp, Homo sapiens
gctaagatttacttttagtaagcctttaacactagttagtccaaggagcagacaagatgttcctttagactcattgtcttgaagggaaatgaagtgaccctttttgtagtcctgtccactctggaagggcagcactggtgcagaagaaaccgagtggccmccgcaagcccttctgcatagaataagctgttcatggaatgaggcagttggaggccttggaatcttgtcgttattttcttgtggtgtcaattggattagaatctgtaattttggaaattagattgttgttaattaatgcatatttctgtagttgcttcctttagcttagtggtaaaaaaaaaaaaaaaaaaagaaaaagaaaaagaaaaattggccaggcacag

SEQ ID NO: 611618 - DNA, 431 bp, Homo sapiens
ccaactatttttgctgccccctaaatataggaagacacctgttgggacatgtaatgttactgaatttgctcttctcaggatcaagcaaaaggatcaggaaaagggagatgttaactaatctctcccttttacatctgatgagtctctatgactgttaagtgtttttcatatcttgagattaaagaccctcagattttgtacttacgaactccatgctggagccatacgaggggtgaaggcatgctttggctgcctgggggtggggagtactgggggcagcggacagctccacgtaagctgctggtggagctgcctccttcactgccatgcccacagtgccccggggtggtggctcaccttggctttgaggtaggctgaaccccgctcacagcggatgcccccrgtacagtacatcagcactctcttctctc

SEQ ID NO: 611619 - DNA, 431 bp, Homo sapiens
ccaactatttttgctgccccctaaatataggaagacacctgttgggacatgtaatgttactgaatttgctcttctcaggatcaagcaaaaggatcaggaaaagggagatgttaactaatctctcccttttacatctgatgagtctctatgactgttaagtgtttttcatatcttgagattaaagaccctcagattttgtacttacgaactccatgctggagccatacgaggggtgaaggcatgctttggctgcctgggggtggggagtactgggggcagcggacagctccacgtaagctgctggtggagctgcctccttcactgccatgcccacagtgccccggggtggtggctcaccttggctttgaggtaggctgaaccccgctcacagcggatgcccccggtrcagtacatcagcactctcttctctc

SEQ ID NO: 611620 - DNA, 620 bp, Homo sapiens
ttggcccatcacaaaaatctgtaaacacgtacacatgattaaaacatcctttatatgtttaaaaatataccaactagagaagcatccataatgctgtctacctcagaccattttcattatactgttgaatcttacttagttgaagagagaacagcttttaaactgtctttggggaaatttagttaaaactttccactcaaacttcattcagcagactttgcggtttaaatctttgaacacacacacaatgcacacatacacacttacatatatatatatttaagatgaaatatatatttacatatatgtttaagatgaaactttttcacatttctaacattacaattagatgcatcttacaatcaatggtaagacgtagttgaattggcagtgtttttttttttaatttgagaaaataatgtggagtcttaaaactaatgctatctcacgtgaaatacaggaggtgatgataactaccatttattgcttatgcggtctcaggcactgttgcaagcaccttgcataccttatttaatatttacaactaccctacaaagtaagtattattagataatttttacagatgaggaaastaaagcctggataatttgagtatactt

SEQ ID NO: 611621 - DNA, 529 bp, Homo sapiens
ttgcctgcctgcagtgagtgcaccaatagaggcaagagtttggagaagggctgattggcatgggaaggattgttgttgactattgtggattaagctgtgtcccttcaaaattcatatgttgacatcctaagcccaggtatctcagaatatgaccttatttggaaatagggctgtcgtagatataattagttaagatgagatcattatcgtggaccctaatccaatttgactggagtccttatagaaaggggatattggaacactgaaagccatgcacacaggaagaatgccatgtgaagatgaaggcagagattgggccgatgtttccacaagccaaggagccaatcctgctgacacctgcatctcaaacttctagtctccagaactgtgagacgatacatttctgttcaggccacccagtttgtagtactttgctatggcagccctggcaaactaaaatactgaccgtgattggcatgttagacaactgtgctgtggtkgaaaccccataggaccgctccctgggaac

SEQ ID NO: 611622 - DNA, 402 bp, Homo sapiens
tgtctcggaaaacaaaaagaaaagaaaagaaaatgcagggaaggtcaagggagtagaaaaggactcaaattctgtcattcactgattctgcaaatacacatggggcacttacatgactagcatgttgtctagtagcagmattggagaaatgatgatacaacctgggaactcacgtacaagtgaatgaaaggaaaagaaatgaacaattaaaatacaagaacacaaaggagggtcacccaagcttaactgagaagtcagggaaacttcctggagtcacagacccctgcacagagtcttaaagaataggtgggggagaaggtctgatgaaagagctccccacataaatgcaagagtgcatggtaccttctgagcactgcatgtagtttcttatatagtaacctg

SEQ ID NO: 611623 - DNA, 605 bp, Homo sapiens
acaggcgtgtgccaccatgcctggctaattgttgtaattttagtagagacagggtttcaccatgtcgcccaggctgatctcaaattcctgatctcaggtgatccacctgcctcagccttccaaagtgctaagattacagaggtgagccaccgtgcctggccaatattgtttactttaaaaagctattatgatggtatgaatacttgtctagatcattatgcagtctaattaacttctaaaggtaaattactaaaamtcgaattactaggccaaagggtatgactatatttaaggttcttatccataatgccagattgtatctcgtgaagtttgcatcaattaatgcccccagcaacaatgttaatgtctttttcactacatcttgctctgcactggatgtttaaaacaaaacacgggctgggggaaatccttccaatttcactggtaaaaaatatatttgacaattaaaatattgttttgcctgaattgaataggcatgtacaacctcaataatctttaggggaaaaaaaaatcttagctttttgttcttttgccagctttcttttaaaatagctttaaaaaatttctattatttaaaaaatagt

SEQ ID NO: 611624 - DNA, 605 bp, Homo sapiens
acaggcgtgtgccaccatgcctggctaattgttgtaattttagtagagacagggtttcaccatgtcgcccaggctgatctcaaattcctgatctcaggtgatccacctgcctcagccttccaaagtgctaagattacagaggtgagccaccgtgcctggccaatattgtttactttaaaaagctattatgatggtatgaatacttgtctagatcattatgcagtctaattaacttctaaaggtaaattactaaaactcgaattactaggccaaagggtatgactatatttaaggttcttatccataatgccagattgtatctcrtgaagtttgcatcaattaatgcccccagcaacaatgttaatgtctttttcactacatcttgctctgcactggatgtttaaaacaaaacacgggctgggggaaatccttccaatttcactggtaaaaaatatatttgacaattaaaatattgttttgcctgaattgaataggcatgtacaacctcaataatctttaggggaaaaaaaaatcttagctttttgttcttttgccagctttcttttaaaatagctttaaaaaatttctattatttaaaaaatagt

SEQ ID NO: 611625 - DNA, 565 bp, Homo sapiens
aggaggctgaggcaggagaatggcatgaacttggaaggcagaggttgcagtgaggcgagatcgtgccactgcactccagcctgggtgacagagggagactccatctcaattaaaaaatcaatcaataaataaaaaacaaaacaaaacaacaaaaaaaccacacaaatttaactgattctttaggtctccatttccttatgaaggctcctgtgtcaacataaccgttaaataaattggcatgtttttctcctgttaatctgcctttagttataggggtctcagccatgaacctaggatgagtgaagaagatatatttttccttccttgcaggtacattcccaattatgggttaattccagtccagaataagagacagaatagccttgtgtatagtcatatrtaattttagctagagtaattagtaagcatgtcttagttctttttctagatttttccatgaggacagaaatgttgtcaattttattgttgtatctctcacaaggcctgggttcaaatcttttctctattcttcagtattgataacgacttttggcaagttatgtga

SEQ ID NO: 611626 - DNA, 474 bp, Homo sapiens
cagctagccaaactctctcatttawaatgtgatagtttaacttttgcacaaaagatgttcgtttttaaggtgattttttttttttttttttttttgagacaggatctccttctgtcacccaggctggagtacagcggcatgatcacggctcactgcagcttcaacctccaaggctcaagccatcctccttcctcagcctccctagtatctgggaccacaggcacatgccaccatacccagctaatttttgtattttttgtagagatggggtctcccccgtgttgcccaggctgctcttgaactcctaggctcaagcaatcctcccacctcagcctcccaaaatgctgggattataagcgtgagtcaccgcactgggccagtattattagtattattttttaagcatactttttattgaagcataacacatatacagaaaaaaatgtcaaccttaagtgttcagcccaaagaatt

SEQ ID NO: 611627 - DNA, 423 bp, Homo sapiens
tacaagcaaatgtaactgtagtaacacatgaggtaaaaccataaagtagatttttttagaaagcaaaattatttttgtctttctgcccctttcatatgatcttttgggctagcaaatcccctgccctacaatgaagattccggcaagccccattaatttctgattacttttacacactatcaaatgttctcaggtcatttgaaggctaacaggtcagccacaatttagtcattaatatgtcctgtcccatgtaatagtcgaagcttcaatctttgtttaaagttaaaactcccccttctcttccatttggaagagggatttataattggcctttttctcttatcttcagaaaatatacamggaaagggaaaaagaggagtaaaggtattagttaaaaattttctcaatgatggataacatgga

SEQ ID NO: 611628 - DNA, 423 bp, Homo sapiens
tacaagcaaatgtaactgtagtaacacatgaggtaaaaccataaagtagatttttttagaaagcaaaattatttttgtctttctgcccctttcatatgatcttttgggctagcaaatcccctgccctacaatgaagattccggcaagccccattaatttctgattacttttacacactatcaaatgttctcaggtcatttgaaggctaacaggtcagccacaatttagtcattaatatgtcctgtcccatgtaatagtcgaagcttcaatctttgtttaaagttaaaactcccccttctcttccatttggaagagggatttataattggcctttttctcttatcttcagaaaatatacaaggaaagggaaaaagaggagtaaaggtrttagttaaaaattttctcaatgatggataacatgga

SEQ ID NO: 611629 - DNA, 423 bp, Homo sapiens
tacaagcaaatgtaactgtagtaacacatgaggtaaaaccataaagtagatttttttagaaagcaaaattatttttgtctttctgcccctttcatatgatcttttgggctagcaaatcccctgccctacaatgaagattccggcaagccccattaatttctgattacttttacacactatcaaatgttctcaggtcatttgaaggctaacaggtcagccacaatttagtcattaatatgtcctgtcccatgtaatagtcgaagcttcaatctttgtttaaagttaaaactcccccttctcttccatttggaagagggatttataattggcctttttctcttatcttcagaaaatatacaaggaaagggaaaaagaggagtaaaggtatkagttaaaaattttctcaatgatggataacatgga

SEQ ID NO: 611630 - DNA, 448 bp, Homo sapiens
ggactctttacatattcatatttcagaaaattagtacatgtgtcatgctatttgtaatggtgaaagagactcttcaaccattccatatatgacatgatatttagattctcatgcaatgctggctagcttcctctgcagagacagattttaacactatacacccaaaaatataacagataatttaacaaaacaattcagatatggtctgagtagcagcatattttctgtatctattacttcatgtaaacctgaatccgtgtttcttttgaaacaatttaagactatattaaatgtgttgtaacattatcacatcatcgatyggtataaacacagatgtcccctccagtgaaaggcatttcttctctatgtatttgatgtttttagcatactggctgggctttaaattcctgttgaatttcaataggaatgaagagattaccaaatcatt

SEQ ID NO: 611631 - DNA, 608 bp, Homo sapiens
tatattgtatgcatgaaaacattataaaatatatttttatatttacatgtgtgcaaaaccagaagcatgcaaaaccaaaatatcctatacattaatatttggtactatttaggtaatatgaagttttagtgagaagaaaacagtttataatttgaaataaaaggacacaaaaagtaaaaatatttagtatccagagaaactacacgacaataataagacacaaataaatcttccaagaagaggaatttaaaccaaaaataaccattagcagagtatggatagcctttatcttgaacattcattttctctttagctgtcaataagagatctccacttatcagctgggaatattgccatagagctaacagagaacagttcctcagcctgscttacagttctgtggccagatgattaaaatctgggtgaagatatgttggcagaagtattgtgtgggacattcttgatgttgcctttttactctctttcaacttattctttttgatgattggtgtttctgctgaattcttggatcataaaatgaccttgggaatggaagccacatgtagcagaacaacagtataggacaatctttgaatgacaaaatataa

SEQ ID NO: 611632 - DNA, 527 bp, Homo sapiens
cctcccttgtcaaaaaaatatcagaaatagtcaccaggacacccacttatattaggaggatgacaagtggtaaatcactgacacttgagtagtttcttcagcaaaacactccactgctttgaaagatatttattcagactctatgtttgatctgtttatttcattgtagcatgtgttttgaacactagaataatgacagaattgtaagcaagagacttaattacaacataatattattgtataaaataatagtttaggttaaaagcaatgtggcataatggtactgagttgagattctgtttctgtactgaaccactgcgagactttgaggaaacaattaacttcatgttgatcattagcagagtaataataacattgcctaagccatggagttgtwttaaaaattcaataaaaggctgggtttggtggctcatgtccgtaatcccagcactttgggaggccaaggcatgtggatcacatggtcaggagttcgagatcagcctggtcaacatggtgaaaccccatcc

SEQ ID NO: 611633 - DNA, 594 bp, Homo sapiens
tttttgaattaagccatttttcacgctatttcttaagartgaatttctcaaatcagactaacatgaatcagagatcataagcagtattagcctaaactaaataatttcaaaggtacaaacaaaaggcttatcaaaagtttcaaaataatggctctgcaggtctttctttcctgtgaaagccacatctctttagcccagaatacataaagcctccaagtgaggcgtgcatggttcctcatacagttggtaatgcttcaattataaaacatctccattttataccccagcactgcaaacactatatgccattttccaggaagccatcccttataaattctggttctatctattataggtaatccttagtcagatatcctactaagggcccaaagacaaccctcttccttctagcaaataccattagtctatttacccaggggaggtagaattgacaaggagattagacctgctcacttgttatggactaaacgttgtaccttcttcccaccccaaattcatgtgctgaagctctaacatctaatgtggtggtgtgtagagatgagacctttgggaggtaattagggttagacaggt

SEQ ID NO: 611634 - DNA, 577 bp, Homo sapiens
tctcttcattacagctctgcaattcatgcctaatagtctgcagaatattttattggtaattgataggcttatacaatcagaaatcataagttaaagatggccttttgttggaaatagtttattataattcttattcccacttcattatcaggaacagtcatttattaattaggaataagaattagaactcgaagaggcatcaaatattgcggcacgcagacaatgtatagattcataccaggttccaaaatactgccgaacatcctcctcttgaaaggctgcaaaagagtcactgtcgaagatacattttaggacatcaaacctaaaaactcaatcctggcaaactaatacacacgcaaacaaaatgcctctttttattccttagcacctcatcaccgatttcattattcacttcttcaggcaagctgcgcgggttagcttcaagctcttcccttaattgcaccagaagttaagtctgggcgttggacatacacactctaaatccytacgcgtgggtctgtctgtgaacagcccggagcagcggagcaagttagtgggagggtatcgccaactgtct

SEQ ID NO: 611635 - DNA, 640 bp, Homo sapiens
ggcggcggtgggtggcggagcggagcatccagcgccagagcaaaggaacctggtgccatctccaagctgggcaactttgcgttttccgctagcaggtccgaagccatagatattcgcgaagccccagagggcagaaatcctcagcaatcctctgtctcacagttgaaaaggcagagtagcgctctgttgcaatagaaactacgcggagcacaaatgcaagctttggttaaaaaaagcacaaaaaacaaaaaaacaacgggcaaaagtttactctctgtaagcaattaattcctgcagcccattccgggtaaaacaaactcctcttgggaagctcctttcgtgggagttgtggatgacacgggggcgcttctgagagcgaagtctctcctgcctgggacgccccagcggtgtagcacccagtgatccctcccgaccgtcgagggaagaaaaagaagttgggacaggagctagccagagacccggacagctactcctggtgcaaaaccttggaaatggctgctaaagrggttgggtctccagactcctaatccctcccctttctccagctgagccgttcacctgctaccgtccagtttacaatataagcgtagcacctaaattaacccagttccaaaagcta

SEQ ID NO: 611636 - DNA, 529 bp, Homo sapiens
attagtgatattgagcatttttcatatatctgttggccatttgtatatcttctttgggaaaatatttattcaggtcttttgctcaatttttaattggataattgggtttcttcatttttgttttatgtttgtttgcttgcttgttttgctgttgtttgaatttcttatatattctagatattagtcccttgtcagatggatagtttgtaaatactttctcccatgctgtaggttgtcttcaccccatttattgtttcccttgctgtacagaagctttttagctttacragattacatttgtctatttttgcatttgttgcctatgcttttcaggtctcatttaaaaaaccctttcccagtccaattttatgatataaataatttttaaaattgtaattgttttgtcataaaacaaagtatttagcttctttctccatatttagggtattcaataattctaagttttgtcctaactttgtttataaaatttggatgcctttctctaattaaaatttctccagaattttat

SEQ ID NO: 611637 - DNA, 592 bp, Homo sapiens
agtagcattaccattttaaataatcctttaaagagtgagggtttcacctcaaagtattttctaaatatatgaaattccccttttaagttgcaaacctttgctatcaacatttacaagaaatgcattattactttccygtcacactaaaagagtgtgaggtatcacccacaacaccgtcccctgacttcacagctctgcctgtaaaacatagcaccaaatagaacagatcagcacacataggcttctgtaccttggctcaattatctgtaattttgagacaagctttgcttctcaaaatgaggaagatagaaacgttcctgtctatctttcactgttttgaagaccaaaagagattaccatatcgatgcaaatgattatctttgtgatgaacaattttgacttttcctgatgaaaagatctagagactatataacatatatcttctttaagggcacttatacatttatgatttaaatctttcagtttactgattattctgtagtcattttgtttcttttctaacttgctgctttgtcctctaattgcatcagcctgggatacagtttgtttctccccaagagtctagaaacct

SEQ ID NO: 611638 - DNA, 574 bp, Homo sapiens
tatatttgctattcccatggccaaccctggcctgagatatgtgaatgaggtcttctcaacccctctcccagatccraaagttggcaagaagcatgtgtaaaagtcaaaaggccatatatttcattgagcagagggcaattacaaggacccaaatgagtcctcagggccacagccattgctgggggaataaagattccgaaggtgccactggggcttggtgctgagatccctgaagctgccatcccagccctcagtgaaccctacaccaggagcccaagccacctgcaattggttgccacccttctttgaaccaataatgtctccagaagatgagtttatgctgaaatattttagcctgagctataagccctgtttttagagtcaggaattaggtttaccagaaaggatccccaaatgaaaactaggactattaccaaacttaatggagtggatgagagggaataaaatgatttctgccaaaaatgggttattggtttatgattgagctgaacctggtatggtatactcaggaattttctcctgccagtgcctaccaacatgctttgtaatacct

SEQ ID NO: 611639 - DNA, 574 bp, Homo sapiens
tatatttgctattcccatggccaaccctggcctgagatatgtgaatgaggtcttctcaacccctctcccagatccaaaagttggcaagaagcatgtgtaaaagtcaaaaggccatatatttcattgagcagagggcaattacaaggacccaaatgagtcctcagggycacagccattgctgggggaataaagattccgaaggtgccactggggcttggtgctgagatccctgaagctgccatcccagccctcagtgaaccctacaccaggagcccaagccacctgcaattggttgccacccttctttgaaccaataatgtctccagaagatgagtttatgctgaaatattttagcctgagctataagccctgtttttagagtcaggaattaggtttaccagaaaggatccccaaatgaaaactaggactattaccaaacttaatggagtggatgagagggaataaaatgatttctgccaaaaatgggttattggtttatgattgagctgaacctggtatggtatactcaggaattttctcctgccagtgcctaccaacatgctttgtaatacct

SEQ ID NO: 611640 - DNA, 607 bp, Homo sapiens
tttttaaagatcattgacttatgaccactacaatatgattaacacaacaacgtttatgaaaattaagattatagtgatttctggaaaaaaygctttgtttttacaaaaaaaaaattattactccccactgcacctgaaatgcaagaaaaaatcatcaaagctgtttatttttattaattaaattgaaggttgaaatcgctttactttgctcagtttgtagaggtggaagaaggctttttaattaaatgtcccagaagcagaaaaagcattgaattatcagataatcataaaaacagtctccaaaaagagattgtacagttaatagcctaatcttttcgatgaagagagcacttaattctcaaccacctttctgtagtgatgacaactaatagaaaagcaattattatgttagaattattcttatgcctgcagagcctgactgacccttcatgtttccatagggaatccaatagggcttgtgatgaactgaggtggggtattgcattaactttctttgaagctaattgtgttgccgtctttaccaacactagtacaataattatcagaacaagcattctttgttatgagcaatatgtataaaatgtgg

SEQ ID NO: 611641 - DNA, 645 bp, Homo sapiens
ttatagactcagaagacacaatatattaacctatgctaataaaatatttaaaacatattaaatgaaaatttatttaaaatatttagcattttaaaagtagtaatataagtaatatatagtttaattggtatagctcattcatcagagcatacaattggaattcttaaaatccattatgyaaaagcccttgaattctttcctttttccaatggagaaataaaagcaataaaatataagtaccagttttggggagaaatgaattaattttgttctttccatcagtaatgcaactgaactggaattttccagaccatgctatcctcagtgttggatgttccatctcacaagaagatgaactattattatactcattagtgaactcagtagttctcttttacacaaatctcccttttgaatgaaatgtttcaacatgttataaatatatgggtaattaggtggatatgaatacatatatctatgaaaaaatatttaataagtaactctaaactgcaacatattttaagatattacatttttaaaactttagatccacaatggcaaaccactgggttctattcggttggtactggcactaatgggagtttatggaaattaaggaactgaagtaacttctaccaatggcaa

SEQ ID NO: 611642 - DNA, 630 bp, Homo sapiens
atcatttaggacaaacaggcattagactcttagaaccactaaaagcaagtgctagcagatacattagtgggaaatgaaaaragtcaccttcctattgcttactcctttctatacaacttacaaagtcttctttgtccttggctgaaagttcatgtttgttaaaagatgcatatttttacctagttgactgatttatactccttttgaactccagagtttctgcaggacttgcttaactctctctaaatgtcatgaagtgtcacaggtgttgagcttgtgattgtgacagagactttttttgaaaacatactctcattatggaaaaatcagaatatacagacaaataattcaatattaccaatatcataaccacccaaggataaatatagtaacatttcagtgaacaaactttcaaatatttcacacttgtgtgtgtgttaacatagatttgtgtttatgaagattatcattatactgtatagactcttccataatttgcttaaattaacacatgaaaattatcacccacataattaaattgttttctaagtatttttttaaattttattatattttaagttccagggtacatgtgtaagacatgcaggttttttacataggtaaatgtgc

SEQ ID NO: 611643 - DNA, 531 bp, Homo sapiens
acaaacaggcattagactcttagaaccactaaaagcaagtgctagcagatacattagtgggaaatgaaaaaagtcaccttcctattgyttactcctttctatacaacttacaaagtcttctttgtccttggctgaaagttcatgtttgttaaaagatgcatatttttacctagttgactgatttatactccttttgaactccagagtttctgcaggacttgcttaactctctctaaatgtcatgaagtgtcacaggtgttgagcttgtgattgtgacagagactttttttgaaaacatactctcattatggaaaaatcagaatatacagacaaataattcaatattaccaatatcataaccacccaaggataaatatagtaacatttcagtgaacaaactttcaaatatttcacacttgtgtgtgtgttaacatagatttgtgtttatgaagattatcattatactgtatagactcttccataatttgcttaaattaacacatgaaaattatcacccacataattaaattg

SEQ ID NO: 611644 - DNA, 526 bp, Homo sapiens
aaaatagaattcaataggaatatagagggaaaagattatagataataaaggaaagtgagatagaatgatcaaagaggaaacgggaatagaagacagttatatcctggaaactaagttttcagaaaaaggaagtagtcaacagtgttaggcccttcagagagactgaaaaagaggaacactgataaggagtcacttgatttagcaattaacatactgttctaaattttgagaagccagttrcatatgagtggtgagagtggaaaccagatattaatattctaaaattgagcatgagatatgggaaaagagttagtagagaatagatttttcttcccaaaatgttagcagaagacaaatgaagaaaagcagtaaccatattaattaactacataataaattattttatttaaaattgatatggaatatattattatgaccatctaggtatcacattattcactgtaatacctaggtattatagatacaaagatgattctgacacagactcagttctcaaaaaggcttg

SEQ ID NO: 611645 - DNA, 526 bp, Homo sapiens
aaaatagaattcaataggaatatagagggaaaagattatagataataaaggaaagtgagatagaatgatcaaagaggaaacgggaatagaagacagttatatcctggaaactaagttttcagaaaaaggaagtagtcaacagtgttaggcccttcagagagactgaaaaagaggaacactgataaggagtcacttgatttagcaattaacatactgttctaaattttgagaagccagttgcatatgagtggtgagagtggaaaccagatattaatattctaaaattgagcatgagatatgggaaaagagttagtagagaatagatttttcttcccwaaatgttagcagaagacaaatgaagaaaagcagtaaccatattaattaactacataataaattattttatttaaaattgatatggaatatattattatgaccatctaggtatcacattattcactgtaatacctaggtattatagatacaaagatgattctgacacagactcagttctcaaaaaggcttg

SEQ ID NO: 611646 - DNA, 501 bp, Homo sapiens
tcacttactgtcacttgacagttttagcagtcagtttttgctttggtaatccaagtgctggtactggcttcaatatactttccctgaaattagaagtaagtaattttcagtcaaaagccagagcagaggtttatgaaatcataaattattttcattgtaaaagatactgggaatgggagactttcttcttgaatacctactaaggactgatgtttttgcatttattatatgcaaaatgagtatgcataaccttgaaaagttcttactttttctsatttatcctaattatcccactgaccaaaaaagcaactgaagttcagagaaataaaggaattgctcaaaatcatgaattcagtaagcgataagtctcatatttgttcatatttttgttttaaatatatagcataactcctgatttaaaaatgagatattctgctaataactatatttagagcagtaaaaaatacatagtacatatatttggttggttagtttagtaat

SEQ ID NO: 611647 - DNA, 640 bp, Homo sapiens
tgtttagctcccacttataaatgaaaacatgaaatatttggttttctgttcctgtattaatttgcctgggattatgacctccagctccatccatgttgctgtagagaacacgatttcatttttttttatggctacacagtattccatggtgtatatgtataacattttctttacccattccatcattgatggacacctgggttgattctatgtctttgctattacgatgagtgcagtgatgaacatacaagtacaagtgtctttttggtagaattattttcttctgggtacatacccagtaatgggaatgctgggttgaatggggtttctgttttaagttatttgagaaatctacaaactgctttccacagtggctggactatccctcatgaacatagacacaaaaatcctcaacgaaatactaacaaatcaaatccagcagcacatcaaaattaatataccacaatcaagtaggctttattcctgggatgcaaagctgattcaacataygcatatcaataaatgttgatttatcatttattttattgatttactacattatttaccaatttaatgattcaccacataaaccagaatcaaaagcaaaatcatatggtcttctcaatagatgcagaaaaag

SEQ ID NO: 611648 - DNA, 640 bp, Homo sapiens
tgtttagctcccacttataaatgaaaacatgaaatatttggttttctgttcctgtattaatttgcctgggattatgacctccagctccatccatgttgctgtagagaacacgatttcatttttttttatggctacacagtattccatggtgtatatgtataacattttctttacccattccatcattgatggacacctgggttgattctatgtctttgctattacgatgagtgcagtgatgaacatacaagtacaagtgtctttttggtagaattattttcttctgggtacatacccagtaatgggaatgctgggttgaatggggtttctgttttaagttatttgagaaatctacaaactgctttccacagtggctggactatccctcatgaacatagacacaaaaatcctcaacgaaatactaacaaatcaaatccagcagcacatcaaaattaatataccacaatcaagtaggctttattcctgggatgcaaagctgattcaacatacgcatatcaataaatgttgatttatcatttattttattgatttactacattatttaccaatttaatgattcaccacataaaccagaatcaaaagcaaaaycatatggtcttctcaatagatgcagaaaaag

SEQ ID NO: 611649 - DNA, 583 bp, Homo sapiens
atttgttcaaattgtttttccatattccatcatataaatatgcaatatattcatcaactctcctgttgatgagcatacatgttgtttctaaggttttgctgttgtgaacagtgttgctataaacattcttgtacatgtcttctggtatacatgcatctgagtttcccttggctttatagatagaattgttggttggttcatagaatatgtcaacatctaaactgataagataacgtgaaagtggttktagcattttacagccccgcaagcaatttataagagatagaaggtgtatatggcttccaacactgcatacactcaagctttttaaatttttgccaatataatgtgactaaagtgaaacctcatagtagtcttgatttacattgccctcactttggatgaagttaaacatcttataacatgtttactagccatgtgtgtttcctctgatgtgaaatgccttttcatgcatttgccccattttttttctttgagttgttgatttttatctactaatttgtatttctttagctagtcgtcataaaatgtactcgttggctgtgtttattgctgattactt

SEQ ID NO: 611650 - DNA, 583 bp, Homo sapiens
atttgttcaaattgtttttccatattccatcatataaatatgcaatatattcatcaactctcctgttgatgagcatacatgttgtttctaaggttttgctgttgtgaacagtgttgctataaacattcttgtacatgtcttctggtatacatgcatctgagtttcccttggctttatagatagaattgttggttggttcatagaatatgtcaacatctaaactgataagataacgtgaaagtggttgtagcattttacagccccgcaagcaatttataagagatagaaggtgtatatggcttccaacactgcatacactcaagctttttaaatttttgccaatataatgtgactaaagtgaaacctcatagtagtcttgatttacattgccctcactttggatgaagttaaacatcttataacatgtttactakccatgtgtgtttcctctgatgtgaaatgccttttcatgcatttgccccattttttttctttgagttgttgatttttatctactaatttgtatttctttagctagtcgtcataaaatgtactcgttggctgtgtttattgctgattactt

SEQ ID NO: 611651 - DNA, 420 bp, Homo sapiens
cataaactacaaaatggatattgtgttagcaggcataaaaacaacattaatctccatgtatattttcattagtgctgttgggtgaccaggtgcattgtcaatgagcagtaatattttcaaaggatagatatggacagtggacttaaaatattcagtaaaccatgctgtaagcagatgtgccatcatactggctttgttttttcatttacagagcacaggcactgtagatttagcataattcttaaaggccctaggattttcagaattgtcaataakcattggcttcaacttaaagtcaccagctgcataagcccctagcaagagagcttgtcttttgaagatttgaaaccaggcactgacttctcctgtctagttattaaaatcctagacagcatcttcttgcaatagaccactgtggct

SEQ ID NO: 611652 - DNA, 526 bp, Homo sapiens
ctttcaacatgtcttcctcactaagcttaattattactagcttttgaattaaaatcagagatgtgcaaattttcctttcactcaaacacctggaggcctctgtagatttattatttggcrtaatttcagtattcttgtgttttagtgaatagggaaagggagagagatgggggaacacccagtcagtggagcagtcagaacatacataatatttattaagttcactatcttatgtgggtccagtttgtatcacccccaaataattacaataataatgtcaaagatcacttatcacagatgaccgtaacaggcataataatagtgaagagattgaatattgtgagaactaccaaaatgtgacacaggaagtgaccacatgatgttggaaaatggccacaatagacttgcttgacacagggttgccataaagcatcaatttgtaaaaatgcagcatctgcaaaatgcaataaactgaagcacaataaaacaagatatgcctgccttttcaggtcacacatatactcca

SEQ ID NO: 611653 - DNA, 526 bp, Homo sapiens
ctttcaacatgtcttcctcactaagcttaattattactagcttttgaattaaaatcagagatgtgcaaattttcctttcactcaaacacctggaggcctctgtagatttattatttggcataatttcagtattcttgtgttttartgaatagggaaagggagagagatgggggaacacccagtcagtggagcagtcagaacatacataatatttattaagttcactatcttatgtgggtccagtttgtatcacccccaaataattacaataataatgtcaaagatcacttatcacagatgaccgtaacaggcataataatagtgaagagattgaatattgtgagaactaccaaaatgtgacacaggaagtgaccacatgatgttggaaaatggccacaatagacttgcttgacacagggttgccataaagcatcaatttgtaaaaatgcagcatctgcaaaatgcaataaactgaagcacaataaaacaagatatgcctgccttttcaggtcacacatatactcca

SEQ ID NO: 611654 - DNA, 526 bp, Homo sapiens
ctttcaacatgtcttcctcactaagcttaattattactagcttttgaattaaaatcagagatgtgcaaattttcctttcactcaaacacctggaggcctctgtagatttattatttggcataatttcagtattcttgtgttttagtgaatagggaaagggagagagatgggggaacacccagtcagtggagcagtcagaacatacataatatttattaagttcactatcttatgtgggtccagtttgtatcacccccaaataattacaataataatgtcaaagatcacttatcacagatgaccgtaacaggcataataatagtgaagagattgaatattgtgagaactaccaaaatgtgacacaggaagtgaccacatgatgttggaaaatggccacaatagacttgcttgacacagggttgccataaagcatcaatttgtaaaaatgcagcatctgcaaaatgcaataaactgaagcacaataaaacaagatatgcctgcyttttcaggtcacacatatactcca

SEQ ID NO: 611655 - DNA, 452 bp, Homo sapiens
agggttgtatgttaattagagacttgtagcacattaaacatgatgccttacaaacatatgttttagttttttcttttcccactttgacacattaatatgatagtaaccagaattagtaacatagaaagccaaatttaataagccaaagtcaaattagactaaatcaatcaaatatattsctaattttaaaaaaacttatatttgctgctatatattttaaaatactacttaaaaatacttgtctattgctttttcacctattgctcttctttttccatcactgaaaatcagggccagtcactgtgattttatgattgctcttctaaaagtttcacaggataaaagcacttgacctacattttcctttaggctcttccttctgaaacctgaaaaaaaaaaatcagagttcacagtaagaacaataattgttcctgcaccacctatacctttat

SEQ ID NO: 611656 - DNA, 627 bp, Homo sapiens
tgttacctatctttaggcaggaacttagtggtgttcttaaaagaaagattgtctctgggcacacagagtgcttagtttgccaggatggttgacctaacaataagagtctggataattacactcacagtgtattcagccttataattctctgcattgacaggaaggaaaaataaatgttttctgaaccagttgtcaaaaagttgctctcttcgaacaagcatagttttaccttagcrcagttttgaaatagaaggtaatacactttagaattttctttactaaggtcatttagaattaagacagtttcttgtctgtctggacttgtttaattctggctttacaaaaaaatgagacagaaggtagaatgccatttagacagctttttctaccccagtatatacatgacattgtaccacctatatctcccttcaaggtaatttgttgcccagatacacagtgcagttggcagatggctttcatctgtcccatcatttagggtctatctcagctgcactgacatacctcagcctgatgaggaacaactcggagaggcatgaatcactgccaggtttccctctgagttagccaaggctttggagagccttcatcacaacttcgccctctgtc

SEQ ID NO: 611657 - DNA, 597 bp, Homo sapiens
tggatgcacaatggtagtccagctgttaaaatgtttacaggggtgagttgggatggtgctggtaggatgggatacactgatgagttttagtatagaatggctgtttataaatgttattgatgcattgcataaagataaagaacagatgagggtgagtaaaaggcaatcgaaaagcaaggtgaaaaccaaatgatcttggttgcatcaaagctctcatttcctgcaacagaagagcaaaggaagccgagaaccatgtctatgatataaatgttggagtgacagaactgcaaagatagttaaatgacagataaagtcaggtctattatgccaaggtcaggacctttgttaagacattttgagattttgctatttgggtggatgtctccgaatgggatgatgatgtctgagtggatttctctattatattttaactccccattctcctcccaaatttctgagcctgaagaagtgcacacacrtgcacacatacacacaaattcatacacacacacacacacacacacacacaccacctcttatcctcatggtggaagaaaatgcagagtctgtaagataacaggtcttaccttcccagga

SEQ ID NO: 611658 - DNA, 583 bp, Homo sapiens
ataatagtgacaaagtaaagtggacacctttgaaattgccccactcttagccatcatggctatcatgaaggcatgatagagatttgtgaccccaataatctaaacaaagtaggggtgtggtctctatcatttccccatttaattccaaatagatggattatggaaaatgacagattactcaaattaagtgaagtattagcctgactgaaaccactatgacaaatggatttcttggcaaaagcagattaatatggcctcaaaaacatgatatctggcctctgatttgataaacacattcatttctttcccaatctgaaaatattatagacaattttcattcatatggaacatacaacagtatatatttactggcttgccccaaggctaagttcacacacacacacacacgtgcacacacacacacacactctctctctatatatatatgtgtgtgtgtgtgtgtgtgtgtgtgtgtgtgtrtataaaatagcatagtctaaagagatttggatcatctagatatctgacagaacattacattagtccattatgtcaatggcattacgttcatcagaccaagtga

SEQ ID NO: 611659 - DNA, 583 bp, Homo sapiens
ataatagtgacaaagtaaagtggacacctttgaaattgccccactcttagccatcatggctatcatgaaggcatgatagagatttgtgaccccaataatctaaacaaagtaggggtgtggtctctatcatttccccatttaattccaaatagatggattatggaaaatgacagattactcaaattaagtgaagtattagcctgactgaaaccactatgacaaatggatttcttggcaaaagcagattaatatggcctcaaaaacatgatatctggcctctgatttgataaacacattcatttctttcccaatctgaaaatattatagacaattttcattcatatggaacatacaacagtatatatttactggcttgccccaaggctaagttcacacacacacacacacgtgcacacacacacacacactctctctctatatatatatgtgtgtgtgtgtgtgtgtgtgtgtgtgtgtgtatataaaatagcatagtctaaagagatttggatcatctagatatctgacagaacattacattagtccattatgtcaatggsattacgttcatcagaccaagtga

SEQ ID NO: 611660 - DNA, 589 bp, Homo sapiens
tgttagctttggaaagatcttacagcagaaaacagccctacagcagatccaggttacagtgaaagtagccctgacactagagtcttatggttttgcagaccttgtggtactggagatataatggctagtagaaaagaggcagtgtggaatttgyggcaagtctcagtgtaagaatcataatgtgggcccctgggattctggagtaaagctatgccatttttcagagaaaatcatatgccttttgaaaaattccaagagttctggagcaagatcatgtcaaataaagcagacaattacatatctttcaaaaacaacttgtggaatgctcttaggctctactatagacagaacagctgaccatgtgtctggacctgcttgtcaagagctgggtctatcagccaacaaatttataagtgatgggcctagcagaaattcagcataagacggaagaggtatatcccaaattgcacacgagaaggatcacagggcataagaaagctgcatgagtaggaaacccagacaacaatggcatccaccatcgttgccctagtgcctgcccttgagttcacaactctggcatagttgggtc

SEQ ID NO: 611661 - DNA, 589 bp, Homo sapiens
tgttagctttggaaagatcttacagcagaaaacagccctacagcagatccaggttacagtgaaagtagccctgacactagagtcttatggttttgcagaccttgtggtactggagatataatggctagtagaaaagaggcagtgtggaatttgtggcaagtctcagtgtaagaatcataatgtgggcccctgggattctggagtaaagctatgccatttttcagagaaaatcatatgccttttgaaaaattccaagagttctggagcaagatcatgtcaaataaagcagacaattacatatctttcaaaaacaacttgtggaatgctcttaggctctactatagacagaacagctgaccatgtgtctggacctgcttgtcaagagctgggtctatcagccaacaaatttataagtgatgggcctagcagaaattcagcrtaagacggaagaggtatatcccaaattgcacacgagaaggatcacagggcataagaaagctgcatgagtaggaaacccagacaacaatggcatccaccatcgttgccctagtgcctgcccttgagttcacaactctggcatagttgggtc

SEQ ID NO: 611662 - DNA, 619 bp, Homo sapiens
gcatccaccatcgttgccctagtgcctgcccttgagttcacaactctggcatagttgggtccccatatgaccagctgaaagaaaaaaaaattcagactatgaatgtgttggcttaatatgtgggtgcaagccaamaatggattttagctgcactgtaacctcacttagagatggccttgaaagactgccatgaatccttcctatgggcatagcttcataactttgggcagtgtccctggtcctatactttgtgttgagaaagaagcttcctgagattagaatatataagcacttatgagtagcagtgaatggcctagaaagctgatcagggccctggaagggaaaaaaatgcaaggtcaagtataagcacacatcttgaatagcatgtgattaaacatgtgagagttggcatgaagtgcagatttttatgttacatattagtggccactagaaagcattaaccataaaagagcactaaataaacacctgatattgtctgtgatttttggcaacagccacctcaaagtggatataataggtatataaatggggtgactgtggtggtagatatagaaactatgcatggatccaacaacatgggtttcagactagcaaggct

SEQ ID NO: 611663 - DNA, 598 bp, Homo sapiens
ccaattaggactactgtagacacagagattaactactcagatctcttctcaaagaagaacttgttcccagttgtrgggagtgcagtcagcagacagcctccagctctcatccccttcaatggctgtctcatctacagagagtcacttgaagagacattattgtcccaagaatctcacacctgctgactaagcgtggtgaagatataggggcctagaaattctgacccaacctgtgccaaatgtggggatgatgctcagagttctccatcagttaggctaggtgttgtcaggcttgcttcacagttcatctactcctcttgcccaatcctgcttcttccttttcctttcacaggtgttgataacctaagcaacaccttgcagcacaaactctgtctccacttctgcttacagagactcaacctacaaaaacttccaagccaaatcctccttctgtgattattaatacttacatttcaccactccttaactcagcatttccaagagtatctttctaggaaacaagatcccatcagaaattaacttttattctaccataatataaattcatgatgaaatagcttgataaatgattagtaag

SEQ ID NO: 611664 - DNA, 576 bp, Homo sapiens
ttattaatacttacatttcaccactccttaactcagcatttccaagagtatctttctaggaaacaagatcccatcagaaattaacttttattctaccataatataaattcatgatgaaatagcttgataaatgattagtaagactaagataaatggactttcttactgtatcaccagaccatttgacctgcaaaggtacttatcatgaatgaatattttccatcttgtgaatycctaaaacatcaatcctcctccacccattgccagtgataaactctttggaaaataagaggtcatatggtgaatttttcttatatctttccagaagtagaagaagtaagacttcataagtactataaatcatcaaactaactaaaaattaaaatcactatttgtaacaagagttataaggctacattatagcagctattatttttaccttttggagaccaaatagaaagagtgagtgatctgagcataaaggaagcttgagggaaatttaaatagtttcttataatcttttggtattatatatcttcattgataggagataatttaattacaaaacatgattag

SEQ ID NO: 611665 - DNA, 576 bp, Homo sapiens
ttattaatacttacatttcaccactccttaactcagcatttccaagagtatctttctaggaaacaagatcccatcagaaattaacttttattctaccataatataaattcatgatgaaatagcttgataaatgattagtaagactaagataaatggactttcttactgtatcaccagaccatttgacctgcaaaggtacttatcatgaatgaatattttccatcttgtgaatccctaaaacatcaatcctcctccacccattgccagtgataaactctttggaaaataagaggtcatatggtgaatttttcttatatctttccagaagtagaagaagtaagayttcataagtactataaatcatcaaactaactaaaaattaaaatcactatttgtaacaagagttataaggctacattatagcagctattatttttaccttttggagaccaaatagaaagagtgagtgatctgagcataaaggaagcttgagggaaatttaaatagtttcttataatcttttggtattatatatcttcattgataggagataatttaattacaaaacatgattag

SEQ ID NO: 611666 - DNA, 575 bp, Homo sapiens
gcatatactcttaaaattgcaaagattccatcattcatgtatggtttttagtgcccaaatgaaagccatctgccctttagttttgaaagaactaatagatagaaattttatactttttacaaggacatccaccctcatatatactttttgctgcccaaatcatctgtggttggctaaatggttagcttaagccaatcatattctccttgccactctacatttagaaaggggcatataaccaaatgcaagacagcacaatgtgagagaagttttctgtgggacttctggaaagtagatcctcattgctaaraagaagacataagaaaatatgaactcttccttctaatagacattcccaactctagctgtatcacctgcaattggagtagagctaacagaactgcagagaaactaagtcacagcttccatattttataccttgatcacgtcttacaccttgacttcttctgacatgagataatacttttcttattaagactatttgtactgggggtttctgatacatagagcaaacttgtctttgttgataggaggtttctaattcttttaaaaag

SEQ ID NO: 611667 - DNA, 340 bp, Homo sapiens
aatgtttagtagatttataatataaaattttagtcaaggattcttagaaatttttaattttgatgaataacacaaccccttataattttatattattatcttttggtgtttactacttgggaacccagtaaaatgcttcytacaaacttgtaatgttatgaactacaatacataactggttaggaaaaaatatgtcaatttactcaaaatactcacatctgtagggctaaactgaaatgtttatataaatattttaaaacaatatgacaatccaagaggattgggctactgtaaaccacaggcttgattcttatatgtgagatatgggggaaagagaggc

SEQ ID NO: 611668 - DNA, 554 bp, Homo sapiens
ttggattatcaattcctctgccttcttgtatgcattctttaaaaagagatacagtgtcacagtaatttaagtagaatattttattcatgtttcaccatgtctagttgtaagctctactaacttagatttttctattgtgtgacttattttaactatgttcaattgaacataactgctaaagttttgtttgaayggtagtagcatcaatatctcataatggctgtaataagaatttttgtttgtttgtttgtttgtttgtgttttttctgagacggaatctcgctctgtcacccaggctggagtgcagtggcgtgatctcagctcactgcaagctccgcctcccgggttcacaccattctcctgcctcagcctctccgagtagctgggattacaggcgcccaccaccatatgaaaatcatttcatataagagaatttcagttaaatgagcttatttacgttgatacatcacacaaataattgcatttatgaagagagaaagtaagacattttcaagtgggtttaacatttaaaacttcatttgattacctgttac

SEQ ID NO: 611669 - DNA, 591 bp, Homo sapiens
agagaataactggttcagagaacctcaagactaagggttgctaaaaatctttattagttttggtatttttaaacatttccttatttgtggaaaaatgtagaaaaggaaatrcccctatagtgcatttcattcttaagaccttattacatttttaatgtctatatttttaaatattattctgagtgcaaaataaagtttccagaacagagcagattattatttacttcaacaaatacttcagttccccatgtaccactgatatctgctttccaagacaaaacaatgagatccaaatgagatgtcatcctatgcatatcggtttgtactgtgggaggtggttgcacaagaaaaggggaagggcatctatcccttctcccttaccgcacttggtaattaatttccaaacacaagagataaaatacaattagtaagttgagggcattaaaactagtttttttttttttttttttggtaattcgaagtacaacaaaccattatagattctcctttctttctctttctttctttctttctttctcttcctttctttttcttctttttttctttctatatttttaattttaaaaggta

SEQ ID NO: 611670 - DNA, 576 bp, Homo sapiens
gtccactgtgaaagcttttttagctgacacagaagattaaatrcatacttctaaacgttagcaattgagaaagtttggcaattggtcaacgcccagcctactgtttctacagggattagattggcaatgactattgggaaattcctttcttattctttattaaaaactgacttccaaagactgtttcagtgagggctccatcaaaaaagcagaactctcatgagtgatacaaaacaagggagttattatagggagtagaccttacagagttcatgagaggcatttgtctgtgcatagggtgatgggcttgaagtgcctgtagatgacaagggacagcagtcaagatgaaaaggtggatgtgaagcagtggaaagaaataacaaactgctacccacaaaaacaaactgaaactatgtccaattgcaatgaactgggtaacctgaagaaaaagctgggacttaccataaagccgcacaggtacctgatccaagattaggagaagttgaaaaggaatatctggtggaagcatagggagctgcaggcttggctgctgcccacatcaaaaatgtgagtcac

SEQ ID NO: 611671 - DNA, 576 bp, Homo sapiens
gtccactgtgaaagcttttttagctgacacagaagattaaatgcatacttctaaacgttagcaattgagaaagtttggcaattggtcaacgcccagcctactgtttctacagggattagattggcaatgactattgggaaattcctttcttattctttattaaaaactgacttccaaagactgtttcagtgagggctccatcaaaaaagcagaactctcatgagtgatacaaaacaagggagttattatagggagtagaccttacagagttcatgagagrcatttgtctgtgcatagggtgatgggcttgaagtgcctgtagatgacaagggacagcagtcaagatgaaaaggtggatgtgaagcagtggaaagaaataacaaactgctacccacaaaaacaaactgaaactatgtccaattgcaatgaactgggtaacctgaagaaaaagctgggacttaccataaagccgcacaggtacctgatccaagattaggagaagttgaaaaggaatatctggtggaagcatagggagctgcaggcttggctgctgcccacatcaaaaatgtgagtcac

SEQ ID NO: 611672 - DNA, 428 bp, Homo sapiens
ttacatacaagcaaatgtaactgtagtaacacatgaggtaaaaccataaagtagatttttttagaaagcaaaattatttttgtctttctgcccctttcatatgatcttttgggctagcaaatcccctgccctacaatgaagattccggcaagccccattaatttctgattacttttacacactatcaaatgttctcaggtcatttgaaggctaacaggtcagccacaawttagtcattaatatgtcctgtcccatgtaatagtcgaagcttcaatctttgtttaaagttaaaactcccccttctcttccatttggaagagggatttataattggcctttttctcttatcttcagaaaatatacaaggaaagggaaaaagaggagtaaaggtattagttaaaaattttctcaatgatggataacatgga

SEQ ID NO: 611673 - DNA, 423 bp, Homo sapiens
tacaagcaaatgtaactgtagtaacacatgaggtaaaaccataaagtagatttttttagaaagcaaaattatttttgtctttctgcccctttcatatgatcttttgggctagcaaatcccctgccctacaatgaagattccggcaagccccattaatttctgattacttttacacactatcaaatgttctcaggtcatttgaaggctaacaggtcagccacaatttagtcattaatatgtcctgtcccatgtratagtcgaagcttcaatctttgtttaaagttaaaactcccccttctcttccatttggaagagggatttataattggcctttttctcttatcttcagaaaatatacaaggaaagggaaaaagaggagtaaaggtattagttaaaaattttctcaatgatggataacatgga

SEQ ID NO: 611674 - DNA, 545 bp, Homo sapiens
tgagttctttggatgatccaatgtatataatccatgaaagaatatgacatatggtttggcacatagatatatttaaaatagtcagcttctaatagtaattctactttctttttcttttcttttcttttcttttcttttttttttttttttttttgkggcagggtctcattctgtcgcccaggctgaattgcagtgttgcaatcttggcttactgcaacctccacctcacaggttcaacagattcttctccctctgcctccccaggggctgagactacatgtgtgcaccaccatgcctggctaattttttatatttttggtagagacagggtttcgccatgttggccaggctggctggtctcaaactcctgacctcaagtgatccacccactcagcctcccaaagtgctgggattacaggagtgaaccactgtggccagccataattccactttcttcacaacattccttttaagaaagtatcatgatccccattttataaaggagaaactgaggctcagagacttgcccaagatcacacaacaat

SEQ ID NO: 611675 - DNA, 539 bp, Homo sapiens
tgcatggagtagctccattctctatgtcatctccacctgctctccctcttcaactcttgatcctattcactgctctcctctgctgactttcaaagttgtggtgctcttcttgactgcctattgtagggtttctagctttgccagtccttgtgttctgaaagctcttgatgtcccagtcttcctaatcccaccccactccttgctcctcaactctcagtaggatgaggaagggtagaggccaacgtattcctggttccatctttggagaaggggccatctggcatagccaaagttgagtcctctgctaaatcactgcatataagcatttgaaccaaactgtgggtttgcctagtgtcttttcgagcctcttcagtatatttctgattatagataattaaatgaggccaggcacagtggctcccgcctgtaatcccaacattttgggagggccagttaggtggattattgacctcaagaatttgagatcagcctgggcatcatggcgaaatccccctttwtacaaaatatttttatttttt

SEQ ID NO: 611676 - DNA, 540 bp, Homo sapiens
aggtttcaccatgttggccaggctggtctcacactcctgacctcaggtgatccaccctccttggcctcccaaatgctgggattataggtgtgagccatcacttgcggccctctaccttttttttcagctctcatcctatcaacaggtgtcctttctgcagtctatttagtgccataaatttcactttttttttttttttgcttttattggagattttactgtttgaaatggtctccagatatagtgctgaagtgctgtctggtgtgtttaagtgcaagagagcagtgatgtaccttcagagagaatatacatattagatacgcttcattcaratatgacttaaagtattcttaggcatgagtttaatattaatgaatcaacaatgatattaaataaggtacctttaaaaagaaacacacatacatcatggttatgtattgatcagttgacaaagatgttgtgaccagagatttttcaggaacctaatcctgtatttccagtaagagcaatggctcactattccagtaattcagtgtttgc

SEQ ID NO: 611677 - DNA, 454 bp, Homo sapiens
cacccagccattctaggcttcactgaaccctagaatccttcagctcatcttcccccaccccccagctcacctraggtgagctcagccagtcgtctcaaactaaccccaattgcctagcaattctcttatattagttagatgatttatccccagaagcctagaatcaggtttatggggccagcctcaggcaagcatctagaagaagtttttagcaggagtcctaccctgcagtacttggggaaggcataagccaaggataaaatggagctggatggttgggggagggtccagagcttgaccctcagctagagtggctggtaggaaaggcggactctgcgccttaaccaaccatgccccccacaccgcccagccaggcaccccaggcagaggccagcgtgtgcaagatttgaaaggtttcctgccaggaggctggagcattcgttaggacttgagg

SEQ ID NO: 611678 - DNA, 621 bp, Homo sapiens
cagaattggtatcaacatataaagaactcttactaatcagtaaggaaaagacaaatactcaatatcaaataggcaaacaataccttcataattcacagaggtcaaaatacmaatggccagcaaagttcagactctctagaaatcaaagaaatgattattaaactaataatagggaattctgcctgttaaattaaaagagattattttttaaagaatttggtaaaaattcacaacagtgagatccgttgttgactgctgattcaaactagtactgcattttgggagaatattaaaaattgttcaaattacatactttttgaccctgacagtatacctgtaagaatttaagaaaattattgtgaatttatgatttcatttatccaaccaatatttgttgatttgtaagaggaacatttttgttgttgtgtgctgagtattcatgaacatttattatcgctaataactttgaaaagctgaaaacagggggtcactgaattgtggtctaatgttagaatgttagaacaatacttagctattaaaatgtgtttaagaatggttattagtaagggggatgtgttcataatataccatttgaaaacatcaagctacaaagtgagcatg

SEQ ID NO: 611679 - DNA, 483 bp, Homo sapiens
aagcagatttcccctttggtattctcatgatagtgaggaagttctcacgagatctggctatttaaaatgtgtaacaattccccctttgctctctgtcctgctggccgtgtgaagatgtgcttgcttcttcaacttccaccatgattgcaagtttcctgaggcctctccagtcaygcttcctgtacagcctgtggaacggtgagccaattaaatctcttttctttataaattacccagtcacaggtagttcttaatagcaatgtgagaacaaactaatacactccccaaagctcaaatctcattgctatagatatcagcaagaataggctttttgaaatctgtgtgtggaacgcttctatcaccttattgttgtgccatcacatgaaaaagtttcagaagacatgggctggaaaatttcttcagtatttttgcagggtgaggctgggagtatagactttacaggctttttctcatctatgaaag

SEQ ID NO: 611680 - DNA, 504 bp, Homo sapiens
agctgggattacaggcgtgcaccaccatgccagctaatttttttttttttttttagtagcgacgggtttcaccatgttggccagactggtctcgaactcctgacctcaggtgatccacccgcctcggcctcccaaagtgctgggattacaggcatgagccaccacgcctggccagaaagtcagatttttaacacatgaaacactgataccatacaagcagaagaagcaaatgagcaaaagtatagggatcttttttctttatacatttctttcaaaatgggcaatccaaaatggattaaaaaagtcactgaaagaccctgcaktaaagagctagcagactacaggactcagagaaaataaagtaattgacaaggaggttctgatagtcaagggaagcctttgaaaggtccagaacatgtggttcatcaggaagctcttgaagcctctaggagcataatgggatcactagacaatgagatggagacgccaaaattagatttgcct

SEQ ID NO: 611681 - DNA, 470 bp, Homo sapiens
aaggttggaattactgttagctgaagtggagatgatggtggttatttgattgtattgtcttagatggcaggttttagccagaagagtgctgggctaggaagcagaattgttttcctmtcttgggagaagagatgtagcagcagggttttggacttgttaaatacgaggtgcctgttaggtatccagatggaggtttcaagcagttgggggtttatgcaggtctggagttcggtggggggccagtccaagctggagatacaatttgggattcaacaccatgtagttaatatttagaactaaagagtctagctgtatagtcccagctacttggaaggctgaggtgggaagaccgcttgagcccaggagttcaagaccagcctgggcaacatagaaagactctctttaaaaaatgaaaattaaaaaagataaataagaaataaaagtacaagtctccatgagatcgcttagga

SEQ ID NO: 611682 - DNA, 413 bp, Homo sapiens
acttcctacagggagtatatggccacccctacgaggtaggtgcatgtggtcccattctgcagatcagcagactgaggcttcatgcatctaaggaaattaccaaggtcatgctgctggtaagtgacagaacagggacagggacccaggtgtgtctgattcagtctgtctgtcttaatctctgtcccattccggcaaggaaaaggggttgctagaaattattgtaatgcrttgaagtaatgatttccttatgtggatgcaatttattcctttcagagcacttttaacattcatttcctttttcccctcaaggtgtagggctgagaattagctgaagaagttaccttctccatcttacagatttggaaactgaggcccagagatgggggggtgccttgcccaaggtcacccacaga

SEQ ID NO: 611683 - DNA, 460 bp, Homo sapiens
gtctcaatgccctcgacctctgtagagctgggagtgggagcagctaaaaccattttgacccgaatcactrggaaaattcaactggatgaatagtctagatagaatctgaacaggctgatggaggtcttggcagttagacaatagttgaaactaggcacattcctgttcttttatttattcaatatatttaagtatgtattaaatatttgtggaatgggtgagtgaatggaagtgtaataagtaagtgaatggaagtgaatgagtaagtgaaccaaaagagcaatgaatacatggaatgactctgagcttctgagagttggaagctagatgcctaattggcaataggtagggagagaatgagccaacaatgcactggattagagatctgaaatgattactctaaagaagcatattttaacaagacagggtcagataagaggctagccccaaagctgtacaa

SEQ ID NO: 611684 - DNA, 576 bp, Homo sapiens
aggccatgcgcggtggctcatgcctgtaatcccagcactttgggaggctgaggtgggcagatcacctgaggttaggagttcaagaccagcctggccaacatggtgaaacctgtctctactaaaaatgcaaaaattakccaggtgtggtggcgtgcgcctgtagtcccagctactcgggaggctgaggcaggagaattgcttcaacctgggaggcggaggttgcagtgagccgagatcgtgccactgcactccagcctgcaacagagtgagactccaactcagaaaaaaaaaaaaaaaaaaaaaaaagagtataagcaattctctgagttttttacacttagaccggacaactataacaggagcttccttaaagattccagaaaattccaagatctgtgattctgtgagttccaaattgatttgatttttcctcaatgtctttttttggaaaaaaaacaaaaagatgtacatgtgttgagagaattttctgtccactatgagaagtggaggggagtaatggcaaagattttattttaaatatgaagtcattaatataaaagacagaaaagtgatgaa

SEQ ID NO: 611685 - DNA, 657 bp, Homo sapiens
ttgtctaattgctctggctagaacttctagtactatgttgaatagaattggttccagtgggcacatttgtcttgttctggatcttaaaggaaaagctttcaactttccttgttgagtatgtcagctgtgggtttttcatatatgacctttatcgtgttgaggtgcgttccttctgtaccaaatttgttgggagttttactatgaaagaatattggattttgtcaaatgcttttttctgcctctaatgagatggtcattttttttccttcattccgttgatgtgttttacaacatttatagatttgtgtatgtttgactctccttgcatccctgagatgaataccacttgctaatgatgaatgatgttaaaaatgtgctgttagatttgatttgccagtgtttttttttgaggacttttgcatttaggtttatcaggcrtattagcctttagtttttttttttctttttgtaatgtcttcatgttcctttggtatcagggtaagccagcctcataaaatgagtttgaaagtattccttcctctttaattttttagaagagtttgggaaggattggtagaatttttttaatgtttggtagaattaactgtgacgccatcaggtcccaagcttttatttaatgggagattttaaaattat

SEQ ID NO: 611686 - DNA, 655 bp, Homo sapiens
ctttacaatcttttgttttaatgatgsctttgtaggaatcctggcagaaaatacgttctgttgcttttccctattcatctttgcttacagggcagacttgatagattgttctcactaaactttttcaacttaagatttctgactccttttggccagggaagccccaggtttggccttctggactttgaaagcatgtgaatttatttttattggaattcttctgactaatcgttctgctgccgcatattgtaattatctgcccaagttatcttctggaaggagatgctgcctctttttccttttaaggactggacactttcctgtctgtgatggtgaagggctccccagtgcatcttgtccctattgaagcttcctagctccatcgtcatggtaacaccatggcatggcaaggagatgcagaggacctatgatgacattcaggctcagcttcatgggtgtatgacctgtgcattcactcaaggccctgcatttagaaaggcaaagaccagcagggtgcagtagctcacacctgtaaccccagcactttgggaggccaaggtgggtggatcatgaggtcaagagatcgagaccatcctggccaacatggtgaaaccccgtttctactaaaaatacaaaaattagctgggcatggtgg

SEQ ID NO: 611687 - DNA, 583 bp, Homo sapiens
atcaaaaaaaaaaaaaaaaaaaaaagccaccctttttcaggctgggtgtggtagctcacacctgtaatcccagcattttggaaggctgaggcgggtggatcacctgaggtcaagagttcgagaccagcctggccaacatggtaaaaccccgtctctactaaaaatacaaaaatgagcygggcctggtggcatgtgcctataatcctagctacttgggaggctaaggcaggagaatcgcttgaacccaggaggcggaggttgcagtgagctgagattctgccactgcattccagcctggacgacagagcaagactccatctcaaaaaaaaaaaaaaaaaaaaaaggaagaagaaaagaaaataggaaaggatgtatgttaattagaataggcttgagaaggcttcactaacaacctcaaatcttaatctgtgcatttgtcacaacgagggtttattcctctctcctctactcttttatgtctttgttaggatatcaacattctagcaaaatcttatctgcaaaactttctggtcttcttcctctaatgccacatttttaaattctctgttttatttttctttat

SEQ ID NO: 611688 - DNA, 583 bp, Homo sapiens
atcaaaaaaaaaaaaaaaaaaaaaagccaccctttttcaggctgggtgtggtagctcacacctgtaatcccagcattttggaaggctgaggcgggtggatcacctgaggtcaagagttcgagaccagcctggccaacatggtaaaaccccgtctctactaaaaatacaaaaatgagccgggcctggtggcatgtgcctataatcctagctacttgggaggctaaggcaggagaatcgcttgaacccaggaggcggaggttgcagtgagctgagattctgccactgcattccagcctggacgacagagcaagactccatctcaaaaaaaaaaaaaaaaaaaaaaggaagaagaaaagaaaataggaaaggatgtatgttaattagaataggcttgagaaggcttcactaacaacctcaaatcttaatctgtgcatttgtcacaacgagggtttattcctctctcctctactcttttatgtctttgttaggatatcaacattctagcaaaatcttatctgcaaaactttctggtcttcttcctctaatgcyacatttttaaattctctgttttatttttctttat

SEQ ID NO: 611689 - DNA, 553 bp, Homo sapiens
  misc_feature 1, 2, 3, 4, 5, 6, 7, 8, 9, 10, 11, 12, 13, 14, 15, 16, 17,18, 19: n = A,T,C or G
nnnnnnnnnnnnnnnnnnntctgtctatgtatctatctacctatctatcatctatctatcaatcattgataacagtgctagatatcaattgattatactctcacctctaaatctactgctgtttaccctgttttgtgattttggggctgggccctatgacatttcacatttgagagttggttcagtcttargttttgttgcgagagagcctagagagacactgcagacatagcaacaacaacaaaaacaacaacaacaaaaataaagaggcttttattgtgtgcttttctctttctccttcagctgcacatctggcagtggtgagtggccctcagtctccactgagggacactgagtgtctccagcatctcaataggaagcttcctgcagaccaactataatctattggcacccaagtggggagtttctatgggccagcttcaacccatgacaccctagtaaaagtcaccaacatccgaacatgtgacctcctgcagaccagctctggcccacaggacccagtgaagttctctgctcttcagcaggtagcagt

SEQ ID NO: 611690 - DNA, 553 bp, Homo sapiens
tttccttcctgtttccacgacattatgttctgccagcatagaggtcttagttccagagagaggaatgctgccaccaggagacacaacaataattccattaaactgggagttaagattgccacctggacacttgggctcctcctacctttaagttaacaggctaagaagggagttacagtgttgactggggtgattgacccagactatcaagatgaaattagtctactactccacaatggaggtaaggaagagtatgcatggaatacaggagatcgattagggcatctcttagtattaccatgccctgtgattcaggtcaatgggaaactacaacagatcagtccagccaggactacaaatggcccagaccctttaggaataaaggtttgggccactccaccaggaaaaaaaccacaacctgctaagatgcttgctgaaggcaaagggaatacagaatgggtagtagaagacggtagtcatmaatatcagctatgatcacatgaccagctgcagaaatgaggactgtaattgtcatgattatttcctccttctg

SEQ ID NO: 611691 - DNA, 591 bp, Homo sapiens
aacttggcagctgtatgagcagacagcgagctagctgcaggagtttcttttcatacctgactggcccctggaatgccagtaagacagaaccgctcactcccctggaaacagagctgaagccagggagccaagtggtctagctcagcaaattccacccccacggagcccatcaagctaagatccactcactaccagcacagcagtctgaagtcatgctcaaacttggtgggtggagtggcatccaccattactgaggcttgagtaggtggttttcccttcacagtataaacaaagcctctaggaagttcaaactgggtggagcccaccacagttcagcaaagctgctgtagccagactgcctctctagattcctcctttctgggcagggcatctctgaaagaaaggccgcagccccagtcaggggcttatagataaactcccatctccctgggacagagcacctggcgagaggggcgcctgtgggcacaggttcagcagacttaaacattcctgcctgcygactttgaagagagcggcggatctcccagcatagtgcctaagctctgctaagggatagacgaccccctcagt

SEQ ID NO: 611692 - DNA, 492 bp, Homo sapiens
gactgcgccttgagggactgtgctatcctgcccagatactacgcttttcccaaggtctttgcaacccacagaccaggagattccctcaggtgcctacaccacaagggccctggatttcaagcacaaaactgggcaactgtttgggcagacaccgagttagttgcaggaatatttttttgtattccagtggtgcctggaaygccagcaagatagaaacattcactcccctggaaagggggctgaagccagggagccaagcggtcttgctcagtggataccaaccccatggagcccagcaagctaagatccactggcttgaaattctcgctgccagcacagcagtctaaagttgacctgggatgcttgagcttggtgggggcaggggcgtccgccattactgaggcttaagtatgagggttttccactcacagtgtaaacaaagccaccaggaagttaggaccaggtggagtccaccacagtgctgcaaagctg

SEQ ID NO: 611693 - DNA, 596 bp, Homo sapiens
tttacctgcttggagaatctgtccttctcctgaaaacctgtatttggtcctgtttcaggaaattgactcaaactttacttcctctagaaatcttttttgatcactctcatctttgggccctgttgaatcatagtttaccctcatatcatagaatatatcacattctattgcttttattagttcacatgtctattttcccctgttaaaatgtatgtttcttctgggtatggagtgtttttattatctctgttctcccagtgtttggcacaatctgtagttggctctcagggatcaatcaaagttggttggatgaacsagtaaatatgtttctgtaaaatgcttcatagaatttgtaattagtatcttcattttatgtcaaataattcatatttaaaatcattacaagactacttgatttatagtagaaagaaaagacaagagctttctagaggaaatgtcaaaggacagtccatctctcttttaccaatgggatgtgttaaaataaagcccaaaagatattctccatatatcacctaatccttcatcaaaaccaccaataatgacaatgagagaaaacagttgaaagaaaggttaaa

SEQ ID NO: 611694 - DNA, 451 bp, Homo sapiens
tgtatttgttttctttgggggcagatagaagccaaagaaaccacaataaagtctaaagcacagcacttccttcacttacataaggattacagaagcaggtgcacagtgtttgttkcttcttggtgtaaaataaggcatcagttttcatattaataattcatatttgttaatttatatttcattttaaaaaacttgcaccaacttaatctctgctcaccccctctgaactgtaggtactcttggccctggtgcaaccaagcctcaggaaactggcttattccagtgagactggagaaaagggaaccctcacacactgttggtaggaatgtaaattagtacagctattatggaaaacagtatggaggttcctcaaaaaattagaaatagaagtaccatatgatatagcaatcccactactgggcatatatgaaatcagactcttgaaggataa

SEQ ID NO: 611695 - DNA, 451 bp, Homo sapiens
tgtatttgttttctttgggggcagatagaagccaaagaaaccacaataaagtctaaagcacagcacttccttcacttacataaggattacagaagcaggtgcacagtgtttgttgcttcwtggtgtaaaataaggcatcagttttcatattaataattcatatttgttaatttatatttcattttaaaaaacttgcaccaacttaatctctgctcaccccctctgaactgtaggtactcttggccctggtgcaaccaagcctcaggaaactggcttattccagtgagactggagaaaagggaaccctcacacactgttggtaggaatgtaaattagtacagctattatggaaaacagtatggaggttcctcaaaaaattagaaatagaagtaccatatgatatagcaatcccactactgggcatatatgaaatcagactcttgaaggataa

SEQ ID NO: 611696 - DNA, 451 bp, Homo sapiens
tgtatttgttttctttgggggcagatagaagccaaagaaaccacaataaagtctaaagcacagcacttccttcacttacataaggattacagaagcaggtgcacagtgtttgttgcttcttggtgtaaaataaggcatcagttttcatattaataattcatatttgttaatttatatttcattttaaaaaacttgcaccaacttaatctctgctcaccccctctgaactgtaggtactcttggccctggtgcaaccaagcctcaggaaactggcttattccagtgagactggagaaaagggaaccctcacacactgttggtaggaatgtaaattagtacagctattatggaaaacagtatggargttcctcaaaaaattagaaatagaagtaccatatgatatagcaatcccactactgggcatatatgaaatcagactcttgaaggataa

SEQ ID NO: 611697 - DNA, 528 bp, Homo sapiens
ggtggctatccagtttacttctcctgaaaagtgaagggtaaggagcgtgtgttgtttttctgctgtgtttccatagggtagcggcatcctgcctttggcttcagtgcttgaagccaaagaacaattaacagaaggtagtgtcaggtgaggatcagtgtagtcatttgctagggctgccataamaaagtaccaggaactgagtggcttaaacaacagacattaattgtctcacagcgatgaataccagaagtctgaaatcaatatgtccacggcagtcattccttctgagtattgtgagggaaggatctgttccaggcctctcttcttggcttatagatggctgtattttctctgtgtctcttcacatcgtcttccctctatgtatttctgtctcctttttgcaaggcaccagtcatattgggtaccagtgatttttccttcattatctccatgaatactccatctttaggcctttacgaatgtcatattctgaggcactggataagactacaacatatcttttgagga

SEQ ID NO: 611698 - DNA, 569 bp, Homo sapiens
aaattggaagttgcagttgccttcccagggcctgcatgccttagtctacattgtagtcacgcatgtaagatgtgccaaatcaaaaataattgtttttagaaacaaatgccagctttctaaggaccactcaatttatttcatactttttttccacaaaaagtagacatttcagagtggcattatcatctaccagaaaaagttatctgatggcatttggcttaccagaatgagaattctttttasattgttaagcagctactgactacttaacagttctcacattacactgaatataagcagtattgctaaaagccaatactcatctgacatagtgaaattgaaattaagcacaaaattatagaaaacatcagaatattattattcacttctcagaaacagtgtcatctaggcagatggcatggctaattcctgtaatccccacactttgggaggctgaaataggaggatctcttaaggccaggagtttgagaccagcctgggcaacacagcaaaaccccatctctacaatcaaaataaaaacaaattagctgagcatggtggcacatgca

SEQ ID NO: 611699 - DNA, 544 bp, Homo sapiens
aatgcaatagcatgtatttataaatttttatatcacaaactagacttctagtctctgttccagtatgtaagctacttggaaattgtcattctcatcctcaaaacaaagcaacaacaaaaaaagctgaacaaactgaaaataaacactcttcttatatccttcagaaaactgaggtcacagggcaaactcaaaatagagaaataggttaatacagaaaatcacaattaccagaccagaagcaaaaatyttctgcaagaaccagtatcaagatatgaagatttcaactgtaattgacaagttgttggcagctcagtgtggacaaatttgagagttaaaaactctagggggcctaatcttaggggagcccctattcttttgtgagttttacatctagaagccctaccaggttttcacagtgaatatctggtaacaaaaaaaaaaaaaaaagaaaacaaacaaaaaaaaaaacccttctgtttcctgaagggtatggggaaagtttccatttaaaatttgcccagattattttgttcttctcaaacag

SEQ ID NO: 611700 - DNA, 549 bp, Homo sapiens
tccccttcactttcaagtacaccaatcaaacaaaagtttggtcctttcacatactcccatatttcttggaggctttgttccttccttttcattcttttttctctaatcttgtcctcacaatttatttcattaagttgatcttcaatctctgatatcctttcttctgcctgatcatttcaggtattgatagttgtatatgcttcccgaagttctcacgctgtgtttttcatctctatcaggtaatttatgttcttctctaaactggttattctagttagcagttcctgtaaccttatatccaggttcttagctttcttgcatkgggttagaacatgctttattagctcagaagagtgtgttattacccaccttctgaagcccacttctgtcatttcatcaaactcattctcggtccagttttgttcctttgctggcaagaagttgtgattctttgaaggagaagaggcattctggtttttggaattttgagcctttttgtgctggattttcctcatcttcatggatttatctacctttggtctttgatgt

SEQ ID NO: 611701 - DNA, 620 bp, Homo sapiens
gaacgtttaagtctgctgaagctgcacccacagccaccccttctcccatgtgctctgtcccaaggaaatgggagttttatgtataatcccctgactagggctgctgcctttcttttggagatgctctgcccagagaagaggaatctagagaggcagtgtggttacagtggctytgcttagctgcagtgggttctacacccagtttgaatttcctggtggctttgtttacactattaggggaaaaccacctactcaagcctcagtaatgatggacgaccctccccccaccaagcttgagcatcccaggtcaatttcagattgctgtgctggcagcgagaatttcaagccagtggatcttagcttactgggctccatggggttgggatctgctgagcaagaccacttggctccctggcttcagccccctttccaggggagtgaacggttctgtctcactggtgttccaggcaccactggggtatgaaaaaactcctgcagccatctcagtgtctgtccaaacggccacccagctttgtgcttgaaacccagggcgctggtggtatagacacccaagggaatcttctggtctatgggttgtgaagactgtgggaaaagagtag

SEQ ID NO: 611702 - DNA, 282 bp, Homo sapiens
aagggacaaaagaagttgtaaccagtttggatgtttacctgtgagctagcattatagaraaagtggagatctgggagaaaagagagagacaagctcagaaatttagagatttgtagaaggggaggaaagcaagcagagaagtgggctgtacttggttccagatttatgggagcagcaagccaaggaaggttatctaaagtggcacacctaccaggtatgctataaataagccccaaagtcagctgaaggaccttatgcatttcaaatcagcctaacttaccc

SEQ ID NO: 611703 - DNA, 641 bp, Homo sapiens
tttgtattcactgtattcacagccacttccataataccttttacaatgctgcattcagtaaatgagcaatgaaaatgaatgagtcagcctaggctagaacacaggtcttaaatcccaatctactcctctttccaccacattcatattctagttacgctttacttacaatgaatcttttcactctatataaatgaaattaaatttgttaaccagaagcagactgacctgaagctactaaagctcaagcttgtgggcctctcatcaggcttcctagtcccaataactcagtgtatatttacagtgctgcatttactttttacttaaggaggcctcacaaaactgtatagccttcatgtcctgcacaacctgctgctaycatataaaatgaaaatgagttttcaccaaatgtctaagttgtcactgagatgactgaactgaaattattgatgatattatggatgaaaatatactctggattactcaggctcatctttaagagatttcatactcctgtgtagctgaaatgtagattcgaataagaaataaatctgagttcattctttctatactcttcataattatattagcttcaaccatctcttttttttttttttttgagacagggtctcactctgccgccc

SEQ ID NO: 611704 - DNA, 611 bp, Homo sapiens
tcccaagttggaattctcatcacagtaatatcagcttctagagtctcagcttttgcaacaaccctggcgccagaaattttcttatgcagcaccatcctgggactctggggcccactggcagtctaaatttgagcttcaattatctcgttgaagaggggagccaatgaaatataaagctttaagggtagcttggaaacttttctctttagaggaggtgaaatacaggattaagtgcctcactgagtccccagagctgaatgtcaaggccagccaagaggtggtgatttcggtttattttacatgcagaagtaggggcccgggttacctccttctcttagaattttggggaaattgatagtccagtgactcctacccacttttgggtgaaggacgatttggaatttgaagtgtggggagacaggcctgtgaagtccgaaggactcactgggtctccagatcccccaactctggaatgcagtgaatacccacccccrtgtttcagagcatctctcccatgtgttagacgtcgtgcagtcctgcattttggctgagacacctaaccccggtgcactcaggtcagagcgccagggcttcaggcagacagcaatggg

SEQ ID NO: 611705 - DNA, 591 bp, Homo sapiens
gcatagatgatggttaatacatactttccaagataatctgagctggagtgttcactagaaacaggagcacaaggccagaactgtaaggcaaattgctttcccacaaacgtttgtctgagaataagaacattcaccccattcacttaatttctcatcatcagtcatgtcattatattttcaaggacctcacagtgctggaaagtggtgtagttataaataagcataaaaacagatgggtgatcccagtcctctaaatataatcggggatgccaaatcttttcaaagagaattcatatatacaacttaaaggccaaggagcccaaytcaatcaaaatttgagccaggatatgctaagttcaatcagcttgaatatgggcaaagtgtaagacctagccagcacttcagatatatacagagaaccacattttctcaagtttccattgttattttccacacaaatttagtgttagtcttcaaagggattgttagatttggtttgggccgggagggtggtgagagtcagtgccccaggctcctgtccttgtctactcccctttctttggtactctctctgcttcagcagtttgccga

SEQ ID NO: 611706 - DNA, 640 bp, Homo sapiens
tactcagctagactcttaaaagaaaaactattagaaataagaaatttgatagtgtggatagtatgatggaagctgacaatttattatttaaaatttctttggaagttggatcgaaaagatgagaagctcagaccttgaatcagactaaatttacaagaggagacacaagatcgagggacatttattctctaagaaatctgatccgaatggggaaaatgagatgtagcggcaaggcaatgggtctgcatagtatacaactcaggcaaggtttgtgcccacaaagaaaaatggttgggagcaataattccatcttatttatacatattttattactagtttttttttcatgttttcaccacacagagattccatgaagcaaagagaggcttagttttgtaaagaactttgcaattttcctggaggaaagttgtcgccaygaaggactttattaccacatactttggtttccaggtgcaagtgagtccaaaccccaggtgcaaatatatccaaatttcagcaccataaggtttcagtttctcacttgtgttttttttatagtacctgccaacacatgaaacacggtagaaaggtttgatcaattttttaaaatgaatttaggaaaaaatagtaacttacagaa

SEQ ID NO: 611707 - DNA, 295 bp, Homo sapiens
ctggcaaacatagcatagtttggctgtatccccacccaaatctcatcttgaattgtaactcccacaattcccatgtgttgtgggaggaacctggtgggrgatgatgggattatgggggtgggtctttcctgtgctgttcttgtgatagtgaacgagtctcacgagatctaatggttttagaaacaggagttttcctgcacaagatcttctcttgtctgctgccatgtgagatgtgccttttaccttctaccatgatagtgaggcctccccagccatatagaactgtaagtccatt

SEQ ID NO: 611708 - DNA, 530 bp, Homo sapiens
aatatacacataattccagtccccaaagtattaagggcagggaggacagaaaaaaactgaaggaatacagtcatccctctgtatcgaggagatttctctattcagaaatccctactaagataccaaaaatctaagaattctcaagtatcttatataaaatgtcatagtatttgcatataacctatgcacattctcccatacacttaagtcatctccatattataagtaatttacattatattaactaatataatmcaatatatattagatatataatataatacaatgtaaatactatgcaaatagttgttatactgtattgtttttcatttgtattcttttttattgttgtattattatttttattgttctttttatcttcagttgattgaacacttagatgtagaaccagcagatatggagggacactgtgatgccaaaataatgaccaaaacagttccaaattgaatgaaaactataagcttacagatccaaaaagctaaacaaatgaagaaaattacaccaagaac

SEQ ID NO: 611709 - DNA, 586 bp, Homo sapiens
aaatgttaagactttttgtaaagtaaatatgattgacttctagttacggccaagtgaggagagtgacaaatcctctctgagagaagcaacctaagctggagaaaattgacaaaaacaaccattttggtttatggaaattggccaaaggcatataacaatctgagaagtgttcagtcttgaaaaagctgaatttcaggtaaagaaagtgggaattcatagcactctggcrtggggctcctcctatcctgttcccccagctcagtgagcatgaaggctctgccagggatgggcaagccatggaactagcactctttctggcagcctggagaagtgggtggtacctaccccaatggcattgtcagaataagtgacttcagggatgtgggacagtaggggagggccaataacttggctccacaggcttgagatttcagtcataattggcacaatatttttcctagctttacacatgtgccgtgaagactggagaggggccaaattatttatgtgctcctggctgaccctgacaatgtgtacctgcatttaggaggccagaaaggacttggtgaaaagtaaaacctgggac

SEQ ID NO: 611710 - DNA, 632 bp, Homo sapiens
aacatagcaaaaccctgtctctacaaaaaaatgcaaaaattagatgggcatggtggcgggcacctgtagtcccagctacttggggggctgaggtgggaggatcacttgagctcgggaggttgaggctgcagtgagccaagattgcatcactgcactcctgcctgggcaacagaatgagatcctgtctccaaaaataaaatacaaataaaataataacaataaaaaacaaagtgctgaaagagaaaaataactattaaccgagaattctatatccagcaaaattgttcttcaaaaaggaagccaaagtaaagatatcctcagctagacaaagaaagtatttggtcttcayagacctgcatatgcatagtaaatatattattgtttactatattgtatatattgtattgtataattaaagctttatagcaatactatgggaaatattgaacaattgtgaaaaaggatttctaaccaatatccctgttagagcagctttgaaaggttctatacattcttttccagtctttgtccatttgcatatacctttcacctagagtaataatagtgtaaagacatttgctacaatttattcactttatagtatattatcactttagtaattgtataatatt

SEQ ID NO: 611711 - DNA, 517 bp, Homo sapiens
gtcaccaaagaaatgatacagatggcaaataaacacatgaaaagatgctcaacattagatgccattagggaaatgcgaattaaaatcacaatgagatacaactatacacctattaaatgcctaaatttctttttaatgataataccaagtgctgacaaagatgtggagcaactagaactctcatatattcctggtgggagttcaaaactacagcaacaataatcaaattagtggttgccagaggctgggattggggaaaaatgttaatagttgtttatatcctgtgtgctggcaatacaagtttatgttttatttcctgtacttctgtttattttttaaaatttcctccaaataaatttttttaagaaaatgaagaaatgtatacattgtgctaggtaatctccatytgcccatccagataaattcacaatctttcttttttctgttttgtgccctgcgaggctgacttctatgagctacctcaatcaggcactttgccctctgacttcctgttggg

SEQ ID NO: 611712 - DNA, 563 bp, Homo sapiens
tgaacaattgagagacagaatcatttagaggcttcttccatgtctgggaactggtcaggaataaatcagagcctgggctaagcagggactgtcacctagaactcctacatgtgactatgtgatctgcatgttgccatgtgacctctccatatggcttgggtttcctcacagtatggtggcctcaggatatgctgttggacttatcacatcatgactcaggattccatgagcaagtgttccagcaaacacggtgcaaattgcatgactttttatgactcagtctcaaaaatcctgtggcaccacaaactcacccaaatcaagaatgagtacacaaatcrgacctctttatgggagaaatgacaaataatttacagtcatgttttaaaactgccatacttatcaaaggtgctctgataatgaaattacaacaaaaataattaatgaagattgactagctacatattatgatgtgagaacggtatagaaccttagttagaaagacttgtgctgggtttccaaaaataagaaatcatgcaaagaacattatctggattcatttttgc

SEQ ID NO: 611713 - DNA, 563 bp, Homo sapiens
tgaacaattgagagacagaatcatttagaggcttcttccatgtctgggaactggtcaggaataaatcagagcctgggctaagcagggactgtcacctagaactcctacatgtgactatgtgatctgcatgttgccatgtgacctctccatatggcttgggtttcctcacagtatggtggcctcaggatatgctgttggacttatcacatcatgactcaggattccatgagcaagtgttccagcaaacacggtgcaaattgcatgactttttatgactcagtctcaaaaatcctgtggcaccacaaactcacccaaatcaagaatgagtacacaaatcagacctctttatgggagaaatgacaaataatttacagtcatgttttaaaactgccatacttatcaaaggtgctctgataaygaaattacaacaaaaataattaatgaagattgactagctacatattatgatgtgagaacggtatagaaccttagttagaaagacttgtgctgggtttccaaaaataagaaatcatgcaaagaacattatctggattcatttttgc

SEQ ID NO: 611714 - DNA, 512 bp, Homo sapiens
tacagaaattcttggtttctccattttaaatattccaaagttcatacagtaaattcagagttttttttttcatttttaatcaattatatttataaggagatttgcttactgggaaacatgtattttctgaaaaaatactaactatgaatctctttgtttctctcttctgagttttcaatcttattcttgttgatgttatggtgggagataggggatttttattcttgaactttttggtgggaaaagaataactataaggatctgcaaatgactcattcattgtgtagaaattatagacttcatgatatttcatttctaaaattatttaagcatctaattcctactgcaaagcagcatcctaggatatgtgttggctgattatatagccacgtggaccatacaagaacacagagaacccctggwgagtctcatgaaggaggtaccatccttacctgaattaatataacacttttgcacagggtaaattgttgccaaagatagattttgtaacc

SEQ ID NO: 611715 - DNA, 619 bp, Homo sapiens
acattttttcaagtttctgtttgtcttccatctgcaggctctttaagctgccttcatatttggatgtggaggttgaagtattgctgaccaatgccagagtcacaggaatatcctgctgtgcttttgatcttcccatatgactgaatttcctgaatcatcatgttactgtgtgtgcacatatgtgcacatgtgaatcttctggcacrtctcccagaagcgctagttctgggacaaaggatccattggtgctttcaggatgtaatattgatcactttggctttccttggctcagagccagacacttcgtctctcactgcacaagatggctgccagctccataagcttgtctcattgtgacggccctcggcaggacttcctgagagcagactaatttctgagaggctttgaaaaatgttgttttaaagtggaactttgtgttttaccaactatggacagtgcttggaatcttgttattgacttttaagatctgtggtacatcctatgtttaattatgtaatactctccaatactcagttaagcaggaacgtcaatgacacagaaaaactcactaggttttttaatcccatggttttgcacacttttttatctagtatcagtc

SEQ ID NO: 611716 - DNA, 487 bp, Homo sapiens
cttccatctgcaggctctttaagctgccttcatatttggatgtggaggttgaagtattgctgaccaatgccagagtcacaggaatatcctgctgtgcttttgatcttcccatatgactgaatttcctgaatcatcatgttactgtgtgtgcacatatgtgcacatgtgaatcttctggcacatctcccagaagcgctagttctgggacaaaggatccattggtgctttcaggatgtaatattgatcactttggctttccttggctcakagccagacacttcgtctctcactgcacaagatggctgccagctccataagcttgtctcattgtgacggccctcggcaggacttcctgagagcagactaatttctgagaggctttgaaaaatgttgttttaaagtggaactttgtgttttaccaactatggacagtgcttggaatcttgttattgacttttaagatctgtggtacatcctatgtttaatt

SEQ ID NO: 611717 - DNA, 561 bp, Homo sapiens
attcagctgtgatatttttaaaaaattatattccatggttatgatatcaccagtgttaaatttaaacttgcgatgacagcacagctgtgaactctttgcgtgtcgtatcctttggaagcagggcactgtgacagtcytgaagaaaatgctatgtttgccattctttgggtgcactcgttagattcttgaatttccagacagaaaaagctgattgtatttagctcatttactctgaagagcctacttcaaatcctttctttgaaagtagacagattatatataaatgtgtagtgttatttctctatattcctataagtgaactcagtagtctgatgttaataataatctgttttaaaactcatgtttcaaactctcccagagagaaacttaataaaaattttgaaattacagagtaaaataatatgagtttgaagataagctcaagacagtctgttgactcaatagagtgatattttgttgttgttgttgtttccagaatgacaacagtataatggtagcagccttgaaagtctagccattgatattttgactgaggaaatc

SEQ ID NO: 611718 - DNA, 509 bp, Homo sapiens
ctactttctgctatacttggaacatttggcaataaaaaactaagtagaggacatgcctctgtttccaaggaacttgcctaaggagaaagcatgacagttgccttccatcatatgtgtattagttcattttaatgctgctrataaagacatactcaagactgggcaatttagaaaaaaaaaaaaaaggttattggacttacagttccacatggctggggaggcctcacaatcatggtggaaggcaatgaggagcaagtctcatcttacgtagatggcagcaggcaaaatagagctggtgcagagaaactcccatttttaaaaccatgagatctcatgagacccattcactatcgtgagaacagcatgggaaagacccacccccatgattcaatcatcttccaccaggtcctgcccacaacatgtgggaattattgggagctacaagatgagatctgggcggggatacagagccaaaccatatcaatacagaatttaaaagttagagatgt

SEQ ID NO: 611719 - DNA, 509 bp, Homo sapiens
ctactttctgctatacttggaacatttggcaataaaaaactaagtagaggacatgcctctgtttccaaggaacttgcctaaggagaaagcatgacagttgccttccatcatatgtgtattagttcattttaatgctgctaataaagacatactcaagactgggcaatttagaaaaaaaaaaaaaaggttattggacttacagttccacatggctggggaggcctcacaatcatggtggaaggcaatgaggagcaagtctcatcttacgtagatggcagcaggcaaaatagagctggtgcagagaaactcccatttttaaaaccatgagatctcatgagacccattcactatcgtgagaacagcatgggaaagacccacccccatgattcaatcatcttccaccaggtcctgcccacaacatgtgggaattattgggagctacaagatgagrtctgggcggggatacagagccaaaccatatcaatacagaatttaaaagttagagatgt

SEQ ID NO: 611720 - DNA, 429 bp, Homo sapiens
cccagctaaaccatcattcaagaatgagtgtgaaatcaagacatttcagcaatgcaattctaaggaagtttaccatctggagacccattgaaaatccacagaggtgtgggacacaagaaacaatcgtgagcaggcaagtgggaaatttagttaatttacttttcaaaagcytacattatataaaaagtaaaataaaatctctacataataaaaaaaacaacttaaaaatggagagaagtccaacaagggtctcactctgttgcccaggctggagtacagtggtgtgatcttggctcactacaacctctgcctcccaggttcaagcaattcccctgcctcagcctctcgagtcgctgggattacaggtgtgcactatcatgcctggctaaattttgtatttttagtaaagacagggtttcaccatgttgg

SEQ ID NO: 611721 - DNA, 430 bp, Homo sapiens
catatataattttatatatgtatatataaacacatacraagcatacataatcaagtacattgttgctattattatttggaacaaaatgctatcttgcagaacaataagaataagaaaaattaaatttttattttactttctcttattctttatctgatggttttcactttttgtaagtctattttgacctatattattatttttcgtctttatgaaagacctattttaacatttcttggagacaggtgtactagaataaattctctcagttgttgtctgagaaagtctatttctatcccatttttgaatgataattattcagggcacagaatcccaggttagcattttatttttctttcaatactttaaatatttcactccaccctcttgttgcttgtatgatttctgaaaataagtcagatgtgcaatt

SEQ ID NO: 611722 - DNA, 585 bp, Homo sapiens
aatggggagttcttcctgactccaagccaatcttagccaggctggatgctttgctttcttctccttccatgtctcagaggtgcaaattaacttccttgttgaattccagtrttttatcttagacattgtattctatgtatgtttacctactcactgttttggtcattctttatggaggaagtgagtgcaaggtgcctctagtcagccattttgaagccccctctttcaattgctttatatattcaagcaatgaacaattggaatttaaaattgaaaactcaataccatttatattaattcccacctcaaagtaaagaaatacctaggcataaatttaataaaatatgtataaaagctttatgagaaaaagtataaaattctgaagaaagaaatcaaaggtctaaataaatggagagatatttcaggcttatggataggaaaacttaacattgtaaagataatagttcttctcaaattggcctataaattcaatgcaatcccaatcacaattccagcaagttattctgtgcatatcaacaaactgattctaaagtttatatgtgaaggcaaaagacagaatagtta

SEQ ID NO: 611723 - DNA, 588 bp, Homo sapiens
aaggacttatcccaggggtttgggaagaattctagtccaggatttgactctaggtgtaagatgacttaagaagggtcaagggccccttcatcataagtcaagtcaaaaggtcaactggtccatccctctgtggctaagctaccctggttactttgtccctaaacctgcttcctcctctgtgctagaagcaagccccatgttgcatgagtagggaaggaagggggaggctcctccctgattcctgggtttgtgtccaacaggctaggcccatagcccagcagccccttccctccctctccaggagcgtgacccccaccttctgcatggggggctccatttcttcctgcagccttgacccagggcagtgaaaccaaatggaaaaataagccccctttcccgggcctgggagggacagaaggaggcaggrcccattttctaggtcagaactccttgcccctgctcttcctccccttgcctatatttttcaaaactagaccttggggagagagggagagggagagggagaaaagtgtggatgcttctgtgtgtgtggctgagtgcgtatatcctgtgtggagagagggagag

SEQ ID NO: 611724 - DNA, 605 bp, Homo sapiens
ccacattctagacttggatcaacaaatcacccactgtgtaactttggcaatgtcattgaatatatccaagcccaagtttsctgatctgcagaattggagtaatagtgaggtaggagatgtgcaggacctgttttctggtcacaaccctgctgaccaaaacagtgtctggataaaacgggatgaagttaagacaccagtggaaaccagcagatgtgacaaaaggcatccctagatgctctcattgcttgttagcataagacactcccaccagcaccatgacagtttacaaatgccaaggcaaagacccagaagttaccacccctttccagggcaacaacctggaagttactgcccctttcccagaaagttctaaacaatctgcccctcaatttccattgacccaccccttaatttgcatgtaattgaaagtgggtttataggagtataaataccattgccaagtaggacttagtgtgttgcctatgaatcagctgtgctctgcaaggagcagcactgttcaacaaaagattgctctctcacaccactggcttgccctcgatttctttcctgaatgaagccaagaacccgcctgggttaagcccagc

SEQ ID NO: 611725 - DNA, 605 bp, Homo sapiens
ccacattctagacttggatcaacaaatcacccactgtgtaactttggcaatgtcattgaatatatccaagcccaagtttgctgatctgcagaattggagtaatagtgaggtaggagatgtgcaggacctgttttctggtcacaaccctgctgaccaaaacagtgtctggataaaacgggatgaagttaagacaccagtggaaaccagcagatgtgacaaaaggcatccctagatgctctcattgcttgttagcataagacactcccaccagcaccatgacagtttacaaatgccaaggcaaagacccagaagttaccacccctttccagggcaacaacctggaagttactgcccctttcccagaaagttctaaacaatctgcccctcaatttccattgacccaccccttaatttgcatgtaattgaaagtgggtttataggagtataaataccattgccaagtaggacttagtgtgttgcctatgartcagctgtgctctgcaaggagcagcactgttcaacaaaagattgctctctcacaccactggcttgccctcgatttctttcctgaatgaagccaagaacccgcctgggttaagcccagc

SEQ ID NO: 611726 - DNA, 613 bp, Homo sapiens
gaataggaacagatcaaaaaggaagggtgtgagtggacgtgaccttgtgagttggaggctcgttgagtttgaagtgccccaggagcagccaggtgaggaggcagaggagaaaactggatatgtgcacctgaaggacacagcaaggtcagtcatggagaccgggactgagaatcatcaatatgtagaagacggttgaacccgtaagagagatgagctcagccagggagtaaatatatagaaagaagagcagtgggtcaaagcagaaagctgagaaataccaagagaaaggagaattacaaggacagatgtagggggagaaccaggagacgagagggatggggaaatcaagtttgaagagcagcatttcccagagggaatacccagaggatattcctwgttttaaataagatgagttttccaggttaaagcaaaacagcttgctaatttctattgtgaatttttacaggggatgatgatatgtagagcttcctaaaatcatttaaccacagaactcttcattttctataaaacctattcatatccttcaaaagttgtgttctttggtgcatgctttgggataacctaggtagcgagtttccctgaataagaaatt

SEQ ID NO: 611727 - DNA, 518 bp, Homo sapiens
catcttgagtggctggagagtttgaaagtctgtagcaggaaccctgaaagctgatgcttatgttgataaccacagtgctggaataaaagcatgttgatgcaaatcttttttcagttttggtcacacaaggtggcagtgactggtgctaattgaaaaggaaaacgataattcaatgttgtaacggttcacacctaccccatgctttctcatccagaagacattttcaaccagacacattttycacaaagggaaataatctaaggtcatttcctgtggggtatggggtcattctgtgtctctgaagaggccaggcaatacttacacggtgacagcaccttctgcagaaggaccagaaagatgcaaggaggaaaaatagaatatgcattttctgaaagcatattccatgctttggaagtagggctgcactaaccaacatgggctgcagattcaagaacatccctgccatccatgtttggttttccatggtggacaagtcacccagttgaaaccttatcatt

SEQ ID NO: 611728 - DNA, 646 bp, Homo sapiens
gcctataatcccagccactcaggaggctgaggtgggagaattgctggaacccgagaagcagaggttgcagtgaaccaagattgtgccactgcactccagcctgggtgacagagcgagactctgtcaaacaaacaaacaaacaaaaaacagaaaagagcaatgtttggtagctgatatagctagttcttcaagaacagtgttttgcctcaggctccagagtccttctagagcatctcaatctttcctagcacatgcctagatcataagactttgattccctatcctaatctgcccatccttgtaagaaatatgcacatgagtttctgctcctcccattgtctgtagctcttgggtccacatggctttttccttccagaggtcaactaatacycttcctttggccccatgtgggagttctgcccctcacaggtagcaacttgatagcgatactcttaccaaacgctagaggttcagtctaggtttcattgctggctgcacagaaagccaatcactgagacaagtattgccaggaagaagaccttattcagatgacatcagttggagagatgggagataaaccccaaatctgtcccctccccaacaataaagttaatgatttatatagacaggaaggacaacaggaggg

SEQ ID NO: 611729 - DNA, 646 bp, Homo sapiens
gcctataatcccagccactcaggaggctgaggtgggagaattgctggaacccgagaagcagaggttgcagtgaaccaagattgtgccactgcactccagcctgggtgacagagcgagactctgtcaaacaaacaaacaaacaaaaaacagaaaagagcaatgtttggtagctgatatagctagttcttcaagaacagtgttttgcctcaggctccagagtccttctagagcatctcaatctttcctagcacatgcctagatcataagactttgattccctatcctaatctgcccatccttgtaagaaatatgcacatgagtttctgctcctcccattgtctgtagctcttgggtccacatggctttttccttccagaggtcaactaatactcttcctttggccccatgtgggagttctgcccctcacaggtagcaacttgatagcgatactcttaccaaacgctagaggttcagtctaggtttcattgctggctgcacagaaagccaatcamtgagacaagtattgccaggaagaagaccttattcagatgacatcagttggagagatgggagataaaccccaaatctgtcccctccccaacaataaagttaatgatttatatagacaggaaggacaacaggaggg

SEQ ID NO: 611730 - DNA, 591 bp, Homo sapiens
agttggttaacaggcagcaggtgcatttcattgtacaaatataagtttctgaagcttcaattccatgggcatcccggcttgttggaaaatagttcaatacttgtgggtcctgccctgagcttccccttggcttaaactctggttcctttttggccacaatgggactgttgccaattatccaagaaatagttaatctgatcatcatattttcttgaccctatgatttagtcttcattctcaaggtattaatccacatcaccacaaataattaagaatttgtcctaaaacttagcatttattgcatcaaaaataactctccatcatayagcaattttagaatcaagtctgcgtataaagcatctaaaatggcccccagtgatccctacctcttggtattcatgtctttgtataatccctcctttgaatatgggctgaacctcatgactcatttataatgaagagagtgcagtaacagggatggcatgtcattagattaagttacaaaatgactatgacttccatcttgtggccagatcttattctctctcttgtttcttacaatggaagccagcttccctatggaaaggccca

SEQ ID NO: 611731 - DNA, 447 bp, Homo sapiens
ggaattcttgtgcagaaagggaaggtatttgaatcgtataagaagggagtcaaggattataaattttaagagtagaatgaaatgtttacaaagcatattgatttatttcttggtagaaatgagccttgtgaaacatttaagatgaagcaggatcagaggatgcattttcatgaagatagtagaccacttatcttaggtgaagaagatactaagagccagtgttagaagcaaatctgattgatcaggcattctaatcaaagtctgaaaatgtgtccattagcaataactctgmaaacttatgccagaaaaagaagtcatagtactgggggaagtctgtgcagggaagggcaaggcccacaggaggaaaatcccacgccatgttcaaccttctaaccacatgcttctgggggaggggtgagtaagaaccgctgcgtgaagtgtccagtc

SEQ ID NO: 611732 - DNA, 591 bp, Homo sapiens
tcagcaaatttcaaagaatagcaggtaatttawcccatagtgaatattaattaggcaaaccaaaaaacggcaatcaggcatgggctagaaatctttccctttaactccatgctacttctaaggcagtactaagatatttggaaaacggaagggttcaattcagtgatgaaatttttctttaggataagctgacatattttctaagaatagacctaggctggaagcaacagtcactaagtaacttccaatctttggctgtttttaaaaaatcccttaagcagcagaacagtcattcccaatctttacgaatatatttttaaaaaaatgttttagcaccctcatgggataatagttgaacttttggtatcagatgacttgagaaaaatacaaaaggatataaattcaaagctagtttgaatttggtaatgtgttttgaaatagacattttgctgatcaaaaaagcaacaaaataggttgaatagatgttgtaacacacacatactcgtatatactttagcctgcagacagaacttgatgtgtccaaggatttagaacttctgataacaactacagaccctcgagggctgtggc

SEQ ID NO: 611733 - DNA, 591 bp, Homo sapiens
tcagcaaatttcaaagaatagcaggtaatttaacccatagtgaatattaattaggcaaaccaaaaaacggcaatcaggcatgggctagaaatctttccctttaactccatgctacttctaaggcagtactaagatatttggaaaacggaagggttcaattcagtgatgaaatttttctttaggataagctgacatattttctaagaatagacctaggctggaagcaacagtcactaagtaacttccaatctttggctgtttttaaaaaatcccttaagcagcagaacagtcattcccaatctttacgaatatatttttwaaaaaatgttttagcaccctcatgggataatagttgaacttttggtatcagatgacttgagaaaaatacaaaaggatataaattcaaagctagtttgaatttggtaatgtgttttgaaatagacattttgctgatcaaaaaagcaacaaaataggttgaatagatgttgtaacacacacatactcgtatatactttagcctgcagacagaacttgatgtgtccaaggatttagaacttctgataacaactacagaccctcgagggctgtggc

SEQ ID NO: 611734 - DNA, 738 bp, Homo sapiens
aggtgtatgagctacaaaataactgttgcttcccttctgtccttcagatctcccaagaatcttgtgtctcaccctaactagaaatatctttaaatgaattttgggaaatgtagtttggcctggccaaactacatttgactcattacaaaggctttgactcatttcaaagccatcacaagaggcatctaattgaagctactagaaagagtaaattgggaaacactttcagggcaggtgatatttgaactgcaactgtaaggatgagcaggagttaactgggaaggggaaatgccaatttaggcagacaccaagcatsagaaaggcaagcctcaggaatatggaagatcctggtatagaagtctaacagcctaagccactgggaacacacttgtagtcaaagctatatttacataattgtggcagcaaaagagaatgcctgccaaggttatgatgggacaacttggaaaaagagagttggaaggagcttattgtagaaatagggcttgtgctgcatgattctaatggggtattagagaactggaggacagtcctggattggatgttttcagaaagcattggatatcgatatggactcagctgtgttctccccaaaatttgtgtgttgaagtcctaaccctggtacctgggaatgtgattgtatttggagatagaacctttaaggaagtaattagagttaatgatgtcataggtgtggggccccaatccagtaggactagt

SEQ ID NO: 611735 - DNA, 575 bp, Homo sapiens
gcttgtgcctttgcctcctctaaaaatagcaagaataaacttggtccattttccacataaatattaaaygcctaacttatgaatattcacctgtggccttcttaagatttcccacctgcctgaaagtggtgcttggcaaaacattaggccaaaactgatctctccattgtgaacatgttgtctgctaagttgtaagatttcacaaaccaaagctagtttttgattgtttgtttgtttgtttttttaatcaactacattatccatgatagtttattttaatgggaaatgctttcctttcttcttcttgtcttcaatgggcctttctttacctacacagacatagtcctctgaagccagttcttggtgtctgctttcatttacagcagagaatcatgattactctttagaacaatacttcttaaatttatctagtacctattttcaagtggcttcttggagttccaagtactttatggtttgctatttatacatacatattgataaatgtgacactttatcatgataaggggctttacaattagtcttgctcattaatcattcctgcgccctgctcc

SEQ ID NO: 611736 - DNA, 575 bp, Homo sapiens
gcttgtgcctttgcctcctctaaaaatagcaagaataaacttggtccattttccacataaatattaaatgcctaacttatgaatattcacctgtggccttcttaagatttcccacctgcctgaaagtggtgcttggcaaaacattaggccaaaactgatctctccattgtgaacatgttgtctgctaagttgtaagatttcacaaaccaaagctagtttttgattgtttgtttgtttgtttttttaatcaactacattatccatgatagtttattttaatgggaaatgytttcctttcttcttcttgtcttcaatgggcctttctttacctacacagacatagtcctctgaagccagttcttggtgtctgctttcatttacagcagagaatcatgattactctttagaacaatacttcttaaatttatctagtacctattttcaagtggcttcttggagttccaagtactttatggtttgctatttatacatacatattgataaatgtgacactttatcatgataaggggctttacaattagtcttgctcattaatcattcctgcgccctgctcc

SEQ ID NO: 611737 - DNA, 636 bp, Homo sapiens
ttgcaagtcaattttgtgtgggttgggaggaaagtagccttctgtgctccctagcagcttgtccgtggcccgcttaaagaaacgacgtggaaacccccacgttgaatttttgactaaattagcagttatttatctgtgatctagtcactctaattcctgggtagtcacagttaggtacggaaacsaggtaaccctcttctcactttgtttgcttttccggtggttggattattaccagctcccggaatttggaagctgcccccattccagcatccgacatacatatgtcttttcctttcacctgatagggacggtgtgaggttgcccgaagctggcaaacttgtctacatctatttccacaacaggaacaggatacgtaatctgtatccttccataagcctctatatgtaatgattcctcaaggtagtgactttaacaaatgttggaggaaagtttaattctaagcccagacatgcagaaaaatgaatagcaaaagattcaaactgggaaaatgacttctttccacagaaagtaaatattgcaccctaagcccttctgccatgagctttgggaatattcacatagatgtgttcagcagaccacagactgagatctctaaccccctgtgtatgaata

SEQ ID NO: 611738 - DNA, 636 bp, Homo sapiens
ttgcaagtcaattttgtgtgggttgggaggaaagtagccttctgtgctccctagcagcttgtccgtggcccgcttaaagaaacgacgtggaaacccccacgttgaatttttgactaaattagcagttatttatctgtgatctagtcactctaattcctgggtagtcacagttaggtacggaaaccaggtaacyctcttctcactttgtttgcttttccggtggttggattattaccagctcccggaatttggaagctgcccccattccagcatccgacatacatatgtcttttcctttcacctgatagggacggtgtgaggttgcccgaagctggcaaacttgtctacatctatttccacaacaggaacaggatacgtaatctgtatccttccataagcctctatatgtaatgattcctcaaggtagtgactttaacaaatgttggaggaaagtttaattctaagcccagacatgcagaaaaatgaatagcaaaagattcaaactgggaaaatgacttctttccacagaaagtaaatattgcaccctaagcccttctgccatgagctttgggaatattcacatagatgtgttcagcagaccacagactgagatctctaaccccctgtgtatgaata

SEQ ID NO: 611739 - DNA, 636 bp, Homo sapiens
ttgcaagtcaattttgtgtgggttgggaggaaagtagccttctgtgctccctagcagcttgtccgtggcccgcttaaagaaacgacgtggaaacccccacgttgaatttttgactaaattagcagttatttatctgtgatctagtcactctaattcctgggtagtcacagttaggtacggaaaccaggtaaccctcttctcactttgtttgcttttccggtggttggattattaccagctcccggaatttggaagctgcccccattcyagcatccgacatacatatgtcttttcctttcacctgatagggacggtgtgaggttgcccgaagctggcaaacttgtctacatctatttccacaacaggaacaggatacgtaatctgtatccttccataagcctctatatgtaatgattcctcaaggtagtgactttaacaaatgttggaggaaagtttaattctaagcccagacatgcagaaaaatgaatagcaaaagattcaaactgggaaaatgacttctttccacagaaagtaaatattgcaccctaagcccttctgccatgagctttgggaatattcacatagatgtgttcagcagaccacagactgagatctctaaccccctgtgtatgaata

SEQ ID NO: 611740 - DNA, 526 bp, Homo sapiens
ttacgagggcagattgaactcctgctacttcagcccattccaggttgacccgcccatgattggctgtttaggatggtgatgaatcacttgagtttagggagcaggattggcagcatgccctcagagaaaaataaaaactagaatttccctgcaagactatttagttccacaaactttgttgtcatggaaaggaagagcttgaggtttcaagttatgatgctgacatacctccgatatgcgtggctgttttcatccccttcttcagaaggcctgcagctgcaatcagtagaaaactctgtgttgaagcttacaggcagcatcacgggcttctagcaggtctgtgaactgactagcctgggcacagttgtgcctttatgcggaaattgatgagttgcttttcatccttcytgtaaggctctccatctcagtcccaccaggacagcaggccctgcgatgttgctcatgctttgctttgtgaacatcctgggctgagagtccagctctcctctgggctcgatgagaaggc

SEQ ID NO: 611741 - DNA, 605 bp, Homo sapiens
agtcacagtttaaggttccatttaaagccactcaatggaagataggttaagtgtacttcataattttgatcattgaaccaggaacattatgtaccagtttttaaggctagtttcatttaggaaaaaagataattatatatctattaygtcttacatttttgtaaattccattgccactggaggaaaccatggaccagagtaacctaaagatgcatgttggtatatattttaattccaggtaacattggaatgtggtatgtgttgggggtgggatcttcctgtttgtttttgtcaagataatattatttacaaaaaccatcccaaggactgagagcaaaatgtattgattatctttatgtggactatgacaaattgattttttaattgagacttcctattttcagggagttcagtgtctcgtaggaaaatagtaaattttgaaaaactttaaaatgttcatgccactgatcatgggaccacatgattgttgataagggaaggtaggacaggaggaagttcaagaattctcagggcagtccaaagcagaaggaaagggtggcatttcatttatgtatctgactgccatcttaactgtgttctctgtg

SEQ ID NO: 611742 - DNA, 605 bp, Homo sapiens
agtcacagtttaaggttccatttaaagccactcaatggaagataggttaagtgtacttcataattttgatcattgaaccaggaacattatgtaccagtttttaaggctagtttcatttaggaaaaaagataattatatatctattacgtcttacatttttgtaaattccattgccactggaggaaaccatggaccagagtaacctaaagatgcatgttggtatatattttaattccaggtaacattggaatgtggtatgtgttgggggtgggatcttcctgtttgtttttgtcaagmtaatattatttacaaaaaccatcccaaggactgagagcaaaatgtattgattatctttatgtggactatgacaaattgattttttaattgagacttcctattttcagggagttcagtgtctcgtaggaaaatagtaaattttgaaaaactttaaaatgttcatgccactgatcatgggaccacatgattgttgataagggaaggtaggacaggaggaagttcaagaattctcagggcagtccaaagcagaaggaaagggtggcatttcatttatgtatctgactgccatcttaactgtgttctctgtg

SEQ ID NO: 611743 - DNA, 605 bp, Homo sapiens
agtcacagtttaaggttccatttaaagccactcaatggaagataggttaagtgtacttcataattttgatcattgaaccaggaacattatgtaccagtttttaaggctagtttcatttaggaaaaaagataattatatatctattacgtcttacatttttgtaaattccattgccactggaggaaaccatggaccagagtaacctaaagatgcatgttggtatatattttaattccaggtaacattggaatgtggtatgtgttgggggtgggatcttcctgtttgtttttgtcaagataatattatttacaaaaaccatcccaaggactgagagcaaaatgtattgattatctttatgtggacyatgacaaattgattttttaattgagacttcctattttcagggagttcagtgtctcgtaggaaaatagtaaattttgaaaaactttaaaatgttcatgccactgatcatgggaccacatgattgttgataagggaaggtaggacaggaggaagttcaagaattctcagggcagtccaaagcagaaggaaagggtggcatttcatttatgtatctgactgccatcttaactgtgttctctgtg

SEQ ID NO: 611744 - DNA, 518 bp, Homo sapiens
gcactctgggtgttgtggggcggggagtgctaagtgtgacagtgcttacaaaacacaccttcacagctgggaggaggagaacacagtgtcattcatgcatcctcagaacattaccactgcggaggactggcagtgtccttcggggaccccgttgcccgtgtgcatgctcaggggcaccataaacacttgctgctggttccccatgccacctgctggttccacatgccacctgtggcctgtcaggtgctcagagggccttctggggcaggcagtatttatgataaatagtttcatcaggatgtgtggctcagctgggcagctccagctttcttgctccctctgggtttcctgacaaactggcctcctgctaagggcagggaactgaatggcactgagaagagttaatgagccacagaaaatgtggcgttctaagaagagaacagtatttgtgtcccgaactctttgtccgtgaagtgttcagagagaartccagtgtaatgggcttaaaaacatcctgc

SEQ ID NO: 611745 - DNA, 549 bp, Homo sapiens
tatagactgagcaataaaacaatcctatatatttgaattgcatataatgtaaaaacatccaagatttggcaaagctgtctttagaataaaatactgctttggtgatttagacagagcttttctctcattcccccggtttttagctatgttctcataaccaatgaattatagataagtgaggagttgttgcctagcacaatactaaatgaatacttcacacatttcaaatatttcttttagctcattgactaattcagcctagcatcttttgaggggaaacaataaatgattgtaggaaaatatattaagctctgttacggaagaacttggccagcacagctaatatttgtttataattgaattttgcattcctcatgtaaaatgttttcagaggacacactacaaaaaaagtcaatatgttatgtgagagggttcacaatatctaacatgaaaactcttactcctgaaaaagaaatmttttagctttctgtaaataaatagtctgtaagcgtctctctctctctctctctctctctctctctctctctc

SEQ ID NO: 611746 - DNA, 529 bp, Homo sapiens
tggagagagaaaaaggacatagaataggcaagacaagtagattatggattttaactaaaataagttagtaaatatatcaaatataaattttcaaatattccagtttagggaagatttttattagcatatatagatagagagattattattattattattatttgagacagaatctcactctgttacccagactggagtgcagtggtgccatcccggctcactgcaccctctgccttatgggatcaagtgattctcctgcctcagcctcctgagtagctgggattagaggcacctgccatcacacctggctaatttttgtatttttagtagaggtggggtttcaccatgttggccgggctgatctcaaactcctgaccccaggtgatctgcccaaatcagcctcccaaagtgctgggattacaggtgtgagccaccacacttgkcttttatcaacttacattaaaacaaagaatgttggttatgtttttaaaacagacatcttaaaaaagtaagaatggagaaaattaaa

SEQ ID NO: 611747 - DNA, 565 bp, Homo sapiens
ttcagggagctgctgccagtactcatcagtgccaagctgcttaggcaaaaatgtggggaacattttgtcttatctattcaactccttccctaagaacccaatgaacaaactgaccctagagaatcaagcaatcaaggagattactattgccacagatcctcttgtgagtatcccagacaagcataagagaaatggaagatattagaggccraaagaaaaaaaaaaatcaagaaatacagaaaagggtggttgtctgtacctgaaacttgaatctcagttctccaaatatgaaagtctttaagaacaccaccaaagggcaagcaagcacactttttggaagactatcaagagctttattattttaattctcctgacactactctgcaagatagttttatttgtcgccctccccccccccgcttttttttttttttttttttttttttttggtttttgagacagagccttacttgtcgcccaggctggagtgcaatggcacaatctcggctcactgcaacctccgcctcccaggtacaagcaattctcctgcctaagcctgtcaagt

SEQ ID NO: 611748 - DNA, 565 bp, Homo sapiens
ttcagggagctgctgccagtactcatcagtgccaagctgcttaggcaaaaatgtggggaacattttgtcttatctattcaactccttccctaagaacccaatgaacaaactgaccctagagaatcaagcaatcaaggagattactattgccacagatcctcttgtgagtatcccagacaagcataagagaaatggaagatattagaggccaaaagaaaaaaaaaaatcaagaaatacagaaaagggtggttgtctgtacctgaaacttgaatctcagttctccaaatatgaaagtctttaagamcaccaccaaagggcaagcaagcacactttttggaagactatcaagagctttattattttaattctcctgacactactctgcaagatagttttatttgtcgccctccccccccccgcttttttttttttttttttttttttttttggtttttgagacagagccttacttgtcgcccaggctggagtgcaatggcacaatctcggctcactgcaacctccgcctcccaggtacaagcaattctcctgcctaagcctgtcaagt

SEQ ID NO: 611749 - DNA, 565 bp, Homo sapiens
ttcagggagctgctgccagtactcatcagtgccaagctgcttaggcaaaaatgtggggaacattttgtcttatctattcaactccttccctaagaacccaatgaacaaactgaccctagagaatcaagcaatcaaggagattactattgccacagatcctcttgtgagtatcccagacaagcataagagaaatggaagatattagaggccaaaagaaaaaaaaaaatcaagaaatacagaaaagggtggttgtctgtacctgaaacttgaatctcagttctccaaatatgaaagtctttaagaacaccaccaaagggcaagcaagcacactttttggaagactatcaagagctttattattttaattctcctgacactactctgcaagatagttttatttgtygccctccccccccccgcttttttttttttttttttttttttttttggtttttgagacagagccttacttgtcgcccaggctggagtgcaatggcacaatctcggctcactgcaacctccgcctcccaggtacaagcaattctcctgcctaagcctgtcaagt

SEQ ID NO: 611750 - DNA, 633 bp, Homo sapiens
tttttgttatttatcttctgtccctttgttatcacacctgtctcatggctttgcattccatctataggcagacaattcctcagtttatatctcagggtcaggtctttcccctgagcatgaaatttatatattacagttccattttgacatttctacttgcgtataataggtatttctaacctaacaaggccactgcagaattatgtatataaccccaccaatgccaaactgatcttgccctttagtctcccagctcgattagcagtattgtcattaacatagtttattgggtcaaattttcaaaggctttcttgattgttgtctttcttgcagcctaaacttgtattgcttcagggacttttatgcgcaaagttacattatgaaaatgtaaacataatgaggatgagggcttcgttcgtgtagtacaacgctcttgactcattacttggagtagcatgtacagatcggggcttatatatatttgtgaaaaggctacatgtgtaaagatagatggaaaatgataagggcaggggagatctgaatatgtgttaatgttaacagcaataaagcaggtgagagagagagagagagagagagagacagagagagasagactagtcatctaagatggaa

SEQ ID NO: 611751 - DNA, 625 bp, Homo sapiens
tattttatagaatgagggaaattcaagcctaaacagtaaccrtttagtgttatacaatgtattaggcacatataatattaaaatctaggtctctatgtttctaattctggcttattctctaaaatgatttgtgatgaagattcttaagaaacatttacacctgattccaacatgactggcaagacttagatcagcttaaattggcaggtttacataactgcacatgtctgttcttacagagaacagaacgacaaaaaatggaacagaagaaaatcccttactaaatgtcaagaattggacttacctgtcaaaacgagcttggctgcagaggtgaaagcagaatccgggacgtactcggccagctcaccctttccactgctcaaggtttgtttatgatgtctgtactctagcatagttggtcatattgttgtgagcagtgaagagttttactttctgcctacataggaaagagtggttaattctaagactcgtgtgtattatcaataactatgatatatccactaatccactaagtagtgaatgctttccactatgtagttaaagccatacctacatgtggtgactattcatgaatgacacaataagaatcagcaatttgactgca

SEQ ID NO: 611752 - DNA, 621 bp, Homo sapiens
agcctcctgagtagctgggattacaggctcatgccaccatgcctggctaatttttgtatttttaatagagacggggtttcaccatgttgcccaggctggtcttgaactcccgacctgtggtgatccacccacttcagcctcacaaagtgttgggattacaggcatgagcyactgtgcctggccaggggaggttttaaaacatacagacgcccaggtcccgtccaagactaatcagaatctctgggagtgagacttgagcatcaatatatttttaaagctccctagtgattctaatgtgcagactggtttcataaattttactctagggttaaaagggggaagatttttatgctgtttcttttggtagcaattcaccccctttttggatgccaaaagtaaattaatcatctgattctacaacacagtgatacttccagcataactctattaaacatctccctagaagcagtagttcatgaaagcatttcacgtccaatattatgtaggtaggtagctagcattaagtataggatagccttcttcaagaattgagcttctgattctagttgcttgtatgttgacattcatggaataggcagatgggatagatgactgtcatca

SEQ ID NO: 611753 - DNA, 513 bp, Homo sapiens
aaaaatctctaggttatcagttagatagcaatgatatmcagaaataaccactgttaataacatggtatatttccttccaaactattttctatgtatatatgcacatgtaaataattatgtttacttacaaatattggatcatttatacagacagctttgtacattgccttttgctcttaatgtattcagaactctttatgttaatatttaaatatctataccatgattttgatggctacataatatttcataatataggtatgtcttaatgtattcaaccaaactttttaaatgtcagatttagattgtttccaaatttcttctattccaaatttcttctattacaaataaatattgtgaatatttccttaagaaagccaggcacggtggcatgtacctgtagtcccagctactgggcatcctgagacaagagaataatttgactccaggggttcaaggctagcctgggcaacaggccaacatagtgagaggaaggaagggaggaagagagga

SEQ ID NO: 611754 - DNA, 367 bp, Homo sapiens
gtaggtggcaggaatatagcaatataattgatttgtgtatactgatttttatgtcaagcaaacttactaaatttctttattaattctatctataaattactttgaaatttcaatgatgacattattagctaataataatggttttgtttattctcttcaaatcccttatgcctttttttttccctttttctgccaaattgatctggcaaggattcttatktcaatgttaaacagaagacattcttggaatcttcttcctcgtaaagatgttttctatgtttaaccactagagataatacctgccctatgttctttgaagttaactttctttagattaagctaattttttattagtttgcacatcatg

SEQ ID NO: 611755 - DNA, 507 bp, Homo sapiens
cctggtttgggcagcagatctgacacgagacacagacagaccgacattaatggcagggtggatacctttgtagaacaattctgtttccaagaagatctgtccsttagtgatagaaatgacattcattggaatgtaagcagacacatcaccagtctgtttctatgactggcaaagcagtcaaggagccaccaccaaaagcattgttcatctgggctgctctctccagcaactgggagcataggtagaacacaacaccaggataggcctcacaaccagggggttggcagagcaacagaaacatctgattggtaagcaacagcctgtttggataagttgtcatagatggtcaaaacatgtttgccattgtctctaaaatactctcccatggaacagccagtgtaaggagccagttactgaagtggggcagcatctgaggccgtagctgacaccacgatggtgtaattcatggcatctgcatcgtaagtctcttcaccaactgggcaacag

SEQ ID NO: 611756 - DNA, 573 bp, Homo sapiens
cagaccgacattaatggcagggtggatacctttgtagaacaattctgtttccaagaagatctgtcccttmgtgatagaaatgacattcattggaatgtaagcagacacatcaccagtctgtttctatgactggcaaagcagtcaaggagccaccaccaaaagcattgttcatctgggctgctctctccagcaactgggagcataggtagaacacaacaccaggataggcctcacaaccagggggttggcagagcaacagaaacatctgattggtaagcaacagcctgtttggataagttgtcatagatggtcaaaacatgtttgccattgtctctaaaatactctcccatggaacagccagtgtaaggagccagttactgaagtggggcagcatctgaggccgtagctgacaccacgatggtgtaattcatggcatctgcatcgtaagtctcttcaccaactgggcaacagtggatctcttttgaccaataacaacatagacacagtacagcttcttcttttcatcagatccatcattgaaacatttctggttaatgattgtgtcaatagcaa

SEQ ID NO: 611757 - DNA, 573 bp, Homo sapiens
cagaccgacattaatggcagggtggatacctttgtagaacaattctgtttccaagaagatctgtcccttagtgatagaaatgacattcattggaatgtaagcagacacatcaccagtctgtttctatgactggcaaagcagtcaaggagccaccaccaaaagcattgttcatctgggctgctctctccagcaactgggagcataggtagaacacaacaccaggataggcctcacaaccagggggttggcagagcaacagaaacatctgattggtaagcaacagcctgtttggataagttgtcatagatggtcaaarcatgtttgccattgtctctaaaatactctcccatggaacagccagtgtaaggagccagttactgaagtggggcagcatctgaggccgtagctgacaccacgatggtgtaattcatggcatctgcatcgtaagtctcttcaccaactgggcaacagtggatctcttttgaccaataacaacatagacacagtacagcttcttcttttcatcagatccatcattgaaacatttctggttaatgattgtgtcaatagcaa

SEQ ID NO: 611758 - DNA, 592 bp, Homo sapiens
cagctgtgtgggagactgaagttttattattgctcaaattagtctcctggagcatttggagatcagagtttttaaggataatttgtgaactggtggggggcagtgagttgggtgtgcggattggtcaggtcatagggagtcaaagctatcctcttgtgctgagtcagttcctgagtggggccacaatatcagatgagccagtttatcgatcggggtgatggctgctgatccatcaagtgcagtgtctgcaaaatatctcaagagctggtcttaggctttacagtagtgatgttatcccctggagcaatctggaaagaacctcgtagcctccagctgcatgactcctaaaccataatttctaatcttgtgactagtttgttagtcctacaaaggcagtctagtccctaagcaagaaagggatttgttttgggaaagagctgtcattatgttcattttaaactataaattataaactaagttccttccaaagttagttcagcctaygccaaggaatgacgaaggacagcttggaagttagaagcaagatggagttggttaggtcagatctctttcactgcctcagttataattt

SEQ ID NO: 611759 - DNA, 553 bp, Homo sapiens
tttttctttgttaatatagctagtggtttattgatcttgtttattcttttgaagaaaaaacactttgtttcattgatcttttctatggatttttgtgtctaaatttcattcagttcttctctaattttagatatttattatcttctgcttgctttggggttggcttgtttttttctagttcctctagttgcaaaggtacattgttaatttgagacctttctaatttcttgctgaaggtkcttagtgctataaactttcctcttaatactgttctagctgtgttccagagattttggtaagctgtgtccctattttcatttatttcaaagaatttttttatttcttccttaattttattgttcaccgaggagttattctggagcaagctgttcaatttccatgtatttgtgtagttttggggagctaggactggctttcagcttcattctccagacccttgagattgggccccagctgttctgggggatccaaagtgcttccaggccaccaggaaggtactcaggtgaagcaaaacacccaggcttggcagcag

SEQ ID NO: 611760 - DNA, 572 bp, Homo sapiens
ttggtaagctgtgtccctattttcatttatttcaaagaatttttttatttcttccttaattttattgttcaccgaggagttattctggagcaagctgttcaatttccatgtatttgtgtagttttggggagctaggactggctttcagcttcattctccagacccttgagattgggccccagctgttctgggggatccaaagtgcttccaggccaccaggaaggtactcaggtgaagcaaaacacccaggcttggcagcagaggctactctgtgcacacctcctgcagggtggccaggcaggggccctggaagtttcccaagtcccacagggaagccagccacactctctcytgggccagcaatcagctgaggctagagctgcctgtagggaggtggggagccctgggggatgggtgtctaggccatgctctgccacagctccacatgcacaaaagctcctaggctccatgccggtgaagccctgtctctgccaactctctttgaagatccccctgccagctcaaatgtccatggagaatgtgaagttctatgtacctaggatcccagaggt

SEQ ID NO: 611761 - DNA, 595 bp, Homo sapiens
gccggtgaagccctgtctctgccaactctctttgaagatccccctgccagctcaaatgtccatggagaatgtgaagttctatgtacctaggatcccagaggtccacagtgagagtggcctgtccctccatcccttcacttatcccttccccaggaggcatccaggtctgggaactagccctgtcatgcaagtatcctgtgcagggtttccagcttcctccctcttcagccttgttgtctgcatcacctctgtaatgactctcagcattttctctctgaagatgggctcaaaatacgttggtgtactcaatattttggtgtctctcagtgggagcagtgcttcctggctgtgtctagttggccatcttgttatggtaacaatttcttttggagattttttggagtccacttgtggcagtcaaaagataactagacagtggtggcagatgacaactgggtccacagattgcacaacgaagagtagcctgtggcagagagcttatttgaagaaatggctgaaaacttcccaaatctgaaaaaygaaatggacaaccaaatttcagcagcttgaaggactctgtctaagatgaacctaa

SEQ ID NO: 611762 - DNA, 503 bp, Homo sapiens
gcagtttcaacattcttctgtaatctctgctgaaacatttttgtacctatattttatatcgatactttcagtgtgtgtgtgtgtgtgtgtatgtatgttctaggacccacttgagaaagattacccagtcaaagttcatataaatgctgcatattgttaggtattgaataagtatttggtatctctttatgttatgaggaagtaaacagtgtatcygcgtttaaatatgaagacagggttacagtggaagcatgatgctatcatctagtgacactcatcttgcagtatcatatttttactagttaagtgttctttattttaagtaggaggtacaggattctgaagcatagtgtaaaagattggaaaaggtttcacagggaaacctgtgggtatgaatcatacatgctgtggaaaccaaggatcttctcaaagtcatagttactggacttcatatgaagccctgtgattaaagaagcaagtcagcttagtaatagccaatattg

SEQ ID NO: 611763 - DNA, 503 bp, Homo sapiens
gcagtttcaacattcttctgtaatctctgctgaaacatttttgtacctatattttatatcgatactttcagtgtgtgtgtgtgtgtgtgtatgtatgttctaggacccacttgagaaagattacccagtcaaagttcatataaatgctgcatattgttaggtattgaataagtatttggtatctctttatgttatgaggaagtaaacagtgtatctgcrtttaaatatgaagacagggttacagtggaagcatgatgctatcatctagtgacactcatcttgcagtatcatatttttactagttaagtgttctttattttaagtaggaggtacaggattctgaagcatagtgtaaaagattggaaaaggtttcacagggaaacctgtgggtatgaatcatacatgctgtggaaaccaaggatcttctcaaagtcatagttactggacttcatatgaagccctgtgattaaagaagcaagtcagcttagtaatagccaatattg

SEQ ID NO: 611764 - DNA, 503 bp, Homo sapiens
gcagtttcaacattcttctgtaatctctgctgaaacatttttgtacctatattttatatcgatactttcagtgtgtgtgtgtgtgtgtgtatgtatgttctaggacccacttgagaaagattacccagtcaaagttcatataaatgctgcatattgttaggtattgaataagtatttggtatctctttatgttatgaggaagtaaacagtgtatctgcgtttaaatatgaagacagggttacagtggaagcatgatgctatcatctagtgacactcatcttgcagtatcatatttttactagttaagtgttctttattttaagtaggaggtacaggattctgaagcatagtgtaaaagattggaaaaggtttcacagggaaacctgtgggtatgaatcatacatgctgtggaaaccaaggatcttctcaaagtcatagttactggacttcawatgaagccctgtgattaaagaagcaagtcagcttagtaatagccaatattg

SEQ ID NO: 611765 - DNA, 635 bp, Homo sapiens
ctgctgaaacatttttgtacctatattttatatcgatactttcagtgtgtgtgtgtgtgtgtgtatgtatgttctaggacccacttgagaaagattacccagtcaaagttcatataaatgctgcatattgttaggtattgaataagtatttggtatctctttatgttatgaggaagtaaacagtgtatctgcgtttaaatatgaagacagggttacagtggaagcatgatgctatcatctagtgacactcatcttgcagtatcatatttttactagttaagtgttctttattttaagtaggaggtacaggattctgaagcatagtgtaaaagattggaaaaggtttcacagggaaacctgtgggtatgaatcatacatgctgtggaaaccaaggatcttctcaaagtcatagttactggacttcatatgaagccctgtgattaaagaagcaagtcagcttagtaatagccaatattgactgaaaatctgaagggcatttgtttaacctccttaaatagttgttatccaacaaatctgctaaaaaatagttttcaattatttagtacttactgyctttgttcacttaaacacaacttgcaaataagaagtagttattgcaaaaggtagaaatgatc

SEQ ID NO: 611766 - DNA, 588 bp, Homo sapiens
ggttgcaacttacatagtgtaaaatacaattcatgaaagtggaaagatgcagaaatcagaatggaaatgagaaccagcaacctgagagtcccacagaaatattcagtcacatctgtgtaaccaggggctgtacagtcttaggtggaggtattccagatttttgtttcttagtttctgtcagatgtaaaatgtgtatgtggaactattgtgcactttctttgtttggtagagacagtctctctgtgttgcccaggctagtctcaaattcctrgcctcaagtgatcctcccacctcagcctctcaaagtgctggtactacaggtgtgagccaccatccccagcctactgtgcattttctattatttgaagcaaaattggggccacaaagaaggtcatctgtagtatgccaataacataaacctctgacatttcagtaaaatattgcctttgcctctgcatagtatgccagcatgttctgcagggtgggcagccgcaagcagtggttagaacaggggctctagaaccagggcctgaacctgaggctgtgctctgctctccttaatagtgaaatcagaggcaagttgcttga

SEQ ID NO: 611767 - DNA, 614 bp, Homo sapiens
actgggcttggccaagtagaaattatatcctgctattagttgaccaaacatgattcataaactataactagtatggccgccattaatctaaaaattaatttttagattaatgtttattgacagtatctactctataaaatacaaaaataaaatatgcttttatgatgtggaccatagtatccataagattgcttttctgtttgaattggctataaaaatggaaaaagtatcattttgtaactgtgtggcatttgttcatttattcaacaataataccagagyggaaagcaacaagttaggtgtgacataatatagaaatggttttgttttgtttgtttgttctacatatattattagtaaggtttctctagagtactgtctctctctatctctctttctatctctgtctacacatagacacacacacacacacacacacacacacacacacacacacagatgttcctcaacttacaatggggttatgtcacaataaacccatcataagtttgttacaggaaagaggtccagatccagaccccaagagagggttcttggatcttgtgcaagaaagaattcagggcgagttcacagtgcaaagtgaaagtaagttt

SEQ ID NO: 611768 - DNA, 588 bp, Homo sapiens
aatctaaaaattaatttttagattaatgtttattgacagtatctactctataaaatacaaaaataaaatatgcttttatgatgtggaccatagtatccataagattgcttttctgtttgaattggctataaaaatggaaaaagtatcattttgtaactgtgtggcatttgttcatttattcaacaataataccagagcggaaagcaacaagttaggtgtgacataatatagaaatggttttgttttgtttgtttgttctacatatattattagtaaggtttctctagagtactgtctctctctatctctctttctatctctgtctacacatagacacacacacacacacacacacacacacacacacacacacagatgttcctcaacttacaatggggttatgtcacaataaacccatcataagtttgttacaggaaagaggtccagatccagaccccaagagagggttcttggatcttgtgcaagaaagaattcagggcgagttcacagtgcaaartgaaagtaagtttattaagaaagtaaaggaataaaagaatggttactccatagaaagagcagccccaaggg

SEQ ID NO: 611769 - DNA, 588 bp, Homo sapiens
aatctaaaaattaatttttagattaatgtttattgacagtatctactctataaaatacaaaaataaaatatgcttttatgatgtggaccatagtatccataagattgcttttctgtttgaattggctataaaaatggaaaaagtatcattttgtaactgtgtggcatttgttcatttattcaacaataataccagagcggaaagcaacaagttaggtgtgacataatatagaaatggttttgttttgtttgtttgttctacatatattattagtaaggtttctctagagtactgtctctctctatctctctttctatctctgtctacacatagacacacacacacacacacacacacacacacacacacacacagatgttcctcaacttacaatggggttatgtcacaataaacccatcataagtttgttacaggaaagaggtccagatccagaccccaagagagggttcttggatcttgtgcaagaaagaattcagggcgagttcacagtgcaaagtgaaagtaagtttattaagaaagtaaaggaataaaagaatggttaytccatagaaagagcagccccaaggg

SEQ ID NO: 611770 - DNA, 410 bp, Homo sapiens
cacaccatcattagctgaaaaatcgttttgaaccattgtaagttggggactgtctaaagaattgtgaattggctcaagtaatgacagaagctgattagtatggaaatttgaagtcagcaagctggagacccagcagaggtaaggtatagtccaaaagcttgcagccttgaggctcaagaagagccaatgttttcgttcatttaagaaggtaggaaaagaccaatgtcccagttcacacagtcaggcaaaaggagctccccagtactcaygggagggtcagctgtttcgttctattcaggcctcccaccaagaggatgaggtccatccatactggggagtgcagtgggcttcactcagctagagattcaaatgttaatctcattcagaaaacaccctcacagacacacaga

SEQ ID NO: 611771 - DNA, 410 bp, Homo sapiens
cacaccatcattagctgaaaaatcgttttgaaccattgtaagttggggactgtctaaagaattgtgaattggctcaagtaatgacagaagctgattagtatggaaatttgaagtcagcaagctggagacccagcagaggtaaggtatagtccaaaagcttgcagccttgaggctcaagaagagccaatgttttcgttcatttaagaaggtaggaaaagaccaatgtcccagttcacacagtcaggcaaaaggagctccccagtactcatgggagggtcagctgtttcgttctattcaggcctcccaccaagaggatgaggwccatccatactggggagtgcagtgggcttcactcagctagagattcaaatgttaatctcattcagaaaacaccctcacagacacacaga

SEQ ID NO: 611772 - DNA, 410 bp, Homo sapiens
cacaccatcattagctgaaaaatcgttttgaaccattgtaagttggggactgtctaaagaattgtgaattggctcaagtaatgacagaagctgattagtatggaaatttgaagtcagcaagctggagacccagcagaggtaaggtatagtccaaaagcttgcagccttgaggctcaagaagagccaatgttttcgttcatttaagaaggtaggaaaagaccaatgtcccagttcacacagtcaggcaaaaggagctccccagtactcatgggagggtcagctgtttcgttctattcaggcctcccaccaagaggatgaggtccatccataytggggagtgcagtgggcttcactcagctagagattcaaatgttaatctcattcagaaaacaccctcacagacacacaga

SEQ ID NO: 611773 - DNA, 546 bp, Homo sapiens
tggttgtcaatcactggtacagtttcagagagcaggaaatraagattcagcctttaactcctacacaatccacagtgtttttttcccctcagaactgtcataaaactgttgtattttatttagatttttaaattaacaactaaagccatattctagtaatactttaataatctagatttcctatttttggagtagaaggctgtatcatatttaaaatcactgcagagactttgaggttttcaaattaatatcatattaaaaatttttgcactctgaaggctttcatttattgctttaaaaaaatgttgaaactcagagttcaaatgattttaaaaactctacatctagatacagttaatgtaaactttgtatatctctgtaatgactttcactgcccctcattatcaatcaagagcattgagataaggactggaaaatattaaatatatatgttaatatttatataaacatattaaatgtgtgtgtgtgtcacacatacacacacagagcaagagaaagagcaagagagggacagtaactgtcttc

SEQ ID NO: 611774 - DNA, 546 bp, Homo sapiens
tggttgtcaatcactggtacagtttcagagagcaggaaataaagattcagcctttaactcctacacaatccacagtgtttttttcccctcagaactgtcataaaactgttgtattttatttagatttttaaattaacaactaaagccatattctagtaatactttaataatctagatttcctatttttrgagtagaaggctgtatcatatttaaaatcactgcagagactttgaggttttcaaattaatatcatattaaaaatttttgcactctgaaggctttcatttattgctttaaaaaaatgttgaaactcagagttcaaatgattttaaaaactctacatctagatacagttaatgtaaactttgtatatctctgtaatgactttcactgcccctcattatcaatcaagagcattgagataaggactggaaaatattaaatatatatgttaatatttatataaacatattaaatgtgtgtgtgtgtcacacatacacacacagagcaagagaaagagcaagagagggacagtaactgtcttc

SEQ ID NO: 611775 - DNA, 546 bp, Homo sapiens
tggttgtcaatcactggtacagtttcagagagcaggaaataaagattcagcctttaactcctacacaatccacagtgtttttttcccctcagaactgtcataaaactgttgtattttatttagatttttaaattaacaactaaagccatattctagtaatactttaataatctagatttcctatttttggagtagaaggctgyatcatatttaaaatcactgcagagactttgaggttttcaaattaatatcatattaaaaatttttgcactctgaaggctttcatttattgctttaaaaaaatgttgaaactcagagttcaaatgattttaaaaactctacatctagatacagttaatgtaaactttgtatatctctgtaatgactttcactgcccctcattatcaatcaagagcattgagataaggactggaaaatattaaatatatatgttaatatttatataaacatattaaatgtgtgtgtgtgtcacacatacacacacagagcaagagaaagagcaagagagggacagtaactgtcttc

SEQ ID NO: 611776 - DNA, 546 bp, Homo sapiens
tggttgtcaatcactggtacagtttcagagagcaggaaataaagattcagcctttaactcctacacaatccacagtgtttttttcccctcagaactgtcataaaactgttgtattttatttagatttttaaattaacaactaaagccatattctagtaatactttaataatctagatttcctatttttggagtagaaggctgtatcatatttaaaatcactgcagagactttgaggttttcaaattaatatcatattaaaaatttttgcactctgaaggctttcatttattgctttaaaaaaatgttgaaactcagagttcaaatgatttwaaaaactctacatctagatacagttaatgtaaactttgtatatctctgtaatgactttcactgcccctcattatcaatcaagagcattgagataaggactggaaaatattaaatatatatgttaatatttatataaacatattaaatgtgtgtgtgtgtcacacatacacacacagagcaagagaaagagcaagagagggacagtaactgtcttc

SEQ ID NO: 611777 - DNA, 576 bp, Homo sapiens
taacatacaaatattttaattagattcttttaaattcttaagattatgtgatataacccaaaagtggggctgaaatgtcaggtgacaataacacccaaatggaggttccactcagcacytccagggacaccccccccaacatatatacactctttacagaaacatatttggaaatgaattcattattcataagtagttgtgaatagttagaaaatagattttacatttcacattcaataaaactcccacagaatgtcaattctgattattcgtggattttgtattttcaaatccaccttcttgctaaaatgtatttgtatttgcaaattcacccacctgctaaaatttattactaaccccaaaattcacactcacagcacctttgttgtcatacacagactggccaaaaatttcattctcccagcttgcacattcccagctgatgttgaacaaaaccgtgttctgccttcttgtttcaactctcatactaaaatcaattttccttttcacaatctgtttagtgtcgtggttttcatatttttgtgcttttttggtgattttgatgtttacaatggc

SEQ ID NO: 611778 - DNA, 576 bp, Homo sapiens
taacatacaaatattttaattagattcttttaaattcttaagattatgtgatataacccaaaagtggggctgaaatgtcaggtgacaataacacccaaatggaggttccactcagcacctccagggacaccccccccaacatatatacactctttacagaaacatatttggaaatgaattcattattcataagtagttgtgaatagttagaaaatagattttacatttcacattcaataaaactcccacagaatgtcaattctsattattcgtggattttgtattttcaaatccaccttcttgctaaaatgtatttgtatttgcaaattcacccacctgctaaaatttattactaaccccaaaattcacactcacagcacctttgttgtcatacacagactggccaaaaatttcattctcccagcttgcacattcccagctgatgttgaacaaaaccgtgttctgccttcttgtttcaactctcatactaaaatcaattttccttttcacaatctgtttagtgtcgtggttttcatatttttgtgcttttttggtgattttgatgtttacaatggc

SEQ ID NO: 611779 - DNA, 576 bp, Homo sapiens
taacatacaaatattttaattagattcttttaaattcttaagattatgtgatataacccaaaagtggggctgaaatgtcaggtgacaataacacccaaatggaggttccactcagcacctccagggacaccccccccaacatatatacactctttacagaaacatatttggaaatgaattcattattcataagtagttgtgaatagttagaaaatagattttacatttcacattcaataaaactcccacagaatgtcaattctgattattcgtggattttgtattttcaaatccaccttcttgctaaaatgtatttgtatttgcaaattcacccacctgctaaaatttattactarccccaaaattcacactcacagcacctttgttgtcatacacagactggccaaaaatttcattctcccagcttgcacattcccagctgatgttgaacaaaaccgtgttctgccttcttgtttcaactctcatactaaaatcaattttccttttcacaatctgtttagtgtcgtggttttcatatttttgtgcttttttggtgattttgatgtttacaatggc

SEQ ID NO: 611780 - DNA, 603 bp, Homo sapiens
tcaggtgacaataacacccaaatggaggttccactcagcacctccagggacaccccccccaacatatatacactctttacagaaacatatttggaaatgaattcattattcataagtagttgtgaatagttagaaaatagattttacatttcacattcaataaaactcccacagaatgtcaattctgattattcgtggattttgtattttcaaatccaccttcttgctaaaatgtatttgtatttgcaaattcacccacctgctaaaatttattactaaccccaaaattcacactcacagcacctttkttgtcatacacagactggccaaaaatttcattctcccagcttgcacattcccagctgatgttgaacaaaaccgtgttctgccttcttgtttcaactctcatactaaaatcaattttccttttcacaatctgtttagtgtcgtggttttcatatttttgtgcttttttggtgattttgatgtttacaatggcccccaaacatagtgctaaagtgctctcaaagcacaaaaagaccgtgatgtgcattatggaggcacatgtgacataaactttgttcagatatgacctatagtata

SEQ ID NO: 611781 - DNA, 576 bp, Homo sapiens
taacatacaaatattttaattagattcttttaaattcttaagattatgtgatataacccaaaagtggggctgaaatgtcaggtgacaataacacccaaatggaggttccactcagcacctccagggacaccccccccaacatatatacactctttacagaaacatatttggaaatgaattcattattcataagtagttgtgaatagttagaaaatagattttacatttcacattcaataaaactcccacagaatgtcaattctgattattcgtggattttgtattttcaaatccaccttcttgctaaaatgtatttgtatttgcaaattcacccacctgctaaaatttattactaaccccaaaattcacactcacagcacctttgttgtcatacacagactggccaaaaatttcattctcccagcttgcacattcccagctgatgttgaacaaaaccgtgttctgccttcttgtttcaactctcatactaaaatcaattttccttttcacaatctgtttagtgtcgtggttttcatatttttrtgcttttttggtgattttgatgtttacaatggc

SEQ ID NO: 611782 - DNA, 603 bp, Homo sapiens
tcaggtgacaataacacccaaatggaggttccactcagcacctccagggacaccccccccaacatatatacactctttacagaaacatatttggaaatgaattcattattcataagtagttgtgaatagttagaaaatagattttacatttcacattcaataaaactcccacagaatgtcaattctgattattcgtggattttgtattttcaaatccaccttcttgctaaaatgtatttgtatttgcaaattcacccacctgctaaaatttattactaaccccaaaattcacactcacagcacctttgttgtcatacacagactggccaaaaatttcattctcccagcttgcacattcccagctgatgttgaacaaaaccgtgttctgccttcttgtttcaactctcatactaaaatcaattttccttttcacaatctgtttagtgtcgtggttttcatatttttgtgcttttttggtgattttgatgtttacartggcccccaaacatagtgctaaagtgctctcaaagcacaaaaagaccgtgatgtgcattatggaggcacatgtgacataaactttgttcagatatgacctatagtata

SEQ ID NO: 611783 - DNA, 542 bp, Homo sapiens
ttgcacattcccagctgatgttgaacaaaaccgtgttctgccttcttgtttcaactctcatactaaaatcaattttccttttcacaatctgtttagtgtcgtggttttcatatttttgtgcttttttggtgattttgatgtttacaatggcccccaaacatagtgctaaagtgctctcaaagcacaaaaagaccgtgatgtgcattatggaggcacatgtgacataaactttgttcagatatgacctatagtatagtgccattggctataatctcaatgctgatgaataaattttatatgttaaataaggwgtctttaaacagaaacacatataaaacaagattatgtcttgatcatttgatgaaaatgttgcagccagaggctcacagaaacttccccttacattttcccaagaagcaacaatttaatacttgctaatgttggagctctgaaaaccatatcctcaaaaatggcactttgacatgttgagtgctttgaattaaataaaattgaaaggcctcagaaataagcctcaggaccaa

SEQ ID NO: 611784 - DNA, 542 bp, Homo sapiens
agtcccccttttccctgtcccctgtgaataggatatttaagaattaaccaactagagggcatttaaggcttaaccaaagctcttctttgagtctcatatttttaggactcccatctccatgtgcatattaataaattgcatgcatttttcccttgttaatctgtctattgtcagctcatttcagcagtgaactatcagagggcagaggggaagatttctctctgccccyacagtaatttgatatttacagaaactttatagaacataactactgtgaataatgagaatcaactgtatatgtcacctttgaatacctctcttctctcttcactgcattcctttggcacagagatggagccaaactctagtggctagggaagtgaataaaagactgggtctgagtcacctgtttccctaaaggtagcatcaccctctgaaggtgccccttacaggcctctctgggaagggtttcacaatctccttccacactttacaggtggcaaattatggagccaagggccaaatccagtgcccatttgggc

SEQ ID NO: 611785 - DNA, 591 bp, Homo sapiens
taaattgcatgcatttttcccttgttaatctgtctattgtcagctcatttcagcagtgaactatcagagggcagaggggaagatttctctctgcccccacagtaatttgatatttacagaaactttatagaacataactactgtgaataatgagaatcaactgtatatgtcacctttgaatacctctcttctctcttcactgcattcctttggcacagagatggagccaaactctagtggctagggaagtraataaaagactgggtctgagtcacctgtttccctaaaggtagcatcaccctctgaaggtgccccttacaggcctctctgggaagggtttcacaatctccttccacactttacaggtggcaaattatggagccaagggccaaatccagtgcccatttgggcaacaagctaagaatgttttttacattaatgacaggctggggaaaaaaaaaaaaacagcaaagaaaataatatgacctaaaactgtatgtgacacataaagcctaaatatttactatctgggcctttacagaaaaagcttgctgaccccttctttgcagcctcaagtatagcaaatatcta

SEQ ID NO: 611786 - DNA, 591 bp, Homo sapiens
taaattgcatgcatttttcccttgttaatctgtctattgtcagctcatttcagcagtgaactatcagagggcagaggggaagatttctctctgcccccacagtaatttgatatttacagaaactttatagaacataactactgtgaataatgagaatcaactgtatatgtcacctttgaatacctctcttctctcttcactgcattcctttggcacagagatggagccaaactctagtggctagggaagtgaataaaagactgggtctgagtcacctgtttccctaaaggtagcatcaccctctgaaggtgccccttacaggcctctctgggaagggtttcacaatctccttccacactttacagktggcaaattatggagccaagggccaaatccagtgcccatttgggcaacaagctaagaatgttttttacattaatgacaggctggggaaaaaaaaaaaaacagcaaagaaaataatatgacctaaaactgtatgtgacacataaagcctaaatatttactatctgggcctttacagaaaaagcttgctgaccccttctttgcagcctcaagtatagcaaatatcta

SEQ ID NO: 611787 - DNA, 538 bp, Homo sapiens
tacacgttctcaagatcgatgataagtagtttgcaagtaagtaaaaggacttgacagcaccacttgccacatagagttcatcccagattcactgggtaattgaaattggccatgggtgcttgctaattacctttatcsaaaggaaaaacaaattctcatatctttataccaggaggtagttttgcaatgtggagcccgacgcctaggtaacattaggttcctaccctcccatgaaaatgtcaataaaaagagtccaactttgtaacacatttgtagaaatttattctgagccaaatatgagtgaccatggcccatgacacagccctcaggagatcccgagaacatgtgtccaaggtggttgcagcacagcctagttttatacatttcagggagacatgagacatcaatcaaatacatttaagatataagttggttcagtccagaaaagtgggacaactcaaagcaagggggtgtctgggttataggtagaatgaaaaatttcagattggcaattgcttgaaagagttattatcataga

SEQ ID NO: 611788 - DNA, 538 bp, Homo sapiens
tacacgttctcaagatcgatgataagtagtttgcaagtaagtaaaaggacttgacagcaccacttgccacatagagttcatcccagattcactgggtaattgaaattggccatgggtgcttgctaattacctttatcgaaaggaaaaacaaattctcatatctttataccaggaggtagttttgcaatgtggagcccgacgcctaggtaacattaggttcctaccctcccatgaaaatgtcaataaaaagagtccaactttgtaacacatttgtagaaatttattctgagccaaatatgagtgaccatgrcccatgacacagccctcaggagatcccgagaacatgtgtccaaggtggttgcagcacagcctagttttatacatttcagggagacatgagacatcaatcaaatacatttaagatataagttggttcagtccagaaaagtgggacaactcaaagcaagggggtgtctgggttataggtagaatgaaaaatttcagattggcaattgcttgaaagagttattatcataga

SEQ ID NO: 611789 - DNA, 630 bp, Homo sapiens
tgttgaataagcactaaagctcacttcaatgtgcatcacaagaaatctgccaaagagattgaaaaacagacagaaatctcaccctttcatgtggccaagtaggtaaaaccctcacatacacgttctcaagatcgatgataagtagtttgcaagtaagtaaaaggacttgacagcaccacttgccacatagagttcatcccagattcactgggtaattgaaattggccatgggtgcttgctaattacctttatcgaaaggaaaaacaaattctcatatctttataccaggaggtagttttgcaatgtggagcccgacgcctaggtaacattaggttcctaccctcccatgaaaatgtcaataaaaagagtccaactttgtaacacatttgtagaaatttattctgagccaaatatgagtgaccatggcccatgacacagccctcaggagatcccgagaacatgtgtccaaggtggttgcagcacagcctagttttatacatttyagggagacatgagacatcaatcaaatacatttaagatataagttggttcagtccagaaaagtgggacaactcaaagcaagggggtgtctgggttataggtagaatgaaaaatttcagattggcaatt

SEQ ID NO: 611790 - DNA, 585 bp, Homo sapiens
gagttcatcccagattcactgggtaattgaaattggccatgggtgcttgctaattacctttatcgaaaggaaaaacaaattctcatatctttataccaggaggtagttttgcaatgtggagcccgacgcctaggtaacattaggttcctaccctcccatgaaaatgtcaataaaaagagtccaactttgtaacacatttgtagaaatttattctgagccaaatatgagtgaccatggcccatgacacagccctcaggagatcccgagaacatgtgtccaaggtggttgcagcacagcctagttttatacatttcagggagacatgagacatcaatcaaatacatttaagatataagttggttcagtccagaaaagtgggacaactcaaagcaagggggtgtcygggttataggtagaatgaaaaatttcagattggcaattgcttgaaagagttattatcatagaaaacaatgtctgggttatgataagaggttgcagagaccaaagttttatcatgaagatgaagcctccatttcgcaggcttcagagaaaatagattgtacaggtttcttctcagacctaagg

SEQ ID NO: 611791 - DNA, 594 bp, Homo sapiens
tgggtaattgaaattggccatgggtgcttgctaattacctttatcgaaaggaaaaacaaattctcatatctttataccaggaggtagttttgcaatgtggagcccgacgcctaggtaacattaggttcctaccctcccatgaaaatgtcaataaaaagagtccaactttgtaacacatttgtagaaatttattctgagccaaatatgagtgaccatggcccatgacacagccctcaggagatcccgagaacatgtgtccaaggtggttgcagcacagcctagttttatacatttcagggagacatgagacatcaatcaaatacatttaagatataagttggttcagtccagaaaagtgggacaactcaaagcaagggggtgtctrggttataggtagaatgaaaaatttcagattggcaattgcttgaaagagttattatcatagaaaacaatgtctgggttatgataagaggttgcagagaccaaagttttatcatgaagatgaagcctccatttcgcaggcttcagagaaaatagattgtacaggtttcttctcagacctaaggcttgtgttgatgttaaatggtgattggc

SEQ ID NO: 611792 - DNA, 585 bp, Homo sapiens
gagttcatcccagattcactgggtaattgaaattggccatgggtgcttgctaattacctttatcgaaaggaaaaacaaattctcatatctttataccaggaggtagttttgcaatgtggagcccgacgcctaggtaacattaggttcctaccctcccatgaaaatgtcaataaaaagagtccaactttgtaacacatttgtagaaatttattctgagccaaatatgagtgaccatggcccatgacacagccctcaggagatcccgagaacatgtgtccaaggtggttgcagcacagcctagttttatacatttcagggagacatgagacatcaatcaaatacatttaagatataagttggttcagtccagaaaagtgggacaactcaaagcaagggggtgtctgggttataggtagaatgaaaaatttcrgattggcaattgcttgaaagagttattatcatagaaaacaatgtctgggttatgataagaggttgcagagaccaaagttttatcatgaagatgaagcctccatttcgcaggcttcagagaaaatagattgtacaggtttcttctcagacctaagg

SEQ ID NO: 611793 - DNA, 557 bp, Homo sapiens
gctggttgctgcagtggttgtgggtcagagttccattgtcgtacgtggtttggccactgtctgttttaatattcagtctctattactaaaaggtatacaaatggctaggcttctcacttcagttcttcatgtacaagctccttttagaggtttctgcactaaactattgtaaaaaaaaaaaagaaaaaaaraaggccaactccatttatccaatgtcaaccttgacgttaagaatgatgaatgtggcagctgtttccttctgttattgatctttttactgacccttcccattgtgctttgtcaatgactgagtatcttccctggaccactcttatctgaagtcgtcctcatctctcagggattttcagcaccatctgtcagccaggcactgtgactctgtcgtcagtgaccatttttattgacttttgtctctttctggcctttccatggtgccttggccttaaatgtcctgctaattagctcagtggtgattacagtgctggttttgagagcaccctgttgttttttcttatctaggagaattttttttctctctt

SEQ ID NO: 611794 - DNA, 557 bp, Homo sapiens
gctggttgctgcagtggttgtgggtcagagttccattgtcgtacgtggtttggccactgtctgttttaatattcagtctctattactaaaaggtatacaaatggctaggcttctcacttcagttcttcatgtacaagctccttttagaggtttctgcactaaactattgtaaaaaaaaaaaagaaaaaaagaaggccaactccatttatccaatgtcaaccttgacgttaagaatgatgaatgtggcagctgtttccttctgttattgatctttttactgacccttcccattgtgctttgtcaatgactgagtatcttccctggaccrctcttatctgaagtcgtcctcatctctcagggattttcagcaccatctgtcagccaggcactgtgactctgtcgtcagtgaccatttttattgacttttgtctctttctggcctttccatggtgccttggccttaaatgtcctgctaattagctcagtggtgattacagtgctggttttgagagcaccctgttgttttttcttatctaggagaattttttttctctctt

SEQ ID NO: 611795 - DNA, 557 bp, Homo sapiens
gctggttgctgcagtggttgtgggtcagagttccattgtcgtacgtggtttggccactgtctgttttaatattcagtctctattactaaaaggtatacaaatggctaggcttctcacttcagttcttcatgtacaagctccttttagaggtttctgcactaaactattgtaaaaaaaaaaaagaaaaaaagaaggccaactccatttatccaatgtcaaccttgacgttaagaatgatgaatgtggcagctgtttccttctgttattgatctttttactgacccttcccattgtgctttgtcaatgactgagtatcttccctggaccactcttatctgaagtcgtcctcatctctcagrgattttcagcaccatctgtcagccaggcactgtgactctgtcgtcagtgaccatttttattgacttttgtctctttctggcctttccatggtgccttggccttaaatgtcctgctaattagctcagtggtgattacagtgctggttttgagagcaccctgttgttttttcttatctaggagaattttttttctctctt

SEQ ID NO: 611796 - DNA, 490 bp, Homo sapiens
aaatggctaggcttctcacttcagttcttcatgtacaagctccttttagaggtttctgcactaaactattgtaaaaaaaaaaaagaaaaaaagaaggccaactccatttatccaatgtcaaccttgacgttaagaatgatgaatgtggcagctgtttccttctgttattgatctttttactgacccttcccattgtgctttgtcaatgactgagtatcttccctggaccactcttatctgaagtcgtcctcatctctcagggattttcagcaccatctgtcagccaggcactgtgactctgtcgtcagtgaccatttttattgacttttgtctctttctggcctttccatggtgccttggccttaaatgtcctrctaattagctcagtggtgattacagtgctggttttgagagcaccctgttgttttttcttatctaggagaattttttttctctctttatctggaaatattaccttgctggctatgct

SEQ ID NO: 611797 - DNA, 646 bp, Homo sapiens
catcagatcagtgttctaaatctgatcctagtattcccatctacaatcttcccacacaagccaagggaagagacacacttgattaaaaccttgcactctctttcctatttggctattttttctcctcttggagaaagagtttccccaaaatactatatgaagtgttattttgtaagcctacttaacttagttttatatactgtgcacaaactttacatataatttgaataggctcagttttttgttactgtttttttagtttttcacyaaattttatatgacagactatttaagctaaataatttgttatagttagaagactgttttctcatttacataccaaaatctaccaaaatgaatttattacacttaagaatttttgttaattacgattatcacttctgtaaaataaaataaatctaagaattttatgagcaaagctttttcaagtctactatttagtttagcaattattctaaatatcaatctcaaaattagagtaagggatttcccctttaggaaaagatatcaataattttattaggtaaaattttaaaataagatacagacatttattctgtgttggatcccaaatatcctattagagaatgatcttctctcattggctgctattttctaaaattcc

SEQ ID NO: 611798 - DNA, 646 bp, Homo sapiens
catcagatcagtgttctaaatctgatcctagtattcccatctacaatcttcccacacaagccaagggaagagacacacttgattaaaaccttgcactctctttcctatttggctattttttctcctcttggagaaagagtttccccaaaatactatatgaagtgttattttgtaagcctacttaacttagttttatatactgtgcacaaactttacatataatttgaataggctcagttttttgttactgtttttttagtttttcaccraattttatatgacagactatttaagctaaataatttgttatagttagaagactgttttctcatttacataccaaaatctaccaaaatgaatttattacacttaagaatttttgttaattacgattatcacttctgtaaaataaaataaatctaagaattttatgagcaaagctttttcaagtctactatttagtttagcaattattctaaatatcaatctcaaaattagagtaagggatttcccctttaggaaaagatatcaataattttattaggtaaaattttaaaataagatacagacatttattctgtgttggatcccaaatatcctattagagaatgatcttctctcattggctgctattttctaaaattcc

SEQ ID NO: 611799 - DNA, 646 bp, Homo sapiens
catcagatcagtgttctaaatctgatcctagtattcccatctacaatcttcccacacaagccaagggaagagacacacttgattaaaaccttgcactctctttcctatttggctattttttctcctcttggagaaagagtttccccaaaatactatatgaagtgttattttgtaagcctacttaacttagttttatatactgtgcacaaactttacatataatttgaataggctcagttttttgttactgtttttttagtttttcaccaaattttatatgacagactatttaagctaaataatttgttatagttagaagactgttttctcatttacataccaaaatctaccaaaatgaatttattacacttaagaatttttgttaattacsattatcacttctgtaaaataaaataaatctaagaattttatgagcaaagctttttcaagtctactatttagtttagcaattattctaaatatcaatctcaaaattagagtaagggatttcccctttaggaaaagatatcaataattttattaggtaaaattttaaaataagatacagacatttattctgtgttggatcccaaatatcctattagagaatgatcttctctcattggctgctattttctaaaattcc

SEQ ID NO: 611800 - DNA, 646 bp, Homo sapiens
catcagatcagtgttctaaatctgatcctagtattcccatctacaatcttcccacacaagccaagggaagagacacacttgattaaaaccttgcactctctttcctatttggctattttttctcctcttggagaaagagtttccccaaaatactatatgaagtgttattttgtaagcctacttaacttagttttatatactgtgcacaaactttacatataatttgaataggctcagttttttgttactgtttttttagtttttcaccaaattttatatgacagactatttaagctaaataatttgttatagttagaagactgttttctcatttacataccaaaatctaccaaaatgaatttattacacttaagaatttttgttaattacgattaycacttctgtaaaataaaataaatctaagaattttatgagcaaagctttttcaagtctactatttagtttagcaattattctaaatatcaatctcaaaattagagtaagggatttcccctttaggaaaagatatcaataattttattaggtaaaattttaaaataagatacagacatttattctgtgttggatcccaaatatcctattagagaatgatcttctctcattggctgctattttctaaaattcc

SEQ ID NO: 611801 - DNA, 457 bp, Homo sapiens
ttgtcagttgcacatcttgggacttctcagcctccataattacatgagccaattccttatcataaattttattatatatatgcatgtgtacacacacacacacatgcacacatatgcacacacgcacgcacacgtgcatgcacacacacacacgcactcacacatacacwcacaatctgtttatccagaggactctaatacagggagtaagtgtctcaaggccacatagttacaaagctcacccagggagtctgactccagggcccatgctctgggcatcaaatatcactcaatgttcacataaaacataatgtcttaggcacattacatgtacagtaagtcataacttaatgtcattgataggttatttgaaattgcaactttaagtgaaaagacatactgtatgccataggaacttaactcttatatcaattagcatatggtaaaattggttttg

SEQ ID NO: 611802 - DNA, 621 bp, Homo sapiens
ctctccccttggcctctgactgtggggcagggggtaaaaagtgggaggtgggttatatgcttctagttgggtaaatgctaagcgtttttatgtgggttgcattttattttygctttctaacaaacataattgaacattcagaaagggtaagtaactttccaaaagtttcacagatactgaaagataagtcagggttcatactttggtctgtctgatcacaagccagactaagatttgaacttctatgagactgtttcctcaaatttaaaatcagaatcatgttatctaattcactggctgaaccaagctcattcctcacccattttttattggtacttcttaaagaatgtggtcctcactctctagattccatgttttgagcgtaaaattcctatccctgtaccccaggcagagaggactggaccaggcgtggacctctgacctacaagatccaaggcattatgtttgcctggttcatcacctccttcaattgtagatgctgcagatgctgccctctctgtagaggtttaagtaaacaggaaagaatgtttaatgaaaataaggggaacaaagaaaccatgtggagtaaaagcagagatgacacatcaggaggccacaaat

SEQ ID NO: 611803 - DNA, 621 bp, Homo sapiens
ctctccccttggcctctgactgtggggcagggggtaaaaagtgggaggtgggttatatgcttctagttgggtaaatgctaagcgtttttatgtgggttgcattttatttttgctttctaacaaacataattgaacattcagaaagggtaagtaactttccaaaagtttcacagatactgaaagataagtcagggttcatactttggtctgtctgatcacaagccagactaagatttgaacttctmtgagactgtttcctcaaatttaaaatcagaatcatgttatctaattcactggctgaaccaagctcattcctcacccattttttattggtacttcttaaagaatgtggtcctcactctctagattccatgttttgagcgtaaaattcctatccctgtaccccaggcagagaggactggaccaggcgtggacctctgacctacaagatccaaggcattatgtttgcctggttcatcacctccttcaattgtagatgctgcagatgctgccctctctgtagaggtttaagtaaacaggaaagaatgtttaatgaaaataaggggaacaaagaaaccatgtggagtaaaagcagagatgacacatcaggaggccacaaat

SEQ ID NO: 611804 - DNA, 621 bp, Homo sapiens
ctctccccttggcctctgactgtggggcagggggtaaaaagtgggaggtgggttatatgcttctagttgggtaaatgctaagcgtttttatgtgggttgcattttatttttgctttctaacaaacataattgaacattcagaaagggtaagtaactttccaaaagtttcacagatactgaaagataagtcagggttcatactttggtctgtctgatcacaagccagactaagatttgaacttctatgagactgtttcctcaaatttaaaatcagaatcatgttatctaattcactggctgaaccaagctcattcctcacccattttttattggtacttcttaaagaatgtggtcctcactctctagattccatgttttgagcrtaaaattcctatccctgtaccccaggcagagaggactggaccaggcgtggacctctgacctacaagatccaaggcattatgtttgcctggttcatcacctccttcaattgtagatgctgcagatgctgccctctctgtagaggtttaagtaaacaggaaagaatgtttaatgaaaataaggggaacaaagaaaccatgtggagtaaaagcagagatgacacatcaggaggccacaaat

SEQ ID NO: 611805 - DNA, 621 bp, Homo sapiens
ctctccccttggcctctgactgtggggcagggggtaaaaagtgggaggtgggttatatgcttctagttgggtaaatgctaagcgtttttatgtgggttgcattttatttttgctttctaacaaacataattgaacattcagaaagggtaagtaactttccaaaagtttcacagatactgaaagataagtcagggttcatactttggtctgtctgatcacaagccagactaagatttgaacttctatgagactgtttcctcaaatttaaaatcagaatcatgttatctaattcactggctgaaccaagctcattcctcacccattttttattggtacttcttaaagaatgtggtcctcactctctagattccatgttttgagcgtaaaattcctatccctgtaccccaggcagagaggactggaccaggcgtggacctctgacctacaagatccaaggcattaygtttgcctggttcatcacctccttcaattgtagatgctgcagatgctgccctctctgtagaggtttaagtaaacaggaaagaatgtttaatgaaaataaggggaacaaagaaaccatgtggagtaaaagcagagatgacacatcaggaggccacaaat

SEQ ID NO: 611806 - DNA, 289 bp, Homo sapiens
cttgaatgtggttacagctgtttgcaamcaaaatatttctgaggctgaggagggaggattgcttgagcccaggagtttgagatcagtctgggcaatgtagcaagaccctgtttccatgaaaaaaaaattacctgggcctggttgtgtgtgcctgtagtcccagctacttgggaggctggggtaggaggatctctcaagcccaggaagtcaaggctgcagtgagccatgatgacactgctgcactccagcctacgcaacagagtgagaccatttcaaaaaaaagtctggt

SEQ ID NO: 611807 - DNA, 507 bp, Homo sapiens
tggcattgttcctaaatctcaacgtgtgaaaaaaccaattcctttagcttgaatgtggttacagctgtttgcaaacaaaatatttctgaggctgaggagggaggattgcttgagcccaggagtttgagatcagtctgggcaatgtagcaagaccctgtttccatgaaaaaaaarttacctgggcctggttgtgtgtgcctgtagtcccagctacttgggaggctggggtaggaggatctctcaagcccaggaagtcaaggctgcagtgagccatgatgacactgctgcactccagcctacgcaacagagtgagaccatttcaaaaaaaagtctggttaatatatgggtatttgtgcattttatggcattgtgtattaaaagatacatatttacaatactacattatttaactctctaagtagatttctatatagtataatactgccattatgttttgtctttgacattgcatattgtcaattttattcagtttatttagtgcatact

SEQ ID NO: 611808 - DNA, 289 bp, Homo sapiens
cttgaatgtggttacagctgtttgcaaacaaaatatttctgaggctgaggagggaggattgcttgagcccaggagtttgagatcagtctgggcaatgtagcaagaccctgtttccatgaaaaaaaaattacctgggcctggttgtgtgtgcctgtagtcccagctacttgggaggctggggtaggaggatctctcaagcccaggaagtcaaggctgcagtgagccatgatgacactgctgcactccagcytacgcaacagagtgagaccatttcaaaaaaaagtctggt

SEQ ID NO: 611809 - DNA, 620 bp, Homo sapiens
gcactttgtgcttctgtgaatggggttattttatattggacatataataacggactcacactgtattttccttttggcttatttcgcttagcataacgtcatcaaggttcatccatgttgccacatatggaaggatttcatttcagacaataatattttgttgtaagtagatgccacattttccttatctattcatatgtcggtgggtctttatgcggcttctacatcctggctatcgtgagtactgctgcaatgaacatgagagttcgaatatgtcttcaagatcttaattttttgaataaataccaagtgtgggattgctggatcatacgatagttctatttttaatgtttttgaggagcctccatactgttttctatagtggctgcaccattttacactcccaatagagtacaaggattccaatttctccacatctttgctaacacttgttatctttttgttgttgttttgacaaccagtggggagtgatatctcattatggttttgattgrcatttctctgattagtgacattgagcatttttcatatgtgtgttggctactcagatattcttttagagaaatgtcaatccaagtactgtacatcttttaaaaatc

SEQ ID NO: 611810 - DNA, 586 bp, Homo sapiens
tcttaacaagcttatgacaggagaaaaaaaaagaaaactagacaaggttttaaattatttctacagatcaggtaacacaaaggagtctttagttcctcaattttcytaagcaccaccttgagtgctgaataattatatagcaagtctgaagatctcgtataaacatgctacatgagtgtttaatgcgaatcacatagtcttatctcctgtattaggtcccatgacatcttgcttgagtatctcaatatttaatttattgttccaaccacataattccccagtatatttaaacatgctcaggtctctcccaatttacacacccacttgcatgataccacactaccctagagcgaaccctattgctctatttccattcattaattcatccacttattcatcaaatatttaatgtgcatcaactgtctgtcagcaatgtcaaagttctgttgatatagtgtacaagacaaagcacatctttactctgccatttcgatcttatattttcatggtggaagatgaaaataaagtagataaataaaaaatacccaaacatacacagaaataatataattgcagaaagtgatca

SEQ ID NO: 611811 - DNA, 586 bp, Homo sapiens
tcttaacaagcttatgacaggagaaaaaaaaagaaaactagacaaggttttaaattatttctacagatcaggtaacacaaaggagtctttagttcctcaattttcctaagcaccaccttgagtgctgaataattatatagcaagtctgaagatctcgtataaacatgctacatgagygtttaatgcgaatcacatagtcttatctcctgtattaggtcccatgacatcttgcttgagtatctcaatatttaatttattgttccaaccacataattccccagtatatttaaacatgctcaggtctctcccaatttacacacccacttgcatgataccacactaccctagagcgaaccctattgctctatttccattcattaattcatccacttattcatcaaatatttaatgtgcatcaactgtctgtcagcaatgtcaaagttctgttgatatagtgtacaagacaaagcacatctttactctgccatttcgatcttatattttcatggtggaagatgaaaataaagtagataaataaaaaatacccaaacatacacagaaataatataattgcagaaagtgatca

SEQ ID NO: 611812 - DNA, 586 bp, Homo sapiens
tcttaacaagcttatgacaggagaaaaaaaaagaaaactagacaaggttttaaattatttctacagatcaggtaacacaaaggagtctttagttcctcaattttcctaagcaccaccttgagtgctgaataattatatagcaagtctgaagatctcgtataaacatgctacatgagtgtttaatgcgaatcacatagtcttatctcctgtattaggtcccatgacatcttgcttgagtatctcartatttaatttattgttccaaccacataattccccagtatatttaaacatgctcaggtctctcccaatttacacacccacttgcatgataccacactaccctagagcgaaccctattgctctatttccattcattaattcatccacttattcatcaaatatttaatgtgcatcaactgtctgtcagcaatgtcaaagttctgttgatatagtgtacaagacaaagcacatctttactctgccatttcgatcttatattttcatggtggaagatgaaaataaagtagataaataaaaaatacccaaacatacacagaaataatataattgcagaaagtgatca

SEQ ID NO: 611813 - DNA, 643 bp, Homo sapiens
ctgcaccattttacactcccaatagagtacaaggattccaatttctccacatctttgctaacacttgttatctttttgttgttgttttgacaaccagtggggagtgatatctcattatggttttgattgacatttctctgattagtgacattgagcatttttcatatgtgtgttggctactcagatattcttttagagaaatgtcaatccaagtactgtacaycttttaaaaatctgggtatttgtttctggctattcagttgtagggtttccttatatatgttggatattaacaccttattagataaatagtttgcaaatattttctcctattttataggttgccttttcaatctattaattgtttcctttgctgtcataaagcttgaaccctttctgggtttaccctacagatatcttgtcattatgaatcttcttaaatgatttcatttttatatgcacaataaaaatcaatgagaattgttaaaaacaaaaacctcagagagataggattttactccacagagaacaaagtggagctcatatcaacctgggattaataaaaggaaaactcttttcactcagataaaactctcaggcaaggcatttggaaatatttttgatgcattcgttatctttgaac

SEQ ID NO: 611814 - DNA, 586 bp, Homo sapiens
tcttaacaagcttatgacaggagaaaaaaaaagaaaactagacaaggttttaaattatttctacagatcaggtaacacaaaggagtctttagttcctcaattttcctaagcaccaccttgagtgctgaataattatatagcaagtctgaagatctcgtataaacatgctacatgagtgtttaatgcgaatcacatagtcttatctcctgtattaggtcccatgacatcttgcttgagtatctcaatatttaatttattgttccaaccacataattccccagtatatttaaacatgctcaggtctctcccaayttacacacccacttgcatgataccacactaccctagagcgaaccctattgctctatttccattcattaattcatccacttattcatcaaatatttaatgtgcatcaactgtctgtcagcaatgtcaaagttctgttgatatagtgtacaagacaaagcacatctttactctgccatttcgatcttatattttcatggtggaagatgaaaataaagtagataaataaaaaatacccaaacatacacagaaataatataattgcagaaagtgatca

SEQ ID NO: 611815 - DNA, 437 bp, Homo sapiens
cctcatgtgagtaatggtgctacagacacattcccactggcatctgatcacagtcaatcagtaaattaagagctctgaaaccaagatttacttattatgaataaatcctttactttttctaataaaaatatattgttttcttttaaaaagaatcttaaagtattgtaggtttattggttgatttccatcattatcaattgaatttcwttatttatttattattatttttggagacagtcttgctctgtcactcagactggagtgcagtggtgtgatctcagctcactgcaacctctgcctcccgggttcaagcgattttcccacctcagcctctcgactagctgggattacaggtgggtgccaccacgcccagctaatttttgtatttttagtagagatacagtttcaccatgttggccaggctggtcttgaactcc

SEQ ID NO: 611816 - DNA, 565 bp, Homo sapiens
tagtgatgtatatataaagggttaaaatactccctcatgtgagtaatggtgctacagacacattcccactggcatctgatcacagtcaatcagtaaattaagagctctgaaaccaagatttacttattatgaataaatcctttactttttctaataaaaatatattgttttcttttaaaaagaatcttaaagtattgtaggtttattggttgatttccatcattatcaattgaatttcattatttatttattattatttttggagacagtcttgctctgtcactcagactggagtgcagtggtgtgatctcagctcactgcaacctctgcctccygggttcaagcgattttcccacctcagcctctcgactagctgggattacaggtgggtgccaccacgcccagctaatttttgtatttttagtagagatacagtttcaccatgttggccaggctggtcttgaactcctgacctctagagatccacccgcctcggcctcctaaaatgctgggattacaggcatgagccaccatgcctggctcattataatttttaaagcattag

SEQ ID NO: 611817 - DNA, 565 bp, Homo sapiens
tagtgatgtatatataaagggttaaaatactccctcatgtgagtaatggtgctacagacacattcccactggcatctgatcacagtcaatcagtaaattaagagctctgaaaccaagatttacttattatgaataaatcctttactttttctaataaaaatatattgttttcttttaaaaagaatcttaaagtattgtaggtttattggttgatttccatcattatcaattgaatttcattatttatttattattatttttggagacagtcttgctctgtcactcagactggagtgcagtggtgtgatctcagctcactgcaacctctgcctcccgggttcaagcgattttcccacctcagcctctckactagctgggattacaggtgggtgccaccacgcccagctaatttttgtatttttagtagagatacagtttcaccatgttggccaggctggtcttgaactcctgacctctagagatccacccgcctcggcctcctaaaatgctgggattacaggcatgagccaccatgcctggctcattataatttttaaagcattag

SEQ ID NO: 611818 - DNA, 565 bp, Homo sapiens
tagtgatgtatatataaagggttaaaatactccctcatgtgagtaatggtgctacagacacattcccactggcatctgatcacagtcaatcagtaaattaagagctctgaaaccaagatttacttattatgaataaatcctttactttttctaataaaaatatattgttttcttttaaaaagaatcttaaagtattgtaggtttattggttgatttccatcattatcaattgaatttcattatttatttattattatttttggagacagtcttgctctgtcactcagactggagtgcagtggtgtgatctcagctcactgcaacctctgcctcccgggttcaagcgattttcccacctcagcctctcgactagctgggattacaggtgggtgccaccacgccyagctaatttttgtatttttagtagagatacagtttcaccatgttggccaggctggtcttgaactcctgacctctagagatccacccgcctcggcctcctaaaatgctgggattacaggcatgagccaccatgcctggctcattataatttttaaagcattag

SEQ ID NO: 611819 - DNA, 643 bp, Homo sapiens
ctgcaccattttacactcccaatagagtacaaggattccaatttctccacatctttgctaacacttgttatctttttgttgttgttttgacaaccagtggggagtgatatctcattatggttttgattgacatttctctgattagtgacattgagcatttttcatatgtgtgttggctactcagatattcttttagagaaatgtcaatccaagtactgtacatcttttaaaaatctgggtatttgtttctggctattcagttgtagggtttccttatatatgttggatattaacaccttattagataaatagtttgcaaatattttctcctattttataggttgccttttcaatctattaattgtttcctttgctgtcataaagcttgaaccctttctgggtttaccctacagatatcttgtcattatgaatcttcttaaatgatttcatttttatatgcacaataaaaatcaatgagaattgttaaaaacaaaaacctcagagagataggattttactccacagagaacaaagtggagctcatatcaacctgggattaataaaargaaaactcttttcactcagataaaactctcaggcaaggcatttggaaatatttttgatgcattcgttatctttgaac

SEQ ID NO: 611820 - DNA, 600 bp, Homo sapiens
gccaccacattcttcacaggcagagtgctagggccttgggggcygaacaggtttgagggaggggcccagggtgcccatgggaacttggggcttaccatccagggccgcctcaaatctctgctccctgcattctggcacagtgctccttggctgccccagctatggctcaagcaggcccaggtgtgactcaagtcactgcttcaggaggtataggccatagcacttggcagcacccatgtagtgcgaactctgcaagtgcacagagttcaggagctttgaaggcctagcttcctcccctaggtttcagagaatgccacagagtgtctccaccagaggaatacacagtggagctgtgtgagtggggccacctcagagagtactcactaacacaaaatctagtggaactatgggggtagggccatgctggagacctccacattttagagtcaccaggatgcaatgccagcgtgaaagagctgcaggtaggagactccaacccatgagggctgtggtgtgggctgtgcccagcaaagctatggggttgtggcctttggagccttggggatccaacccctgccccagtctgccttgacggtaaaa

SEQ ID NO: 611821 - DNA, 626 bp, Homo sapiens
cttcacaggcagagtgctagggccttgggggctgaacaggtttgagggaggggcccagggtgcccatgggaacttggggcttaccatccagggccgcctcaaatctctgctccctgcattctggcacagtgctccttggctgccccagctatggctcaagcaggcccaggtgtgactcaagtcactgcttcaggaggtataggccatagcacttggcagcacccatgtagtgcgaactctgcaagtgcacagagttcaggagctttgaaggcctagcttcctcccctaggtttcagagaatgccacagagtgtctccaccagaggwatacacagtggagctgtgtgagtggggccacctcagagagtactcactaacacaaaatctagtggaactatgggggtagggccatgctggagacctccacattttagagtcaccaggatgcaatgccagcgtgaaagagctgcaggtaggagactccaacccatgagggctgtggtgtgggctgtgcccagcaaagctatggggttgtggcctttggagccttggggatccaacccctgccccagtctgccttgacggtaaaacatgagtcaaataaaattattttcaagccttaagatc

SEQ ID NO: 611822 - DNA, 617 bp, Homo sapiens
cttcacaggcagagtgctagggccttgggggctgaacaggtttgagggaggggcccagggtgcccatgggaacttggggcttaccatccagggccgcctcaaatctctgctccctgcattctggcacagtgctccttggctgccccagctatggctcaagcaggcccaggtgtgactcaagtcactgcttcaggaggtataggccatagcacttggcagcacccatgtagtgcgaactctgcaagtgcacagagttcaggagctttgaaggcctagcttcctcccctaggtttcagagaatgccacagagtgtctccaccagaggaatrcacagtggagctgtgtgagtggggccacctcagagagtactcactaacacaaaatctagtggaactatgggggtagggccatgctggagacctccacattttagagtcaccaggatgcaatgccagcgtgaaagagctgcaggtaggagactccaacccatgagggctgtggtgtgggctgtgcccagcaaagctatggggttgtggcctttggagccttggggatccaacccctgccccagtctgccttgacggtaaaacatgagtcaaataaaattattttcaagc

SEQ ID NO: 611823 - DNA, 597 bp, Homo sapiens
accacattcttcacaggcagagtgctagggccttgggggctgaacaggtttgagggaggggcccagggtgcccatgggaacttggggcttaccatccagggccgcctcaaatctctgctccctgcattctggcacagtgctccttggctgccccagctatggctcaagcaggcccaggtgtgactcaagtcactgcttcaggaggtataggccatagcacttggcagcacccatgtagtgcgaactctgcaagtgcacagagttcaggagctttgaaggcctagcttcctcccctaggtttcagagaatgccacagagtgtctccaccagaggaatacacagtggagctgtgtgagtgrggccacctcagagagtactcactaacacaaaatctagtggaactatgggggtagggccatgctggagacctccacattttagagtcaccaggatgcaatgccagcgtgaaagagctgcaggtaggagactccaacccatgagggctgtggtgtgggctgtgcccagcaaagctatggggttgtggcctttggagccttggggatccaacccctgccccagtctgccttgacggtaaaa

SEQ ID NO: 611824 - DNA, 553 bp, Homo sapiens
ttgctgttgtaatgaatggcattgcactggatccacaaatcaagttaggaagacatcttgacaacattgagtctctctatccatgtatatggaatagctctccatgtatttagttctttgatttctttcatcagctttatagctttcctcatayagatcttatacaaatttggtagatgcatacctatgtttttaatttctaggggtgctaatgtaaatgatattctgtttttaatttcaaattccacttgtttattgctgatgtataggaaagtgattgatttttggatattagctgtgctcttatttttatttccctcattttccttgttttgaatttactttgttcttctttcttatttcttgagtaggaacttaagagtattgacttgaggacacaaatgatgctgaatagccaaaacaatatttagcaaaaagaacgaagctggaggcattatactccctgatttcagaacatgttataaagtgatattaattaaaaccacataggtactcctataaaaacagacacattgaccaatggaacaggata

SEQ ID NO: 611825 - DNA, 622 bp, Homo sapiens
agctttctcaataaatgctgtgggaaaaactgagtatctgyatgtagaagaatgaaatgagatccttatatcataccatatacaaaaattaactctaaattgatgaaagacttaaatataagacttgaaactgtaaaactattacatgaaaacagagaaaatgatccaagatattggtttgatcagcaatttttttggatataaccctgaaagcatagggaacaaaagcaaaaataaacaaatgggatgacatcaagattaactatcttaattatattatttgatgaatagaagtcattaatttatagaagttcaatttaataaactttaaaaatatttggtgtctttttggtcctatttaagaaatctttgcctatctcaaggtcatggaagatattttgtacttttttgttatagaatttgtattgtttttactgtctaagcttccacattgtggcctatgatccatcctgaataaatgttgctaaaaattaaactttgacttagcttactataaatgatatttatatttatgtattacataatttatttacatattctcatatgtaatacatattattttactataaacactataattaaggcagaatagatagtttag

SEQ ID NO: 611826 - DNA, 643 bp, Homo sapiens
caggggtacttgctaaaatgcatattcctaggccccattcaatctggaatgaatgaagcttgaaatctgcaaatggaatatgcgcctctgaagtacattatcatttgatagctgcttccctagcctctctgcccatcgcatggcatcactctcacaaaccctgactcaggatgaacctgcctttctgccttcttatggcctttaactaactggggtgagtggtgtgactgaacgagcattcaccacaatccacttcaacaggcttcaaacaccactgataatcctgatacagaagtcagcatctgccacacattctccctatcagcagtgacccaagtgttcagtcccagccagtacctcacttcacttatattragtttcctttaatgggccactgttgctcttttctcccaatacttgtgagtctgagacaccctagtttatcaaacatgttctaaatggcactgaagctcaaagagaaatggtctggatgccacttcccttctgcacaaatggctcttttatatctctataaatttgcaaatgaaaaatagatacttctagaagcaggagcaacctcacttatcagaccattgataagacaaacatagttacaaccatcccctgaaccatgcattgggca

SEQ ID NO: 611827 - DNA, 602 bp, Homo sapiens
attcttggttgctttatatactgcttaataataagaagacatttgccccctttgaattccaaataagataaaagaagtggctggatgttatcacaagtacaacatttctgtttgggaagtatggaatacttctcagccataaaaaagaatgaaattatattttttgcagcaatatggatggaactggaggccattatcttaagtgatataactcagaaacagaaattcaaagactgcatgttctcacttataagtgagagataagtaatatgtacccatggacatgaaaagtggaatagacattgaagactcattggagattttggagactccagtagacactggaagggtgagagggaagtgagggatgagaaattacctgaaaggtacactgtacactatttgggtgatgggtacactaaatgctgaggtttcaccagcacacaatatatccatgtaacaaaactgcacttgtaccccyaagtctatttttaaaagtgattaaaatccatatgttctccccaaccagcatttgccagaacaatggtccccatgcgcctgcagggacttgaccaactattagggcaaaggcctgctactta

SEQ ID NO: 611828 - DNA, 580 bp, Homo sapiens
aaagtactaagatttcacaggggttgtgtaaaaatgtgcattttatattcagagaaaaggctgcaagcacagagatgtcacttcagggattcagtttctagttgttatcttattgtcaatcctttcagcttggtcatctctatatccccacacaccagctcattaaagtaagatatttgctatgttttatgtataatatagagaaaagcagacatcactttccayaactcatatgtttctgaaatgatatgtactctttgtaagactcagaaatcatccctctctgcttacctaattaaaaagtagaaaatcaaatatttctggtatgatgctgcttttcaccattttaaatatgactagaaaaggcttgcatgcaccttactgtagaaataaaggtagactacccacatgagaacaggtgattaattcaaagtttgggagtgggaaagctttagagtgagcaaaaaacgggagggaaagcgtgggggaaggcttcaagtatgctctgattgcatgtagttggcaaggggaagttggaagtaggttaactagaagcagagtatcttatgtggttggtttg

SEQ ID NO: 611829 - DNA, 580 bp, Homo sapiens
aaagtactaagatttcacaggggttgtgtaaaaatgtgcattttatattcagagaaaaggctgcaagcacagagatgtcacttcagggattcagtttctagttgttatcttattgtcaatcctttcagcttggtcatctctatatccccacacaccagctcattaaagtaagatatttgctatgttttatgtataatatagagaaaagcagacatcactttccataactcatatgtttctgaartgatatgtactctttgtaagactcagaaatcatccctctctgcttacctaattaaaaagtagaaaatcaaatatttctggtatgatgctgcttttcaccattttaaatatgactagaaaaggcttgcatgcaccttactgtagaaataaaggtagactacccacatgagaacaggtgattaattcaaagtttgggagtgggaaagctttagagtgagcaaaaaacgggagggaaagcgtgggggaaggcttcaagtatgctctgattgcatgtagttggcaaggggaagttggaagtaggttaactagaagcagagtatcttatgtggttggtttg

SEQ ID NO: 611830 - DNA, 580 bp, Homo sapiens
aaagtactaagatttcacaggggttgtgtaaaaatgtgcattttatattcagagaaaaggctgcaagcacagagatgtcacttcagggattcagtttctagttgttatcttattgtcaatcctttcagcttggtcatctctatatccccacacaccagctcattaaagtaagatatttgctatgttttatgtataatatagagaaaagcagacatcactttccataactcatatgtttctgaaatgatatgtactctttgtaagactcagaaatcatccctctctgcttacctaatyaaaaagtagaaaatcaaatatttctggtatgatgctgcttttcaccattttaaatatgactagaaaaggcttgcatgcaccttactgtagaaataaaggtagactacccacatgagaacaggtgattaattcaaagtttgggagtgggaaagctttagagtgagcaaaaaacgggagggaaagcgtgggggaaggcttcaagtatgctctgattgcatgtagttggcaaggggaagttggaagtaggttaactagaagcagagtatcttatgtggttggtttg

SEQ ID NO: 611831 - DNA, 580 bp, Homo sapiens
aaagtactaagatttcacaggggttgtgtaaaaatgtgcattttatattcagagaaaaggctgcaagcacagagatgtcacttcagggattcagtttctagttgttatcttattgtcaatcctttcagcttggtcatctctatatccccacacaccagctcattaaagtaagatatttgctatgttttatgtataatatagagaaaagcagacatcactttccataactcatatgtttctgaaatgatatgtactctttgtaagactcagaaatcatccctctctgcttacctaattaaaaagtagaaaatcaaatatttctggtatgatgctgcttttcaccattttaaatrtgactagaaaaggcttgcatgcaccttactgtagaaataaaggtagactacccacatgagaacaggtgattaattcaaagtttgggagtgggaaagctttagagtgagcaaaaaacgggagggaaagcgtgggggaaggcttcaagtatgctctgattgcatgtagttggcaaggggaagttggaagtaggttaactagaagcagagtatcttatgtggttggtttg

SEQ ID NO: 611832 - DNA, 562 bp, Homo sapiens
ccacatcttcaccactgtgatattgccgagtggtctccattacaaactatattgtgaggtcttgactttttgttgttgtgtcagcactgagatgtgaggtcagttggacttcctgggtccagtggggacctggggaactttcctttcttacaagaggattgtataaagcaccaatcagcactctgtaaaatgcaccaatcagcactctgtaaaatgcaccaatcagcagattctaaaagtagccaattgcccrgaggattgaaaaaagggcattctgacaggacaggaacagaatatgggaggggccaataagggaataaaagctggccaccccagccaccagtggcaatcagctcccccttccatgctgtggaagctttgctcttcacaataaaccttgctagtgctcagtttggttctgtgccatctttaagagctgtaacagtcacagcgaaggtctgtggctttattcttgaagtcagcgagaccatgaacccaccagtaggaaccaactccggacacagtatggcaatgatctctggtgagaacagctgcccagtag

SEQ ID NO: 611833 - DNA, 594 bp, Homo sapiens
tcaggggtgcctaattatgaaagagagtgcctaactaccaaaggaagaggctactgaagagccttcttgagttacagaatttatatttgggcccccacaaaagacagtttcttactaaggactcagccaattcataaaaagagattgcaagctcagaaaaatttcrcagccattgtctacaatatccagttaaacctagaaatcctctcaattgtcattttgcgaggcatcgaggtgaagtttcgatagtgttctgcctaccaatagaggcaaaataatttcaccctcttaagataacttacaccctaaatactagcctgtcttttgacaaaattataatttatcttttgaaacattatgttctttttctgctatggctgagagcaagtatttacttgctctcaccttctcaccagcttcctcgttctctgaagaaagcagtggagatcatctgatcctgcatatactgcatcaaaactcaatcacaagtgaaatttagatcttttaagtcttgattgaggacttgtggaaagtaagagggggctttagtgagcccctggggtatgactatccgggtatatttgttgtcctctc

SEQ ID NO: 611834 - DNA, 594 bp, Homo sapiens
tcaggggtgcctaattatgaaagagagtgcctaactaccaaaggaagaggctactgaagagccttcttgagttacagaatttatatttgggcccccacaaaagacagtttcttactaaggactcagccaattcataaaaagagattgcaagctcagaaaaatttcgcagccattgtctacaatatccagttaaacctagaaatcctctcaattgtcattttgcgaggcatcgaggtgaagtttcgatagtgttctgyctaccaatagaggcaaaataatttcaccctcttaagataacttacaccctaaatactagcctgtcttttgacaaaattataatttatcttttgaaacattatgttctttttctgctatggctgagagcaagtatttacttgctctcaccttctcaccagcttcctcgttctctgaagaaagcagtggagatcatctgatcctgcatatactgcatcaaaactcaatcacaagtgaaatttagatcttttaagtcttgattgaggacttgtggaaagtaagagggggctttagtgagcccctggggtatgactatccgggtatatttgttgtcctctc

SEQ ID NO: 611835 - DNA, 594 bp, Homo sapiens
tcaggggtgcctaattatgaaagagagtgcctaactaccaaaggaagaggctactgaagagccttcttgagttacagaatttatatttgggcccccacaaaagacagtttcttactaaggactcagccaattcataaaaagagattgcaagctcagaaaaatttcgcagccattgtctacaatatccagttaaacctagaaatcctctcaattgtcattttgcgaggcatcgaggtgaagtttcgatagtgttctgcctaccaatagaggcaaaataatttcaccctcttaagataacttacaccctaaatactagcctgtcttttgacaaaattataatttatcttttgaaacattatgttctttttctgctatggctgagagcaagtatttacttgctctcaccttctcaccagcttcctcgttctctgaagaaagcagtggagatcatctgatcctgcatatactgcatcaaaactsaatcacaagtgaaatttagatcttttaagtcttgattgaggacttgtggaaagtaagagggggctttagtgagcccctggggtatgactatccgggtatatttgttgtcctctc

SEQ ID NO: 611836 - DNA, 594 bp, Homo sapiens
tcaggggtgcctaattatgaaagagagtgcctaactaccaaaggaagaggctactgaagagccttcttgagttacagaatttatatttgggcccccacaaaagacagtttcttactaaggactcagccaattcataaaaagagattgcaagctcagaaaaatttcgcagccattgtctacaatatccagttaaacctagaaatcctctcaattgtcattttgcgaggcatcgaggtgaagtttcgatagtgttctgcctaccaatagaggcaaaataatttcaccctcttaagataacttacaccctaaatactagcctgtcttttgacaaaattataatttatcttttgaaacattatgttctttttctgctatggctgagagcaagtatttacttgctctcaccttctcaccagcttcctcgttctctgaagaaagcagtggagatcatctgatcctgcatatactgcatcaaaactcaatcacaagtgaaatttagawcttttaagtcttgattgaggacttgtggaaagtaagagggggctttagtgagcccctggggtatgactatccgggtatatttgttgtcctctc

SEQ ID NO: 611837 - DNA, 575 bp, Homo sapiens
ttcccttggctaggggagggagttccccaaccccttgcacttcgtgagtgaggtgatgccccaccctacttcagctcaccttccttgggctgcacccactgtctaaccagtcccaatgagatgagctggttacctcagttggaaatgcagaaatcacccaccttctgccttctgcgttgatctcactgggagctgcagaccagagctgttcctatttggccaccttgccagccaccctgacttgtatattttcgatgctaacctgtgggttrccaaatattgggaaatggtgtgctgagaggagaatataaagacaaagtgtggatccagtgcagaaaattttacagcttcctgtggaataagaaaatgttggaagcttaagaaacttttaatttacctaataaagccttgtattttatagaagcatgaggcccacccatttttgtttactctatattcattcaactacttttttttcttttattattattatactttaagttttagggtacatgtgcacaacgtgcaggtttgttacatatgtatacatgtgccatgttggtgtgctgcaccca

SEQ ID NO: 611838 - DNA, 575 bp, Homo sapiens
ttcccttggctaggggagggagttccccaaccccttgcacttcgtgagtgaggtgatgccccaccctacttcagctcaccttccttgggctgcacccactgtctaaccagtcccaatgagatgagctggttacctcagttggaaatgcagaaatcacccaccttctgccttctgcgttgatctcactgggagctgcagaccagagctgttcctatttggccaccttgccagccaccctgacttgtatattttcgatgctaacctgtgggttgccaaatattgggaaatggtgtgctgagaggagaatataaagacaaagtgtggatccagtgcagaaaattttacagcttcctgtggaataagaaaatgttggaagcttaagaaacttttaatttacctaataaagccttgtattttatagaagcatgaggccyacccatttttgtttactctatattcattcaactacttttttttcttttattattattatactttaagttttagggtacatgtgcacaacgtgcaggtttgttacatatgtatacatgtgccatgttggtgtgctgcaccca

SEQ ID NO: 611839 - DNA, 604 bp, Homo sapiens
cagcttagcaggaaagtctagtctacataggtttgtaattcaagcatccaagtatatgtgatagttgaaatcatgcaagtgagttacgtccagaaatgttcagtgacttcctcatgtctcaaaccattataagaatgaaactcaggtcttctctctttaccacaattctcaataagacaaaatattagggcaaaataaacctgtatatgaagtgtctggatctcttcaaatttggaatctgatatcagaaattgctacagcccttaattgctaacacagatagtccctcttttatrtttcataaatgttctgcattttaccctatttctattagatttgaatttcacctttttagtaacttcacttttgaaatgtaaccttaatgattttagatttcataactaattggttaacatatagatggtatgatctttatattatttgttcaggaaagtttctaaagcatttttctttaccaagttttggaaaaaaggtgtagaatatggatgcggaccactggcctgcattctgaatccaatcaatttaaagagagcttcaaccactgtaaaactcaatgcatctacataaatggaaatcaattgaa

SEQ ID NO: 611840 - DNA, 565 bp, Homo sapiens
gcatctacataaatggaaatcaattgaattgatttttgacagacttgctccactgccttcaattcaaaatctgcttatacatagtgttccagaacaaaatcattaccatgtacaacagaaatactgttttattaaaagcataaaggttacagttttgcaaaggcttcactttacatgaattttcagtgaaataaaaatgtttttaaccacttatactataaatctgtaatatgcttgcaytctgcaagagctaataaatctattaatccattgacctgaaaaaggtttaaatgccccaaaattatcagcattaatggttctgattattttctccatgaatttgcactgtgtacaattattatccaaagtatgtgaagtgatgattctttatcgagcttatattaaacatgatacattaaaatatattaaatgctagagtatctgtatcataaaatacattaaaatactgtaccagaatatctagaaagaaaggacttatgaagtagacctgcatgcccttctctctcatggcagagtttgggtgatgcatcaaaggaagaaagaa

SEQ ID NO: 611841 - DNA, 565 bp, Homo sapiens
gcatctacataaatggaaatcaattgaattgatttttgacagacttgctccactgccttcaattcaaaatctgcttatacatagtgttccagaacaaaatcattaccatgtacaacagaaatactgttttattaaaagcataaaggttacagttttgcaaaggcttcactttacatgaattttcagtgaaataaaaatgtttttaaccacttatactataaatctgtaatatgcttgcattctgcaagagctaataaatctattaatccattgacctgaaaaaggtttaaatgccccaaaattatcagcattaatggttctgattattttctccatgaatttgcactgtgtacaattattatccaaagtatgtgaagtgatgattctttatcgagcttatattaaacatgatacattaaaatatwttaaatgctagagtatctgtatcataaaatacattaaaatactgtaccagaatatctagaaagaaaggacttatgaagtagacctgcatgcccttctctctcatggcagagtttgggtgatgcatcaaaggaagaaagaa

SEQ ID NO: 611842 - DNA, 479 bp, Homo sapiens
cttgtaaacattataatggcagctctcctggcaaacaaagtatgtgaccttggctagcaagagagaactatgaaatacatatagtaaaatatagctgcctatctagaatcacctgtggtaaayagacctggaatctttaggtttacaggggatggctccaaggaaaatgtcacataaactatgtaactcagtaattcatgacctaagtggcttcttctgtgcaagatctgtaccagaacacatctcatgtgagaagaaatgacccaataagtcacattggggtcccagaacactttctgcttcacttgtgtcatataactgcttgtgtcattgcaattattagcaaaacttgacattgagtaagtactctgattctatgattttcatttaccagactaattcttaatattatcttaatgcttgcataatatgatatctgaaatcatctcaggtgctatgaatagatcattttaatttca

SEQ ID NO: 611843 - DNA, 545 bp, Homo sapiens
acaggggatggctccaaggaaaatgtcacataaactatgtaactcagtaattcatgacctaagtggcttcttctgtgcaagatctgtaccagaacacatctcatgtgagaagaaatgacccaataagtcacattggggtcccagaacactttctgcttcacttgtgtcatataactgcttgtgtcattgcaattattagcaaaacttgacattgagtaagtactctgattctatgattttcatttaccagwctaattcttaatattatcttaatgcttgcataatatgatatctgaaatcatctcaggtgctatgaatagatcattttaatttcattaataataaaccacattttaaaaaccctcaatgatgggggtatatcaaaggaatacaggagccaacagaaagaactcccagtggccaaaactagaacaatttgtgcaataaaataagcaaagtagtattgaattatatctcaaagtattaaattatttttaattctaaatgtatataaataattgcttaaataaatagggaagaatata

SEQ ID NO: 611844 - DNA, 545 bp, Homo sapiens
acaggggatggctccaaggaaaatgtcacataaactatgtaactcagtaattcatgacctaagtggcttcttctgtgcaagatctgtaccagaacacatctcatgtgagaagaaatgacccaataagtcacattggggtcccagaacactttctgcttcacttgtgtcatataactgcttgtgtcattgcaattattagcaaaacttgacattgagtaagtactctgattctatgattttcatttaccagactaattcttaatattatcttaatgcttgcataatatgatatctgaaatcatctcaggtgctatgaatagatcattttaatttcattaataataaaccacatttwaaaaaccctcaatgatgggggtatatcaaaggaatacaggagccaacagaaagaactcccagtggccaaaactagaacaatttgtgcaataaaataagcaaagtagtattgaattatatctcaaagtattaaattatttttaattctaaatgtatataaataattgcttaaataaatagggaagaatata

SEQ ID NO: 611845 - DNA, 544 bp, Homo sapiens
tgcttgcataatatgatatctgaaatcatctcaggtgctatgaatagatcattttaatttcattaataataaaccacattttaaaaaccctcaatgatgggggtatatcaaaggaatacaggagccaacagaaagaactcccagtggccaaaactasaacaatttgtgcaataaaataagcaaagtagtattgaattatatctcaaagtattaaattatttttaattctaaatgtatataaataattgcttaaataaatagggaagaatatacagtcctctagatacatattagtgaaatgaaaaattccagtcaaaatatagggctgatctgggaataacaagaagagctaatcctctgcagtactcatagcaattttcttacaatgctttgataaaatctaacagtcacacaactaggtacataaaaatatttgacaaaattgaatatccacatattatgaaaactctcagcaaagtacaaataaaggcaattttcttatcctgataaagcacaaactgattcttaaattgtatagggcatg

SEQ ID NO: 611846 - DNA, 545 bp, Homo sapiens
acaggggatggctccaaggaaaatgtcacataaactatgtaactcagtaattcatgacctaagtggcttcttctgtgcaagatctgtaccagaacacatctcatgtgagaagaaatgacccaataagtcacattggggtcccagaacactttctgcttcacttgtgtcatataactgcttgtgtcattgcaattattagcaaaacttgacattgagtaagtactctgattctatgattttcatttaccagactaattcttaatattatcttaatgcttgcataatatgatatctgaaatcatctcaggtgctatgaatagatcattttaatttcattaataataaaccacattttaaaaaccctcaatgatgggggtatatcaaaggaatacaggagccaacagaaagaactcccagtggccaaaactagaacaatttgtgcaataaaataarcaaagtagtattgaattatatctcaaagtattaaattatttttaattctaaatgtatataaataattgcttaaataaatagggaagaatata

SEQ ID NO: 611847 - DNA, 546 bp, Homo sapiens
ctggaatctttaggtttacaggggatggctccaaggaaaatgtcacataaactatgtaactcagtaattcatgacctaagtggcttcttctgtgcaagatctgtaccagaacacatctcatgtgagaagaaatgacccaataagtcacattggggtcccagaacactttctgcttcacttgtgtcatataactgcttgtgtcattgcaattattagcaaaacttgacattgagtaagtactctgattctatgattttcatttaccagactaattcttaatattatcttaatgcttgcataatatgatatctgaaatcatctcaggtgctatgaatagatcattttaatttcattaataataaaccacattttaaaaaccctcaatgatgggggtatatcaaaggaatacaggagccaacagaaagaactcccagtggccaaaactagaacaatttgtgcaataaaataagcaaagtagtattgaattatatcycaaagtattaaattatttttaattctaaatgtatataaataattgcttaaata

SEQ ID NO: 611848 - DNA, 628 bp, Homo sapiens
gttctctctattacaaatagtcctaatgaaatcatatgctccacagtccagtgcattttgtctttgagagttgccagcctcttttactggagttgcagctcacgatgtagaggaagctactctggggactttggtcattttgcactttgtaggaattgtgctcagtaagtrattgattcacttatcatgagagataataggcaaataaaaagaattcttatacttttgatggcagctaattgggttcccaggttagtctggcatagtggaaagagggttcctgggttctataggctgcagacatgaacctccacatttgctacttgtttccttcaaggaagtcacttcacctccctaagcctcaggtattcaatttgtgaaatgataggtgctagatttctaatgttaacactgtggagaaaaactccttttcttagtagaaatatcttccgtactcccaaaacacacacactcctgtttctcttcaggaaatgcttctattgacctgttagaataggagctgaaaccccaggtgacaattttgaataacgatataagaggttaatattctactttagatgatggaggttagaagcaagtcagctaactgcagagctgttgttttgct

SEQ ID NO: 611849 - DNA, 433 bp, Homo sapiens
gacataaatgtaaaattataaaactttacaagataatctaggagaaaatamccatgactctgatttaggaaaatatttcatatattttgaagctctggtgtttggtccatatatgtttaaaactgttatgtcttcttggtgaactgattctattatcactatataatgcccttccttgtctcttataagagtttttcacttaaagtctattttggctgatagtataggcacccttctttctttttattactatttgcatagaatatattttgccgtatttccactatcaacctgtgcttgtacttagggctaaagtgagtttattatagacagaatagagttggatcctgtgtggatttttttaaaaaaatccattctgccaatctatatcttttggctgcagagtttaatctatttacatttaaagggaaga

SEQ ID NO: 611850 - DNA, 534 bp, Homo sapiens
gttagaggaatcacactatctgatgttaagttacagtaatcaagatagtcatgcaggtcaatgtaacagaatagagaatccataaactgatgcccacatatatggtcaattgatctttgataaagatcaaagaacagatagaattttctttttaataaatggtgctggaataatttggcatcttatgtgaaaaataaacctctacttataactccctctttataaaaaattaaaaatggattatagacataaatgtaaaattataaaactttacaagataatctaggagaaaatacccatgactctgatttaggaaaatatttcatatattttgaagctctggtgtttggtccatatatgtttaaaactgttatgtcttcttggtgaactgattctattatcaytatataatgcccttccttgtctcttataagagtttttcacttaaagtctattttggctgatagtataggcacccttctttctttttattactatttgcatagaatatattttgccgtatttccactatca

SEQ ID NO: 611851 - DNA, 586 bp, Homo sapiens
aaaaattaaaaatggattatagacataaatgtaaaattataaaactttacaagataatctaggagaaaatacccatgactctgatttaggaaaatatttcatatattttgaagctctggtgtttggtccatatatgtttaaaactgttatgtcttcttggtgaactgattctattatcactatataatgcccttccttgtctcttataagagtttttcacttaaagtctattttggctgatagtataggcacccttctttctttttattactatttgcatagaatatattttgccgtatttccactatcaacctgtgcttgtacttagggctaaagtgagtttattatagacagaatagagttggatcctgtgtggattttttwaaaaaaatccattctgccaatctatatcttttggctgcagagtttaatctatttacatttaaagggaagaacttactattggcactctgctatttgttttctgtaggttttatagctttttatcattcatttcctattatcacatttttctgagactctgaagtacaccagattataggagcagaaaacagatcagtggttt

SEQ ID NO: 611852 - DNA, 628 bp, Homo sapiens
gttctctctattacaaatagtcctaatgaaatcatatgctccacagtccagtgcattttgtctttgagagttgccagcctcttttactggagttgcagctcacgatgtagaggaagctactctggggactttggtcattttgcactttgtaggaattgtgctcagtaagtaattgattcacttatcatgagagataataggcaaataaaaagaattcttatacttttgatggcagctaattgggttcccaggttagtctggcatagtggaaagagggttcctgggttctataggctgcagacatgaacctccacatttgctacttgtytccttcaaggaagtcacttcacctccctaagcctcaggtattcaatttgtgaaatgataggtgctagatttctaatgttaacactgtggagaaaaactccttttcttagtagaaatatcttccgtactcccaaaacacacacactcctgtttctcttcaggaaatgcttctattgacctgttagaataggagctgaaaccccaggtgacaattttgaataacgatataagaggttaatattctactttagatgatggaggttagaagcaagtcagctaactgcagagctgttgttttgct

SEQ ID NO: 611853 - DNA, 486 bp, Homo sapiens
ggttgggccagtaaagccccttccttcttcctcttttctgcttatcactatagacagaaactaaaaaccatggcttcaggttgctaaaagtctaaagcaaaacaaaacaggacagcaacaaaaacaacaacaacaatctcaacaaaataaggcaggttggacaagcttgccctatgcagcttctccacctaactgttcattagtttccttartaatatcctttgtaataaatgagtaaatgtaaataatgtttttctctgagttctgtgagccattctagcagattaattgaacctaaacagggggtaatgggaacctccaatttatagccagttggccagaagtacaggtcacatcctgggacctgcagttggcatctgaagtgaagggaagtcttgtgagactgtgcccttactgtgtgggatctgaccctatatccaagtagatagtgtcagaattgaattcaataataggccaccctagtgg

SEQ ID NO: 611854 - DNA, 486 bp, Homo sapiens
ggttgggccagtaaagccccttccttcttcctcttttctgcttatcactatagacagaaactaaaaaccatggcttcaggttgctaaaagtctaaagcaaaacaaaacaggacagcaacaaaaacaacaacaacaatctcaacaaaataaggcaggttggacaagcttgccctatgcagcttctccacctaactgttcattagtttccttaataatatcctttgtaataaatgagtaaatgtaaataatgtttttctctgagttctgtgagccattctagcagattaattgaacctaaacagggggtaatgggaacctccaatttatagccagttggccagaagtacaggtcacatcctgggacctgcarttggcatctgaagtgaagggaagtcttgtgagactgtgcccttactgtgtgggatctgaccctatatccaagtagatagtgtcagaattgaattcaataataggccaccctagtgg

SEQ ID NO: 611855 - DNA, 631 bp, Homo sapiens
aatagtcctaatgaaatcatatgctccacagtccagtgcattttgtctttgagagttgccagcctcttttactggagttgcagctcacgatgtagaggaagctactctggggactttggtcattttgcactttgtaggaattgtgctcagtaagtaattgattcacttatcatgagagataataggcaaataaaaagaattcttatacttttgatggcagctaattgggttcccaggttagtctggcatagtggaaagagggttcctgggttctataggctgcagacatgaacctccacatttgctacttgtttccttcaaggaagtcacttcacctccctaagcctcaggtattcaatttgtgaaatgataggtgctagatttctaatgttaacactgtggagaaaaactccttttcttagtagaaatatcttccrtactcccaaaacacacacactcctgtttctcttcaggaaatgcttctattgacctgttagaataggagctgaaaccccaggtgacaattttgaataacgatataagaggttaatattctactttagatgatggaggttagaagcaagtcagctaactgcagagctgttgttttgctgattggattcaagtagag

SEQ ID NO: 611856 - DNA, 587 bp, Homo sapiens
gttttcacagcaccatctttggtaaaatgactaccgaaaacatatccttcatcaccatagatgctcagtgccactggattaatctagagctaaggatacttgtttttatttgaatctcaaaggttgggtcagctggtctcaaaagtcacatgaatcactcaaagttaaatgttccttaacagaggaagttggaactcacatatttgaaaatagctcacatcatataccatagaaaggttatggtttatttacatacatatatatgacatatctcayatatataagacattttccaaatgtcttattcttacagcgatagatacttgttgtttcaaagaacatgtacaccatagaaatatagaaattagcttaaattagtattgttactgattcacatcattttctcatttattgtcattgaaattggtcccctggaagaataatcagtccaccatcttggaccagcacttaattattatttagcaaaatttaattgttattaccaaaatgtagggacaagtaaaaatgtaattcactattatgataatattggtaaatattctgattcaaatgtttttcttgcaata

SEQ ID NO: 611857 - DNA, 628 bp, Homo sapiens
tattttttgtgtataagtgctcttcagcaattagttgaaaatacaaaaccacatagtttgcktgatatatcaatttgtgtcactttttttttcaattctttgcaaataagcactccccaaattactagaaatctcagaaggaaaattaatttattgctgcagcatatattaggcaaagtggagaagtgttaagtattccaactgaactaaaaagtatatcaaaccaatttctagctcccactgaaacattcaaagaattaaacattacaacttactactgtcaatgtaattttgttcatttccacttgtttttctgcagttttttcaaaaattttaacactgaaaacattataaaaatcgtataactaattgtatgttggttaaaatatgttttatcataataactactttcacatactaatgtttgatatggtttggctctgtgtctccacccaagtctcatatcgaattgtaatccacaatgttggaggaggtgattgaatcatgggagcagacttccctcttgctattgctattctcattatagtgagttctcaagagacctgatggttgtaaaagtgtatagcacctccccgctctctctttcctaccagtcatgtgaagatgt

SEQ ID NO: 611858 - DNA, 628 bp, Homo sapiens
tattttttgtgtataagtgctcttcagcaattagttgaaaatacaaaaccacatagtttgcgtgatatatcaatttgtgtcactttttttttcaattctttgcaaataagcactccccaaattactagaaatctcagaaggaaaattaatttattgctgcagcatatattaggcaaagtggagaagtgttaagtattccaactgaactaaaaagtatatcaaaccaatttctagctcccactgaaacattcaaagaattaaacattacaacttactactgtcaatgtaattttgttcayttccacttgtttttctgcagttttttcaaaaattttaacactgaaaacattataaaaatcgtataactaattgtatgttggttaaaatatgttttatcataataactactttcacatactaatgtttgatatggtttggctctgtgtctccacccaagtctcatatcgaattgtaatccacaatgttggaggaggtgattgaatcatgggagcagacttccctcttgctattgctattctcattatagtgagttctcaagagacctgatggttgtaaaagtgtatagcacctccccgctctctctttcctaccagtcatgtgaagatgt

SEQ ID NO: 611859 - DNA, 572 bp, Homo sapiens
taccagtcatgtgaagatgtgcctgtttcccctttgcatttggccatgattttaagtttcctgaggcctccccagcaatgcctcctgtacagcctgtggaactgtgactcaatgaaacctcttttcttcatatattaccacttcataggcatgtctttatagcagtgtgagaacagactaatacaatgttattatttcctcttgaattgtgcattgtcatattaaaaatttcaagcatttttctaggtgctggcagtagtgaattaaacmaaatccctgtgctaaatccatttatatttgatgggggagagagaatgctagccaatctttcttcctaggtacctgaccctcttattcttgatgctcttgtgaacatgtgatgtggttctttcactgagaaatctccatggggaagaactgggtattacataaggcacttataacatcagtacaatctaggaaaaagaaatctcaaaatttgttttagatttgaatcctaaaatttccaaagacattcttctagattgtgaagttgttagagttctttaaattgcacttttgactatagaaag

SEQ ID NO: 611860 - DNA, 454 bp, Homo sapiens
tgctggcagtagtgaattaaacaaaatccctgtgctaaatccatttatatttgatgggggagagagaatgctagccaatctttcttcctaggtacctgaccctcttattcttgatgctcttgtgaacatgtgatgtggttctttcactgagaaatctccatggggaagaactgggtattacataaggcacttataacatcagtacaatctaggaaaaagaaatctcaaaatttgttttagatttgaatcctaaaatttccaaagacattcttctagattgtgaagttgttagagttctttaaattgcacttytgactatagaaagtggattgccatgttaaattaaaacaaaaataaaagatcagcaataaataaactgaaactgattacaacattttattatagttgtatttttctgggaaaggctgaatgaacatcagatcccccaaagggc

SEQ ID NO: 611861 - DNA, 454 bp, Homo sapiens
tgctggcagtagtgaattaaacaaaatccctgtgctaaatccatttatatttgatgggggagagagaatgctagccaatctttcttcctaggtacctgaccctcttattcttgatgctcttgtgaacatgtgatgtggttctttcactgagaaatctccatggggaagaactgggtattacataaggcacttataacatcagtacaatctaggaaaaagaaatctcaaaatttgttttagatttgaatcctaaaatttccaaagacattcttctagattgtgaagttgttagagttctttaaattgcacttttgactatagaaagtggattgccatgttaaattaaaacaaaaataaaagatcagcaataaataaactgaaactgattrcaacattttattatagttgtatttttctgggaaaggctgaatgaacatcagatcccccaaagggc

SEQ ID NO: 611862 - DNA, 454 bp, Homo sapiens
tgctggcagtagtgaattaaacaaaatccctgtgctaaatccatttatatttgatgggggagagagaatgctagccaatctttcttcctaggtacctgaccctcttattcttgatgctcttgtgaacatgtgatgtggttctttcactgagaaatctccatggggaagaactgggtattacataaggcacttataacatcagtacaatctaggaaaaagaaatctcaaaatttgttttagatttgaatcctaaaatttccaaagacattcttctagattgtgaagttgttagagttctttaaattgcacttttgactatagaaagtggattgccatgttaaattaaaacaaaaataaaagatcagcaataaataaactgaaactgattacaacattttattatagttgtatttttctgggaaaggcwgaatgaacatcagatcccccaaagggc

SEQ ID NO: 611863 - DNA, 476 bp, Homo sapiens
aaatttccaaagacattcttctagattgtgaagttgttagagttctttaaattgcacttttgactatagaaagtggattgccatgttaaattaaaacaaaaataaaagatcagcaataaataaactgaaactgattacaacattttattatagttgtatttttctgggaaaggctgaatgaacatcagatcccccaaagggcccattatctaaagtgtataagggagcacttttattgtctcacatagttcaagtagagatattggcaattccaaattcatatgtaaagcccagagtcagtctcataccaaggtctgctyttaacatggcagagatattccatatgtcagggttactgagatttaataccagctcatcattcttttgacttttccagatggcaggcttttatcatagatattttttctagatatctacaattgtagctacatggagtaaagtgcaattaactgaaa

SEQ ID NO: 611864 - DNA, 620 bp, Homo sapiens
gtaaagtgcaattaactgaaattactagcaattttgtgtttctgatttaaaggcattttgtttattctttttaagtactccaggcccctgctcacactcatttgttgaattcagtaactaaccaactcttctgaaaatgggaatataaaattggaattcctcaaaggttatgtaaaataatgtatgaaaaaccttgtaccacagaatttggctgttgacatgcctttaataaattttgggtgtatctgagcacatcacttygtagtaagaacatttctatttacaagcagtaatgtatcaaggctaaagttacaaatttggtctatggtataagtctcataaagtttttgccatgttgaatttttttaaatgatgttggttttgtcagttcatgatagtttattttttaaatgttttaccaaaatggtcaaaatatcttaaatttaaatgtttattctgttataaatagtagaccttatggatttcttaaatatttgttgtaagcatctagtgaggcagttgtaatcccactaactatatacaaaccaaaaagccctttttatgtttaaaacacacacgctgtgaaggaagttattccaaaaactccagactgtgaacag

SEQ ID NO: 611865 - DNA, 620 bp, Homo sapiens
gtaaagtgcaattaactgaaattactagcaattttgtgtttctgatttaaaggcattttgtttattctttttaagtactccaggcccctgctcacactcatttgttgaattcagtaactaaccaactcttctgaaaatgggaatataaaattggaattcctcaaaggttatgtaaaataatgtatgaaaaaccttgtaccacagaatttggctgttgacatgcctttaataaattttgggtgtatctgagcacatcactttrtagtaagaacatttctatttacaagcagtaatgtatcaaggctaaagttacaaatttggtctatggtataagtctcataaagtttttgccatgttgaatttttttaaatgatgttggttttgtcagttcatgatagtttattttttaaatgttttaccaaaatggtcaaaatatcttaaatttaaatgtttattctgttataaatagtagaccttatggatttcttaaatatttgttgtaagcatctagtgaggcagttgtaatcccactaactatatacaaaccaaaaagccctttttatgtttaaaacacacacgctgtgaaggaagttattccaaaaactccagactgtgaacag

SEQ ID NO: 611866 - DNA, 516 bp, Homo sapiens
tcatttgttgaattcagtaactaaccaactcttctgaaaatgggaatataaaattggaattcctcaaaggttatgtaaaataatgtatgaaaaaccttgtaccacagaatttggctgttgacatgcctttaataaattttgggtgtatctgagcacatcactttgtagtaagaacatttctatttacaagcagtaatgtatcaaggctaaagttacaaatttggtctatggtataagtctcataaagtttttgccatgttgaatttttttaaatgatgttggttttgtcagttcatgatagtttattttttaaatgttttaccaaaatggtcaaaatatcttamatttaaatgtttattctgttataaatagtagaccttatggatttcttaaatatttgttgtaagcatctagtgaggcagttgtaatcccactaactatatacaaaccaaaaagccctttttatgtttaaaacacacacgctgtgaaggaagttattccaaaaactccagactg

SEQ ID NO: 611867 - DNA, 620 bp, Homo sapiens
gtaaagtgcaattaactgaaattactagcaattttgtgtttctgatttaaaggcattttgtttattctttttaagtactccaggcccctgctcacactcatttgttgaattcagtaactaaccaactcttctgaaaatgggaatataaaattggaattcctcaaaggttatgtaaaataatgtatgaaaaaccttgtaccacagaatttggctgttgacatgcctttaataaattttgggtgtatctgagcacatcactttgtagtaagaacatttctatttacaagcagtaatgtatcaaggctaaagttacaaatttggtctatggtataagtctcataaagtttttgccatgttgaatttttttaaatgatgttggttttgtcagttcatgatagtttattttttaaatgttttaccaaaatggtcaaaatatcttaaatttaaatgtttattctgttataaatagtagaccttatggatttcttaaatatttgttgtaagcatctagtgaggcagtygtaatcccactaactatatacaaaccaaaaagccctttttatgtttaaaacacacacgctgtgaaggaagttattccaaaaactccagactgtgaacag

SEQ ID NO: 611868 - DNA, 605 bp, Homo sapiens
gtttattttttaaatgttttaccaaaatggtcaaaatatcttaaatttaaatgtttattctgttataaatagtagaccttatggatttcttaaatatttgttgtaagcatctagtgaggcagttgtaatcccactaactatatacaaaccaaaaagccctttttatgtttaaaacacacacgctgtgaaggaagttattccaaaaactccagactgtgaacagacattaaccttctactttgacaacatctaattttcctgaagaacaattaaaacccagggagcctcaattagaagcactttcactttggtaataaaggccaagttttaatgtttaggttttagttgcattcatttttcataccaatgaactgcatcatgctcttccttcagcacacaagctgcaaccaggccacaattttatcattttcatcagggcccaaacatatgccatctctactcaaagccctgctaattcctggaggtttcttcagagagctsagttgaggagagaattattcagcaaaggtaactaacatggatgctaatgtacataatctggctgagaaatcagcttttcttcaacagctaactgtgctttattc

SEQ ID NO: 611869 - DNA, 605 bp, Homo sapiens
gtttattttttaaatgttttaccaaaatggtcaaaatatcttaaatttaaatgtttattctgttataaatagtagaccttatggatttcttaaatatttgttgtaagcatctagtgaggcagttgtaatcccactaactatatacaaaccaaaaagccctttttatgtttaaaacacacacgctgtgaaggaagttattccaaaaactccagactgtgaacagacattaaccttctactttgacaacatctaattttcctgaagaacaattaaaacccagggagcctcaattagaagcactttcactttggtaataaaggccaagttttaatgtttaggttttagttgcattcatttttcataccaatgaactgcatcatgctcttccttcagcacacaagctgcaaccaggccacaattttatcattttcatcagggcccaaacatatgccatctctactcaaagccctgctaattcctggaggtttcttcagagagctcagttgaggagagaattattcagcaaaggtaactaacatggatgctaatgtayataatctggctgagaaatcagcttttcttcaacagctaactgtgctttattc

SEQ ID NO: 611870 - DNA, 482 bp, Homo sapiens
catatgccatctctactcaaagccctgctaattcctggaggtttcttcagagagctcagttgaggagagaattattcagcaaaggtaactaacatggatgctaatgtacataatctggctgagaaatcagcttttcttcaacagctaactgtgcyttattctttctggtcactttctccaagaggagcactggactctgctagtggatctaaagttttccctagtgtattttccagccatattctagagatgtgccccttctcctgaactgtgtggtgtggtgaaggtggggacatgatgaggacttagctctcagagttagcaatgctgcatgcatccaggatctgctactcactgggggaccttctacaagtcactcagcctctctggtccacagtttcattatctatacaatgaggaaccctgtctacattctctctaactatcatatagctccaaagtttctatgaagcccagatgtt

SEQ ID NO: 611871 - DNA, 482 bp, Homo sapiens
catatgccatctctactcaaagccctgctaattcctggaggtttcttcagagagctcagttgaggagagaattattcagcaaaggtaactaacatggatgctaatgtacataatctggctgagaaatcagcttttcttcaacagctaactgtgctttattctttctggtcactttctccaagaggagcactggactctgctagtggatctaaagttttccctagtgtattttccagccatattctagagatgtgccccttctcctgaactgtgtggtgtggtgaaggtggggacatgatgaggacttagctctcagagttagcaatgctgcatgcatccaggatctgctactcactgggggaccttctacaagtcactcagcctctctggtccrcagtttcattatctatacaatgaggaaccctgtctacattctctctaactatcatatagctccaaagtttctatgaagcccagatgtt

SEQ ID NO: 611872 - DNA, 532 bp, Homo sapiens
acaaattaataaacaagcaaaagctttttccctaacaaataatcagccaaggaagagatgaacataagaattgacatagttaattctcctggaatgaatatagtgtaggagttactccatgatatagaagataaagtacaaccccaagctgtcatttgaggaccaataagtcattgaatgacactttgattcctagatgcaaatattttaaagacttttttattaatayaaaattgtggattgaggcatcactgagaatcccaagtaatgagaatccacagccatgtctgtctcaatatgcagcatgcaggtctgggtccttctcagggtccaggcagggtatactatttatgctcccctatgtctgctcttcttctgcaggaggcatttttcccaccttcatagctgtctccgttcgcttctactttacagtttacaggaaagctacttgctgtaagtcagccagttttagcccttgagatgcaaagagctttgcatgtgaagctctatatgcaaagctatggaatgtggc

SEQ ID NO: 611873 - DNA, 511 bp, Homo sapiens
cagggtccaggcagggtatactatttatgctcccctatgtctgctcttcttctgcaggaggcatttttcccaccttcatagctgtctccgttcgcttctactttacagtttacaggaaagctacttgctgtaagtcagccwgttttagcccttgagatgcaaagagctttgcatgtgaagctctatatgcaaagctatggaatgtggcactccatttctctgtcagtaaaatctatcttgaaagtcttttgttcaggactcagaaatatgattttacaaaataaaagtagaacactgactttaatggaataaaataatataccagaaaaaaaaactctctctacattttatcccttttgcacaagtaatgcccagtggagtcagtcccctgccccaaggcctcactgataactcttttcccccattaagcttagccttcctttctaagaaatatcctctccttaagcctaaatctgaatgctatttcaaccagattttactttggtaaaaa

SEQ ID NO: 611874 - DNA, 574 bp, Homo sapiens
atttggggaaaaggacaagtcttcctttcacatttttggaaggaaatatttttaataaggcagggattctccaatgaactggtmtaaaccactgcttgcggcctcatgcctggcctgcttcacccactcaacagaatcacctcgtctctgaaggtggttgtgtttgaaacacctgctttacagagcagctgcttacaggcttaaaagggaatcagaggtgtcggttcaatcaatctgcccccctgtaagcttcatgaggactataactctgtctccctgatgcacgtgaacctagcaccggcaccctggagcagagcaagtgctcaatactgatcatgtttgcttaattgataagccattagtgtgcgctctaataaactgctttagaagaatgctttaggagtaggaagtatagatctgcctaacatacacttagaaaaaattaggcagatcttttaaatgcttacattttagtaaggaaaacaattgatcattagggtgaatgctgcatcattattttacaatctacaaagtaacaggaagtgtacagatttggcaaaccacagaattaacc

SEQ ID NO: 611875 - DNA, 548 bp, Homo sapiens
acacctgctttacagagcagctgcttacaggcttaaaagggaatcagaggtgtcggttcaatcaatctgcccccctgtaagcttcatgaggactataactctrtctccctgatgcacgtgaacctagcaccggcaccctggagcagagcaagtgctcaatactgatcatgtttgcttaattgataagccattagtgtgcgctctaataaactgctttagaagaatgctttaggagtaggaagtatagatctgcctaacatacacttagaaaaaattaggcagatcttttaaatgcttacattttagtaaggaaaacaattgatcattagggtgaatgctgcatcattattttacaatctacaaagtaacaggaagtgtacagatttggcaaaccacagaattaaccattgtatctgacttacattactcatttgctcatggatgagattctaatagagatgcgtttggcattttcacaaatgccctgcgtttcaaagagtagatcagctgattttgcgctgaaacccttaaacttaatggggacaatg

SEQ ID NO: 611876 - DNA, 619 bp, Homo sapiens
tgataagccattagtgtgcgctctaataaactgctttagaagaatgctttaggagtaggaagtatagatctgcctaacatacacttagaaaaaattaggcagatcttttaaatgcttacattttagtaaggaaaacaattgatcattagggtgaatgctgcatcattattttacaatctacaaagtaacaggaagtgtacagatttggcaaaccacagaattaaccattgtatctgacttacattactcatttgctcatggatgagattctaatagagatgcgtttggcattttcacaaatgccctgcgtttcaaagagtagatcagctrattttgcgctgaaacccttaaacttaatggggacaatgtatctcacctcaaatcttcaatcagatgtgctgatcaaacccacatgaagcacatttattcttggaaaatattttgttttactatttactattgtaattcccactcataaaatagccagcatttgccattatattttacagagacatttttaacaacttcttaaaagaatgactgcaatattttaggttatcagtgaactggtgtggaaaatgcagcattcttaaaagttagtcatggcactagtgcatta

SEQ ID NO: 611877 - DNA, 594 bp, Homo sapiens
tcatggcactagtgcattaattatgcattagaacaattcgccttaaagagattatagatttataaattgtaaattatgccaaaagtattttgaaatcaggtacctgtgagttatgaccctgtgtttcaaaagaacaacttgtaactatattgctgatatcttggttataatattttacatcaacattatgttaaaatataatatcccattataaaasttccagagacaagccacaatatgtaaatatttctgtattttaatttacaaagcttactttttcatttgtcctgataactgaattaacattgtcgagggaaattcatatgaatcaaaaaatgcaataaattagacccttaaaataattcatatttcatgagtttcccattttaaggtcaaaatatttagcaaaatctcacatctcctatggcactatcttttaggtacagtttaaaactttgaatatgctttgttttcaagtgtttatgaataatttcttcaataataaaaaaatcatatactttgaagaaagggcctatctcattcttcttgcctggccacatagtctcatgggtacaattcaatattttaataatt

SEQ ID NO: 611878 - DNA, 484 bp, Homo sapiens
ttgaggaagttaaagcactttaaggaagttaaaaaaaaaaaactagtcatggggcagtggctaattgagtggtcagggaggcctcttcacagagttcacattttgctgaaaactaaagaagatccagccttgagaagatgtggaaaagggaacagcaaatgcaaaagcctgatagaggaagagctttggatggtgatatttcaacaagaacatcctcaaggctggagcagggtgaacaggagggaaaccagtagcatgtggaatrggatcaaatgagcattcaactctatttttccagggattggagaatcagataaggccccccatgtatgctgtaaataaccaagactgactttctacattaaaagagagagatgtgtctttccttttgaatgttaaaaacagtttaaaagtctttacaaaattaccaaagacaaataatatcacatatatcaaatttatccatttgattaataatttttaa

SEQ ID NO: 611879 - DNA, 484 bp, Homo sapiens
ttgaggaagttaaagcactttaaggaagttaaaaaaaaaaaactagtcatggggcagtggctaattgagtggtcagggaggcctcttcacagagttcacattttgctgaaaactaaagaagatccagccttgagaagatgtggaaaagggaacagcaaatgcaaaagcctgatagaggaagagctttggatggtgatatttcaacaagaacatcctcaaggctggagcagggtgaacaggagggaaaccagtagcatgtggaataggatcaaatgagcattcaactctatttttccagggattggrgaatcagataaggccccccatgtatgctgtaaataaccaagactgactttctacattaaaagagagagatgtgtctttccttttgaatgttaaaaacagtttaaaagtctttacaaaattaccaaagacaaataatatcacatatatcaaatttatccatttgattaataatttttaa

SEQ ID NO: 611880 - DNA, 484 bp, Homo sapiens
ttgaggaagttaaagcactttaaggaagttaaaaaaaaaaaactagtcatggggcagtggctaattgagtggtcagggaggcctcttcacagagttcacattttgctgaaaactaaagaagatccagccttgagaagatgtggaaaagggaacagcaaatgcaaaagcctgatagaggaagagctttggatggtgatatttcaacaagaacatcctcaaggctggagcagggtgaacaggagggaaaccagtagcatgtggaataggatcaaatgagcattcaactctatttttccagggattggagaatcagataaggccccccatgtatgctgtaaataaccaagactgacyttctacattaaaagagagagatgtgtctttccttttgaatgttaaaaacagtttaaaagtctttacaaaattaccaaagacaaataatatcacatatatcaaatttatccatttgattaataatttttaa

SEQ ID NO: 611881 - DNA, 505 bp, Homo sapiens
aaatgtttggcttgggtaaagaactgttaaaaccttaaaataaaatttaatgaccccattttttaaaaacttaatttttaatcaggtttttaaacacagtataattccttcagtatggcagctgtgccatrgagttcacgctatgtaatgtttttgtatttaaaaaaatagtttgtactttaaaaaaatacatagctgtattgacatatagtttatataatgtacattttatccatctaaaagtaaaattcagcctcccaagtacctgggattacaggcacctaccaccatgcctagctaatttttagctagctaattttttagctagctaatttttagctagtatttttagtagagacagggttttgccatgttggccagacttgtctcgaactcctgacctcaagtgatctgcccatctcagcctcccaaagtgctgggattacaggtgtgagccaccatgcccagccttttttgtggttttgatttatattgttctaatgac

SEQ ID NO: 611882 - DNA, 505 bp, Homo sapiens
aaatgtttggcttgggtaaagaactgttaaaaccttaaaataaaatttaatgaccccattttttaaaaacttaatttttaatcaggtttttaaacacagtataattccttcagtatggcagctgtgccatggagttcackctatgtaatgtttttgtatttaaaaaaatagtttgtactttaaaaaaatacatagctgtattgacatatagtttatataatgtacattttatccatctaaaagtaaaattcagcctcccaagtacctgggattacaggcacctaccaccatgcctagctaatttttagctagctaattttttagctagctaatttttagctagtatttttagtagagacagggttttgccatgttggccagacttgtctcgaactcctgacctcaagtgatctgcccatctcagcctcccaaagtgctgggattacaggtgtgagccaccatgcccagccttttttgtggttttgatttatattgttctaatgac

SEQ ID NO: 611883 - DNA, 557 bp, Homo sapiens
gcatggctgatacaaagttgtttgtcaggcattcttattgatttatagaaataacattgattagcgattggctatacattattaagctacagggtgtggkttatagcgtttgctctggcattattaagttaatttatagctacttgtggcaataagcagtttcaggagatgaatacctagctcaaagcggggagtaggatttgactgctgcctcattttaatgtctctctgggcctcattatttaaaaggactcacattcctcagataaaagttcttttctcgccttttttttttttgagtaatacaaaatcaatcaagcaatattgtctccattgcacgaagtaatgtgttgtttacaccatggatattctaaaatgaaaccatgaatgtgagttgttaaaaaagcaagtacaataaaaaatgcatgttcaaaaatggatactcccaggctgaggagctgagctgtcagcaacgggaatgatgactcctggcctgcgaaattcactgaaaattgaatttgagggcacagaggaggatgggagtcagtggctaaagt

SEQ ID NO: 611884 - DNA, 651 bp, Homo sapiens
aagcagcatctggctcaattacatccagctcttttatgcagaagatttcccaaagatggcagttttgataaatattgacctccaaagctctatcattttgtcgacctaaaaggaagaggctgagacacaaactctataatttaaagagtttactgagccaaagtgaagacagctgtcaggaggactcggacccatgtaaccttggatatgagtttggcctttgttacaaacagatttttgaaggcaaaaaagggggagaaggcatggctgatacaaagttgtttgtcaggcattcttattgatttatagaaataacattgattagcgattggctatacattattaagctacagggtgtgggttatagcgtttgctctggcattattaasttaatttatagctacttgtggcaataagcagtttcaggagatgaatacctagctcaaagcggggagtaggatttgactgctgcctcattttaatgtctctctgggcctcattatttaaaaggactcacattcctcagataaaagttcttttctcgccttttttttttttgagtaatacaaaatcaatcaagcaatattgtctccattgcacgaagtaatgtgttgtttacaccatggatattctaaaatgaaaccatgaatg

SEQ ID NO: 611885 - DNA, 621 bp, Homo sapiens
cccgggcagtagctccaagacagttttgaactttcaagtaagacaaacttagttttgatttccagytgtacacttagaagctatggatggtagattctttgttggggaaaatggcagcaattctcactccctgtgtctacccctttggttgtccccttccataccggctggccatgcccttgtgacctgctttggccaatgggagaatagcaaatatgacataagtgagacatgggaagttcttgtgttgctgcccttatgctgcttttgaaactcaacccctatgttcaagctctcctggataatgagacttgtggtcacattcccatcacccagctgacgatgagctcctcctgtccctaaaatatgaggccccttagccatccagcccccatccagttattgagaaacaagtattacctgtttgaaatcataaacgggtggtttatgatgcagcaaaaactaacttacatacaacatgacctcatgtgggtttcttaatttctctcagtctcagctttctcatctataggatggagataaggcaatcaacctcgctatttagaggattaaatgagaaaatatatgcaaagtgcttggcatagcataaatactcaacac

SEQ ID NO: 611886 - DNA, 573 bp, Homo sapiens
ttagttttgatttccagctgtacacttagaagctatggatggtagattctttgttggggaaaatggcagcaattctcactccctgtgtctacccctttggttgtccccttccataccggctggccatgcccttgtgacctgctttggccaatgggagaatagcaaatatgacataagtgagacatgggaagttcttgtgttgctgcccttatgctgcttttgaaactcaacccctatgttcaagctctcctggataatgagacttgtggtcrcattcccatcacccagctgacgatgagctcctcctgtccctaaaatatgaggccccttagccatccagcccccatccagttattgagaaacaagtattacctgtttgaaatcataaacgggtggtttatgatgcagcaaaaactaacttacatacaacatgacctcatgtgggtttcttaatttctctcagtctcagctttctcatctataggatggagataaggcaatcaacctcgctatttagaggattaaatgagaaaatatatgcaaagtgcttggcatagcataaatactcaacac

SEQ ID NO: 611887 - DNA, 569 bp, Homo sapiens
ggcaataagcagtttcaggagatgaatacctagctcaaagcggggagtaggatttgactgctgcctcattttaatgtctctctgggcctcattatttaaaaggactcacattcctcagataaaagttcttttctcgccttttttttttttgagtaatacaaaatcaatcaagcaatattgtctccattgcacgaagtaatgtgttgtttacaccatggatattctaaaatgaaaccatgaatgtgagttgttaaaaaagcaagtacaataaaaaatgcatgttcaaaaatggatactcccaggctgaggagctsagctgtcagcaacgggaatgatgactcctggcctgcgaaattcactgaaaattgaatttgagggcacagaggaggatgggagtcagtggctaaagttgttgagaaagtcatttacatttttcttatttattatttctattcttcagagtctaatattttcactaatttttaaaaaactttttcttggccgggcgcagtggctcacgccttaatcccagcactttgggaggccgaggcgggcggatcatgaggtca

SEQ ID NO: 611888 - DNA, 569 bp, Homo sapiens
ggcaataagcagtttcaggagatgaatacctagctcaaagcggggagtaggatttgactgctgcctcattttaatgtctctctgggcctcattatttaaaaggactcacattcctcagataaaagttcttttctcgccttttttttttttgagtaatacaaaatcaatcaagcaatattgtctccattgcacgaagtaatgtgttgtttacaccatggatattctaaaatgaaaccatgaatgtgagttgttaaaaaagcaagtacaataaaaaatgcatgttcaaaaatggatactcccaggctgaggagctgagctgtcagcaacgggaatgatgactcctggcctgcgamattcactgaaaattgaatttgagggcacagaggaggatgggagtcagtggctaaagttgttgagaaagtcatttacatttttcttatttattatttctattcttcagagtctaatattttcactaatttttaaaaaactttttcttggccgggcgcagtggctcacgccttaatcccagcactttgggaggccgaggcgggcggatcatgaggtca

SEQ ID NO: 611889 - DNA, 613 bp, Homo sapiens
ccgctcctgcgccagcacttggagttgctggcaagatgaggcactcacttgatcacacaccccctcctactggggctgagcatgcagtctcggtggctgcaggatccccaccagagtgcaagcccaagtgggcagggcacctcctgcctggggcagagctaggcatgggcaggggcatcgycagccagaagtctgcagttggaaaagtgtccgagaaaaatcctgcgtcactttggaagcagtcttcctatcctagaatgccagagggcaagcatctgaaagatctggaaggatgaggcagcaaaggccaagatgtgaatgtacactgcccctgtcagaggtgatcgaaccagagtgattccatcttgaataggggctgggtaaaataaggctgagacctgtgaggctgcattcccactagcttaggcattctaagtcaggatgagatagaaagtccgcacaagatacaggtcacaaagaccttgctgataaaacaggatgcagtaaaggagccagccaaaaccaagatggtgacgaaagtgacctctggtcatcctcactgctcattatatgctaattataatgtatttccatgctaaatgacactcctgcc

SEQ ID NO: 611890 - DNA, 530 bp, Homo sapiens
tcagtcgagcagctcctgccgctgctctgcctatggagtaaccattctttcattcctttattttcttaataagcttgctttcactttatggacttgccccaaattccttcttgcaggaggtccaagaaccctctcttrgggtctggatagggacccttttccagtaacatccccatcacagccctaatcactaggggaccctctaggctcttcctgccctccccaggctgtctcccttaaacatgctggatgcaggggtgcatcagtgactccgctggtgcctccaggaaaataaagtgtggacctctgtggacaagaaacaacccaaagtaaagacgactcctcacaggcaggatggatatccagttgtatgtatgtcggtgtgctggggccgggaggctcctaataacaatgttaccgctgcttcacgtggaagaaagctgaggctcagagagattaaggaacttgtccagggccataccggagtccaggcctgtgtgctgtcatggtctgaggtttgaactccaaca

SEQ ID NO: 611891 - DNA, 530 bp, Homo sapiens
tcagtcgagcagctcctgccgctgctctgcctatggagtaaccattctttcattcctttattttcttaataagcttgctttcactttatggacttgccccaaattccttcttgcaggaggtccaagaaccctctcttagggtctggatagggacccttttccagtaacatccccatcacagccctaatcactaggggaccctctaggctcttcctgccctccccagrctgtctcccttaaacatgctggatgcaggggtgcatcagtgactccgctggtgcctccaggaaaataaagtgtggacctctgtggacaagaaacaacccaaagtaaagacgactcctcacaggcaggatggatatccagttgtatgtatgtcggtgtgctggggccgggaggctcctaataacaatgttaccgctgcttcacgtggaagaaagctgaggctcagagagattaaggaacttgtccagggccataccggagtccaggcctgtgtgctgtcatggtctgaggtttgaactccaaca

SEQ ID NO: 611892 - DNA, 527 bp, Homo sapiens
tcttagggtctggatagggacccttttccagtaacatccccatcacagccctaatcactaggggaccctctaggctcttcctgccctccccaggctgtctcccttaaacatgctggatgcaggggtgcatcagtgactccgctggtgcctccaggaaaataaagtgtggacctctgtggacaagaaacaacccaaagtaaagacgactcctcacaggcaggatggatatccagttgtatgtatgtcggtgtgctggggccgggaggctcctaataacaatgttaccgctgcttcacgtggaagaaagctgaggctcagagagattaaggaacttgtccagggccataccggagtccaggcctgtgtgctgtcatggtctgaggtttgaactccaacmgtttaaggagctgggatagaactggggagggagtgtggtgggtgggaacagcgggcagatagattctggctggtctccgaggggcctaggttctgccagagggacaacaggtgaggaaaacaggcctcgg

SEQ ID NO: 611893 - DNA, 527 bp, Homo sapiens
tcttagggtctggatagggacccttttccagtaacatccccatcacagccctaatcactaggggaccctctaggctcttcctgccctccccaggctgtctcccttaaacatgctggatgcaggggtgcatcagtgactccgctggtgcctccaggaaaataaagtgtggacctctgtggacaagaaacaacccaaagtaaagacgactcctcacaggcaggatggatatccagttgtatgtatgtcggtgtgctggggccgggaggctcctaataacaatgttaccgctgcttcacgtggaagaaagctgaggctcagagagattaaggaacttgtccagggccataccggagtccaggcctgtgtgctgtcatggtctgaggtttgaactccaacagtytaaggagctgggatagaactggggagggagtgtggtgggtgggaacagcgggcagatagattctggctggtctccgaggggcctaggttctgccagagggacaacaggtgaggaaaacaggcctcgg

SEQ ID NO: 611894 - DNA, 571 bp, Homo sapiens
acctactaaaataaaaaagtagatggaaataatatacatggagctaaagtcaatattaaatagtcccagacatatggtttgtgactaattattaaacataatatatgaattcttctggtgggttatacaattttaattggttgattaaaggaccattctattcttcaaaggagataatcgtgctaaattttaagaaaaattacagtggaggtattcatctatgtctttataaaaatgtaatataaaatgtttatgcaaaggaggcctgtgagagaggggagkgttaagggtttaataagatatttggagtagtttatcccaggaccacacatgttctgctttaccatctgcaatctcattagctgtccatgaagatgctgtgccgaatgtagacctgaaatttagacctaagcgctcacatatatgaaatatacattgctagaggagcaaataaacgaagaagaaaaacattttctgatttgtggcttcacttttgaacaataaccaaaaatattctacatgctcaaaggaaaacaaaactcattttattcttatgagaccaaaggatttt

SEQ ID NO: 611895 - DNA, 571 bp, Homo sapiens
acctactaaaataaaaaagtagatggaaataatatacatggagctaaagtcaatattaaatagtcccagacatatggtttgtgactaattattaaacataatatatgaattcttctggtgggttatacaattttaattggttgattaaaggaccattctattcttcaaaggagataatcgtgctaaattttaagaaaaattacagtggaggtattcatctatgtctttataaaaatgtaatataaaatgtttatgcaaaggaggcctgtgagagaggggagggttaagggtttaataagatatttggagtagtttatcccaggaccacacatgttctgctttaccatctgcaatctcattagctgtccatgaagatgctgtgccgaatgtagacctgaaatttagacctaagcrctcacatatatgaaatatacattgctagaggagcaaataaacgaagaagaaaaacattttctgatttgtggcttcacttttgaacaataaccaaaaatattctacatgctcaaaggaaaacaaaactcattttattcttatgagaccaaaggatttt

SEQ ID NO: 611896 - DNA, 529 bp, Homo sapiens
tggttcagctgggccatggacaatttcaaaacgaagcaatgtgaaaacagcacattaatgaatggataaagaaacatggagagaagatacattactttggctaccagaggtacaaatgcaaaaagattctccacttttgactagtagaactgatgatggatttaaaatcagctgcacattgagggatttttgttcaagtgtaacataaattgtgytacaatatgaggataaaatatgttattttgggctatgttttagtgcataaacactaacaacattaatgaatgttataataatttacttgaaagatgtttaatctatttgtaaatagctctgtcacctgctgaatggctttcatatgtttcaagtaatatttaatttctaaagagtatcctagactttactctgaggatttattatattaactctctcaaagagcccttatattgtaaagagagtgttatctagaaaacaaacctcctgggtgtcacactttgctagttatgatattgcttaaggtaaaatggga

SEQ ID NO: 611897 - DNA, 529 bp, Homo sapiens
tggttcagctgggccatggacaatttcaaaacgaagcaatgtgaaaacagcacattaatgaatggataaagaaacatggagagaagatacattactttggctaccagaggtacaaatgcaaaaagattctccacttttgactagtagaactgatgatggatttaaaatcagctgcacattgagggatttttgttcaagtgtaacataaattgtgctacaatatgaggataaaatatgttattttgggctatgttttagtgcataaacactaacaacattaatgaatgttataataatttacttgaaagatgtttaatctatttgtaaatagctctgtcacctgctgaatggctttcatatgtttcaagtaatatttaatttctaaagagtatcctagactttactctgaggatttattatattaactctctcaaagagcccttatattgtaaagagagtgttatctagaaaacaaacctcctgggtgtcacackttgctagttatgatattgcttaaggtaaaatggga

SEQ ID NO: 611898 - DNA, 597 bp, Homo sapiens
aaaataaaaatctaacaaaagtgcttagctatccaaaattatcaaatattgaaagaatgattttttttccacatcaaacaaaatttagttaaatggtagtttccacataggtataaaatgttgarcagcattagagattaaccctgtgaggtaggggagataaagaaaggtttagtggtggtacaattagctgaggagtcaagagaaatagaaaacaagaaatcttctattttgccttctttggatcatgaatccattgttatgttttatttttattaaacaattatttcccatgctggaaatgtgaaagagttgagccatcctaaggaacttaaggtgtgacaatttacagagaagaatagttgtaacattgctcatttactctgagtataaacatgaaaaatatttttaaaaactacagtgaaataatttattccacagagaagtcatggagctctgttacacatcatattgtatactaatagctttgggtgggtggtcttcagttgatagcacagaaatggagtacgaatttgcagggaaatgacaccaattgaattaggcttcagtttaccagctactgattcctattaacag

SEQ ID NO: 611899 - DNA, 556 bp, Homo sapiens
acctgggcctcccaaagtgctgggattayaggcgtgaagccactgtgcctggccaagaatcaacttactgataaacacaacaagacagctgaatcgcaaataatagtatgctgagggaaagaagcttttaacaaatgcctacctgcctgccctccttccttttcttcttttatgtttttaacctggcttaattttcttggcttcattattttaagcaatttttgcagtgttgaaaaatttgcaagtaagttttcagaaacagttaacttcaaaatcctatacatgctatacatgaagacagtaaaaacatggatggaaagaaataatcagtttatttacattttctgtttatatgataagtagtaatttagctgaggttgacaattcatttaaatgagataaaagtcatttacattgtctctgtggctgttttcacgatacaaagggatgcaaatgtagggtgttactgagcaaacaatgggcttgctgcctaatgtacatggaggccaagaccatggcactggcttttgaggaaaaaaaagcttcattgcaagtg

SEQ ID NO: 611900 - DNA, 556 bp, Homo sapiens
acctgggcctcccaaagtgctgggattataggcgtgaagccactgtgcctggccaagaatcaacttactgataaacacaacaagacagctgaatcgcaaataatagtatgctgagggaaagaagcttttaacaaatgcctacctgccwgccctccttccttttcttcttttatgtttttaacctggcttaattttcttggcttcattattttaagcaatttttgcagtgttgaaaaatttgcaagtaagttttcagaaacagttaacttcaaaatcctatacatgctatacatgaagacagtaaaaacatggatggaaagaaataatcagtttatttacattttctgtttatatgataagtagtaatttagctgaggttgacaattcatttaaatgagataaaagtcatttacattgtctctgtggctgttttcacgatacaaagggatgcaaatgtagggtgttactgagcaaacaatgggcttgctgcctaatgtacatggaggccaagaccatggcactggcttttgaggaaaaaaaagcttcattgcaagtg

SEQ ID NO: 611901 - DNA, 556 bp, Homo sapiens
acctgggcctcccaaagtgctgggattataggcgtgaagccactgtgcctggccaagaatcaacttactgataaacacaacaagacagctgaatcgcaaataatagtatgctgagggaaagaagcttttaacaaatgcctacctgcctgccctccttccttttcttcttttatgtttttaacctggcttaattttcttggcttcattattttaagcaatttttgcagtgttgaaaaatttgcaagtaagttttcagaaacagttaacttcaaaatcctayacatgctatacatgaagacagtaaaaacatggatggaaagaaataatcagtttatttacattttctgtttatatgataagtagtaatttagctgaggttgacaattcatttaaatgagataaaagtcatttacattgtctctgtggctgttttcacgatacaaagggatgcaaatgtagggtgttactgagcaaacaatgggcttgctgcctaatgtacatggaggccaagaccatggcactggcttttgaggaaaaaaaagcttcattgcaagtg

SEQ ID NO: 611902 - DNA, 591 bp, Homo sapiens
ttattaagtaaaatgagggctccttaaacacagcactgtgatacctcaacagtcaatctgataactcagaaggctactaagtgactaacgggcaggtagcgtataaggcatggatatgctagacaaagtggtgattcgtgttctaggagggacactactcaaaacagcgtataatctaaacttatacattatttctagaattttccatttaatattttcagaccacagttgaccacatttaattgaaaccacagaaagtgaaaccatggataaggggaactactctataccatatcatctgtcaccttacagaaactgttcactgatcccttttgyagactaaagagtcataaagatttctcactatgtgagatagaataatttttaaaagcgtaagttccagtttacacttttaagttccaagttccctctatgactgatcatctgactttgcatgagtcacacaagctgagtccagctgtccccagccactgagatacagatactaacaagcacctctactcagttctcaatctgtcaagtgtgcagtgagcatctaaggtcaagaatacatttcaaagatcacagcag

SEQ ID NO: 611903 - DNA, 591 bp, Homo sapiens
ttattaagtaaaatgagggctccttaaacacagcactgtgatacctcaacagtcaatctgataactcagaaggctactaagtgactaacgggcaggtagcgtataaggcatggatatgctagacaaagtggtgattcgtgttctaggagggacactactcaaaacagcgtataatctaaacttatacattatttctagaattttccatttaatattttcagaccacagttgaccacatttaattgaaaccacagaaagtgaaaccatggataaggggaactactctataccatatcatctgtcaccttacagaaactgttcactgatcccttttgtagactaaagagtcataaagatttctcactatgtgagatagaataatttttaaaagcgtaagttccagtttacacttttaagttccaagttccctctatgactgatcatctgactttgcatgagtcacacaagctgagtscagctgtccccagccactgagatacagatactaacaagcacctctactcagttctcaatctgtcaagtgtgcagtgagcatctaaggtcaagaatacatttcaaagatcacagcag

SEQ ID NO: 611904 - DNA, 556 bp, Homo sapiens
tgtctctggcactttcaagaatttgtatatttctttgtcatctgatgattcattaaaatrtatcaaggtgttggagatttttttttcatactgcttgtagatttttttgctttccttcctaaattcatgttcttagcctattgtgactcggctatatgcaagaagtctggctcagccttcccaacattttatgtgtccaaggcctacttttactttcccctgagtagttgttaataccccaaactctgggtaacccaggtcagtttctgttccccaggcaactgtagctcctgtactgcttttatctatttctggattgccatcagggcttccttgagagcttcacatttacttaaaagtagacttgataaaattttctgatattttgtagcgctacaaggctttttaggaaacccagtttggccaattgacagaaatggaagtccaacttgggtgggataactattattgtcaatcactttatatagaatgaaacagtggtgcagagacatgactttgaattatgcaaggtcaaagtgccaacatacttcagatg

SEQ ID NO: 611905 - DNA, 556 bp, Homo sapiens
tgtctctggcactttcaagaatttgtatatttctttgtcatctgatgattcattaaaatgtatcaaggtgttggagatttttttttcatactgcttgtagatttttttgctttccttcctaaattcatgttcttagcctattgtgactcggctatatgcaagaagtctggctcagccttcccaacattttatgtgtccaaggcctacttttactttcccctgagtagttgttaataccccaaactctgggtaacccaggtcagtttctgttccccaggcaactgtagctcctgtactgcttttatctatttctggattgccatcagggcttccttgagagcttcacatttacttaaaagtagacttgatawaattttctgatattttgtagcgctacaaggctttttaggaaacccagtttggccaattgacagaaatggaagtccaacttgggtgggataactattattgtcaatcactttatatagaatgaaacagtggtgcagagacatgactttgaattatgcaaggtcaaagtgccaacatacttcagatg

SEQ ID NO: 611906 - DNA, 572 bp, Homo sapiens
aagcaggagaatcccttgaacttgggaggcggaggttacagtgagccgagattgtgtcattgcattccagcctgagcaacaagagcgaaactctgtctcaaaaaaraaaagaaaagaaattaattttctcacagttctagaggctgacaaattcaggatcaaggagacagtgaggtccttttggcatctggtgaggtccttttcgctgcattctcacctggcagaaggtagcatggcaagagggccagacgctgtgtgaagcctcttttagaaagacctttatccctttgatgagggaggagcccgcatggccttaaaggcccatcttttaatactgtcacattggccattaagtttcaatacctgaattatggaggagacacattcagatcagagccataagccaatgtgatgttggaagctcatggacattcttttttgattgcctcagttttctggtgaagtagggagctaagaatgagactgggagaagagacactggcattttgaggaaagagaaaagagagaaaaagtgttatctaagagaatgagaaggtaaacaggtgtgaaat

SEQ ID NO: 611907 - DNA, 554 bp, Homo sapiens
cctaggcaaacaagatcatttatttatttattcattttsttaaaagtacacccatttccagcctcattcttggatcaggcccagcatggccttccctctcatatgtgcacacactaaccaactaaagatggattctagatctccatcacgaagactcctttaagcctcccagggaggaagaaacttcaagcttaccatgaggaaaatattttcttttttatacctctttcacagagaaatctttacctttctatactgtttttatgtagcttttaagttatgtcacgaatattgtagtgtccctattaacctctaaacttcttgaaggaaggaattgtgtctaaccctttttctgccttaatggtagtaaaattttactgattgaagaatgaatgtggaaggatgttttcgggaaatagccttttgtttaatactcagtaggttggtttctatcttatctcttcataaaacttcacaaagtgacagaattccttcctttaattgagatcattctcagctctagtctacctccagatggtctgttttaaattaac

SEQ ID NO: 611908 - DNA, 554 bp, Homo sapiens
cctaggcaaacaagatcatttatttatttattcattttcttaaaagtacacccatttccagcctcattsttggatcaggcccagcatggccttccctctcatatgtgcacacactaaccaactaaagatggattctagatctccatcacgaagactcctttaagcctcccagggaggaagaaacttcaagcttaccatgaggaaaatattttcttttttatacctctttcacagagaaatctttacctttctatactgtttttatgtagcttttaagttatgtcacgaatattgtagtgtccctattaacctctaaacttcttgaaggaaggaattgtgtctaaccctttttctgccttaatggtagtaaaattttactgattgaagaatgaatgtggaaggatgttttcgggaaatagccttttgtttaatactcagtaggttggtttctatcttatctcttcataaaacttcacaaagtgacagaattccttcctttaattgagatcattctcagctctagtctacctccagatggtctgttttaaattaac

SEQ ID NO: 611909 - DNA, 554 bp, Homo sapiens
cctaggcaaacaagatcatttatttatttattcattttcttaaaagtacacccatttccagcctcattcttggatcaggcccagcatggccttccctctcatatgtgcacacactaaccaactaaagatggattctagatctccatcaygaagactcctttaagcctcccagggaggaagaaacttcaagcttaccatgaggaaaatattttcttttttatacctctttcacagagaaatctttacctttctatactgtttttatgtagcttttaagttatgtcacgaatattgtagtgtccctattaacctctaaacttcttgaaggaaggaattgtgtctaaccctttttctgccttaatggtagtaaaattttactgattgaagaatgaatgtggaaggatgttttcgggaaatagccttttgtttaatactcagtaggttggtttctatcttatctcttcataaaacttcacaaagtgacagaattccttcctttaattgagatcattctcagctctagtctacctccagatggtctgttttaaattaac

SEQ ID NO: 611910 - DNA, 575 bp, Homo sapiens
ccagggaggaagaaacttcaagcttaccatgaggaaaatattttcttttttatacctctttcacagagaaatctttacctttctatactgtttttatgtagcttttaagttatgtcacgaatattgtagtgtcccyattaacctctaaacttcttgaaggaaggaattgtgtctaaccctttttctgccttaatggtagtaaaattttactgattgaagaatgaatgtggaaggatgttttcgggaaatagccttttgtttaatactcagtaggttggtttctatcttatctcttcataaaacttcacaaagtgacagaattccttcctttaattgagatcattctcagctctagtctacctccagatggtctgttttaaattaacggctcaaaattttactactcttgagaacttgggcaaactaatcaaccattcttagtctcagtgtgctctttataaaatgaagaaaacgttaatccttccactgctttgtgaggcttgaatgagatgcgagtccctcagttcatctcagggccctgtgctcagtaatcatccactcttaggactgagctg

SEQ ID NO: 611911 - DNA, 554 bp, Homo sapiens
cctaggcaaacaagatcatttatttatttattcattttcttaaaagtacacccatttccagcctcattcttggatcaggcccagcatggccttccctctcatatgtgcacacactaaccaactaaagatggattctagatctccatcacgaagactcctttaagcctcccagggaggaagaaacttcaagcttaccatgaggaaaatattttcttttttatacctctttcacagagaaatctttacctttctatactgtttttatgtagcttttaagttatgtcacgaatattgtagtgtccctattaacctctaaacttcttgaaggaaggaattgtgtctaaccctttttctgccttaatggtagtaaaattttactgattgaagaatgaatgtggaaggatgttttcgggaaatagccttttgtttaatactcagtaggttggtttctatcttatctcttcataaaactycacaaagtgacagaattccttcctttaattgagatcattctcagctctagtctacctccagatggtctgttttaaattaac

SEQ ID NO: 611912 - DNA, 595 bp, Homo sapiens
accatatttatgtcaatgtgtactcagtgtttggctcccacttacaagtgagaacaagctgtatttggttttccattcctatattataacaatttacttagggttatggcctccagttgcatccatgtttctgaaaaggacatgatttcattmttttctatagctgtgtagtattctgtggtgtatatgtactactactacatttttaaaattcaatctaccgttgataagcacccaggttaattccatgtctttgctattgcgaataatgctgttatgaacatacaagtgtatgtgtctttttggtagaatgatttattttcccttgggtatatgcccaataatgggattggtaggttaaatggtagttctaagttctttgagaaatcttcaattgctttccacagtggctgaaccagtttacattcccctcaacagtttataagcattcccttttatgcacacacagcctcaccagcatctgttgttttttgaccttttcataatagccattctgactggggtgagatggtatcttattgtggttttgatttgcattgctctgatgatagtgatgttggacattttttcatat

SEQ ID NO: 611913 - DNA, 592 bp, Homo sapiens
cagctgtgtgggagactgaagttttattattgctcaaattagtctcctggagcatttggagatcagagtttttaaggataatttgtgaactggtggggggcagtgagttgggtgtgcggattggtcaggtcatagggagtcaaagctrtcctcttgtgctgagtcagttcctgagtggggccacaatatcagatgagccagtttatcgatcggggtgatggctgctgatccatcaagtgcagtgtctgcaaaatatctcaagagctggtcttaggctttacagtagtgatgttatcccctggagcaatctggaaagaacctcgtagcctccagctgcatgactcctaaaccataatttctaatcttgtgactagtttgttagtcctacaaaggcagtctagtccctaagcaagaaagggatttgttttgggaaagagctgtcattatgttcattttaaactataaattataaactaagttccttccaaagttagttcagcctacgccaaggaatgacgaaggacagcttggaagttagaagcaagatggagttggttaggtcagatctctttcactgcctcagttataattt

SEQ ID NO: 611914 - DNA, 591 bp, Homo sapiens
agcattcccttttatgcacacacagcctcaccagcatctgttgttttttgaccttttcataatagccattctgactggggtgagrtggtatcttattgtggttttgatttgcattgctctgatgatagtgatgttggacattttttcatatgtttgttggccgcttgtatgccttcttttgagaagtatctgtccatgtcctttgcccattttttaatggggttatttgtttgttttttcttgatttgtttgagctcctcataggttctggatattagacctttgttagatgcatactttgcaaatattttctcctattatgtaggttgtctgtttactgacagtttctttcgatgagcaggagctttttagtctaattgggtcccacatgtcagtttttggttttgttgcaattgcttttggggacttagccaaaaattctttgccaaggctgatgtccagaatactgtttttcctaggttttcttccaggattcttatagtttgaggtcatacatttaaatcttgaattcattttgagttaatttttgtatacgataaaaggtaggggtccagtttcattgttctgcat

SEQ ID NO: 611915 - DNA, 569 bp, Homo sapiens
ttataacaatttacttagggttatggcctccagttgcatccatgtttctgaaaaggacatgatttcattattttctatagctgtgtagtattctgtggtgtatatgtactactactacatttttaaaattcaatctaccgttgataagcacccaggttaattccatgtctttgctattgcgaataatgctgttatgaacatacaagtgtatgtgtctttttggtagaatgatttattttcccttgggtatatgcccaataatgggattggtaggttaaatggtagttctaagttctttgagaaatcttcaattgctttccacagtggctgaaccagtttacattcccctcaacagtttataagcattcccttttatgcacacacagcctcaccagcatctgttgttttttgaccttttcataatagccattctgactggggtgagatggtatcttattgtrgttttgatttgcattgctctgatgatagtgatgttggacattttttcatatgtttgttggccgcttgtatgccttcttttgagaagtatctgtccatgtcctttgccc

SEQ ID NO: 611916 - DNA, 591 bp, Homo sapiens
agcattcccttttatgcacacacagcctcaccagcatctgttgttttttgaccttttcataatagccattctgactggggtgagatggtatcttattgtggttttgatttgcattgctctgatgatagtgatgttggacattttttcatatgtttgttggccrcttgtatgccttcttttgagaagtatctgtccatgtcctttgcccattttttaatggggttatttgtttgttttttcttgatttgtttgagctcctcataggttctggatattagacctttgttagatgcatactttgcaaatattttctcctattatgtaggttgtctgtttactgacagtttctttcgatgagcaggagctttttagtctaattgggtcccacatgtcagtttttggttttgttgcaattgcttttggggacttagccaaaaattctttgccaaggctgatgtccagaatactgtttttcctaggttttcttccaggattcttatagtttgaggtcatacatttaaatcttgaattcattttgagttaatttttgtatacgataaaaggtaggggtccagtttcattgttctgcat

SEQ ID NO: 611917 - DNA, 591 bp, Homo sapiens
agcattcccttttatgcacacacagcctcaccagcatctgttgttttttgaccttttcataatagccattctgactggggtgagatggtatcttattgtggttttgatttgcattgctctgatgatagtgatgttggacattttttcatatgtttgttggccgcttgtatgccttcttttgagaagtatctgtccatgtcctttgcccattttttaatggggttatttgtttgttttttcttgatttgtttgagctcctcataggttctggatattagacctttgttagatgcatactttgcaaatattttctcctattatgtaggttgtctgtttactgacagtttctttcgatgagcaggagctttttagtctaattgggtcccacatgtcagtttttggttttgttgcaattgcttttggggacttagccaaaaattctttgccaaggctgatgtccagaatactgtttttcctagrttttcttccaggattcttatagtttgaggtcatacatttaaatcttgaattcattttgagttaatttttgtatacgataaaaggtaggggtccagtttcattgttctgcat

SEQ ID NO: 611918 - DNA, 592 bp, Homo sapiens
atgtgaagtgttgctaatattgggttttctgatattatctctacctgattcattgtaacgtttgacttactaatggaaatttgttcactggggaatttgcacaaatctcacatctctaaaaactttgcctgaaccgttccctcccccaaccctggtcccatttccactgactatttccactgctctatcgatacttttttagatgtcaaaggaatacaaataactactgaattatgctttatatttggcatycttttagaaggaagagggcttacatgcgagcaattctattactaggtcttgatactgctaaaaatgggcagaactttctatcgcttctacatcttaactctgatacagaaaatatatgatgtacagaagttgctgacaagttttgttatcatctctaggacacagtgatggagtggctcaaaacaaatgctgtggcatcttttctctttccctgacacaattgaaaaggctgatggggttttgcaaacaacaagaaaaaagagtatatactcacattactaaagtcagactatcatttaaagcaaatgaaaggaaaattttatttctcctattttttgtt

SEQ ID NO: 611919 - DNA, 592 bp, Homo sapiens
atgtgaagtgttgctaatattgggttttctgatattatctctacctgattcattgtaacgtttgacttactaatggaaatttgttcactggggaatttgcacaaatctcacatctctaaaaactttgcctgaaccgttccctcccccaaccctggtcccatttccactgactatttccactgctctatcgatacttttttagatgtcaaaggaatacaaataactactgaattatgctttatatttggcattcttttagaaggaagagggcttacatgcgagcaattctattactaggtcttgatactgctaaaaatgggcagaactttctatcgcttctacatcttaactctgatacagaaaatatatgatgtacagaagttgctgacaagttttgttatcatctctaggacacagtgatggagtggctcaaaacaaatgctgtggcatcttttctctttccctgacacaattgaaaaggctgatggggttttgcaaacaacaagaaaaaagagtatatactcacrttactaaagtcagactatcatttaaagcaaatgaaaggaaaattttatttctcctattttttgtt

SEQ ID NO: 611920 - DNA, 545 bp, Homo sapiens
tgttttcaatatgcagcaactgattcactaagatcattattaaatgcatccacccaagaagcacttgarggccacagtcagctatttcttcccaacaagatacttcccccttcacctccacttccaatccacacaaagccattctccacatattgcccacacttatgggagagcaaagcatctgtgctgtggcctcaaaacctgacacattccagaccaaataaatacaccagaaaaaggatacctgactctgtaaaaaggtataaacatctagaagttatgtgtggaaataactgaaaatatttccaaataagcaacagttcaaaaagagagagcaagagagcatgagaagacacatggcctcaaatggagggaggcagaagcacactgggtgcaggaaaacagtccacaggagacccaggggactgaagagaatgcataatcagtgaacaaaaggaaaggaggctgtggggggacaccacctcagaacataccctattaacagaaaagggcaggagtctagattacaagagtaggtgatgtaa

SEQ ID NO: 611921 - DNA, 545 bp, Homo sapiens
tgttttcaatatgcagcaactgattcactaagatcattattaaatgcatccacccaagaagcacttgagggccacagtcagctatttcttcccaacaagatacttcccccttcacctccacttccaatccacacaaagccattctccacatatygcccacacttatgggagagcaaagcatctgtgctgtggcctcaaaacctgacacattccagaccaaataaatacaccagaaaaaggatacctgactctgtaaaaaggtataaacatctagaagttatgtgtggaaataactgaaaatatttccaaataagcaacagttcaaaaagagagagcaagagagcatgagaagacacatggcctcaaatggagggaggcagaagcacactgggtgcaggaaaacagtccacaggagacccaggggactgaagagaatgcataatcagtgaacaaaaggaaaggaggctgtggggggacaccacctcagaacataccctattaacagaaaagggcaggagtctagattacaagagtaggtgatgtaa

SEQ ID NO: 611922 - DNA, 545 bp, Homo sapiens
tgttttcaatatgcagcaactgattcactaagatcattattaaatgcatccacccaagaagcacttgagggccacagtcagctatttcttcccaacaagatacttcccccttcacctccacttccaatccacacaaagccattctccacatattgcccacacttatgggagagcaaagcatctgtgctgtggcctcaaaacctgacacattccagaccaaataaatacaccagaaaaaggatacctgactctgtaraaaggtataaacatctagaagttatgtgtggaaataactgaaaatatttccaaataagcaacagttcaaaaagagagagcaagagagcatgagaagacacatggcctcaaatggagggaggcagaagcacactgggtgcaggaaaacagtccacaggagacccaggggactgaagagaatgcataatcagtgaacaaaaggaaaggaggctgtggggggacaccacctcagaacataccctattaacagaaaagggcaggagtctagattacaagagtaggtgatgtaa

SEQ ID NO: 611923 - DNA, 473 bp, Homo sapiens
tggctaagactcctaaaatgcaataataatttgcttaaaatatacacataagatttaagatctattttggagaagcaaaaatccacccctgaaatgaagggataaaagctaaattttggtttctaaacagatggaaacaatattactcaatattattaaatctgttattattaacattttagtcaaaactagtgccttttaaatagaaatatttgactttagaaaagcwgaaataatttgactttagaaaagctgaaatatgttaggtaatgaaatgcacagagtcacagaatcaccacctggtcccctccaaagctaaattttaaaaccaaccccaaactcttttggtaaaagtaacaggtttttttccatgggctataatcagtcatgaatgatgccttaattaaagctgggcaatgaaactgtgtattaagcttagtatgtgaagtcaaaaaacttacttcttagcacaa

SEQ ID NO: 611924 - DNA, 634 bp, Homo sapiens
tgactttctcccagtgactcacaatatggtattgttaaacaaatatggtaaatatgcggtcattaaaagttatgttttagaggaatcttattcaaaaaggaaaatgctcctaagtgaaaaaaaaacagattaaaaagatataagctcaatatgattccaacttttattcaacataaatgtgcatagaaaatacggaaattataaaatcaaaattatgtctattggctttgtagagtaaaattatggatggtgctttcttcttctttatagtttttcattttttccataggaaacatatattacatttgtactcagcaaacatccagtaaacattatttctaattagaaaagaagctgaaggaggaaaacattcatgaaactcaataataataaaataataggagaatgcaacataaaaataggagaatgcaacactactccttatctaagcttactaaacatcagttgatccctcaactttcaacttaaaataagcctttgccatgagggcttcactgaacaccccagttgatagcaatctctcctttccacaamagtttatgataggtgttgtcagtggcactggtatgcacacttgcagaactgcagactaatgttatttaaatattttatg

SEQ ID NO: 611925 - DNA, 569 bp, Homo sapiens
aggattttaagtatatataaagaattcatgcatctattgaaactatgattgaaaacatttcataagaatttcacrtaaatcagctaaaattttactgaatttattaaaaactgaaagaggtcaagatggttgtacatttgctttgatccagcacaagttattttaactgccatgtagcctccattgttttgcataaatggatgctacagaaatagcagcattaaattcactgttttagtgatcaggggacgttgtcaaggatactcaactttgcattcatcagcattactctgataggtactctttggcaaaatttagctcatattaactgccagccaaagttgtccttctgaacaaatggaatattttaatcttactgataagattaatctttagctgatcaagttctcttgtagttttagccaccaggaaggtcaatgcagatttctgtggcccacctttagtcactgtgagaaatataattctcacaaactcttgggtttttttcttaaattgtgtatgagcctaaaaagggttataattccttatgtaacaacctttacacattt

SEQ ID NO: 611926 - DNA, 579 bp, Homo sapiens
aaaagtatcccagaaaagaactcaggatctgatggcttcactgatgaattttgccaaatatttaaaaractaataccaatccaactcaaattattaaaaaaatagaggtggacagaatctttccaaatgtattctatgaggccagtgttttttctgattgaatctcccattatattttaatcacatataaaaccagagaaagacacattaaaaagaaagaaaactgtaggccaatatctctgatgaacattgatgcagaaatcctcaacaacaaattagcaaactgaattcaagaacacattaaaacaatcattcatcatgaccaagtggaatttgtcctagagattcaagtgtggttaggtatgtgcagatcaatgggtttaatgttgtccaatgaacataatgtcctccagctccatccatgttcttgcaaatgacaggatctcattcttttttatggctaggtagtactccattgtgtataagtgccatattttctttatccattcatctgttagacacctaagttgcttccaaatcttagctattgtgaatagtgctgcaataaacatgggagtg

SEQ ID NO: 611927 - DNA, 579 bp, Homo sapiens
aaaagtatcccagaaaagaactcaggatctgatggcttcactgatgaattttgccaaatatttaaaagactaataccaatccaactcaaattattaaaaaaatagaggtggacagaatctttccaaatgtattctatgaggccagtgttttttctgattgaatctcccattatattttaatcacatataaaaccagagaaagacacattaaaaagaaagaaaactgtaggccaatatctctgatgaacattgatgcagaaatcctcaacaacaaattagcaaactgaattcaagaacacattaaaacaatcattcatcatgaccaagtggaatttgtcctagagattcaagtgtggttaggtatgtgcagatcaatgggtttaatgttgtccaatgaacataatgtcctccagctccatccatgttcttgcaaatgacaggatctcattcttttttatggctargtagtactccattgtgtataagtgccatattttctttatccattcatctgttagacacctaagttgcttccaaatcttagctattgtgaatagtgctgcaataaacatgggagtg

SEQ ID NO: 611928 - DNA, 577 bp, Homo sapiens
aaaagtcaggaaacaacagatgctggtgaagctgtgraaaaacaggaaagcttttacactgttggtgggaatgtaaattacttcaaccattgtggaagactgtggtaattcatcaaggatctagaaccagaaatagcatttgacccagcaatcccattcctgagtaatacccaaagaaatatatgtcattctattatgaaaatacatgcacgtgtatgtttactgcagccctatttacaatagcaaagacacaaaaccaacccaaatgcccatcaatgatagatgggatttttaaaaattgtgcttaaaacctagatgacaagttgataggtgcagcaaaccaccatggcacatgtatacctatgtaacaaatctacaggttctgcacatgtattccagaacttaaagcaaaatcaaaaaaaaaaaaaagaaagaaagagagagagcaagttggtcaaaatcagctgaaaatacaacatgaaccaaggaaattcagagagcaggagatggttgtgtataaatgaggaaaaaacgagattaataattattaagcaaatcccaattcaaaatttacaca

SEQ ID NO: 611929 - DNA, 577 bp, Homo sapiens
aaaagtcaggaaacaacagatgctggtgaagctgtggaaaaacaggaaagcttttacactgttggtgggaatgtaaattacttcaaccattgtggaagactgtggtaattcatcaaggatctagaaccagaaatagcatttgacccagcaatcccattcctgagtaatacccaaagaaatatatgtcattctattatgaaaatacatgcacgtgtatgtttactgcagccctatttacaatagcaaagacacaaaaccaacccaaatgcccatcaatgatagatsggatttttaaaaattgtgcttaaaacctagatgacaagttgataggtgcagcaaaccaccatggcacatgtatacctatgtaacaaatctacaggttctgcacatgtattccagaacttaaagcaaaatcaaaaaaaaaaaaaagaaagaaagagagagagcaagttggtcaaaatcagctgaaaatacaacatgaaccaaggaaattcagagagcaggagatggttgtgtataaatgaggaaaaaacgagattaataattattaagcaaatcccaattcaaaatttacaca

SEQ ID NO: 611930 - DNA, 577 bp, Homo sapiens
aaaagtcaggaaacaacagatgctggtgaagctgtggaaaaacaggaaagcttttacactgttggtgggaatgtaaattacttcaaccattgtggaagactgtggtaattcatcaaggatctagaaccagaaatagcatttgacccagcaatcccattcctgagtaatacccaaagaaatatatgtcattctattatgaaaatacatgcacgtgtatgtttactgcagccctatttacaatagcaaagacacaaaaccaacccaaatgcccatcaatgatagatgggatttttaaaaattgtgcttaaaacctagatgacaagttgataggtgcagcaaaccaccatggcacatgtatacctatgtaacaaatctacaggttctgcacatgtattccagaacttaaagcaaaatcaaaaaaaaaaaaaagaaagaaagagagagagmaagttggtcaaaatcagctgaaaatacaacatgaaccaaggaaattcagagagcaggagatggttgtgtataaatgaggaaaaaacgagattaataattattaagcaaatcccaattcaaaatttacaca

SEQ ID NO: 611931 - DNA, 577 bp, Homo sapiens
aaaagtcaggaaacaacagatgctggtgaagctgtggaaaaacaggaaagcttttacactgttggtgggaatgtaaattacttcaaccattgtggaagactgtggtaattcatcaaggatctagaaccagaaatagcatttgacccagcaatcccattcctgagtaatacccaaagaaatatatgtcattctattatgaaaatacatgcacgtgtatgtttactgcagccctatttacaatagcaaagacacaaaaccaacccaaatgcccatcaatgatagatgggatttttaaaaattgtgcttaaaacctagatgacaagttgataggtgcagcaaaccaccatggcacatgtatacctatgtaacaaatctacaggttctgcacatgtattccagaacttaaagcaaaatcaaaaaaaaaaaaaagaaagaaagagagagagcaagttggtcaaaatcagctgaaaatacaacatgaaccaaggaaattcagagagcaggagatggttgtgtataaatgaggaaaaaacgagattaataattattaagsaaatcccaattcaaaatttacaca

SEQ ID NO: 611932 - DNA, 547 bp, Homo sapiens
tatttgctattttgtgactggcttatttcacttagcataatgtactcaaggttcatccatgttgcagcatgtgtcagaataagattgaataacatttcattatatgtatataccacattttactgaataatattatgaaaaataatactccattgtaaaaagctgaataatattccatgatrtgtttaatggaatgcatataaggcttaataatattccattatatgtatacactacattttatttatctattcatccatccattgatgagcacttggattacttctaccttttggctacagtaaagaaagcttttataaacatggtatataaatatttcttcaaaccctgctttgaaaaattgtttgggatatatacccagaagtgcaactttggattatatagtaattctatttttaagtttttaaggaacatcacactgttttccattacaactatgctacatcattttatattcccacaaacagggcacaagtctttccatttctctacatcatgccaactcttgttatttggggtgtttttt

SEQ ID NO: 611933 - DNA, 478 bp, Homo sapiens
ttaaccctatcaaagacaaaaaaaacaagtaggaacaaccattttatccagtctattaaaatacagaaagcacctcatatctgaagaccagagtgtctcagtaaggtggttgcaccttaaacatttatagggagctgtagagaagttataggtagaattctttaatcttatttttgtaattaagggaatctcagtcaatcacccagccaaaaatgtcaacctttcatttagctacttctgggggaacaaacactgtatgtaattatttatgagataaaaaattagaatttggatcagctgtgcctggccttgtcatagatacagaaagaggatcatctgggagtctgatctaagtcatatgggtgttcttttcagtrcgtgtttcctggaaaagaaaagagtggagggatttcttaactattgctgctttcttggtgggcagggctcaggtaaaattaaacattgtcagtgtcctctg

SEQ ID NO: 611934 - DNA, 593 bp, Homo sapiens
gataaatagttcagctaatcatttatgagataaacaatgggaatttaaagggtctatatctggccttgtcatggactacaagggggtcatactgttatctaaattgtatggggaaagataacttagactgttatctaagttatgtggggaaaggcggatctttgctataaaccatttttataaaatgatcagggatttcttaactggtgctattttcctggagaacaggactggggaaaattccaacattgttaacccytttacatttatttttaatagtcacaagtggtttgtcaatcatttttctcatcttatactatttttcccacttccttctcttttgactttcttcagagaaactatgttttgttttctggtgtttcatgtaggttacgtgaaagttacaaatgttttgtaaactagccataactgtctttcagtatattaaatacaaacttatatctatgtatcgctaatgattaaagacaatgtaaagttatccttttcaaaataatgtacttagccttatttcttctgctaataccttccttatttctaagactaagttaacacaggtctagtcaattatagac

SEQ ID NO: 611935 - DNA, 593 bp, Homo sapiens
gataaatagttcagctaatcatttatgagataaacaatgggaatttaaagggtctatatctggccttgtcatggactacaagggggtcatactgttatctaaattgtatggggaaagataacttagactgttatctaagttatgtggggaaaggcggatctttgctataaaccatttttataaaatgatcagggatttcttaactggtgctattttcctggagaacaggactggggaaaattccaacattgttaacccttttacatttatttttaatagtcacaagtggtttgtcaatcatttttctcatcttatrctatttttcccacttccttctcttttgactttcttcagagaaactatgttttgttttctggtgtttcatgtaggttacgtgaaagttacaaatgttttgtaaactagccataactgtctttcagtatattaaatacaaacttatatctatgtatcgctaatgattaaagacaatgtaaagttatccttttcaaaataatgtacttagccttatttcttctgctaataccttccttatttctaagactaagttaacacaggtctagtcaattatagac

SEQ ID NO: 611936 - DNA, 507 bp, Homo sapiens
ttgcatggcctcttttaagaatgtctattcaggggtcctttgtccattttttaacttgttatatgttttctcactatggagctttttgaattccttatatatttttraaatcaacttatcaatatcaacttatatatattccttatatatttttgaaatcatttatcagatggatgttttgcagatatattctcattttgtaggttgtctcttcactctgttgattgtttcctttgctgtacagagccttttagtttgatgtaatcctgtttatctatttttgctttttagtgcatatctaaaagatcgttgttcagatcaatgtcatggaacttttcccctatgttttcttctagtacttttatagcttcaagtctcatgtttaacactttagtccatttttagttgatttttgcatattgtgtgagataagggtttaatttcatttttctgcaaggggatattaagttttctcagcaccatttatgaaagataatgtcctttatt

SEQ ID NO: 611937 - DNA, 615 bp, Homo sapiens
cttctcacccatggactcttaataaaagagaaatattttccaatctcatttaaacctcagcattttgaaatatttttattgtagcagattttcctgtacagtaactaacacaaaacacatttagaaagtgtggttgcattttcctcccaaatatgaagaaaaaatggccatgaacaattcgtaaacttctacatactgctttgataagatcaggctcatgagcactgaaatgttttcacagtaaagataatgatttattggagtactgttgctttccaggcttttacatgtggagttgttaaaatggatgtgtctgtggtcttttcgtgggggtgggaaatggaaccctatctgctcttatttattgggataaaatgattgatgataaatcacaaacggaaacccacattctgccagaagatctcacaacggcatgatattacctttcaggaaaactataaagggattaaaaaagcaagacagagatagtagcctttttttcaatggcatcttccattccttcacagagctaycatccctagagggatattttaaaagctgaattcttagccttttgtaataacataagcacaactttttaagactgacctgaca

SEQ ID NO: 611938 - DNA, 507 bp, Homo sapiens
ttgcatggcctcttttaagaatgtctattcaggggtcctttgtccattttttaacttgttatatgttttctcactatggagctttttgaattccttatatatttttaaaatcaacttatcaatatcaacttatatatattccttatatatttttgaaatcatttatcagatggatgttttgcagatatattctcattttgtaggttgtctcttcactctgttgattgtttcctttgctgtacagagccttttagtttgatgtaatcctgtttatctwtttttgctttttagtgcatatctaaaagatcgttgttcagatcaatgtcatggaacttttcccctatgttttcttctagtacttttatagcttcaagtctcatgtttaacactttagtccatttttagttgatttttgcatattgtgtgagataagggtttaatttcatttttctgcaaggggatattaagttttctcagcaccatttatgaaagataatgtcctttatt

SEQ ID NO: 611939 - DNA, 636 bp, Homo sapiens
gttgagtgctgatggtagagtagcaagatattttatttacttacagtagaaagcagtatcttgcaaaagaaaatagttctgtcatcataacttgtgactctaggattatgaccaggacaaggctggttttgtgatagcaaatgctgtatttctctgtgggcataactttacatgcaaagaagtactgatataggatattttatttctttcaattgaattatttttttattttttatacacaatataattaacaagtgagamtcttcccacattacaccagcagaagaacagaataataggatttaaaagtatttcaacacctgacttttcagttaataaagacatccaaatggtaaaattctgtttcagctgattaatttacataagttaaattaacagatcttaaaaaaggcatctctacttccaacacacaccatgctggtgggtgtcaattgcgcagctgagaagagcaacagttttgggtcacgaattttaaatgtgataattcagttcaagaaaccatgtccctaataaccagctctcagtaattttaaaatagtttttttgtttgctcaagtttttattttaaccactgatttccctctccctttcaccattcccggccagtaatttttg

SEQ ID NO: 611940 - DNA, 604 bp, Homo sapiens
actcacgttactactctgtaaacatctcccttctcttaacttctggcaaccactgatttgttctctatcattattaattttgtcagctggataataatatacaaatggaatcatatagtatctaaccttttcagattgcctttttttcactcaacataaagtccttgagatcaatgcaagttgttacatgtaactataatttgttccttttaattactgagcatcctattttgggatgtatcattcatacttgtttatatgttcaccctttggagtcatttgggtggtttccaggttttaattattacaaataaaacttctgtgaaaatttatgtacaggtgtttgtgtgggcataatttttcattagatattcaasagtataattgctagatcttatgccaagtgtacatttaaccttacaagaagttaccaaacttttccagcatggccatgtgtcccaatttttaactggtttgtagcttataattctataaagcaaaatctttatttacctagtcacacattacagtcactgtatctgaaatggtaaaaatggccgggattagacacccagagactctttattaattacttcaggtcatt

SEQ ID NO: 611941 - DNA, 604 bp, Homo sapiens
actcacgttactactctgtaaacatctcccttctcttaacttctggcaaccactgatttgttctctatcattattaattttgtcagctggataataatatacaaatggaatcatatagtatctaaccttttcagattgcctttttttcactcaacataaagtccttgagatcaatgcaagttgttacatgtaactataatttgttccttttaattactgagcatcctattttgggatgtatcattcatacttgtttatatgttcaccctttggagtcatttgggtggtttccaggttttaattattacaaataaaacttctgtgaaaatttatgtacaggtgtttgtgtgggcataatttttcattagatattcaacagtataattgctagatcttatgccaartgtacatttaaccttacaagaagttaccaaacttttccagcatggccatgtgtcccaatttttaactggtttgtagcttataattctataaagcaaaatctttatttacctagtcacacattacagtcactgtatctgaaatggtaaaaatggccgggattagacacccagagactctttattaattacttcaggtcatt

SEQ ID NO: 611942 - DNA, 561 bp, Homo sapiens
gaaaaaatcttaaatgactacacttaccaactgagcccctaactaaagagcttagaatctccccatttaaagccctctaacgtgaaagaacaattggaaacaagttggatgctttaccttcccagacctactttggagacacccacatggccactcggctctctcacttgaaatttagtcgctggcctttacaagatcattcaacctgggagaaagaaactaaatcatctctcctgtcaacattgatgaagttttacttctatctgaaacagtcttcttgcaaactccaggaattccaaccttgagtttatggctctcaactaaaaggatataaaagctactctgaawggaagttcaactcaatttgagaccttcagctaatccatgccctttttttttaaaattatactttaagttttagggtacatgtgcacaatgtgcaggttagttacatatgtatacatgtgccatgttggtgtgctgcacccattaacttgccatttaacattaggtatatctcctaatgctatccctctcccctctccccaccccacaacaggc

SEQ ID NO: 611943 - DNA, 572 bp, Homo sapiens
agctcactgactcaaatgttaatcttctttggcaacaccctcacaaacatacccaggatcaatactttgcgtccttcaatccaaacaagttgacactcagtattaaycatcacaattatcaattgatatgatcgtatgatgtttattatttaccctgttggtgtggattacattgagtaattttgttatgtaaatctctttgtgaactggaataaatcactttaattgggatgacgtcgaatctatggataaagtagggaataagtgacattttaacagcagtgagtctaccaatctgttaatatggattaaatggacagtctctccatttaagtcattttttgatttaatgttttgtatttctctgcatgcatatcctgtacatacgtatgtcaaattgataccatagcatttcattacttttatgctgctataaataaaatttaaaattttcaaatctcaatttttcattgctgctatgctgaaaaatgattgatttttgtatactgactttgtgtcctgccaccttctaaattcaattattagtttcaggagttgtttttttaatatag

SEQ ID NO: 611944 - DNA, 460 bp, Homo sapiens
tctggtttcataatagtcactcttttgattcatgcctagaattatattaagaaattctatttagagttgaaaaagtaacagctcccagtttaaacaatatgaggaattttgtctacttgttgtattgtgtgccttttcataacccaagttaaatatttagaatcagattatatgttgcagagagggagagagagagagagaaaaaaaaaaaaaaatctcatctagtggtatgaacttcatgaagcataaatgaccaggcaagaactaatactgatgccagagataaatacatatttttcaattgattaaatgtaagaataaataaagttcaattacaagagactattatgaataaaaagttaacaatwgcaaagctggaaagagaaaatggctttctgtgttctaattattaaacaaagcacaatataacagtgaaatattgaactaatatccttaaaaa

SEQ ID NO: 611945 - DNA, 565 bp, Homo sapiens
gttttcatttgatttgtttttcttttcttttttttttgagacagagtctggctgtgttgcccaggctggagtgcagtggcacaatcttggctcactgcaacctctgcctcctgggttcaagcgattcttgtgcctcagcctcccaagtagttggaactacaggtgcccgccaccacgcctggctaattttttgtattattagtagaaatggggtttcaccctgttagccaggatggtctcaatctcctgacctcttgatctgcccgcctcagcctcccaaagtgctgggattacaggcatgagccaccgcaccyagcctgatttttaaaatactatgtccatacattgctaaacaatagtttagagaaaaatggattggatggtcatgtactgagggagaaatatattgtacattaatccttatcactggagttaaagcagtaggatatataagatcaatcttggtgatcaatggtgtaattagaagcctctttagttcccccaggagtttattattaagagataagacatacttgtatgaataaagaactcaaaatttaaagta

SEQ ID NO: 611946 - DNA, 596 bp, Homo sapiens
ttggttttggtatcttgttcctctataattccttgtattgacaatttatgttttcttttttgttgttgttgatctgtgttactagaggcttatcaacygtaataattttaaagacaccctttggtttcactggttatttctattgttttctgtttcctaatccatttatttctgcatctgattatatccatccttgtacttactttgagtttaacttgctcatcttcttatacttaaaatgaaagtttaaccattgattacaaatatttcttttccaatgtaaatattaagactatgattgtccctttatagtctgttttagctttattccaaaatgttgatatgttatgcttttcattatcattcagtttgaaatactttctaatttctcttttgatttatttttaagtacactattaatgctcaaataattagggatttttccaggtatgtttttaaattgattaataatttaattctgttatggctagagaatatattatgtattatttcaatcctctttaaatgtgctaagtcttgttttatggcataacatatggtctgtctttgtgagcttaaacagaatgtgtattctt

SEQ ID NO: 611947 - DNA, 610 bp, Homo sapiens
aattaccgaaaaaattatagaaatgcagaaccaattaaaaacatttaaaaccacactttcttgaggtggtaattggattaatgggaaatttgacacayttaattaaaccctttttcccatataaggttatttccatttttattttattaagtccctatataattacttatattaattattagaggaacagacatagcaacagccacattgtggcatgaaatgcaaaatgtgcatgctgtattaaaatagatcataagttttcaaagaaatgttatgcttacagttgtttgctttgacagaaacatctaatacctcaaaggttgtgtacttttattccaatgggtattcctcagtagaaaaaaattcagaaggaagtctagatagcctccaaggtcatatctagcaacaaactttagatttttttcaataaaaaatatgcttgtttcaagtgacagaaatgcaaataatacttgtttgaaagagaaggagctcaggaaaaatacagaggaatattagtttgaactgttgctagacatggaagctacgcaggggactcactgtcatttcttccctttgttctcaggccgcctctgtttgtgtctagcagctc

SEQ ID NO: 611948 - DNA, 652 bp, Homo sapiens
agtgggaggggtacttagaaaggtgagaccaatctgccttgatcagataggatttccactctggaaatatgagaaatacaggtacaaagaaaggctcctggaacatgattcacaggtatctgagaaaatgtcacaagtccacagaagtcttgttccaatagacagttgccaagatcatactgagctgtggaaggtgaggttatagtaatgtgagtttctgtggcactacaaaggcaacgaagtgtgcaaacaggggtgttggccttgtagtcagttaagaatcattatctgtacagagcaaaattgtcccctgggagggtacaacccacctcctcaggtccaggaaaaatatggcttaaaactctgcataatgaaataaagaaggttttctgtatataaataaaataygctgtttctgtgttcatgctgtagtttattttaggatgtaagctgggaaagattgccaacctcactgaaaaagctaagctggaaaaatagagctcctttacaagaggaataacacaaaagccccagttggttttctatctcttcccaagggatttgtttagatatattgcaatcaataccataagacaattcagagcttgctaaagtggattgattaaactgtacatgatttttaatgaaaatc

SEQ ID NO: 611949 - DNA, 542 bp, Homo sapiens
gtgcagccttgtccagtggaaatttttgtgataatggaaattgtgtctaatctgtgctgtcctatatagtagttactggtcatatgtggctattaagaaattgaaatataactagtgtgattgaggaactaaattttttatttaatttcattttaattaatttaaatttaaatagccccacgtggctgatggttacatattgaacarcaaagctccagtcaacaagcaacacgaggacatgtctctactgctcactgttgcactcccatgtggtgccatttctggagtatagcagcacctaatgtttgttgttactgtatactgttgtatacaaatatcttttattcacatctaggttagatgtggggcatctttgtaaatatatttgtataaagtgtataatatatgtataaatagatgtacaaatgttcaatacaggttagatatacaaacaccctataaaaatacagggtctttcttagatgcccagaatgttgtgatagacaataaaataaatcagtctattataatctatgagttga

SEQ ID NO: 611950 - DNA, 587 bp, Homo sapiens
gttaggacctgtttttccacattcttaggcatcacaattgttttagagctgtacatggtgaatgaaagtggctgatgagactcttctggaaacttggtgaagtgatagggaaagataaactttttgttctggaatttccaggagtataaggcataagtgtggagttgctgttagataacttaccaccacaaaggaagatcccacttaacgaggccaaastaaagattgagaggatcattccttattaccacttgagccctatgttcactggcacctggagctgtataatctatacgtttaaattacgtcagcggatacttttcactaggtggtcaaatcatcttgagtttttcagtttttcacacacaatggaaaaaaaaatttaaagtcataaaatccaagggaacagcatttcaatagaggggtgatgaagttttagttatcagttatatgtactgcagagtagaaaatgtcaccagtgtggtgtttttgatgtttcacagcacgatttcaatagaatgtaagtagatatagtaaggtcttggtgtataaaaaagtatgtgaagtagattagtgatgataaagaa

SEQ ID NO: 611951 - DNA, 587 bp, Homo sapiens
gttaggacctgtttttccacattcttaggcatcacaattgttttagagctgtacatggtgaatgaaagtggctgatgagactcttctggaaacttggtgaagtgatagggaaagataaactttttgttctggaatttccaggagtataaggcataagtgtggagttgctgttagataacttaccaccacaaaggaagatcccacttaacgaggccaaactaaagattgagaggatcattccttattaccacttgagccctatgttcactggcacctggagctgtataatctatacgtttaaattacgtcagcggatacttttcactaggtggtcaaatcatcttgagtttttcagtttttcacacacaatggaaaaaaaaawttaaagtcataaaatccaagggaacagcatttcaatagaggggtgatgaagttttagttatcagttatatgtactgcagagtagaaaatgtcaccagtgtggtgtttttgatgtttcacagcacgatttcaatagaatgtaagtagatatagtaaggtcttggtgtataaaaaagtatgtgaagtagattagtgatgataaagaa

SEQ ID NO: 611952 - DNA, 587 bp, Homo sapiens
gttaggacctgtttttccacattcttaggcatcacaattgttttagagctgtacatggtgaatgaaagtggctgatgagactcttctggaaacttggtgaagtgatagggaaagataaactttttgttctggaatttccaggagtataaggcataagtgtggagttgctgttagataacttaccaccacaaaggaagatcccacttaacgaggccaaactaaagattgagaggatcattccttattaccacttgagccctatgttcactggcacctggagctgtataatctatacgtttaaattacgtcagcggatacttttcactaggtggtcaaatcatcttgagtttttcagtttttcacacacaatggaaaaaaaaatttaaagtcataaaatccaagggaacagcatttcaatagaggggtgatgaagttttagttatcagttrtatgtactgcagagtagaaaatgtcaccagtgtggtgtttttgatgtttcacagcacgatttcaatagaatgtaagtagatatagtaaggtcttggtgtataaaaaagtatgtgaagtagattagtgatgataaagaa

SEQ ID NO: 611953 - DNA, 642 bp, Homo sapiens
tgtcagtttgattactactgacattgatcagtagttcgatgcaattttttttaaattttattttctctttttgctgggrtatcatacattttttgaaatacactttgtagaataacactatcaatataaaactattttcttcctttcattaagtgcatttttatttgtctaaatatgataattgtagtagctctgcaaagaaatttatatatattgttataattatgaaccattttgacaaaaagagcaaatcagcattttttaaccctaatgggacctaaactatatagtcattcatcagcatatataatcatacaatacttctactaatgagaattttaaaaattgtgtgggcttatacacaatttacaggagcatcaccctaaaaaaaaaacggggaaaaaaaaagtagctaactatttatcagatagcttattgtacaccaggcttggccatttaaaatcctgtttctcagatttttgaaatattcctactatggctctaaaatgactactaagcttttgtatttatctgtcttggggaaggaacttctttgggggtttccagttatctagagattgtcacttgatgtattactttaatcattttgttgttttaatcaatgtgtacgtgtgctcagag

SEQ ID NO: 611954 - DNA, 642 bp, Homo sapiens
tgtcagtttgattactactgacattgatcagtagttcgatgcaattttttttaaattttattttctctttttgctgggatatcatacattttttgaaatacactttgtagaataacactatcaatataaaactattttcttcctttcattaagtgcatttttatttgtctaaatatgataattgtagtagctctgcaaagaaatttatatatattgttataattatgaaccattttgacaaaaagagcaaatcagcattttttaaccctaatgggacctaaactatatagtcattcatcagcatatataatcatacaatacttctactaatgagarttttaaaaattgtgtgggcttatacacaatttacaggagcatcaccctaaaaaaaaaacggggaaaaaaaaagtagctaactatttatcagatagcttattgtacaccaggcttggccatttaaaatcctgtttctcagatttttgaaatattcctactatggctctaaaatgactactaagcttttgtatttatctgtcttggggaaggaacttctttgggggtttccagttatctagagattgtcacttgatgtattactttaatcattttgttgttttaatcaatgtgtacgtgtgctcagag

SEQ ID NO: 611955 - DNA, 642 bp, Homo sapiens
tgtcagtttgattactactgacattgatcagtagttcgatgcaattttttttaaattttattttctctttttgctgggatatcatacattttttgaaatacactttgtagaataacactatcaatataaaactattttcttcctttcattaagtgcatttttatttgtctaaatatgataattgtagtagctctgcaaagaaatttatatatattgttataattatgaaccattttgacaaaaagagcaaatcagcattttttaaccctaatgggacctaaactatatagtcattcatcagcatatataatcatacaatacttctactaatgagaattttaaaaattgtgtgggcttatacacaatttacaggagcatcaccctaaaaaaaaaacgggraaaaaaaaagtagctaactatttatcagatagcttattgtacaccaggcttggccatttaaaatcctgtttctcagatttttgaaatattcctactatggctctaaaatgactactaagcttttgtatttatctgtcttggggaaggaacttctttgggggtttccagttatctagagattgtcacttgatgtattactttaatcattttgttgttttaatcaatgtgtacgtgtgctcagag

SEQ ID NO: 611956 - DNA, 575 bp, Homo sapiens
ccagtgtggtgtttttgatgtttcacagcacgatttcaatagaatgtaagtagatatagtaaggtcttggtgtataaaaaagtatgtgaagtagattagtgatgataaagaacaagtagagcatataggacactttttgagagagtaggtgaaaagtagggaagaaagagagtagccagaagactagtatggttgagagaaagttgactttggaaaaagggcagtagaatgtgtttggaagtggacgcgttgccagataaaggacaggaaggcctttcagcaaaaagggaaagtatacacatatatcataagagcacttattacagcattgttcatgatgtaaaatactcaaaacaagctaatattaaataattattgcaaataaattaaaaataatatataaaatactgataataaaagactaagtgaaaaggcatgatacaccatactctgtatagaacagatataaaaataagggtatrgttatctaattttctagaaatgattctttcttctctttctttcttctcttttcttttttttggggacagtctcactctgcctcgcagcggcgt

SEQ ID NO: 611957 - DNA, 546 bp, Homo sapiens
aaagttctgtatctatattgtytgtatgtggctattgtgcccttgagcgtgctagtgtgaattatagaaccaaatttttatttttatttaatttttgttaatttaaatttaaatagccatatatggataatggctatagtattggaagtgaatatcaaatacctgaccctccagctctctttcatgttttacttgcagtttatctgctgaacgtatcaattttttaaaaacagtagcccatagcctggactttattgactatatccttaagatggcatttgacatcttcttgtgtcccacgtattttctgtaaattggcagttggatccagatgtttgatcaattcaagaatgattttggcaagaatatactgtagttgctattgtatttttcttatcagaagacctctaggtctagttgcttccttttagtgatcattatgtaaatccataatttaattagcggctgtaaattgcaatattctaattctataccttcttcttcattaagactgagatactcttataaagaaaaattcccagccag

SEQ ID NO: 611958 - DNA, 546 bp, Homo sapiens
aaagttctgtatctatattgtctgtatgtggctattgtgcccttgagcgtgctagtgtgaattatagaaccaaatttttatttttatttaatttttgttaatttaaatttaaatagccatatatggataatggctatagtattggaagtgaatatcaaatacctgaccctccagctctctttcatgttttacttgcagtttatctgctgaacgtatcaattttttaaaaacagtagcccatagcctggactttattgactatatccttaagatggcatttgacatcttcttgtgtcccaygtattttctgtaaattggcagttggatccagatgtttgatcaattcaagaatgattttggcaagaatatactgtagttgctattgtatttttcttatcagaagacctctaggtctagttgcttccttttagtgatcattatgtaaatccataatttaattagcggctgtaaattgcaatattctaattctataccttcttcttcattaagactgagatactcttataaagaaaaattcccagccag

SEQ ID NO: 611959 - DNA, 580 bp, Homo sapiens
aaaccatcattttcagcaaactaccacaggaaaagaaraccaaacaccgcatgttctcactcataagtgggagctgaacaatgagaacacatggacacagggaggggaatatcacacaacatggcctgttggggggtggggggctacaggagggatagcattaggataaatacctaatgtagatgacgggttgataagtgcagcaaaccaccatggcacgtgtatacctatgttaacaaacctgcactttctgcacatgtatcccagaacttaaaatacaattttagaaaaggtcaaaaaaagataatcgattatatggtgtgatggaagttgcctggattagcagacatggttataactatacttaatctaccactgaccatctaaggaacattaatagatgagtctcagtatctccaacctctaaaagaagaagttggatctgactatagttttcctcagatttgcagaaatgtcagccattatcccttcaaatttttttcttacctccttcagtgtttctcagcttcctttcacactccaattatacttacatgaggctacttgatttctcccacag

SEQ ID NO: 611960 - DNA, 609 bp, Homo sapiens
ctgctccctgtgccacccaactgggggagaccctccaataggggttgtcagacaacctatacaggaacattcctactggcatcaggttgatgtccctcaaggtcagagatcccaaaggaaagagtaggcacccatttttkctattctccagactccttgagtgacatctccgggcacaggagtgaaccagatgaatagggcatgaacccctagcaaaccacagcagctctaaagaagaggaaccagaccgttggaagaaaaacaaacagaaagcaacaacaacagcatcagtgaaaaaaagtccctacaaaaaccccatccaagggtcaaagattgaaagcttcaaagattgaaagtagacaaactcatgaagacgagaaaaaagacaacaaaaaaatgcaaaaacccgaaagtccagagtgccttttctcctccaaatgattacaacacatttctagcaagggcacagaactggaaggaggatgaagtgaatgaactgacagaagtaggcttcagaaaagtggtaataacaaactccactgagctaaaggaacatgttctaacccaatgcaaggaagctaagaaccttgataaaggctacagagctgc

SEQ ID NO: 611961 - DNA, 609 bp, Homo sapiens
ctgctccctgtgccacccaactgggggagaccctccaataggggttgtcagacaacctatacaggaacattcctactggcatcaggttgatgtccctcaaggtcagagatcccaaaggaaagagtaggcacccatttttgctattctccagactccttgagtgacatctccgggcacaggagtgaaccagatgaatagggcatgaacccctagcaaaccacagcagctctaaagaagaggaaccagaccgttgraagaaaaacaaacagaaagcaacaacaacagcatcagtgaaaaaaagtccctacaaaaaccccatccaagggtcaaagattgaaagcttcaaagattgaaagtagacaaactcatgaagacgagaaaaaagacaacaaaaaaatgcaaaaacccgaaagtccagagtgccttttctcctccaaatgattacaacacatttctagcaagggcacagaactggaaggaggatgaagtgaatgaactgacagaagtaggcttcagaaaagtggtaataacaaactccactgagctaaaggaacatgttctaacccaatgcaaggaagctaagaaccttgataaaggctacagagctgc

SEQ ID NO: 611962 - DNA, 609 bp, Homo sapiens
ctgctccctgtgccacccaactgggggagaccctccaataggggttgtcagacaacctatacaggaacattcctactggcatcaggttgatgtccctcaaggtcagagatcccaaaggaaagagtaggcacccatttttgctattctccagactccttgagtgacatctccgggcacaggagtgaaccagatgaatagggcatgaacccctagcaaaccacagcagctctaaagaagaggaaccagaccgttggaagaaaaacaaacagaaagcaacaacaacagcatcagtgaaaaaaagtccctacaaaaaccccatccaagggtcaaagattgaaagcttcaaagattgaaagtagacaaactcatgaagacgagaaaaaagacaacaaaaaaatgcaaaaacccgaaagtccagagtgccttttctcctccaaatgattacaacacatttctagcaaggkcacagaactggaaggaggatgaagtgaatgaactgacagaagtaggcttcagaaaagtggtaataacaaactccactgagctaaaggaacatgttctaacccaatgcaaggaagctaagaaccttgataaaggctacagagctgc

SEQ ID NO: 611963 - DNA, 580 bp, Homo sapiens
aaaccatcattttcagcaaactaccacaggaaaagaagaccaaacaccgcatgttctcactcataagtgggagctgaacaatgagaacacatggacacagggaggggaatatcacacaacatggcctgttggggggtggggggctacaggagggatagcattaggataaatacctaatgtagatgacgggttgataagtgcagcaaaccaccatggcacgtgtatacctatgttaacaaacctgcactttctgcacatgtatcccagaacttaaaatacaattttagaaaaggtcaaaaaaagataatcgattatatggtgtgatggaagttgcctggattagcagacatggttataactatacttaatctaccactgaccatctaaggaacattaatagatgagtctcagtatctccaacctcyaaaagaagaagttggatctgactatagttttcctcagatttgcagaaatgtcagccattatcccttcaaatttttttcttacctccttcagtgtttctcagcttcctttcacactccaattatacttacatgaggctacttgatttctcccacag

SEQ ID NO: 611964 - DNA, 381 bp, Homo sapiens
agaaatttccaagtcacctcttatgctttgtagaaatgaaacattttggtggagaaggatatggaagatttccaatttcaattaaaaatctagcttcatggaagcaaattatgcyacctggaatttagattatttggaacaacaggagcgattaaaaccatcccttctttgtgaaatatcctttacttgatgagccataacaggcactctttttgggactgaagaaaaataaatttttactgacttatttctagaagagtaaggaaaaatgtatcagtgtagatagagatagtactttcttttatctaaaggccaagatgaggtaaaataaaatatttatagctcttttaagagagattatgggttcagttattctcaaga

SEQ ID NO: 611965 - DNA, 596 bp, Homo sapiens
attttgaacactttgtaatttttatagcagatgcctgacattgtgatttgtgtggtaggtatttgtacattctataaatatttttgatctttgttgtaggttgtaattatttggaaatagtttcatactttctgtttttgcttctaagcttgattaggtggcatcagagcaccatttaatctagggataactctgcccaaatagtgaggaaaaatccttcttaatattctaccaagtgccctgagaattatgagacttttcttcatagctggtaggaacagccattgttactgagcctgtatgagttctgaggataatgatgataatrcttttcctgactgtaggtagtttcctctgatacgcaatttgatcaacactcatctgaaaacataagggctgcccttttcagatctttggaattttgcctgcatagactattcctatctggatctctgttctgtaaattctgtactcattgaccttcctggaaagctattcccatcttctcaattcagagaactactgggctcagcctattttcttccccccaccaccatcctttgcgtggaaactctctttaggcagtaagctagatc

SEQ ID NO: 611966 - DNA, 434 bp, Homo sapiens
gtgcagcacaccaacatggcacatgtatacatatgtaactaacctgcacgttgtgcacatgtaccctcaaacttaaagtgtaataataaaaaatcataataataaaataaaaataaaaataaaataaatagaacattgtagggtcttctttgaagtagaacaaattccttggtgcaatttatgtgtcaaagtttcctgtggcatcaggctgacatgggaattttacttgaaatgacacccttgcttggcccctttctctttcttaacctacttcttccctgctcttctctgtctctctggataayttccataataaatcaagttacttgtacctgaaaactccataatctgtatggctagtggctacacttgttgacagtacagcttctaccataatacatagtttcactggaaagtgctgttctagcgggttt

SEQ ID NO: 611967 - DNA, 438 bp, Homo sapiens
tttactttccgattcacatgaatcttccaaagactctggttcaagaattctatttagttgctcagcctactgaaaattaggtataaatttaagaaaaaatcttcagagaagcttgagctcacttactctattcttattctctctgatatccttatttttcaattcctggctgccttgtatactcttctatgcctttacttggtagctgaattatgataaatctacactagtttgttttcccctcattcttatttggattctaaggctttagctggctatctttcatctgttttgataatcctcaggcattgtttcttcaacgattcagccttattttctctctcctatttttcagtctccagttaccyagattagaccacgtaactgtaactaagtattatcctctctcccttagttgttattcagtttttacttcat

SEQ ID NO: 611968 - DNA, 499 bp, Homo sapiens
actcacacctgtaatcccagcactttgggaggccgaggtgggcggatcatgaggtcaagagattgagaccatcctggccaacatggtgaaaccccatttmtactaaaaatacaaaaattagctgggcgtggtggtatgcacctgtagtcccagctactcgggaggctgaggcaggagaatctcttgaaccctggaggcggaggttgcagtgagctgagatcatgccactacactccagcctggtggcagagcgatactccatctcaacaacaacaacaacaacaaacacaaaatccccagtccccttttccatacaggggatgatgttggcatcatacagatggaccgtacttatgttccttttgaatttcaacattggggctagatggtactacagggccctttttcctccaggcttctactttttctctttaaataggttttggccacattgactctgtctcatctgcccagcaccagctcagtgggatgggaattc

SEQ ID NO: 611969 - DNA, 519 bp, Homo sapiens
aaagaatgaaagctttccccctaagatcaggaacaagacaagaatgtttatccactttcctgacttctattcaacatagtaytggaaattctagccagagcaatgaggcatgggaaaaaaaaataaaaaggcatccagattgaaaaagaagaagtaaaattatttctatctgcagaagacataatcttatatatagaaaattctaaaaatggcacaaaaaactggctagagctaataaattcagcaaagttggagaatagatcagaacacaccaaaaaaatccactgtttttctacatattggagctgaaaaatatgaaaaggaaatttagaaaacttcatttccaatagcatcaaaaagaataaaatactcaggagtaaacgtaaccaaggaacaactgtatactgaaaacaaaaagttgctgaaagaaattaatatgaactaaatgaaaagaaatcacatgttcatggactgaaggacttaatattgttaagatggcaatattccccaaagtgatct

SEQ ID NO: 611970 - DNA, 584 bp, Homo sapiens
tcaggcttgtctcaaactcctgacctcgtgatctgcccatctcagcctcccaaagtgctgggattgtagctgtgagccaccgtgcctggctaggtgtgctttctagacaattaattttgataaatgatgggtaaaaatgtttacatattcttattgtaatacgttktgaaatattgtttaatctactgtagtagatacaaatattttctattacatttaagatactttatattgatagacaatttttaaagtttatataaatctcattttatcatggggttttgtattagagtcctaggtctaaaggtctaaaatttccatatccaaaaagatggctactatgagttctttggaaatttgtgtgttgttataaaggccagtatattgatcacaaaataacatttctttgacagtggatctgttgagcattgttgatgagtactttctgcctctttgtttcagattgatgaagttgctaacattaatgacatggatgaatatattgagttattatatgaagatattcctgacaaagttcggggttctgctttgatcctgcagcttgctcgaaatcctgataactt

SEQ ID NO: 611971 - DNA, 505 bp, Homo sapiens
taatatcattaaaatgaccatactgcccaaagcaacctacagattcaatgcaatctctatcaaaatatgaatgaaattattcacagatgtagagaaacaatccaaaaatttgtatagaaccacagaatagctcaaacagccaaagcaatactgagcaaaaagaagaaagctggaggtgtcgtactacctgacttccagatatactgcagagctatagtaaccaaaagagcatgacatttgtataaaaacagacatgtagataaaactgaayggaataaagaacccccaaataagtccacatgtttacagccaattgatttctgacaaaggtgccaagaacataccctggggaaagaacaccctcttcaataaatgatgctgagaaaactggaaatacatatacagaagaatgaaactagaccccaaactcacactgtatacaaagaatcaactcaaaatggattacaggcttaaatgtaagacttgaaactataaaaccactaga

SEQ ID NO: 611972 - DNA, 505 bp, Homo sapiens
taatatcattaaaatgaccatactgcccaaagcaacctacagattcaatgcaatctctatcaaaatatgaatgaaattattcacagatgtagagaaacaatccaaaaatttgtatagaaccacagaatagctcaaacagccaaagcaatactgagcaaaaagaagaaagctggaggtgtcgtactacctgacttccagatatactgcagagctatagtaaccaaaagagcatgacatttgtataaaaacagacatgtagataaaactgaacggaataaagaacccccaaataagtccacatgtttacagccaattgatttytgacaaaggtgccaagaacataccctggggaaagaacaccctcttcaataaatgatgctgagaaaactggaaatacatatacagaagaatgaaactagaccccaaactcacactgtatacaaagaatcaactcaaaatggattacaggcttaaatgtaagacttgaaactataaaaccactaga

SEQ ID NO: 611973 - DNA, 582 bp, Homo sapiens
ttaggttgttaattttagatctttctaactttctgatgtggacatttagtgctatgaatttccctcttaacattgtcgtagctgtgtcccagagattctgacatattgtatctttgttctcattattttcaaagaacgtcwtgatttcggtcttaatttcattatttacccaatagtcattcaggagtatgttgtttaatttccatgtaattgcatggttttgagcaattttcagtcttctatttttattgtgctgtggtctgagagtgtgtttggtatgatttcagttcttttacatttgttgagaattgttttatgtccaactatgtggttgattttagagtatgtgccatctggcaatgagaagactgtatattttgttggttttgggtggagagttctgtaaaggtctatcaaacctatttgacccaatgttgagtttaggtgccgagtacctttgttaattttcaggcttcatcatctcacattgtcagtggagtgttgaagtctcccaccattattgtgtgggaatctatatctgtttgtgggtctctaagaacttgctttatgaatctgggtgct

SEQ ID NO: 611974 - DNA, 582 bp, Homo sapiens
ttaggttgttaattttagatctttctaactttctgatgtggacatttagtgctatgaatttccctcttaacattgtcgtagctgtgtcccagagattctgacatattgtatctttgttctcattattttcaaagaacgtcatgatttcggtcttaatttcattatttacccaatrgtcattcaggagtatgttgtttaatttccatgtaattgcatggttttgagcaattttcagtcttctatttttattgtgctgtggtctgagagtgtgtttggtatgatttcagttcttttacatttgttgagaattgttttatgtccaactatgtggttgattttagagtatgtgccatctggcaatgagaagactgtatattttgttggttttgggtggagagttctgtaaaggtctatcaaacctatttgacccaatgttgagtttaggtgccgagtacctttgttaattttcaggcttcatcatctcacattgtcagtggagtgttgaagtctcccaccattattgtgtgggaatctatatctgtttgtgggtctctaagaacttgctttatgaatctgggtgct

SEQ ID NO: 611975 - DNA, 582 bp, Homo sapiens
ttaggttgttaattttagatctttctaactttctgatgtggacatttagtgctatgaatttccctcttaacattgtcgtagctgtgtcccagagattctgacatattgtatctttgttctcattattttcaaagaacgtcatgatttcggtcttaatttcattatttacccaatagtcattcaggagtatgttgtttaatttccatgtaattgcatggttttgagcaattttcagtcttctatttttattgtgctgtggtctgagagtgtgtttggtatgatttcagttcttttacatttgttgagaattgttttatgtccaactatgtggttgattttagagtatgtgccatctggcaatgagaagactgtatattttgttggttttgggtggagagttctgtaaaggtctatcaaaccyatttgacccaatgttgagtttaggtgccgagtacctttgttaattttcaggcttcatcatctcacattgtcagtggagtgttgaagtctcccaccattattgtgtgggaatctatatctgtttgtgggtctctaagaacttgctttatgaatctgggtgct

SEQ ID NO: 611976 - DNA, 583 bp, Homo sapiens
ttgtttgttgctattgcatgctcaaaagatggagatctaagatcactattgaaatataattgtctaaasagcgcctccattttgttgtttaccttaaactatgaatgtcctgctcttgtttttctaaaaatatgaatggaaatttgcatttatgaatgaaggattgttaatgctgataatctagcagatgatcctttgctactttgttgttttattatttcttcggaaggcctactcacatataaaagaatgactgagaactcttcacatgtctgcagagcacaacacagggagggtttcatcttaggctgagagcagaactgctgaccttagccatgactcagacagaccaataaggaaagttttgagggttgtcaacattcatacttgaagcagcagatttttcccaggaagatattttaatttgttaaatgtatctgatataagataatccattgcactataggagcttatcattgagttgaaagcattgaaggacacagtgaaatgtagtgaaaacatatcatgggaggggaaaggaatagctggcaagtgaaacacagtaagtagcaagtaggcaaga

SEQ ID NO: 611977 - DNA, 583 bp, Homo sapiens
ttgtttgttgctattgcatgctcaaaagatggagatctaagatcactattgaaatataattgtctaaagagcgcctccattttgttgtttaccttaaactatgaatgtcctgctcttgtttttctaaaaatatgaatggaaatttgcatttatgaatgaaggattgttaatgctgataatctagcagatgatcctttgctactttgttgttttattatttcttcggaaggcctactcacatataaaagaatgactgagaactcttcacrtgtctgcagagcacaacacagggagggtttcatcttaggctgagagcagaactgctgaccttagccatgactcagacagaccaataaggaaagttttgagggttgtcaacattcatacttgaagcagcagatttttcccaggaagatattttaatttgttaaatgtatctgatataagataatccattgcactataggagcttatcattgagttgaaagcattgaaggacacagtgaaatgtagtgaaaacatatcatgggaggggaaaggaatagctggcaagtgaaacacagtaagtagcaagtaggcaaga

SEQ ID NO: 611978 - DNA, 583 bp, Homo sapiens
ttgtttgttgctattgcatgctcaaaagatggagatctaagatcactattgaaatataattgtctaaagagcgcctccattttgttgtttaccttaaactatgaatgtcctgctcttgtttttctaaaaatatgaatggaaatttgcatttatgaatgaaggattgttaatgctgataatctagcagatgatcctttgctactttgttgttttattatttcttcggaaggcctactcacatataaaagaatgactgagaactcttcacatgtctgcagagcacaacacagggagggtttcatcttaggctgagagcagaactgctgaccttagccatgactcagacagaccaataaggaaagttttgagggttgtcaacattcatacttgaagcagcagatttttcccaggaagatattttaatttgttaaatgtatctgatakaagataatccattgcactataggagcttatcattgagttgaaagcattgaaggacacagtgaaatgtagtgaaaacatatcatgggaggggaaaggaatagctggcaagtgaaacacagtaagtagcaagtaggcaaga

SEQ ID NO: 611979 - DNA, 394 bp, Homo sapiens
tgttgttcaggttctctattttcttactgatcttttgttgttctatccattattgaaagtggagaggtgaagcctcttactattattgtgttgctgaatgtctctttttattctgtcaaagcttgctttatatatttaggggctctgatgcttagtgaataaatttttataatgttatatcttcttaatgagttcacccttttatcattatattagattggcacaaaagtaattgcggtttttgccattacttttaatgacaaaaactgcaattacttttgcaacaatcaaatataatgtcttttttgttgctygtaacagtttttaactttcagtctattttatgtgacattggtataagtattcctaatcttttttggttaccatttgcgtg

SEQ ID NO: 611980 - DNA, 563 bp, Homo sapiens
gaattccttttcattttctttatatataattcatagattttttttctttgttaccatttcaattgcataaaacattttaaagtttaaattctactcctttacagtaccaatccccccacactttgttattgatgtcacaaagtacattttcacatattgcatacacattagcaaagatttatagttatttgtgtttgtattatttaaattctatacaagcattataaataagtttatgtagtgaaattacatagtgcaaattactaaatttttcacgtccttacctacagctgtgttttgtatttttaattttctattatgtcacgaaagatacttcaggttgggtgtggtggctcatgcctgtaataccagcattttgggagactgatgggggtggattgcttgacgcaaggaatttgagaccagcctrtgcaacatagaaaaccctcccaccacatgagattgggaggacaacgctgcagtgagctgtgattatgccattgtacttcagcctgggcagcagaataaaaccctgtttcaaaagaagaaaagcaagaaagcaa

SEQ ID NO: 611981 - DNA, 563 bp, Homo sapiens
gaattccttttcattttctttatatataattcatagattttttttctttgttaccatttcaattgcataaaacattttaaagtttaaattctactcctttacagtaccaatccccccacactttgttattgatgtcacaaagtacattttcacatattgcatacacattagcaaagatttatagttatttgtgtttgtattatttaaattctatacaagcattataaataagtttatgtagtgaaattacatagtgcaaattactaaatttttcacgtccttacctacagctgtgttttgtatttttaattttctattatgtcacgaaagatacttcaggttgggtgtggtggctcatgcctgtaataccagcattttgggagactgatgggggtggattgcttgacgcaaggaatttgagaccagcctgtgcaacatagaaaaccctcccaccacatgagattgggaggacaacgctgcagtgagctgtgattatgccattgtacttcagcctgggcagcagaataaaaccctgtttcaaaaraagaaaagcaagaaagcaa

SEQ ID NO: 611982 - DNA, 607 bp, Homo sapiens
aggtaaaaaacttattggtaatagtaagtatgcagaaaaacacaaaatattataacactgctactgtgttgtgtaaattactsataaatagaaagactaaacagtaaatcaacagcaaataatagctacaacaacttttcaagacatagacagtacaataagaggtaaatagaaacaataaaaagttagaaagcagagaacaaagttaaggcataaagtttatattagttttctttttgcttgtttgtttacaccaaaaatgttgttatcaacttaaaataatgggttataaagcaatattttcaagccttatgatacctcaaacccaaaaccatacaatgaatacatacacaaaaagataaaaagcaagaaaacaaatcatatcaccaataaaaagcatcttcatcaaaaggaaaacaagaaagaatgaagaaaagactacaaaaaaacagaaaaaaataacaaatggcaaaaataaattcttatcaatattaacattgaatgtaaatggtctaaactctcaaataaaaagacacacagtgactgaatagcctaaaaaacatgattgtattagtccattctcacattgctataaataacaaccaaa

SEQ ID NO: 611983 - DNA, 570 bp, Homo sapiens
tgaaaccctgtctctgctaaaaatacaaaaattagccaggtgtggtggcgggcacttgtaatcccagctactcgggaggctgaggcaggagaattgcttaaacccaggaggtggaggttacagtgaactgagattgtgccrttgcactcagcctgggagacagagactctgactcaaaaaaaaaaaaaaaaggaaatttggcatagatacagaatggaatattattcaaccacaaaagtaatgaaattctgtcattcacaacaacatggatggaaatggaggacattatgttaagtgaaataaaccaggcacagaaagacaaaaattgtatgttctcactcatatacggaagttaaagtaaagttgatctcatagaagtaaaaagtagaattaaggatactagagactgggaagtttaaggggaaaggaggataaggacagatttgttaaaggatacaaaataacagctacataggaggaataaattctagtgttctgtaccactgtaggagaattatagtttgaaatagctagaaggtggatactgaatgttcacaacacaaataagtg

SEQ ID NO: 611984 - DNA, 527 bp, Homo sapiens
aggatgatgatggcaaatggaatgatcaagatctctctgcccttaagggccttacgtagcctcatcacctcatcccacatagaatttaaggcaggctctctcaactaccaatttgcttggacaatagtcttgtttgccagcacttcagtgagcaggggaatgaargactcaattcctttctgttctggtctgtctgttctcccaagctcattgtctcagttgaaactctgtgctgtgtaatattttgcatacacagtatggttatgtattggtccatttttatgctgccaataaagatatacctgagactgggaagaaaaggagctttaacttgacttatagttccacatagatggggaggatcatggtggagtgtgaaaggcacttcttacatggcagcagcaagagagaaatgaggaggaagcaaaagtggaaacccctgataaacccatcagatctcgtgagactttttcactatcacaagaatagcactggaaagactggcctccatgattcatttacctccc

SEQ ID NO: 611985 - DNA, 527 bp, Homo sapiens
aggatgatgatggcaaatggaatgatcaagatctctctgcccttaagggccttacgtagcctcatcacctcatcccacatagaatttaaggcaggctctctcaactaccaatttgcttggacaatagtcttgtttgccagcacttcagtgagcaggggaatgaaggactcaattcctttctgttctggtctgtctgttctcccaagctcattgtctcagttgaaactctgtgctgtgtaatattttgcatacacagtatggttatgtattggtccatttttatgctgccaataaagatatacctgagactgggaaraaaaggagctttaacttgacttatagttccacatagatggggaggatcatggtggagtgtgaaaggcacttcttacatggcagcagcaagagagaaatgaggaggaagcaaaagtggaaacccctgataaacccatcagatctcgtgagactttttcactatcacaagaatagcactggaaagactggcctccatgattcatttacctccc

SEQ ID NO: 611986 - DNA, 665 bp, Homo sapiens
gccagtattaccctgacaccaagccagacaaaggcaccataagaaaactacaaacaaacatcccttatacatgctgatgcaaaaatcctcaacaaaataccagcaactcaaacttagcagtacattaaaaggattatacactacgaatgagtataattgactcctgaaatgaaagtatgttccagcacatgaaaatcagcgtaatatcacattaacataaggaaawaaccctcatgtgatcatcttaagcaaagaagaaaaaacatttgtcaaaatttaacccacattcatgataaaatatacttaataaactataaaaagaaagaaaacacattaacataatgctatacaaaaaacaaaacaaaacaaaaagacacagctaacatggtgaaagactgaaagcttttaccctaagagcaaaaacagggatgcctgcttttactactgctatttagtatagtactgaaggttctagttagttaaaacaataaggtgagtaaaggaattaaagatattcccatttttaaaaaagtaaaattatctgtttgcagatgacataacctcatatattaaaaatcttttactttctgtgaaataaactgtcagatgcaataaataaaattcagaaaagctgcaggatacaaaataatacacaaaaatcagtt

SEQ ID NO: 611987 - DNA, 499 bp, Homo sapiens
aagtggcttatgattctacaggctgtagagaagacatagcactggaatatgcttctggggaggtctctggaagtttacagtcatggcagaagttgaagcagaatcttgcacatcacagggcaaaaagcaggagcaaaaaacagaggggcgagttgttacacagttttaaataaccagatcttatggaactcactcactatcatgagaatagtaacaaatgggatggtgctaagccatttatgagtaatccaccccaatggttaaatcacctttcaccaggcccatttccaacattgagaattacatttaaatatgaaatttgggaggggacacacattcaaaccctatcagaggagtctttatgctttttccaatataagattatataattggcaaaaaaaaaaaggtaatttgacttcttttccarttgggatgcgttttattgctttctcctgtctgattgctccagataagactttcagcattatgttgaataaca

SEQ ID NO: 611988 - DNA, 499 bp, Homo sapiens
aagtggcttatgattctacaggctgtagagaagacatagcactggaatatgcttctggggaggtctctggaagtttacagtcatggcagaagttgaagcagaatcttgcacatcacagggcaaaaagcaggagcaaaaaacagaggggcgagttgttacacagttttaaataaccagatcttatggaactcactcactatcatgagaatagtaacaaatgggatggtgctaagccatttatgagtaatccaccccaatggttaaatcacctttcaccaggcccatttccaacattgagaattacatttaaatatgaaatttgggaggggacacacattcaaaccctatcagaggagtctttatgctttttccaatataagattatataattggcaaaaaaaaaaaggtaatttgacttcttttccaattgggatgcgktttattgctttctcctgtctgattgctccagataagactttcagcattatgttgaataaca

SEQ ID NO: 611989 - DNA, 291 bp, Homo sapiens
gcttttagtttttccccacttagtgtgatactggctgtgggtctgtcaaatgtgacttttattatgttgaggtatgttcattccatacccagttttyaaatggttttttttaatattaaagactattaaattttatcaaattatttttagcaaaattgaaatgattatatggattttgtccttgttttgttttgtttttttgagatgaagtctccctctgtcacccaggctggagggcaatggcatgatctcagctcaatgcaaactctgcctcccaggttcaagtgattc

SEQ ID NO: 611990 - DNA, 291 bp, Homo sapiens
gcttttagtttttccccacttagtgtgatactggctgtgggtctgtcaaatgtgacttttattatgttgaggtatgttcattccatacccagttttcaaakggttttttttaatattaaagactattaaattttatcaaattatttttagcaaaattgaaatgattatatggattttgtccttgttttgttttgtttttttgagatgaagtctccctctgtcacccaggctggagggcaatggcatgatctcagctcaatgcaaactctgcctcccaggttcaagtgattc

SEQ ID NO: 611991 - DNA, 291 bp, Homo sapiens
gcttttagtttttccccacttagtgtgatactggctgtgggtctgtcaaatgtgacttttattatgttgaggtatgttcattccatacccagttttcaaatggttttttttaatattaaagactattaaattttatcaaattatttttagcawaattgaaatgattatatggattttgtccttgttttgttttgtttttttgagatgaagtctccctctgtcacccaggctggagggcaatggcatgatctcagctcaatgcaaactctgcctcccaggttcaagtgattc

SEQ ID NO: 611992 - DNA, 291 bp, Homo sapiens
gcttttagtttttccccacttagtgtgatactggctgtgggtctgtcaaatgtgacttttattatgttgaggtatgttcattccatacccagttttcaaatggttttttttaatattaaagactattaaattttatcaaattatttttagcaaaattgaaatgattatatggattttgtccttgttttgttttrtttttttgagatgaagtctccctctgtcacccaggctggagggcaatggcatgatctcagctcaatgcaaactctgcctcccaggttcaagtgattc

SEQ ID NO: 611993 - DNA, 577 bp, Homo sapiens
cattcatccactatttttcttttgactggagtatttagttcatttaaattcaatgttatcagtgataagcacttactcctgccattttttatttcttttctgattgatttttgccctctcttccttctttcctttcttcctgtcttccttttagtgaaggtgatttctcttgaattatratctaatttcttgctttttactttttgtacatctttggtacaccttttgatttgaaattatcatgaggcttgaaaataatataatacatgattttagactgtggacaatttaacactggttgcataaacaaagaaacaagcaaaacagaggttggagccaagatggccaaataacaacggctccaatctacagctcccagaatgagcgacactgaagatgggtgagttctgcatttccaaatgaggtactgggttcatctcactggggagtgtcagacagagggtgcagcacagtgggtgcagtgcaccgagcatgagcagaagcagggtgagacatcacttcatccaggaagcacaaggggtcagggaattccctctgctagtcaaagaaaggggtg

SEQ ID NO: 611994 - DNA, 603 bp, Homo sapiens
catatccaatactgacagtaattgtgtaaagtacatgttaacagccttaccttccagactagcacagctgccactgaccattccaccatgggttatttaaaccaatcttctatctgaatagcgaaaacatattttattgccttaatcaaaactgagattggtttctttgggtaagttatacaaaaagagcaaattaagactcaaattctggaaatttgtctgctaggagaagtattatgtctgctaagactggggaaagtggstattgattgtttaaaaaatagacaggtacctagaatggtagttaaatttttttttttttgctttatttttctgtaactgaatgaaagtagtaacctctccaagggattttggtgacctgtaagattgggattttgtaatatgagattcaaagttttacccagtcaccgaatcatctgtcactcagcaggtggatatgaggaggaaacagctgcccttttccccgaacaattactgcctttctatgattctatgtgaaatttgttaacattttagattcattctaccccttaggagagtattacaaatgataatgctactaccattgaaaataattaagtg

SEQ ID NO: 611995 - DNA, 593 bp, Homo sapiens
tctaagcatgtatgatactttcaaagaataaaatatactgaagggagagacattaggtttctcagagaatctgcctataccattatttttaggcagtttctccatatgatacagtttctcttaagtaaaatctcagcgaaattcttacctggaaaattttgtctgtcakttctatggtgctggaaaggtgaagagagtttgggagtctttacattcagtaatgcctgataccagtattcattcaaacgtgcatgatgttgctaaatctagagtctggagtttaatgtctacagataatagactttctgaaaatctgtgctcctggaaggagcagattggctgctgggatgaggaacgccacataaaattacccttttaaacagagttttaacctagtccccctattttaattttcttgtttcatcaaacctactagattacacaatggtaacaagtgccaatctgttctatgatactactattggattttctcagttatcattcttttctgcttatttaggatcctcaattttttggctcagtttttgttagaaaacaagtgattaaaaatacacttaaaccttatacattgt

SEQ ID NO: 611996 - DNA, 517 bp, Homo sapiens
gacattaggtttctcagagaatctgcctataccattatttttaggcagtttctccatatgatacagtttctcttaagtaaaatctcagcgaaattcttacctggaaaattttgtctgtcagttctatggtgctggaaaggtgaagagagtttgggagtctttacattcagtaatgcctgataccagtattcattcaaacgtgcatgatgttgctaaatctagagtctggagtttaatgtctacagataatagactttctgaaaatctgtgctcctggaaggagcagattggctgctgggatgaggaacgccacataaaattacccttttaaacagagttttaacctagtccccctattttaattttcttgtttcawcaaacctactagattacacaatggtaacaagtgccaatctgttctatgatactactattggattttctcagttatcattcttttctgcttatttaggatcctcaattttttggctcagtttttgttagaaaacaagtgatt

SEQ ID NO: 611997 - DNA, 543 bp, Homo sapiens
accaataacattcacattttccttatgatgggaaaagtgatgttctaagcatttctattaatatagaataatatagttagtacatcctctaattctcatatcaatcccctgaggtagcatttcattatcatacatctatatatgaaggaactcagtagaagagaattttgagaactgcccccaaatgacaaagccagaactcatcccttcgcagtgcagttccagagtggtacttttggttattatacagtattgtgcctcatatacttaggattgtgtctgtttagaaaaaaatgagaaaaagccaaagtagttattttttataactccatctgtgtataattttgtgttgctataattgcccacctctgaattgatcttagaattgcttaaagatatctcaacacagaggttagtcactcatgcattaattttttttcttctttttttctttgttaaactcttcatccgtttcargttaatttttccaaaattgaattatcaaaaacattttatgtttgcattctatttttgatattgctt

SEQ ID NO: 611998 - DNA, 632 bp, Homo sapiens
ataatctgagaagatggtgataatccaaaaagttttgctacaaactatgtcattcagagcccaatctagagattagctagcatttgacatacaagtagtaactgaagcaataagaaaataaacgttttagagaaaatatatagacgggagaatgagtagaattttagaaaaaaaawggaaagaatgagcattaatgcatgggaataaataaggctctcataaaagatctagaattgaaagaagatataagaagtggaaacagcatcagtaaaacatgttcagaaataattcagtggcataaaaaattttataaagaggctttgatggacagcatacaatacaccgtagagttttctgtaggagaaagatgagaaagtatctaatagaataacaaatcatgagatcaatatgtcttcattgtaaaaatgttatgggggaaataaggaaataattctgattgacattctgttaataggtgaaagtaggtcataaaatgatgccttccatttcacgaaatactgtagcaaggtaagatcttggagtgtttcttgtttttcttgggaaaggcctgagcatcttttgatattgggttatatagccaagatggagtaatcaatccatgaattcaatat

SEQ ID NO: 611999 - DNA, 594 bp, Homo sapiens
agtgaaactttctctaatcattcccccaaagagacctctggccttttaccagggttactgtgcactgtgcccaccaamgggtgacctcaggagaggaggattttaatagtcaagtggataggatgacccgttctgtggataccactcagcctctttccccagccacccctgtcattgcccaatgtgcccatgaacaaagtgggggtggcagggatggagattatgtgtgggctcagcaacatgaacttccattcgccaaggctgacctggttacagtcactgctgagtgcccaatttgccagcagcagagaccaacactgagccctcaatatggcaccattccccagggtgatcagccagctacctggtggcagattgactatattggacctcttccaccatggaaagggcagaggtttgtcctcgctggaatagacacttggtaagggtgaaatctaactatttaaacataatttttacaaatttattaatgcacctgccttcttcaccctcaaacttgtccctttaaccttgtgttctaaagaatatatttgagtttttcaattaactttgaattattagaaataagtttaa

SEQ ID NO: 612000 - DNA, 625 bp, Homo sapiens
ttgttgaaaaactgttttcttgcttgtatttggctatttatgtgcatttcttatctctcccacaaccatgccttaaaaataggtttcaccactagctcatctttacaattttagtagtacttagtactccatgtatgtagtaaatgcttgacaaatatgtgttgaataatagcagcatgaatatgcttacacagaactttctaaagaaatatatgaacaagattcttgaattatgcaaaacccatgtgaaaaggtattttgatttttgagcttgattattttcggggaaaatccaattatgtcttaaacttaatggagtgaaaatatccaataagaaaaaaatgtatttgatatctttcattttatattcagaacccagactatgtcctatcgatatctttttttacatcagagtaatttccttctttcaaagcatttgtgccatacaaattgtttattcacaaactaatgtcatgtccagctacccgaaatggtttgtaatttaattaaggaaaatataattaaagacacaaataacataggatttatatcaagcagtaaatgtagatttgctgtcacttgggttttacactttttcatagtktatgtcttggcattaatgaat

SEQ ID NO: 612001 - DNA, 635 bp, Homo sapiens
aaattggaaactttgtacgttgctggtgggaaggtaaatggcacagccattttggaaaacaatctggcagtccttcaaaaagttaaacatagagttactatatgacctagcaatttcacttctgggtatatacctgtattagactgctcctgcactgctgtaaagaaatacctgtgactgggtgatttctaataaaagaggtttaattggctcacagtctgcaggctgtacaagcatggtgctggcatctgctcrgcttctgaggaggcctcagggagctttcaggcatgccagaaggtgaagtggagcaggcatctcacacggtgaaagcaggagcaaggggaggggaggtgctacacagttttacacaatcagatctcgtgagtactcattcattattgcaagtacagcaccaagccataagggatccaccccatgaccaaaacacctcccaccaggacctacttccaacattgcggattacatttcaatatgcaatttgggtggggacaaatacccaaactatatcaatatctaagacaaacaaaagcattatacataaagcttttatgcatgtgttcatttgcagaattactcaaaatggacaaacagtggaagcaacctaaatgcatcaa

SEQ ID NO: 612002 - DNA, 635 bp, Homo sapiens
aaattggaaactttgtacgttgctggtgggaaggtaaatggcacagccattttggaaaacaatctggcagtccttcaaaaagttaaacatagagttactatatgacctagcaatttcacttctgggtatatacctgtattagactgctcctgcactgctgtaaagaaatacctgtgactgggtgatttctaataaaagaggtttaattggctcacagtctgcaggctgtacaagcatggtgctggcatctgctcagcttctgaggaggcctcagggagctttcaggcatgccagaaggtgaagtggagcaggcatctcacacgrtgaaagcaggagcaaggggaggggaggtgctacacagttttacacaatcagatctcgtgagtactcattcattattgcaagtacagcaccaagccataagggatccaccccatgaccaaaacacctcccaccaggacctacttccaacattgcggattacatttcaatatgcaatttgggtggggacaaatacccaaactatatcaatatctaagacaaacaaaagcattatacataaagcttttatgcatgtgttcatttgcagaattactcaaaatggacaaacagtggaagcaacctaaatgcatcaa

SEQ ID NO: 612003 - DNA, 537 bp, Homo sapiens
cctgggttcaagcagttctctgcctcagcctcctgagtagctgggattacaggtgcccaccaccacacctggctaatttttttgtatttttagtagagacagggtttcaccatgttggccaggctggtcttgaactcctgaccttgtgatccacctgccttggcctcccaasgtgctggaattacaggcatgagccactgcccccggcatgtcccaaatttttgaagcttcatttattttgtaatatcatgtttctctctgttcttaagattggacagctgttattaatgcatcaccaagctcactgatttttttccacacatctaatctgtagaatgattctaatgacttttgttgtaattttcagttctttttagttgtatttctgttatttcctatctgtttactcattgagatcatatttttaaacattttaacatatttagaccagctgctgaagtttttgtttgctatgcccaaaatctaggctcacttggaggcactttacatgtgcttcattatttttttaatatgggt

SEQ ID NO: 612004 - DNA, 537 bp, Homo sapiens
cctgggttcaagcagttctctgcctcagcctcctgagtagctgggattacaggtgcccaccaccacacctggctaatttttttgtatttttagtagagacagggtttcaccatgttggccaggctggtcttgaactcctgaccttgtgatccacctgccttggcctcccaacgtgctggaattacaggcatgagccactgcccccggcatgtcccaaatttttgaagcttcatttattttgtaatatcatgtttctctctgttcttaagattggacagctgttattaatgcatcaccaagctcactgatttttttccmcacatctaatctgtagaatgattctaatgacttttgttgtaattttcagttctttttagttgtatttctgttatttcctatctgtttactcattgagatcatatttttaaacattttaacatatttagaccagctgctgaagtttttgtttgctatgcccaaaatctaggctcacttggaggcactttacatgtgcttcattatttttttaatatgggt

SEQ ID NO: 612005 - DNA, 577 bp, Homo sapiens
atttgtttctttgtttgttctgataagtaattaatttgcttaaagccaaactatttatttgtctacacatggtatgcagtagctgatagtctgcttagctttttaaatgtcaagccgccaattttatagtctgactccctgagggtcttctgagcctgtgtagtttattttcagccaaagatatggayggggtttatatgcaaatttggagacattctttctgtggttctcttgcttctattgattcataaattttagttgcttttccacccctgagctttgtcctccttgtaagacttcagctctctgcctcccgagctgagtgcatattctggaatgcacccaatcaataaaggagttaactttcagatctcacctggtgaaattctgacttttgaggatagatttctttattatcctgcctattttttctttgcccaagttgtccccttacatctgtcacttgttgaacagccagggatatggacagagttcatactcagattttttgtttcctcttttctgcagcctttttgcttcttgaattttgtccctaaattctacctgttctgtcata

SEQ ID NO: 612006 - DNA, 577 bp, Homo sapiens
atttgtttctttgtttgttctgataagtaattaatttgcttaaagccaaactatttatttgtctacacatggtatgcagtagctgatagtctgcttagctttttaaatgtcaagccgccaattttatagtctgactccctgagggtcttctgagcctgtgtagtttattttcagccaaagatatggatggggtttatatgcaaatttggagacattctttctgtggttctcttgcttctattgattcataaattttagttgcttttccacccctgagctttgtcctccttgtaagacttcagctctctgcctcccgagctgagtgcatattctggaatgcacccaatcaataaaggagttaactttcagatctcacctggtgaaattctgacttttgaggatagatttctttattatcctgcctattttttctttgcccmagttgtccccttacatctgtcacttgttgaacagccagggatatggacagagttcatactcagattttttgtttcctcttttctgcagcctttttgcttcttgaattttgtccctaaattctacctgttctgtcata

SEQ ID NO: 612007 - DNA, 577 bp, Homo sapiens
atttgtttctttgtttgttctgataagtaattaatttgcttaaagccaaactatttatttgtctacacatggtatgcagtagctgatagtctgcttagctttttaaatgtcaagccgccaattttatagtctgactccctgagggtcttctgagcctgtgtagtttattttcagccaaagatatggatggggtttatatgcaaatttggagacattctttctgtggttctcttgcttctattgattcataaattttagttgcttttccacccctgagctttgtcctccttgtaagacttcagctctctgcctcccgagctgagtgcatattctggaatgcacccaatcaataaaggagttaactttcagatctcacctggtgaaattctgacttttgaggatagatttctttattatcctgcctattttttctttgcccaagytgtccccttacatctgtcacttgttgaacagccagggatatggacagagttcatactcagattttttgtttcctcttttctgcagcctttttgcttcttgaattttgtccctaaattctacctgttctgtcata

SEQ ID NO: 612008 - DNA, 577 bp, Homo sapiens
atttgtttctttgtttgttctgataagtaattaatttgcttaaagccaaactatttatttgtctacacatggtatgcagtagctgatagtctgcttagctttttaaatgtcaagccgccaattttatagtctgactccctgagggtcttctgagcctgtgtagtttattttcagccaaagatatggatggggtttatatgcaaatttggagacattctttctgtggttctcttgcttctattgattcataaattttagttgcttttccacccctgagctttgtcctccttgtaagacttcagctctctgcctcccgagctgagtgcatattctggaatgcacccaatcaataaaggagttaactttcagatctcacctggtgaaattctgacttttgaggatagatttctttattatcctgcctattttttctttgcccaagttgtccccttacatctgtcacttgttgaacagccagggatatggacagagttcatamtcagattttttgtttcctcttttctgcagcctttttgcttcttgaattttgtccctaaattctacctgttctgtcata

SEQ ID NO: 612009 - DNA, 298 bp, Homo sapiens
caagctcaaagctataggaatacaggaatacagacacttatttccaaatgtgaatttttcttttttagctctcattaagaactcatcggcatcttaaatgttgttcaggtagcacataaatctcactgtgaaaattttgttatttctggatgttctcatttctcccttgatggtttctgagctgtgaactattttctacagtttagttattttgcaacttttaaaacaaaattccattggtgggaagtttctaagattgtgattcttttatatgyacacattatctggtttaaatatg

SEQ ID NO: 612010 - DNA, 601 bp, Homo sapiens
tggttaaattcaccaacaaattctgttaatatctgagcttcagttgtttggttttgctattgttgcatttcattccttcctttgtatgcctttttattcttgtagaagtaacaaaaataatcagatttttaaatgggcaaaagaactgaatagacatttctcaaaagaagacatataaattcccaaaaggcatatttaagaagtgttcaaatcagtaattaccaggaaaatgtaaatcaaaatcatgatgaaatacctcctcactccagttataatgactactatcaaaaacataaaaaataacaaattctggagaggatttcagaaaggggaattcttatactctgttgatgggaactttaktttgtatagccattagtaaaacggtatggtggttcctcaaaaataaaaatgaaaataaaaataaaactgccatatgattcagcaatctcactaaatggtacatatgcaaaggaaataaaattagtacgttaaacggatatctgtattacagcatcattcacaatagccaagatatgaaatcaacctacgttttcatcagtggatgaatgaaaaaaggaaatgtgacatatatacacat

SEQ ID NO: 612011 - DNA, 577 bp, Homo sapiens
tcttattcctaccttcaccattttttcaaagtttttcttgcattttttactttgccttgggtaggccattgctttttctaaggagtcaatttacccatgtgttaacaccaaccttttagggggtctgtattaaaagagtgattccatatcaatgaactctgtcttatctaaatttatatttcagagctatatttcagctctcaagaccttcctccatacacactctcccagctcctactaatccatgttgagtacgtcccactgatcttagagtttacagtgcctttcctcacttaatatacctagctctaccttggctctgttacatagcaattttttttttcagtrggggtcttgctctctcacccagtctggagtatggtggtgtaatcatgactctgcagccttgacctcctgggctcaaatgatctttccacctcagcctccagagtagctgagactataggcatgtgccaccatgcctaggtaattcatatatatatataaaatattattacataaatatatatttattaatataaatatataaaaatatataaagactatacacaaatat

SEQ ID NO: 612012 - DNA, 641 bp, Homo sapiens
agaaaccccatctctactaaaaatacaaaattagccaggcgtggtggtgcatgcctgtaatcccagctacttgggaggctgaggcaggagaattgcttgaacccaggaggcagaggttgcagggagctgagattgtgccattgcactccagcctgggcaacaagagtgaaactccgtctcaaaaaaaagaaaagaaacaagtagaataaccagagaagaaaatatatcgttattggaactgaaaactcaattgttaaaataaatagctgaaaaccacattggtgacccagcaatacaattgaatacattatcttcagtagaaaggataaaaaaattaaaatgtctttgtactcctataaagactttgtgaaatgtctttgtcactctgctctaaagaaatacctgagactgagtaatttataaagaaaagaggtttatttggttcatggttccccaggctatacaggaagcatagtggcttctggtcagcttctggggaggcctcagggagttttcaatcatggtggaaggcaayggaggagcaagcacctcacatggcaggagcaggaagaagagaaaagacaggagggagatgccatacacttttaaactaccagatctcatgataactgacttattca

SEQ ID NO: 612013 - DNA, 571 bp, Homo sapiens
cattcagatattaaaacaacagaagataataatwttaatgtgtactactgaatgtgttccataaatgctatctagtgcctgctgaatacatagaagttaaatagttggcttctacctctaaaatacttatagatttttaaaaaataacaagctagaatgcaattatcagtgggatatatggatgtatttataaataggagcatatatattttgaaattacatacagcctcaaattaaaaaaaaattagctagttaacttagttgtacagaactgaagccatcttctatcccaaacacagttcacataatatgaacacaacatatagctccttcctctccagtaggtaaaaactattattctctccctcacctattccaaataaatttgtaaataaaagagtgtgaagttggaacactactgatatattgtgtagaagaaaatgaaaagagaagaaggatctggctcttgctctggtgagtcgcagccgaagtcaaatttaggatagagaatgaatggcttctcttctcttctccgagtcaaggggatgcaccagaaggatgaccagagaga

SEQ ID NO: 612014 - DNA, 571 bp, Homo sapiens
cattcagatattaaaacaacagaagataataatattaatgtgtactactgaatgtgttccataaatgctatctagtgcctgctgaatacatagaagttaaatagttggcttctacctctaaaatacttatagatttttaaaaartaacaagctagaatgcaattatcagtgggatatatggatgtatttataaataggagcatatatattttgaaattacatacagcctcaaattaaaaaaaaattagctagttaacttagttgtacagaactgaagccatcttctatcccaaacacagttcacataatatgaacacaacatatagctccttcctctccagtaggtaaaaactattattctctccctcacctattccaaataaatttgtaaataaaagagtgtgaagttggaacactactgatatattgtgtagaagaaaatgaaaagagaagaaggatctggctcttgctctggtgagtcgcagccgaagtcaaatttaggatagagaatgaatggcttctcttctcttctccgagtcaaggggatgcaccagaaggatgaccagagaga

SEQ ID NO: 612015 - DNA, 571 bp, Homo sapiens
cattcagatattaaaacaacagaagataataatattaatgtgtactactgaatgtgttccataaatgctatctagtgcctgctgaatacatagaagttaaatagttggcttctacctctaaaatacttatagatttttaaaaaataacaagctagaatgcaattatcagtgggatatatggatgtatttataaataggagcatatatattttgaaattacatacagcctcaaattaaaaaaaaattagctagttaacttagttgtacagaactgaagccatcttctatcccaaacacagttcacataatatgaacacaacatatagctccttcctctccagtaggtaaaaactattattctctccctcacctattccaaataaatttgtaaataaaagagtgtgaagttggracactactgatatattgtgtagaagaaaatgaaaagagaagaaggatctggctcttgctctggtgagtcgcagccgaagtcaaatttaggatagagaatgaatggcttctcttctcttctccgagtcaaggggatgcaccagaaggatgaccagagaga

SEQ ID NO: 612016 - DNA, 619 bp, Homo sapiens
aaaccaaaactaaatgtatagaattttgcattgagctgacttcggggacttttagtcaattttccaaatgatcgcttttctcagtggataccacctaatagtacttattcaatttttcctccaagcttcttttcacttttattgactagttcattagattgcagtactatttacttagttgccaaactgtgatgttacatttaacatcctcacttgaaaaagtgcataatattttttataaaatatacctctaaaatatttccatatkatttcttggtaccaatgactgacttcactctgaatttctgaaataattttttaaccacctaaaattcagtcatttattttttcaatccatcgaatatacaaacctcaaaattgtttttctaacaggccaaattttatcattactctccttttaaaaaagcctttagtgacttcccactaacacaatgcagccccaacttcttaccttggacacccatgcatggcctttcaccaacagactgcttctctctttctctttctcctctcatacttatactggagttgcatcagtgctaaatgtggttttgagatttaaatctttggcccattctgtaagaatatacaagcattt

SEQ ID NO: 612017 - DNA, 565 bp, Homo sapiens
  misc_feature 58, 59, 60, 61, 62, 63, 64, 65, 66, 67, 68, 69, 70, 71, 72,73, 74, 75, 76, 77, 78, 79, 80, 81, 82, 83, 84, 85, 86,87, 88, 89, 90, 91, 92, 93, 94, 95, 96, 97, 98, 99, 100,101, 102, 103, 104, 105, 106, 107, 108, 109, 110, 111, 112: n = A,T,C or G
  misc_feature 113, 114, 115, 116, 117, 118, 119, 120, 121, 122, 123, 124,125, 126, 127, 128, 129, 130, 131, 132, 133, 134, 135, 136,137, 138, 139, 140, 141, 142, 143, 144, 145, 146, 147, 148,149, 150, 151, 152, 153, 154, 155, 156, 157: n = A,T,C or G
tcttttgtcactttaagtgaacacaatctaattgtataaactctgtaattataacatnnnnnnnnnnnnnnnnnnnnnnnnnnnnnnnnnnnnnnnnnnnnnnnnnnnnnnnnnnnnnnnnnnnnnnnnnnnnnnnnnnnnnnnnnnnnnnnnnnnnttttggtttcgaatttttaaactttttaaaaaatttttagtactgttgcttccatttttatgtacaaatagtaaagaaaacgattttttatgcataaacgacattattaattcttatcacctccagggttttctaactagactatcccttcaatctggctaggataatgttgaaatgcttgtgttagtaatctaacttgtatgacmtgatacatctgatttggctgtaaataaatatggccacatgtctttttcttttgtaattaattgccaaccatatacatgccttcaataacaagaaatccactattgctaccataaattatccagtaattcttagatttactcagttcaaagcagtataccctgcttttataccctgccaggtggatctttgtgttgccaaaac

SEQ ID NO: 612018 - DNA, 509 bp, Homo sapiens
gaggtaaatgattcccttcatttaagagctatacttctattttgaataagtaaattgttcttgtggcttcatagatcaatttggaaaacttgattaagttagtttgcaagtgagacatggacccatcctgcatgtaattatacaatcagttttctggctctgcaaatacaagrgtcagatcctgaaccacagtaaattagtgaatatatgagtgtcacagtgagagacctattgaaggacaacttctgaacattgccaggagatataccatgcagcataatcattaactattcagggtcagcatttattctaattttgtagttctagcttgtattaaaaattagttatagaaaaatagtgacaggtagtaatccacatcaacatgcaaggaaaatgtttataaatatttttaaatgacaagatcaataagaataacataacatgaaagaaaaatgtattgcacctttgacatatttaatagcatctgtgcatgcagatacaaatatatg

SEQ ID NO: 612019 - DNA, 501 bp, Homo sapiens
tgtattaggacattcttacagtgttataaagacgtatctgagactggctaatttataaataaaaaaaaagaagtttaattgactcacagttctgcatggctggggaggcctcaggaaatttaccatcattgtggaaggcaaaggggaagcaaggtrtgtcttcatatggctggcagaagtgaggggaggtgctacacactttcaataaaccagatcttttgagaactctaccatgagacaacactatagggatggtgctaaaccattagaaatcacccccatgatccaatcatctcccaccaagccccccctttaacacttgggatcacaattcaacatgagagctgggaagggacatagagccaaaccatgttattcctctcctggctccacccaaatctcatgttcttttcacattgcaaaatacaattattccttcttaacagtcccctaaagtcttaactcattccagcattaacccaaaagttcaagtccaaagtc

SEQ ID NO: 612020 - DNA, 578 bp, Homo sapiens
tcggggttggaatttcttttctttaaggatgctttagataggcccccaatttcctttggcttgtaaagcttttttctgaagggtctactgttagcctaatgaacttccctttgtacatgacttctctctccctacctgtcttaagatttttttcctttccattgtccctgaagaatctcatgattgtgtgtattggggatgatcctcttgtacagtatttctcagggtcttttctgaatttccttattttcatgccagcctctccaaggtttggaaattttcatggacaatatccccaaatacgttttccaagttgttttctctctctccgtctgtttcaggaatgccaatgaatcacaggtttgatttctttacataatctcatgtttcttggagattaagttcattttttaaatttttttctttttttttcctttttttrtctgcctgtgttgatttaaaggaggagtcttcaaactctgacattctatttttttttttgagacggagtctcgctctgtcgcccaggctggagtgcagtggcgcgatcttggctcactgcaagctccgcctcccag

SEQ ID NO: 612021 - DNA, 600 bp, Homo sapiens
ttggtactttcttaaaatggttatgttgtctttcatctcctggtttgtttcactgcattsctttaattgggtttcagttgtctcctgtatctcattaagcttccttgccatccagtttctgaattccctgtcatttcagctattttagcatgtttaagaaccattactggagagctagtgtggttatttgaaggtaagtagacactctggcttttagagttgccagaattcttgcactggttctttctcatatgtatggccttacgatcctttaatgtttaaagatgctctcttttggatggtcattttgcttttatattcttttttgccttcagggtttgatttgtggaataagttgggtttagtcaattggcttcggtcctggatgctttgagggggtcaaggctcagtccagcatttcttgtgctgtgtaatctaactctgggcaattgagacctggaccatggctttgttctcttgcccctcaatgcaaagtacatcctgcactggaggacctaacaggttccaagttcaatggctacaatactttcaacggggatgctggtgaaagtgctgcagtatggtggtggtggggttgtg

SEQ ID NO: 612022 - DNA, 581 bp, Homo sapiens
ctgatatctgagccccagagaatgtatttactggtgactaaaaggaatattatcttgattatttgtagaatttatcttatccaaacctatgtctctcttttttgcttcggtagggaaactatatatatgttcaaagtctcactctcttaaaaatttctcctcagaggctaagacatgagggagatgcttctttgctatgcatatattcatcacaggagagatgtggcttttttgagcatgaatttgtgtgtcggaccaataatgtgaaacttttgcttttatgcttgattaactattgctctgggctcttatcccactcaacaaagctcagacttttatttggtatcatttttattgctgctctgcaagttctattttattcttgaataaggaagtcatgctgtgaagtaaaggctctgttcactttaaagtacctaaagtcccttggaaaatggctttaaaccttgttctgcatcagctgagcatggtgaaatttatataattgtcaaagtcatrgatttcaccttaaactctaaacaaaccaacagagttccagaaataaccccacaatttttttcctc

SEQ ID NO: 612023 - DNA, 499 bp, Homo sapiens
tttcctccatctagcttcctttcttcccttcatcagagtctgtcatttctcttaccctgttttaagaatctctatttttattaattagtgaataactacataatttacatcttcagcacagatcacttgttaattattattattgtcttgtaccttctctgatagaaatgcatttattctctttttcatctcaatgaagttactcctgcatttctccatctctgttagcatcccctgtacttaccacttagtacatttctgatattgtactgttttcattcaattgcccttttggcacactcccttttctatattcagctaaaaaatcatattttatttctcttcaaatctttatgatttaactcattgcttgtatttccacaactactgcattatagcaagcaaacttcttctcatctatrtactactctattagctttcttcattttttcaattgattctatatgaagatgccagaataacaaatatcaagtagcaa

SEQ ID NO: 612024 - DNA, 544 bp, Homo sapiens
tcaccatgaaatcgtgattcttcagaaacctgggagaggaatttagattcctatgcaccatggaacatggattcagggcaatgtcatatatggatttacagaagcaaagaggcctgtgctagtatatgacttacagaaattgaatcaccctagctggcattgcagatctgaacttgccctctattcaatggcccaacactycctgtggccttcaatgcagatatctcaagtactactcactaacaccttgtggagttgttactactatcatcctcactttgaaaaaaaaataaagttgcttagaaatattgagtaacttgccaaaatttagtttgctggtaattgacaaaatcaggatttgaaccaaggtttctctgtctacaaatgctactagcataactactacattcaagagttctcttaaatattattaaatacatatgtgcagtcataaggacatttagtcttactttcataggaatcaaataagattaccttatatacacacatttttctatttattgagatccatatcaaatgtaga

SEQ ID NO: 612025 - DNA, 591 bp, Homo sapiens
caattgcactccttgatatttacccaaaagagctgaaaacttatattcacacaaaacactacgcacagatgcttaaaccagctttattcataattatcaaaacatggaagcagccaagatatccatcagtaggtgaatgaataaataaactgaggtacatctagagaatagaatattatttggtgctaaaaagaaatgagctatcgagctatacayaggacatggaagaaacttaaatgcatattactaaatgaaagaagccaatctgcaaagactacatgttgtatgattttaagtatatgacattcggcaaaaggcaaaactatggagagagtaaaaacatcagtggttgccaagcgttagggagtagagaaggaatgaatagagcacagaagattttctaaggcagtgaaaatactacatatgatgctataatgatggatattgtccaacactggacagatatgtaattatatatttgttcacacccattcaatattcaacaccaagagtgaactctaacctagaccgtggactttggatgatactaatgtgtcaacgtaaattcatcacttttaacaaatgtaccac

SEQ ID NO: 612026 - DNA, 541 bp, Homo sapiens
gtcatatgcagtcacttgtcattaatttcctaacayacatgtgattaaactggaaaaggactagattctctgctgacaaatgaaatgagataagaagaatgatatctgaaagctaaagaaggctgaaattcctggaatggcaggcaatgatcatattatttcggatctaacaagcatcctcaggcatcctacccacaaagagggagaatgatcctgtccttggcattgctctcttattcaggccataagcctaaactttgcaatctggctttccgtgctcttatagtattgccacataaatataattttgatagtgtttgtttgtttgtgtttcctgcagatagcattttcttactcaagagaaattataaaaaaataggtaactttgaagtaacaagaaactcacagatttcaaaagcttattttgaactgtaataactggttagtcaggaaagattggctgacactactatattagtataaatacgaagatagtgtaattctataaatatacagaataaataatgtgtaaggacagagt

SEQ ID NO: 612027 - DNA, 541 bp, Homo sapiens
gtcatatgcagtcacttgtcattaatttcctaacatacatgtgattaaactggaaaaggactagattctctgctgacaaatgaaatgagataagaagaatgatatctgaaagctaaagaaggctgaaattcctggaatggcaggcaatgatcatattatttcggatctaacaagcatcctcaggcatcctacccacaaagagggagaatgatcctgtccttggcattgctctcttattcaggccataagcctaaactttgcaatctggctttccgtgctcttatagtattgccacataaatataattttgatagtgtttgtttgtttgtgtttcctgcagatagcattttcttactcaagagaaattataaaaaaataggtaactttgaagtaacaagaaactcacagatttcaaaagcttattttgaactgtaataactggttagtcaggaaagattggctgacactactatattagtataaatacgaagatagtgtaattctrtaaatatacagaataaataatgtgtaaggacagagt

SEQ ID NO: 612028 - DNA, 432 bp, Homo sapiens
agcctgtagctgttttcataatggtttctttcacttagtaatatgaattcacagtttgtctatgttttttgatggcttgatacctcacttctttttaatgatgaataatattccactatgtggctgtattacaaattgtttatccattcatctattaataakatcttggttgccctcaattttcggcaatcgtgaatgaagtttctgtaaacattcacatgcagatgaaagtaagttttcaaatcaattcagcatatatgttaaaacatgattactgcaccatatagtaaaagtacatttagttttgtaagaatctgacaaactgtcttccaaagtggctgcaccatttgaaatgagtgagttttcataaccaaaatttggtattgcttttttttattttcatttttgctattctaatagttgtgcagtttt

SEQ ID NO: 612029 - DNA, 608 bp, Homo sapiens
ttattttttcattttttgattatggccattcttgcaggactgaggtggtattgcattgtgattttgatttgcatttccttgataattagtgaggtgaaacatttttccatatgcttgttggccttttgtatatctccttttgagaagtgtatattcatgtccttagcycactttttgatgggatcgtttggttttttcttgctgatttgtttgagttctttatagattgtagatattagtcttttgtcagatgtatagattacgaaaattttctcccaccctgtgggttgtctacttactctgctgattatttcttttgctgtgcagagcttttcagtttaattaagtctcatctatttatctttctttttattgcatttgcttttggttgcttggtcatgaactctgcctaagccaatgtctagaaggagttttctaatgttaccttctagaatctttattgtttcacgtcttagatttaagtctttgatccatcttgagttgaattttgtataaggtgaaaaatgaagatccagtttcattcttctacagatggcttgtcaattatcccagcattattttttgaattgggtgtcctttacacactt

SEQ ID NO: 612030 - DNA, 574 bp, Homo sapiens
tacatagaattgtgtgtgtacatatatatatatggagctcgatctagtctataaaagaagacagatagtcctacttgataatgggcgtagacttgaatagtcatttcttaaatgaggacttacatctggccaataggtatacgaaaraatgttcaacattactaatcatcagggtaatgcaaattaaaactacaatgacatgttaccttatacctgttggaattgctattgtgaaaaagacaaataagtgttggtgacaatttgggtaaaaaggaacacttgcactctgttgatataaattagtatagtcattatgcaaaaaggatgggaatttctcaaaatattaaaagcagaattacaatataattcatcaaccccacttcttggcatatatccaaaagaaatgaaagcagtcttttcaagagatgtctgcacttccatttttattgcagcattattcacaatatccaagttacggtatcagcacaaatatccatcaatggatgaatggataaataacatatggtacatatacactatggaatatattcagccataaaaaaatgatttttta

SEQ ID NO: 612031 - DNA, 634 bp, Homo sapiens
ggtgcctgccaccatgcctggctaatttttgtatttttagtagagacaaggtttcgccatgttggccaggctgatctcaacctcctggcctctggtgatccacacgcctgggcctcccaaagtgctgggattacaggtgtgagccaccgcacttggcctacttaatatatttctttttctatatttttctgagtttctctcttgtcacccaggcyggagtgcaatggcacgatctcagctcacagcaacctgtttcgcaggttcaagcgattctcctgcctcagactaccgagtggctgggactacaggtgcccaccagcacgtccggctaatttttttgtatttttactagagatggggtttcaccatgttagccaggatgatctcaatctcctgacctcgtgatctgcccgcctcggcctcccaaagtgctgggattacaggtgtgagccacagcacccagccaatatatttctttatatttgtaatgttttacttaaggttgatttaaatggagcctccacattcattgctatattgccatatggcattaccacttgccataagtagagggtagcaatataaataaaagcataaccaataaccctaaaagcacctaaaatcaccttgcaag

SEQ ID NO: 612032 - DNA, 583 bp, Homo sapiens
attagtccattctcatactgctataaagaaatacctgagactggataatttataaacaaaagaggtttaattgactcacagttccacaggctctccaggaagcacggctcaggaggcctcaggaaactttcaatcatgtgcgggcgaaggggaagcaggcacatggctggagcaggaggaagagagtgaagcgggaggtgccacacacttttcaacaaccagaactcactgycacaagaacagcaaggggaagatccacccccatgatccaatagcctcccaccaggcccctcttccaacagtggggattgcaataagattttggcagagagacagacccaaaccataccagatgtaactgtatcataagttgagggacattggtatatagcttatataatagaaaaagagaatttctcttcagttttaggaatcttttttttccccaggagcctatttttaattgttcttactactctgggtatagtatgttacagtcttagagtatttatgctttatcttcaaatgtcagcttacactgatcaatttagggcagaagcctgttatagtcctttcttggaac

SEQ ID NO: 612033 - DNA, 583 bp, Homo sapiens
attagtccattctcatactgctataaagaaatacctgagactggataatttataaacaaaagaggtttaattgactcacagttccacaggctctccaggaagcacggctcaggaggcctcaggaaactttcaatcatgtgcgggcgaaggggaagcaggcacatggctggagcaggaggaagagagtgaagcgggaggtgccacacacttttcaacaaccagaactcactgtcacaagaacagcaaggggaagatccacccccatgatccaatagcctcccaccaggcccctcttccaacagtggggattgcaataagattttggcagagagacagayccaaaccataccagatgtaactgtatcataagttgagggacattggtatatagcttatataatagaaaaagagaatttctcttcagttttaggaatcttttttttccccaggagcctatttttaattgttcttactactctgggtatagtatgttacagtcttagagtatttatgctttatcttcaaatgtcagcttacactgatcaatttagggcagaagcctgttatagtcctttcttggaac

SEQ ID NO: 612034 - DNA, 478 bp, Homo sapiens
ttacctggctgtattctgaaggaatggtccctgcttacctgattccatcctgaaggaatggtccacacttacgtgactccatcctgaaggaatggtccatgcttacctgggcccatcctgaagaaacagtccatgattacctggctgtattctgaagaaatggtccacacttacctggctccatcctgaaggaatggtccatgcttacctgggcccatcatgaagtaacagtccatgcttacctggctgtattctgaaggaatggtccacacttacctggctccatcctgaaggaatggtccatgcttacctgggcccatcctgaagaaacagtccatgcttaccttgctccatcctgaaggaatggtccacacttacctgactccactctgaaggaatggtccatgcttacctgggcccatcctgaasaaacagtccatgcttacctggctgtattctgaagaaatggtccacactt

SEQ ID NO: 612035 - DNA, 512 bp, Homo sapiens
ctccactctgaaggaatggtccatgcttacctgggcccatcctgaagatacagtccatgcttacctggccgtgttctgaaggaatgttccacacttacctggctctatcctgaaggaatggtccatggttacctgggcccatcctgaagaaagagtccatgcatacctggctgtattctgaaggaatggtccacacttacctggctccatcctgagggaatggtccattcttacctgggcacatcctgaagatacagtgcatgcttacctggccgtattctgaaggaatgttccacacttacckggctctatcctgaaggaatggtccatggttacctgggcccatcctgaagaaagagtgcatgcatacctggctgtattctgaaggaatggtccacacttacctggctccatcctgaaggaatggtccattcttacctgggcccatactgaagaaacagttcatgcttacctggctgtattctgaaggaatggtccttgcttacctgatt

SEQ ID NO: 612036 - DNA, 552 bp, Homo sapiens
ctcccccacccccattacacccttctcttcccactcagccccttgactcccaacagtccctggagctttatggacccagacaatcccagatcaactacctgatctgaggctgaaaaggaaaaagaccaactggaaacargtggggcattttatctactcagtgaaggctttgatatatccagatggctgcttcaatcacagcctctgtgagattaaataatatcaggggaaaagaaaggcttgaaactccccttcacaaatgctggttaagaaagaaaaatctttagcccttattgagtgggtaacctcaacatatcccgtttttatcagaaacataattcagataaaaatatagagtggagataaaccagtgagttttgtgttactgtgttgccggactcatggctgaaatttaagaatgaagccatacaatcaccgttttcatgtgtctgtctgtatgtgtatgtacctatgttacatatatgtgatatttttctacctctggatggtattgctgaagtaattataaaattccttaaaggagttctattc

SEQ ID NO: 612037 - DNA, 552 bp, Homo sapiens
ctcccccacccccattacacccttctcttcccactcagccccttgactcccaacagtccctggagctttatggacccagacaatcccagatcaactacctgatctgaggctgaaaaggaaaaagaccaactggaaacaagtggggcattttatctactcagtgaaggctttgatatatccagatggctgcttcaatcacagcctctgtgagattaaataatatcaggggaaaagaaaggcttgaaactccccttcacaaatgctggttaagaaagaaaaatctttagcccttattgagtgggtaacctcaacatatcccgtttttatcagaaacataattcagataaaaatatagagtggagataaaccagtgagttttgtgttactgtgttgccggactcatggctgaaatttaagaatgaagccatacaatcacygttttcatgtgtctgtctgtatgtgtatgtacctatgttacatatatgtgatatttttctacctctggatggtattgctgaagtaattataaaattccttaaaggagttctattc

SEQ ID NO: 612038 - DNA, 513 bp, Homo sapiens
attaactgggcccatcctgaagaaacagtgcatgcttacctggctgtattctgaaggaatggtccctgcttacctgattccatcctgaaggaawggtccacacttacgtgactccatcctgaaggaatggtccatgcttacctgggcccatcctgaagaaacagtccatgattacctggctgtattctgaagaaatggtccacacttacctggctccatcctgaaggaatggtccatgcttacctgggcccatcatgaagaaacagtccatgcttacctggctgtattttgaaggaatggtccacacttacctggctccatcctgaaggaatggtccatgcttacctgggcccatcctgaagaaacagtccatgcttaccttgctccatcctgaaggaatggtccacacttacctgactccactctgaaggaatggtccatgcttacctgggcccatcctgaagaaacagtccatgcttacctggctgtattctgaagaaatggtccacactt

SEQ ID NO: 612039 - DNA, 513 bp, Homo sapiens
attaactgggcccatcctgaagaaacagtgcatgcttacctggctgtattctgaaggaatggtccctgcttacctgattccatcctgaaggaaaggtccacacttacgtgactccatcctgaaggaatggtccatgcttacctgggcccatcctgaagaaacagtccatgmttacctggctgtattctgaagaaatggtccacacttacctggctccatcctgaaggaatggtccatgcttacctgggcccatcatgaagaaacagtccatgcttacctggctgtattttgaaggaatggtccacacttacctggctccatcctgaaggaatggtccatgcttacctgggcccatcctgaagaaacagtccatgcttaccttgctccatcctgaaggaatggtccacacttacctgactccactctgaaggaatggtccatgcttacctgggcccatcctgaagaaacagtccatgcttacctggctgtattctgaagaaatggtccacactt

SEQ ID NO: 612040 - DNA, 541 bp, Homo sapiens
tgatttcatcgtgaaggaatggtccacacttatgtgactccatcctgaaggaatggtccatgcttacctgggcccatcctgaagaaacagtccatgcttacctggctgtattctgaaggaatggtccacaattacctgactccatcgtgaaggaatgttccatgcttacctgcgcccatcctgaagaaacactccatgcttacctggctgtattccgaaggaatggtccacacttacctggctccctcctgaaggaatggtccatgcttacctgggcccatcctgaagaaacactccatgcttacctggcagtattccgaaggaatggtccacacttacctggctccatcctgaaggaatggtccatgcttacctgggcccatcctgaagaaacagtccatgcttwccttgctccatcctgaaggaatggtccacacttacctgactccactctgaaggaatggtccatgcttacctgggcccatcctgaagaaacactccatgcttacctgactgtattctgaaggaatggtccacactt

SEQ ID NO: 612041 - DNA, 498 bp, Homo sapiens
cccaccacctgcgtggaggtggctgctgtgattgtgacccaggttggtcattgttggcatggttggtagagatggttgatccatccttttattttggttctaatttgggtttaatatctaagacatacagccaagctaatacaagaacatcagatcctatgagcattttgactccaatgttaaaattcagttgcagaattaaaatcatatttttctgtagctgaataaactttgtaaacctcagyaaaaacaatacaataaaaacctttcaaaggaaccctaccaaaacagaattttttcacctttatctgccaaatgttacttctttctcaatttgtttcaaagtgtaaactctggaaaatatacttctgagtgatgtgataataggatcatgtagcaaaataaaacttaatgtcaatttttgcttaattaaatagattaacatttaagaaactttaaatagacattacctaatagtttgtgaataaggcagatgag

SEQ ID NO: 612042 - DNA, 498 bp, Homo sapiens
cccaccacctgcgtggaggtggctgctgtgattgtgacccaggttggtcattgttggcatggttggtagagatggttgatccatccttttattttggttctaatttgggtttaatatctaagacatacagccaagctaatacaagaacatcagatcctatgagcattttgactccaatgttaaaattcagttgcagaattaaaatcatatttttctgtagctgaataaactttgtaaacctcagcaaaaacaatacaataaaaacctttcaaaggaaccctaccaaaacagaattttttcacctttatctgccaaatgttacttctttctcaatttgtttcaaagtgtaaactctggaaaatatacttctgagtgatgtgataataggatcatgtagcaaaataaaayttaatgtcaatttttgcttaattaaatagattaacatttaagaaactttaaatagacattacctaatagtttgtgaataaggcagatgag

SEQ ID NO: 612043 - DNA, 498 bp, Homo sapiens
cccaccacctgcgtggaggtggctgctgtgattgtgacccaggttggtcattgttggcatggttggtagagatggttgatccatccttttattttggttctaatttgggtttaatatctaagacatacagccaagctaatacaagaacatcagatcctatgagcattttgactccaatgttaaaattcagttgcagaattaaaatcatatttttctgtagctgaataaactttgtaaacctcagcaaaaacaatacaataaaaacctttcaaaggaaccctaccaaaacagaattttttcacctttatctgccaaatgttacttctttctcaatttgtttcaaagtgtaaactctggaaaatatacttctgagtgatgtgataataggatcatgtagcaaaataaaacttaatgtcaatttttgcktaattaaatagattaacatttaagaaactttaaatagacattacctaatagtttgtgaataaggcagatgag

SEQ ID NO: 612044 - DNA, 535 bp, Homo sapiens
ggagaaaatatttgcaaactatgcatccaacaaaggtttaatattcaaaatttatgaggaacttaagcaattaggcaagcaaaaaagcaacaaccccacttaaaaatgtacacaatatatgaacaaacatttctcaaaagaagggcataacatgggccaataacatatgaraaagtgttcacatcacttatcatcagagaaatgcatattaaaaccacagtaagataccatctcataccagtcagaatggctattactaaaaagtcaaaaaacaacaaatgctggtgaggctgtggagaaaagggaacacttacatacgttggtgggaatgtaaattagttcagcaactgtggaaaaaaatttggagatttctcaaagaacttaaaagagaactaccattcaacctagcaatcccattactgggtagatatccaaaagaaatctaatcattctaccaaaaagacacatgcacttgtgtgttcatcatggcagtattcgcaatagcaaagacatggaatcgaccttggtgcttatc

SEQ ID NO: 612045 - DNA, 560 bp, Homo sapiens
gtgttgggattacaggtatgagccacagcaccggatccttcatcactcatatcacagagcttgaatcttctgaacatcaagtagataagaacagccataaactccctttcagaaatttaaaataaagcatatataattagctattttcctcctgtttcagaaaacatcattgtttttcagtgtcttctgtgttctggatccttttccctgccatccctctgggacgttgcccctcagctactctgtgagtttcttctgtctccaagctgttgatgggcatgggagttccaccagcatccctggcagtgaccaggctctagtcrctctagcttccacttcacactgtcccctgcccgtgtatgtccctcttgctactgctgtcccactctctttttctaagcatcccgacttctacagaaagtattcatcatttgctctctccttttcattaactcatttcctctcctcagtcttctgcaatcaggcatctactcttatccattcatcaatttactgatgaactcagatctatcactaatttatacagattattttgtttt

SEQ ID NO: 612046 - DNA, 586 bp, Homo sapiens
ctttttaatcgatgtacttgaatattcattgagaaagtggacgtttctgtaaaacctgaaaagcatcttaataagagattagcgtgcaaatgctgtcatttattcctttttaggattgtaatattttgtaggaattaagtctaacagggaaaaaactggcagacattacatcatactgcatcaacttagatgttagcagcttacagttttgccgaccttggcagcttcagagttaaaatgctaattaacttccaygcagtatagggacagagcgcctgtaggtgaaactaaattaataacctgtcctaactactaagggaataacacttgaacacccctgtcaggggcttcgtttctcatagtagaaagttcttgcttaaagacaaaactcagccagtcatttaggtgatcttgaaaatgattcctctctggatgctaatattttacattatttaatttgccatcaggttccctgttttttattttccttaatttggtaaacacctaggaagcctttatttctagaatgggctatgattctaatgtaatgatgatattccagacagatgagcaaaacataatgtac

SEQ ID NO: 612047 - DNA, 586 bp, Homo sapiens
ctttttaatcgatgtacttgaatattcattgagaaagtggacgtttctgtaaaacctgaaaagcatcttaataagagattagcgtgcaaatgctgtcatttattcctttttaggattgtaatattttgtaggaattaagtctaacagggaaaaaactggcagacattacatcatactgcatcaacttagatgttagcagcttacagttttgccgaccttggcagcttcagagttaaaatgctaattaacttccatgcagtatagggacagagcgcctgtaggygaaactaaattaataacctgtcctaactactaagggaataacacttgaacacccctgtcaggggcttcgtttctcatagtagaaagttcttgcttaaagacaaaactcagccagtcatttaggtgatcttgaaaatgattcctctctggatgctaatattttacattatttaatttgccatcaggttccctgttttttattttccttaatttggtaaacacctaggaagcctttatttctagaatgggctatgattctaatgtaatgatgatattccagacagatgagcaaaacataatgtac

SEQ ID NO: 612048 - DNA, 586 bp, Homo sapiens
ctttttaatcgatgtacttgaatattcattgagaaagtggacgtttctgtaaaacctgaaaagcatcttaataagagattagcgtgcaaatgctgtcatttattcctttttaggattgtaatattttgtaggaattaagtctaacagggaaaaaactggcagacattacatcatactgcatcaacttagatgttagcagcttacagttttgccgaccttggcagcttcagagttaaaatgctaattaacttccatgcagtatagggacagagcgcctgtaggtgaaactaaattaataacctgycctaactactaagggaataacacttgaacacccctgtcaggggcttcgtttctcatagtagaaagttcttgcttaaagacaaaactcagccagtcatttaggtgatcttgaaaatgattcctctctggatgctaatattttacattatttaatttgccatcaggttccctgttttttattttccttaatttggtaaacacctaggaagcctttatttctagaatgggctatgattctaatgtaatgatgatattccagacagatgagcaaaacataatgtac

SEQ ID NO: 612049 - DNA, 586 bp, Homo sapiens
ctttttaatcgatgtacttgaatattcattgagaaagtggacgtttctgtaaaacctgaaaagcatcttaataagagattagcgtgcaaatgctgtcatttattcctttttaggattgtaatattttgtaggaattaagtctaacagggaaaaaactggcagacattacatcatactgcatcaacttagatgttagcagcttacagttttgccgaccttggcagcttcagagttaaaatgctaattaacttccatgcagtatagggacagagcgcctgtaggtgaaactaaattaataacctgtcctaactactaagggaataacacttgaacacccctgtcaggggcttcgtttctcatagtagaaagttcttgsttaaagacaaaactcagccagtcatttaggtgatcttgaaaatgattcctctctggatgctaatattttacattatttaatttgccatcaggttccctgttttttattttccttaatttggtaaacacctaggaagcctttatttctagaatgggctatgattctaatgtaatgatgatattccagacagatgagcaaaacataatgtac

SEQ ID NO: 612050 - DNA, 510 bp, Homo sapiens
tgtatttgtctttcttattaaatgacaattgatatcatgcaaggaaacacgagagtgaaatgcttagaagtgaaccttttagtgaaaaaaaaattatccatctgtatgtgattgattgctcagtcaaccaaaatcccctagcccaccccctaaaaaaaaaagagatggtaatatttacatttttcctaaggatattatgtagttaaactaattatagtttatgaaattgctgtgaaagcctcgtatgaaragagacatgcatttgttattgcatgtaataggacactatcaaaatatgatgcaaaaggaatgtcctctaaacattacaataatgtttattttaagttgctattaacagagaaatttttttagaggcaagcacacatcgggtacaatgtggggcatcagaattctgctaaagtttgtcccactgaattctttggaaaaaatatgacaacctaaaaaaatccagttggcaaaaattaatgtgaaagaaaataggtgaatctg

SEQ ID NO: 612051 - DNA, 510 bp, Homo sapiens
tgtatttgtctttcttattaaatgacaattgatatcatgcaaggaaacacgagagtgaaatgcttagaagtgaaccttttagtgaaaaaaaaattatccatctgtatgtgattgattgctcagtcaaccaaaatcccctagcccaccccctaaaaaaaaaagagatggtaatatttacatttttcctaaggatattatgtagttaaactaattatagtttatgaaattgctgtgaaagcctcgtatgaaaagagacatgcatttrttattgcatgtaataggacactatcaaaatatgatgcaaaaggaatgtcctctaaacattacaataatgtttattttaagttgctattaacagagaaatttttttagaggcaagcacacatcgggtacaatgtggggcatcagaattctgctaaagtttgtcccactgaattctttggaaaaaatatgacaacctaaaaaaatccagttggcaaaaattaatgtgaaagaaaataggtgaatctg

SEQ ID NO: 612052 - DNA, 510 bp, Homo sapiens
tgtatttgtctttcttattaaatgacaattgatatcatgcaaggaaacacgagagtgaaatgcttagaagtgaaccttttagtgaaaaaaaaattatccatctgtatgtgattgattgctcagtcaaccaaaatcccctagcccaccccctaaaaaaaaaagagatggtaatatttacatttttcctaaggatattatgtagttaaactaattatagtttatgaaattgctgtgaaagcctcgtatgaaaagagacatgcatttgttattgcatgtaataggacactatcaaaatatgatgcaaaaggaatgtcctctaaacattacaataatgtttattttaagttgctattaacagagraatttttttagaggcaagcacacatcgggtacaatgtggggcatcagaattctgctaaagtttgtcccactgaattctttggaaaaaatatgacaacctaaaaaaatccagttggcaaaaattaatgtgaaagaaaataggtgaatctg

SEQ ID NO: 612053 - DNA, 510 bp, Homo sapiens
tgtatttgtctttcttattaaatgacaattgatatcatgcaaggaaacacgagagtgaaatgcttagaagtgaaccttttagtgaaaaaaaaattatccatctgtatgtgattgattgctcagtcaaccaaaatcccctagcccaccccctaaaaaaaaaagagatggtaatatttacatttttcctaaggatattatgtagttaaactaattatagtttatgaaattgctgtgaaagcctcgtatgaaaagagacatgcatttgttattgcatgtaataggacactatcaaaatatgatgcaaaaggaatgtcctctaaacattacaataatgtttattttaagttgctattaacagagaaatttttttagaggcaagcacacatcgggtacaatgtggggcatcagaattctgctaamgtttgtcccactgaattctttggaaaaaatatgacaacctaaaaaaatccagttggcaaaaattaatgtgaaagaaaataggtgaatctg

SEQ ID NO: 612054 - DNA, 555 bp, Homo sapiens
agaacaacaggggccactggaactgtccaacagagtcctgcagctgcaggacagccatggggtagatggaggacagtcagaattctctgctgctttcatttcccacagagctgttgtccccgtcttcctccccacagtcagtgctgtgggctcactttgcaaaccacacaaggaccggcctgtgagaaacttccagtagaaaatgctgccaccctgagaaaccaggactttccagaatctttctgtccacatgtcacctacttataaactgagggaggcagtgctggattctgtggtgaggcagggttggggggaagggtttttaacttggaagatctaaataaaccagagttcaagacctgtcacaattccaagtatgatgtaaatcacycatcccccttgaatttccatcttccttttgcaaaatagaggtaatggtgattactctaggatcttatctgagggaagatgtatagatatcagtaacataatgcactgtggaaaattcaaatgatttccactttcaagtacactttgggatgaagcaaggttgaa

SEQ ID NO: 612055 - DNA, 555 bp, Homo sapiens
agaacaacaggggccactggaactgtccaacagagtcctgcagctgcaggacagccatggggtagatggaggacagtcagaattctctgctgctttcatttcccacagagctgttgtccccgtcttcctccccacagtcagtgctgtgggctcactttgcaaaccacacaaggaccggcctgtgagaaacttccagtagaaaatgctgccaccctgagaaaccaggactttccagaatctttctgtccacatgtcacctacttataaactgagggaggcagtgctggattctgtggtgaggcagggttggggggaagggtttttaacttggaagatctaaataaaccagagttcaagacctgtcacaattccaagtatgatgtaaatcactcatcccccttgaatttccatcttccttttgcaaaatrgaggtaatggtgattactctaggatcttatctgagggaagatgtatagatatcagtaacataatgcactgtggaaaattcaaatgatttccactttcaagtacactttgggatgaagcaaggttgaa

SEQ ID NO: 612056 - DNA, 354 bp, Homo sapiens
aaaggaagatgttttcctactctgtctttctcgaagagttgygtctggtcctactcaagtctgcagagggtcagtttcctgttcacttgctcacagcagcttgcagtccttctcagtcccaacttctaattttattcattttcaccccaatgtagaatttgtttctcacagtactcatcaacgtaagccacggttcagtcttcctgatattttattgtgcaatgtatattaaatactgtattacattttaaaatacgagttatgagatgttagtcacattcattaatctgcatgtgaaagtacaactaaaatgtgggcacggtgagtccctggggccgcagttctcagggttta

SEQ ID NO: 612057 - DNA, 354 bp, Homo sapiens
aaaggaagatgttttcctactctgtctttctcgaagagttgcgtctggtcctactcaagtctgcagagggtcagtttcctgttcacttgctcacagcagcttgcagtccttctcagtcccaacttctaattttattcattttcaccccaatgtagaatttgtttctcacagtactcatcaacgtaagccacggttcagtcttcctgatattttattgtgcaatgtatattaaatactgtattacattttaaaatacgagttatgagatgttagtcacattcattaatctgcatgtgaaagtacaactaaaatgtgggcacrgtgagtccctggggccgcagttctcagggttta

SEQ ID NO: 612058 - DNA, 613 bp, Homo sapiens
  misc_feature 359: n = A,T,C or G
tctgtgtgactgtgaagccccagcacaggctcccataaaaagggcgtttgcatttactacaatatttaagaatccacaaaaaatggtttttttcaaaascctacagttagaagcaagttgctcaaatattaccaaatattaccaatattaccaataatcagacccaattaatatcagagagaaaaaaagtcacacaaggctgtgtagctcatgcactactaatatagcccattgactatttaactcataggatgccttttaaaatagattttattgtggtaaaatatatatcccataaaatctaccattttaaccatattgagtgtacagttcagtggcattaaatatattcacattgntgttcaaccaccacctgcatccagctcctgactcatttcatcctacagctgaaactcaaatcttctgaataattggtgaagtggctaacacaccatgctgacccttaatttgtgaagaaggcccacaagtattagaaagatacatttgtagaggtgtcacttgatgtgtcattccttgctagcacagatccatctcaaacaaacttctaaagcttgggctactctgctcaactctaaatccacatgaagaaatg

SEQ ID NO: 612059 - DNA, 613 bp, Homo sapiens
  misc_feature 359: n = A,T,C or G
tctgtgtgactgtgaagccccagcacaggctcccataaaaagggcgtttgcatttactacaatatttaagaatccacaaaaaatggtttttttcaaaaccctacagttaraagcaagttgctcaaatattaccaaatattaccaatattaccaataatcagacccaattaatatcagagagaaaaaaagtcacacaaggctgtgtagctcatgcactactaatatagcccattgactatttaactcataggatgccttttaaaatagattttattgtggtaaaatatatatcccataaaatctaccattttaaccatattgagtgtacagttcagtggcattaaatatattcacattgntgttcaaccaccacctgcatccagctcctgactcatttcatcctacagctgaaactcaaatcttctgaataattggtgaagtggctaacacaccatgctgacccttaatttgtgaagaaggcccacaagtattagaaagatacatttgtagaggtgtcacttgatgtgtcattccttgctagcacagatccatctcaaacaaacttctaaagcttgggctactctgctcaactctaaatccacatgaagaaatg

SEQ ID NO: 612060 - DNA, 613 bp, Homo sapiens
  misc_feature 359: n = A,T,C or G
tctgtgtgactgtgaagccccagcacaggctcccataaaaagggcgtttgcatttactacaatatttaagaatccacaaaaaatggtttttttcaaaaccctacagttagaagcaagttgctcaaatattaccaaatattaccaatattaccaataatcagacccaattaatatcagagagaaaaaaagtcacacaaggctgtgtarctcatgcactactaatatagcccattgactatttaactcataggatgccttttaaaatagattttattgtggtaaaatatatatcccataaaatctaccattttaaccatattgagtgtacagttcagtggcattaaatatattcacattgntgttcaaccaccacctgcatccagctcctgactcatttcatcctacagctgaaactcaaatcttctgaataattggtgaagtggctaacacaccatgctgacccttaatttgtgaagaaggcccacaagtattagaaagatacatttgtagaggtgtcacttgatgtgtcattccttgctagcacagatccatctcaaacaaacttctaaagcttgggctactctgctcaactctaaatccacatgaagaaatg

SEQ ID NO: 612061 - DNA, 500 bp, Homo sapiens
ataaaactctcttcttggtgttttctttcagtcctrtcttgagttatttttaatcaaaatgctaggctgaggtcaactgattgtaatttgtttataaggaaaaaatggaaggtgacctgaagaattttctctcctccctttacccaaaagtatttattcttattttgaaatgagaaattccttcagaatttcccaagatcaaagagggctatctcactgacagctaagaccctgttgtcttcatctgtaacttggctagtcttatccaaaagaggcctcttctgggttggaattgcatttagttttaaataaacaattatgcagaaagtgcttcttccatcttattaaaatttcagagttagaagaaaaggcatctgaagtttccaagtagaactataacagacctagtgttttttagtatccccataagtaagcattctagcataagggagggtttgctggttgctcattgaatgttgtcttggccactcacagaccaa

SEQ ID NO: 612062 - DNA, 500 bp, Homo sapiens
ataaaactctcttcttggtgttttctttcagtcctatcttgagttatttttaatcaaaatgctaggctgaggtcaactgattgtaatttgtttataaggaaaaaatggaaggtgacctgaagaattttctctcctccctttacccaaaagtatttattcttattttgaaatgagaaattccttcagaattycccaagatcaaagagggctatctcactgacagctaagaccctgttgtcttcatctgtaacttggctagtcttatccaaaagaggcctcttctgggttggaattgcatttagttttaaataaacaattatgcagaaagtgcttcttccatcttattaaaatttcagagttagaagaaaaggcatctgaagtttccaagtagaactataacagacctagtgttttttagtatccccataagtaagcattctagcataagggagggtttgctggttgctcattgaatgttgtcttggccactcacagaccaa

SEQ ID NO: 612063 - DNA, 500 bp, Homo sapiens
ataaaactctcttcttggtgttttctttcagtcctatcttgagttatttttaatcaaaatgctaggctgaggtcaactgattgtaatttgtttataaggaaaaaatggaaggtgacctgaagaattttctctcctccctttacccaaaagtatttattcttattttgaaatgagaaattccttcagaatttcccaagatcaaagagggctatctcactgacagctaagaccctgttgtcttcatctgtaacttgrctagtcttatccaaaagaggcctcttctgggttggaattgcatttagttttaaataaacaattatgcagaaagtgcttcttccatcttattaaaatttcagagttagaagaaaaggcatctgaagtttccaagtagaactataacagacctagtgttttttagtatccccataagtaagcattctagcataagggagggtttgctggttgctcattgaatgttgtcttggccactcacagaccaa

SEQ ID NO: 612064 - DNA, 500 bp, Homo sapiens
ataaaactctcttcttggtgttttctttcagtcctatcttgagttatttttaatcaaaatgctaggctgaggtcaactgattgtaatttgtttataaggaaaaaatggaaggtgacctgaagaattttctctcctccctttacccaaaagtatttattcttattttgaaatgagaaattccttcagaatttcccaagatcaaagagggctatctcactgacagctaagaccctgttgtcttcatctgtaacttggctagtcttrtccaaaagaggcctcttctgggttggaattgcatttagttttaaataaacaattatgcagaaagtgcttcttccatcttattaaaatttcagagttagaagaaaaggcatctgaagtttccaagtagaactataacagacctagtgttttttagtatccccataagtaagcattctagcataagggagggtttgctggttgctcattgaatgttgtcttggccactcacagaccaa

SEQ ID NO: 612065 - DNA, 609 bp, Homo sapiens
actgcaaactccacctccagggttcaagagattctcctgcctcagcataccaagtagctggaattacaggagcacgccaccacacccagctaatttctgtatttttagtagagacagggtttcaccacgtcagctaggctgctctcgaactcctgtcctcaggtgatctgcccaactcagcctctcaaagtgctggaattacaggcgtgagccaccgcgtccagcctctaggtatttttctaattggtaagactaactcctttttcaatttcttgttgccaattgtactgcttatccttttatgaaaattaatttttttaaatgtgacgaataaaatatgtatgcattatgtacaacttgatgttttgaaacatgcatacataattgaatgagtacatcaagctaattaaatatgcattacctcacatacttatttttgtggtgagaaaactaaaaatctattctcagcaattttcaagaacacagtactttgttattaactayagtcaccattttgtgcaatagatatcttgaacttattcctcctacataactgaaattttgtatcctttgaccaacatctccccaactcccaaactcgctagtccc

SEQ ID NO: 612066 - DNA, 499 bp, Homo sapiens
tcagtaccatgctattttgattgctacagctttgtagtacattttgatgtcagatagtgtgatacctccagctttgttctttacgctcaagattgctctggttattggaggtcctttgtggttacacacaaattttaggatcattttctctatttatgtgtaaaatgtcattagaattttcataggtaatgcactgaatctgtagatcaccttaggtattatgaatattttaataataatttcttccaatccatgaacatggggatatctttcgattcctgtcatctttaagtcattcatcaaaattttatagtctactataaaattctgtaaaccgcagtgtacaactctttcaccaccttggttaaatttattcataagtatcttattggattattttcttgatttcagacacttcattattagtatatagaccacataactgatttttctgttgatgttgtactrtaactttattgaatttatttattagttattt

SEQ ID NO: 612067 - DNA, 613 bp, Homo sapiens
cctgctctgccacctcccaaggcatgacccttcgtctcctcctcatctgtaaaatggggatgatgatacccagctcccgtagctgtggggaggatgaagcaagatgatacatgggaagggtagtgcactgcgcatggctctcggtgagcccctcacagatgacactgtcgttagaaggagctgagcccarccaggagacgagacagagggagcagggagagcagagtcggggccagtgatttccttaagagggatgtgcccttcctcccaaagtgccaaagcaacactcaaggatccacagccttgggagagtctagatcctagattgctacttgtataattttgagatttccctacatacatatatttattttaagaagtaaagtgaattagccgggtgcagtggttcatgcctgtaatcccagcactttgggatgctgaagcaggtggatcacctgaggtcaggagtttgggaccagcctggccaacatggtgagaccccacctctacaaaaaatacaaaaattagcagggtgtaatggcggcacctgtaatcccagctacttgggaggctgaggcaggagaatcacttgaacccgggaagcaaaggttgc

SEQ ID NO: 612068 - DNA, 400 bp, Homo sapiens
aaaaaaaaaaaaaaggaaaaaaatagttaaagaaaaataataggccgggwgtagtggctcatgcctgtaatcctagcattttgggagaccaaggcaggtggatcacttgaggtcaggagttcgagaccagcttggctaacatggtaaaaccccatctctactaaaaatacaaaaattaactgggcgtggtggtgggcacctgtaatcccaggctgaggcaggagaattgcttgaaccgctcgggaggtggaggttgcagtgagctgagattgccccactgcactccagcctgggaaacagagtgagactctgtctcaaaaaaaaaaaaaggaaaaaaaaataataaagagctgtagggcaggaattgtacaaggctaatatccaagatattatgtaattt

SEQ ID NO: 612069 - DNA, 593 bp, Homo sapiens
ccttttatgctttgtttattgttgtcagtggtctacaggaggcacttaataacaattgcttgctctagaatctgagctcaggcaactctgaacagtctttcagagagagagaatgaatatctgaaaattaaatacagaattaaagargagccatttccatgagatcaaagagcagtgcaaaggaagaatgagctgctccaacagctccccaaggccctctgctgtcttttatgctaatacattctaaatgtatcttcctgatctggttggattttctcttctcagaaaggtcccccttgatgttcatatgacactctctttgtctatgtccttggtgggggtcagggggaaactgatatctaaaagactgtgtactgtctgggactggaattgttgataggataacatcaagaatgccaattaagtttggagattaggttctgtgatacctctctctctctctctatctctctttctctctccttttgtcctactgagtataccaaggaacctgagttgtgggacgcccaacagtaaccatccacaaatgtgttccaggttggaaaaaaagtatatctatacatatatacaca

SEQ ID NO: 612070 - DNA, 585 bp, Homo sapiens
tataatgtaacagaaagagagcaataagtgtagattaatgggttcaattaaatattatagtgcaatgggacaaaatgagaatgcactactctacgtcagtgggccaaaaaaaaaaaattaaaagacaggaaaagggccttgaaaaaaaatgagtacatatttagctcttgaagggaatcagaacatacaatagaagggaaatcaaagtagaaagagaagcaaaaacaaagtcaatgatacgaaagagctttggatgtttgaaagccttcaagccattatacatggcataaagatgggaggtaagggttagagatggggggacgtcaaagagataaagctaaaggggtaagcatagattagagatgaaagcatcttctgtattacgttgagtttagaatatattataaagaaaataagaaatgacttagtaatgaaaatcctgggtaaatgtttcaataggtttgctatataacaaaccactccaatacttagtgacttaagaaatgcttatgtcagttggactgttctgatctggtctgattcagctgatctctctatagtcarctagtgcttcaactgggatta

SEQ ID NO: 612071 - DNA, 367 bp, Homo sapiens
ttgaccctggattttctcgtgtactctctaacttgaaccacacattctactatcaagacaaatccaagttggtagccaacacatcttcctgagaatwtgagctagttaagttaagaacaaatgaatgttttcttgattcttggtattagtaagaatggaaacctgaagttgataaagtttttgattgagaaaagtagtgtaatgaggttttgcttttaccctatttctcctaagtgaagaacgacaaggcattgacagtgaaattagtctcttcatttattgatttggctcttaaaaagaaagagattttagagatgtcaaatagtaaaatcaaaaagggatgtgtaaagaagtttttagagaagca

SEQ ID NO: 612072 - DNA, 583 bp, Homo sapiens
tttttgttggtgtaccaaaataaggtttctaatttttaaaaagtagaaattacacttgaaaaaaagtgtgattaatcaattaaaatttggagggaaagcttcttcacctcagcatgtgtaaaacaagcatgaagagcagtgttctaacaaatatttgtttctgaaagataaaagctaagtctgttgtgtaagtggttactatatcaagttaggttacaaagaatattttcttagagttttctagataccatcagggctaatgcttggaatttgctttcctttgtgcctttctattcacttcctarcaatggcctctgtccttccatctctccatctcattctgccccaggaagagtgcaagaagtggcctttcctccttcttttcattagtactagtggcttgaccagttagtttcagcaagatacatccctaactctatcaacttttgaattgtcaaggaaatcaagcctattatagattctgttctcagtgtacaaagttataacaatggcaactcaccatcattttatatttccctacaaaattgagattttaaaaaagtgggagcaaggaagggaggaa

SEQ ID NO: 612073 - DNA, 575 bp, Homo sapiens
atctagaggtcttttgtagagaaccttatggttttctagttataaaatcatatcttcagcaaacagagctaacttcacttcctcttttcaaatttggataccttttacttcttttgcctgattgctctagctgggacttccagtactaagttgaatagaagtagacaggcacccagaatggtgccatgctgcagttgtccagtgctaggaagccagtcggactttacatgagttagagcagtgtctctctgtgatctccaggcagcttcctatgccaagtagaggcctgtgagggttgaggggctctcttgtagctggattgtaaaggtctgtggcagaaatgtggagccctggaggtctttcacttatcccttccctgggctagggagcagctccaggccccagcaatcctgactgagcaaccctgcttccccctccttcacgctttgtattttttattgcctctctgttgaatcccagtgttctctctcagatgagctattcaaagtctttcayttatcccttccctgggctagggagcagttccaggccccagcaaccctgactgagcaacc

SEQ ID NO: 612074 - DNA, 481 bp, Homo sapiens
gattagatttgatgaggttatgatggtgaagcccttatgatgagtataaaccagttattaaaagaagaagagacaggagatttgtttttctgtgtgcacatagcaaggaaatgccgtgagaagatataaccaagaatctaggcctcaccaataacctgaccacactggaaacctaatctccagcctcactttctgcattcagagttataacaaataagtgtttgttttgtaagctacccagtcttatagtagcctgaactaagacacctggttactacatcagcccctagaaatccttgccacctgctattttgtccctttatgaatcattctagatcttgctttgagggcaatctttccatagtacaactggattatctgtttcttaggtgtygagtcaaattattgagtacttactatgtataagccttgatgccttgctcttttcctatataaattaatttattcatcacaacacagc

SEQ ID NO: 612075 - DNA, 572 bp, Homo sapiens
taccactctacgtctttgagaaactatctcattttccttcagtttgagtaatcttcatatctgttacccagaactaccagccttcaacaccttctattttaggaaaaatttctaactaattttcttgatgagtttaggggatacatagcgtaatcgtagtctaagggggcaaaatcaactcttacaggtgwtttgctgtggcctaggccatgtcttgaaaattagataatttcacatcaaaatctagatagtaggatgttcttcaaacataaagaggtgattaatcatgactaaggataagtgaatccataatttaaaaaccactatgttgactaaaaaaaactcaataggaaaacttccacattaaagagttaatctattacttgacaaatatgagtttttcctcatatttagtgaatatttgatgattatgactgcatgaaatatgttttcataaggtaagtgaatttcaatttcttgaaaacctccctgtatcagtctctttttaggtagttttgatagaattaaaatattaatatagcccctgactgcagagatgaagacgtggtata

SEQ ID NO: 612076 - DNA, 594 bp, Homo sapiens
tctgtcaggttctgtttaagtgggtctcggggaatcaattgagaaaattagaaacgagctctacttgacacccagtgtccaattcttcagtccagctataactggccctggctgcccttctccttgatttcctaaaaamctcttgtgatttttttctatcctgaatgttctttcatcttatcatcctcttgtgattggagaatcggataaagctgagattttaggatatgtataatctttgtcatggtctggtcttagatattgggaaggtgatattttggagtactaatttttctagctagaaataggtgctacatgcagcaagaactcaagaatttgcaatttgcaagatttagatcaggtcactaaatgagaaaaaatataagattaccttgagtacaggcacctccaaattaaagataaaatccctctgaatcttatggactatggttgaaatgtgacagcagtgcttacttgagaggaaatgttataatgtgtaaggaagtataatctgcaccaacattagtgaagtctaatatctttgatttaggtgtggtatggaacactgaggctagcagacatcataaacatgta

SEQ ID NO: 612077 - DNA, 608 bp, Homo sapiens
gagtacaggcacctccaaattaaagataaaatccctctgaatcttatggactatggttgaaatgtgacagcagtgcttacttgagaggaaatgttataatgtgtaaggaagtataatctgcaccracattagtgaagtctaatatctttgatttaggtgtggtatggaacactgaggctagcagacatcataaacatgtaaattttatccttaacatattttaacctgtaaatataactagtctcttctctactttttatcactgacctcctgtataggaagggtgtgaggagaagcccctgacgtcttaagtgtttcagccagaaaagaactggctatcttcaaaatacctacatttatatggcgcatggtcctggactgtgtaatgttaactggaaaaaggctggaaaatattttctcagaacctcataccctgtaagattctaagttctaactgaccaaaagaggaattgggagatatttgaaaggtgaaaaggaaacaaaaagccattgtctcagaaggtcataatattcaaacatagtgacacacctagagttgccagagggtctcagttagtccttggtctgctctgtttcccttctcaact

SEQ ID NO: 612078 - DNA, 585 bp, Homo sapiens
tctgctttggaaaagggctgtcattgtctttgttttaaactataaactaagtttctcccaaagttagttcagcctatacccaggaataaacaaggacagcttggaggttagaagcaagatggagtcagttaagttagatctctttctctgtctcagtcataattttgcaaaggtggtttcaaaagtagatgaaaattcctgataaattggatttaagtttaggggaaagagaagtcaaggttgacgactaggtttttagtccaagcaacctagtgaaggtggtacctctactaaaacggggaagaggggccagaagagctttttgagaaacaawcttttggtcatattaatattgagaactctatataaatcgaattatcacttaaactgtggtgactctggtactagagctcaggagagaaattagtgttgaaatacaaaattttggattcaaaagcacactgagtatatctaaagctaatctgtaatccctaatattatatgctggtggttgtattccttatcctagcactattgatttaataatgcaataagatagttatccattttcttcctctggataaa

SEQ ID NO: 612079 - DNA, 563 bp, Homo sapiens
ggctaggctggtctcgaactcctgacctcatgatccagctgctttggcctcccaaagtgctgggattacaggtgtgagccaccacatcttgccaaaacctattttttatatacttagaattttgctttaattttgagaatcttttctgtattatactaacaagttttatattttatatttcatttcaaaagcaaaactactgttgaattccctgcactgatcatataatagttgcttctttgtgaaacaaattcagattatgcaatggagtatacagtgaagatagtgagattaattttactctggatctatggtgtcatttccttggcaattgcaaaatttctcaatgccaaatttataaagatgttaatttgtccaagcattgaaacataaatatattgttaataaacatccacatttattaaaattattttccatatgcaaacatttatttctatcattctggaaaattaagatataaactatcgggaaacatactgaaaaaagtaattgaaaaataaatggttwcctataaaatatgttcatgttgaaaatcaaaatca

SEQ ID NO: 612080 - DNA, 594 bp, Homo sapiens
aatttttggtttcaaaagcaatacagaaggtaaggctatgtcttcatatagtgagcagttggaactcagactactttgcagagcttgaacatttaaagagtaacttcattgatttggacatttaaaggataccactattgttgaataagtaggttagaaaaaaaaatcaatattgtgacatctggtaaacaacaaatttgtttatctttgattaaccttgatgtgaagataaaaataatctttcctgagaattaataaatatttatatgaccttacatgagtttgaacatgtaagtcttacatgattcaaaaacactcaaaccagaaaacataacatacaaagttggctggggtggggttaaaagtgatagaaacagtactaagtgttctacagggtcaatattcacttcaaattagagamgattctagtgtctttagagataaatttacactgaatgtgcactataacctaaagtaacaaaacacttgtgcaaacaatctggcatgagcaagattttacaaacacaaaaaaataagaattttatgtaatgaaatcattagaaaacagattttaaaatggtgaataagatgatt

SEQ ID NO: 612081 - DNA, 476 bp, Homo sapiens
cctagagtggccattttggagacctccctctaggaatgcattctctttctcagggctgttccttgctgagaaaaagaattcagtgatatttctcctattcacttttgtaagaagagaaatatgactctgttctatccggcccctcgggcagtcaggcctaatggttatctcacttgttccctgaaaatcacagccatcctgttccttttggatgcccagatttcatattgttcaaacacacatactctacaatttgtgcagataacacaatcatcacagggtcctgaggctacatacatcctcagcttacraagatgatgggattaagatattaaagtagagaaaggcataggaaattataagagtattgattggggaagtgataaatgtccatgaaatcttcacaatttatgttcagagattgcagtaaagacaggcataagaaattataaaagtattaatttggagaactaaca

SEQ ID NO: 612082 - DNA, 500 bp, Homo sapiens
ggcttcagaaatccctccctgagaccctctgcagaagactgcccatagctacctgttccaagaacaaattggcactttagaatcctgtctgctttttsaccaagagaatcgctgattttggcttcatatcctctgagctaccaaagacggccagttgcccaactaatctgcaattggctccaggttgtaagtagagctcctctgggcacctacctctgcaactgaggaaccatggccttccagaacatcaaggaccatctgtaatttatgaagagacatttggaacaggaaggagctggatgtatctgcaaaacctacagaattcctgcagaacccaaccctctgaagaaaattcacctcactccagaccttcattcacaggtccaatggtggttgcagcagccttggcaggacttcaagcagaagctaactgctcagtttgtctggattacttgagataccctgtcaccatcaaatatggacagaatttctgttatttc

SEQ ID NO: 612083 - DNA, 515 bp, Homo sapiens
acagttttgctatatatccatgtttcagtctgagaattgtgcagctaggtagatttttgttttctaggaaataatactctttctcatgatgtgtatgacggacatctctgttaattattctgaagatctctgggctctgctgaaacccgcactatttctacagctgtatgggataatcccaaccaaaggtaaataaaaccctaattttaaaaatacattgtacatcaggtatgtcacattataaaactcagattaatcaactagtaaatattccaaccatcttttgtaatctctgccataaccagggatagtggccctttagatcctaaacataatttcattagagatgctttaaacaggcagagaggaataaagacccatcattgaggctggatgtgtatcaattttrcgtcacagggatatggtcatcctagctatggcaaccaaggtaattattttctccttttgaaactgtaggcttttctaaaagaaatattcctttccataatcaaaca

SEQ ID NO: 612084 - DNA, 578 bp, Homo sapiens
  misc_feature 536: n = A,T,C or G
ctttgaaaataagatgataaaaaataggttctgaatttccaagcttttgcagaagtccttttttgtataaagttttcattttttctttcatctttattgtttacagaattccggcatcataagctatcatatgagaagcaagatttcagaaccttttttaaacacaagtgcttgagattgtttgaacaatgtgtgtcaagacagactactaacacagaaacacctcactgaaagaaacaacaaaaataacaacaaagaggtaaataaaaagaaggacagaagcaaccataaaacacagaattatgctacaacatttttaggtgaacattataagtacacaaaagttgttaataatagcttgcttctatttacaaatactttaacactgattgacttacaagtktccactaacgttgttaacagcacaataggtttcaacgcttatctctttaagttttgttagcagtataatgtcaagtatagcagtcccagcccaaatcaattgcaaaaaaaaaaaaaaaaaaaaaaaaaaagcncaattttctaactggatatgtttttcagtcactctaatccat

SEQ ID NO: 612085 - DNA, 187 bp, Homo sapiens
gcaaaacctacagaattcctgcagaacccaaccctctgaagaaaattcacctcactccagaccttcattcacaggtccaatggtggttgcagcagccttggcaggacttcaagcagaagctaactgctcartttgtctggattacttgagataccctgtcaccatcaaatatggacagaatttctgt

SEQ ID NO: 612086 - DNA, 557 bp, Homo sapiens
gaaaaaaaaatgtttgttttttttttaaatgagaaagtaaaagaaagtttataggcctcacaggtgaaggtaaatagccccattttattcatggcctagtattatctctttggtcacagggttacagttggttaatgtccacatggaaagcaaaagacattctgtatcaatactattgcttctttttaaaaataaggattctgtattataaaattgactattgtttgcctttttgtacaggtttttctgttcagctttttctattttctacatgctaaaggataaaatttaatgtggttcacaattcaaaagaaaatgatttttaaggtgagataaatgtgtattgtgatagtagcatttataattcayctgtacaaataattactaatctaaatatgtagttcattttaatgtacttcaaaagtatgtctattgtttttgctaagatacattaaccatcttggatttgtaatgttgcataaaggctgttagttactatcaaaaaaatcagaatagaaccaaaaccacatttctgatgtctcagctttcattctatt

SEQ ID NO: 612087 - DNA, 618 bp, Homo sapiens
agttaattttaattcaaagtgaatcagagtcatgggaatacataaatttattagaaataccatacattagacacatataatgatatggtttggccgcatctccaccaaagtctcatcttgaattcttacatgttgtgggaggaacctggtaggaggtaattgaatcatgggagcagttttttctcatgctgttctcataatggtgggtgagactcgtgagakctgatggttttatatgggggagtttccctgcacaagctctctcactcttttaacctgctgccatccatgtaagacaggacttgttcctccttgccttctgctatgattctgaggcctgcccagacacacagaagtgtaagtccattaaacctctttctcttcctagtctcgggtgtgtctttatcagcaatatgaaaatggactaatacttaaattagtactagcagagtggggcattgttgaaaaaattcctgaaaatgtgaaagcaactttggatctgggtaacaggcagatgttggaacagtttggaggactcagaagaagacaggaaaatgtgataatgtttggaacttcctagagacttgttgaatagctttgaacaaaatgctgatagtg

SEQ ID NO: 612088 - DNA, 549 bp, Homo sapiens
gacattttccaaaagaagacatacaaatggccaacaagtatatataaaaatactcartatcactaatcatcaggtaaaggaaaatcaatagaatgactattatcaaaaagataaaaaataacaaatgctggtgaggatgtggagaaagaaacattcctacattgttggtggaaatgtaaagtagtaaaatcattatagaaaacagcatggtgttccctacaaaaactaaaaatagagcaattgtatgatctagtaatcccactgctgggtatatattcaaaggaaaggaaatcaatatatcaaagagacatcagcactcccatgtttattgcagcattattcacaattgccaagatatgaatcaaactaagtgtccatcaatagattaattggtagaaaatgtgatatagatacacaatagaacattactcaaacataaactaggaatgaaatcctatcatttgcagcaacatgggtggaaatggaggccattacgttaagtcaaatatgccaggcacagaaaaacaattattgcatagtctcactctt

SEQ ID NO: 612089 - DNA, 549 bp, Homo sapiens
gacattttccaaaagaagacatacaaatggccaacaagtatatataaaaatactcaatatcactaatcatcaggtaaaggaaaatcaatagaatgactattatcaaaaagataaaaaataacaaatgctggtgaggatgtggagaaagaaacattcctacattgttggtggaaatgtaaagtagtaaaatcattatagaaaacagcatggtgttccctacaaaaactaaaaatagagcaattgtatgatctagtaatcccactgctgggtatatattcaaaggaaaggaaatcaatatatcaaagagacatcagcactcccatgtttattgcagcattattcacaattgccaagatatgaatcaaactaagtgtccatcaatagattaattggtagaaaatgtgatatagatacacaatagaacattactcaaacataaactaggaatgaaatcctatcatttgcagcaacatgggtggaaatggaggccattacrttaagtcaaatatgccaggcacagaaaaacaattattgcatagtctcactctt

SEQ ID NO: 612090 - DNA, 533 bp, Homo sapiens
ctccatagaacatattttggctagttttagggacctttaagcccttcctaggacctggcaaaatccttcctgtcctgtcttttctcgtcactggggagaacactgcagggaatgttgatacagggtcatgtgcatgccacgatcctccaaaacagattccccaccaccccaaccccaattagcaagactggacagaatcactctgctaagattccacctttcatattttgatcaggtggttgaagagtagcacttttgctgaatagctytagtgtatggccaccagaaaaaaaaaaaaaggttataacaccttgaattattcacatccaatacagatattattctggcaaaaaatttagtacatcggaaagtatagaaaattataatctcctcatcacatgattcggaggacagcctagtcattggaaacttattcctggccagtttttttttttttttttttttttttgtctgaaaagatagagctattttcttttcatgaggctgcagtttgtgattaccaatgaagtaga

SEQ ID NO: 612091 - DNA, 339 bp, Homo sapiens
aatgttacaccacaatattaaatggaattaccttctagggtatgaagtgagaaataaattatttggggaaatctaatcaatgatgctataaaaattaattgcaaaagactgggctcatttaacttttgttctataaaaatagtyaatgaagaaaaatatggttaatgctagtgcagaatgagtatgtcaataattgtcaggcaataagtaatactgagtttcaaagatctaaaagaaagaggcttgggtttacttttatgggcaattgtaaatgtggaatcattttacatgatgataacttaaattaatatttttgctatacttcttttgtattttttc

SEQ ID NO: 612092 - DNA, 339 bp, Homo sapiens
aatgttacaccacaatattaaatggaattaccttctagggtatgaagtgagaaataaattatttggggaaatctaatcaatgatgctataaaaattaattgcaaaagactgggctcatttaacttttgttctataaaaatagtcaatgaagaaaaatatggttaatgctagtgcagaatgagtatgtcaataattgtcaggcaataagtaatactgagtttcaaagatctaaaagaaagaggcttgggtttacttttatgggcaattgtaaatgtggaatcattttacatgatgataacytaaattaatatttttgctatacttcttttgtattttttc

SEQ ID NO: 612093 - DNA, 449 bp, Homo sapiens
attcgtgaagtcatatttgatcttattatttaaactattgtcatgttctagggtatcatctttataccaactaagttgaaataaacacaatttataaagcaatagttaaaaatacatttctcatgcatatgttttgttttattcttagctgttatggggtagttctatgtttaaaagtaatttgtagtatcatatgctcaattttcttagattattcaaaagtttcttggcaacarcattcttaaaataaacaaatagattaatacgtaaacataagtgtttaggtaacatacgtagaagagcttgcccactggaatataaataagaccgtcaacaactgacattatttcatccaaagaacaaagggaaaccatgaagttgtctgagtttacaagaaaaacatgtttgcttgtttttatgtctctctccctgcagaggacagaacaaag

SEQ ID NO: 612094 - DNA, 559 bp, Homo sapiens
gaacaaccataggtaatcagtaagtgttattagagggaatgaatagcagaaatacatctccctcagtacagccgccaaggcaagctggccagggagggacacgtggaagctgtgctggagggcagcaatgtggcagggcagggatccacagatctcaggtgtcattactttgagaagcttgtctcacttggaagcagcctgtgagactttgatggtaggcattaattcctagcaactgaccactacttagaatgttagttttttcttttctaactaagcataatcattgtgytcctttgatttatagctccatctccaaaagaaataattgcacatacttatcaactagttagctatgacacaggaatcctcagagattcatcattacccaagatttctgtcatttcagatgaattttccaccatgttggatgccagggacaggcaacaggttcaataagtattcatttactcaacaaatgtttaattgagcaactactatagatcagacacaatgttaggtgtaggcatttatgatgcaaaggtaggcaagacaagtt

SEQ ID NO: 612095 - DNA, 417 bp, Homo sapiens
ttttctttataaattacccagtctgaggtatgtctttatcagcagtgtgataatggactaatataagtacataactactgtaatttatgtttagaatttccttccacttatacatttagtaatacattctacagattttttgttgcttgtttttaactttctttttttggtagatacatatatttatggggtacatgtgatgttttgatacagactggcaatgtgcaataattatatcatggaaaataggatatccatctccttacacatttattctttgtatttmaaacaatccaattacattcctttagttatttttaaatgtacaattaaattgctactgaccatagtcaccctgttgtgttatcaaatattcatagtttttatttattctttctatttttttatgcccattaa

SEQ ID NO: 612096 - DNA, 563 bp, Homo sapiens
cttttacacagcaaaggaaataataaagttaagagaaaatctacagaatgggaaaaattatttgcaaactatctaccctacaaaagattaataatcagaatatataaagaactcaaacagctcaatagcaaaaaagaaataatctgattaaaaaatgagaaaaagatctgaatagatatttctcaaaataaggcataaatggccaattgatacatttttaaagatgctcaacatcactaatcatcagggagatgcaaatcaataccacaatgtaataccatctcaactcagttacggcttttatccaaaagrcaaaaaataatggatgctggcaagcaaatagtgaaagggcaattcctgtacactgttattgagaatataaattaaccactgtggaaaacagtatagaggttcctcaaaaaactaaaaatagaactaccatatgatctaacaatccactactggatgtatatccaaaaggaggaaaacgaatatatcaaaagatttttgcactctcatgtttattgcagcactaattgcaatattcaaaatatgaaaatcaa

SEQ ID NO: 612097 - DNA, 654 bp, Homo sapiens
tccactgctctcttcagggtagacaggaaggaacgtttaagtctgctgaagctgcgcccacagccacgccttcccctgggtgctcagtcccagggagatgggagttttaactataagcccctgactagggctgctgyctttctctcagagactccttgcccagagaggatgaatctagaaaggcagtctggctacaggggctctggtgagctgcggtgggctccacccagtcctaacttccaggcggctttgtttacactgtgaggggaaaaccgcctactcaagcctcagtaatggcagatgtccttctccccaggaggctcgagtgtccaggtcgatttcagactgctgtgctggcagcgagaatttcaagccagtggatcttagcttgctgggctccatgagggtcagatctgctgagcaaggccacttggctccctggcgtcaaccccctttccaagggagtgaaaggttctgttttactggagttccaggcgccactggggtatgaaaaaaactcctgcagctatcttgatgtctgcccaaatggctgcccagttttgtgcttgaaacccaggcccttgtggtgtaggcacccaagggaatctcttggtctgcgatttgcaaagaccatagaaaaagcacagtaactgg

SEQ ID NO: 612098 - DNA, 654 bp, Homo sapiens
tccactgctctcttcagggtagacaggaaggaacgtttaagtctgctgaagctgcgcccacagccacgccttcccctgggtgctcagtcccagggagatgggagttttaactataagcccctgactagggctgctgtctttctctcagagactccttgcccagagaggatgaatctagaaaggcagtctggctacaggggctctggtgagctgcrgtgggctccacccagtcctaacttccaggcggctttgtttacactgtgaggggaaaaccgcctactcaagcctcagtaatggcagatgtccttctccccaggaggctcgagtgtccaggtcgatttcagactgctgtgctggcagcgagaatttcaagccagtggatcttagcttgctgggctccatgagggtcagatctgctgagcaaggccacttggctccctggcgtcaaccccctttccaagggagtgaaaggttctgttttactggagttccaggcgccactggggtatgaaaaaaactcctgcagctatcttgatgtctgcccaaatggctgcccagttttgtgcttgaaacccaggcccttgtggtgtaggcacccaagggaatctcttggtctgcgatttgcaaagaccatagaaaaagcacagtaactgg

SEQ ID NO: 612099 - DNA, 606 bp, Homo sapiens
ggactacaggcatgtgtcaccatgctcagctaatttcatttagcacattttaaaatctatggagtaaataaacttattaaaagaaaatagagtttaaaaaaatgagaagtctaagactggaacccttggtctcactagtctgtcaaggcctggaagaaaagtaagagccagcaaaggagactgatgtgaatggaatgtctagtaaagtaaaaccagaatagaaaccagaattaagtggagtaagtggtagcctaaaaattaagtgttaaaactgttttaatactagatggataaacaattttgctagtatatcggccactggattggcaatactgaaatatttttagctatgagaagagcaatttaagtagtgtggtaaagatgaaagctaaattggaacaggttaaaatgataattgtgactgtaagtaaacttaagattgaaaaactgtttattgctggttcttgagagaccccactccagtgacaagaaagggatatcttttttaaagggaaaaaaaacaaaggacaaagagagaaaataacagatgcaaattttagayacagaataaagttaaataagcagatctgtgaaaactgaaaagtc

SEQ ID NO: 612100 - DNA, 540 bp, Homo sapiens
caacactggggatgcagcagtaagcaaaacactgcttactggctcaaggggctcagtctggtggaggaaatcaccacttctcagggtgagctctttcacaggagttttcctctgtggaactgctggagtccttggcagttcttcattctttgggttttccgtccccagaacacctacgcaggtggctccagcaagggtagagtacaggggagagcagtgatcaggaaagtctcacactgcctcctccaacatttaggccccacccagccttgccagagtttcatcacctytagctcctttctctcattcttggctactacagataacccccagtatttcagacaaattagtacataatggaaccccaattatgcaccagggtgagagtctattcaaaaggagttccgggatccacgtgatctgaggaaagtggctgggtgctccaatatttctgctgcagtcagcaggttctgtgaatgttccatgacattacagatgggtgtgtcccaggctctcagggctccagtcagcctaacagtc

SEQ ID NO: 612101 - DNA, 470 bp, Homo sapiens
tgatccaccatgcagtgtttcacctaccctgtaataacaccttaatttcctgaagatgatctggagatgctggatgacttcagagtttctttcttgtcatcagaaataaaatcaatagtaggtatagtttttggtttaagagttctaattgtgttctggtgctttgaatatatttgcaactcatatttaatatttatagtaattttacataagtgaattagmagttttagagcatgttagcaaggcacatctgtgttcagttatcagcttccccactactggaaagttatttaaacattctcaagttcattctcccaccaacaaaggtcacccactatttatatagccgtgacgatatgtcaaactaaccagaaataagtgtatgaacttcatggtcttcagaataaaacacaacccacattataataacaatgaaattgccctaccgtaattgtgataatgataaagaa

SEQ ID NO: 612102 - DNA, 450 bp, Homo sapiens
cctcccaccgcagcctcctgagtagctgggaccacaggcgcatgctacaatgcccagctaatttttaaattctttgtagagatgggggtcttgctgtgttgcccaggctggtctctttacattctgggcggctcaagcaatcctcctgccttggcctgggaggcctgggagtctgggcgtagtcattcacatgaaccatggagcctggcacattcttttttttttttttttttttttttttgagacaatttcacatcatcacccaggctggagtgcagtggtgcgatcttggttcactgatsgcaacctctctctcctgggctcaagtgactcccacctcagcctcccaagtagctggagttaaggcacgcaccaccacacctggctaatttttgttatttttttgtagagacgggggttttgccatgttgcccaggctggtcttgaatt

SEQ ID NO: 612103 - DNA, 560 bp, Homo sapiens
gcccaggctggagtgcagtggcccaatctcagttcactgcaaccttcacaagcgattctcctgcctcaacctcccaagtagctgggattacaggtgcctgccaccacacctgactaatttttgtatttttagtagagatgaggtttcaccattttggctaggctggtcttgatctcctgacctcgtgatctgaccwattcagcttcccaaagtgctgagattacaggagtgagccaccgcaccagcctgtttttcttaatactctctaaaatacacatatttggttttgaataattaacagagtttcatatgatttctactgtttacatttctctacaaatcaaagttaggaaattttccaagtgagccaaattcttcttcttcaattaaatgtcctaaaaaatatagctggctccaaatgaatataactatattttcatgtttatatttatatttttacatgtaatccttcttaatttacccagaagacatcaacacactgcaatcaaatagtataacttatttaaacctgaacatcttagagtcctcagtgtaataat

SEQ ID NO: 612104 - DNA, 585 bp, Homo sapiens
tcgtcttcttcttttttttttttttttagatgaagttttgctcttgttgcccaggctggagtgcaatggcaccatcttggctcaccgcaacctccacctcctgggtccaagcaattcttctgcctcagcctctcgagtagctgggattacaggcatacaccaccatgcctggctatttgtttgtatttttagtagagacagggtttttccatgttggtcaggctggtctcgaactcccaacctcaggtgatcctcctgcctctgcctcccaaagtgctggtattacaggcatgagccaccaagcctggccggggtataatattcttaaagagatttgaagaagaaaatggtcaatagctaaaaaagaaagtagcatcaaaggagacttttgtaaaactacgggatttttaaaaggtttttaagcaggacaaattcaatacatagaaataaattgacaatgcagttgtaaaatgkgcagtaggtaggctttatttaccaaggggaagaatttgccttggcctggagaagggtcaattcttcttaagtaaggagtttaaggagtttgaaaaaatgagagaataaata

SEQ ID NO: 612105 - DNA, 500 bp, Homo sapiens
aggccccttggtaaaactctatctcaatatcacctcttagcctatgcagacggtttggaaagaccacttacacaatttcagtaaaacatcttgtcagatttttatctgaactttatttgtccccatcttgattgctaattaatgattttaagatattcaattaacctattttgtccgtaactcaagttaacctataaatgtaaaaaccttttgaggtggcattaaccattttatctgcaccyccaccccatcaccatatttggttaactgacaaattcactgattataatcaagtataggtaacacactattcatgaaaagtaatggtgctggagctaatttttggctctcgcttttttacttttgatggtacctctatttcttcctttactttcctttctcaacttcatttcttcctgctttcataaatcagataaactttgttattcccatgaatatttaactgtaaattctataaatttaggcatgctttttgttac

SEQ ID NO: 612106 - DNA, 599 bp, Homo sapiens
agatactgagtcagagtggggaaaagtatctttaatttttctcctttcctctagtaagaaggcctcaccagagatgtctaaagatgatctctgtccaaggccttagacaaagagacctaggaatatgacccctgggctaggaatgtaaatttgtggaaaagcatgacttgagatcttagtcctaaactgcaactctcttcgggactgcaatgcgctagctgagcatcaagtcaggagtgggaagggaagcaatcttcccacgaagtctgccaggtgaaatctttgtaattacctatggatgggcctggaaaatcacacatccatgtttaagcaggagctgtacccagtcagaccacaattttatccctgacattgttaggttttctggtctagtacagtgcatagatgtgaatgtacacacaaactcatatgcacacacatgtatctaaacaagcatccattcatcaacattctatgatgaatatcagtggcaggaaatgccatttttatgcttactcatttatatactctaatgttatctactggacaaatatcattmagtaatattaaactaataaaaggagagatgtgaaataaaa

SEQ ID NO: 612107 - DNA, 636 bp, Homo sapiens
tgagtgtaaaattaaaatatcttttgtcagaaactgtcagaatttgttctcttgctctctgcctcagcccagaccctgaggtaaggacaattaggaagataatctattgagaatgtgaccaagagcttacatgaagagtaaaaattgatttttcaagtgagatggagttggagcattttccaaacagaggaagtagtactgtcaaagagagtgtaaaataaggtaactcccaaagagtgaaagaaggccagtactactagaattgggaaaaagaatcattttatgaaatgaaaggacaaccatgggtcatcattaagactatggctacatactaagggccataagcttgactgaatatattttagcaacatagttagacttacattttgtagttgtcatttcatttgtatattaagaatgggtcagcgagaggcaagaaagtagattgttaaacacattagtgttcctaaccaatcccagttccaattcctacacaattggagtcacatgcctgagaaatgatgtggggtaaagagawgcggatagagttatgaagagatgttaaagatgagcattagagaggcacggcagtagattggctaagaagagaaaggacaaagcgggtaaaaactaaaa

SEQ ID NO: 612108 - DNA, 604 bp, Homo sapiens
aatatcaccagggcatgtcagagaccttcatggcatctcctcccatctcaggctcaaaggcccaggaggaaaaaatggtttcatggtccaggcccagggcctcactgctgctctgtgcagccttgggacttggcaccctgcattccagccatggctaaagggggccaacgtacagctcaggccattgcttcatagggtgcaagccccagttgttggtggtttccatgtggtgttaggcctgcaggttcacagaagtaaagaattgaggtttgggaacctccatctgatttcagaggatgtatggaatctcctgggtgttgaagcagtagtttgctgcagggttggagccctcatggagaacctctgctagggaagtatggaagaaaaatgtaggttagagcccccacatagagccccamtgggacactgcctagtggaactgtgagaagagggccattgtcccccagaccccagaacggtagacccactgacagcttgcaccacgcacctggaaaagctgcagacactcaaccccagcctgggaaatcaatcggtggtggggctgtaccctgcaaagccacaggagtgaagctgcccaagacca

SEQ ID NO: 612109 - DNA, 454 bp, Homo sapiens
cattctcctgcctcagcctcccaagtagctgggactacaggagcctgccaccacgcccggctaattttttgtatttttagtagagatagggtttcactgtattagccaggatggtctccatctcctgacctcatgatccgcccgccttggcctcccaaagtgctgggattacaggcgtgagccaccgcgccyggcctaggggaagatttttgtcatcagctattgtctcagctttctttgcagagatttaaatataacagtcttttcagtggagtgataaatctgtctttaagtactaggcagatccaggatggtacaaaattaacatcaaaggacctttgtaaaatgatgccttttgatgatcttgtgacaagggtcaggagatgcggagaagggaaagggaattggtctggcaggctgaggaatgtgctccacatgcaagtgaaaaagcgag

SEQ ID NO: 612110 - DNA, 613 bp, Homo sapiens
ttgcaatgcatgtttctagaggccagttcaagaagtggctgtggggaacaggaaaaggagtaacaggcttatatgtcaartgattgcaaagaaagcagcttttacctaattccagattgccccaggaacctagaaaagtccttgttttccccaaatgcaagaagaaataacttagcgggcctggtgtcaaaaaggttggctcaaagaagtcaaaattatgttaatctgtctcaggttgacactacaattccactgtgtgtgtctctatctactggcctggtgtagacaggttatatcccatgcttctctacaatacagtcaaagtctcagttaaagctgtgtaatgtgttgatgattcatcatagatgaggcaccccagaaaaaaataaggagtgggaccatggtcaagagaagagtaacctcttgatctggtggtcagtcatagaaatgatgaccaggacaaagtgatgggagctatttgtttgaaatgtgatccagttttcattcaattcagactgcccttgtaccaatcagcataaaaagacatacaaaggctcttctgcaaaataagatacaccacttatcttaattcacaagaacagcataataatta

SEQ ID NO: 612111 - DNA, 613 bp, Homo sapiens
ttgcaatgcatgtttctagaggccagttcaagaagtggctgtggggaacaggaaaaggagtaacaggcttatatgtcaaatgattgcaaagaaagcagcttttacctaattccagattgccccaggaacctagaaaagtccttgttttccccaaatgcaagaagaaataacttagcgggcctsgtgtcaaaaaggttggctcaaagaagtcaaaattatgttaatctgtctcaggttgacactacaattccactgtgtgtgtctctatctactggcctggtgtagacaggttatatcccatgcttctctacaatacagtcaaagtctcagttaaagctgtgtaatgtgttgatgattcatcatagatgaggcaccccagaaaaaaataaggagtgggaccatggtcaagagaagagtaacctcttgatctggtggtcagtcatagaaatgatgaccaggacaaagtgatgggagctatttgtttgaaatgtgatccagttttcattcaattcagactgcccttgtaccaatcagcataaaaagacatacaaaggctcttctgcaaaataagatacaccacttatcttaattcacaagaacagcataataatta

SEQ ID NO: 612112 - DNA, 653 bp, Homo sapiens
ctgtatccttcttataggaaagaaacaaaactgaatttaaaaaccttcaccctcaaaatttatatccagcaaaaagtattattcatgaatgactgtgaaataatcacatttttcagataaaagaaaactaaaacaatgtatacccagagaactctatggttcttcaagttgaaaggaaatcatagtagatggaacctcagaaagcaatgatgagtatcagaaaaggtaaatatgttgataaatataaaagactggtttttgtttttaaattctttaaaatatttcagattatttataacaaaacttattatcttatatggaatgtaaggtattaaatgcaatacatatgacaagtttacataatgaaaggagggcacacctatcttatagcaagtttamaataaatttcatgtgatatggtacaatattaatttcaagtagactgtgaaagccaaggatgtataaagcaatctatagagaaaccactaaggagtaatgcaaagaggtatagccaaaacacaacaaataaattaaaataaacctctacaaatattcaaaagttcctgatggaagtatgaagagagatacggaggaacaaaatctgaggggacaaacaatacaaataataagatgttagagctaaatccaaccct

SEQ ID NO: 612113 - DNA, 540 bp, Homo sapiens
tccttaaaagtccttaaaaatggtctttaaattgataggggagcgtctgggtttgttgttgtcttaaaatagcctctacatacagcttctgtaagtagaaaaaaggccatcttatctgtgccactgtgcagtgagtaaacaacaacaaactgttcttggcaaacatctcctacgtaagatgcttccttcttccaggtcttaaaaggaacacatgagatgaggaaccccaagaaaattatgcctttagcttttgctttttttaatggtcttgttctgtccttcaggctggagtgtagtgrcacaatcatagctcgtcgtagccttgacctcctggtctcaagtgatcctcccacctcagcctccttcctgaatagctagacaggcacacgccaccatacctgcctaattttaaaaattattgtgtagaaatgaggtcttgctatgttgcccaggctagtgttgaactcctggtctaaagggatcttcctgcctcagcctcccaaagtgctgggattacaggcatgaaccatggtgccccac

SEQ ID NO: 612114 - DNA, 612 bp, Homo sapiens
aggcggagggctgtggccatacacacacgatgatcccatccgcagcccgccgggatggtcctgakctcacagcaacacccgtcgggtacacaaaggggaggagaaaatcagaccgtgaggcctaggaggaaccaactcaaacctggctggtcgtgggcaaaatgtggccctctggcccactctcctctgctgcctgtttctccatagaaaactaagctgggacgaaagcacaccctgtcctttcctaacgtcggtagatggattcctgccgccgtgccagaaaggagtttttcctccgcagactgcaggagcaagagaacctgcgggactcggtctcccttcactcgaaatttgcccgactctcggcatagtgtgcacacaccccagcacgcgcgcgcgcgcacacacacacacacacacacaggcacgcacacacgcaggtgcacaccaggaagtggagaaatcgtccaacgcagaggtagagaggacttcgaaatgggcaacgaagtagggcacttcctttgaaattaccgtgaagcccacagctacctttgtctctgttctgccactccgcaaaattgctcatcacttgccggagacagagcggcaggg

SEQ ID NO: 612115 - DNA, 612 bp, Homo sapiens
aggcggagggctgtggccatacacacacgatgatcccatccgcagcccgccgggatggtcctgagctcacagcaacacccgtcgggtacacaaaggggaggagaaaatcagaccgtgaggcctaggaggaaccaactcaaacctggctggtcgtgggcaaaatgtggccctctggcccactctcctctgctgcctgtttctccatagaaaactaagctgggacgaaagcacaccctgtcctttcctaacgtcggtagatggattcctgccgccgtgccagaaaggagtttttcctccgcagactgcaggagcaagagaacctgcgggactcggtctcccttcactcgaaatttgcccgactctcggcatrgtgtgcacacaccccagcacgcgcgcgcgcgcacacacacacacacacacacaggcacgcacacacgcaggtgcacaccaggaagtggagaaatcgtccaacgcagaggtagagaggacttcgaaatgggcaacgaagtagggcacttcctttgaaattaccgtgaagcccacagctacctttgtctctgttctgccactccgcaaaattgctcatcacttgccggagacagagcggcaggg

SEQ ID NO: 612116 - DNA, 612 bp, Homo sapiens
aggcggagggctgtggccatacacacacgatgatcccatccgcagcccgccgggatggtcctgagctcacagcaacacccgtcgggtacacaaaggggaggagaaaatcagaccgtgaggcctaggaggaaccaactcaaacctggctggtcgtgggcaaaatgtggccctctggcccactctcctctgctgcctgtttctccatagaaaactaagctgggacgaaagcacaccctgtcctttcctaacgtcggtagatggattcctgccgccgtgccagaaaggagtttttcctccgcagactgcaggagcaagagaacctgcgggactcggtctcccttcactcgaaatttgcccgactctcggcatagtgtgcacacacccmagcacgcgcgcgcgcgcacacacacacacacacacacaggcacgcacacacgcaggtgcacaccaggaagtggagaaatcgtccaacgcagaggtagagaggacttcgaaatgggcaacgaagtagggcacttcctttgaaattaccgtgaagcccacagctacctttgtctctgttctgccactccgcaaaattgctcatcacttgccggagacagagcggcaggg

SEQ ID NO: 612117 - DNA, 612 bp, Homo sapiens
aggcggagggctgtggccatacacacacgatgatcccatccgcagcccgccgggatggtcctgagctcacagcaacacccgtcgggtacacaaaggggaggagaaaatcagaccgtgaggcctaggaggaaccaactcaaacctggctggtcgtgggcaaaatgtggccctctggcccactctcctctgctgcctgtttctccatagaaaactaagctgggacgaaagcacaccctgtcctttcctaacgtcggtagatggattcctgccgccgtgccagaaaggagtttttcctccgcagactgcaggagcaagagaacctgcgggactcggtctcccttcactcgaaatttgcccgactctcggcatagtgtgcacacaccccagcacgcgcgcgcgcgcacacacacacacayacacacaggcacgcacacacgcaggtgcacaccaggaagtggagaaatcgtccaacgcagaggtagagaggacttcgaaatgggcaacgaagtagggcacttcctttgaaattaccgtgaagcccacagctacctttgtctctgttctgccactccgcaaaattgctcatcacttgccggagacagagcggcaggg

SEQ ID NO: 612118 - DNA, 269 bp, Homo sapiens
aagggatattttcttgtccttaacttagcagatttttttgttgcatctaacatttaatcctccactcttccttgaaatatgtcaccatttgttctttygacgccgccttccttcatcttctgctccctctgtttctcctttatttctttcatcagcacctctttctcttcttatcctttgccagttggtattttccagggcttcatcttttgtgccttgcatttccttgtctgtgtggttttcctgattgattacatctcttgtttata

SEQ ID NO: 612119 - DNA, 434 bp, Homo sapiens
cttctagagctatctctttcattcctggcttccttgcatattctttkatagacctctgtaagagaacattcaaactcataactgatactgaaataacaatcaccaccaaaataagaaaaaaaaaaaagaaaaactttgctgtttattgaacattttccatatgctagacagtggtctaagtgtgtttcatacagttgccttatttaatcctcacaaacgcattatgagataggtacaattattatattaacacttaaagtcacgtagccttctcacagggcaaagaaagtttcaaactcaaatccaactgattccaaagattgttgcttcaaccactgagcaataaaggctctataacccctggaaccagcccttagtgtattcaccaagaagctacaaatgtaggcttcattattgtttttcctaggctggcc

SEQ ID NO: 612120 - DNA, 604 bp, Homo sapiens
ctcttctgtgtttcaagcaggtaagtgggttccctattgaagttctgtcaccctttgggaaaggaacatttgtgtgagtaataggtgagaaaaggaaaagtttagaggaagcatgatggacttgagagtctacctgaagaagccacccttctatcaacatccctactgaaaaggaaagcacacttctaggttgcctacaatgtgtgcacacatatgcacacataacacgcatgcactcattaatgaaagcttgtaagagagctgcaagggcaagaagtcagttttgytcacctccaacaggacagagatatcttgaatattaaatgatgtaagaccggtatcaagggccttccccccatactctgctgccgggatccttctcaagccaagtgcccccatgcaattcatcgagtgactggccccgactccagcctactccacgtgtcctgctgccccaaccctcccttctgccatcaatgctcctgccatcaatgcacaatgtgatccagagaaaggaggcacacatcccttctttataccgctctgaaccatgaactacatcttttaatcacggacacactgcatcacatggttgcttccttaa

SEQ ID NO: 612121 - DNA, 597 bp, Homo sapiens
ctgactaggggtactgcctagtcccaagccagattccagtatctggagcagtcacacaggaacatctgttggggaccctggagcagtgaatgaatacactaccctaaagtgctccaaragtcattgctgactctgctagcccaggtggttaacagctgaaaaaagagagaaaagaggagagaaaagagcatgcatgttctctctgctgtccttctctcccttcatcaactgccatgcatcccttggcactacactgcagccaaactgacatggaagttcctcctggctgggtgtggtggctcacaactggaatcccaacactttggaaggccgaggtgggcagatcacttgaggtcaggagttcgaaaccagcctggccaagatggtgaaaccccgtctctactaaaattacaacaattagccaggtgtggtgttgtgtgcctgtaatctcagctactgtggagggtgaggcaggagaatagctcgagcttgggaggtggaggttgcagtgagctgagatggcaccactgcactccagcctggatgacagagtgagactctgtctcaaaaaaaaaaaaaaaaaagttcctccttagg

SEQ ID NO: 612122 - DNA, 496 bp, Homo sapiens
caggtctgcctacttagaacactttgtctcttgagagattgatgtgggatattggcaaagatcccaaaataggccaaagagaggcaccatagcttagagatgaggaacatgaactcaagagtcagactctcagattccaaacctggttctattacttactggctgtgtgatcttgggcaaggtacataatcctctttgtgcctcagtttcctcatgcattaaatggagctaataatgagtaaagactaaatgaacttatttcagtaaagcacttggaacagtgccacctaaggatgtgtgattattgctgttcctcagtgmcaggacttctgcataaaccattgggaaagggggcatctcattactctggcaacacttaattgtggttgtaagcctggagaggtcagtgagagtgtgcctgaaaaagaaaaacagaaaaacagagtgcaccagagaaacacagagatgagggacgaaaagaaacaggaatagtgag

SEQ ID NO: 612123 - DNA, 496 bp, Homo sapiens
caggtctgcctacttagaacactttgtctcttgagagattgatgtgggatattggcaaagatcccaaaataggccaaagagaggcaccatagcttagagatgaggaacatgaactcaagagtcagactctcagattccaaacctggttctattacttactggctgtgtgatcttgggcaaggtacataatcctctttgtgcctcagtttcctcatgcattaaatggagctaataatgagtaaagactaaatgaacttatttcagtaaagcacttggaacagtgccacctaaggatgtgtgattattgctgttcctcagtgacaggacttctgcataaaccattgggaaagggggcatctcattactctggcaacrcttaattgtggttgtaagcctggagaggtcagtgagagtgtgcctgaaaaagaaaaacagaaaaacagagtgcaccagagaaacacagagatgagggacgaaaagaaacaggaatagtgag

SEQ ID NO: 612124 - DNA, 579 bp, Homo sapiens
taatatgaatcctcaacactgagcaactatcgattttcagttgcaccataggtcgtctttagsctttcagcgaaaacatgagaaaataatgaaaagataaagagaacaaaagccactatgttacaataatgagcatgataactaatgcttctaaagagttcaccaggtagcaaactcactgctttacatgtaatatgtcacttaatcttcatcactccatatatgatatgagatttttatttccattattctgaaggggaaaccacaactccagaaaaactcctgcagcaagcaagtgatggagttaagatttgcactcagccaatttgcttgaggtccatagcctatgccctcagacaataaactttatgtttaatcaaaatatagaatacatagagaaaagtgtgaagctcagtgaattttcacagagttaaaacactcatgtaaccaccacccataacaataaatcaaacattatcagcatcacataagcccacttgtagttccccatgtcaccaccctttccatcacccagaagtaatctctatcctttcttctaacatcataaattagtttact

SEQ ID NO: 612125 - DNA, 579 bp, Homo sapiens
taatatgaatcctcaacactgagcaactatcgattttcagttgcaccataggtcgtctttagcctttcagcgaaaacaygagaaaataatgaaaagataaagagaacaaaagccactatgttacaataatgagcatgataactaatgcttctaaagagttcaccaggtagcaaactcactgctttacatgtaatatgtcacttaatcttcatcactccatatatgatatgagatttttatttccattattctgaaggggaaaccacaactccagaaaaactcctgcagcaagcaagtgatggagttaagatttgcactcagccaatttgcttgaggtccatagcctatgccctcagacaataaactttatgtttaatcaaaatatagaatacatagagaaaagtgtgaagctcagtgaattttcacagagttaaaacactcatgtaaccaccacccataacaataaatcaaacattatcagcatcacataagcccacttgtagttccccatgtcaccaccctttccatcacccagaagtaatctctatcctttcttctaacatcataaattagtttact

SEQ ID NO: 612126 - DNA, 579 bp, Homo sapiens
taatatgaatcctcaacactgagcaactatcgattttcagttgcaccataggtcgtctttagcctttcagcgaaaacatgagaaaataatgaaaagataaagagaacaaaagccactatgttacaataatgagcatgataactaatgcttctaaagagttcaccaggtagcaaactcactgctttacatgtaatatgtcacttaatcttcatcactccatatatgatatgagatttttatttccattattctsaaggggaaaccacaactccagaaaaactcctgcagcaagcaagtgatggagttaagatttgcactcagccaatttgcttgaggtccatagcctatgccctcagacaataaactttatgtttaatcaaaatatagaatacatagagaaaagtgtgaagctcagtgaattttcacagagttaaaacactcatgtaaccaccacccataacaataaatcaaacattatcagcatcacataagcccacttgtagttccccatgtcaccaccctttccatcacccagaagtaatctctatcctttcttctaacatcataaattagtttact

SEQ ID NO: 612127 - DNA, 579 bp, Homo sapiens
taatatgaatcctcaacactgagcaactatcgattttcagttgcaccataggtcgtctttagcctttcagcgaaaacatgagaaaataatgaaaagataaagagaacaaaagccactatgttacaataatgagcatgataactaatgcttctaaagagttcaccaggtagcaaactcactgctttacatgtaatatgtcacttaatcttcatcactccatatatgatatgagatttttatttccattattctgaaggggaaaccacaactccagaaaaactcctgcagcaagcaagtgatggagttaagatttgcactcagccaatttgcttgaggtccatagcctatgccctcagacaataaactttaygtttaatcaaaatatagaatacatagagaaaagtgtgaagctcagtgaattttcacagagttaaaacactcatgtaaccaccacccataacaataaatcaaacattatcagcatcacataagcccacttgtagttccccatgtcaccaccctttccatcacccagaagtaatctctatcctttcttctaacatcataaattagtttact

SEQ ID NO: 612128 - DNA, 527 bp, Homo sapiens
catgctttactaaaatctcgtatacttcaattctatcaaaaatgaaaacaatggtaaatatcgatgaatcagtatgtgaatgtgtgtgtgaagctattttagttcctagtaatcactatttcatatcctaagtgccatctctttataaatctattctttttaaacatcctcttttgggaaatgctaatagcctagaaaagcatgataagttcatccctcccagtgaaagctgacaaggtgagagtataaacatcttaaagtaagagagttgggttctaggagctttctgtcaagatgccatagaaatactgatagcattgtgatttagaatgacccaaaggcaactatggagctgttgaaaaacagtcactggtagttagggggtccatgatttaattctagttcatgagccaataarctgtgtacaaatcagttttagaagtaaaacatactctattcttggtaacatcagaatttctagaatgcttcccctaatcaaattgggagaaataaatcctccactggaa

SEQ ID NO: 612129 - DNA, 619 bp, Homo sapiens
gaggtcttcttttcaaatattaaaattatgataaaatgcatttactctagaggtataatcagaaaattgaattatctccatctgaatgaataggtcttcaccatccataaatcccaagttaaatgccgctatctccaagaaacctttgatttcccctttcagaaaaacctgtctgtagtctcctggttttattttgtgttgyttttcatttttaaattatttttcctctcctccccttccttctactgccatctcttctcttgtcctcttttctcctctccctctctcttgccattctttttcatttctttcccttccatccattcattcatgaatcaatccatccatccaaccatccattatttttttttctggccatgccttacgcttggttgcatgaatgcttgctagcattacacactgccttaagtatattctctcattggccaagttcatttcaagtggccagcatatgtccaatttcctagcatatcttcagagtccagaatcctagaagtgatttcagaatctctctgtcctactcccagctgttgtcatatctgctctactgtatacttaaggtatagaatttctttttctttttttttttttttttgag

SEQ ID NO: 612130 - DNA, 631 bp, Homo sapiens
tctttgggagccttgttggtggaatgactcacaggattataattctatggaacacctctagggaaatgctagtaggaaccgccctgactttgcttactgcctagaatagggtcagtgcttaacaatgtgagttgaatgaataattaactatctgttattgctctggtaaatttccaggctaatgatgttggcttgtcttctttctcatcttcttgtaatcacattatctcattatctctctctgtatctctctctgtatgtatctctctctctctctctctctcacgcacacacacacacacacacacacacasagagagataaacctgtcacccttggatcctacagtgattctgatagacaggacccaaaagttttcaaatcatgtccatggaaatgtattacttaacagagatttagggactatgcaaattttatattttaatttttcttaaaagttttattttttaaattgttaaaaatataaaaacaagaataaacactcagatatcacatgccagaatttaggatactgaagaaagtatcagttgccagataaacttattttatgcaggcttcagggaaaaaaaaaatctcctctcatctttgtttcatctaaaaagatactgag

SEQ ID NO: 612131 - DNA, 623 bp, Homo sapiens
gattataattctatggaacacctctagggaaatgctagtaggaaccgccctgactttgcttactgcctagaatagggtcagtgcttaacaatgtgagttgaatgaataattaactatctgttattgctctggtaaatttccaggctaatgatgttggcttgtcttctttctcatcttcttgtaatcacattatctcattatctctctctgtatctctctctgtatgtatctctctctctctctctctctcacgcacacacacacacacacacacacacacagagagataaacctgtcacccttggatcctacagtgattctgayagacaggacccaaaagttttcaaatcatgtccatggaaatgtattacttaacagagatttagggactatgcaaattttatattttaatttttcttaaaagttttattttttaaattgttaaaaatataaaaacaagaataaacactcagatatcacatgccagaatttaggatactgaagaaagtatcagttgccagataaacttattttatgcaggcttcagggaaaaaaaaaatctcctctcatctttgtttcatctaaaaagatactgaggatgagtcaagatgccaacaacctca

SEQ ID NO: 612132 - DNA, 549 bp, Homo sapiens
gtttaaaaacactgtaacttgttttatagatgacactgctgcttaatctttgtattcccagcacccattgacaaatagcctgggcttcatgaacgctgcctgaacaaaaatggtagtaagacagagtatggagtgaagaatgggtcagagatagtattcaaaatattcagaatgaggttgttgaaagatacaaggagagacagaagacatgtccttttcctctcatctgcttacctgaaaaataaggagggcttgctcacaggtaggaatgctctctgtactccttccctgcaacatcatgcctggggtcttccaccaagaggaagtgctgtaagtagtgctacctaatgaactgattgttgccagaggtaagaggaatggaaggaaaaggctaagagccttgaatgtggatgtaaataatttaccaaagcgaggaggggcaggagtcactaaagawgtgttaaaatgcaacagtcccttcatgaaatattcaccactttaaacacgtctaatattaaagattaaaagtcctgggatttgtcctccaga

SEQ ID NO: 612133 - DNA, 375 bp, Homo sapiens
aggtaagaggaatggaaggaaaaggctaagagccttgaatgtggatgtaaataatttaccaaagcgaggaggggcaggagtcactaaagaagtgttaaaatgcaacagtcccttcatgaaatattcaccactttaaacacgtctaatattaaagattaaaagtcctgggatttgtcctccagactcccaggactgatttatgatctgcyacaagccacaggcctcatgattcataatgggagaggtaaaatggttacctctggcaaaggagcaggaagtcaggctggggtggatgaggaggggccaacaaggaggatccctcttgtttatggaaagggcaaaggctgaggtccctatctctcctgcagtgactct

SEQ ID NO: 612134 - DNA, 530 bp, Homo sapiens
ttccttccctttaattccaagctggccactgggttctggtatatgtttacatttagacaaaactatcacccctaactccttacatattagacatgtagagacacaaattacctccttttggggccttagtttctccttctgtaaaatggaaggttggagtagatcactcatcacttctgagcaccaagactctgctgtttgcattgcctttccaaatccctaacctctgctttctggatastgtttgttttagtttcagctgcaatcattcttagcagcagcctgggtgtctctagcaagatctccatcaatgccataggtattggctttattgactcctgtttcctattttgctggctcagctaaatctccactatttgcaaccaggcatttccttcttgacagatgaaaagcctctgacagccagagctgagggtaattaacctcttccctgggtgactcctttcttcaactctgcttctgcacacccagagcagcaaggccatcaaatgacagctctctagggatgc

SEQ ID NO: 612135 - DNA, 530 bp, Homo sapiens
ttccttccctttaattccaagctggccactgggttctggtatatgtttacatttagacaaaactatcacccctaactccttacatattagacatgtagagacacaaattacctccttttggggccttagtttctccttctgtaaaatggaaggttggagtagatcactcatcacttctgagcaccaagactctgctgtttgcattgcctttccaaatccctaacctctgctttctggatactgtttgttttagtttcagctgcaatcattcttagcagcagccygggtgtctctagcaagatctccatcaatgccataggtattggctttattgactcctgtttcctattttgctggctcagctaaatctccactatttgcaaccaggcatttccttcttgacagatgaaaagcctctgacagccagagctgagggtaattaacctcttccctgggtgactcctttcttcaactctgcttctgcacacccagagcagcaaggccatcaaatgacagctctctagggatgc

SEQ ID NO: 612136 - DNA, 544 bp, Homo sapiens
ctatgccaatggaataggacaataattttttacttgcctgttcccccactaagctgggaatttcttgattgcaaaaacattttcttaatcatcctgtattctaataattagtataatgcctgataaaggrtaggcaactcaattattgaatgaatgaatgaatgagtgaattcatacatatatcatgattaccatgaatttaggctgagttcatttagaataatgatgactctgctgaggactggaagaaactttctacatccaagataggtatttgccaaggaaacaaagagtgcaaacacaagtgctgatgaaatgtcaaaaatagaattctattttacatcagagcagaaaagacccttaaagatcagctagttcaaactttcccagtttcattattcagaagaggaaactcaagctaagagagtaaaggagtttgtccaaatcactggcctagcctctgggccagccaggatggaaacccagggctcttggccaccacttcagtgtccttttgctgcattggtggtatcaatagttcaat

SEQ ID NO: 612137 - DNA, 544 bp, Homo sapiens
ctatgccaatggaataggacaataattttttacttgcctgttcccccactaagctgggaatttcttgattgcaaaaacattttcttaatcatcctgtattctaataattagtataatgcctgataaagggtaggcaactcawttattgaatgaatgaatgaatgagtgaattcatacatatatcatgattaccatgaatttaggctgagttcatttagaataatgatgactctgctgaggactggaagaaactttctacatccaagataggtatttgccaaggaaacaaagagtgcaaacacaagtgctgatgaaatgtcaaaaatagaattctattttacatcagagcagaaaagacccttaaagatcagctagttcaaactttcccagtttcattattcagaagaggaaactcaagctaagagagtaaaggagtttgtccaaatcactggcctagcctctgggccagccaggatggaaacccagggctcttggccaccacttcagtgtccttttgctgcattggtggtatcaatagttcaat

SEQ ID NO: 612138 - DNA, 414 bp, Homo sapiens
cagaaaagacccttaaagatcagctagttcaaactttcccagtttcattattcagaagaggaaactcaagctaagagagtaaaggagtttgtccaaatcactggcctagcctctgggccagccaggatggaaacccagggctcttggccaccacttcagtgtccttttgctgcattggtggtatcaatagttcaatgcatcctgaagtcttttgcatcaatttttctgyacatttttgacattaccaagttttctaaaaatgagagcattgacaaacaggtattatttaaacagtaaaatgaatttgaaatacccttaagtacattaaaaacatacatgtatatgttgttagtaatggagacctaaaaaaaagaatttactctcttcactatattggttctcataagggaattc

SEQ ID NO: 612139 - DNA, 633 bp, Homo sapiens
atctggattcatcctcagcttagagccaagggcagctgagtcctggctagatcagtccacccagatgtgtgacaaaggagaaaaagatgcttacttatagttgtggacaataaaatgtgattgatatgcagygttattttggcaaaagtttctgatgtactttaaacctagatgtctacatctctataagtaatggtaccagtttctttcctaattggaaacttcagaaaaacttctaatggggccctattttgtactctcagcatctgagtgatatctgaatcccactgattctaccgctttggttttatccagacccatttattcccatctctcttctctgccactggcctggttcaggccctcagcattgtccatgtgctatgaacctattttctgtgtccctacatctgatctgactgttggccagttatcttttcaaagaacagctgcacccatggccctccccaaaaactctcagtggttttcagttgccttcagggtagaagtcacatatcccagtcaaagcctttcattactggcccagccaatttttccaaccttatcaataactctgcctccctgtgacttttatgctccaattttttctgagtctattggtaagagcagggt

SEQ ID NO: 612140 - DNA, 512 bp, Homo sapiens
cttacttatagttgtggacaataaaatgtgattgatatgcagcgttattttggcaaaagtttctgatgtactttaaacctagatgtctacatctctataagtaatggtaccagtttctttcctaattggaaacttcagaaaaacttctaatggggccctattttgtactctcarcatctgagtgatatctgaatcccactgattctaccgctttggttttatccagacccatttattcccatctctcttctctgccactggcctggttcaggccctcagcattgtccatgtgctatgaacctattttctgtgtccctacatctgatctgactgttggccagttatcttttcaaagaacagctgcacccatggccctccccaaaaactctcagtggttttcagttgccttcagggtagaagtcacatatcccagtcaaagcctttcattactggcccagccaatttttccaaccttatcaataactctgcctccctgtgacttttatgctcca

SEQ ID NO: 612141 - DNA, 382 bp, Homo sapiens
ggcaaacaattattttgtaaaagaatgagataatttgggcactgttgagtataagtaatgtcatcaggggatacattttacagccctgaatcctctgcaaatcattctacctttctggacctcagccttcccatctgtaaaatgagtgggtagtacttggatctcccacttttccaaatcttgttaaaattccagcccttgattcttcctctaatatattctggtctggtttcttgaaatcagcatctctcttgtaattcaggaagcaggataagtttgggggcttgggggaacagagggttggtaggcaaagaaacatgattygcgtgaaataacaagaggatataattagaagctttatgaaatgaggaagattctttat

SEQ ID NO: 612142 - DNA, 575 bp, Homo sapiens
atctctcaacttttaatatttttatcaagtgtttttagacatttttccttaaccacctcccacccatgaaattttaataccagagatatattgtatatctgcttatacactgtatgtactgtttatatactatgctttcactgtacatagattaaatattttcactccctccccaagatcaatttttacttctttggggatgttatgtccttattgagaatgtatgttataatcagacccttttgcagagataaggaaactgagggtcaaggcaaggggyaggggaggtgcccaagatcccctctgggattagtgaagtagccacagctagaacatggactttgtgactctcaacctcttctggtcatgagggaggtgggagtgagagaagtcaactgactctccaagagccacaggtgtcagggctagaccagaatctaagtgccataacttctaagagctcagagtctgtgccagtatcttccactgacaatcaagaaccgtcctggtggagggaaactgtcactgggctagagcccagtgggagtaggaaatgctaataactgtgagaggac

SEQ ID NO: 612143 - DNA, 582 bp, Homo sapiens
ttctggcaatgatttaattgcagaacagtgcaggttcccattaccaaggctctcattcttttacaaaacatttttacagtacatttcctgggatataatggagaatcattgtgagtcattaaaattaagcaacgtgtgtctaagcagcctgcatcaggcttcactacagagtcaggtttcattgttaggttcacttctggccattggagagtgtgatggkctgttcacaccacactgggtaaggtcacctgaacttacctgagttgtgtgggacattttgaattctggatgccctgtccaaaggaagagtcctggtgttagcaacgtaaatccatactccaactgcccatcacatactcccattttctggtagaaactcaaaccatctagtgaaattttaattaagagaccattcaacatcgtagccaaaaggcagggacataacagaccattcatcacggtagccaaaaggtggggacacacacacacacatacacacagaaacacatactcctccttctattcagaggcctttagtcatccacactgaatcaaatgctgccttcagtctagcaaaaggag

SEQ ID NO: 612144 - DNA, 446 bp, Homo sapiens
ccaccacacccagcctttcttagagttctttaattttccttctttctcttcccttgtcttcccttccattcactccactgcctttgcaccactctcaaacaaacaagcacactacagcccccactttctggcaatgatttaattgcagaacagtgcaggttcccattaccaaggctctcattcttttacaaaacatttttacagtacatttcctgggatataatggagaatcattgtgagtcattaaaattaagcaacgtgtgtctaagcagcctgcatcaggcttcactacagagtcaggtttcattgttaggttcacttctggccattggagagtgtgatgggctgttcasaccacactgggtaaggtcacctgaacttacctgagttgtgtgggacattttgaattctggatgccctgtccaaaggaagagtcctggtgttag

SEQ ID NO: 612145 - DNA, 493 bp, Homo sapiens
aacacacatgccccagatcctctgcactgaaacacttatttatatgaatgagcgtacctgagcacatccyttcaagacaagcccagaaaagcaatgccagaaaccagcaccaccttcacatgtggcaagaggccatgcaaaatgtaatggctcaagtttggagctgggaggatgggggcttacatcccaaggataaaatattttgactgcttaatatgttctcaagaggaagaaaattaagcaccattatggtagtgttgcagcctcctctctgccactaagttactgaattactaaatgaaccctcccaaaacctcaagctaatcaggtgtagaaggaagccttgggccagataatctgtagggctcctcccacccctggagccttttgttatatgcctccacagtgcccaatcctacttgttatctcagcagagtctttaaaggcttctcaggagaaggggtagaggcaagggtcattaattaatattttt

SEQ ID NO: 612146 - DNA, 580 bp, Homo sapiens
gggtgccacagactgatcactctctcatcctccaccctggttcaaatactgcagtgagatgtcacctgagatattactccagtgattcaaaccttcaggggagcagccttcagagatccggcaaattaattttactcgcaggacacagtgacatctcctactaataacttttatccaggcagcatttgtaaaggttctaatattgtggtttttcttttttcttttcttttctttttttttttttracagagtctcgctctgttgcccaggctggagtgcagtcgcgtgatcttggctcactgcaccctccacctcccaggttcaagtgattctcctgcctcagcctcctgagtagctggactattttttgtatttttagtagagacagggtttcactgtgttggtcaggctggtctcgaactcctgacctcaagtattctgcccacctcagcctcccaaagtgttgggattacaggcatgagccaccatgcccagcctattgtgtgttctttaaagttgcttgtatttttttcttttctttcttttttttttaaatctaaatatgtagccaagaagtagg

SEQ ID NO: 612147 - DNA, 513 bp, Homo sapiens
gggtgccacagactgatcactctctcatcctccaccctggttcaaatactgcagtgagatgtcacctgagatattactccagtgattcaaaccttcaggggagcagccttcagagatccggcaaattaattttactcgcaggacacagtgacatctcctactaataacttttatccaggcagcatttgtaaaggttctaatattgtggtttttcttttttcttttcttttctttttttttttttgacagagtctcgctctgttgcccaggctggagtgcagtcgcgtgatcttggctcactgcaccctccacctcccaggttcaagtgattctcctgcctcagcctcctgagtagctggactattttttgtatttttagtagagacagggtttcactgtgttggycaggctggtctcgaactcctgacctcaagtattctgcccacctcagcctcccaaagtgttgggattacaggcatgagccaccatgcccagcctattgtgtgttcttta

SEQ ID NO: 612148 - DNA, 621 bp, Homo sapiens
aaagtttaaatggaagccagagttaaagccagggagtgaataaacagaaggttcaaggatggtccaggctctggggatcactccagctgatgatgagatgccccagccattagctgaggttcagaaagttgccaagagcttctggaaaacccaaggctgagcagctgcagatatatttggcttacataatccagaggaatgtgctggggagaaaagccaaatagcaaggctttgctgggtagcagcgctggggaagggggagcaggatgcacaggtgttaattattcctcccatcttatcctttcccatgtgaatacaatgcattcttcccctcccagactcccactggcatcagagatgytcaaggtccctcttcagctggggctgagaggggaagctgcggaggggccaggcttcccactactttatttttcatccaggcagccttgggagcctgaagtccctccacaagcttggatgtgatccttctaagctgtcttcaaatggcaacttgtgggctcagctgtttgctcagctgtctctgctccctacctccctgttcagggggctgcatgacagcagtttggcccaaagcagtctgaagacagagtacctgggaca

SEQ ID NO: 612149 - DNA, 417 bp, Homo sapiens
tacaatggaattttggtgagatatcaagaagtacatgaacattgaagtgacaataacaacatctaaaattattaggcacttattgtgtaccaaacaccatgcaaagactttatatagctattctcagttattataataacacttctaggtagttatttttgcttcaatacaagtagctatgtcttaaagtagttgattgacattctcaagttcatatatttactaagtattactgctgggatttggccaagctactgttttaaggagttagcatgtgaggaaatttgcttagcattgagaaaagagaggcattctgggattycccctttgataggtatttgtatagaattctcagaggcaggcatgaatcctttggacaaagaatttactgaataagttgacttgaaaaaaacaaaa

SEQ ID NO: 612150 - DNA, 586 bp, Homo sapiens
tttgttttcatacatcttattttgtttctatttctaaataatctcctgatggccctctccctcatatatatttaattgcatgcaactaattagatgccttttggtaattttctgataaagtgattaagaacttgggttttggagtcagctacacatgagttcaaatctcagccgtgtcactctgtggatgaccttgagttaacttattcagttatcagttttctcatctgtaaaataggaattttaaaagagttacccactcacgatcctggaaaagacttaaatgaagcaaagtatataaggtccataagatagtgcctggagcttagtaattaaatgccatatttaaattattatcagcatggctagatgtattattatgagcattggtcaaacatctcttgtaactccagtgaaaaacaatagcaatgccaaaattatgtacatgtgttttatcaaggtaaagaggttgaaatggaactcgayaacatgaaggcagggaccaaaaagaaggaggaaagagcagagaagtttctacaagagcagatgaagctggcaaggctatagaagatatagcaccaaagag

SEQ ID NO: 612151 - DNA, 541 bp, Homo sapiens
aaacaatagcaatgccaaaattatgtacatgtgttttatcaaggtaaagaggttgaaatggaactcgataacatgaaggcagggaccaaaaagaaggaggaaagagcagagaagtttctacaagagcagatgaagctggcaaggctatagaagatatagcaccaaagagatctatgcaccaaaaagaaagctctaacttgcagtggcagggggtggcaaygattaagggaactgcataaattattgaaatcaatatgtttttgaagcagttttgaaaatgattttaagagctctgatgagaaagaggttacagcaggaagcttgaagacatcattgatggtttcttagacactgtagtatttgaacttggtcttggtgatcatacagggaacaacattacaaacaggggcaccacctgagaaagagctttctgggaggccaggatgggatggcatgcacagtagaccagtttggatggagcatgataaggaatggaggaagaaagtttcagaagaaaggatggaatttaaatcataaaggg

SEQ ID NO: 612152 - DNA, 565 bp, Homo sapiens
aaaaagaaagctctaacttgcagtggcagggggtggcaacgattaagggaactgcataaattattgaaatcaatatgtttttgaagcagttttgaaaatgattttaagagctctgatgagaaagaggttacagcaggaagcttgaagacatcattgatggtttcttagacactgtagtatttgaacttggtcttggtgatcatacagggaacaacattacaaacaggggcaccacctgagaaagagctttctgggaggccaggatgggatggcatgcacagtagaccagtttggatggagcatgataaggaatggaggaagaaagtttcagaagaaaggatggaatttaaatcataaagggtcatatgttcaggctacagtgtttcagctttaccttacaggcagtgaaggaacactggatgtttttgaatgtatgagcatccctrtgtgcatgtgtgcatgtgtatatatgtgtgtgtgtgtgtgtgtgtgtgtgtgttgtgttgtgtatctccttgcatatgggggcaggacagggatagttcagggaaggtgaggtacatat

SEQ ID NO: 612153 - DNA, 606 bp, Homo sapiens
ccttacaggcagtgaaggaacactggatgtttttgaatgtatgagcatccctatgtgcatgtgtgcatgtgtatatatgtgtgtgtgtgtgtgtgtgtktgtgtgttgtgttgtgtatctccttgcatatgggggcaggacagggatagttcagggaaggtgaggtacatatggtctaagctgaacatcaggaagcttgatctttcttaataattttttaaattattaatcacagcctacaatatgttcatccccccaccccccacacatggaaaaataggagtagcagggtttctatttagatttgtctgagaaactggaagaagtactcaggaactgcaggtaatgcctaataagagagtggttcccagagacagacccaagcttcctttatcgtatctgtgtagcagagagcctgtatgagtacatgtgagtatgtgtgtacacacatacatctgcatgtccttccaggcactggaaaaggagcctgacttgtctgttgttctgagactacaagccccaggtgatgaaatctagcaggaagaagctcatcttctgccccattacacagctacttgaaaaatgactatcatgataggtgggcat

SEQ ID NO: 612154 - DNA, 462 bp, Homo sapiens
acagaaatttagcagggcgtgtggtggtgcacacctgtaatcccagctactcaggagggtgaggcaggagaattgcctgaaccctggaggcagggttgcagtgagccgagatcacaccactgcactccagcctgggcgacagggcaagactccatcaaaaaaaaaaaaaaatactaatcatcccttcaagcacttactttaacattcaacaaacatcaggctcctagcaagtgtatgggaattaagtgtggacagattattagtatgccatccttgcctctcgaacaggtgatgacttgtaagaatgaactgttcagtgtggggcaggggacggagcatgcattagagtcagacagarctagatagagttctagacagagctctgctgcttcctagaataagacttgagcacattatctaatctctcagtatttatctataaagttggcataataatgaaaa

SEQ ID NO: 612155 - DNA, 564 bp, Homo sapiens
cctttcccttcttagcacctgccggatggagcgtctatgcagctaggactgttatatggagggttttctcccgccgtggactctctggaggctatggactgtctgctttgcccatcattctgtccccarcacgttgtctgcatgaagtgaagatttgataactgcctgctaagggagcgaaggagtgagtgggtggatgagtgggacggtattctcactgccacagctgctcccagccctattttaaggacagagaatatgcatatttaaaggacagatgcgtgtctaataatcccagcatgttgggaggctgaggcaggaggatcgtttgaggccagcagttcgagagcagcctgggaaacatagtgagacctccatctctgccgcaaacaaagaaaattagtccagccatagtggagtgcacctgtaatctcagctcgtggggaggctggggcagaaggatgacttgagcccaggagttcaaagctgttgtgagctgttatcatggcactgcactccagcctgggcaacagagcaagacctcatctcttaaaagaaaaaaga

SEQ ID NO: 612156 - DNA, 564 bp, Homo sapiens
cctttcccttcttagcacctgccggatggagcgtctatgcagctaggactgttatatggagggttttctcccgccgtggactctctggaggctatggactgtctgctttgcccatcattctgtccccaacacgttgtctgcatgaagtgaagatttgataastgcctgctaagggagcgaaggagtgagtgggtggatgagtgggacggtattctcactgccacagctgctcccagccctattttaaggacagagaatatgcatatttaaaggacagatgcgtgtctaataatcccagcatgttgggaggctgaggcaggaggatcgtttgaggccagcagttcgagagcagcctgggaaacatagtgagacctccatctctgccgcaaacaaagaaaattagtccagccatagtggagtgcacctgtaatctcagctcgtggggaggctggggcagaaggatgacttgagcccaggagttcaaagctgttgtgagctgttatcatggcactgcactccagcctgggcaacagagcaagacctcatctcttaaaagaaaaaaga

SEQ ID NO: 612157 - DNA, 339 bp, Homo sapiens
tatcctcattttgcagatgtggaaactgaggcacagaaggttaaatagatttcccaggtcacacaactagtgggtggtgaaactgggctacaacccagccagtctggttctgaagtatcacctctgtggaacatgtatgtaacttgggaacaaaaaaacatatattggaggtattaagttttttttttttttttttttttttwacctgttatgagttcatgatctaaataatttggagactctttcttcaggtctttatcctagtgggctcaccagggaagtcaccacagctatatgtgtccttattctacatatctggccatctctagcccttcacat

SEQ ID NO: 612158 - DNA, 537 bp, Homo sapiens
gattgttctggctaggacttccagtactatattgaataagagtgatgtgtatgggcatccttgtcttgttctggttctcaacgggaatgcttccagcttttgcccattcagtataatgttcaaagcctacagtcttaacctgcgtgtgccactgcatccagtaggaacaagctgggtgatgaggaaaagagggaaggtgtttggggcagagggacaagcagtcacaaagttctagactctagaatggaagagaagaggaactgcaggaacaaaatgagcaaaaatgcagaaggtggggtggagagtgaggacacagggacagggattaccactctgtgaccaccgcataggtggcccgcagaggatacccaggagtgtctagagagaaggctacataagtggacaaaggccagatctggaagggctttgtttgccatacgggagggtttcaayttcatctcaaaggccccaagaattctatgaaggattttaacggagagggtgacatattcatattatcccatacataactgccat

SEQ ID NO: 612159 - DNA, 569 bp, Homo sapiens
ggctataggtattgcttcccacctcccttccctttcctcctcagaactcttcctgctttggycctaatgacaagttgataagctaatagctttgaggccccaggactagaggtgggcagctcagctgcttcctagaattctgagcttgtgaagtttctttttttctttttctttttagagatggggtcttgctctgtcatccacgctggagtgcagtggcacaatcatagctcactgcagcctcaagattcctaactcaagcagttctcttgcctcagtctaccaaatagctgggactacaggtgcatgccaccatgcctggctaggcttgtgaaatttctatacaacaacctcatttctctgtttcttacattctaaactcccacgaagtaagtttgtggatatttgacttgctgaaaatcatacaaatgaactttcctaattctattttctctgtggaacacagattattaaagtgagaattaatgtgtgcctgggacagttttggcttccacctgttgtccaagtgtaattattaattgcaccctcccctatttgctcacaaaagg

SEQ ID NO: 612160 - DNA, 556 bp, Homo sapiens
  misc_feature 106: n = A,T,C or G
ggccttccaaagtgtagggattacaggtgtgagccaccacgcctgacattttttattttttagatatggcggcggcgggggggtgggaagggggaagggcgtctanctatattgcccaggctggattcaaactcctgagctcaaaaggtcctcctgtctcagcctctcaagtagctggggttacaggcacatgctactgcacctggctgcaaccactctggataagagcaacctgtaatccctcttccacctgccttttgtttactgtatctatccctgtaaagtactgctactttctagctgtttggccttatacaagttgctttacatctgtatgccctattttccacatctgataaatcagtattatttcatagaattgctatgaagmttagatgagataataaaggcaaagctcttagaatggtacttggctcatagtaagcactcaaatattgtttttgtcaacattttctatatatctatgtatggcttttgtgattgtttttatttttagtcaaggattacatctcatttcttgccttttctttgtatt

SEQ ID NO: 612161 - DNA, 353 bp, Homo sapiens
tcctaagtcacaaagtgactttctggggagagggctctaatgctgcatggatttggtaagaaaggagagtccagggaggcaggaagtgcccttagaggcagggggcagggccagcctccrtgaggccctcagacacgacagtggcccacggaccctgtgcctctcaggccacacaggatcaagggtggactagagccttgtcgtagtactcagtgatggttcctctggctctgtcttcttctctctgttggaactcagctctccaaaggaagtctgggatgccccagggaagctcagacagcctggaggatgggtccccgaggttcccgggcacctgccagccccctcctcac

SEQ ID NO: 612162 - DNA, 475 bp, Homo sapiens
gccctggaccctgggtgctcaatgggtccacagaagttcgatcttgacgctttggttttccctctgctcctctcttgcccttgcgtctctgctttttcctttctatctgttaacaatctggagttcagacctctgcaacgacttcttggttggctcctggccctattctctctggccccagtccagtctctgccctaggtcctatctttagttcccaaccacattttccaagtctagactcccctggtagggctgcagraccatccacgatcttgtcattcccaacacatttggcctcatctccctttctctgcaagttgacccctgctggctaacaaggatgcccttccctctctccaacacagttcctaggctcattcaaacccctgcctttccattcatcttttttaaaagcactgctcttcctcctcccacccatctaaatgttgttaggactataggctttgaggttaaa

SEQ ID NO: 612163 - DNA, 484 bp, Homo sapiens
gcatggtggtgggcatctgtagtcccagctacttggaaggctgaggcaagagaattgcttgaacctgggaggyggaggcagaggtggaggttgcagtgaaccgagatcacatcactgcactccagcttgggcaacagagtgagaccctgtctcaaaaaaaaagaaaaaaagaattcaacttgggagttccttacagggattctaagagatctctcctctgaaacttctataacctattattcactacattccctcatacattttactcttctttcccaccttaggatacatgatcccttaattcaggctcaggctgaagaactgacccacttacgacagaagacacaggaagggagaggtgtctgctaccttttcacccagcatgtgaagaacacagtcaagtcttttgagggccttctcaggaacactgacattgcctactaccagagacagagattctgtgagcaaatggtacaaggaagcc

SEQ ID NO: 612164 - DNA, 484 bp, Homo sapiens
gcatggtggtgggcatctgtagtcccagctacttggaaggctgaggcaagagaattgcttgaacctgggaggtggagkcagaggtggaggttgcagtgaaccgagatcacatcactgcactccagcttgggcaacagagtgagaccctgtctcaaaaaaaaagaaaaaaagaattcaacttgggagttccttacagggattctaagagatctctcctctgaaacttctataacctattattcactacattccctcatacattttactcttctttcccaccttaggatacatgatcccttaattcaggctcaggctgaagaactgacccacttacgacagaagacacaggaagggagaggtgtctgctaccttttcacccagcatgtgaagaacacagtcaagtcttttgagggccttctcaggaacactgacattgcctactaccagagacagagattctgtgagcaaatggtacaaggaagcc

SEQ ID NO: 612165 - DNA, 484 bp, Homo sapiens
gcatggtggtgggcatctgtagtcccagctacttggaaggctgaggcaagagaattgcttgaacctgggaggtggaggcagaggyggaggttgcagtgaaccgagatcacatcactgcactccagcttgggcaacagagtgagaccctgtctcaaaaaaaaagaaaaaaagaattcaacttgggagttccttacagggattctaagagatctctcctctgaaacttctataacctattattcactacattccctcatacattttactcttctttcccaccttaggatacatgatcccttaattcaggctcaggctgaagaactgacccacttacgacagaagacacaggaagggagaggtgtctgctaccttttcacccagcatgtgaagaacacagtcaagtcttttgagggccttctcaggaacactgacattgcctactaccagagacagagattctgtgagcaaatggtacaaggaagcc

SEQ ID NO: 612166 - DNA, 548 bp, Homo sapiens
tattccactgtcttctggcttacactgttccaacaagaagtctgccataattcttatttctgtttctctgtacataatatgtcttttttctctggatgcttttgagattttctatttatcactsgtttgaagcagtttgattaagataagaccttgtatagttttctcttttacatattgttctactttatttagtttcttgcatctgcatgcttatagttctcatcaaatttgaataataatgacatatatagtcttacctatggcatatacaatatattatatttggcatacatacatcaaatatatataatgtatattctattctttctctctatcttctccttcaaagactccagttatatttgtattagctgctttgaaattttaccacagctgactaatggtctgttcatttttgttgtatcttttctttctctctgtttctttctatttccatgtcttggaattgattaatctttcttcagcagcatctaatctgctgttaatcctatcgagtgtattttcatctcagactttatttttca

SEQ ID NO: 612167 - DNA, 548 bp, Homo sapiens
tattccactgtcttctggcttacactgttccaacaagaagtctgccataattcttatttctgtttctctgtacataatatgtcttttttctctggatgcttttgagattttctatttatcactggtttgaagcagtttgattaagataagaccttgtatagttttctcttttacatattgttctactttatttagtttcttgcatctgcatgcttatagttctcatcaaatttgaataataatgacatayatagtcttacctatggcatatacaatatattatatttggcatacatacatcaaatatatataatgtatattctattctttctctctatcttctccttcaaagactccagttatatttgtattagctgctttgaaattttaccacagctgactaatggtctgttcatttttgttgtatcttttctttctctctgtttctttctatttccatgtcttggaattgattaatctttcttcagcagcatctaatctgctgttaatcctatcgagtgtattttcatctcagactttatttttca

SEQ ID NO: 612168 - DNA, 548 bp, Homo sapiens
tattccactgtcttctggcttacactgttccaacaagaagtctgccataattcttatttctgtttctctgtacataatatgtcttttttctctggatgcttttgagattttctatttatcactggtttgaagcagtttgattaagataagaccttgtatagttttctcttttacatattgttctactttatttagtttcttgcatctgcatgcttatagttctcatcaaatttgaataataatgacatatatagtcttacctatggcatatacaatatattatatttggcatayatacatcaaatatatataatgtatattctattctttctctctatcttctccttcaaagactccagttatatttgtattagctgctttgaaattttaccacagctgactaatggtctgttcatttttgttgtatcttttctttctctctgtttctttctatttccatgtcttggaattgattaatctttcttcagcagcatctaatctgctgttaatcctatcgagtgtattttcatctcagactttatttttca

SEQ ID NO: 612169 - DNA, 548 bp, Homo sapiens
tattccactgtcttctggcttacactgttccaacaagaagtctgccataattcttatttctgtttctctgtacataatatgtcttttttctctggatgcttttgagattttctatttatcactggtttgaagcagtttgattaagataagaccttgtatagttttctcttttacatattgttctactttatttagtttcttgcatctgcatgcttatagttctcatcaaatttgaataataatgacatatatagtcttacctatggcatatacaatatattatatttggcatacatacatcaaatatatataatgtatattctattctttctctctatcttctccttcaaagactccagttatatttrtattagctgctttgaaattttaccacagctgactaatggtctgttcatttttgttgtatcttttctttctctctgtttctttctatttccatgtcttggaattgattaatctttcttcagcagcatctaatctgctgttaatcctatcgagtgtattttcatctcagactttatttttca

SEQ ID NO: 612170 - DNA, 507 bp, Homo sapiens
  misc_feature 379: n = A,T,C or G
agtgttctccagattgaagccttccstctaactgctcctaaatctgtgatgtagtggaaaaggtttgaggccttgattctcatcccaggtttttcacctacagatcatatggccttagcctcttgacaccattgtctccttatggccaaagatggaactgtacttgggtggtatctgagcaccctgttggctttgacattctaagggctcttcccttggcaccactctcttatttaaaaggaataggatgtggacttacaagggttatttctctgcaaactatcctctctttcttatgacaagctatttctgaatgtgcacatttgaggctaagcaaatccctttcctgggcagggtgtgaaagacctttatttctctncagaggagtattatgggaggtggtagagacctagctaactcatctgcagtggctttgagcaagggctttagagccataaggtggggctgggtcctgtgtcctacaccacaggccagctagttcatttc

SEQ ID NO: 612171 - DNA, 546 bp, Homo sapiens
  misc_feature 394: n = A,T,C or G
tctctaaaacctgttagtgttctccagattgaagccttccgtctaactgctcctaaatctgtgatgtagtggaaaaggtttgaggccttgattctcatcccaggtttttcacctacagatcatatggccttagcctcttgacaccattgtctccttatggccaaagatggaactgtacttgggtggtatctgagcaccctgttggctttgacattctaagggctcttcccttggcaccactctcttatttaaaaggaataggatgtggacttasaagggttatttctctgcaaactatcctctctttcttatgacaagctatttctgaatgtgcacatttgaggctaagcaaatccctttcctgggcagggtgtgaaagacctttatttctctncagaggagtattatgggaggtggtagagacctagctaactcatctgcagtggctttgagcaagggctttagagccataaggtggggctgggtcctgtgtcctacaccacaggccagctagttcatttcaggagactttcttttcaatctatt

SEQ ID NO: 612172 - DNA, 507 bp, Homo sapiens
  misc_feature 379: n = A,T,C or G
agtgttctccagattgaagccttccgtctaactgctcctaaatctgtgatgtagtggaaaaggtttgaggccttgattctcatcccaggtttttcacctacagatcatatggccttagcctcttgacaccattgtctccttatggccaaagatggaactgtacttgggtggtatctgagcaccctgttggctttgacattctaagggctcttcccttggcaccactctcttatttaaaaggaataggatgtggacttacragggttatttctctgcaaactatcctctctttcttatgacaagctatttctgaatgtgcacatttgaggctaagcaaatccctttcctgggcagggtgtgaaagacctttatttctctncagaggagtattatgggaggtggtagagacctagctaactcatctgcagtggctttgagcaagggctttagagccataaggtggggctgggtcctgtgtcctacaccacaggccagctagttcatttc

SEQ ID NO: 612173 - DNA, 502 bp, Homo sapiens
gtgtttaattattcactgactgaagtgggcatgtagagagagagaggctgtgctttgtgttatctatactctctggtgtgtggtcatgtgtacactttgggtagacactcatttggtgcaagcaaactgaataactgcctctgttgaaatcaaatctgaatgttgaaaatggctaatttctgtaaggcttgcaggggtgacattgtgtcatcctttttgaactaagacttcttagcatctccttgcttcagcttcctcctttttacttggtagtaattggatttagctgacttctaacttcataaggatgtaagaataaagcacaggtgtggtatcatagcaaaaarcactagcctgggaatcaagagactgttttacctctttggacattagtttctttacctgtacagttaggaatttaggttagcctcttctaagatcttttctagctttgagtaccctaattttctttgtaaagacacatgactatcccagcaatgct

SEQ ID NO: 612174 - DNA, 568 bp, Homo sapiens
actaccccacttgtacatctatttttctgtgcatgctaggcaaacggaccattaagtctattacaagcactagaattttagttcttcttaatagcctgttcctctcagtggatggtatttataaaatacatccataaacatggcgtgatgggtctgttttctttcttatatttcattgaaggagtaaattttgattatggggcaatctggatgacatggtaatgctaataaacatcattattatgattttataatatgatatttgagcaatgtactttaaaaagtcactcaacaccactgagtatagtttcctctcatctgtaaaaagtgatcattgaatttagtctgaaatatttcaagagaagctcatataaaatcaatagccttttaggaataagagactagtgctttgtgggataattaagtttttctccatttgygcacttagtgccatctgtattactcagtgctgctcaatgccaggttcatttgggttttttctcccatttttcttcatttttatctatttctgcttcaagttttcagatctgtcaatttccatgtcagt

SEQ ID NO: 612175 - DNA, 663 bp, Homo sapiens
actggaataagaattctcaaactttagagtggctgggaatcatctggagacatttgttgaaattcagattcccagggcccacactcaagaattcttaactcaataggctttaagtggggcctagagtctgattttttaacagaaaggccagacgattctgatgcaagtgttctgtggaccacactttgaaaaaaactgtggtccttttgcctacagtaagtatatgacgcctccaggtaacggaggaaaagtattctgttctctttgaagtaagttaacattatattattcatagcatatatatatgtcataatatataacactatattattatatagcacaaattatgctgcataaaccccaagaaattgggcaaaacaatcgggataggaagaaaatattagaattattcatttttatctataaaaatcaataattatgaatcaattattattaatattaaaagattgacamaacatattttccaaaaaagagaaccagaaaggtgggaagataattaagtggtaaatgatttagcagaccagaaaagtcaaaacttaaactagtaaaagtaaattttacttgtattgcagtaccccaaaaaggctcataaatttgagatatcaggtacctctaaaagttgggctgaaaacaggttgacta

SEQ ID NO: 612176 - DNA, 597 bp, Homo sapiens
ccttgttgcttatgtcaaaaacagaatgtggttaagtaaccactaatttatatttttactattgatctacagaggttatcaagaattttgctaaggcttgagttttaaaagtgttttartggcagttggagatctcccattatataattggatcactgtcatcttttattaaatatgtgaaggcagaactgtgcaatatgaacattcacaaagtagtctaatttatttgtagactctttaatattttcagaaattccctgttgaaatctttaaaacataagccctcttttatattcatgaagatataatcatcactcctagtttttgttggggtacacttgttttagtcattcatgtaatttttaaaccaaatccttgcttttagaaaatccttaagtttgtctttctgtcttctggtttttatgtctcttatttttcagccttagaactctaaagccaaaaatcctattctgaccctaatgacttgtccatgatcccagaagtttattatgaaatatattgtaataattgccaatgaaaacaaacagcctaattgctactacctgttataaaacaatgtcttacatagctctcagc

SEQ ID NO: 612177 - DNA, 594 bp, Homo sapiens
taaaaatacccatctctggccttctcctgtctagttaatgcttccttcccaaatcttatggctttctttttatatttattttcctccttagtcttcataatcatataaggaaaattaaaataaaaacaattgcacacatcctaaatatgctttgaaattcgggtatattcatrtttatttaacaaattcagatcaaatttttttaggttatagaaagttacaggttctaaatgatcatggatagttgtagttatgttcttaaaacttacccagaagactgtctacagtatatctgcagtaccatttattcatctagtagacatttgttgagcactgctttcactaaactaaaaaatatcgtgacttcaaactccaaaaggttttaggatttactgggggatgaaagtgggaggggacaagatatggactaatacaaatcaataagaaaaaaaaaaagagagagagaatgctatgggaggcatagaggagggagcaattaattctacctaaatcatttaggatattttgccagaggtggtaacatttgatatgagccttgaaggacaagaatatattaataggtggggaaagagg

SEQ ID NO: 612178 - DNA, 601 bp, Homo sapiens
ggaattctttaaaagggaaaaatgatacctcaaataagtctttatgactggtgctactgccaacacaaactgccagatgttgcaagaatgaaacactctcactctcggttccctaagagcgcggkggctcacgtctgaaatcccagcactttgggaggccaaggcaggcagatcacctgaggtcaggtgttcaagaccaacctggccaacatggtgaaaccccatctctactaaaaatacaaaaaaattagctgtgcatggtggcaggtgcctgtaatccacgctattcgggaggctgaggcaggagaatcacctgaacccgggaggcggaggttgcagtgagccaagatcacaccactgcactccaccctgggcaacaagagcgagactccacctcaaaaaagaaaaataataataataacgccaataatgataaaagctaattttatactattgaaacattataccttatattgtttaccaagtgtcaggcacttgttctaaggactttacatatatttcacttaatctttgcaatgttgttaaggtaaatactataattcctatcttatagataaggaaactgactctcagagaagct

SEQ ID NO: 612179 - DNA, 592 bp, Homo sapiens
  misc_feature 579, 580, 581, 582, 583, 584, 585, 586, 587, 588, 589, 590,591, 592: n = A,T,C or G
caccttatatttggggtgttgtactttttctaccctcttgaattgaatacttaaattaattattttagctcattcttaatgttaataagcatatctaaagctattcacttccctctaagtaaaactttattcatccaccaaatttggcatatgtactaccaatggcatgctgtggttggctcayagtactcatagagccaattatgtgcatctcttcccaacactgcattcaattcatataccttgaaattggacatggtaggagcaataagcaccacagaaattggcaaacactaaaaattgaatttaaaaattataagtacatttccagttgcttattaatgttatatgagaaggccacactttttgaatattactattggtccttgtagatgctcttgattgtagaatttgtattatttgtacacaaggagagttttacaagttttctgacatacattttattttttattttttgttttgttgcatggggtcaatattccagtgtaatgttgaatagaagcagtgatagtgatatcttgtctttaatagaagaagtgcttctaaaattttattatnnnnnnnnnnnnnn

SEQ ID NO: 612180 - DNA, 592 bp, Homo sapiens
  misc_feature 579, 580, 581, 582, 583, 584, 585, 586, 587, 588, 589, 590,591, 592: n = A,T,C or G
caccttatatttggggtgttgtactttttctaccctcttgaattgaatacttaaattaattattttagctcattcttaatgttaataagcatatctaaagctattcacttccctctaagtaaaactttattcatccaccaaatttggcatatgtactaccaatggcatgctgtggttggctcacagtactcatagagccaattatgtgcatctcttcccaacactgcattcaattcatataccttgaaattggacatggtaggagcaataagcaccacagaaattggcaaacactaaaaattgaatttaaaaattataagtacatttccagttgcttattaatgttatatgagaaggccacactttttgaatattactattggtccttgtagatgctcttgattgtagaatttgtattatttgtacacaaggagagttttacaagttttctgacrtacattttattttttattttttgttttgttgcatggggtcaatattccagtgtaatgttgaatagaagcagtgatagtgatatcttgtctttaatagaagaagtgcttctaaaattttattatnnnnnnnnnnnnnn

SEQ ID NO: 612181 - DNA, 525 bp, Homo sapiens
ggaagataatgaaaacttagagtgaataggattaaagaaaaaattggcgttraagaattaagggcagtgggtatagataggacctctcagaggctgagagtggttatatttttttaaagttcacagcatattaaataatgaagaaatgccaaaacaggattttaaaactgttaagtatattttagatgattaaccttaaaattaactctattaacaaaaagcacagtatgatataattgttctatttacatgataattaaaagatttctaaaaaatattaattcataacccatgttgggggcatgatctggtgatgggacagatatttcaaaatgactgtcttctccagagtatcctgtcactgtatgtgtaacttcttgattgtatgtgtaactttatttgcagataatgaaaaaggctaaatttgtggcctattttgaatgtaagactaaggtcagattttcttcttcagtctcaggatctgttatctgacggggttggatagtgtggatggggaaagcaagt

SEQ ID NO: 612182 - DNA, 525 bp, Homo sapiens
ggaagataatgaaaacttagagtgaataggattaaagaaaaaattggcgttaaagaattaagggcagtgggtatagataggacctctcagaggctgagagtggttatatttttttaaagttcacagcatattaaataatgaagaaatgccaaaacaggattttaaaactgttaagtatattttagatgattamccttaaaattaactctattaacaaaaagcacagtatgatataattgttctatttacatgataattaaaagatttctaaaaaatattaattcataacccatgttgggggcatgatctggtgatgggacagatatttcaaaatgactgtcttctccagagtatcctgtcactgtatgtgtaacttcttgattgtatgtgtaactttatttgcagataatgaaaaaggctaaatttgtggcctattttgaatgtaagactaaggtcagattttcttcttcagtctcaggatctgttatctgacggggttggatagtgtggatggggaaagcaagt

SEQ ID NO: 612183 - DNA, 635 bp, Homo sapiens
ttctgcttctctacactgcagtttggatagcttyattgccctgtcttgaagttcacggatcttttcttctctaatatctaacctgctgttaaacccaggtttttttttttgttttttgttttttttgcagttaagatattgtaatttttagaactagaagttccactggttctattttaagtttccagttctcttcgcattatattcatgtttttttttaatacgtgaacatatttataatcactgtttaaatgtctttttctgttaactctattttggggtctgtttctattgatcaacttttcttctggatataaattatctttactggaatcttcatgaatttgtttaacaagctcaacaagacctctcctctccaactggtcaaaatgcaaatgtctccttaccctgcacatactcccatacttgtttcccttttacatcctaattagctgttcttttcctggcagttgtttgtgtcagaccttgtggagttcaccctatgcataagcaacttaatagtcagccaaagacatgaggggatgcttacacaaaatttgagaactattctacaaatagctccctcttatggtattgccctgcaaatttcagctacctagaactttgatgtcttt

SEQ ID NO: 612184 - DNA, 473 bp, Homo sapiens
atcccatttctgggtatatagctgaaggaaatgaaatcagtatgtctaagagatgactactctccaatgtttatcgcagcactattcacaaaagccaagatatggaatcaacctaagtatccaacaacagatgcatggataaagaaaatgtggtatataaacacaatggagtactatacagccataaaaaagaacaaaatcctgttatttacaataacatagatgaacctggaggacattatgttaagtaagccagacacagaaagccaaataccccgtgtctcactcatctgtgaaatctaaaaatcctgatctcatagaagtagagagtaggatagcagttaccaggggctggggagggtgttagtaaggggaaaacagggagagattggtcaatcggtacaaagttacarttagatcgaaagtataaattctggtgtcctattgcatggtagggtgaatataatcaatca

SEQ ID NO: 612185 - DNA, 553 bp, Homo sapiens
agatgcattcactgaaatttaaagtctcagtggacaccagctgctcctgccatctttggatctggaaaggtacaggttcccacagtgaaatcatcaggacaataccttaaatacttgcactgtgtcctttgtttagagagtgctgagaaaatgcttgttaatgattatgagataaatggcacatatttgtggtaaatacttggaaaaaagggtctgctcccagtccagagcagggccatgtgcaaaccgagaccygtgtccactgagcctagagcaggactgtgtgcaaacccagacctgtgtccactgaccctagagcagggccatgtacaaacccagacccatatccactgagcctatagcagggccgtgtgcaaacccagacctgtgtccccactgtccagagcagggccgtgtgcaaacccagacccatatccactgagcctggagcagggccgtgtgcaaacccagacctgtgtcccctccgtccagagcggggctatctctgcatcatctgtccttcccacaaaactaacatggccccacagatcag

SEQ ID NO: 612186 - DNA, 553 bp, Homo sapiens
agatgcattcactgaaatttaaagtctcagtggacaccagctgctcctgccatctttggatctggaaaggtacaggttcccacagtgaaatcatcaggacaataccttaaatacttgcactgtgtcctttgtttagagagtgctgagaaaatgcttgttaatgattatgagataaatggcacatatttgtggtaaatacttggaaaaaagggtctgctcccagtccagagcagggccatgtgcaaaccgagacccgtgtccactgagcctagagcaggactgtgtgcaaacccagacctgtgtccactgaccctagagcagggccatgwacaaacccagacccatatccactgagcctatagcagggccgtgtgcaaacccagacctgtgtccccactgtccagagcagggccgtgtgcaaacccagacccatatccactgagcctggagcagggccgtgtgcaaacccagacctgtgtcccctccgtccagagcggggctatctctgcatcatctgtccttcccacaaaactaacatggccccacagatcag

SEQ ID NO: 612187 - DNA, 652 bp, Homo sapiens
ttccccacttggccaatgatatcagtagccacactgcaaactctgaagtctctcagagctctagtctaggactccagagcgtgagtgcrtctgtggtggtgggcttgacctgaggctcatccttgtcacctgctcggtggcagtgcctgcgtgcagacccctcgcagcactcaggtgtggcccgtggacttgtggtttcgctgctggctggggaaccccctccggctcctcacttccccaccaagcgctggtcacagaaacgcccttctctggtcactgctctctggcctggcttggtggtggctttggtggcagccccgtcacccctgggatccgtgtcctcctgtttctttcgtttctcctgaaggttttccaagtgcctgtttgcttctgggaatttcctctctgccttcctccgacttcctcatagccgttcttttattccggcctcccaagattgcgtggagcccggccactgccagggcggccctgtgatgagctacatgggacacaagaggcagccccaggcgcccgcctccacctctaccagcagcgtcttcgctttcacttctgccttctgcggcgtcttcctctgtggagttggcgtcggccactggctgtggggcaacctcagcctctccagcggacgctg

SEQ ID NO: 612188 - DNA, 689 bp, Homo sapiens
ttgtaataaatttgttggcttggatgctggaaagtaagactggcctcacatgggtgagctaaggtatttctttaatgtatccttttaaaagctaatggagagtaactgactttttcattgtggcccatttgagagaaaatatatctttctcaaatatttaaaaagrtcgatcacttgtgtaatgtttgccaagttgtatacacaagaaaactagaactcagaatcattaaataatttgctgaagtttacatggtttttaaatggcagggtcaggatcgaatatggggactgactctgaagtctatgtgtttcatagtatgctaaagagtaaatatttccagaatttcgatagagtacctaaattatcttgaggtggggttagcaaattgtgaattaagattgtggtttttgtaaaggaagaaagtgcctatacttttattggcaatctggtgtttttgtttgctttttttctgaatgagaaacaaaagaaatgaagagctagccatgtgttctctactctgtctcagtttgtatggctacttttccatccagagctcttgccttttggttctcaatttggttgcattcccatgaagaaaacctagtgtggcaggcagaaggatggcctcccacagatgtccacatcctgatccccagaacctctgactatgacactgtctgtggccagg

SEQ ID NO: 612189 - DNA, 689 bp, Homo sapiens
ttgtaataaatttgttggcttggatgctggaaagtaagactggcctcacatgggtgagctaaggtatttctttaatgtatccttttaaaagctaatggagagtaactgactttttcattgtggcccatttgagagaaaatatatctttctcaaatatttaaaaagatcgatcacwtgtgtaatgtttgccaagttgtatacacaagaaaactagaactcagaatcattaaataatttgctgaagtttacatggtttttaaatggcagggtcaggatcgaatatggggactgactctgaagtctatgtgtttcatagtatgctaaagagtaaatatttccagaatttcgatagagtacctaaattatcttgaggtggggttagcaaattgtgaattaagattgtggtttttgtaaaggaagaaagtgcctatacttttattggcaatctggtgtttttgtttgctttttttctgaatgagaaacaaaagaaatgaagagctagccatgtgttctctactctgtctcagtttgtatggctacttttccatccagagctcttgccttttggttctcaatttggttgcattcccatgaagaaaacctagtgtggcaggcagaaggatggcctcccacagatgtccacatcctgatccccagaacctctgactatgacactgtctgtggccagg

SEQ ID NO: 612190 - DNA, 614 bp, Homo sapiens
accactaagtaatttttttaaaaaataagtatagttgatattctaagacaggagagaaaatagtcacatcaaatgctyaattaaaacccaagatggcaggaaaagagtataagtcacaaaagaaacaaagactatgaagaaaggaataaaagtcagttacaaatatggtaaatattaatccagctatattaataatcactttaagtgtgaattgtctaaataaaccaaatacagaaactgtcagaatagaaaaaacaagacctaaccatatgttgtgtgcaggaaaggcactttaaatataaaaacacgggtttaagagatagaggaagatgtaccatgctgctactactcaaagggacacaagattagctatattaatttcagacaaagcagacttcagaacaagagaagttaccagggataaagaggggcattgccaaacaacaaagaggtcagttctccaagacaacataacaattctcaaagtctctgtaacaacagagggtcaaaatatgtgaggcaaaaacggatagaactggaaagagaaagaaaatccactgttatatttggacacttcatgacctctgtccacaggcagaaaatcagtaaggaca

SEQ ID NO: 612191 - DNA, 395 bp, Homo sapiens
ccaaacaggaaatctcaggctctacttggcccacagaaagtttaactggcaaatatccacaaactggaacatcctttgaaaacccctacacctggaaaccagcctgagataccagcaagggatgtagaattgaatgaaatctgaatcagaagggtaagaagaatggtctcactccacctgggcttcccccttccccttccccaagttggcacagcagatggagatggtttcccygcactcacagtttctaccaggaaaaaagagaataagaggtagtcattcagtttccctaacgttctaagatgctactcaggaagtcaactctggtttcacctcatggggaatactaggagaaatggcatggcttgactgccctagggtcaggcagaaacaaa

SEQ ID NO: 612192 - DNA, 524 bp, Homo sapiens
aagatccatattctttctctaaaagaatctcagatccttggattttattttttgtttgttttatgtttgtttgtttatttgtttgttttgagatggagtctcactctgtctcccaggctggagtgcagtggcacgatctcagctcactgtaacttctgcctcctgggttcaagcgattctcctgcctcagcctcctgagtagatgggattacagwcatgtaccaccatgcccagataatttttgcatttttagtagagacggcattgtgccatcttggctagactagcctcaaactcctgacctacagtgatctgcccaccctggcctccccaagtgctgggattacaggcttgagccaccacgccaggcctcagagcctttgttttagaggctcaggctcacggaacacagtcacctccttctagattggaattctttaaagatcagcgtaccttgaaaatagcaaaaacaaaaagaaacaaacgacaaacaaaaaaatcagcaatgactctagaatagcctt

SEQ ID NO: 612193 - DNA, 597 bp, Homo sapiens
gttaatattgatgcttgtttcatcttaaactaattgtacctggagtttcagcagatctggatctatactcatcctagttcaagtacaataaagaacatctctttatatttcctgcaaaattcctaggttttactctcattaaacaaacttgtgtcattgccctttttgtgaggatttgaggaatcctggtctgccagcatttggtcagaagttcttctcatgaagcctacagtagacaaatggacaactgaaaatattgaatggttgatactagaacaaattataggtacattgatatagattctaaacagccaaaataataaacattcattctatcacaatgagttcatgttaaaagtgtagtgacataacattaaagcatgcagacggctgatactatccmcctcacttttaaatttttttaatttttgtatttttatactttaattactggggtacatgtgcagaatgtgcaggtttgttacataggtatacgcatgccatggttgtttgctgcacccattaatctgtcatctacattaggtatttatcctaatgctatccctcccctagtcccccaccccctgataggcccgg

SEQ ID NO: 612194 - DNA, 544 bp, Homo sapiens
cttaaggttttagcatgaacaaaagtaaactgaattgaagaggataaatggatacctgagaagaagctatctaaaagtcatactactctaggaaaaaaaaaaggtttattttaaatayaggaacatcaaagaaatgtacaataggaaatatttattcatagatagttctgcaatatgttactaattaacactcaagcaactctcctgcctcaacctcccaagtagctgtgattacaggtacccaccaccattcccggctaattattgcttttttagtagagatggtatttttgccattttggtcaggctggtctagaactcctgacctcaagtgatccatctgtctcagcctcccaaagtgctgggatcacagatgagaaagttttgtgaactatgggaagatggagaaccaagaggaacatggttagttttagagaaaatctgaaatgagcagtgggaaaaacaagaaccagatatttacatattgaatatttaatgtccaagagaaactttccctgatgcattagggcaatggttataaaat

SEQ ID NO: 612195 - DNA, 613 bp, Homo sapiens
caagcatgtgattgaggtaatcatttatagtaatagaggcatttgctaggatgaacaccatctacaacaaccgtctatgatattgagtttcaaaacataatattaagttttagaaaattcttttataacctatccatctctctcaatctattaaatattcaaattcttttaaaaaaataatagcagctcctcttgtcaggcacatgctagttctttagggcaaactatattatttactcattacaaaaactcctgtgagattgatatggtttggctctgtgtccccacccaaatctcatctcaaatggtaatccccacttgtgtaggaaaggacctgtaatccscatgtgttgatggagggaggtgactggatcatgggagtggtttctccatgctgttcttgtgatagtgagtgagttctcacaagatctgatggttttataagcgtttgacattcctccttcactggctcttgctctcctgctgccttgtgaagaaggtgcctgcttccccttccaccatgattataagtttcctgaggcctccccaggcatgtggaactgtgagtcaattaagcttcctttgtctataacttatgcagtctcaggtggta

SEQ ID NO: 612196 - DNA, 642 bp, Homo sapiens
aaaaatttcttgcagaatatagagccctccaaaaaatatgttttttgtaacgtgcacaagaaaacgtggctacggtttttaaaataaaaccatggaacagtgaaaagttttgaatgcaatatttagaagccaatgtgatttaatcacatattcgcccctcttacaactctataattcccattagatttttctgttgtgattcataattttgtttaatatatttcataaaactgttttatatagtttatatttatgcaaaaatatataatgcatatatatctttacaataatttattgcttcagctaatatgttttatgtataatacctaaaaatcctttgtaaaatgaagtgaaaatgaaaacaggttgtttcttcccacttcttaacttacgtcatcaacacaacttcagacccagtcatctgaaccgtatttagcaatattaccaaacaatagctcaattaaccaacaatactaggagaatcataataattcaatcggcrtggttatttttaattatacaagttaagaaacatttctaaatttttcatttttgaaacacattgtttagtctaagactgtgataacacctttagtaacttgtgaagttaaagcacatatacacacacatacattgcacaaa

SEQ ID NO: 612197 - DNA, 572 bp, Homo sapiens
ttcaccaacagtgaaatggcagcatcagtgccctgatgttcccaagaagtgcgttctttcctgaagccatctgtaatcctagattccattttcaccacactctaaagaaaaagtgcaattttttatttgaatttatattttttgcatattaccttttttcatccctggtcatatatgagaaaatattcacagtcttaatgttctccattggtgtatttattgttggcaaaaatatgaaagaataaagcattttgaatcacactatgaatgtatccaaatccacatagctaatatttcacaaagaaaagttgtacctcatattttgtccaaagaaacaaaatgtgcaccaatgtagtctccacacagaaataggaacttgtcctccaggctgccttctcttatcagaagagtctccttccattgcttcatcaayaacaaagtgcttagaagaagagacttttggctctttgacttatttgcttctaaattccatttgagtaatgaagaagctaattatttttgctgaactctttctcttttcttgagattatactttcagtaataaaaataca

SEQ ID NO: 612198 - DNA, 610 bp, Homo sapiens
gttacttctgcctgattgttttagcaactctgcggagctgtgttgtgctttctatttggatgatgttttcatagcaattttaggctaaagacttcactcaattagcccttttgaaatgtattaatcttgtggtgttggtggtgaactaagaataaattaggatgcctttattatttatctgtccaaagctttcatgttacttgatcatgctctgctgttcatacgactgaaggcaattaattttagaaaacagacaagctgttaacacagaacagtttgcaagccttcctgtaacacaatatgatacattgaagacactgtactttattgtaaagggttggatcatttcaattaattttctttcaattctaaattagcasagtatttaaatgtgtacttgctctgttctgtcctcttatctttccaaattcggtgtcatcctggagtttaaacgggagaagtcaaatgtaaaagtactaagtgtcttgcgttgtttggtagccttgatagcattctatagctcactttcttttaatgcttggcgattcggatcctgaataggctgttttaattttttaaaaatcagttttttaaactcttagatttagtt

SEQ ID NO: 612199 - DNA, 501 bp, Homo sapiens
tctaagaaatacccaagctgaggcttcctctatatcactgtttttttctttttgggatctcaacagaatcacctctaacagtctattcatggcaatgtaggctttttctaatatgcatctcaaaacccttccagcttctacccattattccattccaaagcttctyccacattttagctattagtcacatcttcattccctctagatagcaactttctgtcttagtttcaggcagcttaaacaaaatgccataaactaggttgtttataaacagcagaaatgtatttctccagttctggaggctggtgagttgaaatcaagctgctagcagattcagtgtctgatgagggcctactttctcatagacattgatttcttgctgtgtcctcacatggtggagggtgctaactaagctctctgggatctcttctataagtccattagtcctaatcatgaagtctccacccttatggcttaagcacctcccaaatgccccatctc

SEQ ID NO: 612200 - DNA, 504 bp, Homo sapiens
gtgtaaatgcaatccaggcacacactgcagttaaaaacttcattgctagagatgaagtcattcaayagccagcgattcattgtggactttaggaaaatatgagtgggtcaaggtgagagttcaggacactttgtttgtttgaactaaaggtaaagattgagtgtaatgagactctgtatataaatacacaaaaggaatgaatattcagagcagttttaagatgttagagaggccctatttgggtactagcatttatctttattccctgagtaactctgtgagtaatagacaccaatctcaacctaatgcccagaatttttgacagagtaactttaaaaccatagagccaatcacaatgtttaaccatatctggactaaaaatttgttatagcatctagcatacttttacatatgttcttgtgaaattgaataggatatttgacatattttctactgagttatggtcatatatagaagctaccccttaattaaattcttcactta

SEQ ID NO: 612201 - DNA, 581 bp, Homo sapiens
gatgctatttctccccatctttgtattgctctctgccactgatcaccttcccttctgtccactgaaacactgactaggaatctcattccccrataggcagtgctgatcctgaggtttttagtatttactctgaaagtaataatacacataatacttcttcaaatcagtttgagaaaagctttctacctattttttgtctctatgggtcattatttaataatgcaaaatgaagaaaataaattagttaaacaaccatttgatttagtttcaaaatagataatgtaagataaaacctataaacaccatcccagttattcaatcagttcaatttataagaatgaaatcaatttcctactgatataaacaataattattttgatcttttatatctaaatgaggtgaagagggtaatattgatacaaaaacactttgatattcaatgaagctaagtattatgaaataaaatcattatagaatgaacattatgtgaatagtaaaaaaactacttgctcttaattagctgtactgtaagataatgatgaacagactatgacacaagaaatgaattcaataaattcatc

SEQ ID NO: 612202 - DNA, 600 bp, Homo sapiens
taatcattctcatgtgtcgaggatggggccaactggaaataactgaatcatggtggtggttcccccacactgttcttgtggtagcaaataagtctcatgagatctgagagttttatatttaagcttgttcccctacacaaactctctctcttgcttgttgccatgtaagacatgactttgctcctcattcaccttctgccatgattgtgaggcttcctgagccatrtggaactttgactcaattaactatctttcctttataaactacccagtcttgggtatgtctttatcagcagcgtgagaacagacagtcaatgcagtagagtgaggtgttgctctaaaaattcccaaaaatgtggaagtgactttggaattgtgtaacaggcagagtttggaagagtttggagggctcagaagaagataggaaaatttgggaaattttggaacttcctagagacttggagggctcagcggaaaagaagatgtgggaaggtttggaacttcctagaaacttgttgagtggctttgaccaacatgctgatagtgatatggacaataaagtccaggctaaggtagtctcaggtgaagatgagaaactgg

SEQ ID NO: 612203 - DNA, 634 bp, Homo sapiens
taatcacctcccacaaggcccctcctctgacacgtggagattacaattcgagatgagatttgagtggagacgcagagccaatgcctgtcacttgggtaagtgaaggagattgagcataagttataattctagtatttcctcacataattgccttatattaatacaacgtattttattttaaaattagaatagctacacaaaaagcaaaacttattcataatctgatccctaaaaattaagcaagatcaagaattgcaaattcttccagattcctttctgtatatatagattgacatattatgcatgaattataaaattgatattctatttacataccgtttggtaacctgcatatcatttaactctttataaggtgagayattttccaagaactatatattttggtggtatagattccttagtggcttccaagtatgcctctgtatgtatatgtatttacttaacacactacctattaatggattttatattgttttccattttcatcgttgtaaacaaatacattgcaaaattaatattgttctattaaaagcaaatctaaatagtaagatatttgatacttgacaaattttctaattttcttcaagaaatgaagtaccaaaatattctgcca

SEQ ID NO: 612204 - DNA, 588 bp, Homo sapiens
cggacacccccaaacgctgctgcagggcctgcacggagtttgctccttccagtgcccaaaagcaatcacctcagctcctggacccactcacctttgtgctccctcccacaagggatggagcacagcaggtctgagtgagtggagttcactcctgctggcrctgaaatagccagctggtttccagtgccttgtgtactccagttcctcccttgttcactcatgtacttcctcctatgaggagttgagtgctgcaggctgagtaaacaagtcgcaagtcctgcaaaggggttaggggaatatcttgcttcacaaccccactatctgcaaattgatacttgtaacaattgccatagtgttagataaataatactttcttataattactgttttcttttatcaaaaattaccagcatgtgtatctttaagaagattatttgagatcttttggagaccacattctctaagaattctcttttttctgaatcttttccaattaaaaaatggcatttttatgtgttgttatagcatttgctaaattaaaatgaaagagacttttatgtgttagcaataagttgacatacaatttat

SEQ ID NO: 612205 - DNA, 600 bp, Homo sapiens
agtgcccaaaagcaatcacctcagctcctggacccactcacctttgtgctccctcccacaagggatggagcacagcaggtctgagtgagtggagttcactcctgctggcactgaaayagccagctggtttccagtgccttgtgtactccagttcctcccttgttcactcatgtacttcctcctatgaggagttgagtgctgcaggctgagtaaacaagtcgcaagtcctgcaaaggggttaggggaatatcttgcttcacaaccccactatctgcaaattgatacttgtaacaattgccatagtgttagataaataatactttcttataattactgttttcttttatcaaaaattaccagcatgtgtatctttaagaagattatttgagatcttttggagaccacattctctaagaattctcttttttctgaatcttttccaattaaaaaatggcatttttatgtgttgttatagcatttgctaaattaaaatgaaagagacttttatgtgttagcaataagttgacatacaatttattgtctagaccaggacacttttgatagtaaaagattttgctgaaaataatttaaattatataa

SEQ ID NO: 612206 - DNA, 650 bp, Homo sapiens
gtctagaccaggacacttttgatagtaaaagattttgctgaaaataatttaaattatataatttctgaaatattttattgaataacatttaataagttgagacatwaaaagttctcaaaataaatttttttctaaaataaaaattttcaaaatatgtttttaaaaattattttcaaaaatacaccttaaaatatattacagaaaaattttaaaaatactgtttttatttaaacattaaaatataagcattaaattatttttgtgactttatatattttaatcaatttctcactgtatgtatcactaataccaagtcatttgtgcatttataaagaaaaattgttttcaatattcaatattcagtttttatattttatcataaatatgttcataatcttcatcacagtctaattgtgtgcttaattaaaatgtttgatgctttcaattgactcaatcttacagcagatttttaattggggaatgttcagaaaaatgcactagtagagaaagtatagtatcaatcctgcttgtttattatttaaatgtgaaaatattacagcccaaatatattcagagctactgtctttttacctgtggattccagagtatctttctttgataaatattcatatgagaaaaacaaaaaaatt

SEQ ID NO: 612207 - DNA, 612 bp, Homo sapiens
ttataggtgtacagcattatttctgggctttctattctgttccattggtctgtgtgactgtttttgcaccattaccatgctatttgagttactgcagcctcatagcacagtttgaagtaagataatgtgatgcctccagctttattctttttgctttgtattgccttggcaattcagtcacttttttggttccatataaattttaaaatagtttttcctaattctgtgaagaacgtcattggtactttggtaggaatagcattaaatcagtaattattttgggcagtttggccattttcgcaatattgattcatcttatccatgaacatggaacatttttccatttgttggtgtcatctctgatttttttgagcagtgttttgtaattcttattgtaaagrtctttcacctccttagttagctatattcctggttattttattctttttgtggctattgtgaatgaaattgcattcttgatttggctctcagcttggatgctgttggtgtataggagtgctactaattttttactttgattttgtgttataaaactttgctgaagttgtttatcagctcaaagagtttctgtgaagagaccgtggagttttc

SEQ ID NO: 612208 - DNA, 430 bp, Homo sapiens
ttatctatcttattcattctttcaaataaccagctcctggattaattgatcttttgtaggtttgtttcatgtctcaattttctttggtttacctctgattttggttatttcttaacttctgctagccttggacttggtttgctcttgtttctctagttcttagaattgtgatgtcagcttgttaatttgagagctttctaactttttgatatkggtatttagtgctataaactttcctctttacacggatctgaatgtgtcctagagattctgttacattgtatctttgttctcattaggttcaaagaatttcttgatctctgtcttagtttcattatttgcccagagctcattcaggaagagattgtttaatttccatgtaatcgtatggctttgagtaattttcttagtattgattttttattgcact

SEQ ID NO: 612209 - DNA, 547 bp, Homo sapiens
caacttgccactctgtgacctttatttggggagtttagcccatttatattcaaaattactattgatatgtctggatttgatcctgtcatcactttgttaactggttattatgcagacttgtttgtgtggctgctttatactgtcattgtcctatgttattgtgtttttgtagtggccagtaatggcctttactttccatatttagcactccttttaggactgcttgtaaggcaggtctggtgttaacaatcctccttagcatttgtttgtctgagaagaatctgatttctcctttgcttatgaagcttagtttggctggatatgaaattcttggttgaaaattctttcccttaggaattctgaatataggmccccagtctcttccggattgcagtttctgccattggtctgctgttagcctgatggggttttgtttgtaagtgacctgcctcttctctctagttgcctttaacattttttttctttcatttcaacattaagaatttgattattatgtgtcttgagggtagtcttcttgtgtagtatc

SEQ ID NO: 612210 - DNA, 467 bp, Homo sapiens
atcctaaattaatgcaactattgataatgattttaaacaacaaaaaatcaggaacaactgctaaatgcaccataaaggtcttggggacaataaatataacctggatatctcccagggaaaccaacatttagtcacacacaatattgtgaagttctttaccatagaaccacaactaaaatggtcacctrtttagagttctgttgattattcccattagtttgggcaagttcctttatttctataaactcataaagttggtatgaagattgagttctaggaaagagaaaagctccaagtctgatagctagaaatattaagagtaattatctagatggattttcagtgaccataatagttaaataatctcatttttagcccagttacacttaggtactttgagtctatttagtaaacttaatctgaaatcaaaactaaaattcttatatcacaatgaatatgcttaaaaa

SEQ ID NO: 612211 - DNA, 599 bp, Homo sapiens
atattcagttgcttgcttagtgatggaggtgtgaaaatggaaaactatgagcagtaacagagaggtccttttgccattaacatctgttacagccacaattattaatattgttaccatttttcacagcaggaatgatttccatctccattttatattacaacaaataatttgggaaatgattaatgagatttttaattatagattgaatttatcttaaaacaatctgtgccactacagctggaaaggatcaggctytaattacaaccaggaaaaactccacagtgaaaccaatcatgtccattttagggtgcacagaccttctccatgcctgcttcaccttcacacttgactgcttagctccattttttaacacatggtgctaatgaggccatggccatgttttcactgcccatatgtgccagttagcttcactgttccagtgctacagattgttttcgtaaacttgggctgccaactcaacaatttctccactcattcaccagggggatctggcaaaaaaaaaaaaaaaaaaaaaccatggactatctgttgtaaagttaaaacaagggctgattgcttggggataagagtaagaaggc

SEQ ID NO: 612212 - DNA, 681 bp, Homo sapiens
accacttaggcacacaaggacagctcttcaggtggtctcagagaggataaaaaattgcatatgtcatctgccagmacagatactaaattactttagcctacagaaactttctatttgtctagaaggcatttattttcccacttgaggtgttgggaaaacaataggctaaacttcctatgacagaaaatacatcagtgaaaactcagtatctctttaatcttttattatatactctgttactagtggcctaaactttctgtgacagaacatacatcagtgaaaactcagcatcactttaatcttttactgtgtcctctgctactatatctctgtgattactgttagcatatcatgattatttgttcatttttctttgtatgcatgttttttacattttacacagtatattcaatcaaaataatacgtagatcacgtaggtttaaattgaatgctttctgtagtttgtttaatctgtacattgaatgctacctttataagtgccttatttttggaaacatgtcaatataatcaatccatcaacatttgttaatatactagcaactatttgattaactgtaagtattatttcactactatatctccctttgactgtgtttttaccttagaaaatttgtggtaatttatgctaaaataggaaaaaatgagcacaacagtataagc

SEQ ID NO: 612213 - DNA, 681 bp, Homo sapiens
accacttaggcacacaaggacagctcttcaggtggtctcagagaggataaaaaattgcatatgtcatctgccagaacagatactaaattactttagcctacagaaactttctatttgtctagaaggyatttattttcccacttgaggtgttgggaaaacaataggctaaacttcctatgacagaaaatacatcagtgaaaactcagtatctctttaatcttttattatatactctgttactagtggcctaaactttctgtgacagaacatacatcagtgaaaactcagcatcactttaatcttttactgtgtcctctgctactatatctctgtgattactgttagcatatcatgattatttgttcatttttctttgtatgcatgttttttacattttacacagtatattcaatcaaaataatacgtagatcacgtaggtttaaattgaatgctttctgtagtttgtttaatctgtacattgaatgctacctttataagtgccttatttttggaaacatgtcaatataatcaatccatcaacatttgttaatatactagcaactatttgattaactgtaagtattatttcactactatatctccctttgactgtgtttttaccttagaaaatttgtggtaatttatgctaaaataggaaaaaatgagcacaacagtataagc

SEQ ID NO: 612214 - DNA, 475 bp, Homo sapiens
tctttgtctacaattcctatatgaacatataatttataaatggaaaaacctataagggtgtagctatttaaatggtttttaaatgggttctttttatttgtcaatttatgctataaaatctaggaactgacagactgtatactttagccctacaaatcctgtttgacttctgtcttcagcaaaagtatgtgactgcttggtgtttctgtcttcctacagkgcccatgttataataatttaggagtgttttgtgcagatctcatctgagcaccatgtataggtccatttcttctgtaacacttgaatttaaattagaaaatcttcataattaatcaggtaatatttatataaatatcagtataaaaccgcatgcaaacatttgttatataaaatattttttctaaaaagaataaacaaactgaatcatgaccaataatccaggtgagttgctttaagttgaatatgaactgaataa

SEQ ID NO: 612215 - DNA, 503 bp, Homo sapiens
  misc_feature 1, 2, 3, 4, 5, 6, 7, 8, 9, 10, 11, 12, 13, 14, 15, 16, 17,18, 19, 20, 21, 22, 23, 24, 25, 26, 27, 28, 29, 30, 31,32, 33, 34, 35, 36, 37, 38, 39, 40, 41, 42, 43, 44, 45,46: n = A,T,C or G
nnnnnnnnnnnnnnnnnnnnnnnnnnnnnnnnnnnnnnnnnnnnnncaagtgcacatttgaagaaagcataggcttgctacaggattctattaatataatgaagagattccacttgtgtaaatacagtagagggatattacattagtctcattaacccattaaacctcttgttgtttcaacccaactgtaacaaggcttatatggagtagggtagaccagaatgtttgactgagtgaaaattaattggcaacaccaaaacatgccaagagattctaagtacataaaaytaaatgtgttttgaaatgattgtacatatgtttaactttttcttgtttacatccaatggcaaacctgtgaagatatttaacttttaattttattgttaatttttaggaacacatagtagttgtaaatatttataaggtacatatgatattttgatacaagcctctaaagtataatgatcaaatctgggtatttggaagattcattatctcaaacg

SEQ ID NO: 612216 - DNA, 604 bp, Homo sapiens
taacccattaaacctcttgttgtttcaacccaactgtaacaaggcttatatggagtagggtagaccagaatgtttgactgagtgaaaattaattggcaacaccaaaacatgccaagagattctaagtacataaaactaaatgtgttttgaaatgattgtacatatgtttaactttttcttgtttacatccaatggcaaacytgtgaagatatttaacttttaattttattgttaatttttaggaacacatagtagttgtaaatatttataaggtacatatgatattttgatacaagcctctaaagtataatgatcaaatctgggtatttggaagattcattatctcaaacgttgatcatttatttatgatggggtatttaaaatcttttctagctattttgaaatataaaatacattactgttaactatatttccccaattgtgctaccaaacactacatccctatccttctataaaacttatttaaattcaatagcttattgaaaattctagaaaagtatctgctttgtagtaaacacttgataaaacgtagttcacttgtgaaacaaataaatcattttctttaaacaatcaaattcattta

SEQ ID NO: 612217 - DNA, 448 bp, Homo sapiens
ccttgtaacatagctttgttggttttgcttagaattctcttggctatttatgctcttttttggttccaagtgaagtttaaaatagtttgttttctaattctgtgaagaatgtcattggtagtttgataagartagcaccgaatttgtacgttgctttgggcatcatggccattttaacaatattgattcttcctattattgatcatgaaatggtttaccatttgtttgtgtcatctctgatttctttgaatagtgtttcataattctcaatgtaaaggactttcacctcgttgggttagttgtattcctagtattttattcttattacggctattgtgaatggcattgaattcttgatttggctgtcagcttgtatgttgttggtgtataaaggtgttactaatttttgtacatggattttgtgtcctgaaactttgctaaaattgtt

SEQ ID NO: 612218 - DNA, 448 bp, Homo sapiens
ccttgtaacatagctttgttggttttgcttagaattctcttggctatttatgctcttttttggttccaagtgaagtttaaaatagtttgttttctaattctgtgaagaatgtcattggtagtttgataagagtagcaccgaatttgtacgttgctttgggcatcatggccattttaacaatattgattcttcctattattgatcatgaaatggtttaccatttgtttgtgtcatctctgatttctttgaatagtgtttcataattctcaatgtaaaggactttcacctcgttgggttagttgtattcctagtattttattcttattacrgctattgtgaatggcattgaattcttgatttggctgtcagcttgtatgttgttggtgtataaaggtgttactaatttttgtacatggattttgtgtcctgaaactttgctaaaattgtt

SEQ ID NO: 612219 - DNA, 448 bp, Homo sapiens
ccttgtaacatagctttgttggttttgcttagaattctcttggctatttatgctcttttttggttccaagtgaagtttaaaatagtttgttttctaattctgtgaagaatgtcattggtagtttgataagagtagcaccgaatttgtacgttgctttgggcatcatggccattttaacaatattgattcttcctattattgatcatgaaatggtttaccatttgtttgtgtcatctctgatttctttgaatagtgtttcataattctcaatgtaaaggactttcacctcgttgggttagttgtattcctagtattttattcttattacggctattgtgaatggcattgmattcttgatttggctgtcagcttgtatgttgttggtgtataaaggtgttactaatttttgtacatggattttgtgtcctgaaactttgctaaaattgtt

SEQ ID NO: 612220 - DNA, 612 bp, Homo sapiens
aaaaactctcacatgaagtgatgttgaattttatcaaaagccttttcttcatctatggaaataattatatggctcttgtttttagttctgtttgtgtgatgaatcacatttatcgatttttttttacatttactgatttgtatatgttgaatcaactttgcatcccagggataaagcatacttgatcatgagggattatatttttgatgtgcaggtagattcagcttactagtattctaytgaggattttgcatctatgttcatcaaggatattggtctgacattttctttttctgccaagtctttcccaggttttggcatcagtacgatggtgatctcatagaatgagctaaggaggaattcatattctttagttttttcaagatactttcagaatggtaccagctcttctttatacatctggtagaattcagctatctggtcctgggctttttctggtcggcaggcttgttattactgattcaatttcaggactcattattaatttgttcagggatttaatttcttccagtttaatcttggtggtcgtatgtttccaggaatttacccatttcttctaggttttctaacttatatacactgaagtgttcc

SEQ ID NO: 612221 - DNA, 612 bp, Homo sapiens
aaaaactctcacatgaagtgatgttgaattttatcaaaagccttttcttcatctatggaaataattatatggctcttgtttttagttctgtttgtgtgatgaatcacatttatcgatttttttttacatttactgatttgtatatgttgaatcaactttgcatcccagggataaagcatacttgatcatgagggattatatttttgatgtgcaggtagattcagcttactagtattctattgaggattttgcatytatgttcatcaaggatattggtctgacattttctttttctgccaagtctttcccaggttttggcatcagtacgatggtgatctcatagaatgagctaaggaggaattcatattctttagttttttcaagatactttcagaatggtaccagctcttctttatacatctggtagaattcagctatctggtcctgggctttttctggtcggcaggcttgttattactgattcaatttcaggactcattattaatttgttcagggatttaatttcttccagtttaatcttggtggtcgtatgtttccaggaatttacccatttcttctaggttttctaacttatatacactgaagtgttcc

SEQ ID NO: 612222 - DNA, 612 bp, Homo sapiens
aaaaactctcacatgaagtgatgttgaattttatcaaaagccttttcttcatctatggaaataattatatggctcttgtttttagttctgtttgtgtgatgaatcacatttatcgatttttttttacatttactgatttgtatatgttgaatcaactttgcatcccagggataaagcatacttgatcatgagggattatatttttgatgtgcaggtagattcagcttactagtattctattgaggattttgcatctatgttcatcaaggatattggtctgacattttctttttctgccaagtctttcccaggttttggcatcagtacgatggtgatctcatagaatgagctarggaggaattcatattctttagttttttcaagatactttcagaatggtaccagctcttctttatacatctggtagaattcagctatctggtcctgggctttttctggtcggcaggcttgttattactgattcaatttcaggactcattattaatttgttcagggatttaatttcttccagtttaatcttggtggtcgtatgtttccaggaatttacccatttcttctaggttttctaacttatatacactgaagtgttcc

SEQ ID NO: 612223 - DNA, 508 bp, Homo sapiens
tgagtgctcttgtgttgtgtgtatatatatatttcggtttgttgtcttgttgagtcaaactctaccattatgtaatgctcaactttttttttaatctttgttcatttaaagtttgttgtgtctgaaattagaatagtaaccactgcttttttatatttcccatttggttggtagatttttctccattcctttactttgagtctatgggtatcattgcatgtgagatgggtctcctgaagacagcataccatcaggtcttgcttctttatccagccggccactgtttgccttttaattggggcattaattttgtttacagtcaaggctaatgttgataygtgcagatttgatcctgtcattatattatcagctggctattatgcagacatgtttgtgtggttgttttacagtatcaatgatctatgtacttaagtttgtttttgtagtggctggttatagtctttccatatttagcacttctttcagggcctctcttatgacaggtctg

SEQ ID NO: 612224 - DNA, 375 bp, Homo sapiens
cctgtcattatattatcagctggctattatgcagacatgtttgtgwggttgttttacagtatcaatgatctatgtacttaagtttgtttttgtagtggctggttatagtctttccatatttagcacttctttcagggcctctcttatgacaggtctggtaggaacaaattcctttaacatttgcttgtctaaaataatcttatttctcctttgcttatgaagcttagtttagctggatatgaaattcttgcttagaggttcttttctttaggaatgctaaatataagccttcaatctcttctggcttgtagggtttctggtgaaatatttcttaaatgccctttctctttagctgtctctaacattttttctttc

SEQ ID NO: 612225 - DNA, 576 bp, Homo sapiens
agtttgtttttgtagtggctggttatagtctttccatatttagcacttctttcagggcctctcttatgacaggtctggtaggaacaaattcctttaacatttgcttgtctaaaataatcttatttctcctttgcttatgaagcttagtttagctggatatgaaattcttgcttagaggttcttttctttaggaatgctaaatataagccttcaatctcttctggcttgtagggtttctgstgaaatatttcttaaatgccctttctctttagctgtctctaacattttttctttcacttcaagcttggagaatctgatgagtatgtatcttggggatgggcttcttgtgtagtatctcatagggattctctgcttttcctgaacttgaatgttggcctctctagtgaggttagggaaactttcatgaaccatattctaaagtgtgttttccaaattgctttctttctcccccatctttcagggatgccaatgagttgtagacatagtctctgtacataattccatgtttcttggaggttttgttctattcttttttaaaaaatttttgcctgactg

SEQ ID NO: 612226 - DNA, 341 bp, Homo sapiens
agtggaggtggggacctgtgtggaaaatagtctggccacttttccataaggctgttgcactgtgcccaggatcttcatcagtagctaatcactgtgctccctcccatatctcagggcaacaggagcaagggctgcaaagcaacaaaaatagtggcctgcctacttcctttgggagctccatcctagggaaatgcagggctgctgctggccygagagccaaggcaggaagtggctggagtcctgggtctggaggccgtgcctagagtggagtagcagtggtgtgggcccacatggcaaacagctgcactgtgctcggggtctggattagtccctgatcactg

SEQ ID NO: 612227 - DNA, 445 bp, Homo sapiens
aacactgcccagtgaagagtagtggaggtggggacctgtgtggaaaatagtctggccacttttccataaggctgttgcactgtgcccaggatcttcatcagtagctaatcactgtgctccctcccatatctcagggcaacaggagcaagggctgcaaagcaacaaaaatagtggcctgcctacttcctttgggagctccatcctagggaaatgcagggctgctgctggcccgagagccaaggcaggaagtggctggagtcctgggtctggaggccgtgcctagagtggagtagcagtggtgtgggcccacatggcaaacagctgcactgtgctcsgggtctggattagtccctgatcactgtacaccctcttatcctgatggcaacagtagtgagagctgtggagcagcaaaaatggccacctgcctctccttctgggagcctca

SEQ ID NO: 612228 - DNA, 622 bp, Homo sapiens
tcactgtgctccctcccatatctcagggcaacaggagcaagggctgcaaagcaacaaaaatagtggcctgcctacttcctttgggagctccatcctagggaaatgcagggctgctgctggcccgagagccaaggcaggaagtggctggagtcctgggtctggaggccgtgcctagagtggagtagcagtggtgtgggcccacatggcaaacagctgcactgtgctcggggtctggattagtccctgatcactgtacaccctcttatcctgatggcaacagtagtgagagctgtggagcagcaaaaatggccacctgcctctccttctgggagcctcatcccagggaagtgcagagytgcttctggcctgagaacttaggcaggtgttagtggttcactttttacaaataatgaactagcattgagacatcattatcactaaaagtccatcatttgcattagagtcactcttggtgttgcatgttttatggcttttgagaaatgtataaggatatgtatctactattgtaataccatacagaataccttcactgccctaaaactcatctgttccccaccaatttattcttccctcctcccttaccccctgttaaccactgata

SEQ ID NO: 612229 - DNA, 622 bp, Homo sapiens
tcactgtgctccctcccatatctcagggcaacaggagcaagggctgcaaagcaacaaaaatagtggcctgcctacttcctttgggagctccatcctagggaaatgcagggctgctgctggcccgagagccaaggcaggaagtggctggagtcctgggtctggaggccgtgcctagagtggagtagcagtggtgtgggcccacatggcaaacagctgcactgtgctcggggtctggattagtccctgatcactgtacaccctcttatcctgatggcaacagtagtgagagctgtggagcagcaaaaatggccacctgcctctccttctgggagcctcatcccagggaagtgcagagttgctwctggcctgagaacttaggcaggtgttagtggttcactttttacaaataatgaactagcattgagacatcattatcactaaaagtccatcatttgcattagagtcactcttggtgttgcatgttttatggcttttgagaaatgtataaggatatgtatctactattgtaataccatacagaataccttcactgccctaaaactcatctgttccccaccaatttattcttccctcctcccttaccccctgttaaccactgata

SEQ ID NO: 612230 - DNA, 629 bp, Homo sapiens
ttttctaacactttaacaattcccttcttagcatatatattttccttattgtggcagacactgtttgtcgcttgcctgtcattctcatttcttcaccaacggattcctgatttttcttagatgtaaaagtggtcccagagtaagaatttatgtagttgcaacaatctgtttccattttttcctctgacaggcatagtagaacttgggctactccattctactcaactagagagaaaagatgtcatctgcaatgtcatggaacaatatttagtttcttgacaataacagagagaagtgagaggaaatctccttggctttcttcttcccttcttaataaatgtgggaagatataatcactgcagttatggcagctatcttrtgattataaaggaagaagtaccatgatgagaatgcagatggaaaaatgaaaagagccaaggattgggtctgtgtgataattttgactcataaaaccacctacagtaccacctccctcaataagacactcagttgatatttccttacttgagccaaacgtatcctgataccctcctagaaatagacttagtgtcaatggccatgcccacatctttgaaacattatcaatagtatttatatcagaaaaaggt

SEQ ID NO: 612231 - DNA, 688 bp, Homo sapiens
cttcttaaaattcatatttgaaatataagaaatttaaggcaatgttttaattgcctatgtgtatcttcaccatatttcatgacactttggaaagaaaatcaatatatgcgttgtattacatatgccatctgtcaatatgtagaaaatatgatcacaracctttgtaacagttctgggtaaaatttttagtatctattgtttttttcctttttctttgccttacaatttttttttcttttgagattggagtggagctaaatgggctgcacaaccccttcttgatgacaagcaattttcttcccactctaccaaataactcccacactaaacttacattttgtataataaagtttttctgtattttgtgtttgttttttatttgttttttggagatttgagagcattaactaacagttacggcactcttttgattaaaattatcattttcttccattagtacttgaaataaaatccaaacttatcactggaaatgctgttaactctctctctagctatatctttataaatctccccacaaacagtgacacagttgctaaagtttgccaaaatttttccaaacacataccttagacctttccaaacaagggcctgaggtcctcttctcctagaaagctttgcttcccatcatttagccttcactgcaaatattaccaactcagacaggcta

SEQ ID NO: 612232 - DNA, 600 bp, Homo sapiens
ttaccttttttctcaaactatttcgagtttgttatccaattccgtttggtcaatgtaatcaagttgaacattcaccatctgcttatgctctgtttaatacaattgaaggaagacaaggaccctcattagacaacccaaacctctgacttcaaccaccactatactagacaagtcaaactccatatactagaaacactcactggcctcaagtttactttccttttcaaggtagtaatctttctccataaacatcamttcttcatctttgtatttcttctttttaatatctaaacttggttgactgcatttccagccttggtgctgtattacctaattctctcaacctctggtcaaatgaggaaaactacttacccgatgtgatttaggaggatattaaataaagccatttaaataaaacccatagcactgtgcctggtaaacaaagcgtgatgagtaaatgttagcaattcttattgtttaattattataattaccaaactttctcaaaatgatttttctgttttattaatgaccactagctgtattggaaaatcatttttatcaaaatattattgatacatgaatattagaaattacaaa

SEQ ID NO: 612233 - DNA, 600 bp, Homo sapiens
ttaccttttttctcaaactatttcgagtttgttatccaattccgtttggtcaatgtaatcaagttgaacattcaccatctgcttatgctctgtttaatacaattgaaggaagacaaggaccctcattagacaacccaaacctctgacttcaaccaccactatactagacaagtcaaactccatatactagaaacactcactggcctcaagtttactttccttttcaaggtagtaatctttctccataaacatcaattcttcayctttgtatttcttctttttaatatctaaacttggttgactgcatttccagccttggtgctgtattacctaattctctcaacctctggtcaaatgaggaaaactacttacccgatgtgatttaggaggatattaaataaagccatttaaataaaacccatagcactgtgcctggtaaacaaagcgtgatgagtaaatgttagcaattcttattgtttaattattataattaccaaactttctcaaaatgatttttctgttttattaatgaccactagctgtattggaaaatcatttttatcaaaatattattgatacatgaatattagaaattacaaa

SEQ ID NO: 612234 - DNA, 580 bp, Homo sapiens
acatatggatatacaattgttccaacataatttatgaaaaaactatactttctcccttgaattgytttgggccctttgtcaaaaatctattgtttatataggtcaactctagtttctaatctaaagtctattttgttccatggacctatttatgtatttttatgccaaaacttgaaatcaagtattgttagttcttcaactacaatcattttcaagattgttttgaatgtcctaggtcttttgcatttccatatgaattttatgatcatattacaggtttctgaaaacatgctaagtgggattttgataggaattgtatcaacctgtagataaatttgaggtttattgccattttaacagtattacttctccgattaatgctcattggatgcttttcatttagatggagctcctttaatttctctcatcaaagtacaggtctttcacgggtttgtcagatttatccttaagtatttcatattttgatcccgtggtaaacattttcatctcaatttttaattgctcattgctagtgttcaaaatgcaattgattttgtctattgctcttttattccgcaac

SEQ ID NO: 612235 - DNA, 580 bp, Homo sapiens
acatatggatatacaattgttccaacataatttatgaaaaaactatactttctcccttgaattgttttgggccctttgtcaaaaatctattgtttatataggtcaactctagtttctaatctaaagtctattttgttccatggacctatttatgtatttttatgccaaaacttgaaatcaagtattgttagttcttcaactacaatcattttcaagattgttttgaatgtcctaggtcttttgcatttccatatgaattttatgatcatattacaggtttctgaaaacatgctaagtgggattttgataggaattgtatcaacctgtagataaatttgaggtttattgccattttaacagtattacttctccgattaatgctcaytggatgcttttcatttagatggagctcctttaatttctctcatcaaagtacaggtctttcacgggtttgtcagatttatccttaagtatttcatattttgatcccgtggtaaacattttcatctcaatttttaattgctcattgctagtgttcaaaatgcaattgattttgtctattgctcttttattccgcaac

SEQ ID NO: 612236 - DNA, 666 bp, Homo sapiens
gagctcctttaatttctctcatcaaagtacaggtctttcacgggtttgtcagatttatccttaagtatttcatattttgatcccgtggtaaacattttcatctcaatttttaattgctcattgctagtgttcaaaatgcaattgattttgtctattgctcttttattccgcaaccttgctgaactcatttattagttctagtagctctttttatgtatttcattagaatttctttatgaattatcatgccatctgcacacaatgacagttttacttccttgcttttcattctagatgtcttttatttctcatgttttagtttgttgatatggcgarttacactgactgcatttcaaatgtttaaccaaacttgtatttgtaggataagctgcatttagtacatgaattattaatatagatagatcgattggaaagatatattcaatttctatttaaaataaatgtcatctagatttatgaggaatacttgtctgtatttgttttttttttttttgcagtgtctttgtcttgcgttgatagtgcagtaatgctaacctaacaggataggttacaaaatattcactctgtttttgttttgttttgttttctaatgagtttgtgtagaattggtgttgtttcttccttaaatatttggttgattctagc

SEQ ID NO: 612237 - DNA, 581 bp, Homo sapiens
aatcacactgtgaacttttgctccaagaacaacttcagaaaagaattcacagaccctttgaaagcagcatcttgctgctgcaaactccatgagatggctgaaaacctgtgagctcccaaagtgtgagaaggggaaaagtcagcctctgaacacacatcctcactggggaacctgaaaatgcaggtcatgaaagaaggatctgaccttacctatagctgaaatggatttaggtagctaagtgaaatatacaagtagaagaagcagcagggagagccctgtaggcactccctgtccccagcttaagaccagggaagccattcctggccatgtctcacagggatccttggggaaggcagccagcaaaactcgggaggggcacagagtgaaggacactcctaattgaactgacaataatttccactgagcaaaamttttcttgagcagaattggggtgggggagcaaacaggaagtgcagataccagcatagaagttgcagccaaaggtgcaggcaggtgggaagaggtgaggcctgggagccatgcttgctttctcagtagggaggcttgtagcctggggcaag

SEQ ID NO: 612238 - DNA, 521 bp, Homo sapiens
tttgagtccagcctggccaacatagtgagaccccatctcttttaacaacaaaaaagaaaccgaaccattaaactattccccacccagcccctgrcaaccactattctgctttctgtttctatggatttgactcctagatctcatatctagagtatttacgtacagcaacacagtacttatttgtgtgactagcatgcttcactcagcgtaatggactcaagattaatccgtgttacagattatgtcagaatgtccttcctttttaaggcggaatagtgttccattgtgtggatgtaccacattatgtgtatccgttcatctcacagtggacacttgacttgcttctgtttttctttttttgcttgagacagggtctcactctgttgcccaggccagggtgcagtggcacaatctcagctcaaactactgggaacaagtgatcctcccacctcagactcccaagtagctgggacaataggtgtgtcctaccacaccccgttcatttttgtgttttttgtaga

SEQ ID NO: 612239 - DNA, 493 bp, Homo sapiens
acaggtgtgagccactgcacccagcctacctttcaaaaagaatttataatgatttaagattgtatgttcaacaaacttttattaatcatgtattaatcaaaatgctaatggtttctgggtttctttttaattgcatgaaattaacatgtatttactaatggcaggttcatgacaaataagtttaaccatgtgtataagcagacctcagcttaaatacttgatttcctctgaaccagattgttaattcacatcacccaataggtttgttagtcatagtgttagatctccatgtgatatactatcctggtcgtatcacatttttcactttaaatccaaaggtagccacttttttttaagtttttatttatactttatcttattccattaaaaatttatggcaattgataggaaatccactcaataaaatagaaaaataagagaaaaatatttagaataatataaattagaawaggtggtattttgggggagggaa

SEQ ID NO: 612240 - DNA, 490 bp, Homo sapiens
actggacaaagagtcttggcatagtaggtgcataattgttgctttttggcatttgactggacagcgagagttgtgattttgattctccaaaagcagactatgtgagcaccaagtatattttaggtcatttagatagtttgttgtttgaatgaatgaggataagacatccatcaatttttgatactrcaccaaatctgccttatttcaaaaggaactaactaaacactccatcacagatgtcctgacaaagatgcacggatgactatattaacgagactgtgtcagaatgaataataatcaatggctgtcctgagaatccaacataaatttccttatctaaaatagtggtttgtttaaatgatgaagcaaagatggcattggagctgttggctcactgtcccttttattctgttaactgcagaagcactgaatctgatgccctaccttgtggggttatggtgtgcttatctccccctcctcaaacagagtt

SEQ ID NO: 612241 - DNA, 490 bp, Homo sapiens
actggacaaagagtcttggcatagtaggtgcataattgttgctttttggcatttgactggacagcgagagttgtgattttgattctccaaaagcagactatgtgagcaccaagtatattttaggtcatttagatagtttgttgtttgaatgaatgaggataagacatccatcaatttttgatactacaccaaatctgccttatttcaaaaggaactaactaaacactccatcacagatgycctgacaaagatgcacggatgactatattaacgagactgtgtcagaatgaataataatcaatggctgtcctgagaatccaacataaatttccttatctaaaatagtggtttgtttaaatgatgaagcaaagatggcattggagctgttggctcactgtcccttttattctgttaactgcagaagcactgaatctgatgccctaccttgtggggttatggtgtgcttatctccccctcctcaaacagagtt

SEQ ID NO: 612242 - DNA, 490 bp, Homo sapiens
actggacaaagagtcttggcatagtaggtgcataattgttgctttttggcatttgactggacagcgagagttgtgattttgattctccaaaagcagactatgtgagcaccaagtatattttaggtcatttagatagtttgttgtttgaatgaatgaggataagacatccatcaatttttgatactacaccaaatctgccttatttcaaaaggaactaactaaacactccatcacagatgtcctgacaaagatgcayggatgactatattaacgagactgtgtcagaatgaataataatcaatggctgtcctgagaatccaacataaatttccttatctaaaatagtggtttgtttaaatgatgaagcaaagatggcattggagctgttggctcactgtcccttttattctgttaactgcagaagcactgaatctgatgccctaccttgtggggttatggtgtgcttatctccccctcctcaaacagagtt

SEQ ID NO: 612243 - DNA, 490 bp, Homo sapiens
actggacaaagagtcttggcatagtaggtgcataattgttgctttttggcatttgactggacagcgagagttgtgattttgattctccaaaagcagactatgtgagcaccaagtatattttaggtcatttagatagtttgttgtttgaatgaatgaggataagacatccatcaatttttgatactacaccaaatctgccttatttcaaaaggaactaactaaacactccatcacagatgtcctgacaaagatgcacggatgactatattaacgagactgtgtcagaatgaataataatcaatggctgtcctgagaatccaacataaatttccttatctaaaatagtggtttgtttaaatgatgaagcaaagrtggcattggagctgttggctcactgtcccttttattctgttaactgcagaagcactgaatctgatgccctaccttgtggggttatggtgtgcttatctccccctcctcaaacagagtt

SEQ ID NO: 612244 - DNA, 577 bp, Homo sapiens
ctactatgtagcaggaactgtcacatgtggcttctaattctaacaatgcttcaaattattattatcctcattttctgtattaaaaaaatgagacattgagaggttaagtgatttgcccaaaattacacagctggttatcatggaggaaatgactccatgctatcttcccacagtgtgctggagttggatttaaaaagagaacaacacaaatgtaattgtgataacgttttttagacacatagattcagttwtaaatttctaaaacctgtgtattacttttttaaacgacccttttacatgttagtatgttacattgttatatttatatattaattttttattatctaggcagtgttttctagcaaatatctagtgttttcttatttatatactaggtcataatttgcttttgttttggtaattgaattaaacctgatatttttcatttttatttgtgcaatctgtgcctccgagaagaattaaatgaattaagcaatatccatggtgtcatagccccatgtatagtcatctctcagaatcattgttcgacactcatggatcccccttctctgggaat

SEQ ID NO: 612245 - DNA, 576 bp, Homo sapiens
ctagccatactaagaatttatttaatactcccttgcttcttacctctccttgttggaagcattcaatcaactatagaggcaatagtagctaggcaaactaccactcagctattaggtatatgagaagtcatgaaaacagggcccacatagtggtataagtgcccttacagaggaagaaacaccagacctctccctctctaccatatgaggacacarcaagaaggcaggcatctgcagcccaaagagagagccctcactagacactgaacttgcttgcaacttgatcttggacttcttatctccagaactgtgaaaaatacattcctatggtttaagtcacccagtctatggtattttgttatagcagctcaaacttacataagatagaagttttggtaatgataaacttccttggtttttgtttgtgagagaatgtatttctctgtcacttttgaaatataatttcaattagtaaataattttaggttgatggagttttttggtttttcttttcttcagacttttaatattttattccattctttccttacctgcattgtttttgagaattctact

SEQ ID NO: 612246 - DNA, 601 bp, Homo sapiens
accttcaatctgcaaaaaatgcagtatgcacaaagggcaataaagcaaaacacaatgaatggaggtgtacctgtgctgtgcatcactatctactaatctctagaattaattcaaatttcaccagtgcctttttttttttttttttttttggcagagtctccctctgttacccaacctgcagtgcagtggygtgatctcagctcactgcaaactctgggttcaagcaaccctcccaccttagcctttggagtagctgggattataggcctgcaccatcacacccagctaaattttgtatttttaatagaaatgggatttcgccatattggccaggctggtctgaaactcctggactcaagtgactcactcatgctggcctcccaaagtgctgggattagaggcgtgagccaccatgcctggccttaagagtgttttctttctttcttttttttttccataggttattggggaacaggtggtgtttggttacatgagtaagttctttagtggtgattggtgacattttggtgccctcatcacctgagcagtaaacactgcaccctatttgtagccttttatcccttgtgacctctcccaccct

SEQ ID NO: 612247 - DNA, 601 bp, Homo sapiens
accttcaatctgcaaaaaatgcagtatgcacaaagggcaataaagcaaaacacaatgaatggaggtgtacctgtgctgtgcatcactatctactaatctctagaattaattcaaatttcaccagtgcctttttttttttttttttttttggcagagtctccctctgttacccaacctgcagtgcagtggtgtgatctcagctcactgcaaactctgggttcaagcarccctcccaccttagcctttggagtagctgggattataggcctgcaccatcacacccagctaaattttgtatttttaatagaaatgggatttcgccatattggccaggctggtctgaaactcctggactcaagtgactcactcatgctggcctcccaaagtgctgggattagaggcgtgagccaccatgcctggccttaagagtgttttctttctttcttttttttttccataggttattggggaacaggtggtgtttggttacatgagtaagttctttagtggtgattggtgacattttggtgccctcatcacctgagcagtaaacactgcaccctatttgtagccttttatcccttgtgacctctcccaccct

SEQ ID NO: 612248 - DNA, 398 bp, Homo sapiens
acgttgtttctttgctgactttctgtcttgatgacctgtctagtgctgacagtggagtattgaagttccccactatcattgtgttgatgtctgtcttatttcttggtctattagtaaatgttttataaatttgggagctccagtgttaggtgtatatatgtttaggactgtgatattttcctgttggaaaaggccttttaccattatataatgtccttctttgtctttcttactgctgttgctttaaagtttgttttgtctgatattagaatagctactccagctcgcttttggtgtccatttgcatgaaatgcctgtttctacccctttactttaagtttatgtgagtcyttatgtattaggtgagtctcttgaagacagcaaatagtcagttagtg

SEQ ID NO: 612249 - DNA, 352 bp, Homo sapiens
gggtgtggtggctcatgcctgtaatcccagcactttggaaggccgaggcgggaggatcacctgaggccaggagttcaggaccagcctggccaacgtggtgaaacgtcatctctaccaaaaatacaaaatgagccaggtgtggtggtgcacccctgtaattccagctactcgggaggctgtggcaggaggatcgcttgaaccttggaggcagaggttgcagtgagccgagattgagccacagcactccagcctggacaacagagtgagactctgcctttaaacaaacaaacaaacaaacagactttaagacaaatatttaaaaasgaattttcattcaatttgaaattcaaga

SEQ ID NO: 612250 - DNA, 550 bp, Homo sapiens
cttccccttccaccaggattctaagttttctgaggcctcctctgccatgtggaactgtgagtcaattaaacctcatttttttgtaaactacccagtctcaggaagctctttatagcagtatgaaaatgaactaatacaactttctatgtgattaaggaataaccatggtatgggaacagtcaccactttgacatcagaatatatgattccctcttttgtatcagtggtttaatgctacacattgataatgacaatgtctgtcagggtcctcagataaacctactcacatggcttaactagtttttcttttaggtattctccttacagtcctcaaacccaaaccaattatttgagagtccacagcaaaattaaaatacctttatagtcatcatcatcaaaatcatcatcattatcagtctcattactatgatcatctgctagctttgctactcaaataatgctttaatattacattaagggcattagtcataaggagaaagggaaatataatcattattaagcsagataatattaaaatgaagttattatt

SEQ ID NO: 612251 - DNA, 575 bp, Homo sapiens
actttctactcctcccctgctttcacttttttggaaaatagaaggaagaacttaatattttagaaatcctagactaatgattattagatttggtcccatattataattactaggcccttctggttctgtttagctttgttttagtagtgatattaatctaccccaccagagatgttaatttaattgttctaaggcggagctagagaaatttcttttttcttacttcttacgtgttagtattgagaactcttatttttgggaagtccatatatttttctggtctctgctcaaaaccacaaacagtcaatttgttagaaccggggactgggcggattcgcatagacctactgtagacacctaggtaggttggtggcttttcaaagtgtgtttcaggttaccttacttgcctgggttatctggtttatgccatatacagtctacatttactttttaagcagaaaacagtattttggaatctctttcactcaattctaatatgtatgcatacacattagttacatatayatatagcatacatacagtagtatatatatggtagtgtgcatatatatgtg

SEQ ID NO: 612252 - DNA, 551 bp, Homo sapiens
caccccatctctccaagctcmtagctctccaggcacacatttactcatttctctgttaatcagtgaaggtaactttttaacctcccagggtttggaaaatagagatccttaaaccagagcaaaagctgtcttccactgaactatgacaggaaaccaaaatgaattgccttccatttgaaagttcatagagaaagaaataagttaaaatgctattcctcaaacagagaagatttgtacataaaaacataagcccaatgtgccccattatctagattcacagctttgccaaaggaaaccacctaatatattaaaatatattttgtttgtaattccttgtgtaagaaaagagggggggaaagaaccataaaggaataaagaaaagaaggaagagaaaaaaatttaaaaagaattagtaatatgtgtaactatttactaatttgcatggaatcacagcaaggtggttttgcctaagtgtttttgtaacaggtaaataataagaaaatatgttttaattactttcatgtattataaatatcatgactttagaattc

SEQ ID NO: 612253 - DNA, 482 bp, Homo sapiens
attcagctcccccttgtttagttaaccaccttctccaagccacctgaggatgaaccacagatgcttgttcctctgtgaaaactgggcttcttgctcagcattctggctctcaactcccaaagttgtaaaaccttccagctgtgaaacaccatcacatgaccctttagctcactgtgccacacctacctagaccctccctcaactcctatcttccaaataggatttttttttttttgagaatgaaacagggcattattaatgattgcatgaggactatggggataaattgagactgctgcatacaaaccaagaccagtgattatcttggggcaacactgcttgtcccactagaactaaaaaagtctttatgaaaacagttttgcttccttctttccttttcctttggatttactgygttgtgttcctttcccagaagaaaaaaaaaagtgtttccagttggcttaatcaaccactgagttttt

SEQ ID NO: 612254 - DNA, 606 bp, Homo sapiens
gaattcattaaatgaacagaaaacacatttgaaggcttcaacaatacactaaacagaagaaagaatctcataacttgaaggcaattctttttaaatagccctgtcaggcaaaactaaagaaaagataaatttaaaacagtgagcaaagactacatgacatatgagagaacataaggcaacaaaatatttgaatttttagagtttcagaaggaaaaaggaaaacaaaaggcttagaaaacctatttaatgaaataataaatgaaagttcccaactgtagcaaggtatttagacatttaaataaaagagcctcagagatccccagatacattgcaaaaatatctccacagcacattatagtcaaactgtcaaaagtcaatgacaaaaagaaaatacgaaaaacagtaagagaaaagggtctaattacttataaggattccccaatcagactacagtagcggacttctcagtagaaactttatcagccagagagactgagatgttagtytcaaggcactgaaaaaaaaaaaaaaaaaaaaaaaagccatcctaggaatatttggcctggaaaattatccttcataaataaagaaaaaaataaagttttt

SEQ ID NO: 612255 - DNA, 606 bp, Homo sapiens
gaattcattaaatgaacagaaaacacatttgaaggcttcaacaatacactaaacagaagaaagaatctcataacttgaaggcaattctttttaaatagccctgtcaggcaaaactaaagaaaagataaatttaaaacagtgagcaaagactacatgacatatgagagaacataaggcaacaaaatatttgaatttttagagtttcagaaggaaaaaggaaaacaaaaggcttagaaaacctatttaatgaaataataaatgaaagttcccaactgtagcaaggtatttagacatttaaataaaagagcctcagagatccccagatacattgcaaaaatatctccacagcacattatagtcaaactgtcaaaagtcaatgacaaaaagaaaatacgaaaaacagtaagagaaaagggtctaattacttataaggattccccaatcagactacagtagcggacttctcagtagaaactttatcagccagagagactgagatgttagtttcaaggcactraaaaaaaaaaaaaaaaaaaaaaaagccatcctaggaatatttggcctggaaaattatccttcataaataaagaaaaaaataaagttttt

SEQ ID NO: 612256 - DNA, 596 bp, Homo sapiens
aggcttcaacaatacactaaacagaagaaagaatctcataacttgaaggcaattctttttaaatagccctgtcaggcaaaactaaagaaaagataaatttaaaacagtgagcaaagactacatgacatatgagagaacataaggcaacaaaatatttgaatttttagagtttcagaaggaaaaaggaaaacaaaaggcttagaaaacctatttaatgaaataataaatgaaagttcccaactgtagcaaggtatttagacatttaaataaaagagcctcagagatccccagatacattgcaaaaatatctccacagcacattatagtcaaactgtcaaaagtcaatgacaaaaagaaaatacgaaaaacagtaagagaaaagggtctaattacttataaggattccccaatcagactacagtagcggacttctcagtagaaactttatcagccagagagactgagatgttagtttcaaggcactgaaaaaaaaaaaaaaaaaaaaaaaagccatcctaggaatatttggcctggaaaattatccttcataaatraagaaaaaaataaagtttttcactatcaaacaaaagctgagg

SEQ ID NO: 612257 - DNA, 580 bp, Homo sapiens
tgaagtaaaaagtcaaacagagaatactgtaggctgggaagttggggagggacaggagggacagggaaagatttgttaaaggatgcaaaagtgttttgtgtttgtttttctgagacggagtctcactctgtcgcccaggatggagtgcaktggtgtgatctcggctcactgcaacctccgtctcccaggttcaagtgattctcctgcctcagcctctggagtagctaggattacgggtacccgataccacgcccagctaatctttgtattttttttagtagagatggggtttcacctttttggtcaggctggttttgaactcctgacctcaagcaatccacccgcctcggcctcccaaagtgctgggattatataacttctagtgttctatatcactgtaggataaccatacttgacaataataaaaagcttcaaatagcttggaggaggatattgaatattcccaatataaagaaataataagtgtttgagatgatggttatcctaattaccctgatctgatcactatacattatatttattgaaatatcactatatagtccatgaatatgtacaatta

SEQ ID NO: 612258 - DNA, 574 bp, Homo sapiens
ggaatttccattacagcatatagcattcgtcctatgaagaaaccccctcgctcagtgacttacacgaaaaactggggtataaaacacccataacatctggcctgctgcagagctggcttcaggaacaattgtggaccattacatcactctctccggtctgcaggcattggcgggtacatgckgatcataaccaccagatggcgctgttggcctaagctcgagcacagtccacagcctggaggtcctgggaaagcctgacctgaatctaaaacttctctaaactccctaatttgattcaaaagcaaaacagtagaatacttctgcacatcccagcgaggtcagagtatagcatctgcgtggcccgtaggcaagtcatcggtggttatttaaagcccgagtttaagaaaatgacttcacaatgcagagaaactggggagccggcgctggtccctcagtccccgacatggaacgctcctgcacccgcagcggagtggctggcagcgccgcatggaggtggcgagctccaggtctcacgcagcgtctgtctgtgcagtgcccagatggcaggggctgt

SEQ ID NO: 612259 - DNA, 545 bp, Homo sapiens
  misc_feature 147: n = A,T,C or G
atttgttctattttagagttctcaaatagtggggaatattttcttaacaaaagggctcaatcttactgccataaatacatgaatagaggagaaaagcctccaagtgagaactgaaaggtacaatccccacattaaggggggtgattntttattctgtttataaatggactcaaatttcatgacttaattttactcttcttaaaactaaaaataaattcactgggaacctcaggagtagcagaaatatcctaagttaaaaattctaaaattacttcaaaggctttggggttcatgaaaagaagttccattctcaaaactctgaaaatggttcagtttattcccaaggcctgctcaggaatgaagtgagagctgaatctgttttattttcaagactaaaaacatatccaattttattgagtttattgcacaattaggctgcagatttgaggagccaaaataasaaaattacaaatcatgttttgtacctcacccaaactagatgacatttctccaaattaatcagctaccccataaaggatactaac

SEQ ID NO: 612260 - DNA, 477 bp, Homo sapiens
tctgtttggcaagctttcgttgcagtgggcaagtgccacatataaacttcatgtggaaatatgcacaaatacckaacagcgggcattcaaacacacttgtttgaagatgctaagcttcttataatactttcttcttttgcatcataagagaaaacattcatcatgtgtcagggggcagggggtaaaaagagagagaaacacaaaatgaatcagatattctccatgtaagcattgatagtcgcttggccaacctagcaaaacattaaagcaagagcatctggtcttggttatcctctgcttttcccttgagagtcttcttccttcaacaggcatctgtttatctctgcctcccatcctccactttctaagttctccaaacatgaagctggtactgtttcctgtgttgcatttcactattgggaacctgacgttccagtttttccctccttctcacctaaactgtcctgcatttcattt

SEQ ID NO: 612261 - DNA, 521 bp, Homo sapiens
ctgtttggcaagctttcgttgcagtgggcaagtgccacatataaacttcatgtggaaatatgcacaaatacctaacagcgggcattcaaacacacttgtttgaagatgctaagcttyttataatactttcttcttttgcatcataagagaaaacattcatcatgtgtcagggggcagggggtaaaaagagagagaaacacaaaatgaatcagatattctccatgtaagcattgatagtcgcttggccaacctagcaaaacattaaagcaagagcatctggtcttggttatcctctgcttttcccttgagagtcttcttccttcaacaggcatctgtttatctctgcctcccatcctccactttctaagttctccaaacatgaagctggtactgtttcctgtgttgcatttcactattgggaacctgacgttccagtttttccctccttctcacctaaactgtcctgcatttcatttcctcagagctttgctctgttctgctctgctctctccaaactgaat

SEQ ID NO: 612262 - DNA, 559 bp, Homo sapiens
catctataaagtttctatgcatttctcctgcctttctgaacaggcccactgccatggaaagagaaaaatgtactccattctcctgatttcctaatgctgtggacatgtgggtcagggaragtaattcctatttcacttttcctttctgtgattaaacagccaggccatggtgcatgaccaaagttaagcagctctcctcacctgtctccaaaacaagtctgcttacagatgtgggccacatcttgacctcttaacatcaaccacagagcaagacctgtaccctagagatgctcagaaatgtttggtgagtgaaaatgattgggtgaaggagtaaacaattaagaaagccagcaggatgagttgcattagccatgaattgcactcgtactggatatcagggagcaaacacaggcttctctggaaaaaatgctctttctttcactctctattataacaagaagaagaagaagaggaagaggaagaggaagaggaaaaatggttggagtagaaaaggagaaagcagataaagaggaggaggaaaaaatagaaagggattaga

SEQ ID NO: 612263 - DNA, 641 bp, Homo sapiens
taggtaagataaaatatcaagaagcagaaagaagaaagtgaatattagtattgtttctatgaaaacagcagcaaatccagatttaatgtaaaaaatactgttctatatgataaaactttttgatgtagatttggataactctataatcagagaaagcttttaagattcccttatttaacaggwggagaatcagaggttcacatggccagtgacttacctcgggtcattataggcacctaccctgggtcaagccactcttttaccaagcagaattgcttgtcagagtgaaaatgtgatatttgcagcctccaagtagaatctagtctgattctaaatgggctagacttggcaaaatctttcttcctttcccaggaaatttacatcaaagagttaattgcattaaattgctctgtatttaacttccgtgtctgctaacaagcaaaatatcaataacagtctccattttctgtgtaaaccggagaaggacttcttttattttgtttcagtactatttttctaaagctctctttctttttatgctcctcatcacagtgtaagtccatgaaaaattaatgcccctgttcagcagggaggctagctcctcttaaaagaatgttctggaaaacccaacagcaggacat

SEQ ID NO: 612264 - DNA, 641 bp, Homo sapiens
taggtaagataaaatatcaagaagcagaaagaagaaagtgaatattagtattgtttctatgaaaacagcagcaaatccagatttaatgtaaaaaatactgttctatatgataaaactttttgatgtagatttggataactctataatcagagaaagcttttaagattcccttatttaacaggtggagaatcagaggttcacatggccagtgacttacctsgggtcattataggcacctaccctgggtcaagccactcttttaccaagcagaattgcttgtcagagtgaaaatgtgatatttgcagcctccaagtagaatctagtctgattctaaatgggctagacttggcaaaatctttcttcctttcccaggaaatttacatcaaagagttaattgcattaaattgctctgtatttaacttccgtgtctgctaacaagcaaaatatcaataacagtctccattttctgtgtaaaccggagaaggacttcttttattttgtttcagtactatttttctaaagctctctttctttttatgctcctcatcacagtgtaagtccatgaaaaattaatgcccctgttcagcagggaggctagctcctcttaaaagaatgttctggaaaacccaacagcaggacat

SEQ ID NO: 612265 - DNA, 641 bp, Homo sapiens
taggtaagataaaatatcaagaagcagaaagaagaaagtgaatattagtattgtttctatgaaaacagcagcaaatccagatttaatgtaaaaaatactgttctatatgataaaactttttgatgtagatttggataactctataatcagagaaagcttttaagattcccttatttaacaggtggagaatcagaggttcacatggccagtgacttacctcgggtcattataggcacctaccctgggtcaagccactcttttaccaagcagaattgcttgtcagagtgaaaatgtgatatttgcagcctccaagtagaatctagtctgattctaaatgggctagacttggcaaaatctttcttcctttcccaggaaatttacatcaaagagttaattgcattaaattgctctgtatttaacttccgtgtctgctaacaagcaaaatatcaataacagtctccattttctgtgtaaaccggagaaggacttcttttattttgtttcagtactatttttctaaagctctctttctttttatgctcctcatcacagtgtaagtccatgaaaaattaaygcccctgttcagcagggaggctagctcctcttaaaagaatgttctggaaaacccaacagcaggacat

SEQ ID NO: 612266 - DNA, 364 bp, Homo sapiens
tttaactgctcatcatacatacttaagagagagtggcactgcttgttattatctcaatttayttcatttgtttgctttcatttaaatctgctttatttctctttgttttctttcttcctttctttccttctttctttcttttccttttttctttccttcaacaagagcctattcttgtctccagaaatattacgttaagtagtaggaatacagataagagatgagaacacattcaacaacaaaaaaatcccatttttaaaaacagcactgtggaggtgggcaagtgtctagtgcgaataaggtagaatagcacatgcaagtgccactccctgtggcagaggttccacttaaataactgtatgga

SEQ ID NO: 612267 - DNA, 364 bp, Homo sapiens
tttaactgctcatcatacatacttaagagagagtggcactgcttgttattatctcaatttatttcatttgtttgctttcatttaaatctgctttatttctctttgttttctttcttcctttctttccttctttctttcttttccttttttctttccttcaacaagagcctattcttgtctccagaaatattacgttaagtagtaggaatacagataagagatgagaacacattcaacaacaaaaaaatcccatttttaaaaacagcactgtggaggtgggcawgtgtctagtgcgaataaggtagaatagcacatgcaagtgccactccctgtggcagaggttccacttaaataactgtatgga

SEQ ID NO: 612268 - DNA, 364 bp, Homo sapiens
tttaactgctcatcatacatacttaagagagagtggcactgcttgttattatctcaatttatttcatttgtttgctttcatttaaatctgctttatttctctttgttttctttcttcctttctttccttctttctttcttttccttttttctttccttcaacaagagcctattcttgtctccagaaatattacgttaagtagtaggaatacagataagagatgagaacacattcaacaacaaaaaaatcccatttttaaaaacagcactgtggaggtgggcaagtgtctagtgcgaataaggtagaatagcacatgcawgtgccactccctgtggcagaggttccacttaaataactgtatgga

SEQ ID NO: 612269 - DNA, 551 bp, Homo sapiens
catggtatatatgtaccacattttctttacccagtctaccattgatgggcacttaggttgattccatgtctttgttagtgtgaatagtgctgcaataaacatacatgggcatgcatctttatgatagaataatttacattaaaaatgtatattcctttgggtatatgcccagtaatggaattgctgggtcaaatggtagttctgtgtttaggtctttgaggaattgccatactgtgttccacaatagtctaattaatttacactcccaccaacagtgtatatacattccttgttcttcataacttcaccagtacctgttattttctgatgttttagtaatagccattctgactgatgtgaaacatgatagtatctcattacagttttgatttgcatttctctaataatcagtgatgttgagctttctttcgtatgtttgttggctgcatgtatgtsttcttttgaaaagcgtgtgtccatatattttgtccactttttaatggggttgtttgtaaatttgtttaaattccttatagacgctggatataaga

SEQ ID NO: 612270 - DNA, 416 bp, Homo sapiens
catatccagaatcttatttatttatttatttatttatttgagacagggtctcactctgtcccccagkctggagtgcagtggcatgatcttggttcactgaagcctcgacagcctgggctcaagcaatcctcccacctcagcttcctgagtagctgggattacaggtgtgcaccaccgtgcccggttaatttttcaaaattttttgtagagatggggttttgccatgtttcccaggctggtctcaaactcctgggctgaagtaatcttggcctcccaaagtgccgggattacaggtgtgagccaccacatctggcaactatatccaaccattatctcctacctcctgtttcttaaaggtctggaatcagagtatctttgagaacatctgtttgatgcatgatttttttccacaacag

SEQ ID NO: 612271 - DNA, 568 bp, Homo sapiens
ctgtcacatgtgaattattcatgtagtagatacgtttcatatttatttctagtaaaataattcaatataaaaacaataatttagctcagacttgctactggttcccagatatattgaccccaaattaaatatgcttataatcacttggcataaacatgactgtaagaaatacagaagtgtgtataccaagtcttgtggtaaaactttgttctaagatgatgatctagataaattagaataaacgtttaaaaaaacccttttactttcagaaaagtattagacttacagaaaaattgtgaagacaattcagagggttctcatacaacccacatccagtttccccttattaacatttacataagtgtggtacatttgtcacaattaatgaaccaatactgatatcattattaactaaagtccaaacttatttagattgtcttagttttatctaatgttgtttttctgttctaggatcccatccaagataccacattgcatttcattgtcttgtcwccctaggtttcttttggctgtggcagttttcaaacactgtctttgatgacctgga

SEQ ID NO: 612272 - DNA, 382 bp, Homo sapiens
atatgctatttttgttttttaaaatggcttggtgaagatattattgagtcaggcaaaagattttgagaaaaaactagaaaggagcaaaggagccataatatcttaagaattataagattttcacatattttagggttaaatattacttcattcttttctcttttattgttaatcaagaaatatatgctatgtaagatccagccctccaagattactacattgactttggtcagcaactatttctttttctttttctttttttttgagacggagtcttgctctgtcacccaggcatgatcttrgctcactgcaacctccgcctcccagattcaagcaattcctgtgcctcagcctcccaaatagcagggattacaggcacacc

SEQ ID NO: 612273 - DNA, 645 bp, Homo sapiens
tgtagtctagtaagtgcacaatagcagtatgtctaaataacaatgtatataccttaatttaaaaatactttgctgctaaaaataaaagtggcaatcctctgacctttcagccataatctttttgaccttcagtcataatcttcataaccttcagtcataatctttttgatggtggaaggtttttgtcttgatgttgatggctgttgactgattagggtggtggttgctgaaggttggggtggccatggcaatttcttgaaagacaatgacatttgccacatcaattgactcttcttttcatgaaagatttttctgtagcaggtgatgccatttgatagcattttacccacagtaaaactttcagaattggagtcagtcccctcaaaccctatggcttctttttcaactaagtttgtgtgacattctgaatcctttgttgtcatttcaacagtgttcacagcatctttgccaggagtagrttctatctccagaagccactttatttgctcatccttaagaaacaactcctcattcattcaagttttatcatgatatcgcaccaatttagtcacatctttaggctccacttctaattctagttcttttgctaattctatcacatctgtaattacttcttccactgaa

SEQ ID NO: 612274 - DNA, 640 bp, Homo sapiens
accagggtttcatagacttttactcaaagcctaagattcctgcagagacacttttgaccatagattggtgcagaattcttgttgttgttgggggatataagtgggttaccttctattttgctgtcttgctattcaaactttttttttttttttttttttttcagacagcgtcccactctgtcacccaggctggagttcagtggtgtgatcttgtctcactgaaacctccgcctcccaggttcaagaaattctcctacctcagcctcccgagtagctgagattacaggtgcccaccaccatgcccagctaatttttgtatttttagtaraaatggggttttaccatgttggctaggctggtcgctattcaaacattttttttaaagacagcatcttgaaaataaaaaaggtctcacctcccagagtaagtgagatatactttaattggtattcagaacctaccaaagaaaaaatcatgaacacattctctccaagacactgtttaaattggtaaaggaaaacaaagatttaaaattaaaatcttcagaagaaagtccaccttcaacatccttcttatggccctctttggcaggactcctgtttgcagactcaaaaatttctcccctctctcctctacagct

SEQ ID NO: 612275 - DNA, 563 bp, Homo sapiens
cagcctgggcaacatggcaaaaccccatctctacaaaaagtacaaaaattaaccgggcgtggtggtgggtgcctgtagtcccagatactccggaggctgacgcaggagaatcgcttgaacctgggaggcgcaggttgcagtgagccgacatctcgccactgcactccagcctgggggacagaatgagactccaactcaaaaaaagaaaaaaagaaaaagaaagcctggggatatttaccaggacccttyctccttttcaggccctagattctaagatcctgctttgcagatctgaagtgggacccaggaatctttaacaagctctaagcctgccgagtgcctgcgattgcaggcacgcgccgccacgcctgactggttttggtggagacggggtttcgctgtgttggccgggtctccagcccctaaccgcgagtgatccgccagccttggcctcccgaggtgccgggattgcagacatacagatattcttttacttgttctggagaaaatagaattttagaaattcataacagccatcttttttaaagtatctgtttatcttg

SEQ ID NO: 612276 - DNA, 584 bp, Homo sapiens
acaaaaacaaaattgaggggcattctacaaagtaactggccttctatggggaaggttgtgaaagacagaaaaagaactatttcagattaaggagattaaagagacatggcarctaaatgcaatatatgatcctggattacaggattctggattacaatagttcttgggttttaaggacattattaagacaattagtgaatgttcttactcttaggaaatacacactaaagtatttagagataatggggcaccacatctacaaatttactctctaatgattctggctaaggaaaaaaatgtgtaaaaatacacatttaaatttttttgtgacttttaaattagaaataattttaaacgtaccaaaaagttacaaggataatacatggaactccataatattcttctctcagatccttcaattgttaacattttatcacatttgtttaaaattctctcttttgtagtattcttacctctaggtgtgcttgaaattatttcaaagtagaaaaccacacaaaattacaagagtcattttttcctatttatttttgcttgctaagtaggttagcacatgacagtggtta

SEQ ID NO: 612277 - DNA, 608 bp, Homo sapiens
taatacaggaacagaaaagcatattctgcatgttgtctcttagaagtgggagctatataacgaagacacatgaaaacaaagaggagaacaatagacactggggcctccctgagggtggggataggagagagaggattagaaaaataactactggggactaggcttaacacctgggtgacaaaatattctatacaacaaacccctgtgacatgagtttacctatatgacaaacctgcacatgtaccactgaacttaaaaatattttaaaacccaatttcttgttttacagatcctttgtattgttttcttcatttcaatttcatttatttttactctggtctttataatttctttttttctactgattttggttttagttttttttttgatggagtctgactctgtcacctaggctggagtgcagtggcacgatctcagctcactgcaagctccgcctcccgagttcacgccattctcctgcctcagcctcctgagtagctgggamtacaggtgcccgccaccaagcctgactaattttttgtatttttagtagagacagggtttcactgtagtctccatctcctgacctcgtgatccgctcgccttgg

SEQ ID NO: 612278 - DNA, 608 bp, Homo sapiens
taatacaggaacagaaaagcatattctgcatgttgtctcttagaagtgggagctatataacgaagacacatgaaaacaaagaggagaacaatagacactggggcctccctgagggtggggataggagagagaggattagaaaaataactactggggactaggcttaacacctgggtgacaaaatattctatacaacaaacccctgtgacatgagtttacctatatgacaaacctgcacatgtaccactgaacttaaaaatattttaaaacccaatttcttgttttacagatcctttgtattgttttcttcatttcaatttcatttatttttactctggtctttataatttctttttttctactgattttggttttagttttttttttgatggagtctgactctgtcacctaggctggagtgcagtggcacgatctcagctcactgcaagctccgcctcccgagttcacgccattctcctgcctcagcctcctgagtagctgggaatacaggtgcccgccaccaagcctgactaattttttgtatttttagtagagacagggtttcactgtagtctcsatctcctgacctcgtgatccgctcgccttgg

SEQ ID NO: 612279 - DNA, 565 bp, Homo sapiens
gatatgtataaaatactggcccataataggcaatcaacaaatgaatattgtaattttattaccactaaatattattcttacacccagagaataaaaacatattgcttccttttttaaatacaactttaacttggcacagtgtttctaagtttcttatgcattaatttggttggaatataagatattttactgaatgatattttgtattttgggctttataatgtttttagggtcttggtaatgtaatgcttgagaaagaatagacttcaaatagaaaatttatttyctcatgagatttcatttttattacacaaagaaaattataatgaataatgtaatttggaaagtccaaataataacagtgatgagggaaaatggagtaaaaaagacaaaacataacttgaaagggatttttgaaaaatgtcataatattatccacatcctctttgtctactaataatgttgctgaagacagctctgttttgtagtcaagcattgtatcaatttgagtaactaatactaagaaatgctaataactcgattgttgcatcagtcatttttgtca

SEQ ID NO: 612280 - DNA, 604 bp, Homo sapiens
tttcagggttccccacctaccctttaaaattgcagttagggaaatgaggcatacctaaaattaactctttcattttttttgactattcactagttctttccatgcctgtggacccccaatcctgggatgccacagaagagcccacaaaaatataggccagtggccgggcgcagtggctcactcctgtagtcccagccctttgggaggccgaggcgggcggatcacgaggtcaggagatcgagaccgtcctggctaacacggtgaaaccccgtctctactaaaaaaaaaaaaaaaaaaaaaaaaattagccgggcgtggtggcgggtgcctgtagttccagctactcgggaggctgaggcaggagaatggcgtagacctgggaggcggagtttgcagtgagccgagattgcgccactgcactccagcctgggcaacagagcgcgactccgtctcaaaaaaaaaaaaaaaaaaaaaawatatatatatatatatatatatatatatatatatgcatgccagtattcctctgcatgttaggcaatacaaatgccagttacttatttggccagttactggcttgttttgatgttaaggaaaataatag

SEQ ID NO: 612281 - DNA, 596 bp, Homo sapiens
caacgccggcacagtggctcactcctataatcccagcactttgggaggctgaagcaggcagatcacttgagcccaggagttagagaccagcctggccaacatggcaaaaccctgtctctactgaaaatacaaaaattagctgggcatggtggcacacacctgtaatctcagctactcgggaggctgaggcacaaaaatcacttgaactttgcaggcrcaggttgcagtgagccgagattgcaccactgcactctaacctggtaagagtaagaccctgtctcaaaaaaaaaaaaaaaaaaaaaagaaaagggttaagagtcaagatgaagcaaacaggcaaatcctgtcctgtaagttatatcatcattccaagtccaagggaatatagtcgataattgtgaaagggaagcagaattaaatattttaaatgctgacaattcaataatataaaatcatggccttgaaatctactagagctagtagaacaactaaatatgatgctgatgcagaatgtaatgtgtatcagacacatttctacaatagaaagaactgctctcctttctcttataagcagggaagatggtttggcatggcaa

SEQ ID NO: 612282 - DNA, 596 bp, Homo sapiens
caacgccggcacagtggctcactcctataatcccagcactttgggaggctgaagcaggcagatcacttgagcccaggagttagagaccagcctggccaacatggcaaaaccctgtctctactgaaaatacaaaaattagctgggcatggtggcacacacctgtaatctcagctactcgggaggctgaggcacaaaaatcacttgaactttgcaggcgcaggttgcagtgagccgagattgcaccactgcactctaacctggtaagagtaagaccctgtctcaaaaaaaaaaaaaaaaaaaaaagaaaagggttaagagtcaagrtgaagcaaacaggcaaatcctgtcctgtaagttatatcatcattccaagtccaagggaatatagtcgataattgtgaaagggaagcagaattaaatattttaaatgctgacaattcaataatataaaatcatggccttgaaatctactagagctagtagaacaactaaatatgatgctgatgcagaatgtaatgtgtatcagacacatttctacaatagaaagaactgctctcctttctcttataagcagggaagatggtttggcatggcaa

SEQ ID NO: 612283 - DNA, 639 bp, Homo sapiens
atattactaagctgtaattttaatgaatcatcagaaattattgcgtctgtatatatcattcagggaatctcaggaaaagtagtcatcactgagccctcaggaatatggacgtaacattctgatayctgttctatgagagccaaagtcccccaccatcagcattacctagtgttattcttctaggatttatcaacaccacctggagtgtgagccaagtcaactccttcaaagaacttggcaattttttttaaccatgccaaaactgaactactattcctttgcttgcttgtgaagatattgaaataatgacagtttctctaactatacattactatccctttgtgctaaatcagtgttactcaaccagggacaattttgcccctagtggacttagacaatgtctagagacaagtttggttgtcacaactgggggtggggagggggtttgctactggcatctagttgataaaggccagggatgctgctaaacatctcacaatgcacaggaaagaacccacaacaaacattatcctatccaaaatgtcaatagtgccaagattgaaaaccctgtgctaaatcatagactaaatgcagctttcagggaatcatatccatcttctgaggtccaactaaggctat

SEQ ID NO: 612284 - DNA, 639 bp, Homo sapiens
atattactaagctgtaattttaatgaatcatcagaaattattgcgtctgtatatatcattcagggaatctcaggaaaagtagtcatcactgagccctcaggaatatggacgtaacattctgatacctgttctatgagagccaaagtcccccaccatcagcattacctagtgttattcttctaggatttatcaacaccacctggagtgtgagccaagtcaactccttcaaagaacttggcaattttttttaaccatgccaaaactgaactactattcctttgcttgcttgtgaagatattgaaataatgacagtttctctaactatacattactatccctttgtgctaaatcagtgttactcaaccagggacaattttgcccctagkggacttagacaatgtctagagacaagtttggttgtcacaactgggggtggggagggggtttgctactggcatctagttgataaaggccagggatgctgctaaacatctcacaatgcacaggaaagaacccacaacaaacattatcctatccaaaatgtcaatagtgccaagattgaaaaccctgtgctaaatcatagactaaatgcagctttcagggaatcatatccatcttctgaggtccaactaaggctat

SEQ ID NO: 612285 - DNA, 628 bp, Homo sapiens
acttatttttaaatatacaactggattattattgactgtagtcatcctgttttgttatcaaatactaggtcttatttactgtttctaattctattttttgttcccattaaccatttccacttctycccaagactcccaataccattcccagcctctaataaacatcattatactctctatctccatgagttcaattgttttgatttttagctcccacaaataagtgagtaaatgcaaagttttgtcttcatgtgcttcacttatttcactttacacaatgacctccagttccatccatgttgttgcaaatgacagaatcacattattttttacagctacatagtactccattgtgtgtaggtactgtatattctttatcaaattatttgatgatggatatttaggtttcttccaaattctgggtattgagaacagtgctgcaacagacatgagagtacagatatctcttctagatattgatttttctttcttctaggtatatacccatcaatgggattgctggacattatagtagttctatttttagttctttgaaaaacctccaaatcattctccatagtggttttactaatttattcccacaacaatgtacagcgttcccttttcg

SEQ ID NO: 612286 - DNA, 451 bp, Homo sapiens
gtgctgtggtgttgggtgcacatatctagaattgttatatcctcttgctgaattgatccttttattattatataatgttattctytgtcttctttctcagcttctgatttaaagtctcttttatctgatataaatctggatattcttgctcatttttggtttctctttacatgaaatattttgttttttaatccctttaccatcagtctatatgtgttttcacaggtcagatgagttttttgtaagcaatatatgattggaatatgttctgtttagccattctgtcaatttatatattttaagtgaagcatttaatctatttaaattaaaggctagtattattatatgtgagtttttatttccgtattattatgaattgttatctagtcatttaaaattatttgcttcttctttttctgttgtcttgtgatttcataaaattctgttgaat

SEQ ID NO: 612287 - DNA, 451 bp, Homo sapiens
gtgctgtggtgttgggtgcacatatctagaattgttatatcctcttgctgaattgatccttttattattatataatgttattctttgtcttctttctcagcttctgatttaaagtctcttttrtctgatataaatctggatattcttgctcatttttggtttctctttacatgaaatattttgttttttaatccctttaccatcagtctatatgtgttttcacaggtcagatgagttttttgtaagcaatatatgattggaatatgttctgtttagccattctgtcaatttatatattttaagtgaagcatttaatctatttaaattaaaggctagtattattatatgtgagtttttatttccgtattattatgaattgttatctagtcatttaaaattatttgcttcttctttttctgttgtcttgtgatttcataaaattctgttgaat

SEQ ID NO: 612288 - DNA, 451 bp, Homo sapiens
gtgctgtggtgttgggtgcacatatctagaattgttatatcctcttgctgaattgatccttttattattatataatgttattctttgtcttctttctcagcttctgatttaaagtctcttttatctgatataaatctggatattcttgctcatttttggtttctctttacatgaaatattttgttttttaatccctttaccatcagtctatatgtgttttcacaggtcagatgagttttttgtaagcaatatatgattggaatatgttctgtttagccattctgtcmatttatatattttaagtgaagcatttaatctatttaaattaaaggctagtattattatatgtgagtttttatttccgtattattatgaattgttatctagtcatttaaaattatttgcttcttctttttctgttgtcttgtgatttcataaaattctgttgaat

SEQ ID NO: 612289 - DNA, 451 bp, Homo sapiens
gtgctgtggtgttgggtgcacatatctagaattgttatatcctcttgctgaattgatccttttattattatataatgttattctttgtcttctttctcagcttctgatttaaagtctcttttatctgatataaatctggatattcttgctcatttttggtttctctttacatgaaatattttgttttttaatccctttaccatcagtctatatgtgttttcacaggtcagatgagttttttgtaagcaatatatgattggaatatgttctgtttagccattctgtcaatttatatattttaagtgaagcatttaatctrtttaaattaaaggctagtattattatatgtgagtttttatttccgtattattatgaattgttatctagtcatttaaaattatttgcttcttctttttctgttgtcttgtgatttcataaaattctgttgaat

SEQ ID NO: 612290 - DNA, 551 bp, Homo sapiens
atgtggtttttacatatattgattgatgtctcatgtctacctaaaatgtaaaaaaccaagctgttctctgaccaccttgggcacatgtcatcaggacctcctgaggctgtatcatgggcgtgtgtcttcaaccttcacaaaataaacgttctaaattaacagagacctgtctcagattttctgggtccacatcgtgaattcactcaatattcctgtctcttcattataattcacgttgtttttgaaatgctttttctttaatttatttatttggggcacttgtaactatacttgtgttttcyaaggtgttgaaagctattttttcttatcatctgctaatgcaaataaacacatctgtaattcagtttgtcacagaaaaaattaaattttattcttcttggtatctcagggttgattaaaagtttttaaagaaaatatttatggtctggacatccgaaagtaatgcctccattaaaagccatacccaatataggacatttgaatttaatttgaatataatttatttttaaaattagcataggagattaatt

SEQ ID NO: 612291 - DNA, 551 bp, Homo sapiens
atgtggtttttacatatattgattgatgtctcatgtctacctaaaatgtaaaaaaccaagctgttctctgaccaccttgggcacatgtcatcaggacctcctgaggctgtatcatgggcgtgtgtcttcaaccttcacaaaataaacgttctaaattaacagagacctgtctcagattttctgggtccacatcgtgaattcactcaatattcctgtctcttcattataattcacgttgtttttgaaatgctttttctttaatttatttatttggggcacttgtaactatacttgtgttttccaaggtgttgaaagctattttttcttatcatctgctaatgcaaataaacacatctgtaattcagtttgtcacagaaaaaawtaaattttattcttcttggtatctcagggttgattaaaagtttttaaagaaaatatttatggtctggacatccgaaagtaatgcctccattaaaagccatacccaatataggacatttgaatttaatttgaatataatttatttttaaaattagcataggagattaatt

SEQ ID NO: 612292 - DNA, 551 bp, Homo sapiens
atgtggtttttacatatattgattgatgtctcatgtctacctaaaatgtaaaaaaccaagctgttctctgaccaccttgggcacatgtcatcaggacctcctgaggctgtatcatgggcgtgtgtcttcaaccttcacaaaataaacgttctaaattaacagagacctgtctcagattttctgggtccacatcgtgaattcactcaatattcctgtctcttcattataattcacgttgtttttgaaatgctttttctttaatttatttatttggggcacttgtaactatacttgtgttttccaaggtgttgaaagctattttttcttatcatctgctaatgcaaataaacacatctgtaattcagtttgtcacagaaaaaattaaattttattcttcttggtatctcagggttgattaaaagtttttaaagaaaatatttatggtctggacatccgaaagtaatgcctccattaaaagccatacccaayataggacatttgaatttaatttgaatataatttatttttaaaattagcataggagattaatt

SEQ ID NO: 612293 - DNA, 489 bp, Homo sapiens
atgctgattacaatagccttatttgcctgggcataagacagaatagtaggagagaaagtggagacaaagagtgaagattcttttagggaaattttatgtaaagaagatcagtgaaatgaagcggaaactaaaaaaaawagatggggagtcaagggaagtgatctttttggcatgttgtgtgtttttaacatggaagacacacacctaaaaaagtctttgaataggcaaaaagacgtggcacttttgtacagaattgatgtatagtagtaggtggcaaatgaaattacatggaccccaataaaataagtgagaaaggatgaaagcatgaaaggtattttacattgcttctacattcacagtaagtagaaaagcattttcatgagctgaaaatagaaggagaaaagatgttgaagtttggagcagagagaagaaactgtgaaatagttatctagattctagaacaatgggcgaggtaaatggagtaggatt

SEQ ID NO: 612294 - DNA, 489 bp, Homo sapiens
atgctgattacaatagccttatttgcctgggcataagacagaatagtaggagagaaagtggagacaaagagtgaagattcttttagggaaattttatgtaaagaagatcagtgaaatgaagcggaaactaaaaaaaaaagatggggagtcaagggaagtgatctttttggcatgttgtgtgtttttaacatggaagacacacacctawaaaagtctttgaataggcaaaaagacgtggcacttttgtacagaattgatgtatagtagtaggtggcaaatgaaattacatggaccccaataaaataagtgagaaaggatgaaagcatgaaaggtattttacattgcttctacattcacagtaagtagaaaagcattttcatgagctgaaaatagaaggagaaaagatgttgaagtttggagcagagagaagaaactgtgaaatagttatctagattctagaacaatgggcgaggtaaatggagtaggatt

SEQ ID NO: 612295 - DNA, 542 bp, Homo sapiens
tctgaaacagggaacaagtgaaaagaagagtcaatggcttggaatatggatgtggcctaggagggggtagtggcgagtgacattctttcctaggtgactggcaaagtaagaatyacttatttgaacgtgggagtctacagtatgccaacttttatatgtttcctgggaagtttaagaaataactggataaaatcctttcttcattcaactacaaatcccggagataccaggcaagaatgaggcgaggaaaagaaacaatatttgaattctttactctctgggagatcaatgatcaccttctgaacgtccttcctcctttgctctcattatccatcattcggcttagagacttggggaatggagaaccatgagtattattttaaaaatccttttctggctgcttatcccactttccctgcgaagtttctcatcctttccttccctccctccctttgttgtaggaaaatctgggttcttgtcacacaaccagcaaagattaggctcacaaacgctttgaagggtgagggggatggaatttattg

SEQ ID NO: 612296 - DNA, 542 bp, Homo sapiens
tctgaaacagggaacaagtgaaaagaagagtcaatggcttggaatatggatgtggcctaggagggggtagtggcgagtgacattctttcctaggtgactggcaaagtaagaattacttatttgaacgtgggagtctacagtatgccaacttttatatgtttcctgggaagtttaagaaataactggataaaatcctttcttcattcaactacaaatcccggagataccaggcaagaatgaggcgaggaaaagaaacaatatttgaattctttactctctgggagatcaatgatcaccttctgaacgtccttcctcctttgctctcattwtccatcattcggcttagagacttggggaatggagaaccatgagtattattttaaaaatccttttctggctgcttatcccactttccctgcgaagtttctcatcctttccttccctccctccctttgttgtaggaaaatctgggttcttgtcacacaaccagcaaagattaggctcacaaacgctttgaagggtgagggggatggaatttattg

SEQ ID NO: 612297 - DNA, 564 bp, Homo sapiens
aggttgatttagaaaactactcaatttgcttatctacctgccaaaaaagtcgtggtgaaactcatttgaaaagtaatttaaatttttttattaaaaaatttcatctctattttttcttcataaaggggtcattggaacagcatgattcttgaggaaaggttttcctaggtgagattatgtttgtatctttatcatgaagaaaaaaaamccagaattgttcataaactatgtgatataaaattcagtttgatcattaaagacaagctgttcagttatagataatcaatcatagcttattaggccactctggataaacacaactttgaaatgtcaattaaataggtttcctaagatatccattattataatgacactaaaaattatgatcattttccaggattgaaacagcgtagtgtggtagttaagaatataatcacttttgttcatcaggacacctttacagaagcgaaaaggcaaaagagagtaataaatgataattacggcaaaggattatttgagatatatattttctttttttttttttttttttgagatggagtttcg

SEQ ID NO: 612298 - DNA, 564 bp, Homo sapiens
aggttgatttagaaaactactcaatttgcttatctacctgccaaaaaagtcgtggtgaaactcatttgaaaagtaatttaaatttttttattaaaaaatttcatctctattttttcttcataaaggggtcattggaacagcatgattcttgaggaaaggttttcctaggtgagattatgtttgtatctttatcatgaagaaaaaaaaaccagaattgttcataaactatgtgatataaaattcagtttgatcattaaagacaagctgttcagttatagataatcaatcatagcttattaggccactctggataaacacaactttgaaatgtcaattaaataggtttcctaagatatccrttattataatgacactaaaaattatgatcattttccaggattgaaacagcgtagtgtggtagttaagaatataatcacttttgttcatcaggacacctttacagaagcgaaaaggcaaaagagagtaataaatgataattacggcaaaggattatttgagatatatattttctttttttttttttttttttgagatggagtttcg

SEQ ID NO: 612299 - DNA, 578 bp, Homo sapiens
gctgttctcatgatagtgaataaatctcacgagatctgatgattttaaaaccaggagtttccctgcacaagctctctctctttttgcctgccaccatccatggaagatgtgacttgctcctccttgccttttgtcatgattgtgaggccaccctacccatgtggaactgtaagtccattaaacctctttttcttcccagtcttggatatgtctttatcagcagtgtgaaaatggactaatacagatctgcttatgtggagtactgaagatcagctggcaacactattcttcaaaatactacagcagaattttccctcatatttaaatatcaaaaaatcagaggtcatcttaacaaattgccttgtatgattgtcaaaagcaatagcaagggaaatycttaataaattactgattatgaagtgaaatcattactgtagtaacttaaagtattctagatatagaaacaaagctgtcttttcaaactcttctttttgtctaaaaatttttatggaattaaaattcacataatataaaagtaaccattttaaagtagacaattcagtagcactttttatgtt

SEQ ID NO: 612300 - DNA, 474 bp, Homo sapiens
ttgggtactgggcttaatacttgggtgatgaaataatctgtacaacaaaccttcatgatacaagtttacctaggtagcaaaccttcacgtatgcccccaaacctaaaataaaactttaaaaataaataaataaaatttaaaaagaaattatgtaattagcattaaataaatggtatcgagaactgtaaggacaacaagttttatattttttaatacaagcatgttctataaagccatgatattatggataataacagtgttgtgtttttctcaagaagggggatgtgaaattagtcagtgatagcatatttcacaatacagaacgtaagagagaatttataaactggaagaggaagagatggtacttgggcactatgaagaatcttcatgkctactgaatgaacaatgaataaacatataagtacctcctctttaagcattattctacgtcgtcatcagtaaattactacgttt

SEQ ID NO: 612301 - DNA, 540 bp, Homo sapiens
cacacacaacacacacacacacacacacacacacacacacgtcctggtgtacatataggtttcccaaagccttgacaggtggagtttcttttcatgaaaatatcagctttgctcactagatcaaatttgggaaagcctgtttgttaccaaggaaaataatcagttttcattttacattacctaagaaaagaataaaaatcagaatgaaaatgttaagcaacatgtacacattaaatgtattcattataaaatgatcacatgtatgcatttctgtttcaaatggcttcctattttaaagcaatggaaactatagtaatgtgcttctttttctctgtcgccttttatttcacttgtaatatgctaagacagcacattcaaatctagatctaattttgttattaatgtcttatcaaattaggtacagrggctactaaggctttcttgaattaccaatcagtcccacaaacttcagtgtcccagctcattaatatataccttcctgccttcagttttactccagttctcaggccagtgactttc

SEQ ID NO: 612302 - DNA, 528 bp, Homo sapiens
gattgttatattaagtggggaaactgaaaaaactagatttctacatgcaaaagaaggaccctggacccttatcttacacatgatgcagaaaagtcaatgctaaatgtataaaagacccaaacataagaccatgaaatgtaagacctaaatgaaagatcatgaaatttctagaaaaccacatagargaaaaacttgacattggccttgcaatgattccttgaatatcacactaaaagctcagattacaaaagcaaaaataagtaaatgggactacaccaaaccaaaaagtttatggatagtaatatggtttggatttgtgtcctgcccaaatctcatgttgaattgtaatgcccagtgttggaggagggatctggtggaaagtgataggatcatgggggtggacttctcctttgctgttcttgtgatagtgagtgagttctcacaggatttgcttgtttaaaggtgtgtagcacttccagattttctcttttcctccttttctcttttcctccttttttggccatgtaa

SEQ ID NO: 612303 - DNA, 528 bp, Homo sapiens
gattgttatattaagtggggaaactgaaaaaactagatttctacatgcaaaagaaggaccctggacccttatcttacacatgatgcagaaaagtcaatgctaaatgtataaaagacccaaacataagaccatgaaatgtaagacctaaatgaaagatcatgaaatttctagaaaaccacatagaagaaaaacttgacattggccttgcaatgattccttgaatatcacactaaaagctcagattacaaaagcaaaaataagtaaatgggactacaccaaaccaaaaagtttatggatagtaatatggtttggatttgtgtcctgcccaaatctcatgttgaattgtaatgcccagtgttggaggagggatctggtggaargtgataggatcatgggggtggacttctcctttgctgttcttgtgatagtgagtgagttctcacaggatttgcttgtttaaaggtgtgtagcacttccagattttctcttttcctccttttctcttttcctccttttttggccatgtaa

SEQ ID NO: 612304 - DNA, 618 bp, Homo sapiens
tggctgaattttcattagaaaatgggagtacaaagctgggtctttgttgattagaatatcagtaatttgaaagctaattacattaagattttaatctccacatcttggatttaaaagcatctaagatttttttttgtagtttcagttctttttttaacgattatactataagtttggggatacatgtgcagaatgtgcaggtttggtacatagatatacacatcgcatggtggtttgctgcacccattatccagtcaactgcattaggtagttctcctaatgctatccctcccctagccccccatcccccaacaggccctggtgtgtgatgctcccacacyctgtgtccatgtgttctcattgttcaactcccacttatgagtgagaacatgtggtgtttggttttctgttcctgtgttagtttgctgagaatgatggtttccagcttcatccatgtccctgcaaaggacatgaattcatccttttgtatggctgcatagcattccatggtgtgtatttgccacactttctttatccagtctatcactgatgggcatttgggttggttccaagtcttttctttcaaccttttgctgtggatagcaaaatgcaatttaa

SEQ ID NO: 612305 - DNA, 604 bp, Homo sapiens
tttcatcttgtttcagcacctgtataggctgattatcattgctacattccagaaaggccaagaaaatattgggaaaaaccagttccattattacctacacatggtggttgagccttgcctcatataagatataatatttatcttaaaaataacaggaatcagtaaacaaatgatgcatttagtagataaaacaactcctgttagcccatatgcagtacataggcaaataaaayacataagtcagagtataactggtgatcacttatgttattcttgtaacatagctagtcaaagactttaacctctgatacgatagtaataattatggcagcagaaattggatgtacttgcacatctatttcaatattcagggtattttttagcctgtttgaatatatatagtatagtaggtggcttataaaccagggaaattatttttcacagtgatagaggctgggaagtacaagatcaagtagccatcagattcagtgtctggtgaggacacacttcctcatagacactgccttctttctgtgtcctcacaaaaacgaagggtaaaggagctctctccagcctctcttataaggccattaatcttattatg

SEQ ID NO: 612306 - DNA, 604 bp, Homo sapiens
tttcatcttgtttcagcacctgtataggctgattatcattgctacattccagaaaggccaagaaaatattgggaaaaaccagttccattattacctacacatggtggttgagccttgcctcatataagatataatatttatcttaaaaataacaggaatcagtaaacaaatgatgcatttagtagataaaacaactcctgttagcccatatgcagtacataggcaaataaaatacataagtcagagtataactggtgatcacttatgttattcttgtaacatagctagtcaaagactttaacctctgatacgatagtaataattatggcagcagaaattggatgtacttgcacatctatttcaatattcagggtattttttagcctgtttgaatatatatagtatagtaggtggcttataaaccagggaaattatttttcacagtgatagaggctgggaagtacaagatcaagtagccatcagattcagtgtctggtgaggacmcacttcctcatagacactgccttctttctgtgtcctcacaaaaacgaagggtaaaggagctctctccagcctctcttataaggccattaatcttattatg

SEQ ID NO: 612307 - DNA, 678 bp, Homo sapiens
aattcatttttttttgtatattctagagtttcaaattytgaacagccttgctcaattatataaacaaatctgttgatttccatatcagtatttgatatttgcccttatttacaccagccacatattgattcattgaggttaaatattataaaatgtgtaattaatgttaaaagtccttaatgttttaatttatgtctagtgttaaaaaatgtggatctataaaaagtcagtgatactgaatatctgtacttcaaagaggctatctctagttgcctatttttggttctgatcaaaatttcaattaaccaattaatgttttttgttgttttttgttcgtttatttgtctgttttttgaaagggagtcttgctttgtcacccagtctggaggacagtggcgccatctctgctcactgcaacctctgcctcctgggttcaagcgattctcctgcctcagcctctggagtagctgagattacaggcacgtgccactatgcctggctaatttttgtatttttagtagagatggggtttcaccattttggccgggctggtctcgaactcctgacatcaagttatccatccacccttctcggcctcccaaagtgctgggattacaggtgtgagccaccaagcccagcctctattgagccaattaatatgttaaatgtcacaggaga

SEQ ID NO: 612308 - DNA, 364 bp, Homo sapiens
ttacttatagtttatgatcagttatataatatcagtgtctgccaaattttatactggtataagttaacctctgacattttacatatgatagtattgtggttttatttattttatttttatttttatttttgagacggagtctcactcttgtaccccagtgcagtggcgtgatctcagcttatttcaacctcttcctcctgggttcaagcaattctcctgccccagcctcccaagtagctgggattacaggygcccaccaacatgcctggctaatttttttattttatttaatctttttcgtagtagagacagggtttcaccatcttggccaggctggtcttgaactcctgacctcaggtgatcc

SEQ ID NO: 612309 - DNA, 435 bp, Homo sapiens
gaattccaatgccaggtctccggggagagcacactcaggaggaagatgagagtccgggtccctgtgggatggacgtggagccctcyaggggcattgaactctatagatctgccagtcaggggcagaggggtccagggcagaggagacagagatctgggcaccacccacgaaggcacagtggacaggggatggagccctctggagggagccagcgcaagggtgcgagaaggagcttgcaaaggaagcagagcggcagccaggacaagggaaggcacccgcgaggaacttgcctgcagaccccagggttgagtaggctttaaggaggagtgcatggggagcgctgggccgctcacagactgaacacacagaggctggcgtggatgcctgtggcctctgcccttgcaacaacctctgtcttgggtcaggtttcctgga

SEQ ID NO: 612310 - DNA, 409 bp, Homo sapiens
aggtctccggggagagcacactcaggaggaagatgagagtccgggtccctgtgggatggacgtggagccctctaggrgcattgaactctatagatctgccagtcaggggcagaggggtccagggcagaggagacagagatctgggcaccacccacgaaggcacagtggacaggggatggagccctctggagggagccagcgcaagggtgcgagaaggagcttgcaaaggaagcagagcggcagccaggacaagggaaggcacccgcgaggaacttgcctgcagaccccagggttgagtaggctttaaggaggagtgcatggggagcgctgggccgctcacagactgaacacacagaggctggcgtggatgcctgtggcctctgcccttgcaacaacctctgtcttgggt

SEQ ID NO: 612311 - DNA, 435 bp, Homo sapiens
gaattccaatgccaggtctccggggagagcacactcaggaggaagatgagagtccgggtccctgtgggatggacgtggagccctctaggggcattgaactctatagatctgccagtcaggggcagaggggtccagggcagaggagacagagatctgggcaccacccacraaggcacagtggacaggggatggagccctctggagggagccagcgcaagggtgcgagaaggagcttgcaaaggaagcagagcggcagccaggacaagggaaggcacccgcgaggaacttgcctgcagaccccagggttgagtaggctttaaggaggagtgcatggggagcgctgggccgctcacagactgaacacacagaggctggcgtggatgcctgtggcctctgcccttgcaacaacctctgtcttgggtcaggtttcctgga

SEQ ID NO: 612312 - DNA, 409 bp, Homo sapiens
aggtctccggggagagcacactcaggaggaagatgagagtccgggtccctgtgggatggacgtggagccctctaggggcattgaactctatagatctgccagtcaggggcagaggggtccagggcagaggagacagagatctgggcaccacccacgaaggcacagtggrcaggggatggagccctctggagggagccagcgcaagggtgcgagaaggagcttgcaaaggaagcagagcggcagccaggacaagggaaggcacccgcgaggaacttgcctgcagaccccagggttgagtaggctttaaggaggagtgcatggggagcgctgggccgctcacagactgaacacacagaggctggcgtggatgcctgtggcctctgcccttgcaacaacctctgtcttgggt

SEQ ID NO: 612313 - DNA, 435 bp, Homo sapiens
gaattccaatgccaggtctccggggagagcacactcaggaggaagatgagagtccgggtccctgtgggatggacgtggagccctctaggggcattgaactctatagatctgccagtcaggggcagaggggtccagggcagaggagacagagatctgggcaccacccacgaaggcacagtggacaggggatggagccctctggagggagccagcgcaagggtgcgagaaggagcttgcaaaggaagcagagcrgcagccaggacaagggaaggcacccgcgaggaacttgcctgcagaccccagggttgagtaggctttaaggaggagtgcatggggagcgctgggccgctcacagactgaacacacagaggctggcgtggatgcctgtggcctctgcccttgcaacaacctctgtcttgggtcaggtttcctgga

SEQ ID NO: 612314 - DNA, 437 bp, Homo sapiens
gcgaattccaatgccaggtctccggggagagcacactcaggaggaagatgagagtccgggtccctgtgggatggacgtggagccctctaggggcattgaactctatagatctgccagtcaggggcagaggggtccagggcagaggagacagagatctgggcaccacccacgaaggcacagtggacaggggatggagccctctggagggagccagcgcaagggtgcgagaaggagcttgcaaaggaagcagagcggcagccaggacaagggaaggcacccgcraggaacttgcctgcagaccccagggttgagtaggctttaaggaggagtgcatggggagcgctgggccgctcacagactgaacacacagaggctggcgtggatgcctgtggcctctgcccttgcaacaacctctgtcttgggtcaggtttcctgga

SEQ ID NO: 612315 - DNA, 435 bp, Homo sapiens
gaattccaatgccaggtctccggggagagcacactcaggaggaagatgagagtccgggtccctgtgggatggacgtggagccctctaggggcattgaactctatagatctgccagtcaggggcagaggggtccagggcagaggagacagagatctgggcaccacccacgaaggcacagtggacaggggatggagccctctggagggagccagcgcaagggtgcgagaaggagcttgcaaaggaagcagagcggcagccaggacaagggaaggcacccgcgaggaacttgcctgcagaccccagggttgagtaggctttaaggaggagtgcatggggagcgytgggccgctcacagactgaacacacagaggctggcgtggatgcctgtggcctctgcccttgcaacaacctctgtcttgggtcaggtttcctgga

SEQ ID NO: 612316 - DNA, 409 bp, Homo sapiens
aggtctccggggagagcacactcaggaggaagatgagagtccgggtccctgtgggatggacgtggagccctctaggggcattgaactctatagatctgccagtcaggggcagaggggtccagggcagaggagacagagatctgggcaccacccacgaaggcacagtggacaggggatggagccctctggagggagccagcgcaagggtgcgagaaggagcttgcaaaggaagcagagcggcagccaggacaagggaaggcacccgcgaggaacttgcctgcagaccccagggttgagtaggctttaaggaggagtgcatggggagcgctgggccgctcacagactgaacacacaraggctggcgtggatgcctgtggcctctgcccttgcaacaacctctgtcttgggt

SEQ ID NO: 612317 - DNA, 597 bp, Homo sapiens
tcaagacaagcctgggtaacagggagagcctcatctctatagaaaattaaaaaatttaattagcctatcgtggtggctcacacctgtaatcccagatasttgggaggcttttttgaggttatagtgagttatgatccagctactgtactccagcctggtgacagaatgacatcttccctctataaaaataaaaataaaatctatgacatttaactgattacatatttaatcaattaattggaataaatgatatcctgattatgacatttcaatagacatattattatttattttaatatttgaatagagtaaataaagtcctatttttctttcaatttgtcatttattttatgttgctttgaatagaaaactaatgctgcaattgtgtacaccattaaatcattaggttctaatttccttgatctattacgaaaagtgattttcaattttaatatcaagggcattatttgcagaatattgttattctgcaaatatattctgcaaatacattctgtaatatttaaatatcataatcaagcaaactcttaaatgtgacacctgaaacaattataggcaaagaaaatactagtaatatag

SEQ ID NO: 612318 - DNA, 577 bp, Homo sapiens
taaagtatgcaaggaacttcggattcagacaatatggcacagatccatgtttttcccgcctctttttgttatgcacaactgtatattttgaaaatgacacatgtgactaacatgaaaaagctctaagagatggaggtaaacagaagaagagttagtttgatatgcaaggaatggtgaaacagcacaacagcaaggcatcttgtrtatcctgaagtcctgaagaaggccttcagacttatttttcctaatcccccaatctagcaacagaagatacctcaagtaagctccttcctcccttggatcaatcaggagccactagcttgagacacccaccaccatccaggagaagcagctaggagaaatgctaagagaggtgctctccttcccagtacagcttgaggcttccttttctaccaggaagcacaaaggtgggaaaatagaatcaggaagagggacctagtagagaaagtggcctggcctaagaagctgctttgtccctgcaggcctaagactctcttcccaatgaccccagagtagccaggggacattggttgggggattctaccacacccctcac

SEQ ID NO: 612319 - DNA, 516 bp, Homo sapiens
tggcctggcctaagaagctgctttgtccctgcaggcctaagactctcttcccaatgaccccagagtagccaggggacattggttgggggattctaccacacccctcaccacatacctcagacacctggtagcctaacctggagaaactgcttccactgccataggcagcactaacagggagcagtggaattcccagcagcaccatattaatcaaagagtctgaaatcayaatgcaaaagctctaaacattaacttggtattgaaactacagccaaaacaattggccagtgcaggacagttcttcatgtggccttggattgacccagttctcttccctttcttccttgtaggtcttaataattactgtagattgtgctgggaatacattatggtgagataaggaggggctgactggactagcctgggcctgttgctctttcctctggaagcaagatgggccctcaaagcttaagtcaatgttcacattggctctgaggtataataccctgaacaggc

SEQ ID NO: 612320 - DNA, 367 bp, Homo sapiens
ggaattcccagcagcaccatattaatcaaagagtctgaaatcataatgcaaaagctctaaacattaasttggtattgaaactacagccaaaacaattggccagtgcaggacagttcttcatgtggccttggattgacccagttctcttccctttcttccttgtaggtcttaataattactgtagattgtgctgggaatacattatggtgagataaggaggggctgactggactagcctgggcctgttgctctttcctctggaagcaagatgggccctcaaagcttaagtcaatgttcacattggctctgaggtataataccctgaacaggctgtcttaaagagtcctggctggacgtggtggctcat

SEQ ID NO: 612321 - DNA, 367 bp, Homo sapiens
ggaattcccagcagcaccatattaatcaaagagtctgaaatcataatgcaaaagctctaaacattaacttggtattgaaactacagccaaaacaattggccagtrcaggacagttcttcatgtggccttggattgacccagttctcttccctttcttccttgtaggtcttaataattactgtagattgtgctgggaatacattatggtgagataaggaggggctgactggactagcctgggcctgttgctctttcctctggaagcaagatgggccctcaaagcttaagtcaatgttcacattggctctgaggtataataccctgaacaggctgtcttaaagagtcctggctggacgtggtggctcat

SEQ ID NO: 612322 - DNA, 592 bp, Homo sapiens
atgcactgtgcacagtctccaatcactgtttcgccagtgtgcacatatgcagagtcctcactgcaactgcatgggccccactggtgtgtgtgtataaaccctgacaacctgccactgccagggtgagtatgagtataacatgccacactgcacccctgctgcagctggtgcacatgtgcgtaagcatggacccctcagcaaatgctccaatgaagcacttttgttggcatcccccrttggactgttgttgccagtggactgagaatgctgtggccctgtcagtgcagcaggtacttcatcttgagggggcatataacaaagctgtgggccaggtcccaatccccccagtgttagagcacacatcccaggagagctgagctgagccttggccacctgaaatcatccagagatgaagccagtcaattaaatgcaacttatagcatagtaaacccttaacggcatcaaagtatacaagtaaaaagccccatccaaaacaaacaaacaaactaacttcaacgattaaaggaacattagctcacagagatgagaaagaaccagaaccagcataactacactggcaattcaataaccc

SEQ ID NO: 612323 - DNA, 592 bp, Homo sapiens
atgcactgtgcacagtctccaatcactgtttcgccagtgtgcacatatgcagagtcctcactgcaactgcatgggccccactggtgtgtgtgtataaaccctgacaacctgccactgccagggtgagtatgagtataacatgccacactgcacccctgctgcagctggtgcacatgtgcgtaagcatggacccctcagcaaatgctccaatgaagcacttttgttggcatcccccattggactgttgttgccagtggactgagaatgctgtggccctgtcagtgcagcaggtacttcatcttgagggggcatataacaaagctgtgggccaggtcccaatccccccagtgttagagcacacatcccaggagagctgagctgagccttggccacctgaaatcatccagagatgaagccagtcaattaaatgcaacttatagcatagtaaacccttaacggcatcaaagtatacaagtaaaaagccccatccaaaacaaacaarcaaactaacttcaacgattaaaggaacattagctcacagagatgagaaagaaccagaaccagcataactacactggcaattcaataaccc

SEQ ID NO: 612324 - DNA, 380 bp, Homo sapiens
gcatttcattgtttaactggaagtattaacaacagaaaggactaagctgaggaaaaaaactgagagctgtgagatggattcattgaatcaactcagttaaacaaatataaaggggtgggtcactgtattagtctgttctcatgcttctataaagaactgactgagactgggtaatttagaatcaaaatagttttaattgactcacagttctgcatggctggggaggctccaggaaacatacacttatggtggaaggggcagcaaacatgtccttcttgatatggctgcaggagrgagaagtgcaaagtaaagtgggggaaagcccctataaaaccttcagctctcataagaactcactcattatcatgagaacagtatga

SEQ ID NO: 612325 - DNA, 603 bp, Homo sapiens
ggaaggggcagcaaacatgtccttcttgatatggctgcaggagggagaagtgcaaagtaaagtgggggaaagcccctataaaaccttcagctctcataagaactcactcattatcatgagaacagtatgatccccatgtctaatcacctcccatgatgtccttcccccaacatgtggggattacaatttgcattacaattcaagatgagattttgggtagggacacaaagccaaactatattattctgtccatggcccctcgcaaatctcatgtcctcacatttcaaaacacaattatgcctttccaagaatcccccaaagtcttaactcatttcagcattaacctgaaagttygagttcaaaatctcatctgagaaaaggcaagtcccttccacctatgagcctgtaacatcaaaagcaagttagttatttcctagatacaatgggagtgcagatactgggtaaatacacccattggagataggagaaattgaccaaaacaaaggagctataggccccatgcaagtctgaaatccaacagagcagtcattaaaccttattgtttcaaaatgatgtcctttgactccatgtctcacatccagg

SEQ ID NO: 612326 - DNA, 603 bp, Homo sapiens
ggaaggggcagcaaacatgtccttcttgatatggctgcaggagggagaagtgcaaagtaaagtgggggaaagcccctataaaaccttcagctctcataagaactcactcattatcatgagaacagtatgatccccatgtctaatcacctcccatgatgtccttcccccaacatgtggggattacaatttgcattacaattcaagatgagattttgggtagggacacaaagccaaactatattattctgtccatggcccctcgcaaatctcatgtcctcacatttcaaaacacaattatgcctttccaagaatcccccaaagtcttaactcatttcagcattaacctgaaagtttgagttcaaaatctcatctgagaaaaggcaagtcccttccacctatgagcctgtaacatcaaaagcaagttagttatttcctagatacaatgggagtgcagrtactgggtaaatacacccattggagataggagaaattgaccaaaacaaaggagctataggccccatgcaagtctgaaatccaacagagcagtcattaaaccttattgtttcaaaatgatgtcctttgactccatgtctcacatccagg

SEQ ID NO: 612327 - DNA, 658 bp, Homo sapiens
ccaaagctctaatgttcttcaattctatgaaggctgagagaggtaagagaaaactgcagaagaaaagttggaagctgacaaaggttggttcttaagatagarggaaaggagccatcttaacaacataaaagtggaaagtgaaacagtaactgctgatgaaaaagcttcagcaaattatttagaaaatttagctaaaataattgatgaatgtgactaccctaaacaacagattttcaatgtagacagaacagttttatattgagagaagatttcatctaagcctttcatagctagaggggagaagtcaatgcctggcttcaaagcttcaaatgacagactgacactcttgttaggggttagtgcagctagtgactttcagttgaagccaatgcttatttaccatttgaaaatcctaaggctaataagaattatgccaaatctactctgcttgtctctataaatgaagcaacaaagcctttatgacagaacacctgtttatagcatggtttactgaatactttaagcccactgttgagacatactgatccaaataaaagattctctttcaaatattactgcttgtggacaatgtacgtggtcacccaagagctctgatgaacatatacaaggacattaatgttgtttcatgcaacctaac

SEQ ID NO: 612328 - DNA, 658 bp, Homo sapiens
ccaaagctctaatgttcttcaattctatgaaggctgagagaggtaagagaaaactgcagaagaaaagttggaagctgacaaaggttggttcttaagatagagggaaaggagccatcttaacaacataaaagtggaaagtgaaacagtaactgctgatgaaaaagcttcagcaaattattyagaaaatttagctaaaataattgatgaatgtgactaccctaaacaacagattttcaatgtagacagaacagttttatattgagagaagatttcatctaagcctttcatagctagaggggagaagtcaatgcctggcttcaaagcttcaaatgacagactgacactcttgttaggggttagtgcagctagtgactttcagttgaagccaatgcttatttaccatttgaaaatcctaaggctaataagaattatgccaaatctactctgcttgtctctataaatgaagcaacaaagcctttatgacagaacacctgtttatagcatggtttactgaatactttaagcccactgttgagacatactgatccaaataaaagattctctttcaaatattactgcttgtggacaatgtacgtggtcacccaagagctctgatgaacatatacaaggacattaatgttgtttcatgcaacctaac

SEQ ID NO: 612329 - DNA, 658 bp, Homo sapiens
ccaaagctctaatgttcttcaattctatgaaggctgagagaggtaagagaaaactgcagaagaaaagttggaagctgacaaaggttggttcttaagatagagggaaaggagccatcttaacaacataaaagtggaaagtgaaacagtaactgctgatgaaaaagcttcagcaaattatttagaaaatttagctaaaataattgatgaatgtgactaccctaaacaacagattttcaatgtagacagaacagttttatattgaragaagatttcatctaagcctttcatagctagaggggagaagtcaatgcctggcttcaaagcttcaaatgacagactgacactcttgttaggggttagtgcagctagtgactttcagttgaagccaatgcttatttaccatttgaaaatcctaaggctaataagaattatgccaaatctactctgcttgtctctataaatgaagcaacaaagcctttatgacagaacacctgtttatagcatggtttactgaatactttaagcccactgttgagacatactgatccaaataaaagattctctttcaaatattactgcttgtggacaatgtacgtggtcacccaagagctctgatgaacatatacaaggacattaatgttgtttcatgcaacctaac

SEQ ID NO: 612330 - DNA, 658 bp, Homo sapiens
ccaaagctctaatgttcttcaattctatgaaggctgagagaggtaagagaaaactgcagaagaaaagttggaagctgacaaaggttggttcttaagatagagggaaaggagccatcttaacaacataaaagtggaaagtgaaacagtaactgctgatgaaaaagcttcagcaaattatttagaaaatttagctaaaataattgatgaatgtgactaccctaaacaacagattttcaatgtagacagaacagttttatattgagagaagatttcatctaagcctttcatagctagaggggagaagtcaatgcctggcttcaaagcttcaaatgacagactgacactcttgttaggggttagtgcagctagtgactttcagttgaagccaatgcttatttaccatttgaaaatcctaaggctaataagaattatgccaaatctactctgcttgtctctataaatgaagcaacaaagcctttatgacagaacacctgtttatagcatggtttactgaatactttaagcccactgttgagacatactgatccaaatawaagattctctttcaaatattactgcttgtggacaatgtacgtggtcacccaagagctctgatgaacatatacaaggacattaatgttgtttcatgcaacctaac

SEQ ID NO: 612331 - DNA, 591 bp, Homo sapiens
tgagactgaatccgaagaggagtgaatatcatggatacctattttggataggaccactgcattttaatttgtgcacatatatttgaattatatttgacaggatcatgtacttgttactgttactcttttaagtttaagctttagaaaaggcaggtgcatggatattgaatagtcttaagctggaccatcggctatttcagactggcttactcaggyatattccaaaactctggtagtttgactaagaacttgctcaatttggaacagctaaaaatgatatccccaggcttactcacaattcaggttttacattaaacctaccttctttaaggaaaagagcctgagatagaaggtgccttcctattctttttcctgacaagcagtgtaacaaaaccatttactttcctgtaacgacagtcacaaatgaccaaatgtccagtccttagttctgtggccaacattctgtgttattcaaatatgaaccatggctgagatcctatgatcaagaagcaagcagctatgacagaagtattttaatgcttagagaaaaaaaaaaacaaaggtagcaactcactgttaggttagggttag

SEQ ID NO: 612332 - DNA, 516 bp, Homo sapiens
acaggatcatgtacttgttactgttactcttttaagtttaagctttagaaaaggcaggtgcatggatattgaatagtcttaagctggaccatcggctatttcagactggcttactcaggtatattccaaaactctggtagtttgactaagaacttgctcaatttggaacagctaaaaatgatatccccaggcttactcacaattcaggttttacattaaacctaccttctttaaggaaaagagcctgagatagaaggtgccttcctattctttttcctgacaagcartgtaacaaaaccatttactttcctgtaacgacagtcacaaatgaccaaatgtccagtccttagttctgtggccaacattctgtgttattcaaatatgaaccatggctgagatcctatgatcaagaagcaagcagctatgacagaagtattttaatgcttagagaaaaaaaaaaacaaaggtagcaactcactgttaggttagggttagtctgcagatacctggattaag

SEQ ID NO: 612333 - DNA, 516 bp, Homo sapiens
acaggatcatgtacttgttactgttactcttttaagtttaagctttagaaaaggcaggtgcatggatattgaatagtcttaagctggaccatcggctatttcagactggcttactcaggtatattccaaaactctggtagtttgactaagaacttgctcaatttggaacagctaaaaatgatatccccaggcttactcacaattcaggttttacattaaacctaccttctttaaggaaaagagcctgagatagaaggtgccttcctattctttttcctgacaagcagtgtaacaaaaccatttactttcctgtaacracagtcacaaatgaccaaatgtccagtccttagttctgtggccaacattctgtgttattcaaatatgaaccatggctgagatcctatgatcaagaagcaagcagctatgacagaagtattttaatgcttagagaaaaaaaaaaacaaaggtagcaactcactgttaggttagggttagtctgcagatacctggattaag

SEQ ID NO: 612334 - DNA, 516 bp, Homo sapiens
acaggatcatgtacttgttactgttactcttttaagtttaagctttagaaaaggcaggtgcatggatattgaatagtcttaagctggaccatcggctatttcagactggcttactcaggtatattccaaaactctggtagtttgactaagaacttgctcaatttggaacagctaaaaatgatatccccaggcttactcacaattcaggttttacattaaacctaccttctttaaggaaaagagcctgagatagaaggtgccttcctattctttttcctgacaagcagtgtaacaaaaccatttactttcctgtaacgacagtcacaaakgaccaaatgtccagtccttagttctgtggccaacattctgtgttattcaaatatgaaccatggctgagatcctatgatcaagaagcaagcagctatgacagaagtattttaatgcttagagaaaaaaaaaaacaaaggtagcaactcactgttaggttagggttagtctgcagatacctggattaag

SEQ ID NO: 612335 - DNA, 516 bp, Homo sapiens
acaggatcatgtacttgttactgttactcttttaagtttaagctttagaaaaggcaggtgcatggatattgaatagtcttaagctggaccatcggctatttcagactggcttactcaggtatattccaaaactctggtagtttgactaagaacttgctcaatttggaacagctaaaaatgatatccccaggcttactcacaattcaggttttacattaaacctaccttctttaaggaaaagagcctgagatagaaggtgccttcctattctttttcctgacaagcagtgtaacaaaaccatttactttcctgtaacgacagtcacaaatgaccaaatgtccagtccttagttctgtggccracattctgtgttattcaaatatgaaccatggctgagatcctatgatcaagaagcaagcagctatgacagaagtattttaatgcttagagaaaaaaaaaaacaaaggtagcaactcactgttaggttagggttagtctgcagatacctggattaag

SEQ ID NO: 612336 - DNA, 597 bp, Homo sapiens
actgtttattcaaagtataggggcacagtttaggcccagatcagtcaggaaggtggcaaactgtttcacacatttcctgccatgtaaatcagaaatgttgtgtagaacagaacttatatacaagctaaaataagtaaacacaaaacaaaagatagtgaccaaaatctttagcaagaagaggtgcatcacaaaaggaaagaggaacaggaatgacctgatatgaaactrtaaggtacccctgtaagagatatgaatggaggctgctacagtaagtctaaggccaacaatgtagagagaaacagatgaaatttttcttcgtattgttaaattaaaatgcaaacattcgagcttcccagcttccacatcaaagtagaaaaaaaaagaaatttgcattagaaatgtgtgtctagcttttatgaaggatgacaaaaaaaattattgtttctcaaagcagtttttctaaaagtacatttgtaaaatggacaatgtgcctcaagttacaaaaaattattttattattctctatgtaaatatgtttcccattagtacatttaatgatgtttagactaacaattttgtttaaattttaagttaata

SEQ ID NO: 612337 - DNA, 597 bp, Homo sapiens
actgtttattcaaagtataggggcacagtttaggcccagatcagtcaggaaggtggcaaactgtttcacacatttcctgccatgtaaatcagaaatgttgtgtagaacagaacttatatacaagctaaaataagtaaacacaaaacaaaagatagtgaccaaaatctttagcaagaagaggtgcatcacaaaaggaaagaggaacaggaatgacctgatatgaaactgtaaggtacccctgtaagagwtatgaatggaggctgctacagtaagtctaaggccaacaatgtagagagaaacagatgaaatttttcttcgtattgttaaattaaaatgcaaacattcgagcttcccagcttccacatcaaagtagaaaaaaaaagaaatttgcattagaaatgtgtgtctagcttttatgaaggatgacaaaaaaaattattgtttctcaaagcagtttttctaaaagtacatttgtaaaatggacaatgtgcctcaagttacaaaaaattattttattattctctatgtaaatatgtttcccattagtacatttaatgatgtttagactaacaattttgtttaaattttaagttaata

SEQ ID NO: 612338 - DNA, 597 bp, Homo sapiens
actgtttattcaaagtataggggcacagtttaggcccagatcagtcaggaaggtggcaaactgtttcacacatttcctgccatgtaaatcagaaatgttgtgtagaacagaacttatatacaagctaaaataagtaaacacaaaacaaaagatagtgaccaaaatctttagcaagaagaggtgcatcacaaaaggaaagaggaacaggaatgacctgatatgaaactgtaaggtacccctgtaagagatatgaatggaggctgctacagtaagtctaaggccaacaatgtagagagaaacagatgaaatttttcytcgtattgttaaattaaaatgcaaacattcgagcttcccagcttccacatcaaagtagaaaaaaaaagaaatttgcattagaaatgtgtgtctagcttttatgaaggatgacaaaaaaaattattgtttctcaaagcagtttttctaaaagtacatttgtaaaatggacaatgtgcctcaagttacaaaaaattattttattattctctatgtaaatatgtttcccattagtacatttaatgatgtttagactaacaattttgtttaaattttaagttaata

SEQ ID NO: 612339 - DNA, 544 bp, Homo sapiens
ccctcctgcccaaaggcaaagcagccacagtggaagtgcctgagtcctccctcacagccttctgtctagtggttattcccgcttcaaggctaaggaagggaaggacccgttttgccttcaaaggctttttccttccagcccttgctgtgcagcccgttgtgtgtgggaggaaccatgagaggcctggatattgtcaacaaaagacttgaacaagccaaagagctgattatgttgacaagaaggggaccttaacaaggcagataatcaaaagytgatgactgacagcccctttcgcatcccttcaccctctactaaatcaggtctcttacatgatcttgatgacaaataataaaaattataaacacattacagttttcacatgcatttgttcacttctcacagcaaatatgagaggtatctaaggctgagcagcttattacagaaaaaagtttatgggactagaaccttaattttatgtaacaaaatttatatagagcttaccatggatcatgtactctcctaaatagttcaaaactttcatttt

SEQ ID NO: 612340 - DNA, 544 bp, Homo sapiens
ccctcctgcccaaaggcaaagcagccacagtggaagtgcctgagtcctccctcacagccttctgtctagtggttattcccgcttcaaggctaaggaagggaaggacccgttttgccttcaaaggctttttccttccagcccttgctgtgcagcccgttgtgtgtgggaggaaccatgagaggcctggatattgtcaacaaaagacttgaacaagccaaagagctgattatgttgacaagaaggggaccttaacaaggcagataatcaaaagctgatgactgacagcccctttcgcatcccttcaccctctactaaatcaggtctcttacatgatcttgatgacaaataataaaaattataaacacattacagttttcacatgcatttgttcacttctcacagcaaatatgagakgtatctaaggctgagcagcttattacagaaaaaagtttatgggactagaaccttaattttatgtaacaaaatttatatagagcttaccatggatcatgtactctcctaaatagttcaaaactttcatttt

SEQ ID NO: 612341 - DNA, 544 bp, Homo sapiens
ccctcctgcccaaaggcaaagcagccacagtggaagtgcctgagtcctccctcacagccttctgtctagtggttattcccgcttcaaggctaaggaagggaaggacccgttttgccttcaaaggctttttccttccagcccttgctgtgcagcccgttgtgtgtgggaggaaccatgagaggcctggatattgtcaacaaaagacttgaacaagccaaagagctgattatgttgacaagaaggggaccttaacaaggcagataatcaaaagctgatgactgacagcccctttcgcatcccttcaccctctactaaatcaggtctcttacatgatcttgatgacaaataataaaaattataaacacattacagttttcacatgcatttgttcacttctcacagcaaatatgagagktatctaaggctgagcagcttattacagaaaaaagtttatgggactagaaccttaattttatgtaacaaaatttatatagagcttaccatggatcatgtactctcctaaatagttcaaaactttcatttt

SEQ ID NO: 612342 - DNA, 348 bp, Homo sapiens
agatactatacaacattttatttacatattttaattgaagtctrctgaaaatacaccagaaaacctaacagatacacttaacataagggaaacattatcctacactgcttcactttttcaaagatgttattcctcctagttaatgacttactctaaaaagagtgttagaagtagctgaaaagaaaggctatgtttaaatatgtgaagagggcaagtttgaacatttaatatttattgcccacctcttagctttgttatgctctcaagtgactcttaagagaatttcacacttcgacaatattcagagaataagagacatgacattgttaaataccatcaacatgcctg

SEQ ID NO: 612343 - DNA, 550 bp, Homo sapiens
ttcagaatatcttgcttctgatgtcaggatttactctgaacagaaatattttgaatgaagaaacacaaatatgtaatgaggtataatagtacccctcactaattattaaagaaagactacccgaaggctagatttatcttcttgcttgaaaaacaaaatcaaggaaacacccacagaaatacaagactctggatatgagggaatgaagtacttcccgaaagacagaaaacaaaggagttaaaccctgctactgccctaatttagtggctagagtttccagcagtggggcagagaaagtgggctcctagagttgtacaaagccaagagttccaggagactaaggtaaytagagtttctaggtctgagaagctagagattcaaagagagaaatctctgatatctacagatgttctcctttcagtgcttagcagaatactgattagtgtatacatgtgagtaatctgctcactgccagggaaacaagcatcttcaaagattaaaaacaaacaaacaataacaacaacaaaaaccagtgcctgacattcacata

SEQ ID NO: 612344 - DNA, 626 bp, Homo sapiens
taaaatttctttaatagattcacagagactggcagcacaaagttttgtaaggatttagagctactggaactctcataccttgatggtagaaatgtaaaatgttttaaaaacttctgaaaactstttggaaatatcttattttctcataatgttaagcatacacctatactatgacaaagaactccattataaggtgtttacaggccctcgatcagaaaaaacataaccaaacataagttgtataaacatgtatatggaaactttatttaagatagtcaaaaatttgaaaaattctaaatgtctatcaaagaaaagtggataaacattgtgtgacataatcacacaagagagattacctttcaccaattaacaaataatgagcttttgatacgcacaatgacacaattaatctcaaacacatgttgaaccaaaagatgccaggcagaaattagtgcacactgttttaattccaaaaacagatacaactactgtgcagatatgagaaaagtggttgcttcattaatgagaggtattaactagaaagagatattaggaaaatttattgggtcatatttgtgcacttgaatggaagtagaatttatttttgtaaaaataaagatgtcagc

SEQ ID NO: 612345 - DNA, 626 bp, Homo sapiens
taaaatttctttaatagattcacagagactggcagcacaaagttttgtaaggatttagagctactggaactctcataccttgatggtagaaatgtaaaatgttttaaaaacttctgaaaactctttggaaatrtcttattttctcataatgttaagcatacacctatactatgacaaagaactccattataaggtgtttacaggccctcgatcagaaaaaacataaccaaacataagttgtataaacatgtatatggaaactttatttaagatagtcaaaaatttgaaaaattctaaatgtctatcaaagaaaagtggataaacattgtgtgacataatcacacaagagagattacctttcaccaattaacaaataatgagcttttgatacgcacaatgacacaattaatctcaaacacatgttgaaccaaaagatgccaggcagaaattagtgcacactgttttaattccaaaaacagatacaactactgtgcagatatgagaaaagtggttgcttcattaatgagaggtattaactagaaagagatattaggaaaatttattgggtcatatttgtgcacttgaatggaagtagaatttatttttgtaaaaataaagatgtcagc

SEQ ID NO: 612346 - DNA, 626 bp, Homo sapiens
taaaatttctttaatagattcacagagactggcagcacaaagttttgtaaggatttagagctactggaactctcataccttgatggtagaaatgtaaaatgttttaaaaacttctgaaaactctttggaaatatcttattttctcataatgttaagcatacacctatactatgacaaagaactccattataaggtgtttacaggccctcgatcagaaaaaacataaccaaacataagttgtataaacatgtatatggaaactttatttaagatagtcaaaaatttgaaaaattctaaatgtctatcaaagaaaagtggataaacattgtgtgacataatcacacaagagagattacctttcaccaattaacaawtaatgagcttttgatacgcacaatgacacaattaatctcaaacacatgttgaaccaaaagatgccaggcagaaattagtgcacactgttttaattccaaaaacagatacaactactgtgcagatatgagaaaagtggttgcttcattaatgagaggtattaactagaaagagatattaggaaaatttattgggtcatatttgtgcacttgaatggaagtagaatttatttttgtaaaaataaagatgtcagc

SEQ ID NO: 612347 - DNA, 626 bp, Homo sapiens
taaaatttctttaatagattcacagagactggcagcacaaagttttgtaaggatttagagctactggaactctcataccttgatggtagaaatgtaaaatgttttaaaaacttctgaaaactctttggaaatatcttattttctcataatgttaagcatacacctatactatgacaaagaactccattataaggtgtttacaggccctcgatcagaaaaaacataaccaaacataagttgtataaacatgtatatggaaactttatttaagatagtcaaaaatttgaaaaattctaaatgtctatcaaagaaaagtggataaacattgtgtgacataatcacacaagagagattacctttcaccaattaacaaataatgagcttttgatacgcacaatgacacaattaatctcaaacacatgttgaaccaaaagatgccaggcagaaattagtgcacactgttttaattccaaaaacagatacaactactgtgcagatatgagaaaagtggttgcttcattaatgagaggtattaactagaaagagatattaggaaaatttattgggtcatatttgtgcacttgaatgraagtagaatttatttttgtaaaaataaagatgtcagc

SEQ ID NO: 612348 - DNA, 494 bp, Homo sapiens
tgtatatgcatttgtcaaaacttataaatattacttaaatttgttcaccctattttatgtaaattttatataaaaataaacaaaacagaaaaaaatcctagtctttttaggagtatgatcaaagttaatcacagattgtttatacgtgaatgaacacacaaaaaatatgtwtgcacttacctctccaaaatgttgaagtgtctgcttgtaaaagataccgttaatatttattcatttcacatattcatatgattcaaacatttaaatatttaaaacaaatattaccaacacttttagtaaattggaaaatttaagtcaatatcgaattgagagtttttttctcatttggttgattcattaattataatcagcaaaaaaaatttgcatatgttacgtttcgttatacagatacatttgtgacatataattgcagtattgggcaatgactgataaagttgtattttatcaaaacagctttctgagtatgtgatatt

SEQ ID NO: 612349 - DNA, 494 bp, Homo sapiens
tgtatatgcatttgtcaaaacttataaatattacttaaatttgttcaccctattttatgtaaattttatataaaaataaacaaaacagaaaaaaatcctagtctttttaggagtatgatcaaagttaatcacagattgtttatacgtgaatgaacacacaaaaaatatgtttgcacttacctctccaaaatgttgaagtgtctgcttgtaaaagataccgttaatatttattcatttcacatattcatatgattcaaacatttaaatatttaaaacaaatattaccaacacttttagtaaattggaaaatttaagtcaatatcgaattgagagtttttttctcatttggttgattcattaattataatcagcaaaaaaaatttgcatatgttacgtttcrttatacagatacatttgtgacatataattgcagtattgggcaatgactgataaagttgtattttatcaaaacagctttctgagtatgtgatatt

SEQ ID NO: 612350 - DNA, 590 bp, Homo sapiens
gactgataaagttgtattttatcaaaacagctttctgagtatgtgatattgtgatatataagtaaaaaaaaatgctaattcatgatattctgtccctggaagaatatggacaacagaaatattttgtagcatcaaattttagacaaaaacagaggtttacatttaacatcaatgtcaataatagagtcagaattgatatcaaacttgagaaatatttttaccaaaagtaggtctttcataattaatatgaattgatttctgcmaaactatcatatttagccatgtggtcagtaatataatgtaaattatatgtagatatatatttttaaagttgaggacacctaaataaaacatgtaaattattttaattacttgacaatctattatatacaaagtatttaagtatattttaaacatatttaatttaactaattttttgagtgatttgggcaaaattctgttttagttcatgtatagacatgcttatatttgagttactgaaaatgcaaacatttaagtagtctactcttagcatattaatatgtcctgtattcattacaacattaattgcattaaattcagctactatg

SEQ ID NO: 612351 - DNA, 501 bp, Homo sapiens
tgggtgggctttacttgcttcaacagcacatgggaatgcagtgtgcccccatttatccccaccaaccaccactgctgatggatccttgttgggyacagagtcatcaagccccatctacaccagtgccctgcccttgtgctgtgctgcacacagagcaggggatccccccacaacctgagcaattgctcctgcttgcagaccacagataaggcgccaagacctccactggccagcaccccaccccaagccatcaccacctacagtgcagcagtgcactctgtctccagcagaaggcccttgctcccccaacagctgccttgcctccaatactgtggagaacacctgcagagaggcagacacccctatatccactagtactttgctgcaggtactgcagtttgctatccccagcacagtggactccaaatctcgaggagccacagtgtaagagatcgatcaggttgttgtgggaatcaggagactggagagattggtaggtga

SEQ ID NO: 612352 - DNA, 598 bp, Homo sapiens
gctggcatatatctgcatgggtgggctttacttgcttcaacagcacatgggaatgcagtgtgcccccatttatccccaccaaccaccactgctgatggatccttgttgggtacagagtcatcaagccccatctacaccagtgccctgcccttgtgctgtgctgcacacagagcaggggatccccccacaacctgagcaattgctcctgcttgcagaccacagataaggcgccaagacctccactggccagcaccccaccccaagccatcaccacctacagtgcagcagtgcactctgtctccagcagaaggcccttgctcccccaacagctgccttgcctccaatactgtggwgaacacctgcagagaggcagacacccctatatccactagtactttgctgcaggtactgcagtttgctatccccagcacagtggactccaaatctcgaggagccacagtgtaagagatcgatcaggttgttgtgggaatcaggagactggagagattggtaggtgaaacagaaggatttttattgagtgcactcagaaccagcagattaatatccaaagactggaccctgaacaaagacagcactt

SEQ ID NO: 612353 - DNA, 426 bp, Homo sapiens
cagcagaaggcccttgctcccccaacagctgccttgcctccaatactgtggagaacacctgcagagaggcagacacccctatatccactagtactttgctgcaggtactgcagtttgctatccccagcacagtggactccaaatctcgaggagccacagtgtaagagatcgatcaggttgttgtgggaatcaggagactggagagattggtaggtgaaacagaaggatttttattgagtgcactcagaaccagcagattaatatccaaagactggaccctgaacaaagacagcacttgccttttacgcacacttctaaaagggggtggtctaacttgaaacaagcttacagtgrtgcaaagtataatgattcaaaagcaaggatacagaagaagaacaaaggcagtcaatcatactacgacaagtt

SEQ ID NO: 612354 - DNA, 615 bp, Homo sapiens
aagtataatgattcaaaagcaaggatacagaagaagaacaaaggcagtcaatcatactacracaagttcacaactcaggcttacatatgactcttgctatgcagcccagatagctgttatctaggcttgttccagtgctttgcatgggcttatctcataacatttgctatggcatctaggggactgcaatccaggcctgctcaggtgtctcatgatcttcactgtgctgcttagatgaataacagaatcaaaagagaaaggaaaatttgtttttcttctccctatgttgagggagccctgggagactctccagagcacattctttgagccccagcttcttagataatgctatcgagactttgtctgggtctgggctttgcctgttactgcctttgggatgagtcagcctaatacagaaagattgtttctttctctttttaattttacttttctttctttaatttccagcctcaagggtgatgggagaagatgtaagaaaagttatagggaaaaatgcaaaccttcttggaaggccaaaaactttggagaataatttagctgaaggcagctaaattctcttaagggcaaaggttagataacaagggaatgtaaaga

SEQ ID NO: 612355 - DNA, 615 bp, Homo sapiens
aagtataatgattcaaaagcaaggatacagaagaagaacaaaggcagtcaatcatactacgacaagttcacaactcaggcttacatatgactcttgctatgcagcccagatagctgttatctaggcttgttccagtgctttgcatgggcttatctcataacatttgctatggcatctaggggactgcaatcyaggcctgctcaggtgtctcatgatcttcactgtgctgcttagatgaataacagaatcaaaagagaaaggaaaatttgtttttcttctccctatgttgagggagccctgggagactctccagagcacattctttgagccccagcttcttagataatgctatcgagactttgtctgggtctgggctttgcctgttactgcctttgggatgagtcagcctaatacagaaagattgtttctttctctttttaattttacttttctttctttaatttccagcctcaagggtgatgggagaagatgtaagaaaagttatagggaaaaatgcaaaccttcttggaaggccaaaaactttggagaataatttagctgaaggcagctaaattctcttaagggcaaaggttagataacaagggaatgtaaaga

SEQ ID NO: 612356 - DNA, 615 bp, Homo sapiens
aagtataatgattcaaaagcaaggatacagaagaagaacaaaggcagtcaatcatactacgacaagttcacaactcaggcttacatatgactcttgctatgcagcccagatagctgttatctaggcttgttccagtgctttgcatgggcttatctcataacatttgctatggcatctaggggactgcaatccaggcctgctcaggtgtctcatgatcttcactgtgctgcttagatgaataacagaatcaaaagagaaaggaaaatttgtttttcttytccctatgttgagggagccctgggagactctccagagcacattctttgagccccagcttcttagataatgctatcgagactttgtctgggtctgggctttgcctgttactgcctttgggatgagtcagcctaatacagaaagattgtttctttctctttttaattttacttttctttctttaatttccagcctcaagggtgatgggagaagatgtaagaaaagttatagggaaaaatgcaaaccttcttggaaggccaaaaactttggagaataatttagctgaaggcagctaaattctcttaagggcaaaggttagataacaagggaatgtaaaga

SEQ ID NO: 612357 - DNA, 615 bp, Homo sapiens
aagtataatgattcaaaagcaaggatacagaagaagaacaaaggcagtcaatcatactacgacaagttcacaactcaggcttacatatgactcttgctatgcagcccagatagctgttatctaggcttgttccagtgctttgcatgggcttatctcataacatttgctatggcatctaggggactgcaatccaggcctgctcaggtgtctcatgatcttcactgtgctgcttagatgaataacagaatcaaaagagaaaggaaaatttgtttttcttctccctatgttgagggagccctgggagactctccagagcacattctttgagccccagcttcttagataatgctatcgagactttgyctgggtctgggctttgcctgttactgcctttgggatgagtcagcctaatacagaaagattgtttctttctctttttaattttacttttctttctttaatttccagcctcaagggtgatgggagaagatgtaagaaaagttatagggaaaaatgcaaaccttcttggaaggccaaaaactttggagaataatttagctgaaggcagctaaattctcttaagggcaaaggttagataacaagggaatgtaaaga

SEQ ID NO: 612358 - DNA, 517 bp, Homo sapiens
gctctctacttaggggtcaacaatgttaatttcccacaaattatgtttgctccaggcctttgtcttcaaatctgtactaaattaatacaaagttytctggcttagtgggactgtactctcattggtgatgctaagcagtgcagtcccctagctgcattctcaggcaaaataactgtgtctgaatacttttttcattggtcgctcagccagagtgtgcgggatggacccaacacaagagaacaaagctggggcctaatacaagtcccccagagttagagcacacagtccagaagttgggagctgagtgttggtgccataaaatctcccagaaatgaagccagtcagctgaatctaccttataacacaaacaaatcttcgacatcatcaaataggatgaaagaaaacaaaataccgtccaaaggtaagcaatctcaaagactgaagttagataagtgcacaaagatgagaaagaatcagtgcaagaatactgaaaactcaaaaagccagagtaacttcc

SEQ ID NO: 612359 - DNA, 517 bp, Homo sapiens
gctctctacttaggggtcaacaatgttaatttcccacaaattatgtttgctccaggcctttgtcttcaaatctgtactaaattaatacaaagttctctggcttagtgggactgtactctcattggygatgctaagcagtgcagtcccctagctgcattctcaggcaaaataactgtgtctgaatacttttttcattggtcgctcagccagagtgtgcgggatggacccaacacaagagaacaaagctggggcctaatacaagtcccccagagttagagcacacagtccagaagttgggagctgagtgttggtgccataaaatctcccagaaatgaagccagtcagctgaatctaccttataacacaaacaaatcttcgacatcatcaaataggatgaaagaaaacaaaataccgtccaaaggtaagcaatctcaaagactgaagttagataagtgcacaaagatgagaaagaatcagtgcaagaatactgaaaactcaaaaagccagagtaacttcc

SEQ ID NO: 612360 - DNA, 517 bp, Homo sapiens
gctctctacttaggggtcaacaatgttaatttcccacaaattatgtttgctccaggcctttgtcttcaaatctgtactaaattaatacaaagttctctggcttagtgggactgtactctcattggtgatgctaagcagtgcagtcccctagctgcattctcaggcaaaataactgtgtctgaatacttttttcattkgtcgctcagccagagtgtgcgggatggacccaacacaagagaacaaagctggggcctaatacaagtcccccagagttagagcacacagtccagaagttgggagctgagtgttggtgccataaaatctcccagaaatgaagccagtcagctgaatctaccttataacacaaacaaatcttcgacatcatcaaataggatgaaagaaaacaaaataccgtccaaaggtaagcaatctcaaagactgaagttagataagtgcacaaagatgagaaagaatcagtgcaagaatactgaaaactcaaaaagccagagtaacttcc

SEQ ID NO: 612361 - DNA, 517 bp, Homo sapiens
gctctctacttaggggtcaacaatgttaatttcccacaaattatgtttgctccaggcctttgtcttcaaatctgtactaaattaatacaaagttctctggcttagtgggactgtactctcattggtgatgctaagcagtgcagtcccctagctgcattctcaggcaaaataactgtgtctgaatacttttttcattggtcgctcagccagagtgtgcrggatggacccaacacaagagaacaaagctggggcctaatacaagtcccccagagttagagcacacagtccagaagttgggagctgagtgttggtgccataaaatctcccagaaatgaagccagtcagctgaatctaccttataacacaaacaaatcttcgacatcatcaaataggatgaaagaaaacaaaataccgtccaaaggtaagcaatctcaaagactgaagttagataagtgcacaaagatgagaaagaatcagtgcaagaatactgaaaactcaaaaagccagagtaacttcc

SEQ ID NO: 612362 - DNA, 501 bp, Homo sapiens
ggccctgggcctgtccccagaaaacattttttccccctaggcctctgggtctgtgatgggaggggctgctgtgaagacctaggacatggcctagagacatttttcccattgtcttcatgattaggatttggcttcttgttacttatgcacatttctgcagctggcttgaatttcttctcagaaaatgttttgkttttttttctattgcattgtcagactgcaaattatataaatatatatataatgtaaataatatgagccaataaatacataactaattaatatttaaattattaaagataaatattaattttaactattttatcaaaattgtaaatatggaaatgtatgtaacatacaattattgataaataagttgggggttttacttatgattttctcaaaacctgaataaaatatcctttcttttttgagtcctggattttcttcagtttgaacaaatattggaattattaactctgcaccaaagctaaataactg

SEQ ID NO: 612363 - DNA, 626 bp, Homo sapiens
acataactaattaatatttaaattattaaagataaatattaattttaactattttatcaaaattgtaaatatggaaatgtatgtaacatacaattattgataaataagttgggggttttacttatgattttctcaaaacctgaataaaatatcctttcttttttgagtcctggattttcttcagtttgaacaaatattggaattattaactctgcaccaaagctaaataactgattaaggacacatgatgaacctattagcataaatgtgtaaatgttatttttaaaagcagtgaaaaagttaatgaagatatttaattaacctgaagagtccacttactagataattcaatgtcattaattaggtgactcataaagcagatgctttccattttttgagagtggctagaaaaaaaaagtttatgtttacaacatgactctactaagaaacctgaatattatttcattactttttatcaagctaatatgagaaaggaagcaataagataaaaataaatgacagtcacttcttggactggaagcaaagaagtttaacaaaagaaaaaaaagcatwcttccccactttcttaaaaattgagaccacattttaaaataattttgcttgag

SEQ ID NO: 612364 - DNA, 621 bp, Homo sapiens
gggagatctttgaccaccacctctgctgtggcacgaccattgtcaaaatgctagaaagaagagagactggctcttagaccaagggaatttgggattygaaaggacttccaattccagttctatagatttccttcccattagcctcttcatgtgtatcaaatgtaaatggcaggctaaacctacaggatgaagagagttgaaagactgctgcctaaaaatgcccttttccaaatctgtgggtgcagaagcacattgaaaggcagctacccagcctggcggtgtggcacatgcctgcagtctcacatacttaagaggctaaggtgggaggactacttgagcccaggagattgaggcttcagtgaactatgatggtgccacaacactccagcctgggaaacagagctggaccccatttccaaaaaaaaaaaaaaaaagtagttacccaggtaaggtggatgatcaagtacacccagtgagaagcacacaacctttaccctttacccaaactctctcccttacctggcccatttccggtctctagaggaggatcagttagggggtgtgacccaagttacccagataattaactgtggaagcaagtttttttttcactcctttggc

SEQ ID NO: 612365 - DNA, 621 bp, Homo sapiens
gggagatctttgaccaccacctctgctgtggcacgaccattgtcaaaatgctagaaagaagagagactggctcttagaccaagggaatttgggattcgaaaggacttccaattccagttctatagatttccttcccattagcctcttcatgtgyatcaaatgtaaatggcaggctaaacctacaggatgaagagagttgaaagactgctgcctaaaaatgcccttttccaaatctgtgggtgcagaagcacattgaaaggcagctacccagcctggcggtgtggcacatgcctgcagtctcacatacttaagaggctaaggtgggaggactacttgagcccaggagattgaggcttcagtgaactatgatggtgccacaacactccagcctgggaaacagagctggaccccatttccaaaaaaaaaaaaaaaaagtagttacccaggtaaggtggatgatcaagtacacccagtgagaagcacacaacctttaccctttacccaaactctctcccttacctggcccatttccggtctctagaggaggatcagttagggggtgtgacccaagttacccagataattaactgtggaagcaagtttttttttcactcctttggc

SEQ ID NO: 612366 - DNA, 592 bp, Homo sapiens
gctgtggcacgaccattgtcaaaatgctagaaagaagagagactggctcttagaccaagggaatttgggattcgaaaggacttccaattccagttctatagatttccttcccattagcctcttcatgtgtatcaaatgtaaatggcaggctaaacctacaggatgaagagagttgaaagactgctgcctaaaaatgcccttttccaaatctgtgggtgcagaagcacattgaaaggcagctacccagcctggsggtgtggcacatgcctgcagtctcacatacttaagaggctaaggtgggaggactacttgagcccaggagattgaggcttcagtgaactatgatggtgccacaacactccagcctgggaaacagagctggaccccatttccaaaaaaaaaaaaaaaaagtagttacccaggtaaggtggatgatcaagtacacccagtgagaagcacacaacctttaccctttacccaaactctctcccttacctggcccatttccggtctctagaggaggatcagttagggggtgtgacccaagttacccagataattaactgtggaagcaagtttttttttcactcct

SEQ ID NO: 612367 - DNA, 603 bp, Homo sapiens
ctttgaccaccacctctgctgtggcacgaccattgtcaaaatgctagaaagaagagagactggctcttagaccaagggaatttgggattcgaaaggacttccaattccagttctatagatttccttcccattagcctcttcatgtgtatcaaatgtaaatggcaggctaaacctacaggatgaagagagttgaaagactgctgcctaaaaatgcccttttccaaatctgtgggtgcagaagcacattgaaaggcagctacccagcctggcggtgtggcacatgcctgcagtctcacatacttaagaggctaaggtgggaggactacttgagcccaggagwttgaggcttcagtgaactatgatggtgccacaacactccagcctgggaaacagagctggaccccatttccaaaaaaaaaaaaaaaaagtagttacccaggtaaggtggatgatcaagtacacccagtgagaagcacacaacctttaccctttacccaaactctctcccttacctggcccatttccggtctctagaggaggatcagttagggggtgtgacccaagttacccagataattaactgtggaagcaagtttttttttc

SEQ ID NO: 612368 - DNA, 480 bp, Homo sapiens
tatagatttccttcccattagcctcttcatgtgtatcaaatgtaaatggcaggctaaacctacaggatgaagagagttgaaagactgctgcctaaaaatgcccttttccaaatctgtgggtgcagaagcacattgaaaggcagctacccagcctggcggtgtggcacatgcctgcagtctcacatacttaagaggctaaggtgggaggactacttgagcccaggagattgaggcttcagtgaactatgatggtgccacaacactccagcctgggaaacagagctggaccccatttccaaaaaaaaaaaaaaaaagtagttacccaggtaaggtggatgatcaagtacacccagtgagaagcacacaacctttaccctttacccaaactctstcccttacctggcccatttccggtctctagaggaggatcagttagggggtgtgacccaagttacccagataattaactgtggaagcaag

SEQ ID NO: 612369 - DNA, 480 bp, Homo sapiens
tatagatttccttcccattagcctcttcatgtgtatcaaatgtaaatggcaggctaaacctacaggatgaagagagttgaaagactgctgcctaaaaatgcccttttccaaatctgtgggtgcagaagcacattgaaaggcagctacccagcctggcggtgtggcacatgcctgcagtctcacatacttaagaggctaaggtgggaggactacttgagcccaggagattgaggcttcagtgaactatgatggtgccacaacactccagcctgggaaacagagctggaccccatttccaaaaaaaaaaaaaaaaagtagttacccaggtaaggtggatgatcaagtacacccagtgagaagcacacaacctttaccctttacccaaactctcycccttacctggcccatttccggtctctagaggaggatcagttagggggtgtgacccaagttacccagataattaactgtggaagcaag

SEQ ID NO: 612370 - DNA, 477 bp, Homo sapiens
agcatgtgagtaaagtcaatttgccagtcctgggtgggggcaaatccctgagcttgatgtgtagggaagggagggggcctgaataatccctgaggagtagtagaatagcagatggaacactgagaagtgattttttgaggatagatttccacaatggaaaggaaatgagaggttctaagaggtgggctagcagcttgtaacctacatggaagaggttatgcaatgacgacagaatagaatgggcctgtgaggctggaaggagatattttccttggtcaaagaaccatttgccttgtgtgggaagagattgataggtggaagtttcagtyggtgagtaggtgggagtgaccgattagaaggagaaaaactggccgtgagggacagaagttggaatgctagctgcttctttagctattttatcagcataagtattgccctgagcaatgggatctgatgccttttgatggcctttacagt

SEQ ID NO: 612371 - DNA, 644 bp, Homo sapiens
gaattgcagttcagggtgccatagtaccccagagaggccaccctgtctctaatctggagtttatacttcccttgggtacctcccctataaggggattccacaggggtyggggacaggactaaggaatgacagactgctagaatccctctaatgatgctggatgcctctgatccttccatttgggtggatgatgttatgagatataccaactttgtactggagtggatgattgaggcagaaaggtttgagtcaagcaacaagggcaatggatgtctgcagaagtagcttgggactaaaacagacagaccgggttgctataccaactcagcctaattcttatccaataggtagagaacatctgagaccctggaaagggtgagaggtgggcattaaactgtcagtctgcttttccacatggatggggcattataggcctgtgagcataatgccttagtggcctcttccaaagtgccatggttacaccatgggtaacctgacaaagtgctggatgctccatccacgacctcgttctctcattgactagaacgatcctttcatcttgccagtggttaactactccagcactcctaatgccacagagtacagtaatggaccctaagtcctagcttactgagtgaggacct

SEQ ID NO: 612372 - DNA, 644 bp, Homo sapiens
gaattgcagttcagggtgccatagtaccccagagaggccaccctgtctctaatctggagtttatacttcccttgggtacctcccctataaggggattccacaggggttggggacaggactaaggaatgacagactgctagaatccctctaatgatgctggatgcctctgatccttccatttgggtggatgatgttatgagatatrccaactttgtactggagtggatgattgaggcagaaaggtttgagtcaagcaacaagggcaatggatgtctgcagaagtagcttgggactaaaacagacagaccgggttgctataccaactcagcctaattcttatccaataggtagagaacatctgagaccctggaaagggtgagaggtgggcattaaactgtcagtctgcttttccacatggatggggcattataggcctgtgagcataatgccttagtggcctcttccaaagtgccatggttacaccatgggtaacctgacaaagtgctggatgctccatccacgacctcgttctctcattgactagaacgatcctttcatcttgccagtggttaactactccagcactcctaatgccacagagtacagtaatggaccctaagtcctagcttactgagtgaggacct

SEQ ID NO: 612373 - DNA, 644 bp, Homo sapiens
gaattgcagttcagggtgccatagtaccccagagaggccaccctgtctctaatctggagtttatacttcccttgggtacctcccctataaggggattccacaggggttggggacaggactaaggaatgacagactgctagaatccctctaatgatgctggatgcctctgatccttccatttgggtggatgatgttatgagatataccarctttgtactggagtggatgattgaggcagaaaggtttgagtcaagcaacaagggcaatggatgtctgcagaagtagcttgggactaaaacagacagaccgggttgctataccaactcagcctaattcttatccaataggtagagaacatctgagaccctggaaagggtgagaggtgggcattaaactgtcagtctgcttttccacatggatggggcattataggcctgtgagcataatgccttagtggcctcttccaaagtgccatggttacaccatgggtaacctgacaaagtgctggatgctccatccacgacctcgttctctcattgactagaacgatcctttcatcttgccagtggttaactactccagcactcctaatgccacagagtacagtaatggaccctaagtcctagcttactgagtgaggacct

SEQ ID NO: 612374 - DNA, 402 bp, Homo sapiens
aataactttgtggaaaaatgtcatgaccacaactaaygaatctttggtgggcaggtgctttgatgcaccaggctcctttaattacaaagatgtgtgttcatgatgatgaagagaagaagtatcagagagtgctagccctctgcgtagaggctttaggattgtatggggtaaaatgtatgaggaaaactcaggcaactactaccatcaatgagacttagctagtgagtgccaataccttcatcctcataaataatactagcacagggggtctgtgtgtgccagagggctacatctttatctgtgggcaatctggggtgactgaaatgcagggtgggcaaagtcatgcctggaaaacttacaggtcctgccccattgagtgtgctagggatgctcctagaattc

SEQ ID NO: 612375 - DNA, 400 bp, Homo sapiens
gaattcaaaggtgctatcttttaacttaaataactttgtggaaaaatgtcatgaccacaactaacgaatctttggtgggyaggtgctttgatgcaccaggctcctttaattacaaagatgtgtgttcatgatgatgaagagaagaagtatcagagagtgctagccctctgcgtagaggctttaggattgtatggggtaaaatgtatgaggaaaactcaggcaactactaccatcaatgagacttagctagtgagtgccaataccttcatcctcataaataatactagcacagggggtctgtgtgtgccagagggctacatctttatctgtgggcaatctggggtgactgaaatgcagggtgggcaaagtcatgcctggaaaacttacaggtcctgcccca

SEQ ID NO: 612376 - DNA, 402 bp, Homo sapiens
aataactttgtggaaaaatgtcatgaccacaactaacgaatctttggtgggcaggtgctttgatgcaccaggctcctttaattacaargatgtgtgttcatgatgatgaagagaagaagtatcagagagtgctagccctctgcgtagaggctttaggattgtatggggtaaaatgtatgaggaaaactcaggcaactactaccatcaatgagacttagctagtgagtgccaataccttcatcctcataaataatactagcacagggggtctgtgtgtgccagagggctacatctttatctgtgggcaatctggggtgactgaaatgcagggtgggcaaagtcatgcctggaaaacttacaggtcctgccccattgagtgtgctagggatgctcctagaattc

SEQ ID NO: 612377 - DNA, 402 bp, Homo sapiens
aataactttgtggaaaaatgtcatgaccacaactaacgaatctttggtgggcaggtgctttgatgcaccaggctcctttaattacaaagatgtgtgttcatgatgatgaagagaasaagtatcagagagtgctagccctctgcgtagaggctttaggattgtatggggtaaaatgtatgaggaaaactcaggcaactactaccatcaatgagacttagctagtgagtgccaataccttcatcctcataaataatactagcacagggggtctgtgtgtgccagagggctacatctttatctgtgggcaatctggggtgactgaaatgcagggtgggcaaagtcatgcctggaaaacttacaggtcctgccccattgagtgtgctagggatgctcctagaattc

SEQ ID NO: 612378 - DNA, 402 bp, Homo sapiens
aataactttgtggaaaaatgtcatgaccacaactaacgaatctttggtgggcaggtgctttgatgcaccaggctcctttaattacaaagatgtgtgttcatgatgatgaagagaagaagtatcrgagagtgctagccctctgcgtagaggctttaggattgtatggggtaaaatgtatgaggaaaactcaggcaactactaccatcaatgagacttagctagtgagtgccaataccttcatcctcataaataatactagcacagggggtctgtgtgtgccagagggctacatctttatctgtgggcaatctggggtgactgaaatgcagggtgggcaaagtcatgcctggaaaacttacaggtcctgccccattgagtgtgctagggatgctcctagaattc

SEQ ID NO: 612379 - DNA, 402 bp, Homo sapiens
aataactttgtggaaaaatgtcatgaccacaactaacgaatctttggtgggcaggtgctttgatgcaccaggctcctttaattacaaagatgtgtgttcatgatgatgaagagaagaagtatcagagagtgctagccctctgcgtagaggctttaggattgtatggggtaaaatgtatgaggaaaactcaggcaactactrccatcaatgagacttagctagtgagtgccaataccttcatcctcataaataatactagcacagggggtctgtgtgtgccagagggctacatctttatctgtgggcaatctggggtgactgaaatgcagggtgggcaaagtcatgcctggaaaacttacaggtcctgccccattgagtgtgctagggatgctcctagaattc

SEQ ID NO: 612380 - DNA, 518 bp, Homo sapiens
gtaactgactttgggtttacgtcttttatgagatctttggtaccattcataggagttattgctcataaaaaaatgaaaataaacctgtcccaaaccatggcaaatattgcctcctccattgccactgtcttagaagmcaaggaaacatctcccagatccacccagaaagttattttaaacaacagaattgttccagactctttttgtttgagatggagtttcgctctcgttgcccatgctggagtgcagtggtatgatctcagctcactgcaacctctgcctcccaggtctaagtgattctcttgcctcagactccagagtagctgggattataggtgtgcaccaccactcctggctaattttgtattttttttttttttgtagagacagggtttctgcatgtttgtctggctggtctcgaactcctgacctcaggtgatccacctatcttggcctccgaaagtgctgggattacaggcatgagtcaccgcactcagccctccagactttcttttagc

SEQ ID NO: 612381 - DNA, 635 bp, Homo sapiens
atgagatctttggtaccattcataggagttattgctcataaaaaaatgaaaataaacctgtcccaaaccatggcaaatattgcctcctccattgccactgtcttagaagacaaggaaacatctcccagatccacccagaaagttattttaaacaacagaattgttccagactctttttgtttgagatggagtttcgctctcgttgcccatgctggagtgcagtggtatgatctcagctcactgcaacctctgcctcccaggtctaagtgattctcttgcctcagactccagagtagctgggattataggtgtgcaccaccactcctggctaattttgtattttttttttttttgtagagacagggtttctgcatgtttgtctggctggtctcgaactcctgacctcaggtgatccacctatcttggcctccsaaagtgctgggattacaggcatgagtcaccgcactcagccctccagactttcttttagctcaactgggagaagtgtatacaattgccagcacctcttactgtattgggataaacatcttaggtattgtagaaacataggtagaggagatccagaagctgacccatttgttgtagacagtggggccacctgaagaatccttctt

SEQ ID NO: 612382 - DNA, 293 bp, Homo sapiens
gtcaatagtgccattgagatgcragaaggtaaaatcagtgaatgtgagggcagaatagtagaatttaaccaatttgaacaacataaataaaatagactgatatataaaatgaacagagatgtaggtatgtgtgaggcaacaacaaaagatccaacatttttattacgtgtaccagaaaaaaagtaaaatgaggctgaaagaatacttgaagaaatagtgcttcaaaaaaacctcaaatttgcagaagacacaaatgtatagattcaagaagcctaagataccctacacggaat

SEQ ID NO: 612383 - DNA, 293 bp, Homo sapiens
gtcaatagtgccattgagatgcaagaaggtaaaatcagtgaatgtgagggcagaatagtagaatttaaccaatttgaacaacataaataaaatagactgatayataaaatgaacagagatgtaggtatgtgtgaggcaacaacaaaagatccaacatttttattacgtgtaccagaaaaaaagtaaaatgaggctgaaagaatacttgaagaaatagtgcttcaaaaaaacctcaaatttgcagaagacacaaatgtatagattcaagaagcctaagataccctacacggaat

SEQ ID NO: 612384 - DNA, 578 bp, Homo sapiens
tccttgtctcttggttctttcctccagtacaattagcaatgtagtatctttaaatattttctaccacactcttccacatttaaaggatccttgtgattaaattggccccccccagataatcaagtatgatctcttattttaagttcagctgtttagtaagcttaatgtcatgtgcaaccttaatactttcttgcattgtaacatcatatattcttatataacatagcatatccttcctgacatggagaataggacagggacagtcttgtggggggtgggggggcattattctgcttatcacagttagcaaacaaagattttgtgccatgaaaacatggaggaaatacccttatccttatttttcttcagtctttctcatcaaatagatctttagatccaaaagagaagactcaacattgcttttaattaaatctcaagatgaacgaagaggcactatgagccctgggccctagyattggagtagaactcattccaaaacaataagaaagtttaggaaagagatttttaagttgctctagatatctttgaggattatggagaatagtaaaagttttaga

SEQ ID NO: 612385 - DNA, 558 bp, Homo sapiens
ctgtgctcttaaccacttagttgtgtgacacctggcagggtatttaacttctgcaygccctgttccctcatttgcaaaacacagataagtagggatgataagacattcccttcaaagaattatgttgattaattgagctaaggcattcaccatactcacagtaagcattcagtagtttaggtgccctacacattggagcagggttgaggaagggaaagagtacaatccaatgggctattaattattcattgttactgttgataataatagttatcatgcattgagagccaactgagcataggccaccctacaaggtaaaaattatgtctgttttacagatgaagaaactgagtttcacataaattacgtaaattacctaaagctatccagttaataagtgacagaacagagctcttgtttaaacactgggcccttgactccaaagcctgcagttcccagcacccccagggtcaccaaaacctggcctctcctgggggaggtcagggctgaggccaacaagcccaagtcacaccctttaccacctgggacctgattttc

SEQ ID NO: 612386 - DNA, 558 bp, Homo sapiens
ctgtgctcttaaccacttagttgtgtgacacctggcagggtatttaacttctgcatgccctgttccctcatttgcaaaacacagataagtagggatgataagacattcccttcaaagaattatgttgattaattgagctaaggcattcaccatactcacagtaagcattcagtagtttaggtgccctacacattggagcagggttgaggaagggaaagagtacaatccaatgggctattaattrttcattgttactgttgataataatagttatcatgcattgagagccaactgagcataggccaccctacaaggtaaaaattatgtctgttttacagatgaagaaactgagtttcacataaattacgtaaattacctaaagctatccagttaataagtgacagaacagagctcttgtttaaacactgggcccttgactccaaagcctgcagttcccagcacccccagggtcaccaaaacctggcctctcctgggggaggtcagggctgaggccaacaagcccaagtcacaccctttaccacctgggacctgattttc

SEQ ID NO: 612387 - DNA, 558 bp, Homo sapiens
ctgtgctcttaaccacttagttgtgtgacacctggcagggtatttaacttctgcatgccctgttccctcatttgcaaaacacagataagtagggatgataagacattcccttcaaagaattatgttgattaattgagctaaggcattcaccatactcacagtaagcattcagtagtttaggtgccctacacattggagcagggttgaggaagggaaagagtacaatccaatgggctattaattattcattgttactgttgataataatagttatcatgcattgagagccaactgagcataggccaccctacaaggtwaaaattatgtctgttttacagatgaagaaactgagtttcacataaattacgtaaattacctaaagctatccagttaataagtgacagaacagagctcttgtttaaacactgggcccttgactccaaagcctgcagttcccagcacccccagggtcaccaaaacctggcctctcctgggggaggtcagggctgaggccaacaagcccaagtcacaccctttaccacctgggacctgattttc

SEQ ID NO: 612388 - DNA, 558 bp, Homo sapiens
ctgtgctcttaaccacttagttgtgtgacacctggcagggtatttaacttctgcatgccctgttccctcatttgcaaaacacagataagtagggatgataagacattcccttcaaagaattatgttgattaattgagctaaggcattcaccatactcacagtaagcattcagtagtttaggtgccctacacattggagcagggttgaggaagggaaagagtacaatccaatgggctattaattattcattgttactgttgataataatagttatcatgcattgagagccaactgagcataggccaccctacaaggtaaaaattatgtctgttttacagatgaagaaactgagtttcacataaattaygtaaattacctaaagctatccagttaataagtgacagaacagagctcttgtttaaacactgggcccttgactccaaagcctgcagttcccagcacccccagggtcaccaaaacctggcctctcctgggggaggtcagggctgaggccaacaagcccaagtcacaccctttaccacctgggacctgattttc

SEQ ID NO: 612389 - DNA, 614 bp, Homo sapiens
gacagtggcagctagtttaacaaaccaccacaccccgtagcacctctcacctgggtgcaagtgccccaggccacactgcagtagctgctcgctgagggtgtccccggatatataagaagcctctctgagggccacagaggttttttgatggcagatggtttaaaacaccatttttatattaagttgtataaaatatactacattataaaatgcaaagtttgcatcattttagagctaaaacttaaggccacaaaagaatctgctattttcttattaataaaaaatcctatttttatataatgcaaataatgaagatgaagtaacctattatttaattaaacatgtcttttaaaaaaaaaaaaaaagaaataattggtccttgctaatggcccttcagggcaatcccccagactgctggggtccaagtttaccctcctgcctctaataactagggactttggcagaaaagtttgagaaaccctgtcaggaagagagcctacacaaggaccaggaaatctgacttcttcattctttaraagaacaaaacaaacagcaacattgtgttttctaccttcctagtgttttaccttcaagtttagcattaagaacatgaa

SEQ ID NO: 612390 - DNA, 614 bp, Homo sapiens
gacagtggcagctagtttaacaaaccaccacaccccgtagcacctctcacctgggtgcaagtgccccaggccacactgcagtagctgctcgctgagggtgtccccggatatataagaagcctctctgagggccacagaggttttttgatggcagatggtttaaaacaccatttttatattaagttgtataaaatatactacattataaaatgcaaagtttgcatcattttagagctaaaacttaaggccacaaaagaatctgctattttcttattaataaaaaatcctatttttatataatgcaaataatgaagatgaagtaacctattatttaattaaacatgtcttttaaaaaaaaaaaaaaagaaataattggtccttgctaatggcccttcagggcaatcccccagactgctggggtccaagtttaccctcctgcctctaataactagggactttggcagaaaagtttgagaaaccctgtcaggaagagagcctacacaaggaccaggaaatctgacttcttcattctttaaaagaacaaaacaaayagcaacattgtgttttctaccttcctagtgttttaccttcaagtttagcattaagaacatgaa

SEQ ID NO: 612391 - DNA, 324 bp, Homo sapiens
tgtgtaaatttgtgattcttatttctggttcctttctgtttaataattactagctgaatcattaatcatcaaccaagtgaatggtcacactttatagaaggctacaaggtggaacacaagattagttggattcttaagaaagaaactaaaagctgcttgcgacttagatgctcttaagttttatgactgtggtgggaatttgagcatccaggcyttgcttctgatggtcctctcattccagtgccccagttctaatcctctgtgggtgccctcggtagtcacagccttggggctgcccagggctcaaggcgtccatgtttttaa

SEQ ID NO: 612392 - DNA, 212 bp, Homo sapiens
ttgctttacaatatttaacattccttgactaaagagcaagtctaaattgcaagtactcctaggacagggactggcttagatccatgacagctccctctctgaaagaagggcrtgccttactccaccagaccaaacaaaactaaagtgacttctctgctacccccagagaggggcactggggatggtaaaagcatttctgtccctgcacccag

SEQ ID NO: 612393 - DNA, 355 bp, Homo sapiens
aggaatcagttctgcagcagacaccagctgggtatccaccaattcgattctgacactatctaccatgagatagtgtcaccccacmgattgagagctcagcccccaaaactgcccccctttcagacaccagtcacaagtcctagcctctggaacttctgactgacagatttaatttggggttcctacgaccccctctttgggtttgattaatttgctagaataaaatggctcacaaacctcagggaaacacatttactgtttgattacaaggatattccaaaggatatagatgaagagatgcctagcgtgaggtatggggcaaggggcacagagattccatccccttcctgggcac

SEQ ID NO: 612394 - DNA, 355 bp, Homo sapiens
aggaatcagttctgcagcagacaccagctgggtatccaccaattcgattctgacactatctaccatgagatagtgtcaccccaccgattgagrgctcagcccccaaaactgcccccctttcagacaccagtcacaagtcctagcctctggaacttctgactgacagatttaatttggggttcctacgaccccctctttgggtttgattaatttgctagaataaaatggctcacaaacctcagggaaacacatttactgtttgattacaaggatattccaaaggatatagatgaagagatgcctagcgtgaggtatggggcaaggggcacagagattccatccccttcctgggcac

SEQ ID NO: 612395 - DNA, 355 bp, Homo sapiens
aggaatcagttctgcagcagacaccagctgggtatccaccaattcgattctgacactatctaccatgagatagtgtcaccccaccgattgagagctcagcccccaaaactgcccccctttcagacaccagycacaagtcctagcctctggaacttctgactgacagatttaatttggggttcctacgaccccctctttgggtttgattaatttgctagaataaaatggctcacaaacctcagggaaacacatttactgtttgattacaaggatattccaaaggatatagatgaagagatgcctagcgtgaggtatggggcaaggggcacagagattccatccccttcctgggcac

SEQ ID NO: 612396 - DNA, 489 bp, Homo sapiens
aacatataaaaagccaaagtatgggtgcagtggctcatgcctgtaatcccaacactttgggagcccgaggcaggcagatcacttgaggtcaggagttcgagaccagactggccaatatggtgaaaccccatctctactaaaaaagaaaacaaagacaaaaattagccggccatggtggcacatgcctgtagtctacttgggaggctgaggcagaagaattgcttgaacccaggaggcagaggttgcagtgagtggagattgcrccactgcactgcagcctgggttacagagcaagactctgtttcaaaaaaaaaaaaaaaaaaagcaagcccttaggacattccaaggattttaggagttgtataccaggaaatagggacaaagaccaaatctgtatttgacaaaaatcacagaaccgtatgagtttttaattcaatacagacatggaaactggcccaagcatttactcacagatgactgggcgaatca

SEQ ID NO: 612397 - DNA, 466 bp, Homo sapiens
ggagcccgaggcaggcagatcacttgaggtcaggagttcgagaccagactggccaatatggtgaaaccccatctctactaaaaaagaaaacaaagacaaaaattagccggccatggtggcacatgcctgtagtctacttgggaggctgaggcagaagaattgcttgaacccaggaggcagaggttgcagtgagtggagattgcaccactgcactgcagcctgggttacagagcaagactctgtttcaaaaaaaaaaaaaaaaaaagcaagcccttaggacattccaaggattttaggagttgtataccaggaaayagggacaaagaccaaatctgtatttgacaaaaatcacagaaccgtatgagtttttaattcaatacagacatggaaactggcccaagcatttactcacagatgactgggcgaatcactggtcctatgggtacaaattattgatcaaaccccc

SEQ ID NO: 612398 - DNA, 466 bp, Homo sapiens
ggagcccgaggcaggcagatcacttgaggtcaggagttcgagaccagactggccaatatggtgaaaccccatctctactaaaaaagaaaacaaagacaaaaattagccggccatggtggcacatgcctgtagtctacttgggaggctgaggcagaagaattgcttgaacccaggaggcagaggttgcagtgagtggagattgcaccactgcactgcagcctgggttacagagcaagactctgtttcaaaaaaaaaaaaaaaaaaagcaagcccttaggacattccaaggattttaggagttgtataccaggaaatagggacaaagaccaaatctgtatttgacaaaaatcacagaaccgtatgagtttttaattcaatacagacatggaaactggcccaagcatttactcacagatgactgggcraatcactggtcctatgggtacaaattattgatcaaaccccc

SEQ ID NO: 612399 - DNA, 536 bp, Homo sapiens
gttgaggagccttggggtgatcrctccccatctctacccctgcccccagtcacccctcctcccatgacccatattctcaggtttcactctataagaactacttccactcggtgtgacagggcacttagtgccagaattatttataacattgaaatggcaacagggcaatggagagcagcccaacccatggacactttctctttgaaagctcgatcaatggacctagatcactgtttactacttggtgtctcggcctctgccatgtttcctgctggctttgggggatggggaaacaggggtctggaccaggtcaaggctgtcctcagagtttatgatgcttataagccaggcctccaataaagttatgccttcactgtacctctattccttggccaggcacttccctgcctcaggtgagctctcttcttggaaatgaaccattcttggggctttttctcaaacaggagccctctgcctcccccaggaaagctggtattatgtccctaccacagtggcagagctaggacttgagctga

SEQ ID NO: 612400 - DNA, 536 bp, Homo sapiens
gttgaggagccttggggtgatcgctccccatctctacccctgcccccagtcacccctcctcccatgacccatattctcaggtttcactctataagaactacttccactcggtgtgacagggcacttagtgccagaattatttataacattgaratggcaacagggcaatggagagcagcccaacccatggacactttctctttgaaagctcgatcaatggacctagatcactgtttactacttggtgtctcggcctctgccatgtttcctgctggctttgggggatggggaaacaggggtctggaccaggtcaaggctgtcctcagagtttatgatgcttataagccaggcctccaataaagttatgccttcactgtacctctattccttggccaggcacttccctgcctcaggtgagctctcttcttggaaatgaaccattcttggggctttttctcaaacaggagccctctgcctcccccaggaaagctggtattatgtccctaccacagtggcagagctaggacttgagctga

SEQ ID NO: 612401 - DNA, 536 bp, Homo sapiens
gttgaggagccttggggtgatcgctccccatctctacccctgcccccagtcacccctcctcccatgacccatattctcaggtttcactctataagaactacttccactcggtgtgacagggcacttagtgccagaattatttataacattgaaatggcaacagggcaatggagagcagcccaacccatggacactttctctttgaaagctcgatcaatggacctagatcactgtttactacttggtgtctcggcctctgccatgtttcctgctggctttgggggatggggaaacaggggtctggaccaggtcaaggctgtcctcagagtttatgatgcttataagccaggcctccaataaagttatgccttcactgtacctctattccttggccaggcacttccctgcctcaggtgagctctcttcttggaaatgaaccattcttsgggctttttctcaaacaggagccctctgcctcccccaggaaagctggtattatgtccctaccacagtggcagagctaggacttgagctga

SEQ ID NO: 612402 - DNA, 549 bp, Homo sapiens
tatgccttcactgtacctctattccttggccaggcacttccctgcctcaggtgagctctcttcttggaaatgaaccattcttggggctttttctcaaacaggagccctctgcctcccccaggaaagctggtattatgtccctaccacagtggcagagctaggacttgagctgaggaagtcatctgatatggatcagaatggrgatgtagaagattctgggagttcttctgaggaagggcttgaattggccccacccagtctggagtggaggtagagggatggatgaattcacttcttaaggactgaaaacctttttaccatcctcttcctccccagccatagccaattactagttgtcctaatttgaaggctctgttgtctggactggaggatttttacccattttccagcccctctcccggtctcatttatttgggcagtgtcacattaaaggcattgtcagacttcctagtccttcccaaaggcctgacccaactccttcccaaatggtgaagcacctctgcctccttccctttacacctgtggacc

SEQ ID NO: 612403 - DNA, 549 bp, Homo sapiens
tatgccttcactgtacctctattccttggccaggcacttccctgcctcaggtgagctctcttcttggaaatgaaccattcttggggctttttctcaaacaggagccctctgcctcccccaggaaagctggtattatgtccctaccacagtggcagagctaggacttgagctgaggaagtcatctgatatggatcagaatggagatgtagaagattctgggagttcttcygaggaagggcttgaattggccccacccagtctggagtggaggtagagggatggatgaattcacttcttaaggactgaaaacctttttaccatcctcttcctccccagccatagccaattactagttgtcctaatttgaaggctctgttgtctggactggaggatttttacccattttccagcccctctcccggtctcatttatttgggcagtgtcacattaaaggcattgtcagacttcctagtccttcccaaaggcctgacccaactccttcccaaatggtgaagcacctctgcctccttccctttacacctgtggacc

SEQ ID NO: 612404 - DNA, 597 bp, Homo sapiens
ctcctaggtgagtcccagagaaagcccaggtgaaagactatgagcctgtcggaagggatcagggtagaacccaagttgggacaggcaggggaggcagtcccagtctttaggggggtcaagtaattcccctttacaagccaaatgaagaaaaaaagttctaaggggagcatatgactccataaaataaaggacataattgggagtgatatctaatttatctattgaatgcctcctacgtactcttttatcacttagatggacagaatataattggtgtgctgtgcgccatcaatctcagagcctgggcttcctgtgctggctacacatattactgtcagattatgacactgtaataccaagatcaatgacattttaaacgtgctccagttatgggcaattgctgacaataaaaacagtgacaaattgatgaaacttgggcagcgattatctggtgtsaaaaataaaccataaagaatctgatttccaaacagagagaggtgcctgggacaccagcttagggaggaaaggcccagcgagaagagaacttatcctgctcacatgatcttggccactcaggaagccacctgctctggaaaa

SEQ ID NO: 612405 - DNA, 544 bp, Homo sapiens
ggaaatttatatgctattctgttagtttattaaattaatgtttatttttatacaaacattaattattttcaaagtggcyactaaaatgaataataagcaatcataaaataattatacaaaattatatagataaataagggcagaaattgtttatttttatataattatttattttattttatttttttgagagggaatctcgctctgtcacccagtctggagtgcagtggcatgatttcggctcacggcaaactccatctcctgggttcacaccattctcctgcctcagcctccatagttgctgggactataggtgcccaccaccacatccagctaatttttttttttttgtatttttagcagagacaggatttcactgtgttagccaggatggtcttgatctcctgacctcatgatccgcccgccttggcctcccaaagtgctaggattataggcatgagccactgcgcccagccagaaattgtatatttttaaatacactaataatcttaataatgcatccggtatatttatatgagttact

SEQ ID NO: 612406 - DNA, 544 bp, Homo sapiens
ggaaatttatatgctattctgttagtttattaaattaatgtttatttttatacaaacattaattattttcaaagtggctactaaaatgaataataagcaatcataaaataattatacaaaattatatagataaataagggcagaaattgtttatttttatataattatttattttattttatttttttgagagggaatctcgctctgtcacccagtctggagtgcagtggcaygatttcggctcacggcaaactccatctcctgggttcacaccattctcctgcctcagcctccatagttgctgggactataggtgcccaccaccacatccagctaatttttttttttttgtatttttagcagagacaggatttcactgtgttagccaggatggtcttgatctcctgacctcatgatccgcccgccttggcctcccaaagtgctaggattataggcatgagccactgcgcccagccagaaattgtatatttttaaatacactaataatcttaataatgcatccggtatatttatatgagttact

SEQ ID NO: 612407 - DNA, 544 bp, Homo sapiens
ggaaatttatatgctattctgttagtttattaaattaatgtttatttttatacaaacattaattattttcaaagtggctactaaaatgaataataagcaatcataaaataattatacaaaattatatagataaataagggcagaaattgtttatttttatataattatttattttattttatttttttgagagggaatctcgctctgtcacccagtctggagtgcagtggcatgatttcggctcackgcaaactccatctcctgggttcacaccattctcctgcctcagcctccatagttgctgggactataggtgcccaccaccacatccagctaatttttttttttttgtatttttagcagagacaggatttcactgtgttagccaggatggtcttgatctcctgacctcatgatccgcccgccttggcctcccaaagtgctaggattataggcatgagccactgcgcccagccagaaattgtatatttttaaatacactaataatcttaataatgcatccggtatatttatatgagttact

SEQ ID NO: 612408 - DNA, 544 bp, Homo sapiens
ggaaatttatatgctattctgttagtttattaaattaatgtttatttttatacaaacattaattattttcaaagtggctactaaaatgaataataagcaatcataaaataattatacaaaattatatagataaataagggcagaaattgtttatttttatataattatttattttattttatttttttgagagggaatctcgctctgtcacccagtctggagtgcagtggcatgatttcggctcacggcaaactccatctcctgggttcacaccattctcctgcctcagcctccatagttgctgggactataggtgcccaccaccacatccagctaatttttttttttttgtatttttagcagagacaggatttcactgtgttagccaggatggtcttgatctcctgacctcatgatccrcccgccttggcctcccaaagtgctaggattataggcatgagccactgcgcccagccagaaattgtatatttttaaatacactaataatcttaataatgcatccggtatatttatatgagttact

SEQ ID NO: 612409 - DNA, 583 bp, Homo sapiens
aaaaatttatccaattaagagacactagaccttctkttttcttcctagtgaaaatacaatgagaaggcagctgtctgcaagccaggaagaactcttaccaagaattgaatctgctggcacctttaacttggacttgccagcctgcagaactgtgaaaaacaaatgtcttttgtgatcaagtgccaagatgacttactagaagcagctagtatgctccactctcgtgaaaaggaaatagactggccagtaaacactagcacttcaactggatcttccaagaggacatgttgggattcagcaaggaagcaacagaagccatggagaacaaaaacagcaagacacaacagccacccacccaggattgggtggagtcaggggaggatccttaccacaaagaaatagtgactgagagagagccccatggccccatacttctgtcacggacctttgtaatcataggcacaggtgatccaccctgagtccctccccctggggccttcagactaacaaggagagctgcatagaatctgggcagagctccagatcaggcacatgagaagtcccaggggtcttagacccctaa

SEQ ID NO: 612410 - DNA, 583 bp, Homo sapiens
aaaaatttatccaattaagagacactagaccttcttttttcttcctagtgaaaatacaatgagaaggcagctgtctgcaagccaggaagaacycttaccaagaattgaatctgctggcacctttaacttggacttgccagcctgcagaactgtgaaaaacaaatgtcttttgtgatcaagtgccaagatgacttactagaagcagctagtatgctccactctcgtgaaaaggaaatagactggccagtaaacactagcacttcaactggatcttccaagaggacatgttgggattcagcaaggaagcaacagaagccatggagaacaaaaacagcaagacacaacagccacccacccaggattgggtggagtcaggggaggatccttaccacaaagaaatagtgactgagagagagccccatggccccatacttctgtcacggacctttgtaatcataggcacaggtgatccaccctgagtccctccccctggggccttcagactaacaaggagagctgcatagaatctgggcagagctccagatcaggcacatgagaagtcccaggggtcttagacccctaa

SEQ ID NO: 612411 - DNA, 442 bp, Homo sapiens
caggcctgccgtttttgcctgctatagcccctgcccataatgccctcagatcaagagatagcaaagaggcttaaggattatagcaggtcttcagctcagcacatctgccttatggaggtgttgtcagacttttttccatgcctgtctttgctcctgctacttctcactgggtagggcctcccgacctcggccccagcacagctaccctgctcccacttgaacacttcagacagtggcacctgtgcatttctctgggatagaattcccagtgacaacccacagcccctctgccattacatacagtggtaccacccttgctrcctgatatggtttggctctgtgtccccattcaaatctcatcctgtagatcccacaattcccatgttttgtgggaggtacctggtgggaaatgactgaataatggggatgggtatttcccatg

SEQ ID NO: 612412 - DNA, 561 bp, Homo sapiens
tacttctcactgggtagggcctcccgacctcggccccagcacagctaccctgctcccacttgaacacttcagacagtggcacctgtgcatttctctgggatagaattcccagtgacaacccacagcccctctgccattacatacagtggtaccacccttgctgcctgatatggtttggctctgtgtccccattcaaatctcatcctgtagatcccacaattcccatgttttgtgggaggtacctggtgggaaatgactgaataatggrgatgggtatttcccatgctgttctcgtcatagtggatgggtctcatgagatctaatgattttaaaaacaggagtttcctgacacaagctctctcttagcctgctgccatccatgtaagatgtgacttgctcctacttacctttcaccatgattgtgaggccttcccagccacgtggaactgtaagttgattaaacctccttcttttgtaaattgcccagtctcaggtctgtctatcagcagcatgaaaatggaataatacagtaaattggtaccagtagagtgggctctactg

SEQ ID NO: 612413 - DNA, 592 bp, Homo sapiens
cacccttgctgcctgatatggtttggctctgtgtccccattcaaatctcatcctgtagatcccacaattcccatgttttgtgggaggtacctggtgggaaatgactgaataatggggatgggtatttcccatgctgttctcgtcatagtggatgggtctcatgagatctaatgattttaaaaacaggagtttcctgacacaagctctctcttagcctgctgccatccatgtaagatgtgacttgctcctacttacctttcaccatgattgtgaggccttcccagccacgtggaactgtaagttgattaaacctccttcttttgtaaattgcccagtctcaggtctgtctatcagcagcatgaaaatggaataatacagtaaattggtaccagtagagtgggctctactgaaaagtgcctgaaaatgtggaagcaactttagaactgggtaacaggcagaggttgaaacagcttggagcactcagaaggagacaggaaaatgtggcaaagtttagaaccacctagagacttgttgaatggttttgcctaaaatgatgttaatgatacrgacaatgaaatccaggatgaggtgg

SEQ ID NO: 612414 - DNA, 521 bp, Homo sapiens
tgatttagggtatctcatggaagaaatttctaagcagcaaagcattcaagatgtgacctgggtgctgttaaagtcactcagtyttataaaggaagtagagcataaaagttcaaaaagtttgcagcttgacaatgtgatagaaaagaaaatcccattttctgaggagaaatttaagtcagctgcagaaatttgtataagtaatgaggagatgaatgttaatccccaagacaatagggaaaatgtctctaaggcatgccagaggtcttcatggcagccccttccatcacaggcctggtgacctaggagaaaaaaagtggttttgtgggccaggcccaaggtcatcatgctgtgagcagcctggggacttggcaccctgtgtcccagctgctccagccatggctgaaaggggccaatgtagactttaggctgtggcttcagagggtacaagccccaaaccttggcagcttccacttgatgttgagcctgtgagtgcacagaagtcaaaaatgggggtttgggaa

SEQ ID NO: 612415 - DNA, 579 bp, Homo sapiens
cttgcataagttaatccttaatttgtcaactgttgattcattttgctctgaaatcaatgacaataaaaaagaattgtacttctattttgtacttttttactcagagtaaatatttattgagatttaatttgtgccctgtaaactgctaaactcctaaatccattaggtctatttctcccatgaggtaaatatttgctcttcattgaggatatagccagcaaggcagaaactagtctaggacttacaaacaatctgattttattatgtggagcaggtaacatcagggtgaaaataactaagaaacaaagcaaggaatagtgatgaaagtattagcactagcagagaactaatcctttcctcatgatagtaaggtcaatgggagaaactaaagttccagagatccagtaatgagccatttcacagtagaattactgctggtgagaaatgggaccagggagaaatatgaccyctgatgtaggtgtcattagaagcagagaaaacaaacaaacgaaaacagaagtggcccttctccttgccttttcctgtccttcaatctttggcttttgccttcccttgcct

SEQ ID NO: 612416 - DNA, 303 bp, Homo sapiens
aagtaatgaggagatgaatgttaatccccaagacaatagggaaaatgtctctaaggcatgccagaggtcttcatggcagccccttccatcacaggcctggtgacctaggagaaaaaaagtggttttgtgggccaggcccaaggtcatcatgctgtgagcagcctggggacttggcaccctgtgtcccagctgctccagccatggctgaaaggggccaatgtagactttaggctgtggcttcagagggtacaagccccaarccttggcagcttccacttgatgttgagcctgtgagtgcacaga

SEQ ID NO: 612417 - DNA, 303 bp, Homo sapiens
aagtaatgaggagatgaatgttaatccccaagacaatagggaaaatgtctctaaggcatgccagaggtcttcatggcagccccttccatcacaggcctggtgacctaggagaaaaaaagtggttttgtgggccaggcccaaggtcatcatgctgtgagcagcctggggacttggcaccctgtgtcccagctgctccagccatggctgaaaggggccaatgtagactttaggctgtggcttcagagggtacaagccccaaascttggcagcttccacttgatgttgagcctgtgagtgcacaga

SEQ ID NO: 612418 - DNA, 600 bp, Homo sapiens
tgtcccagctgctccagccatggctgaaaggggccaatgtagactttaggctgtggcttcagagggtacaagccccaaaccttggcagcttccacttgatgttgagcctgtgagtgcacagaagtcaaaaatgggggtttgggaatctctgcctagatttcagatgtatggaaatgsctggatgtccaggaataagttcactgcaagggtgaggccctcataaagaaccactgtttagggcagtgtggaagggaaatgtggggttggagcccccacagagagtccctactggggcactgcctaatgcagctgtgagaagagggccaccatcctccaaaccccagaatggtaaatccactgacagcttgcaccgtgcacctagagaagactaaaacactcaatgtcaccctgtgaaagcagccatgaaggaggctgaaccctacacagccacgggggcggagctaccccaagaccttgggaacccacctcttgcattagcatgacctggatgtgagacatagagttactgggagatcattttggagctttaaaatttgactgtccctctggatttcacacttgcatggggcatgtagccct

SEQ ID NO: 612419 - DNA, 600 bp, Homo sapiens
tgtcccagctgctccagccatggctgaaaggggccaatgtagactttaggctgtggcttcagagggtacaagccccaaaccttggcagcttccacttgatgttgagcctgtgagtgcacagaagtcaaaaatgggggtttgggaatctctgcctagatttcagatgtatggaaatggctggatgtccaggaataagttcactgcaagggtgaggccctcataaagaaccactgtttagggcagtgtggaagggaaatgtggggttggagcccccacagagagtccctactggggcactgcctaatgcagctgtgagaagagggccaccatcctccaaaccccagaatggtaaatccactgacagcttgcacygtgcacctagagaagactaaaacactcaatgtcaccctgtgaaagcagccatgaaggaggctgaaccctacacagccacgggggcggagctaccccaagaccttgggaacccacctcttgcattagcatgacctggatgtgagacatagagttactgggagatcattttggagctttaaaatttgactgtccctctggatttcacacttgcatggggcatgtagccct

SEQ ID NO: 612420 - DNA, 566 bp, Homo sapiens
ttacaggctcataagtgaaagggacttgacttgtctcagatgagactttggactgtggacttttgagttaatgctgaaattagttaaggctttttgggactgttgggaaggcatgattggttttgaaatgtgaagatatgagatttgggaggggccaggggtataataatatggtttgactctgtgtccccasccaagtctcatcttgtagttcccataacttctacatgttgtgggagggacccagtgggaaatgattgaatcatgagagtgagtcttccccatgctgttctcatgatagtgaatgggtctcatgaaatctgatggctttaaaaatgggaatttccccaaacgaggtctctatttggctgcagtcatccatgtaagatgtgacttgctcctcttcttgacttctgccatgagtttgaggcctcctcagccatgtagaactacaaattgattaaacctctttattttgtaaattgtccagtgtcaggtatgtctttatcagcagtgtaaaaaaggactaagaaactccccttgggctggggaaagaacaaaatcct

SEQ ID NO: 612421 - DNA, 614 bp, Homo sapiens
agtcatccatgtaagatgtgacttgctcctcttcttgacttctgccatgagtttgaggcctcctcagccatgtagaactacaaattgattaaacctctttmttttgtaaattgtccagtgtcaggtatgtctttatcagcagtgtaaaaaaggactaagaaactccccttgggctggggaaagaacaaaatcctggttgcttcactagcatcttcatcatgacacagttgccatatagcgtagagcccagtctctcttccttgtgagctcccaactcctatcattcactaaacagagctccttgcttgggcctgcagagaagctacctcacccaactgaaaattctattgccagtggctctgtgttatcctgtgatggagctcccagaggcaaatgacagccaactgccactgccaatgcagtggtacctgcccttgctgtcttagactgggaaagaaataaaagagcctgaatgctttactcatgcttccagcacactatgattaccatatgatcaccatatggcatggagcccaatctctattctctgtgagcccctgatcccctgctcttcaccaggcaggggtcccagcaaaggctcatagtgcagcagc

SEQ ID NO: 612422 - DNA, 614 bp, Homo sapiens
agtcatccatgtaagatgtgacttgctcctcttcttgacttctgccatgagtttgaggcctcctcagccatgtagaactacaaattgattaaacctctttattttgtaaattgtccagtgtcaggtatgtctttatcagcagtgtaaaaaaggactaagaaactccccttgggctggggaaagaacaaaatcctggttgcttcactagcaycttcatcatgacacagttgccatatagcgtagagcccagtctctcttccttgtgagctcccaactcctatcattcactaaacagagctccttgcttgggcctgcagagaagctacctcacccaactgaaaattctattgccagtggctctgtgttatcctgtgatggagctcccagaggcaaatgacagccaactgccactgccaatgcagtggtacctgcccttgctgtcttagactgggaaagaaataaaagagcctgaatgctttactcatgcttccagcacactatgattaccatatgatcaccatatggcatggagcccaatctctattctctgtgagcccctgatcccctgctcttcaccaggcaggggtcccagcaaaggctcatagtgcagcagc

SEQ ID NO: 612423 - DNA, 505 bp, Homo sapiens
atcattgaaattcagtagaaagttgaacactatttccaagaatctgaggaatccagtaaaatgattaaagagaaaaaaattagccatttgaaaaaacaaaacaagacaaacaaacaaacaaacwaaaaccaaacctagcaggtagagttacaaaatacactacaagaatttcataaaatgattggaaatattcacagcagaatggactaagccaagaaaagaatctcagagattgaagactgattatttaagttaacactgccagaaaataaataaagaaaagaagaattttaaaaaatgaaaggtcaggcatggtggctcatgcctgtaatcccagcactttgggaggatattgagaccatcctggctaacacggtgaaaccctgtctctactaaaaatacaaaaaaaaaaaaattcactgggcatggtggcaagtgcctgtagccccagctactcaggaggctgaggcaggagattggtaggaacacgggaggtggagcttgc

SEQ ID NO: 612424 - DNA, 580 bp, Homo sapiens
ctctagcaactcaaaaagtcagagtgtcactttacctccaaatgactgcactagttctacagcaatggttgttaaatagaaggaaatggctgaaatgacagatatagaactgagaggtagaaggaaatgaagatcattgaaattcagtagaaagttgaacactatttccaagaatctgaggaatccagtaaaatgattaaagagaaaaaaattagccatttgaaaaaacaaaacaagacaaacaaacaaacaaactaaaaccaaacctagcaggtagagttacaaaatacactacaagaatttcataaaatgattggaaatattcacagcagaatggactaagccaagaaaagaatctcagagattgaagactgattatttaagttaacacwgccagaaaataaataaagaaaagaagaattttaaaaaatgaaaggtcaggcatggtggctcatgcctgtaatcccagcactttgggaggatattgagaccatcctggctaacacggtgaaaccctgtctctactaaaaatacaaaaaaaaaaaaattcactgggcatggtggcaagtgcctgtagccc

SEQ ID NO: 612425 - DNA, 505 bp, Homo sapiens
atcattgaaattcagtagaaagttgaacactatttccaagaatctgaggaatccagtaaaatgattaaagagaaaaaaattagccatttgaaaaaacaaaacaagacaaacaaacaaacaaactaaaaccaaacctagcaggtagagttacaaaatacactacaagaatttcataaaatgattggaaatattcacagcagaatggactaagccaagaaaagaatctcagagattgaagactgattatttaagttaacactgccagaaaataaataaagaaaagaagaattttaaaaaatgaaaggtcaggcatggtggctcatgcctgtaatcccagcactttgggaggatattgagaccatcctggctaacayggtgaaaccctgtctctactaaaaatacaaaaaaaaaaaaattcactgggcatggtggcaagtgcctgtagccccagctactcaggaggctgaggcaggagattggtaggaacacgggaggtggagcttgc

SEQ ID NO: 612426 - DNA, 502 bp, Homo sapiens
agattgacatataaatttagaaaattcagataaccyatgtaagatgctatgtaagacaaccattgcagagacacaaagtaatcagattcttgaaggtcaatgcaaaagaaaaaaatattaaaggcagttaacgacaaggggcaggtcacataaagtggaaactacatcaaactcacaggggaactctcagcaatatcccacagtcagaagacattaagaatccatattcagcatttttgaaaaaataaaattttgaaccaagaattttatgtcccaccaaactaagcttcataaacaagggagaaataaaatccatttcagataagcaaaagctaggggaatttattaccaccaggcctttagagaccacaagagatccttaagaaagtgctaaacatgaaaatgaaggactgttacctagcaccagaaaaacacactcaagtatatagaccaccaacactataaagtaattacacaatcaagtttacataacaaccagcta

SEQ ID NO: 612427 - DNA, 653 bp, Homo sapiens
ggcatggtggctcatgcctgtaatcccagcactttgggaggatattgagaccatcctggctaacacggtgaaaccctgtctctactaaaaatacaaaaaaaaaaaaattcactgggcatggtggcaagtgcctgtagccccagctactcaggaggctgaggcaggagattggtaggaacacgggaggtggagcttgcattgagccgagatcatgccactgcactccagcctgggctacagagcaagactccatctcaaaaaaaaaaaagaaagaaaaagaaaagaaaaaaccttggagaagtaagggattctgtaaaaaatttccccaatttcactagagagattgacatataaatttagaaaattcagataacctatgtaagatgctatgtaagwcaaccattgcagagacacaaagtaatcagattcttgaaggtcaatgcaaaagaaaaaaatattaaaggcagttaacgacaaggggcaggtcacataaagtggaaactacatcaaactcacaggggaactctcagcaatatcccacagtcagaagacattaagaatccatattcagcatttttgaaaaaataaaattttgaaccaagaattttatgtcccaccaaactaagcttcataaacaagggagaaataaaatc

SEQ ID NO: 612428 - DNA, 435 bp, Homo sapiens
taagaatccatattcagcatttttgaaaaaataaaattttgaaccaagaattttatgtcccaccaaactaagcttcataaacaagggagaaataaaatccatttcagataagcaaaagctaggggaatttattaccaccaggcctttagagaccacaagagatccttaagaaagtgctaaacrtgaaaatgaaggactgttacctagcaccagaaaaacacactcaagtatatagaccaccaacactataaagtaattacacaatcaagtttacataacaaccagctaacaacatgctgggaggatcgaatgtgcacatgtcaatattgaagataaacaagctaaacacccacttaaaaggcatggagtggcaaagtggataaagaatcaagacccaactgtatgctgtcttcaagagacccatctcacatgtga

SEQ ID NO: 612429 - DNA, 585 bp, Homo sapiens
gggattctgtaaaaaatttccccaatttcactagagagattgacatataaatttagaaaattcagataacctatgtaagatgctatgtaagacaaccattgcagagacacaaagtaatcagattcttgaaggtcaatgcaaaagaaaaaaatattaaaggcagttaacgacaaggggcaggtcacataaagtggaaactacatcaaactcacaggggaactctcagcaatatcccacagtcagaagacattaagaatccatattcagcatttttgaaaaaataaaattttgaaccaagaattttatgtcccaccaaactaagcttcataaacaagggagaaataaaatccatttcagataagcaaaagctaggggaatttattaccaccaggcctttagagaccacaagagatccttaagaaagtgctaaacatgaaaatgaaggactgttacctagcaccagaaaaacacactcaagtatatagaccaycaacactataaagtaattacacaatcaagtttacataacaaccagctaacaacatgctgggaggatcgaatgtgcacatgtcaatattgaagata

SEQ ID NO: 612430 - DNA, 435 bp, Homo sapiens
taagaatccatattcagcatttttgaaaaaataaaattttgaaccaagaattttatgtcccaccaaactaagcttcataaacaagggagaaataaaatccatttcagataagcaaaagctaggggaatttattaccaccaggcctttagagaccacaagagatccttaagaaagtgctaaacatgaaaatgaaggactgttacctagcaccagaaaaacacactcaagtatatagaccaccaacactataaagtaattacacaatcaagtttacataacaaccagctaacaacatgctgggaggatcgaatgtgcayatgtcaatattgaagataaacaagctaaacacccacttaaaaggcatggagtggcaaagtggataaagaatcaagacccaactgtatgctgtcttcaagagacccatctcacatgtga

SEQ ID NO: 612431 - DNA, 435 bp, Homo sapiens
taagaatccatattcagcatttttgaaaaaataaaattttgaaccaagaattttatgtcccaccaaactaagcttcataaacaagggagaaataaaatccatttcagataagcaaaagctaggggaatttattaccaccaggcctttagagaccacaagagatccttaagaaagtgctaaacatgaaaatgaaggactgttacctagcaccagaaaaacacactcaagtatatagaccaccaacactataaagtaattacacaatcaagtttacataacaaccagctaacaacatgctgggaggatcgaatgtgcacatgtcartattgaagataaacaagctaaacacccacttaaaaggcatggagtggcaaagtggataaagaatcaagacccaactgtatgctgtcttcaagagacccatctcacatgtga

SEQ ID NO: 612432 - DNA, 487 bp, Homo sapiens
cttattttagataaaactgacattaaactaacgatgatcaaaasagacaataaagggcattacgtaatgatgaaggattcaattaaacaagaagacttaactatcctaaatatatatgcacctaacactggagcactcagattcacaaaacaagctcttagagatatacaaagaaacttacataactacacaatgacagtggcagacctcaacaccttactgacagtgtaagacagatcactgaggcagaaaactaacaaggatattcgggacctaaacttgacacttggccaaatacactaacagacatctgcagaacactccacacatcaacaacaagaatatatattcttatcatctgcacgtgacacatattctaaaatcaaccacatgctcagctataagtcaattctcaacaaataaaaaaaaaattttaccagccacactctcagaccagagcacaataaaaatacaaatcaataccaag

SEQ ID NO: 612433 - DNA, 579 bp, Homo sapiens
cttgcataagttaatccttaatttgtcaactgttgattcattttgctctgaaatcaatgacaataaaaaagaattgtacttctattttgtacttttttactcagagtaaatatttattgagatttaatttgtgccctgtaaactgctaaactcctaaatccattaggtctatttctcccatgaggtaaatatttgctcttcattgaggatatagccagcaaggcagaaactagtctaggacttacaaacaatctgattttattatgtggagcaggtaacatcagggtgaaaataactaagaaacaaagcaaggaatagtgatgaaagtattagcactagcagagaactaatcctttcctcatgatagtaaggtcaatgggagaaactaaagttccagagatccagtaatgagccatttcacagtagaattactgctggtgagaaatgggaccagggagaaatatgacccctgatgtaggtgtcattagaagcagagaaaacaaacaaacraaaacagaagtggcccttctccttgccttttcctgtccttcaatctttggcttttgccttcccttgcct

SEQ ID NO: 612434 - DNA, 605 bp, Homo sapiens
cctaaacttgacacttggccaaatacactaacagacatctgcagaacactccacacatcaacaacaagaatatatattcttatcatctgcacgtgacacatattctaaaatcaaccacatgctcagctataagtcaattctcaacaaataaaaaaaaaattttaccagccacactctcagaccagagcacaataaaaatacaaatcaataccaagaagatctgccaaaactgtaggattaagtgaaaattaaacaacctgaacctgaatgacttttgtgtaaacaataaaatcaaggcagaaatcaagaaattcttagactctgatgaaaacaaaaatacaacacaccagaaactcyagaacacagctgaagcatggttaaaaggaaagtttattgtgctaaacacttatgtcaacagctagaaagatctcaaatttgcaacctaacatcacagatagaggaacctaaaaaacaaaacagaaccaacctcgaaggtagtagaagaaaagaaatggccacaatcataactgaaattaacaaaatggagatgagaaaaaaatgtaaaaaaatcaacaaaactgaatgttgggtatttgaaagaaaaa

SEQ ID NO: 612435 - DNA, 563 bp, Homo sapiens
  misc_feature 461: n = A,T,C or G
tctcatgagacttattcactatcatgagaatagcacaggaaagactggcctccgtgattcaattacckcaccctgggtccctcccataacatgtgggaattctgggagatagaattcaagctgcgatttgggtgtggacacagccaaaccatatcaccatatatggagagactgtggatcaacaagatcatctcgaactaatacaggaggtgagcgtttaaattagaacaaccactttggaaagcaatttggattatcttataaatttgagcattctcatatgttatggcaaagtaatttctctaccataggccctggagaaactcttgcccatatgtacaagatgtagtaaaaaaaaaaaaatgctcacgtaatgccattcataataggaaaaatctggaaaatagccaaatgttcattaataggagattgggtaaattaatagagaatgggtaataaanattcccttaaaactagtaacatgtcatttagggaaacatatgtatgcaataaaacaatgtgttttttttaaaggaagagaatcctaaacataaattcagggt

SEQ ID NO: 612436 - DNA, 563 bp, Homo sapiens
  misc_feature 461: n = A,T,C or G
tctcatgagacttattcactatcatgagaatagcacaggaaagactggcctccgtgattcaattacctcaccctgggtccctcccataacatgtgggaattctgggagatagaattcaagctgygatttgggtgtggacacagccaaaccatatcaccatatatggagagactgtggatcaacaagatcatctcgaactaatacaggaggtgagcgtttaaattagaacaaccactttggaaagcaatttggattatcttataaatttgagcattctcatatgttatggcaaagtaatttctctaccataggccctggagaaactcttgcccatatgtacaagatgtagtaaaaaaaaaaaaatgctcacgtaatgccattcataataggaaaaatctggaaaatagccaaatgttcattaataggagattgggtaaattaatagagaatgggtaataaanattcccttaaaactagtaacatgtcatttagggaaacatatgtatgcaataaaacaatgtgttttttttaaaggaagagaatcctaaacataaattcagggt

SEQ ID NO: 612437 - DNA, 499 bp, Homo sapiens
  misc_feature 386: n = A,T,C or G
ggtccctcccataacatgtgggaattctgggagatagaattcaagctgcgatttgggtgtggacacagccaaaccatatcaccatatatggagagactgtggatcaacaagatcatctcraactaatacaggaggtgagcgtttaaattagaacaaccactttggaaagcaatttggattatcttataaatttgagcattctcatatgttatggcaaagtaatttctctaccataggccctggagaaactcttgcccatatgtacaagatgtagtaaaaaaaaaaaaatgctcacgtaatgccattcataataggaaaaatctggaaaatagccaaatgttcattaataggagattgggtaaattaatagagaatgggtaataaanattcccttaaaactagtaacatgtcatttagggaaacatatgtatgcaataaaacaatgtgttttttttaaaggaagagaatcctaaacataaattcagggtagtagttaccc

SEQ ID NO: 612438 - DNA, 499 bp, Homo sapiens
  misc_feature 386: n = A,T,C or G
ggtccctcccataacatgtgggaattctgggagatagaattcaagctgcgatttgggtgtggacacagccaaaccatatcaccatatatggagagactgtggatcaacaagatcatctcgaactaayacaggaggtgagcgtttaaattagaacaaccactttggaaagcaatttggattatcttataaatttgagcattctcatatgttatggcaaagtaatttctctaccataggccctggagaaactcttgcccatatgtacaagatgtagtaaaaaaaaaaaaatgctcacgtaatgccattcataataggaaaaatctggaaaatagccaaatgttcattaataggagattgggtaaattaatagagaatgggtaataaanattcccttaaaactagtaacatgtcatttagggaaacatatgtatgcaataaaacaatgtgttttttttaaaggaagagaatcctaaacataaattcagggtagtagttaccc

SEQ ID NO: 612439 - DNA, 612 bp, Homo sapiens
cccttcttacctggaggtaaacttggcatctactacttacctctacacttgaacagccaaggatgggctgagcacagaggctcacatctgtaactccagcactttgggaggccaaggcaggaggatcgcttaaggccaggagttcaagaccagcctgggcaatatagtgagacctcgtctctgtaaaaacaaacaaacaaaaccgaggatgggtgggtgacagggagcagttcaacatcggaaaccataaatctgagaggtggaaggacccttagaccagccccacattaacagatgagactctgccctgagattatagcctaaggtaatgcattgagcttttctagagayttgaaaataatcaatcctaaaacccccaagcatactgctactgtttgctattgaataatgttttctagtctgggtgtggtggctcctgcctgtaattccaacactttggaaggtcgatgcaagtggatcacctaaggtcaggagttcgagaccagcctggccaacatggtgaatccctgtctctacataaatacaaaaaattagcaggccatcgtggtgtgcactggtaatcccagctgcttgggaggctgaggcaggaga

SEQ ID NO: 612440 - DNA, 612 bp, Homo sapiens
cccttcttacctggaggtaaacttggcatctactacttacctctacacttgaacagccaaggatgggctgagcacagaggctcacatctgtaactccagcactttgggaggccaaggcaggaggatcgcttaaggccaggagttcaagaccagcctgggcaatatagtgagacctcgtctctgtaaaaacaaacaaacaaaaccgaggatgggtgggtgacagggagcagttcaacatcggaaaccataaatctgagaggtggaaggacccttagaccagccccacattaacagatgagactctgccctgagattatagcctaaggtaatgcattgagcttttctagagatttgaaaataatcaatcctaaaacccccaagcatactgctactgtttgctattgaataatgttttctagtctgggtgtggtggctcctgcctgtaattccaacactttggaaggtcgatgcaagtggatcacctaaggtcaggagttcgagaccagcctggccaacatkgtgaatccctgtctctacataaatacaaaaaattagcaggccatcgtggtgtgcactggtaatcccagctgcttgggaggctgaggcaggaga

SEQ ID NO: 612441 - DNA, 499 bp, Homo sapiens
  misc_feature 386: n = A,T,C or G
ggtccctcccataacatgtgggaattctgggagatagaattcaagctgcgatttgggtgtggacacagccaaaccatatcaccatatatggagagactgtggatcaacaagatcatctcgaactaatacaggaggtgagcgtttaaattagaacaaccactttggaaagcaatttggattatcttataaatttgagcattctcatatgttatggcaaagtaatttctctaccataggccctggagaaactcttgcccatatgtacaagatgtagtaaaaaaaaaaaaatgctcacgtaatgccattcataataggaaaaatctggaaaatagccaaatgttcattaataggagattgggtaaattaatagagaatgggtaataaanattcccttaaaactagtaacatgtcatttagggaaacatatgtatgcartaaaacaatgtgttttttttaaaggaagagaatcctaaacataaattcagggtagtagttaccc

SEQ ID NO: 612442 - DNA, 649 bp, Homo sapiens
actcagcgtgtaatgtgcaccaaatacatgtatattggattaatatttaaatgtgtatatacttagctgtgaataaatagcatcaatattckttttttaaatgttaaaaatataaagtgtatagccttcaaaagtacactgtacataaataatttgaaggtgatgaagaggaccctgaaacaggaatggattcctaattcctagcagggatttaatggccatcatggagcagccagatgttataagataaggatataagatctgagaggcatggcaggtaagaatagagctaacatacattttacttaaaatttttgaattggctatattgaaaaaagtttaacacatgttaccacagcaaacactctaaaaactctctactaagaattttggcttagaccaaggccaacattgctctggacataaaatggccttttatacatgatgatgatattttcaaaactaagtaagttaagtacattatttaaaagattttagtcctgttttacctgttatttcactactaaaggatttttctactctgagttcactttatcattcttttttcagaattttatctgtgcttattttaaataaacatgaaaattactaccatttaagataaatatccttttatctttcaattatt

SEQ ID NO: 612443 - DNA, 487 bp, Homo sapiens
ttcacatatccttcagatagctggtaaaatgctgctttttgctagaagccttctccgccctttctatataacagcaacctctcttctcagtttcttgtcatctccagtacaccttctagctgcttttctaattttatttttcccaagcacaacttagcactttactggaagtcatctgttttctgcttcacaaagcaaggacttgtctccgttgtgcccagctctagcctcagggcctagaaaagtactcagcgtgtaatgtgcaccaaatacatgtatattggattaatatttaaatgtgtatatacttagctgtgaataaatagcatcaatattctttttttaaatgttaaaaatataaagtgtatagccttcaaaagtacactgtacataaayaatttgaaggtgatgaagaggaccctgaaacaggaatggattcctaattcctagcagggatttaatggccatcatggagcagccagatgtt

SEQ ID NO: 612444 - DNA, 649 bp, Homo sapiens
actcagcgtgtaatgtgcaccaaatacatgtatattggattaatatttaaatgtgtatatacttagctgtgaataaatagcatcaatattctttttttaaatgttaaaaatataaagtgtatagccttcaaaagtacactgtacataaataatttgaaggtgatgaagaggaccctgaaacaggaatggattcctaattcctagcagggatttaatggccatcayggagcagccagatgttataagataaggatataagatctgagaggcatggcaggtaagaatagagctaacatacattttacttaaaatttttgaattggctatattgaaaaaagtttaacacatgttaccacagcaaacactctaaaaactctctactaagaattttggcttagaccaaggccaacattgctctggacataaaatggccttttatacatgatgatgatattttcaaaactaagtaagttaagtacattatttaaaagattttagtcctgttttacctgttatttcactactaaaggatttttctactctgagttcactttatcattcttttttcagaattttatctgtgcttattttaaataaacatgaaaattactaccatttaagataaatatccttttatctttcaattatt

SEQ ID NO: 612445 - DNA, 621 bp, Homo sapiens
agaaagcacaccacgtaactttaaattgttctcaaatcattttgtaagtcatcagataagtagctacttaagtaatctatatatttgtaataaatatttgtgtagaaataatagaatgaggaagtccttcttcataactttgaataaaacactatttctccagttaacctggagggcaaataaaccttttaaaaatataacagaaaagttcgataagagcacaaagtgtgtattaagtaaatgttacaaaggataaatggaagtgaaatacctggattatccttactgagaattcaacacctataagtgaattataagtgaaatcacaactatcacaaactttgctccatctcattttggaattgtaacagcctcaagggcataataactttcaaaagacggtcactgagtgccaactatatgccagcccatatgctaggtacggactgctaggtttttttcttactaattagaatcacttaactgcttgaaaatgtgcattggtggtaaacctattatcagcccttactctatctttaaaattttaagttaaatttttgatttaatrtagaatcattttatacacacacacacacacgccacacaccgaaacatatacta

SEQ ID NO: 612446 - DNA, 572 bp, Homo sapiens
gggcagtccctgctatgctgcccttcagacacagccctcttccctcaagctgccctctgcctggatcccaccttccttgtgagctggagtatttgcttgwgggagtcttgactctccttccctgtcagtcactgtttggctgcaggcagtgacagtggtggcaataaagcagcagagaggaggctttggtatcagagcagggactcacgggtgggatgggacggggatggttttatgtttgccccgctgtgttctctgtgctgctctgcccagggaggctgacctctgcagactgtgtcacatgggccccctgatctctcggccaatagagttcccggctgagaagggggagagaggagtcagggtatttgtttcctccattccctgtcagcccccctttttgcctgcttgaagctctggtggtggttgtgtttcctccttggtcacagctttgctgagtggcctctctcctgtgtcccgtgagcccagttggcattgggctttggtagagatatttctatcctggtgccacactagcccttattagttttcttcatctgatctatgccttt

SEQ ID NO: 612447 - DNA, 572 bp, Homo sapiens
gggcagtccctgctatgctgcccttcagacacagccctcttccctcaagctgccctctgcctggatcccaccttccttgtgagctggagtatttgcttgagggagtcttgactctccttccctgtcagtcactgtttggctgcaggcagtgacagtggtggcaataaagcagcagagaggaggctttggtatcagagcagggactcacgggtgggatgggacggggatggttttatgtttgccccrctgtgttctctgtgctgctctgcccagggaggctgacctctgcagactgtgtcacatgggccccctgatctctcggccaatagagttcccggctgagaagggggagagaggagtcagggtatttgtttcctccattccctgtcagcccccctttttgcctgcttgaagctctggtggtggttgtgtttcctccttggtcacagctttgctgagtggcctctctcctgtgtcccgtgagcccagttggcattgggctttggtagagatatttctatcctggtgccacactagcccttattagttttcttcatctgatctatgccttt

SEQ ID NO: 612448 - DNA, 572 bp, Homo sapiens
gggcagtccctgctatgctgcccttcagacacagccctcttccctcaagctgccctctgcctggatcccaccttccttgtgagctggagtatttgcttgagggagtcttgactctccttccctgtcagtcactgtttggctgcaggcagtgacagtggtggcaataaagcagcagagaggaggctttggtatcagagcagggactcacgggtgggatgggacggggatggttttatgtttgccccgctgtgttctctgtgctgctctgcccagggaggctgacctctgcagactgtgtcacatgggccccctgatctctcggccaatagagttcccggctgagaagggggagagaggagtcagggtatttgtttcctccattccctgtcagcccccctttttgcctgcttgaagctctggtggtggttgtgtttcctccttggtcacagytttgctgagtggcctctctcctgtgtcccgtgagcccagttggcattgggctttggtagagatatttctatcctggtgccacactagcccttattagttttcttcatctgatctatgccttt

SEQ ID NO: 612449 - DNA, 534 bp, Homo sapiens
ccaggagcccctgaacgggcatgttggtcccaggccctttgtgagcatgcttttccctgccctgccccctgtcatcaccattctggatggagcagcaaggacggagacacttagttgggctgtccactccaggtccaatgccagtgggatcagctttgatgggatgcacacagactgacctcttctccccagccycttcaacttcccagagctgcagggggcctgggagttcttggtaacagcacattaaacctctgtttgtgggaactttaatttaaacacaaattagagatggcaaatgactctggcagccagataagccatcccgggagagcaaggagaaagccaagagaatcagcccagataaggcctgactttaaactactggtgatacccagaagcctgggacagatgaaatctaggggtcctgaatgaagaaccccagaagctccacaccccagttgtccttgctctgggctctatgccagctccctctcctgtgttctctatatttctatctttttgcaaaattct

SEQ ID NO: 612450 - DNA, 534 bp, Homo sapiens
ccaggagcccctgaacgggcatgttggtcccaggccctttgtgagcatgcttttccctgccctgccccctgtcatcaccattctggatggagcagcaaggacggagacacttagttgggctgtccactccaggtccaatgccagtgggatcagctttgatgggatgcacacagactgacctcttctccccagcctcttcaacttcccagagctgcagggggcctgggagttcttggtaacagcacattaaacctctgtttgtgggaactttaatttaaacacaaatyagagatggcaaatgactctggcagccagataagccatcccgggagagcaaggagaaagccaagagaatcagcccagataaggcctgactttaaactactggtgatacccagaagcctgggacagatgaaatctaggggtcctgaatgaagaaccccagaagctccacaccccagttgtccttgctctgggctctatgccagctccctctcctgtgttctctatatttctatctttttgcaaaattct

SEQ ID NO: 612451 - DNA, 534 bp, Homo sapiens
ccaggagcccctgaacgggcatgttggtcccaggccctttgtgagcatgcttttccctgccctgccccctgtcatcaccattctggatggagcagcaaggacggagacacttagttgggctgtccactccaggtccaatgccagtgggatcagctttgatgggatgcacacagactgacctcttctccccagcctcttcaacttcccagagctgcagggggcctgggagttcttggtaacagcacattaaacctctgtttgtgggaactttaatttaaacacaaattagagatggcaaatgactctggcagccagataagccatcccgggagagcaaggagaaagccaagagaatcagcccagatraggcctgactttaaactactggtgatacccagaagcctgggacagatgaaatctaggggtcctgaatgaagaaccccagaagctccacaccccagttgtccttgctctgggctctatgccagctccctctcctgtgttctctatatttctatctttttgcaaaattct

SEQ ID NO: 612452 - DNA, 534 bp, Homo sapiens
ccaggagcccctgaacgggcatgttggtcccaggccctttgtgagcatgcttttccctgccctgccccctgtcatcaccattctggatggagcagcaaggacggagacacttagttgggctgtccactccaggtccaatgccagtgggatcagctttgatgggatgcacacagactgacctcttctccccagcctcttcaacttcccagagctgcagggggcctgggagttcttggtaacagcacattaaacctctgtttgtgggaactttaatttaaacacaaattagagatggcaaatgactctggcagccagataagccatcccgggagagcaaggagaaagccaagagaatcagcccagataagkcctgactttaaactactggtgatacccagaagcctgggacagatgaaatctaggggtcctgaatgaagaaccccagaagctccacaccccagttgtccttgctctgggctctatgccagctccctctcctgtgttctctatatttctatctttttgcaaaattct

SEQ ID NO: 612453 - DNA, 631 bp, Homo sapiens
ctgacctcttctccccagcctcttcaacttcccagagctgcagggggcctgggagttcttggtaacagcacattaaacctctgtttgtgggaactttaatttaaacacaaattagagatggcaaatgactctggcagccagataagccatcccgggagagcaaggagaaagccaagagaatcagcccagataaggcctgactttaaactactggtgatacccagaagcctgggacagatgaaatctaggggtcctgaatgaagaaccccagaagctccacaccccagttgtccttgctctgggctctatgccagctccctctcctgtgttctctatatttctatctttttgcaaaattctaacctgattctttggctccatccctccsacccccaccccactgttttagagaatgcactttctttactttgcttctcatcttcttctgtgacctactattctgagaaagttctacttgttacctaacctccatctatgctactacatttagagtctaatacatcctgcttagtggtagctctgggagtttctgttcatgtggcaaatgtggtgtagtaaaaacaacctgaaaaagacctgggtgaacttctctgcatctcagtttcctcat

SEQ ID NO: 612454 - DNA, 631 bp, Homo sapiens
ctgacctcttctccccagcctcttcaacttcccagagctgcagggggcctgggagttcttggtaacagcacattaaacctctgtttgtgggaactttaatttaaacacaaattagagatggcaaatgactctggcagccagataagccatcccgggagagcaaggagaaagccaagagaatcagcccagataaggcctgactttaaactactggtgatacccagaagcctgggacagatgaaatctaggggtcctgaatgaagaaccccagaagctccacaccccagttgtccttgctctgggctctatgccagctccctctcctgtgttctctatatttctatctttttgcaaaattctaacctgattctttggctccatccctcccacccccaccccactgttttagagaatgcactttctttactttgcttctcatcttcttctgtgacctactattctgagaaagttctacttgttayctaacctccatctatgctactacatttagagtctaatacatcctgcttagtggtagctctgggagtttctgttcatgtggcaaatgtggtgtagtaaaaacaacctgaaaaagacctgggtgaacttctctgcatctcagtttcctcat

SEQ ID NO: 612455 - DNA, 631 bp, Homo sapiens
ctgacctcttctccccagcctcttcaacttcccagagctgcagggggcctgggagttcttggtaacagcacattaaacctctgtttgtgggaactttaatttaaacacaaattagagatggcaaatgactctggcagccagataagccatcccgggagagcaaggagaaagccaagagaatcagcccagataaggcctgactttaaactactggtgatacccagaagcctgggacagatgaaatctaggggtcctgaatgaagaaccccagaagctccacaccccagttgtccttgctctgggctctatgccagctccctctcctgtgttctctatatttctatctttttgcaaaattctaacctgattctttggctccatccctcccacccccaccccactgttttagagaatgcactttctttactttgcttctcatcttcttctgtgacctactattctgagaaagttctacttgttacctaacctccatctatgctactacmtttagagtctaatacatcctgcttagtggtagctctgggagtttctgttcatgtggcaaatgtggtgtagtaaaaacaacctgaaaaagacctgggtgaacttctctgcatctcagtttcctcat

SEQ ID NO: 612456 - DNA, 620 bp, Homo sapiens
aatccaattttgtgcacttaagccatttgaaaaacagaaaagcaaaacaacaaaataatttttaagaaattgaatatagggtgctatgctctgaatgtgtccccctaaaattaatcaccaatgtcataggattaggaagtagggcttttaggtagtgattcagtcatgaagggagagtcttcacaaatgggtgtaggatccttacacaaggactggagggagtgggcttcccctgttttgcccttccgccttctgccatgtgaggacacagtgcctctcctcctgaagacacagtgcacaaggtaccatcttggatgcagagaccaggccctcaccagacaccaatcctgctggcaccttgatcttggacttctagcytatggaactgtgagaaatacatttctgttcttcagaaattacccagcctagtgtattttcttatatagaagcacaaactcattaaggcacaatgcctcttgtcattttcttctacaattttctttgtggcctctttagcactgggtcattttatatttgctccttcataatatctcttactttcggtttttcacatttctgttccaagtgtattcttagatacatattttccactattagtt

SEQ ID NO: 612457 - DNA, 613 bp, Homo sapiens
tccctctgtcacagcacctgtgagggtggcagagggatggcaacccccaagagggcagagttccatctctccaactgactttgaagcatctttttatcctgcttttctgggaggcttaaagtgaaggcggagggagatatcacacagtcccaaagcccccactaaatggggagctacygtctttcatctttcatgcagggtaaaagaagacaccttggctacagcaagaggaaagaaggtcaaaccacaggcagaactttcaggttgaatgttagagcagactgtgatcccaagagatcatccaagacccttggtctcagaggatgcctatgaggccctggtccctggctggggtgggaacaataatctcaacagccccatgctagactgacttgggagtcagaaggtccctgggactagaatagaaggactttggcattttccctggcctagggcccttagacagaagtgggcagctgccatcaggagcctggggcccagctgtgtccacaccttgcccgcctcccccctcctgagtgcctggctgcccctggagccccaggcttgcctgccatctgggcagctcagaggagagcccactgccaagggagtg

SEQ ID NO: 612458 - DNA, 544 bp, Homo sapiens
ccctagggaaccacccatcatacatgttatcataccctatcctttgtagacttggcccaactgtaacatattaatatgtttactgtcagtctctcccactggactgtaatctctaggagggtaggaaccagacccattgtgctcattcctgaatattcagcaccaaacacagtgcctggcgcctaataagatctcagtaagaatttgtcaagtgtaggaaagaatgaataaatgaaggtccttgtccatgaggtggagggaagcccacgtgtcttcttagtgcctgccatggtttccgagaccctgcggcatctgctgctacccccaggatctctccctccaggacccttcctcacccctgtcatatcaacccaggaccaatggggccaatcttatctggatacccttgccttcccactttccttgagtcacctttcttaagtccttcacacaatgttcttttcctccmattttccttcctccaagatactttctcagattacctacagcctcagtcctggattcagatactctttcagataat

SEQ ID NO: 612459 - DNA, 318 bp, Homo sapiens
acagccttaacctcctaggctcaagcaatcctcccacctcagcctcccaagtagctgggactagaggcatgtcccactacatctggctaatttgtatatgacatatrtttttgtagaggtagggttttgccatgttgcccaggttgatcttgaactcctgagctgaagcaattcacctgccttggcctcccaaagtgctttgattacaggtgtgggttaccacacccagccaatgtacatttaattatcaaagtactatctatactattttatggaagtactaattatcaaagtgcaatagaggttttgttgttattg

SEQ ID NO: 612460 - DNA, 432 bp, Homo sapiens
ctgttggtggttgccagagtctggaggcagggggagctgctaatgctgaatccctgagggtttcattttgggatgatgaaaatggttgaaactagatagataccacgtgttgcgtggtggtacacaacattgtacctggacttaaatgccactaaattgtttctcttccttttcttataagggcactaatcccatcattccggctccatcctcatgatttcacctaaaccaaattattttcccaaggccccacttcctgagaccatcacactgagggcaagagcttcaagatatgaagtttgtggggaatgccaacattcagtccatgacactaagcaaagtcttcctgtactcttcccacagcttcttgatgcagttttctacgttgtcaaatgtatcascttgtgtcagtccactttttccccggagccc

SEQ ID NO: 612461 - DNA, 431 bp, Homo sapiens
ggacacaaacactgcggaaggccgcagggtcctctgcctaggaaaaccagagacctttgttcacttgtttatctgctgaccttccctccactattgtcccatgaccctgccaaatccccctctgtgagaaacacccaagaattatcaataaaaaaataaattaaaaaaaaaaaaaaaaaaagactraatgcttttccttaagatcaagaacattcagctttgtgctggagtttctagacagtgaaataaaggaagataaaggaaaagaattcagactgagggaaaaaaattcaggctagaaaggaagaagtacaactgtctgtctgtattcactgacaaaatgattgtctatgtagcaaatcttgtgggatctgcagaagaaatactagaaattctagaactaattaatcaattttggaaggttgcaggat

SEQ ID NO: 612462 - DNA, 336 bp, Homo sapiens
atagcctcccccttcacaaggagccaacatctccctagacatatcctgctgtttctccttgtgagtacctcccactcccctcttttgctgctaatattttcccttcttcctaaggaatgattactctccacaagactcagcccaggcacctctcctcctagaagccatttcttgatctcccccagtctgagtttggtgccactagttcagacttccatttgtgcccagtgcataactctatcacagcaccaacatattgaattctggttggctgtggagtgtgagtgtgagtccttctccaatagtagatgaygtgcctttttcctctgtctctct

SEQ ID NO: 612463 - DNA, 382 bp, Homo sapiens
ataacatatcagtattaaataaagtaaaataaaaagcaagggaatttatcagtataaaaagagacacatttctagggataaaaggatcaatataccaagatcattaataattgttactgtgtaagcaacggagcttcaaaatacataaaacaaaaactgatagaactaaaaacacacaatatgttggagacttcaaaactcctttctcagtaatcrataaaagtagcaaaggtaaatcatcaagaatacagaagaaataaattacatcttaaaacaacaggaaccaattgatatttataaaacactccagtcaacaacagaacacacatgcttttcaagtgtacatgtggaaaattcatcactgatcttttcaaagaaacag

SEQ ID NO: 612464 - DNA, 667 bp, Homo sapiens
ataaatgaaaaaaacatgatgttttctttcattaaaaaaaaamctgacaataatttgaaaatcaatcttgttaactcagcttaacctctttagggaaagcaatgaaaataaggagaaaaaatgtttcagaacttatcactaggaaagtcccaatttttgtcgtaatggcttttgaagttacaggataaaagtgaagcctgagaaacagcaatttactttattcagctaccagggattatgaaaataataacaactgacatttgaaaatgcttattctaagagctttacatatataaactcatttaatcatcacaaaaaccccattatctccttttaatagacacagaaacaagcataaaggaagaagataaataacttgcccagggctacaaacaactagcaagtggcagaatgaggattccacctcaggtatcctgggtctagaacttgtgctcctaatcactatgatatattgccacatggttgaagaaattaagcttaatgacaagtactctgcgatctgcaatttaacaggctttaatttccaatgaatatgctagttactactataaacattgttaaatgatataaaccattctaggcaaacgcagaagaggaatctaatacaccgagaactggtacaggtgtaataaatgagctacttgta

SEQ ID NO: 612465 - DNA, 667 bp, Homo sapiens
ataaatgaaaaaaacatgatgttttctttcattaaaaaaaaaactgacaataatttgaaaatcaatcttgttaactcagcttaacctctttagggaaagcaatgaaaataaggagaaaaaatgtttcagaacttatcactaggaaagtcccaatttttgtcgtaatggcttttgaagttacaggataaaagtgaagcctgagaaacagcaatttactttattcagctaccagggattatgaaaataataacaactgacatttgaaaatgcttattctaagagctttacatatataaactcatttaatcatcacaaaaaccccattatctccttttaatagacacagaaacaagcataaaggaagaagataaataacttgcccagggctacaaacaactagcaagtggcagaatgaggattccacctcaggtatcctgggtctagaacttgtgctcctaatcactatgatatattgccacatggttgaagaaattaagcttaatgacaagtactctgcgawctgcaatttaacaggctttaatttccaatgaatatgctagttactactataaacattgttaaatgatataaaccattctaggcaaacgcagaagaggaatctaatacaccgagaactggtacaggtgtaataaatgagctacttgta

SEQ ID NO: 612466 - DNA, 403 bp, Homo sapiens
cgcggcgtaccggcagcgcccgcccgcgtcctctcgctcgtccgcgcctgcctcgccgggcgcgcccctagcccctgccggaccctggacggcaactagccggcgcccgcgcgggcgaccccagcccggagccaccaccgccgcggscgaagcgagcgccacctcctcacactcaccacggcgctccatcccgcgtcccggacgcggacggccgccccacacctacggccgccgccaccgccgagggctggagctcgccgcccccatcccccacggcccgcagacgcccggccaagtggcagccgcagccacagacaccaccaccaccaccaccacagcggccgccgcctttgcagctaccgccacggctgcgccggccgcctgccccgccccttggagccca

SEQ ID NO: 612467 - DNA, 362 bp, Homo sapiens
gcaaatagaaaagttggggtggaaacacaggctttttcattctttcccaccacatgagtctttgacaaagcaggaaataaatggttgaatcttcctttgacttatatctccccttcctggtacacaatgtcatcagmttctgcaaaaagttgaccagtgcatgtatgagtagggaggcatcccattttccatggataccaatgcaggaagcagttgttagttcttcattctagactgccactgggcagttgtggttttatcgcttttatttaaaacagggaaaacaggcagctgtaattcagcatttgttaaaaaggaaaactgagtcatttgtttttcgctgatttccattctaacctccc

SEQ ID NO: 612468 - DNA, 556 bp, Homo sapiens
cagagacaaaatcataggccacatacragaagttagaaatgagaaggatttcaggcttcaaagagaacaaaaaaaacacctttgaatttctgaagaaaaataattttcagtccaaaatattagaaccgtccacactatcaacacttatgacatttccattcaagagagtagaatataaagacattcgtggataaataaggttttaaatatttactcctattctaccttgctcaagtatgggcatgaccaaaacaggagaataaaacaaaacaaaacaaaacaaaacaaaacaaaacaaaacagggaagacatgacaggcatttcctcataaaagaggagaaggtggaaaagagataccccaggatggcagctagttaccatatttttaaaaatccagtacaaaattatagctagataaggaggagtaagttctggtgttttataccactgtaagatgactgtagttaacaataatatattacatactttcaaataactaaaaggagggtaatgaatgttcccaacacaaagaaatgatgcttgagatgatggatgg

SEQ ID NO: 612469 - DNA, 483 bp, Homo sapiens
caggtggcaaacattattcttcctgttttacagatgaagaaactgaggcactgagaaataaaagcatgaggcataaaagttccagagcaagtcagtgatagaaacaggaagcctagagccttgtagtctggttagctgctatccactaaggaaaatctggttaggagccatccactgaaaacactgctactactgagttcccctcacccaggagagcctgcctttatccaccagatgtttcagctcagctgtctgtttattcctgtaaagtaaatmccattttcctattaatttctattgaaaaatcggcgatatggacccccagattcttcccatacatagagctgaatgtttttgacatgggagaaccgaatgtggttgcccaggctctggttgttttttgacctctccacttcccaccttactcccatcccggtagtgttttgagaagttggggaaaaaacatgatgcagagtggagagg

SEQ ID NO: 612470 - DNA, 589 bp, Homo sapiens
caaataagtgacaccattttacacatggtttaatttcttgaaatattttgtttattaatataactgcccactaatgtcttcgttgcatgttaggtagagacatggggactgagaaggtggaaggaggtaagtagggagataaacagggagtcctgccctcaaggagatagaagttttatgggggagacagaaggaaaccaacatctatcatgcagggtcacttgtaactaggtaatgattggtaacaggggcacctarctaaccctgtcctctgggagttctcaggggaagttttgaagaatgactaggaattagccagtgaccaggggtgtgtgtcactctaggcagaggctacagtgtgtgcaaaggtatggaaacttgcaagatcttgccctccgggaagcagtgagcagtgagaagtactgcacagctcttgtgcacaccgtacactgacgctgactggatgtagaggtcaaggtgggtggaagccaggcttagaagtcactttagtgctaagaaacatttgaatgtttccctgaagaccacagggcatctttgaaagctgctgtgatggggatttgcacatgcc

SEQ ID NO: 612471 - DNA, 589 bp, Homo sapiens
caaataagtgacaccattttacacatggtttaatttcttgaaatattttgtttattaatataactgcccactaatgtcttcgttgcatgttaggtagagacatggggactgagaaggtggaaggaggtaagtagggagataaacagggagtcctgccctcaaggagatagaagttttatgggggagacagaaggaaaccaacatctatcatgcagggtcacttgtaactaggtaatgattggtaacaggggcacctagctaaccctgtcctctgggagttctcaggggaagttttgaagaatgactaggaattagccagtgaccaggggtgtgtgtcactctaggcagaggctacagtgtgtgcaaaggtatggaaacttgcaagatcttgccctccgggaagcagtgagcagtgagaagtactgcacagctcttgtgcacaccgtrcactgacgctgactggatgtagaggtcaaggtgggtggaagccaggcttagaagtcactttagtgctaagaaacatttgaatgtttccctgaagaccacagggcatctttgaaagctgctgtgatggggatttgcacatgcc

SEQ ID NO: 612472 - DNA, 625 bp, Homo sapiens
tggctgggcaaggtggctcccgcctgtaatcccagcactttgggacgcccaggggggcagatcacaaggtcaggagttcaagaccagcctgaccaacatggtgaaaccatgtctctactaaaaatacaaaattagctgggcatggtggcaggcacctgtagccccagctactcgggaggctgaggcaggagaatcgcttgaacccaggaggtggaggttgcagtgagctgagatctccagcctgggtgacagagtgagactccrtctcaaaacaaaaaacaaaaaacaaaaaacaaaacaaaacaacaacaaaacctagtatcaggagagaaaaagcctttgttaacatcctgctattgctactgttgttgcagtagctttgctatactttttaaaaagaaacttttaaaacaaaaacaaaacaggttaactttctccagctttaagaatttgatatctaaaaattctgaagtctccttgtgcacttcaggtgtgaggtgactaggaataccatcctcttccttctgtcccccaggcggcatattggcaaggcacagtccctattcaaaggtctgtctggtcagtaatggtggtatggcctggggcatgctggggctcactgagg

SEQ ID NO: 612473 - DNA, 577 bp, Homo sapiens
ggctcactatttgaaagtcaatcaatataatccactatattaacaaggtataaagaagaaaattcactgctgcatcagtatccattgatgcagaaaaaacatttgataaaattcatgataactaggaatagaggggaaatttctcaacttgaagaacagatgctgttaaaataaaatggactcaaaggaaaaactaataatgagaactgggcatctgaggttcagctcccactggagcacacttaagacaggcaaattgggctttaaatgtactaattccccataagggtacctctcatttaaacagaatatttaattataagtttcggggtgggaaagagaaccagataggctgtaagagacccaaaccatataattaacccttcttgctttttctccccccatatctacccctgggaaactggactactgaaatttccaagtagcaaagaagagccgggcagtggyggactgtaacctgtcttttgccaccgagatatgcttgctggatataagcagttatggatgttgatataatgattatgcatataaggtgatagctcttaagattgtcctg

SEQ ID NO: 612474 - DNA, 576 bp, Homo sapiens
gtccccaagtagattcaaccccaaaaaagcctatctgaggaacattacagtcaaactgtcaaaattcaaagacaaagagaagattctaaaaatggcaagagaaaaatgtcatcatataaatgggaaaccccagcagaacaacagcagatttctcagcagaaaccttaaaggacaggagagaataggatgagataktcaaagaactgaaggaaactgccagccaagaaaattatatccaacaaagctatccttcagaaatgaatgagaaataaaatcttcccaagacaagcaaaacctgagggaattcatcacccctagcgtagccttacaagaaatgctcaagggagtcttacaagtggaagtgaaaagatgataaccaccattatgaaaacatgcaaaactataacactcactggtagagccaatacacaaaggggaaaaaagaaaggaatcaaaccctatcactgcaaaaaaaaaaaaaccacccaccacaaacataaacgataagagaggaaggatacacaaaacaaccagaaaacaatcaacaaaatgagataaatagttcctcaccaatct

SEQ ID NO: 612475 - DNA, 596 bp, Homo sapiens
gaatatggttttatttaagaacgctttgagggtctgtggatcccaggttaagaactcctgttgctagaaatatcttgtagttccagcaacagtctgagaaaaagaatcttcccttagtttaccactacagttctgcaagtttccacatgtcctttcctggtttacttggcaaattcttgcttatctttcacaccaaggtcatgggctacctcttatttgaagtctgaccatctccctctcccctaaaatcaggtagaataaattactccttcctcctttgttccaccactatattgtgtgcataggtctgtcacagcactgacgttatagcactgacagaaatgcattgcacttcttaggttgtaatgtgcttggaggcagggtccatactagtcctaggtagtcctcagcacttatcccacttgctrtctggcactgggaattcctgataggcatttagaagatgtttgtttcgcaaatggctaaatgaagattgaggggtggtatggtatgataattcgaaaatatatgtcattagatatcctaggtttgaataatgactccaccacttaactagcagggtgaccttaggtgag

SEQ ID NO: 612476 - DNA, 553 bp, Homo sapiens
gcactccagcctgggtgacagagcaagactctgtctcagaaaaaaaaaaaagaaaagaaagaaaaaacccacaaaaattagctgggttcacgtgatggcrtgtgcctgtaatcccagctacttgggaggcagaggcaggagaatcgcttgaatcctggaggaaaaggattgcagtgagctgaaatcgcaccactgctctccagcctgcgcaacagagtgagaccctgtctaaaaaaaaaaaaaaaaaaaaaactagaaggccaggctcagtggctcacgtctgtaatcccaacactttgggaggccaagacagaaggagaacttgagcccaggagttcgggaccagcctgggcaacatagcaagatcctgtctctacaaaaaaatttaaaaggccagatgcaatggcttacactttgtaatcccaacactttgggaggtgggaggattgcttgagtccaggagttttgagaccagcctgggcgacatagcaagattccatctctacaaaaaataaaaaattagctgggcatgggggcatgcatctgtagtccc

SEQ ID NO: 612477 - DNA, 574 bp, Homo sapiens
aaggccagaaaagactctcgattatcatctaaggtaaggtgttgtttcctaccagtgtgcagtatggattcttaagaaaataatggcatgacaataagcttytgcttttggggaaaaagtcaataccaaatgttgaaaccataaagccaagattgagagattaaattaaataaaagttaaaattttctatattctgtattctctataaatgaaggcaaatcgactaaaagaatgtcagagctctttgttacatgtaaagggcttcttttaaaaatccacaaaagaggtcgggagtggtggctcacgcctataatcccagcactttaggaggctttggcgggtggattgcttgagcccgggagtctgagaccagcctgggcaatatggcaaaaccccatctctaccagaaaaaaaaaagaaagaaagataaaaattagctgggcatggtgacacacgcctgtagtcccaactactcagggggctgagaggcagaggttgcagtgagctgtagttgcaccactgcactccagcctgggtgacagagcgagaccttgtttcaggaaaaaaaaaaaaa

SEQ ID NO: 612478 - DNA, 574 bp, Homo sapiens
aaggccagaaaagactctcgattatcatctaaggtaaggtgttgtttcctaccagtgtgcagtatggattcttaagaaaataatggcatgacaataagcttctgcttttggggaaaaagtcaataccaaatgttgaaaccataaagccaagattgagagattaaattaaataaaagttaaaattttctatattctgtattctctataaatgaaggcaaatcgactaaaagaatgtcagagctctttgttacatgtaaagggcttcttttaaaaatccacaaaagaggtcgggagtggtggctcacgcctataatcccagcactttaggaggctttggcgggtggattgcttgagcccgggagtytgagaccagcctgggcaatatggcaaaaccccatctctaccagaaaaaaaaaagaaagaaagataaaaattagctgggcatggtgacacacgcctgtagtcccaactactcagggggctgagaggcagaggttgcagtgagctgtagttgcaccactgcactccagcctgggtgacagagcgagaccttgtttcaggaaaaaaaaaaaaa

SEQ ID NO: 612479 - DNA, 577 bp, Homo sapiens
agttgctgacaccttgttttgtccatttggagagggaacttttcctaagctatcattattatatgtagatatacatctctgtctacacattgatgaattagatgtttatttgagtcttctcagtctgggtttgcttgtgactacttttaagtgggcctattaagaaattttgagtggacttatcatcgtattccagtttaacgttagagagagcccaaatcccatgttagacgtaagtcttccaatggctccactgatgcaacatttgctggctgggcccatgggtgatccacagggagcccctggctatgggggagaacaagtcaggccgtcaagsctgtagagtctgtgtattatgtttcacatggtggctgttgctggccccacctcctcttatgtcattaacatgcctcaggtggttcttcccttttggcactcatggtgccacttgtgggctgatacaggagtgaggctactgtgaaagaactcaatatagtggaaaaaacaaatatcaaactcctgctcactttcttcagtgtaaaaactataagccctgtgggagtttctgcagatggta

SEQ ID NO: 612480 - DNA, 573 bp, Homo sapiens
aagacagccattttgaattatttgcctgccagatcattcatctgtatgtctttaagttcagttgctgacaccttgttttgtccatttggagagggaacttttcctaagctatcattattatatgtagatatacatctctgtctacacattgatgaattagatgtttatttgagtcttctcagtctgggtttgcttgtgactacttttaagtgggcctattaagaaattttgagtggacttatcatcgtattccagtttaacgttagagagagcccaaatcccatgttagacgtaagtcttccaatggctccactgatgcaacatttgctggctgggcccatgggtgatccacagggagcccctggctatgggggagaacaagtcaggccgtcaagcctgtagagtctgtgtattatgtttcacatggtggctgtygctggccccacctcctcttatgtcattaacatgcctcaggtggttcttcccttttggcactcatggtgccacttgtgggctgatacaggagtgaggctactgtgaaagaactcaatatagtggaaaaaacaaatatca

SEQ ID NO: 612481 - DNA, 573 bp, Homo sapiens
aagacagccattttgaattatttgcctgccagatcattcatctgtatgtctttaagttcagttgctgacaccttgttttgtccatttggagagggaacttttcctaagctatcattattatatgtagatatacatctctgtctacacattgatgaattagatgtttatttgagtcttctcagtctgggtttgcttgtgactacttttaagtgggcctattaagaaattttgagtggacttatcatcgtattccagtttaacgttagagagagcccaaatcccatgttagacgtaagtcttccaatggctccactgatgcaacatttgctggctgggcccatgggtgatccacagggagcccctggctatgggggagaacaagtcaggccgtcaagcctgtagagtctgtgtattatgtttcacatggtggctgttgctggccccacctcctcttatgtcattaacatgcctcaggtggttcwtcccttttggcactcatggtgccacttgtgggctgatacaggagtgaggctactgtgaaagaactcaatatagtggaaaaaacaaatatca

SEQ ID NO: 612482 - DNA, 605 bp, Homo sapiens
atgctcacacagacacacacactcacacacacttataggcccaagctcacacaccacacttacatggcttattcacacacttacacacattaacacacatacgcactcatatttacacatccacacgcaggtatatttccaaatacacactcatactcccaagttcaaacaccattatttcttcacaaacattcacacaataactcacatacacactctcacacatgtacacactcacccacacactctccattacacacatttacctgtctgttctcacacacatgcacaaacacaaagccaaattagagccattttcctggtcccacacaaagaaaactgatacctcagtttcttggtcttgaccagaactgggtgcatgattccatccaaccacaaggtggggtgggaatgaaatcctatcacgtcctcaggccgtggagaaaaaaaaaaaaaactatgtcaggcctctctaatgcctcccacaaatgagcaggagggattgaaacagaaaaggggttcytcctgacatgtggcattgatggagcccggttctgcctcatgccaagccctgccttgcccctcgatgatggaaaatggttgtg

SEQ ID NO: 612483 - DNA, 568 bp, Homo sapiens
ctggaggcgaggccagcattggacttgacgttgcttcacctactcggttctattgtccatccatgtgcagtgtctatcctgttgtttattatttcttccttaaattttatttgaactaaattaattttgtgatagcagcttgctttctgtgaatatttacttaaaatttttataaaatttttatttttttatttctttaatttgaaagtgctgctttgttattgataattttgtattttaatatatgaggttaatccctctatgtttggtaggaaaaagtgatatatttgaacttatttctatcatttgattttggattttgtatttgcaaagctttatcctcaattctcttttccttttttcagatttcttttcttttctctttttttggggggacagagttttgctcttattgcccaggctggagtgcaatggggagatctcagctcaccacaacctccgcctcttgggttcaagcaattcttctgccacagcctccaagtaactgggattacaggaatggaccaccataccyggctaattttgtatttttagtacagacagagtt

SEQ ID NO: 612484 - DNA, 542 bp, Homo sapiens
gggtcttactcagggcctcctgctgctgctctgtggccttgttgagcccgtggggctggttcctgtggctcctcctggccagttgtccacygcaggtgccatggatccaagaattacctctgctgggcacctccctcccacacaatggcaccctgcttccaggacatgctgagtcctatctcaaggcattcttggtcttccctcaatgttgcagagtaatattattttatctagaacattcctgtgttgaagctcagtaaatgtcagcacaagtaggcaaaagtgtattgctttgggtggtaaactttctccatgctctccccggaccccttcttatccactttaccagccatgtgaatgcatcctatagcttctctgtgctttgttccaaatggcctgcccctgtgaccttcttcagaggctgaccatgggccagtccctccctcccagagagagcctggaatgcctggtagtgtagttctagggaagcctatagccaatgactgtgcaagattctgaaagcctgactccctttcctcaaa

SEQ ID NO: 612485 - DNA, 542 bp, Homo sapiens
gggtcttactcagggcctcctgctgctgctctgtggccttgttgagcccgtggggctggttcctgtggctcctcctggccagttgtccaccgcaggtgccatggatccaagaattacctctgctgggcacctccctcccacacaatggcaccctgcttccaggacatgctgagtcctatctcaaggcattcttggtcttccctcaatgttscagagtaatattattttatctagaacattcctgtgttgaagctcagtaaatgtcagcacaagtaggcaaaagtgtattgctttgggtggtaaactttctccatgctctccccggaccccttcttatccactttaccagccatgtgaatgcatcctatagcttctctgtgctttgttccaaatggcctgcccctgtgaccttcttcagaggctgaccatgggccagtccctccctcccagagagagcctggaatgcctggtagtgtagttctagggaagcctatagccaatgactgtgcaagattctgaaagcctgactccctttcctcaaa

SEQ ID NO: 612486 - DNA, 542 bp, Homo sapiens
gggtcttactcagggcctcctgctgctgctctgtggccttgttgagcccgtggggctggttcctgtggctcctcctggccagttgtccaccgcaggtgccatggatccaagaattacctctgctgggcacctccctcccacacaatggcaccctgcttccaggacatgctgagtcctatctcaaggcattcttggtcttccctcaatgttgcagagtaatattattttatctagaacattcctgtgttgaagctcagtaaatgtcagcacaagtaggcaaaagtgtattgctttgggtggtaaactttctccatgctctccccggaccccttcttatccactttaccagccatgtgmatgcatcctatagcttctctgtgctttgttccaaatggcctgcccctgtgaccttcttcagaggctgaccatgggccagtccctccctcccagagagagcctggaatgcctggtagtgtagttctagggaagcctatagccaatgactgtgcaagattctgaaagcctgactccctttcctcaaa

SEQ ID NO: 612487 - DNA, 542 bp, Homo sapiens
gggtcttactcagggcctcctgctgctgctctgtggccttgttgagcccgtggggctggttcctgtggctcctcctggccagttgtccaccgcaggtgccatggatccaagaattacctctgctgggcacctccctcccacacaatggcaccctgcttccaggacatgctgagtcctatctcaaggcattcttggtcttccctcaatgttgcagagtaatattattttatctagaacattcctgtgttgaagctcagtaaatgtcagcacaagtaggcaaaagtgtattgctttgggtggtaaactttctccatgctctccccggaccccttcttatccactttaccagccatgtgaatgcatcctatagcttctctgtgctttgttccaaatggcctgcccctgtgaccttcttcagaggctgaccatgggccagtccmtccctcccagagagagcctggaatgcctggtagtgtagttctagggaagcctatagccaatgactgtgcaagattctgaaagcctgactccctttcctcaaa

SEQ ID NO: 612488 - DNA, 560 bp, Homo sapiens
tgacatctcagtggcttaacaaaaagagatgtttatttttcataatgtaaaattcaatctgcaacaaggattagggtgasagtgggatctatggttgtattagtctgcttaggctgccataacaaaataccatagactgtttggcttaaaaaacaaagcatttttaaatcacagttctggaggctagaaattcaagattaagatgctgtcagggttgatgtctagtgagggctcttttcctcgctatcgggggaaccagcacccaatatttcaacataggttctttctattttccctaagtgtcggctggtctgagaaataaagagaaagaatacaaagagagaaattttacagctgggcccctgggggtgtcatcacatattggtaggactgtgatggcaaccatgagccacaaaaccagcaagtttttattagagattttaaaaggggagggggtgtacaaacagagagtaggtcacagggatcacatgcttcaaagggcaatacatatcacaaggtgaaggcaaaattagaattactgatgaaggtctatgtcccac

SEQ ID NO: 612489 - DNA, 560 bp, Homo sapiens
tgacatctcagtggcttaacaaaaagagatgtttatttttcataatgtaaaattcaatctgcaacaaggattagggtgacagtgggatctatggttgtattagtctgcttaggctgccataacaaaataccatagactgtttggcttaaaaaacaaagcatttttaaatcacagttctggaggctagaaattcaagattaagatgctgtcagggttgatgtctagtgagggctcttttcctcgctatcgggggaaccagcacccaatatttcaacataggttctttctattttccctragtgtcggctggtctgagaaataaagagaaagaatacaaagagagaaattttacagctgggcccctgggggtgtcatcacatattggtaggactgtgatggcaaccatgagccacaaaaccagcaagtttttattagagattttaaaaggggagggggtgtacaaacagagagtaggtcacagggatcacatgcttcaaagggcaatacatatcacaaggtgaaggcaaaattagaattactgatgaaggtctatgtcccac

SEQ ID NO: 612490 - DNA, 483 bp, Homo sapiens
tgatgtcctgaccttgtgatccacctgccttggcctcccaaagtgctrggattacaggtgtgagccactgcacctggcccatatttttaaattaaaaaatagtacaatttatgtagtacaagacctttaaaaatatctctccatgtgtatgtggtctgtgtgtcttaaaaatgagtgcaggcaagtgtatttctagaaacatactttattagttgggtgcattgggttgcaggtaacagaaaacattcttatagtacttaagcaaaaaagtcatccaatttttctacatagcaagacctccggaaatggaaactaacagatttcctgcagagctcaacaatgtccatcacccaacttctttctgttctgccaccacagcacattccattttcattctatgtaattctcacagttataagatcacacacaactaacacaacttaaataattatgtctttaaacaataaaaaccaaagaaagaaa

SEQ ID NO: 612491 - DNA, 483 bp, Homo sapiens
tgatgtcctgaccttgtgatccacctgccttggcctcccaaagtgctaggattacaggtgtgagccactgcacctggcccatatttttaaattaaaaaatagtacaatttatgtagtacaagacctttaaaaatatctctccrtgtgtatgtggtctgtgtgtcttaaaaatgagtgcaggcaagtgtatttctagaaacatactttattagttgggtgcattgggttgcaggtaacagaaaacattcttatagtacttaagcaaaaaagtcatccaatttttctacatagcaagacctccggaaatggaaactaacagatttcctgcagagctcaacaatgtccatcacccaacttctttctgttctgccaccacagcacattccattttcattctatgtaattctcacagttataagatcacacacaactaacacaacttaaataattatgtctttaaacaataaaaaccaaagaaagaaa

SEQ ID NO: 612492 - DNA, 451 bp, Homo sapiens
tttaaattaaaaaatagtacaatttatgtagtacaagacctttaaaaatatctctccatgtgtatgtggtctgtgtgtcttaaaaatgagtgcaggcaartgtatttctagaaacatactttattagttgggtgcattgggttgcaggtaacagaaaacattcttatagtacttaagcaaaaaagtcatccaatttttctacatagcaagacctccggaaatggaaactaacagatttcctgcagagctcaacaatgtccatcacccaacttctttctgttctgccaccacagcacattccattttcattctatgtaattctcacagttataagatcacacacaactaacacaacttaaataattatgtctttaaacaataaaaaccaaagaaagaaaaaaattcatatatttggccatcattttcattagaggtcaaaatcctactaata

SEQ ID NO: 612493 - DNA, 565 bp, Homo sapiens
tttaaattaaaaaatagtacaatttatgtagtacaagacctttaaaaatatctctccatgtgtatgtggtctgtgtgtcttaaaaatgagtgcaggcaagtgtatttctagaaacatactttattagttgggtgcattgggttgcaggtaacagaaaacattcttatagtacttaagcaaaaaagtcatccaatttttctacatagcaagacctccggaaatggaaactaacagatttcctgcagagctcaacaatgtccatcacccaacttctttctgttctgccaccacagcacattccattttcattctatgtaattctcacagttataagatcacacacaactaacacaacttaaataattatgtctttaaacaataaaaaccaaagaaagaaaaaaattcatatatttggccatcattttcattagaggtcaaaatcctactaataagctccctcctttggcattcttcctaaatacattgtattasctggaaacaggacaaatattcatctctaaatcaatcacaagcaaaggaattacactaacgtttgtattagttt

SEQ ID NO: 612494 - DNA, 565 bp, Homo sapiens
tttaaattaaaaaatagtacaatttatgtagtacaagacctttaaaaatatctctccatgtgtatgtggtctgtgtgtcttaaaaatgagtgcaggcaagtgtatttctagaaacatactttattagttgggtgcattgggttgcaggtaacagaaaacattcttatagtacttaagcaaaaaagtcatccaatttttctacatagcaagacctccggaaatggaaactaacagatttcctgcagagctcaacaatgtccatcacccaacttctttctgttctgccaccacagcacattccattttcattctatgtaattctcacagttataagatcacacacaactaacacaacttaaataattatgtctttaaacaataaaaaccaaagaaagaaaaaaattcatatatttggccatcattttcattagaggtcaaaatcctactaataagctccctcctttggcattcttcctaaatacattgtattacctgsaaacaggacaaatattcatctctaaatcaatcacaagcaaaggaattacactaacgtttgtattagttt

SEQ ID NO: 612495 - DNA, 565 bp, Homo sapiens
tttaaattaaaaaatagtacaatttatgtagtacaagacctttaaaaatatctctccatgtgtatgtggtctgtgtgtcttaaaaatgagtgcaggcaagtgtatttctagaaacatactttattagttgggtgcattgggttgcaggtaacagaaaacattcttatagtacttaagcaaaaaagtcatccaatttttctacatagcaagacctccggaaatggaaactaacagatttcctgcagagctcaacaatgtccatcacccaacttctttctgttctgccaccacagcacattccattttcattctatgtaattctcacagttataagatcacacacaactaacacaacttaaataattatgtctttaaacaataaaaaccaaagaaagaaaaaaattcatatatttggccatcattttcattagaggtcaaaatcctactaataagctccctcctttggcattcttcctaaatacattgtattacctggaaacargacaaatattcatctctaaatcaatcacaagcaaaggaattacactaacgtttgtattagttt

SEQ ID NO: 612496 - DNA, 616 bp, Homo sapiens
acttctattactattaacctaccaaattctattgggtagagcagtcacatagccaagcccaaagtcagtgatacwgggaaatattctttcctcattaaaaaaaaggtaaggatggggagggaacaagaatcatctgttttaattatttttttctcagacagagtctcgctctgtcatccaggctggagtgcagtggcacaatcttggctcactgcattcttcgccttctgggttcaagtgattctcacacctcaggctcccaagtagctgggattacaggtgcacaccagcatacccagctattttttgtattttagtagagagggttttgccatgttgcccagcccggtatcaaactcctgagctctggcaatctgactgcctcagtttcctgaaagtgttaggatcacaggcgtaagacactgcacctggccagagacaaagaattaggaacacacaatacaatctaccgcaatattcatggcttagatcaaccatggctcatcctctcagattgagagaggaatccattgtctgtgaacttgttgcaacaatacaaatttcttattcattgtgaacaagaaataaggaattgtggctattgagtagacaacag

SEQ ID NO: 612497 - DNA, 616 bp, Homo sapiens
acttctattactattaacctaccaaattctattgggtagagcagtcacatagccaagcccaaagtcagtgatactgggaaatattctttcctcattaaaaaaaaggtaaggatggggagggaacaagaatcatctkttttaattatttttttctcagacagagtctcgctctgtcatccaggctggagtgcagtggcacaatcttggctcactgcattcttcgccttctgggttcaagtgattctcacacctcaggctcccaagtagctgggattacaggtgcacaccagcatacccagctattttttgtattttagtagagagggttttgccatgttgcccagcccggtatcaaactcctgagctctggcaatctgactgcctcagtttcctgaaagtgttaggatcacaggcgtaagacactgcacctggccagagacaaagaattaggaacacacaatacaatctaccgcaatattcatggcttagatcaaccatggctcatcctctcagattgagagaggaatccattgtctgtgaacttgttgcaacaatacaaatttcttattcattgtgaacaagaaataaggaattgtggctattgagtagacaacag

SEQ ID NO: 612498 - DNA, 616 bp, Homo sapiens
acttctattactattaacctaccaaattctattgggtagagcagtcacatagccaagcccaaagtcagtgatactgggaaatattctttcctcattaaaaaaaaggtaaggatggggagggaacaagaatcatctgttttaattatttttttctcagacagagtctcgctctgtcatccaggctggagtgcagtggcacaatcttggctcactgcattcttcgccttctgggttcaagtgattctcacacctcaggctcccaagtagctgggattacaggtgcrcaccagcatacccagctattttttgtattttagtagagagggttttgccatgttgcccagcccggtatcaaactcctgagctctggcaatctgactgcctcagtttcctgaaagtgttaggatcacaggcgtaagacactgcacctggccagagacaaagaattaggaacacacaatacaatctaccgcaatattcatggcttagatcaaccatggctcatcctctcagattgagagaggaatccattgtctgtgaacttgttgcaacaatacaaatttcttattcattgtgaacaagaaataaggaattgtggctattgagtagacaacag

SEQ ID NO: 612499 - DNA, 621 bp, Homo sapiens
ccacaaacaattctaccttattttaaaaaggctgcaatttatatatatgggacattcatgtcacagtatatcagacaactctctgacaccttgggtgcccagttttctttcaggcaggacatcaatatttatcytcttttaattctggcccatccactggcacagactggtcccttatgttattatcatgagctagtgatacaggaagagaagcattgctgatctgtgaaactggacaatacatttaatctgtcttggtatttaaaccacagtaggcaccatgtttaactgggtttatgaaatgacatcttgttcagggcaagggtcaatattgaagaggagctatatttaatgctaaattaagtgcccaagttaaagctaaattgttacacacacaagtcagtaatttcagaactatgacttgcaaataaatcacaaattgacctctttgagcacactgcaggaaatactttgtgtgacattatatggcactaattgtaaaagccaaatctgacttctttccaattatatgtccaaaaatcataactgagaattctctctctttggattttctgacattctttccttagtattaaggtaatgaatggcttcaaagctaaa

SEQ ID NO: 612500 - DNA, 621 bp, Homo sapiens
ccacaaacaattctaccttattttaaaaaggctgcaatttatatatatgggacattcatgtcacagtatatcagacaactctctgacaccttgggtgcccagttttctttcaggcaggacatcaatatttatcttcttttaattctggcccatccactggcacagactggtcccttatgttattatcatgagctagtgatacaggaagagaagcattgctgatctgtgaaactggacaatacatttaatctgtcttggtatttaaaccacagtaggcaccatgtttaaytgggtttatgaaatgacatcttgttcagggcaagggtcaatattgaagaggagctatatttaatgctaaattaagtgcccaagttaaagctaaattgttacacacacaagtcagtaatttcagaactatgacttgcaaataaatcacaaattgacctctttgagcacactgcaggaaatactttgtgtgacattatatggcactaattgtaaaagccaaatctgacttctttccaattatatgtccaaaaatcataactgagaattctctctctttggattttctgacattctttccttagtattaaggtaatgaatggcttcaaagctaaa

SEQ ID NO: 612501 - DNA, 641 bp, Homo sapiens
tgtgaaactggacaatacatttaatctgtcttggtatttaaaccacagtaggcaccatgtttaactgggtttatgaaatgacatcttgttcagggcaaggrtcaatattgaagaggagctatatttaatgctaaattaagtgcccaagttaaagctaaattgttacacacacaagtcagtaatttcagaactatgacttgcaaataaatcacaaattgacctctttgagcacactgcaggaaatactttgtgtgacattatatggcactaattgtaaaagccaaatctgacttctttccaattatatgtccaaaaatcataactgagaattctctctctttggattttctgacattctttccttagtattaaggtaatgaatggcttcaaagctaaagttatgggaaaatgcaagagcttatccaataggttaatatctgattcttagggtttattaactgtagcatatctaaagacacaaaacccacctttgctgatttcctggatgctctagatgtgcaaatacaaacctcactgcacatggaagtgccctgtcaggcacaattttcataaagggaatttaaatagctattttaatctctagaccagactgtgcattccaagaatctaagactaatgag

SEQ ID NO: 612502 - DNA, 621 bp, Homo sapiens
ccacaaacaattctaccttattttaaaaaggctgcaatttatatatatgggacattcatgtcacagtatatcagacaactctctgacaccttgggtgcccagttttctttcaggcaggacatcaatatttatcttcttttaattctggcccatccactggcacagactggtcccttatgttattatcatgagctagtgatacaggaagagaagcattgctgatctgtgaaactggacaatacatttaatctgtcttggtatttaaaccacagtaggcaccatgtttaactgggtttatgaaatgacatcttgttcagggcaagggtcartattgaagaggagctatatttaatgctaaattaagtgcccaagttaaagctaaattgttacacacacaagtcagtaatttcagaactatgacttgcaaataaatcacaaattgacctctttgagcacactgcaggaaatactttgtgtgacattatatggcactaattgtaaaagccaaatctgacttctttccaattatatgtccaaaaatcataactgagaattctctctctttggattttctgacattctttccttagtattaaggtaatgaatggcttcaaagctaaa

SEQ ID NO: 612503 - DNA, 510 bp, Homo sapiens
ccactttctcagataatcacttctaaataaacaaggtcttttgcactgacccaggaatctgcattgtagctgaaaaattaattataccaatattatactaggcatatctacaacaatacaaaagaatgttctctccatctccaaagttagatgttcattcagatgaaatgcaatttattcatctggaaagttctaaatgttttcctttgcacctctaaatgagcagaaagatatttccttttaagaagaaargagaaaatccattatttttactttttctttaatatatatataaatcaataaattcccaaactaaatttctcccctactaatttaatttggaataaaattagaaccaatcattatgagcaaaatgttttcaattaagacataattaattaaatgtgcaaatgcagaatacatttagatgggctatcagatgactgattatactggaaatctaattttacacttaaattgccagccacacacttcatcttgagctgttga

SEQ ID NO: 612504 - DNA, 510 bp, Homo sapiens
ccactttctcagataatcacttctaaataaacaaggtcttttgcactgacccaggaatctgcattgtagctgaaaaattaattataccaatattatactaggcatatctacaacaatacaaaagaatgttctctccatctccaaagttagatgttcattcagatgaaatgcaatttattcatctggaaagttctaaatgttttcctttgcacctctaaatgagcagaaagatatttccttttaagaagaaaagagaaaatccatkatttttactttttctttaatatatatataaatcaataaattcccaaactaaatttctcccctactaatttaatttggaataaaattagaaccaatcattatgagcaaaatgttttcaattaagacataattaattaaatgtgcaaatgcagaatacatttagatgggctatcagatgactgattatactggaaatctaattttacacttaaattgccagccacacacttcatcttgagctgttga

SEQ ID NO: 612505 - DNA, 510 bp, Homo sapiens
ccactttctcagataatcacttctaaataaacaaggtcttttgcactgacccaggaatctgcattgtagctgaaaaattaattataccaatattatactaggcatatctacaacaatacaaaagaatgttctctccatctccaaagttagatgttcattcagatgaaatgcaatttattcatctggaaagttctaaatgttttcctttgcacctctaaatgagcagaaagatatttccttttaagaagaaaagagaaaatccattatttttactttttctttaatatatatataaatcaataaattcccaaactaaatttctcccctactaatttaatttggaataaaattagaaccaatcrttatgagcaaaatgttttcaattaagacataattaattaaatgtgcaaatgcagaatacatttagatgggctatcagatgactgattatactggaaatctaattttacacttaaattgccagccacacacttcatcttgagctgttga

SEQ ID NO: 612506 - DNA, 445 bp, Homo sapiens
cacacttcatcttgagctgttgatccatagcaagttaccataagttaaaccttacctctggaggaagcagcctcagtggacaaattttttcctgcagtaattctatgaccatgccatagtaactgtctttagagggtagccagaggtatcttgcatgaaggagcttcattcttgccatccttcttgtttttcaaacagcattttttttttattttaaataagtaatgcaygtcttggcaagttgtgaaagaaaggcctcttttactcttttctacttactaaccttttctactcactctttaaaaggaagttgataatcaaagtattaatgtgtgaaaaggtactgagctttgaacaatttttgaattacttaatattgcattttaaactgtctaaattatagatacaaatgtctgaatctatacttgctgttggtgtttatggg

SEQ ID NO: 612507 - DNA, 445 bp, Homo sapiens
cacacttcatcttgagctgttgatccatagcaagttaccataagttaaaccttacctctggaggaagcagcctcagtggacaaattttttcctgcagtaattctatgaccatgccatagtaactgtctttagagggtagccagaggtatcttgcatgaaggagcttcattcttgccatccttcttgtttttcaaacagcattttttttttattttaaataagtaatgcacgtcttggcaarttgtgaaagaaaggcctcttttactcttttctacttactaaccttttctactcactctttaaaaggaagttgataatcaaagtattaatgtgtgaaaaggtactgagctttgaacaatttttgaattacttaatattgcattttaaactgtctaaattatagatacaaatgtctgaatctatacttgctgttggtgtttatggg

SEQ ID NO: 612508 - DNA, 478 bp, Homo sapiens
gatcacagaatttgtcattgtgttcaggtactkagtatctcatctttaaataataaaaaagcattgtctgacactgttttaaaactatatttagaaataccaagaatttaatagccaagataactttgaaaaagaacaaaggttgaggatttacatgattaaacatcaaaacttggtataaagctaaagtaaatcaaatagtaaggtattagaacaagcatggacacctagaataataaaacagaaaacagatcagaaacagacctttctatatacagtcacctgatttttgacaaaagcactactacaatttagtgtgaggaatggccttttcaataaaaggtgctggatcaactggatatctatgaggaaaaatttattttgacccctcctcaaaccctatacaaaagtgagtttgtgatttgaaaaaatcacatcaactagatctgagaccctgctgagaaatgtaaaataatgt

SEQ ID NO: 612509 - DNA, 580 bp, Homo sapiens
gcaaaagttgtcagcaagaagcatttgttgaatgtctacyatgtgccaagcagtgcacttggtattctcatgtgtcatgtctttgtgtatcaattactaatccataggttgatgcaaaagtcattgcagttttaaccatcattttcaagggcaaaaatcgcaattacttttgcaccaaatgaatatcatttctcagtcccaagccaatgcttctattttttgcaatgtttagttggacatctataacggccttccatgaggcagcctactgtctcccagagcatgataaggaagttccttgggttagatatctttctagcctgaaacataacaatttgcatttcagcccattgaattagacatttttctcttcagataatttctttggaaatgaaaatgttcctcaaagtgtagctacctattgggtcactgaagctttaatattagcaggtttgctggttcgctgtcttcaagaatagtggatattttgccacaaagggagaataggaagccagagtggaaagaggggaacaaaaacagggatagatacaagggaagaagatagacggtattagcattt

SEQ ID NO: 612510 - DNA, 580 bp, Homo sapiens
gcaaaagttgtcagcaagaagcatttgttgaatgtctactatgtgccaagcagtgcacttggtattctcatgtgtcatgtctttgtgtatcaattactaatccataggttgatgcaaaagtcattgcagttttaaccatcattttcaagggcaaaaatcgcaattacttttgcaccaaatgaatatcatttctcagtcccaagccaatgcttctattttttgcaatgtttagttggacatctataacggccttccatgaggcagcctactgtctcccagagcatgataaggaagttccttgggttagatatctttctagcctgaaacataacaatttgcatttcagcccattgaattagacatttttstcttcagataatttctttggaaatgaaaatgttcctcaaagtgtagctacctattgggtcactgaagctttaatattagcaggtttgctggttcgctgtcttcaagaatagtggatattttgccacaaagggagaataggaagccagagtggaaagaggggaacaaaaacagggatagatacaagggaagaagatagacggtattagcattt

SEQ ID NO: 612511 - DNA, 499 bp, Homo sapiens
aaagctgactgtagaaagaggaatatttagaaaaataggcaaagtgatgttatggtttaaaatcatcaagtgggaaatccaaaaccacggttctcaaccttagctactcatggaaaccacctgggaaatttttaaaaatactgatggatgggttccatgcccatagatttttaaaaaattcttccaaaggattctgacatcctaatcagggttgaaagctactgctccaaagagcttgacataatcaaatgaacatttatcaggtgttcacaaggtttaggaaggcccagcacaaagcaaaaccatagagacgttgagtactcttttgcttcagcattcagcatccaattccaactccatgcttttccttacttccaacttccatctttgccccgagcaacctgtgcagraaaccatcagtttccctgctccactggacatctaaggactatggtggtgataaaaaatgagagtcatcaaaaaggtccaagtttagtga

SEQ ID NO: 612512 - DNA, 478 bp, Homo sapiens
gatcacagaatttgtcattgtgttcaggtacttagtatctcatctttaaataataaaaaagcattgtctgacactgttttaaaactatatttagaaataccaagaatttaatagccaagataactttgaaaaagaacaaaggttgaggatttacatgattaaayatcaaaacttggtataaagctaaagtaaatcaaatagtaaggtattagaacaagcatggacacctagaataataaaacagaaaacagatcagaaacagacctttctatatacagtcacctgatttttgacaaaagcactactacaatttagtgtgaggaatggccttttcaataaaaggtgctggatcaactggatatctatgaggaaaaatttattttgacccctcctcaaaccctatacaaaagtgagtttgtgatttgaaaaaatcacatcaactagatctgagaccctgctgagaaatgtaaaataatgt

SEQ ID NO: 612513 - DNA, 602 bp, Homo sapiens
gcaaattcccagatgatattgatattgctgtctggaggccacactttgaagaccactgcctctaggaatgggaaaagaaattagataycagcaatctgtccttaatgagattgcttaaggctttgtattagggatgtactttgtcatggaacatgtcatataaatgacaaactgagaacactggcaacatattttaaaagtaaaatatagtacaatacacgccagaagttctgagaaggataaataattaagtagtggtgaggcagaagaggctaattagagatgacaaagaataatacaaaaaccatgggccacagagccaggggtggcctggagctgagctgagcttattaggggacaactgcataggtggacttaagggcaaaactgaaggttttaaatgctatgaagtgtagggccatgctgctggtgctaattaagcactgagaactacctttcatacaaggctgagatctgtgagacagcctcttgcttcttgatcatgaacatcttcagttagataaagaaagggtctagtgagggtaggtgggttactcaaaatccctagtgtttaattagttttagttagttgagactgattg

SEQ ID NO: 612514 - DNA, 538 bp, Homo sapiens
gaaattagatatcagcaatctgtccttaatgagattgcttaaggctttgtattagggatgtactttgtcatggaacatgtcatataaatgacaaactgagaacactggcaacatattttaaaagtaaaatatagtacaatacacgccagaagttctgagaaggataaataattaagtagtggtgaggcagaagaggctaattagagatgacaaagaataatacaaaaaccatgggccacagagccaggggtggcctggagctgagctgagcttattaggggacaactgcataggtggacytaagggcaaaactgaaggttttaaatgctatgaagtgtagggccatgctgctggtgctaattaagcactgagaactacctttcatacaaggctgagatctgtgagacagcctcttgcttcttgatcatgaacatcttcagttagataaagaaagggtctagtgagggtaggtgggttactcaaaatccctagtgtttaattagttttagttagttgagactgattgtgatgaaacaca

SEQ ID NO: 612515 - DNA, 602 bp, Homo sapiens
gcaaattcccagatgatattgatattgctgtctggaggccacactttgaagaccactgcctctaggaatgggaaaagaaattagatatcagcaatctgtccttaatgagattgcttaaggctttgtattagggatgtactttgtcatggaacatgtcatataaatgacaaactgagaacactggcaacatattttaaaagtaaaatatagtacaatacacgccagaagttctgagaaggataaataattaagtagtggtgaggcagaagaggctaattagagatgacaaagaataatacaaaaaccatgggccacagagccaggggtggcctggagctgagctgagcttattaggggacaactgcataggtggacttaagggcaaaactgaaggttttaaatgctatgaagygtagggccatgctgctggtgctaattaagcactgagaactacctttcatacaaggctgagatctgtgagacagcctcttgcttcttgatcatgaacatcttcagttagataaagaaagggtctagtgagggtaggtgggttactcaaaatccctagtgtttaattagttttagttagttgagactgattg

SEQ ID NO: 612516 - DNA, 602 bp, Homo sapiens
gcaaattcccagatgatattgatattgctgtctggaggccacactttgaagaccactgcctctaggaatgggaaaagaaattagatatcagcaatctgtccttaatgagattgcttaaggctttgtattagggatgtactttgtcatggaacatgtcatataaatgacaaactgagaacactggcaacatattttaaaagtaaaatatagtacaatacacgccagaagttctgagaaggataaataattaagtagtggtgaggcagaagaggctaattagagatgacaaagaataatacaaaaaccatgggccacagagccaggggtggcctggagctgagctgagcttattaggggacaactgcataggtggacttaagggcaaaactgaaggttttaaatgctatgaagtgtagggccatgctgctggtgctaattaagcactgagaactacctttcatacaaggctgagatctgtgagacagcctcttgctwcttgatcatgaacatcttcagttagataaagaaagggtctagtgagggtaggtgggttactcaaaatccctagtgtttaattagttttagttagttgagactgattg

SEQ ID NO: 612517 - DNA, 198 bp, Homo sapiens
ggtggacttaagggcaaaactgaaggttttaaatgctatgaagtgtagggccatgctgctggtgctaattaagcactgagaactacctttcatacaaggctgagatctgtgagacagcctcttgcttcttgatcatgaacatcttcagttagatmaagaaagggtctagtgagggtaggtgggttactcaaaatccct

SEQ ID NO: 612518 - DNA, 336 bp, Homo sapiens
atcttccccactccatcccctttccagctccctttcccactgaggcccacttttaccactcaataaagtcctccacattcaccaccttcaatttgttcatgtgacctgattcttcctggacgctggatcagaactcagktaccaagacagcaaagtgtaaaaggctgtcaccctgaccttccactgagctggttaacacttagccatccacagacagcaaatgttaaaggagcactgattgtaacacatgccctctggggctctgggggtcgcagacagcccctcccagaccgcagagctaaaagactattgtaacacactttgacactgctgcag

SEQ ID NO: 612519 - DNA, 336 bp, Homo sapiens
atcttccccactccatcccctttccagctccctttcccactgaggcccacttttaccactcaataaagtcctccacattcaccaccttcaatttgttcatgtgacctgattcttcctggacgctggatcagaactcaggtaccaagacagcaaagtgtaaaaggctgtcaccctgaccwtccactgagctggttaacacttagccatccacagacagcaaatgttaaaggagcactgattgtaacacatgccctctggggctctgggggtcgcagacagcccctcccagaccgcagagctaaaagactattgtaacacactttgacactgctgcag

SEQ ID NO: 612520 - DNA, 336 bp, Homo sapiens
atcttccccactccatcccctttccagctccctttcccactgaggcccacttttaccactcaataaagtcctccacattcaccaccttcaatttgttcatgtgacctgattcttcctggacgctggatcagaactcaggtaccaagacagcaaagtgtaaaaggctgtcaccctgaccttccactgagctggttaacacttagccatccacagacagcaaatgttaaaggagcactgattgtaacacatgccctctggggctctgggggtcgcagacagcccctcccagaccgcagagctaaaagacyattgtaacacactttgacactgctgcag

SEQ ID NO: 612521 - DNA, 577 bp, Homo sapiens
agggagaaagaggcaggtccatggtgactttgtttgaggccctttgtttaattatatctaaaggcagwtatgctttttaacatttcagtaatatgctttttaatatcctatattggaagagtggaaaaagttaataaggaaatgtgaagcacccagaggttagcaacaacagaaagtctctatgatatcagaaatggagcacaaagggaggcaatggcactacgggattctctgagttggggcctcagtaggacctggaatcatggagaaggaactgcttaggaaatgccaaggctgccaggctggaagcatggcaaagactgcacaacaggaaccgaaaccagagaagagatgctacctcaagtacagagagtgagaagaaatagtctggcttctccttcccttccaccctttggatgcctgctcctctgccttcacttagctaaacctaagtctcagactaacattcagagctgagcagaaaaaggggcagggtatggctttcagagcaaatgagtaatacacgtggtcaggacatattcgttcagttttcctctttccttccaaaatgcattcc

SEQ ID NO: 612522 - DNA, 567 bp, Homo sapiens
gtttgaggccctttgtttaattatatctaaaggcagatatgctttttaacatttcagtaatatgctttttaatatcctatwttggaagagtggaaaaagttaataaggaaatgtgaagcacccagaggttagcaacaacagaaagtctctatgatatcagaaatggagcacaaagggaggcaatggcactacgggattctctgagttggggcctcagtaggacctggaatcatggagaaggaactgcttaggaaatgccaaggctgccaggctggaagcatggcaaagactgcacaacaggaaccgaaaccagagaagagatgctacctcaagtacagagagtgagaagaaatagtctggcttctccttcccttccaccctttggatgcctgctcctctgccttcacttagctaaacctaagtctcagactaacattcagagctgagcagaaaaaggggcagggtatggctttcagagcaaatgagtaatacacgtggtcaggacatattcgttcagttttcctctttccttccaaaatgcattccaaactttaatgaaggatacac

SEQ ID NO: 612523 - DNA, 567 bp, Homo sapiens
gtttgaggccctttgtttaattatatctaaaggcagatatgctttttaacatttcagtaatatgctttttaatatcctatattggaagagtggaaaaagttaataaggaaatgtgaagcacccagaggttagcaacaacagaaagtctctatgatatcagaaatggagcacaaagggaggcaatggcactacgggattctctgagttggggcctcagtaggacctggaatcatggagaaggaactgcttaggaaatgccaaggctgccargctggaagcatggcaaagactgcacaacaggaaccgaaaccagagaagagatgctacctcaagtacagagagtgagaagaaatagtctggcttctccttcccttccaccctttggatgcctgctcctctgccttcacttagctaaacctaagtctcagactaacattcagagctgagcagaaaaaggggcagggtatggctttcagagcaaatgagtaatacacgtggtcaggacatattcgttcagttttcctctttccttccaaaatgcattccaaactttaatgaaggatacac

SEQ ID NO: 612524 - DNA, 577 bp, Homo sapiens
agggagaaagaggcaggtccatggtgactttgtttgaggccctttgtttaattatatctaaaggcagatatgctttttaacatttcagtaatatgctttttaatatcctatattggaagagtggaaaaagttaataaggaaatgtgaagcacccagaggttagcaacaacagaaagtctctatgatatcagaaatggagcacaaagggaggcaatggcactacgggattctctgagttggggcctcagtaggacctggaatcatggagaaggaactgcttaggaaatgccaaggctgccaggctggaagcatggcaaagactgcacaacaggaaccgaaaccagagaagagatgctacctcaagtacagagagtgagaagaaatagtctggcttctccttcccttccaccctttggatgcctgctcctctgccttcacttagctaaacctaagtctsagactaacattcagagctgagcagaaaaaggggcagggtatggctttcagagcaaatgagtaatacacgtggtcaggacatattcgttcagttttcctctttccttccaaaatgcattcc

SEQ ID NO: 612525 - DNA, 567 bp, Homo sapiens
gtttgaggccctttgtttaattatatctaaaggcagatatgctttttaacatttcagtaatatgctttttaatatcctatattggaagagtggaaaaagttaataaggaaatgtgaagcacccagaggttagcaacaacagaaagtctctatgatatcagaaatggagcacaaagggaggcaatggcactacgggattctctgagttggggcctcagtaggacctggaatcatggagaaggaactgcttaggaaatgccaaggctgccaggctggaagcatggcaaagactgcacaacaggaaccgaaaccagagaagagatgctacctcaagtacagagagtgagaagaaatagtctggcttctccttcccttccaccctttggatgcctgctcctctgccttcacttagctaaacctaagtctcagactaacattcagagctgagcagaaaaaggggcagggtatggctttcagagcaaatgagtaatacacgtggtcaggacatattcrttcagttttcctctttccttccaaaatgcattccaaactttaatgaaggatacac

SEQ ID NO: 612526 - DNA, 567 bp, Homo sapiens
gtttgaggccctttgtttaattatatctaaaggcagatatgctttttaacatttcagtaatatgctttttaatatcctatattggaagagtggaaaaagttaataaggaaatgtgaagcacccagaggttagcaacaacagaaagtctctatgatatcagaaatggagcacaaagggaggcaatggcactacgggattctctgagttggggcctcagtaggacctggaatcatggagaaggaactgcttaggaaatgccaaggctgccaggctggaagcatggcaaagactgcacaacaggaaccgaaaccagagaagagatgctacctcaagtacagagagtgagaagaaatagtctggcttctccttcccttccaccctttggatgcctgctcctctgccttcacttagctaaacctaagtctcagactaacattcagagctgagcagaaaaaggggcagggtatggctttcagagcaaatgagtaatacacgtggtcaggacatattcgttcwgttttcctctttccttccaaaatgcattccaaactttaatgaaggatacac

SEQ ID NO: 612527 - DNA, 604 bp, Homo sapiens
gggtatggctttcagagcaaatgagtaatacacgtggtcaggacatattcgttcagttttcctctttccttccaaaatgcattccaaaytttaatgaaggatacacaattttttctcaaatctcagagaatgggggtcaggttattttctgcttagaaacttgagtgggttactacataagacaaggcaatttggtctgatattcaagttcatttagactattgccataatttatgggcatgaaataacatgatagaaaaatgtaaaggtaaattgaaatccagtcacattaggctacttgctctttttgattagagtatattttcctgcacttgctaataatattccttctgccaggcttaccatcttcttccccatttttctttactgagattttatcttcacatcacaaattaagtgctattccttcaagaaacatactggcttgcccaaactttgttgtatctctcccttcttaaactcttatatcattctcatggcactcaacactttggatcttgtgttttagatattgaaatttctatcatatgctttgataatagattgtgatttctgcaaaggcaaagagtgatttcctcaactt

SEQ ID NO: 612528 - DNA, 604 bp, Homo sapiens
gggtatggctttcagagcaaatgagtaatacacgtggtcaggacatattcgttcagttttcctctttccttccaaaatgcattccaaactttartgaaggatacacaattttttctcaaatctcagagaatgggggtcaggttattttctgcttagaaacttgagtgggttactacataagacaaggcaatttggtctgatattcaagttcatttagactattgccataatttatgggcatgaaataacatgatagaaaaatgtaaaggtaaattgaaatccagtcacattaggctacttgctctttttgattagagtatattttcctgcacttgctaataatattccttctgccaggcttaccatcttcttccccatttttctttactgagattttatcttcacatcacaaattaagtgctattccttcaagaaacatactggcttgcccaaactttgttgtatctctcccttcttaaactcttatatcattctcatggcactcaacactttggatcttgtgttttagatattgaaatttctatcatatgctttgataatagattgtgatttctgcaaaggcaaagagtgatttcctcaactt

SEQ ID NO: 612529 - DNA, 604 bp, Homo sapiens
gggtatggctttcagagcaaatgagtaatacacgtggtcaggacatattcgttcagttttcctctttccttccaaaatgcattccaaactttaatgaaggatacacaattttttctmaaatctcagagaatgggggtcaggttattttctgcttagaaacttgagtgggttactacataagacaaggcaatttggtctgatattcaagttcatttagactattgccataatttatgggcatgaaataacatgatagaaaaatgtaaaggtaaattgaaatccagtcacattaggctacttgctctttttgattagagtatattttcctgcacttgctaataatattccttctgccaggcttaccatcttcttccccatttttctttactgagattttatcttcacatcacaaattaagtgctattccttcaagaaacatactggcttgcccaaactttgttgtatctctcccttcttaaactcttatatcattctcatggcactcaacactttggatcttgtgttttagatattgaaatttctatcatatgctttgataatagattgtgatttctgcaaaggcaaagagtgatttcctcaactt

SEQ ID NO: 612530 - DNA, 449 bp, Homo sapiens
gagaatcttgtatttatggcatcaggttataaagatctattcaaaaccatttttgtcaaagtttaaacactggaacaaaagtcaaattgtttctaaatgagacacaaatgattcttgctaatagtacaaattttgtcccatgggtaatactattgtctttttcttttttaaaacaattatttcaatttttttttaaattcagggaacacatgggcaggtttgttagctgggtgtactgtgtgatgttgaggtttagggtatggatgatcctgtcacccaggtagtgagaagagtccmcagtaggtagtttttcagctcttgttcccgctccccaccctacctccccagtgtctgttattcccatgggtcctcaggtattactattttcaagtttttttctttacatgaaactactgaaagcaaaagtatgtcatgctgtaggttactct

SEQ ID NO: 612531 - DNA, 423 bp, Homo sapiens
aaaacaaaattccagtactcaccaacagcctcctgcttttagagaagggggtgcttgaaayttctgattagcctctcactctctgtcatttcccatctccccaggaggtaaaatagctcacccctgctagggaagggtagaagtggggagaagctaggcagatggttggcaaggattacttctcgtatttcatcctaatttgcattaatgctcaactttgaatcactctttctgtgtatataattttttagtaaaaaaaattcctcttcttttcaattttgagcctgaaattgtgaacaatttgattgctatttgttagtcacattaagattctcttaaaatatactcacacattgttatgtatctagcaggcatatactaatgtatgttcttgtaaaaatatgcctatgggtatttaatgcc

SEQ ID NO: 612532 - DNA, 423 bp, Homo sapiens
aaaacaaaattccagtactcaccaacagcctcctgcttttagagaagggggtgcttgaaacttctgattagcctctcactctctgtcatttcccrtctccccaggaggtaaaatagctcacccctgctagggaagggtagaagtggggagaagctaggcagatggttggcaaggattacttctcgtatttcatcctaatttgcattaatgctcaactttgaatcactctttctgtgtatataattttttagtaaaaaaaattcctcttcttttcaattttgagcctgaaattgtgaacaatttgattgctatttgttagtcacattaagattctcttaaaatatactcacacattgttatgtatctagcaggcatatactaatgtatgttcttgtaaaaatatgcctatgggtatttaatgcc

SEQ ID NO: 612533 - DNA, 423 bp, Homo sapiens
aaaacaaaattccagtactcaccaacagcctcctgcttttagagaagggggtgcttgaaacttctgattagcctctcactctctgtcatttcccatctccccaggaggtaaaatagctcacccctgctagggaagggtagaagtggggagaagctaggcagatggttggcaaggattacttctcgtatttcatcctaatttgcattaatgctcaactttgmatcactctttctgtgtatataattttttagtaaaaaaaattcctcttcttttcaattttgagcctgaaattgtgaacaatttgattgctatttgttagtcacattaagattctcttaaaatatactcacacattgttatgtatctagcaggcatatactaatgtatgttcttgtaaaaatatgcctatgggtatttaatgcc

SEQ ID NO: 612534 - DNA, 509 bp, Homo sapiens
  misc_feature 204: n = A,T,C or G
aatcagcccaaccgtaagaaaacttagaaaatatatctaaaactttatccctgttatagatggaaaatactyggtgcagagcctggaatcttctatgaacttggataggtgaacaacactgtactacatggtgatagctgtgaaggatccaagtgttacacttagaactgacaaattcaacatattttgtcagacaagcattgngctcattctgtccattccacagtctattggctgaactctgctaaacctattgtgattaaataaagacatctgtaaaagtcctaatgatggtcacactacaaagctctttgagtaactaatcccagtgttagccagcaatgagtcttagggaagttcttcacattcacctggattccaaatacctaataaaaaagagcaagtgtcaaactcagagtgtgtgtctctctcttcctgtttatttgtgaatggcttttaatgaataggaaaagaacaaaaagtataaatgcagcttgtcaaccacagca

SEQ ID NO: 612535 - DNA, 509 bp, Homo sapiens
  misc_feature 204: n = A,T,C or G
aatcagcccaaccgtaagaaaacttagaaaatatatctaaaactttatccctgttatagatggaaaatactcggtgcagagcctggaatcttctatgaacttggataggtgaayaacactgtactacatggtgatagctgtgaaggatccaagtgttacacttagaactgacaaattcaacatattttgtcagacaagcattgngctcattctgtccattccacagtctattggctgaactctgctaaacctattgtgattaaataaagacatctgtaaaagtcctaatgatggtcacactacaaagctctttgagtaactaatcccagtgttagccagcaatgagtcttagggaagttcttcacattcacctggattccaaatacctaataaaaaagagcaagtgtcaaactcagagtgtgtgtctctctcttcctgtttatttgtgaatggcttttaatgaataggaaaagaacaaaaagtataaatgcagcttgtcaaccacagca

SEQ ID NO: 612536 - DNA, 509 bp, Homo sapiens
  misc_feature 204: n = A,T,C or G
aatcagcccaaccgtaagaaaacttagaaaatatatctaaaactttatccctgttatagatggaaaatactcggtgcagagcctggaatcttctatgaacttggataggtgaacaacactgtactacatggtgatagctgtgaaggatccaagtgttacacttagaactgacaaattcaacatattttgtcagacaagcattgngctcattctgtccattccacagtctattggctgaactctgctaaacctattgtgattaaataaagacatctgtaaaagtcytaatgatggtcacactacaaagctctttgagtaactaatcccagtgttagccagcaatgagtcttagggaagttcttcacattcacctggattccaaatacctaataaaaaagagcaagtgtcaaactcagagtgtgtgtctctctcttcctgtttatttgtgaatggcttttaatgaataggaaaagaacaaaaagtataaatgcagcttgtcaaccacagca

SEQ ID NO: 612537 - DNA, 509 bp, Homo sapiens
  misc_feature 204: n = A,T,C or G
aatcagcccaaccgtaagaaaacttagaaaatatatctaaaactttatccctgttatagatggaaaatactcggtgcagagcctggaatcttctatgaacttggataggtgaacaacactgtactacatggtgatagctgtgaaggatccaagtgttacacttagaactgacaaattcaacatattttgtcagacaagcattgngctcattctgtccattccacagtctattggctgaactctgctaaacctattgtgattaaataaagacatctgtaaaagtcctaatgatggtcacactacaaagctctttgagtaactaatcccagtgttagccagcaatgagtcttagggaagttcttcacattcacctggattccaaatacctaataaaaaagagcaagtgtcaaactcagagtgtgtgtctctytcttcctgtttatttgtgaatggcttttaatgaataggaaaagaacaaaaagtataaatgcagcttgtcaaccacagca

SEQ ID NO: 612538 - DNA, 423 bp, Homo sapiens
aaaacaaaattccagtactcaccaacagcctcctgcttttagagaagggggtgcttgaaacttctgattagcctctcactctctgtcatttcccatctccccaggaggtaaaatagctcacccctgctagggaagggtagaagtggggagaagctaggcagatggttggcaaggattacttctcgtatttcatcctaatttgcattaatgctcaactttgaatcactctttctgtgtatataattttttagtaaaaaaaattcctcttcttttcaattttgagcctgaaattgtgaayaatttgattgctatttgttagtcacattaagattctcttaaaatatactcacacattgttatgtatctagcaggcatatactaatgtatgttcttgtaaaaatatgcctatgggtatttaatgcc

SEQ ID NO: 612539 - DNA, 431 bp, Homo sapiens
aagctaagccatcatatcccctgtgacytgcactatacatccagatggcctgaagcaactgaagagccacaaaagaagtgaaaatagccttaactgatgacattccaccattgtgatttgtttctgccccaccttaactgatcccaaaacctataagaactaatgatgatcccaccaccctttgctgactccttttttggactcagcctgcctgcacccaggtgaaataaacagccttgttgctcacacaaagcctgtttggtggtctcttcacatggacatgcgtgacaaagggaaatcgttccagccttagaactgtgcctttctctgaggagggaaccacaaagtgttaaggagggccaggcaacaggagcctaagcaagaagttaacactcccagacctaagcaatctaatcccaatagcgttctgg

SEQ ID NO: 612540 - DNA, 431 bp, Homo sapiens
aagctaagccatcatatcccctgtgacttgcactatacatccagatggcctgaagcaactgaagagccacaaaagaagtgaaaatagccttaactgatgacattccaccattgtgatttgtttctgccccaccttaactgatcccaaaacctataagaactaatgatgatcccaccaccctttgctgactccttttttggacwcagcctgcctgcacccaggtgaaataaacagccttgttgctcacacaaagcctgtttggtggtctcttcacatggacatgcgtgacaaagggaaatcgttccagccttagaactgtgcctttctctgaggagggaaccacaaagtgttaaggagggccaggcaacaggagcctaagcaagaagttaacactcccagacctaagcaatctaatcccaatagcgttctgg

SEQ ID NO: 612541 - DNA, 431 bp, Homo sapiens
aagctaagccatcatatcccctgtgacttgcactatacatccagatggcctgaagcaactgaagagccacaaaagaagtgaaaatagccttaactgatgacattccaccattgtgatttgtttctgccccaccttaactgatcccaaaacctataagaactaatgatgatcccaccaccctttgctgactccttttttggactcagcctgcctgcacccaggtgaaataaacagccttgttgctcacacaaagcctgtttggtggtctcttcacatggacatgcgtgacaaagggaaatcgttccagccttagaactgtgcctttctctgaggagggarccacaaagtgttaaggagggccaggcaacaggagcctaagcaagaagttaacactcccagacctaagcaatctaatcccaatagcgttctgg

SEQ ID NO: 612542 - DNA, 571 bp, Homo sapiens
caactggttcacaaaataagaactctgaatcacccaactgaattttcctggtggacagattttccagatttctaaaaaatgggtgtttgagcataaagtagctggtatcctctgtattgtcattaacgctgacccagaaattcacaaggaataacaacatccaggattttctgtgcaggctatttatataccaaagccagagcagttataggagttctgttattcacccaggatgatatcccaattcgttcattcactcatcctgcaaaggttgcctggccctgctcaggctgacatgcccccacctccagatgtcgagctgcttcataatcaccaagcagtggcayctcacgccatcccattagagagtagcatgcagcccacttgttgggcatgttgatgcaagcttaggaaggaaaacataattcatttttgccagtgacagaaatgttaacacttacttgaaatagctgataatctgacaaggagagctaaaggattactgtatttcatgtggctaatgagaaaagctgtttaaaagccatatgaaaaagacttaatgtatggtgag

SEQ ID NO: 612543 - DNA, 401 bp, Homo sapiens
agcaggggctttttatggaaagaattgataggggaagacagtagacaaaagatattgaaaaatcatgtttgggatttagttgatatatgaaataatcttatttaactttcatttactagatgaggaaactgaggcctagaaaaccaagtaatttgtggagggggcatggctaattagtgggaaaccctggcctggatccatgatgttttgctgctctttttgatgctggagcasagtctcctgcagtcacaagaaagaactatggaacgatgtgtttgcagcagggcaggaagccccgtaaagtaaaatcccacggggctccagggtccctcagcatccacagggggcactcgagtccatgacaaagatgccttcagttctgtccacactacgcaagaaca

SEQ ID NO: 612544 - DNA, 401 bp, Homo sapiens
agcaggggctttttatggaaagaattgataggggaagacagtagacaaaagatattgaaaaatcatgtttgggatttagttgatatatgaaataatcttatttaactttcatttactagatgaggaaactgaggcctagaaaaccaagtaatttgtggagggggcatggctaattagtgggaaaccctggcctggatccatgatgttttgctgctctttttgatgctggagcagagtctcctgcagtcacaagaaagaactatgraacgatgtgtttgcagcagggcaggaagccccgtaaagtaaaatcccacggggctccagggtccctcagcatccacagggggcactcgagtccatgacaaagatgccttcagttctgtccacactacgcaagaaca

SEQ ID NO: 612545 - DNA, 409 bp, Homo sapiens
tttaactttcatttactagatgaggaaactgaggcctagaaaaccaagtaatttgtggagggggcatggctaattagtgggaaaccctggcctggatccatgatgttttgctgctctttttgatgctggagcagagtctcctgcagtcacaagaaagaactatggaacgatgtgtttgcagcagggcaggaagccccgtwaagtaaaatcccacggggctccagggtccctcagcatccacagggggcactcgagtccatgacaaagatgccttcagttctgtccacactacgcaagaacaggctgcttcaccctcttgcactggagggctgccctcttcctggtggtttgtccttgcccagtgcccctccttgctatccagggcactttcagcacagaagacattatc

SEQ ID NO: 612546 - DNA, 613 bp, Homo sapiens
aatttgatatgtacatgtgcccattaaacaatcaccatgaaggggacaatgagcatatccaatactctcaaagcttcctagttctcttttgtaatgcacactcatacctctcaggtgtgaagtattgagcttcacacatacacacaaatatatactgggatatctaattgtttcagaagcatttgttgaaaatgttatgtccatgaatggtctaagaactttatcaaaaattagctgatagctgatatacatgtgtatatctatatttgtactacattgtcttaagtattactgtaacgttctaagtcttgaatccmggtgctgtttattctccagcagcacctggtttcaaagtaactgtttcctttcaaagtaatttgccattataggtcctctacccattgatgtacatttcagaattttagtttctcaatttctaaaataagaaatccagctgtgatttgattggaattgttatagatcaatgtgggaagagtagacatcttaacaatatagagatttatgactcataaattccatttatttaggtctcatttattttagcaatattttgtagttttgtagttttcaaatgtttctcttttttgctggt

SEQ ID NO: 612547 - DNA, 402 bp, Homo sapiens
atctggattttttactcttggtgaarataactgcaatgacatttatcatgtatgatttaaagtcaggaaatgcctcctggtaacctacagggtcagtttttcactgatgggttacaactggcctaattggtttgacaaacctagcttgattacatggacaaggagacataaaaggcttgtggagaatttctcctcgaagccctcctgaaagcatgattcctagcacagaatcttggtggttgacactggagacagaatgcacactctgtgtctgtgaatacttggagccctgggtagctttcaacatgggatgtctttcagactcccagtccatgcccgcactctctttcacttgctgcaccatatcctttgcctttaaataaaagccccatgtaaatatgt

SEQ ID NO: 612548 - DNA, 402 bp, Homo sapiens
atctggattttttactcttggtgaaaataactgcaatgacatttatcatgtatgatttaaagtcaggaaatgcctcctggtaacctacagggtcagtttttcactgatgggttacaactggcctaattggtttgacaaacctagcttgattacatggacaaggaracataaaaggcttgtggagaatttctcctcgaagccctcctgaaagcatgattcctagcacagaatcttggtggttgacactggagacagaatgcacactctgtgtctgtgaatacttggagccctgggtagctttcaacatgggatgtctttcagactcccagtccatgcccgcactctctttcacttgctgcaccatatcctttgcctttaaataaaagccccatgtaaatatgt

SEQ ID NO: 612549 - DNA, 622 bp, Homo sapiens
ctttgtcttttaacctggatatctggattttttactcttggtgaaaataactgcaatgacatttatcatgtatgatttaaagtcaggaaatgcctcctggtaacctacagggtcagtttttcactgatgggttacaactggcctaattggtttgacaaacctagcttgattacatggacaaggagacataaaaggcttgtggagaatttctcctcgaagccctcctgaaagcatgattcctagcacagaatcttggtggttgacactggagacagaatgcacactctgtgtctgtgaatacttggagccctgggtagctttcaacatgggatgtctttcagactcccagtccatgcccgcactctctttcacttgctgcaccatatcctttgcctttaaataaaagccccatgtaaatatgttctatggaatgtggtggttcctttcaaacatccaaacaggaagcttttcagtatgtatacatttctattgakaatacacctaagaatgaatttgctatttgccagttcataaaagtatatatatttatatattgagctttagacaaaattttcaagtaaaatacaaaaagaaatttcttgaaccattagagaataagtta

SEQ ID NO: 612550 - DNA, 622 bp, Homo sapiens
ctttgtcttttaacctggatatctggattttttactcttggtgaaaataactgcaatgacatttatcatgtatgatttaaagtcaggaaatgcctcctggtaacctacagggtcagtttttcactgatgggttacaactggcctaattggtttgacaaacctagcttgattacatggacaaggagacataaaaggcttgtggagaatttctcctcgaagccctcctgaaagcatgattcctagcacagaatcttggtggttgacactggagacagaatgcacactctgtgtctgtgaatacttggagccctgggtagctttcaacatgggatgtctttcagactcccagtccatgcccgcactctctttcacttgctgcaccatatcctttgcctttaaataaaagccccatgtaaatatgttctatggaatgtggtggttcctttcaaacatccaaacaggaagcttttcagtatgtatacatttctattgataatacacctaagaatgaatttgctatttgccagttcataaaagtatatatatttatatattgagctttagacaaaatttkcaagtaaaatacaaaaagaaatttcttgaaccattagagaataagtta

SEQ ID NO: 612551 - DNA, 601 bp, Homo sapiens
tcaagtaaaatacaaaaagaaatttcttgaaccattagagaataagttactgacctgatttccagttaccaccaaatattttggggtttattccttacaaacaggtttctcctacatgttcacaacacaactgtcagcattggttgtattcccactaataccctgttactgtctaatcctcagaccccattcaagaccctggcactctacattaagctacccctgtgtgtagttaccttcttcactctactctgactccaacacctcatgcttggccaccgtcattcttggatgccatccctgggctctgatctactccctagattatcatccatttcacatagacactcttctcatccttcctgggttaaacccacatgggtgctcaccccactctgctcagtgaggctctgacactccaaccttgctgtatcactgyggtgatgcccttttcatcttgcttgggttctgccaccacttctgtgtggactccttctcctgttctttggctttgatacctggcaccttggagccctcctatacagatgcccctttcagtctatttacaccagaaaatcccacagtgacttgactcttctac

SEQ ID NO: 612552 - DNA, 476 bp, Homo sapiens
cagacatgctggcagtgaattaaaaagataacaatagtttttaaagcctcattcaaatctgcatatctacaatagtgtatcaatttgggatggccaaagttatagataatttggataaataaaataggggctcagcagtaaaataatgactgtatctccagaagctttaagattaatgaaaagaagaaaagactaaaggcagatcaagctrtcatgctgactacagacatagtaaaggctttccacagaaagagaaaatagattagtcttgttttactctggtcaacaaagggtagaattatagaaatggagattgcagctgcatatagatagaattgttaagactcatagctattccaacatctttgctagggggccatagggagtgccaacatcgagtatcagaacaaactagatgaatgccaaaatctcttatactctaaggttatatgagaaagtgattttgatgccaaaga

SEQ ID NO: 612553 - DNA, 587 bp, Homo sapiens
aaaatgttgtgggtacatagtatgtgtatgtatctgtggggtccctgagatgttttgatacaggcatgtaatgtgaaataagcacatcttggggaatggggtatccctcccctcaagcatttatccttcaagttataaaaaatkcaattacagtcttagttatttcaaaatgtaccattaaattattattggatatagtcaccctattgtgctataaaatagtaggtcttattaactctctatttttatacccattaaccatccccaccttcccacaaacctccccccagctacctttcccagcctctgataaccatccttatactccatatgtccatgagtttgttttgattttagattccacaaataagtaagaacatgtaacatttgtctttctgcgcctggcttatttcacttaatataatgatccataatgttccatcattgttactgacaatgactggatcttgttctttgttacagctgaatagtcctccattgtgtatatgtaccacattttctttatccattcatctgttgatggacactaaggtttcttccaaatcttagttttgtaaacagtgctg

SEQ ID NO: 612554 - DNA, 604 bp, Homo sapiens
ttttaaaaatttgttttcaaacaagtctaatcataaataatagaatatattttacaatagttgaaggtaacaaaaaataagtgctatttaaaaaattgtattagattgtttaaaaatgttgtgggtacatagtatgtgtatgtatctgtggggtccctgagatgttttgatacaggcatgtaatgtgaaataagcacatcttggggaatggggtatccctcccctcaagcatttatccttcaagttataaaaaatgcaattacagtcttakttatttcaaaatgtaccattaaattattattggatatagtcaccctattgtgctataaaatagtaggtcttattaactctctatttttatacccattaaccatccccaccttcccacaaacctccccccagctacctttcccagcctctgataaccatccttatactccatatgtccatgagtttgttttgattttagattccacaaataagtaagaacatgtaacatttgtctttctgcgcctggcttatttcacttaatataatgatccataatgttccatcattgttactgacaatgactggatcttgttctttgttacagctgaatagt

SEQ ID NO: 612555 - DNA, 587 bp, Homo sapiens
aaaatgttgtgggtacatagtatgtgtatgtatctgtggggtccctgagatgttttgatacaggcatgtaatgtgaaataagcacatcttggggaatggggtatccctcccctcaagcatttatccttcaagttataaaaaatgcaattacagtcttagttatttcaaaatgtaccattaaattattattggatatagtcaccctattgtgctataaaatagtaggtcttattaactctctatttttatacccattaaccatccccaccttcccacaaacctccccccagctacctttcccagcctctgataaccatccttatactcyatatgtccatgagtttgttttgattttagattccacaaataagtaagaacatgtaacatttgtctttctgcgcctggcttatttcacttaatataatgatccataatgttccatcattgttactgacaatgactggatcttgttctttgttacagctgaatagtcctccattgtgtatatgtaccacattttctttatccattcatctgttgatggacactaaggtttcttccaaatcttagttttgtaaacagtgctg

SEQ ID NO: 612556 - DNA, 587 bp, Homo sapiens
aaaatgttgtgggtacatagtatgtgtatgtatctgtggggtccctgagatgttttgatacaggcatgtaatgtgaaataagcacatcttggggaatggggtatccctcccctcaagcatttatccttcaagttataaaaaatgcaattacagtcttagttatttcaaaatgtaccattaaattattattggatatagtcaccctattgtgctataaaatagtaggtcttattaactctctatttttatacccattaaccatccccaccttcccacaaacctccccccagctacctttcccagcctctgataaccatccttatactccmtatgtccatgagtttgttttgattttagattccacaaataagtaagaacatgtaacatttgtctttctgcgcctggcttatttcacttaatataatgatccataatgttccatcattgttactgacaatgactggatcttgttctttgttacagctgaatagtcctccattgtgtatatgtaccacattttctttatccattcatctgttgatggacactaaggtttcttccaaatcttagttttgtaaacagtgctg

SEQ ID NO: 612557 - DNA, 604 bp, Homo sapiens
ttttaaaaatttgttttcaaacaagtctaatcataaataatagaatatattttacaatagttgaaggtaacaaaaaataagtgctatttaaaaaattgtattagattgtttaaaaatgttgtgggtacatagtatgtgtatgtatctgtggggtccctgagatgttttgatacaggcatgtaatgtgaaataagcacatcttggggaatggggtatccctcccctcaagcatttatccttcaagttataaaaaatgcaattacagtcttagttatttcaaaatgtaccattaaattattattggatatagtcaccctattgtgctataaaatagtaggtcttattaactctctatttttatacccattaaccatccccaccttcccacaaacctccccccagctacctttcccagcctctgataaccatccttatactccatatgtccatgagtttgttttgattttagattccacaaataagtaagaacatgtaacatttgtctttctgcgcctggcttatttcacttaatataatgatccataatgttccatcaktgttactgacaatgactggatcttgttctttgttacagctgaatagt

SEQ ID NO: 612558 - DNA, 500 bp, Homo sapiens
ccattctactcttaacttctatgagtgcacagttttggatttcacatataagtgatattaagagatatttgtctttctgtgtctggcttattttacttagcataatgtcctctaaatccatccaygtttttgcaaatgacagaatttcattcatttataaagataagccgtatttttgtatgcatcctacatatacttttaactttccacagctttattgagatataatttatacattgtgtaattcactcatttaaagtacaaacttcaaattcttttagtatattaactggatggacaaataatcatcataatataattttagaacattttaattctccttaaaagagacttgcacccattagcaatcttccccattttctccagctttttttaaacccctcctagtctaggcaaccactcgtctactttctgactatgaatttgcctattctggacatttcacataaatggaatcataataacacatagtcactttt

SEQ ID NO: 612559 - DNA, 500 bp, Homo sapiens
ccattctactcttaacttctatgagtgcacagttttggatttcacatataagtgatattaagagatatttgtctttctgtgtctggcttattttacttagcataatgtcctctaaatccatccatgtttttgcaaatgacagaatttcattcatttataaagataagcmgtatttttgtatgcatcctacatatacttttaactttccacagctttattgagatataatttatacattgtgtaattcactcatttaaagtacaaacttcaaattcttttagtatattaactggatggacaaataatcatcataatataattttagaacattttaattctccttaaaagagacttgcacccattagcaatcttccccattttctccagctttttttaaacccctcctagtctaggcaaccactcgtctactttctgactatgaatttgcctattctggacatttcacataaatggaatcataataacacatagtcactttt

SEQ ID NO: 612560 - DNA, 500 bp, Homo sapiens
ccattctactcttaacttctatgagtgcacagttttggatttcacatataagtgatattaagagatatttgtctttctgtgtctggcttattttacttagcataatgtcctctaaatccatccatgtttttgcaaatgacagaatttcattcatttataaagataagccgtatttttgtatgcatcctacatatacttttaactttccacagctttattgagatataatttatacattgtgtaattcactcatttaaagtacaaacttcaaattcttttagtatattaactggatggacaaataatcatcataatataattttagaacattttaattctccttaaaagagacttgcrcccattagcaatcttccccattttctccagctttttttaaacccctcctagtctaggcaaccactcgtctactttctgactatgaatttgcctattctggacatttcacataaatggaatcataataacacatagtcactttt

SEQ ID NO: 612561 - DNA, 500 bp, Homo sapiens
ccattctactcttaacttctatgagtgcacagttttggatttcacatataagtgatattaagagatatttgtctttctgtgtctggcttattttacttagcataatgtcctctaaatccatccatgtttttgcaaatgacagaatttcattcatttataaagataagccgtatttttgtatgcatcctacatatacttttaactttccacagctttattgagatataatttatacattgtgtaattcactcatttaaagtacaaacttcaaattcttttagtatattaactggatggacaaataatcatcataatataattttagaacattttaattctccttaaaagagacttgcacccattagcaatcttccccattttctccagcyttttttaaacccctcctagtctaggcaaccactcgtctactttctgactatgaatttgcctattctggacatttcacataaatggaatcataataacacatagtcactttt

SEQ ID NO: 612562 - DNA, 593 bp, Homo sapiens
ctcattgtggctttgatttgcatttctctgataattagaaatgtttttgattttttcatgtacctgttggccttttgtatgccttaggaagtgtctattctggttctttgcttatttttttaataagcatagttttattcttatttttgagtaggttgagttacttatatattattatatgagccctttatctgatgtatggtttaaaaatgttatcccatttgtgggttctcttcattctattatcgcttcttttcctgtggaaaagctttttagttttatgcaatctcattcgtgtgtttttgcttttgttgcctgtgcttttggaataatctacagaaaatcatagctcaggccaatgtcatacagtcttcttctatatttccttgtagtagttttacatttaagtctttaattttgatttgatacttgtataaagagcaaaaggaaagtcaaattttattcttctgtatgtggatattcagttttttctayaccatttattgaaaataattttctttcttcattgtgtatttttagtcattttatcaaaaaatcaattgaccacagacacacggacttatttacgggtt

SEQ ID NO: 612563 - DNA, 593 bp, Homo sapiens
ctcattgtggctttgatttgcatttctctgataattagaaatgtttttgattttttcatgtacctgttggccttttgtatgccttaggaagtgtctattctggttctttgcttatttttttaataagcatagttttattcttatttttgagtaggttgagttacttatatattattatatgagccctttatctgatgtatggtttaaaaatgttatcccatttgtgggttctcttcattctattatcgcttcttttcctgtggaaaagctttttagttttatgcaatctcattcgtgtgtttttgcttttgttgcctgtgcttttggaataatctacagaaaatcatagctcaggccaatgtcatacagtcttcttctatatttccttgtagtagttttacatttaagtctttaattttgatttgatacttgtataaagagcaaaaggaaagtcaaattttattcttctgtatgtggatattcagttttttctacaccatttattgaaaataattttctttcttcattgtgtatttttagtcattttatcaaaaaatcarttgaccacagacacacggacttatttacgggtt

SEQ ID NO: 612564 - DNA, 605 bp, Homo sapiens
ctacacatggagcccttctttggtgggatagtcttgacatataccaggattctcattgacctttcagagccttcaagaatcctgagctgctttggcttctgttcctggaagagatgcaactgaactgctctggagctggagttcaggttcaaatattcatcactgttactaagcctttacatagcatgtgatttctttccggcaggctcatggtcacttaggtttgcttgtatgtagatggagggtctgcatcctcattcaggtaacaccctcagcctttcatgctgagattagccattttatttgtaactcactgtacaatccatttgctcttccagtgtcccttagaaggatgcagagtgttctgtagaatgccatagagacctggatttagggaaaatatttgaccaaaagtctgccaactcacatgagtatctcccaacaacttgtacagtgctagtctctgggtatatagcaaatgaaacygtgcctgagcagatgttacaaacaccctcccctgagagactccagggctgctttattcaagcaaaacggtgtgctctaataagctcagtgttgagaggaacaagttttcattccagctt

SEQ ID NO: 612565 - DNA, 521 bp, Homo sapiens
acccatggtaagacccatgagcctctgaatataattatagaaaacatttggagagggatagagagagacaagatcatgcctcctttgataatgtcaaattttcagtgcacgaagccatacatagtgcagttttctagcttccctttcacacatggcattgaagaaagtaaattaagcaactcagctaacactgggaatgcagcagaagtaatcgagttcagtgctgggagacagttgccatgatattccaacatggacaccaggatcacagtcratgactatgccctcccttgaagatggtggcttgcctctctttctgtaagcacatgtcatgtcataacaatattaaacaattgaaagtaatgtccccatcttcttctacactgcctttgaattattattttagatctgccaaaataaattgcaaactcattaacaagaaagggggggtgcatgcatccttgccttcccgagtagtctattcacccaaagacaaaagggtgaccagcctccatctggga

SEQ ID NO: 612566 - DNA, 562 bp, Homo sapiens
atgcctcctttgataatgtcaaattttcagtgcacgaagccatacatagtgcagttttctagcttccctttcacacatggcattgaagaaagtaaattaagcaactcagctaacactgggaatgcagcagaagtaatcgagttcagtgctgggagacagttgccatgatattccaacatggacaccaggatcacagtcgatgactatgccctcccttgaagatggtggcttgcctctctttctgtaagcacatgtcatgtcataacaatattaaacaattgaaagtaatgtccccatcttcttctacactgcctttgaattattattttagatctgccaaaataaattgcaaactcattaacaagaaagggggggtgcatgcatccytgccttcccgagtagtctattcacccaaagacaaaagggtgaccagcctccatctgggatattcaaagacacagtcaccttgccatgcagcctgaggccaatcccctttttaagaagcttgttagatgagctccttaaacatacaaccacaaaggaaaagcacagctggtgtgag

SEQ ID NO: 612567 - DNA, 531 bp, Homo sapiens
caccagaggagagtgagctgtaatragtattttggcagattgcatgtttcttgtgttccttggccctgcacagagctaccgtttactcatttgacaaatatttgagtagtagactccagggttcaatagtgagcaaacatgcacagaatttcttctctagtggagctgagagtctaacagaaagagctgacattagtcacagaattatgtaataagggaaagttcagcagacccaggggtactacaagagcctgggaaggcggactgaccccaagagggaggcaggaaaggttgcccccaggaagtagcacttgagctacaatcagggagaaaactaggcaaagacacagcattcaggagaaggtagaagctggcccatgaggatggtggtgtggagaggtgaaccaatacccaagtcttggatttattgttgagctgctgaattaaccagtggttggctctctcccaacctctgcacttcttttttgcaaggttatatatttttttatttaaaagctagtatgagttggg

SEQ ID NO: 612568 - DNA, 589 bp, Homo sapiens
actgcacagcatgcatagaatacgtcctcccttcagttggcttgggtcagcttaggtcatgggccacttggactgatagcagtttccacagaaatgcctcaagatggtagaataatccagatctctttgcatggggcatggtgtggctatctgagaaaatcctggcttttataggaaggagaaagaagaatgcttcttgaggggaagaaaccaacaggaatgtgcctcagggaaatgtcaccagaggagagtgagctgtaataagtattttggcagattgcatgtttcttgtgttccttggccctgcacagagctaccgtttactcatttgacaaatatttgagtagtagactccagggttcaatagtgagcaaacatgcacagaatttcttctctagtggagctgagagtctaacagaaagagctgacattagtcacagaattatgtaataagggaaagttcagcagacccaggggtrctacaagagcctgggaaggcggactgaccccaagagggaggcaggaaaggttgcccccaggaagtagcacttgagctacaatcagggagaaaactaggcaaagacacagc

SEQ ID NO: 612569 - DNA, 444 bp, Homo sapiens
ttgtattcccagttactcaggagactgaagtgggagaatcactgagcccagggaggttgaggctgcagtgagccatgatcgtgctgcccctctccaatctgggtgacagagcaagaccctgtctcaaaaaaaaaaaaaaaaaaaaaaaaaggctatcactatactatctataactattcttmattaggataactaggtattttccaacagtggaaactccaaacagactaaattgttgtacatcaaggtgaattgtcatagttaattcctttgcttgcaactgtccaataaatggatgaggactcacttcaccaataaataagaaatgtgaacagcacatggggcctgtagatgccttttgcagggccctctttttctcttcctaaagttgcaatttgcgtgtttctgtagatgggcacatcatagaaactgtcatcctagatc

SEQ ID NO: 612570 - DNA, 635 bp, Homo sapiens
tgacaagtctgcctatttacatgatgtacattgtgtcccactactggtaatagaagctcagcagctgattgactgttaggttattttcaaagctcaatattcacaataatctaacagacacccacacaaccacaaagacagacaaggctctcataacctgcaaaagacaaggtgcacatttcttctttccatcccagcaacaaattgccaacccagccagcacttaagttggggtaaaaattaattaaaagaagaatctaccaatgtagataaaagaacaaaaaagctattgcagctgtcttctccataacagaggcctgtgatttgaattttaatgtttcaatctactttctgctcttgtgtttattttattatttattttttgtcactatctcttatttgtagatacaaatttttcacatttaaaagctattttaaatataatctttaaaaggagaaacattattttttttaattgcacaaaatactgaaggtgagwtccactgattggaatgcaaaatgggacaatatctctggaagcaattttatccagataaatcaatagctttaaaacaattcaaaaccttggacctaatacctctacttctaggaaggtagcctatgaaggtttctgc

SEQ ID NO: 612571 - DNA, 563 bp, Homo sapiens
aatgtagataaaagaacaaaaaagctattgcagctgtcttctccataacagaggcctgtgatttgaattttaatgtttcaatctactttctgctcttgtgtttattttattatttattttttgtcactatctcttatttgtagatacaaatttttcacatttaaaagctattttaaatataatctttaaaaggagaaacattattttttttaattgcacaaaatactgaaggtgagttccactgattggaatgcaaaatgggacaatatctctggaagmaattttatccagataaatcaatagctttaaaacaattcaaaaccttggacctaatacctctacttctaggaaggtagcctatgaaggtttctgctgaaggatgtttatcacagtattatttataatgcaaaaaagccaaagaggagacctgaaatgtttcaaagatgaaaatggtttgataaacaacatttttttagacggggtctcactctgttgcccaggctggggtgcagtgccacgatcttagctcactgcaaaatccatctcccaggttcaagcaattc

SEQ ID NO: 612572 - DNA, 573 bp, Homo sapiens
atacaaatttttcacatttaaaagctattttaaatataatctttaaaaggagaaacattattttttttaattgcacaaaatactgaaggtgagttccactgattggaatgcaaaatgggacaatatctctggaagcaattttatccagataaatcaatagctttaaaacaattcaaaaccttggacctaatacctctacttctaggaagstagcctatgaaggtttctgctgaaggatgtttatcacagtattatttataatgcaaaaaagccaaagaggagacctgaaatgtttcaaagatgaaaatggtttgataaacaacatttttttagacggggtctcactctgttgcccaggctggggtgcagtgccacgatcttagctcactgcaaaatccatctcccaggttcaagcaattctcctgtctcagcctcccaagtggctgggaatacaggcacaccccaccaagcctcactatttttttgtattttagtagagatggggtttccctgtgttgcctaggctggactcaaactcctaagcttaggcaatccatctgtcttgaactccca

SEQ ID NO: 612573 - DNA, 227 bp, Homo sapiens
atgcctggtgacctctgctgggctgcccagcaggctctcagtggatggtcactattttaggcttgctcaggcatgtcttgtgaccttctcagtgttgcacagatggaaaacaggaacttacaaaatccttacaaacttacagaaatagttacaaaaatarttatgagagcagagcaaagacatactggcctaggaaagaatctcaaagggggaagctgataagaaga

SEQ ID NO: 612574 - DNA, 421 bp, Homo sapiens
gcaatccactctaggagtattaaagtgccagtgtggactgaggcaccaaagaatcacattattatgtcatataacttgccttattyatagtgacccatgggcttggaaacagaaccacttgcagctgtcagggaagtaagtgcacagtgcctgacctttgctgcagcctcctccccactggtcttccatgagaagatcaccccttgagagtgtcgagagattcctgttaaatgctaaagaccacaggagagtttgggagggggaagatgtttggggagccgcttagttgtcctgaggtgcccatcacccttcaccatttcagcaatatggatcttccaaggatctgggaatgggaaccaggcataagacagatacatgtgggtgagaagaggccagagtctttctctgtgtaggtaccatc

SEQ ID NO: 612575 - DNA, 597 bp, Homo sapiens
accacagtcctttgtcatcttattgtctccattttacagataaagaaacaggcacagagggtttaagtaacatgtacgaggtcacacaatcacagctagtaaagycaggattaaagtccagtcagtcggcattcaaagcctgtgctcctgccccaaaatgacaagtaatgacttaaaggcaagaaaaacagaccctcctctacccaccatcctcatacacagccttccagcccaggatctgagccattcattcatttgctctcatattcattcattcattcattcattcattcagttcttcatcatacatttagtgaagctctgtcatggaatgtccacacagaaggtacaaaaatgaggcaggtgtattttctcccatctaaagggggatgaccacgtgaagagaactgatgggctgcgtgtccagtggccttacggggcagtggtggagggtggcccaggtcatccactctctggggaggcagaaccagaagcaccagttggacaactgctaaagagatgtttatgcaggcttatatgttaagtcctatattttgaaagctttttaaattttttctttaagattttagatgctta

SEQ ID NO: 612576 - DNA, 590 bp, Homo sapiens
aggcaagaagcagctagttctctggagtaccaaaaagtaaacttcagccagttctggaagcagataaatagcaggaaatatactttcacatgggctactttctcaayagttcttgcttgcaagagctctagggaaagtatgagttactgggtaacaatgtaatagaaaaggggccagccttgggaaaaattgcagtggaagaaaatcagtgtctcctcatttacatctttctttctcctcttcctttgtaatgctgcctttcttggggtattctttcccctagaataccctgcctgtcaccccacaacaacctgctcttgagactgcatttctaatacctataatgagatgttatgtcaatgcctcatctctcagtgtgtgtatagacatattaagctttctctctatgctgtgttttctcatgcaggaatatcagacattaatgaaccagtaaagaggatgctggggtgcagaagagctttcccagtgtcccgggagccattctacacagcatcctacagcatgactatggatctgctgtgcttagtttctttacttgtgaaaacagagtaatagtagcacctacctca

SEQ ID NO: 612577 - DNA, 380 bp, Homo sapiens
ggaaaactgccttagggctggaggtrggacatacgggcaacaatactgctctgtaaggcattgagatgtttatgtgtatgcatatctaaagcacagcacttaattctttaccttggctatgatgcagagacctttgttcacgtgtttatctgctgaccttctctccactattatcctgtgaccctgccacaaccctctctctgagaaacacccaagaatgatcaataaattctaagagaactcagaggctggcaggatcctccgcatgctgaacgctaaaaaaaaatgggcccccttatttctttctctatactttgtctctgtgtctttttcttttccaagtctctcattccacctaacgagaaacacccacaggtgtg

SEQ ID NO: 612578 - DNA, 380 bp, Homo sapiens
ggaaaactgccttagggctggaggtaggacatacgggcaacaatactgctctgtaaggcattgagatgtttatgtgtatgcatatctaaagcacagcacttaattctttaccttgkctatgatgcagagacctttgttcacgtgtttatctgctgaccttctctccactattatcctgtgaccctgccacaaccctctctctgagaaacacccaagaatgatcaataaattctaagagaactcagaggctggcaggatcctccgcatgctgaacgctaaaaaaaaatgggcccccttatttctttctctatactttgtctctgtgtctttttcttttccaagtctctcattccacctaacgagaaacacccacaggtgtg

SEQ ID NO: 612579 - DNA, 380 bp, Homo sapiens
ggaaaactgccttagggctggaggtaggacatacgggcaacaatactgctctgtaaggcattgagatgtttatgtgtatgcatatctaaagcacagcacttaattctttaccttggctatgatgcagagacctttgttcacgtgtttatctgctgaccttctctccactattatcctrtgaccctgccacaaccctctctctgagaaacacccaagaatgatcaataaattctaagagaactcagaggctggcaggatcctccgcatgctgaacgctaaaaaaaaatgggcccccttatttctttctctatactttgtctctgtgtctttttcttttccaagtctctcattccacctaacgagaaacacccacaggtgtg

SEQ ID NO: 612580 - DNA, 380 bp, Homo sapiens
ggaaaactgccttagggctggaggtaggacatacgggcaacaatactgctctgtaaggcattgagatgtttatgtgtatgcatatctaaagcacagcacttaattctttaccttggctatgatgcagagacctttgttcacgtgtttatctgctgaccttctctccactattatcctgtgaccctgccacaaccctctctctgagaaacacccaagaatgatcaataaatwctaagagaactcagaggctggcaggatcctccgcatgctgaacgctaaaaaaaaatgggcccccttatttctttctctatactttgtctctgtgtctttttcttttccaagtctctcattccacctaacgagaaacacccacaggtgtg

SEQ ID NO: 612581 - DNA, 633 bp, Homo sapiens
tactgaaaccttaaactcttactgattctttaaactgtccccattccagttttctctacagcaagtagctctcaatgtgtagtcctcagatgggcagcatccactggaaaactgctaggaatgcacattctcaggcctcacccaagatctgctgaatcagaagctctggggtggaacccaacaacctgcattttaacaagccttccagatgactctgaagcatgctccatactgacaactaatgcaatgcattatggtaaatttgcccacccaccctctggcmaaaataacatctaattgcatttcctttttagtttgatgagtacttatctcggtatcttttaattcacctgatgtttctgttggtaacaaaaccaacaaaaacgttgtaaatttggtacactgaaatgcaaaataagagtgaaggagaggacactggtagtgaaatcaacaactataaagcagtttggggaaattcagtttagggacaggcattatatctcaaaaatccagtgagcatcacattataaaagcacggctccaaaggtgacgatttcatgtgaggacccttcagtcacaaacagaggattagctcacgttcattatttccaaatttccctcaccaaagcacac

SEQ ID NO: 612582 - DNA, 600 bp, Homo sapiens
gggctctgcaccaaacacaggctcctgaatggaagataggtgacattgtcactgtcctcagtccctgccctggcttgcctagaatgcaataaattaagttgttataggtggtgtgtacttgtacctaaagaygtcactgctagctgagaggaaataagcccctgaagattgttagggcagtgaaattattctttaagatactgttatgggaaatatatgacataatgcatttagcaaagcccatagaaccgtacaacacagggactaaatcctaatataaactgtggatgttagttaatcataatgcatgaatattggttcatcagttgtaacaaatgtgccacaccaacacaaaatgttaacaataggaaaaaccagaggctggtgggggaagagagtatacaggaaccccatatattttgctcacattttctgaaaacctaaaactggtctaaaaatcaaagtctattaatttttttaaacaccttgaaacagtatgtctatcttctattagttccctgcctttgtgaaaataagagcagacttttggtttttcttctttaggacaagaattatatttttataataactcctccattt

SEQ ID NO: 612583 - DNA, 600 bp, Homo sapiens
gggctctgcaccaaacacaggctcctgaatggaagataggtgacattgtcactgtcctcagtccctgccctggcttgcctagaatgcaataaattaagttgttataggtggtgtgtacttgtacctaaagatgtcactgctagctgagaggaaataagcccctgaagattgttagggcagtgaaattattctttaagatactgttatgggaaatatatgayataatgcatttagcaaagcccatagaaccgtacaacacagggactaaatcctaatataaactgtggatgttagttaatcataatgcatgaatattggttcatcagttgtaacaaatgtgccacaccaacacaaaatgttaacaataggaaaaaccagaggctggtgggggaagagagtatacaggaaccccatatattttgctcacattttctgaaaacctaaaactggtctaaaaatcaaagtctattaatttttttaaacaccttgaaacagtatgtctatcttctattagttccctgcctttgtgaaaataagagcagacttttggtttttcttctttaggacaagaattatatttttataataactcctccattt

SEQ ID NO: 612584 - DNA, 600 bp, Homo sapiens
gggctctgcaccaaacacaggctcctgaatggaagataggtgacattgtcactgtcctcagtccctgccctggcttgcctagaatgcaataaattaagttgttataggtggtgtgtacttgtacctaaagatgtcactgctagctgagaggaaataagcccctgaagattgttagggcagtgaaattattctttaagatactgttatgggaaatatatgacataatgcatttagcaaagcccatagaaccgtacaacacagggactaaatcctaatataaactgtggatgttagttaatcataatgcatgaatattggttcatcagttgtaacaaatgygccacaccaacacaaaatgttaacaataggaaaaaccagaggctggtgggggaagagagtatacaggaaccccatatattttgctcacattttctgaaaacctaaaactggtctaaaaatcaaagtctattaatttttttaaacaccttgaaacagtatgtctatcttctattagttccctgcctttgtgaaaataagagcagacttttggtttttcttctttaggacaagaattatatttttataataactcctccattt

SEQ ID NO: 612585 - DNA, 614 bp, Homo sapiens
ttgttagggcagtgaaattattctttaagatactgttatgggaaatatatgacataatgcatttagcaaagcccatagaaccgtacaacacagggactaaatcctaatataaactgtggatgttagttaatcataatgcatgaatattggttcatcagttgtaacaaatgtgccacaccaacacaaaatgttaacaataggaaaaaccagaggctggtsggggaagagagtatacaggaaccccatatattttgctcacattttctgaaaacctaaaactggtctaaaaatcaaagtctattaatttttttaaacaccttgaaacagtatgtctatcttctattagttccctgcctttgtgaaaataagagcagacttttggtttttcttctttaggacaagaattatatttttataataactcctccatttcttttgatatatctaattatttctttaataactggatcaaacactttaatattaatgaaggtagagccaataggatatcctggtagattggaagagacagtgagagaaacagaggcataaaggatgatgctgaagtttttggcttgagcaagaagaagcagggctggtactagggtgagcca

SEQ ID NO: 612586 - DNA, 614 bp, Homo sapiens
ttgttagggcagtgaaattattctttaagatactgttatgggaaatatatgacataatgcatttagcaaagcccatagaaccgtacaacacagggactaaatcctaatataaactgtggatgttagttaatcataatgcatgaatattggttcatcagttgtaacaaatgtgccacaccaacacaaaatgttaacaataggaaaaaccagaggctggtgggggamgagagtatacaggaaccccatatattttgctcacattttctgaaaacctaaaactggtctaaaaatcaaagtctattaatttttttaaacaccttgaaacagtatgtctatcttctattagttccctgcctttgtgaaaataagagcagacttttggtttttcttctttaggacaagaattatatttttataataactcctccatttcttttgatatatctaattatttctttaataactggatcaaacactttaatattaatgaaggtagagccaataggatatcctggtagattggaagagacagtgagagaaacagaggcataaaggatgatgctgaagtttttggcttgagcaagaagaagcagggctggtactagggtgagcca

SEQ ID NO: 612587 - DNA, 600 bp, Homo sapiens
gggctctgcaccaaacacaggctcctgaatggaagataggtgacattgtcactgtcctcagtccctgccctggcttgcctagaatgcaataaattaagttgttataggtggtgtgtacttgtacctaaagatgtcactgctagctgagaggaaataagcccctgaagattgttagggcagtgaaattattctttaagatactgttatgggaaatatatgacataatgcatttagcaaagcccatagaaccgtacaacacagggactaaatcctaatataaactgtggatgttagttaatcataatgcatgaatattggttcatcagttgtaacaaatgtgccacaccaacacaaaatgttaacaataggaaaaaccagaggctggtgggggaagagagtatacaggaacmccatatattttgctcacattttctgaaaacctaaaactggtctaaaaatcaaagtctattaatttttttaaacaccttgaaacagtatgtctatcttctattagttccctgcctttgtgaaaataagagcagacttttggtttttcttctttaggacaagaattatatttttataataactcctccattt

SEQ ID NO: 612588 - DNA, 614 bp, Homo sapiens
ttgttagggcagtgaaattattctttaagatactgttatgggaaatatatgacataatgcatttagcaaagcccatagaaccgtacaacacagggactaaatcctaatataaactgtggatgttagttaatcataatgcatgaatattggttcatcagttgtaacaaatgtgccacaccaacacaaaatgttaacaataggaaaaaccagaggctggtgggggaagagagtatacaggaaccccatatattttgctcacattttctgaaaacctaaaactggtctaaaaatcaaagtctattaatttttttaaacaccttgaaacagtatgtctatcttctattagttccctgcctttgtgaaaataagagcagacttttggtttttcttctttaggacaagaattatatttttataataactcctccattwcttttgatatatctaattatttctttaataactggatcaaacactttaatattaatgaaggtagagccaataggatatcctggtagattggaagagacagtgagagaaacagaggcataaaggatgatgctgaagtttttggcttgagcaagaagaagcagggctggtactagggtgagcca

SEQ ID NO: 612589 - DNA, 450 bp, Homo sapiens
cctccaggcccatgccccgaatggccttcccttttctgagtcctctctaccactctgggaagtaaaggatgcttatgtcagtggtggctgggctggctctgccatttagaaagtgctggctggggctgggagtaagaaatatattgctttctctctttacagtggggtccttaactcttctttgttttcatttgtggattcctgttccaattctatagcaacggaaaaatcctatttaacaccttatttcacattagttattgctgttaattattttgatcattcttcaagtttaaaatataaaatattygtattagaaaataaagggccaatgatgataaattaatttcctaaggtcactcagccgagaaacagttaattctatttctgcctgattccaaagtccatgccccctactacacctcatgactgcccttggtaaagtattta

SEQ ID NO: 612590 - DNA, 450 bp, Homo sapiens
cctccaggcccatgccccgaatggccttcccttttctgagtcctctctaccactctgggaagtaaaggatgcttatgtcagtggtggctgggctggctctgccatttagaaagtgctggctggggctgggagtaagaaatatattgctttctctctttacagtggggtccttaactcttctttgttttcatttgtggattcctgttccaattctatagcaacggaaaaatcctatttaacaccttatttcacattagttattgctgttaattattttgatcattcttcaagtttaaaatataaaatattcgyattagaaaataaagggccaatgatgataaattaatttcctaaggtcactcagccgagaaacagttaattctatttctgcctgattccaaagtccatgccccctactacacctcatgactgcccttggtaaagtattta

SEQ ID NO: 612591 - DNA, 593 bp, Homo sapiens
gcaagtgaggaagtgtggagaccagttagggctaccacactcacatgggaaaggtgagggagactgggacttgggtgctagcagttaagatggtgagaagcagttgggttttagatgtgttttgaaagtagagctgacagaatttgctgatggattagatgtgagatgtttgagaaagacaaaaaggccaagcatamttacaaaaaaatttggcctacatttacagatatgcagaggattaggtttgaggggtaaattctagaggttgctagtgaacatgttgagtgttatctgaattcttgatatccaagtgtagtggttgagaaggtaggtcagagaatgagtcaaagaatgacaaaattttgaagatcatcaccatgatctttttgggcaagattttctccagtcttgggaaaaatatgaaactgaggtacagaaagattaactgactttctgacaaattcaaagctagaaaacagccattatcctgaggaaactgacgcaggaacagaaaaccaaataccacattttctcacttatatatgggagctaaatgatgagaacacatggacacatagaggggaacaacacac

SEQ ID NO: 612592 - DNA, 593 bp, Homo sapiens
gcaagtgaggaagtgtggagaccagttagggctaccacactcacatgggaaaggtgagggagactgggacttgggtgctagcagttaagatggtgagaagcagttgggttttagatgtgttttgaaagtagagctgacagaatttgctgatggattagatgtgagatgtttgagaaagacaaaaaggccaagcataattacaaaaaaatttggcctacatttacagatatgcagaggattaggtttgaggggtaaattctagaggttgctagtgaacatgttgagtgttatctgaattcttgatatccaagtgtagtggttgagaaggtaggtcagagaatgagtcaaagaatgacaaaattttgaagatcatcaccatgatctttttgggcaagattttctccagtcttgggaaaaatatgaaactgaggtacagaaagattaactgactttctgacaaattcaaagctagaaaacagccattatcctgaggaaactgacrcaggaacagaaaaccaaataccacattttctcacttatatatgggagctaaatgatgagaacacatggacacatagaggggaacaacacac

SEQ ID NO: 612593 - DNA, 404 bp, Homo sapiens
ttttgcaatttcaaattttgctgctataaacatgtgtgtgcaagtatctttttcgtataatgacttcttttcctatgggtagaaacccagcagtgggattgctgaatcaaatggcagttctatttttagatctttaaggaatctccacactgttttgcatagtggttgtaccagttctagtttacattcccaccagcagtgtagaagtgttcccttttcatctcatccacaccaacatctatyattttttgattttttgattatggccattcttgcaggagtaaggtggtggtatcacattgtggttttgatttgcatttccctgatcattagtgatgctgagcattttttcatatgtttgttggctatttgtatatcttcttttgagaattgtctattcatgt

SEQ ID NO: 612594 - DNA, 567 bp, Homo sapiens
agatgacttattgtaagaattgggtaatgtggttatgaaagctgggaggtcccacagacttctgtctgtacgctgtagaaccaggaaagccaatcatgtaattcagtcatattctgaaggtctgagactagggggtgaggagaagggaggcaatggtggtgtaaacctgtaccaagtcgaagaaccagtagtgttgatgtcatagagcaggagaagataaatgtcccagctcagacagagactgtaaatttgccatttctccactgttcgttctactgaggccctcaaaagatttagtggtgtctgygcatattggggagggtcatttgttttactgagttcaccaattcaaatgcagcttcctttcatcattcacacacttactgcccaaaagcttctttctctgccttgacattgttaggtggcctatttcagtaaaaagcaaagtctctctgaggtgttggctggtactgtttaaacccctgttagctcattagatgctctgcattttaataggggtctctggaacacacaggagttttatgggattttttgttttgttttgtt

SEQ ID NO: 612595 - DNA, 567 bp, Homo sapiens
agatgacttattgtaagaattgggtaatgtggttatgaaagctgggaggtcccacagacttctgtctgtacgctgtagaaccaggaaagccaatcatgtaattcagtcatattctgaaggtctgagactagggggtgaggagaagggaggcaatggtggtgtaaacctgtaccaagtcgaagaaccagtagtgttgatgtcatagagcaggagaagataaatgtcccagctcagacagagactgtaaatttgccatttctccactgttcgttctactgaggccctcaaaagatttagtggtgtctgtgcatattggggagggtcatttgttttactgagttcaccaattcaaatgcagcttcctttcatcattcacacacttrctgcccaaaagcttctttctctgccttgacattgttaggtggcctatttcagtaaaaagcaaagtctctctgaggtgttggctggtactgtttaaacccctgttagctcattagatgctctgcattttaataggggtctctggaacacacaggagttttatgggattttttgttttgttttgtt

SEQ ID NO: 612596 - DNA, 583 bp, Homo sapiens
aaagttttctgttacttattatttaactgccagtgtactttattgcaatatgccagtgaactcacttgatatacatccttctggccttcatcccctctcaagtgatgatataataagatatattatttagagggcagatatagatttgacttagtcataaaccagtgtaacataaggttcctgacttttagatctgacacaaawtgctctcttttagtggtagtacagaatgttgaagtaaggctggatatgtaagcttacatttttatttcattagagaatgcaaaactcattgtatttaactgacagtctcaaaacttctctgccaaatcttaaagtctctagacttctgaattccagaaatgagttcactgacctaaatatttggaaagggaggaaaatgcgttttcccaaaaaggaaataaatctaccaaagtaaaattagggagggagagacattctccttggaataagcatgtttggatttatatacagtgcattagtagatgatgtattttggtgcattgtgataatcagaaaagttacagtatgtccaggactctgtacacaatagtgttaagca

SEQ ID NO: 612597 - DNA, 583 bp, Homo sapiens
aaagttttctgttacttattatttaactgccagtgtactttattgcaatatgccagtgaactcacttgatatacatccttctggccttcatcccctctcaagtgatgatataataagatatattatttagagggcagatatagatttgacttagtcataaaccagtgtaacataaggttcctgacttttagatctgacacaaaatgctctcttttagtggtagtacagaatgttgaagtaaggctggatatgtaagcttacatttttatttcattagagaatgcaaaactcattgtatttaactgacagtctcaaaacttctctgccaaatcttaaagtctctagacttctgaattccagaaatgagttcactgacctaawtatttggaaagggaggaaaatgcgttttcccaaaaaggaaataaatctaccaaagtaaaattagggagggagagacattctccttggaataagcatgtttggatttatatacagtgcattagtagatgatgtattttggtgcattgtgataatcagaaaagttacagtatgtccaggactctgtacacaatagtgttaagca

SEQ ID NO: 612598 - DNA, 550 bp, Homo sapiens
tgaaacctttaggagttggttaggtyatgagggctccaccctcatgaatgggattagtgctttcataattgagcttgagggtgatatatgagtgaaaaataaattatttaggcagatagtgagggtaaggaagtccttggaaaggtttcccttttaatgaaaagcagcccccaaataatttgcttttctaatgcagagtagcctgtaaaattgagctgcagacataaacaagcaagctagaagcttgcacaggtgaatgctgacagttgcgccaataggaaaaggctacccatgaataggcatgttcaaaatggcggctccatcttctcttcactttgccaaccacatgtacagtaaggagcagacaagatggccaagtagaaagcctatttgcataagattagggtggggccatacagcctttcctgctgcaccaggtaaatgtcacacctgatagaaccaatctgtgcatcccacataaatcagacaccgcctcctcaagcctgcctataaaatctggcacaggccagtgtggtgactcatgcctgca

SEQ ID NO: 612599 - DNA, 586 bp, Homo sapiens
tttaacagtttaattgagcaagaaaggtaccaggtttttttccccagaagtttatatttctttaaatcttgcttgcaatagtatacttcctacatttatgtgttaattataattatagggaaattcattttaatgcttgtaaatattcatactttttaaatgcttaattgtctgaacatatatatttgttttacactaaccaaaccctataaaggaacagaaatagatattaagaatgtttctgaggcgaatcatataatatcaggctctggatacttagcacatgcagtgtccattaagagtagattgtttatggcttgtggattgctattgccraaatgaccatttcaacagttgacagtgctaggatgcctaactgctaatactgttgcaatgcacctattcaaatcaggcataacatgtcaagtcaacacatttttatttgatttgcatatattgatactctatatatacaactcaagttgctcagatattctatgtgcataaaaaatctatgctctcgaggcaggcagatcacgaggtcaggagatcgagaccatcctggctaacacggtgaaaccccgtc

SEQ ID NO: 612600 - DNA, 582 bp, Homo sapiens
aatggcaaggacagaggtgtgggtgttccctctaatgggagagattttttacctaagaaataaatatacactcatttgaactcttcttggattaaaaaagaaaygaaaacaatccgctaatgcctcttatactaattatcttagtattattcactctctcctttaggacttattggaatgttgtatttttatgataatctattattaaacctcctggctggtattaggtaggaaatcctagtagcatatgttgtgttgtataggatatcaccttttagattatcaaaagacaaaattgaaaatctagtttaaagatcttaattgattttactcgccattctagaattgggcaacacttcattttataaggtagaatgagtgttccaatgacccgagaaggggaaattgattttgtagacaagagctaaagaaagcagaaaaaaggaaaaagtggatgaccattgcaaagttactttccttgtaaggtgggaacagggaagcagaacagaagaaaaataactggctaacatcaggttacattttgttgtaaggattaaagatagagggaactttattgtcatg

SEQ ID NO: 612601 - DNA, 575 bp, Homo sapiens
agtgaggtaatgtatgtgctaaaaagcttgatttagccattccacaatgtatacatatatcagatcatcatattgtacaccataagtatgtacaattttactagccaattaaataagagaaaaatgaatgcataagttttcatcatatataggtattgatttttccagagagatgatcagtcacaaataatggtatcctcattcatgcttttttaaaaaagccaaatgtagacttgaggctctagcaaatgagtgctgacttctatcttactgcatccttgaatgcatatacgcttactcagtgatcgtttgtaaaagacaaagcagggtgcagaatggtttcatttcacacctggaatcagctctctggggaaattttaagatcaaaacagtaaaacaaacagcaaggtccagtagaaattagttcttaacttgctgcattttaacacctctctggccatacaaatatgcccrcacaggtaactagggtagagaagtggacaccacctagtgtatgctaagtaattggatcatcacctgaatgaattcttccacccttatatggtactttcaat

SEQ ID NO: 612602 - DNA, 653 bp, Homo sapiens
caacattttatcttctaaatactactctttgaaaagtagatgagaagtggaaaagactggtgtcaagaaatccagttaaggagctcttataataacacatacagtagaagaaccaaggtagtggcagtgaggtgagagmgaggaatttggattcctgaaatactaatttgcagaatcaatgggatttggtgattgctacatttggagaagtaaggaatcaaaaagtgaatagcaagtcaagaagttataggaatttcaaattctttgacatcaagaaacatgaattcttagcaacagttttggttgattgaactgtactgtgtactcctgtgtcttctgagtttctctttatgtagatatacgttcattaaacaaattcaacaaagacttattgaacgaatagttaaactcatgagtgattgcaagggaatgaataaatgaataaatacaggcacaaatgaaagaacaaatgaatgagaggaaaatcaaggaaacaaagagtcaatgaacatatgaaagatttcctcatcagcaaggatggtaaatcatatactcaaaatagagcctcctagttttaggaaatctagaactcaagatgctaaatggggtgcaaaaataaaatgcacaacaaaaacagcctaatgaagcttcat

SEQ ID NO: 612603 - DNA, 589 bp, Homo sapiens
ttcattcaaaaaatatttgagcacttattatatgccagacactgggctaggcamtagtttaattaaaaagtttaccactactttactccatctagatgtgacccaactatgcccttgaatatctgcaccagataatatcacctgtgaattgtctgcaaacttcagacttggtgttttagattgctggtcactctcaggaggttcaggcttcaactttccagtttcagaccaagcttgttccttccttgagggagttcaaggcatggtcttgattaaagacttccagaaagagtccatacaattgagaggtaagagcagctttaaccaaaaccttggggctgcttacctactcaaggtttcttcaagtgtgtcattctttctgactcaggttgttataacaccctctcatcttcctttaaccctccagctccccatctgttctccagaggaaaaactctttttctctctacatctatctccatggctttaggtcaaaccactgacatcacagctacctaccaccgggagcccatattgccctcagcaataagcaattctggcatccctgatgcttttccctcaagacttg

SEQ ID NO: 612604 - DNA, 536 bp, Homo sapiens
tatgctggacttttaagaagattgtttttactgcatttgggtagactacatcaaagttctgtcagattacctcttagtaggccaggtgcagtggctcatgcctggaatcctaacagtttgggaggacaaggcaggaggaatgcttgaggctaggaattcgagaccagcctgggcaacacaatgagaccccatctctacaaaaaatacaaaaattagctggacatagtggcacgtgcacacagtctcagctgcttgggtggctgaggcaggaggattgcttcagcccaggggcggaggcggtaatgagccatgattaaaccactgcactctggcctgggtgacagagtgagagccaagctggaaatggcacaatcataactcatggctcattttttctaaaaaaaaaagaaaagaaaagaaaagaaaaaacaaacaaaaaacaattcttagtagatttctaatcagtctctgtaatgtacatagaattatttttaaaacacamctttggccttgaaatatgatggtgatttcaatcc

SEQ ID NO: 612605 - DNA, 454 bp, Homo sapiens
ctgaggcatccaagttctttcttsttctaggcagacagcttgacccatggagagcaaggaaaagcaggttgaggcgacaacccacctgaagcagcacaaagccagggagaccccacccccagccaagggaagtagtgagtgactgtgaggccctgcccaggaaaccacttttttcccatgtatctttgcaacctgtggatcaggagatacctgagccaccagagacttaggtccgaagcaaagagctgtgtggagtcttggggaagtggacactcacgcatgcacagagacccaggagttttgtgtactctggccctggggattctggtgaggtgggagttccattcgtgcattcccctaggaagggggctgaatccagggagccaagcagagttgttctgatggccccactccaatggcacctcacaatttaggacacactggcttggaattc

SEQ ID NO: 612606 - DNA, 450 bp, Homo sapiens
aagtctgactggttatttggggctgttaagtcaacctgcccacctgaccgtgcatgagatattcctttttaatgaaatattttgatatcctagagatttttaaattacmtccctgttaattatttacatctacagcatggggaaaggtggatttattgtcatttgctagccaagctctatgtatgctttaaaaagacaccagtcctttcaatttttagaagacattgtatgttattcttctgagcctttatttaatcctaaacacacatgtgtacacacataccctcagataaactgtgtttttaagcaaatgtgtcaccaagctttgtttgagactatagacgaaaataagacatccttcacattgtgttcctcccgcttgaaagcttttcttttatacatttgcacagggtgaagccagatgggagtgctgagcttcagggagcagct

SEQ ID NO: 612607 - DNA, 450 bp, Homo sapiens
aagtctgactggttatttggggctgttaagtcaacctgcccacctgaccgtgcatgagatattcctttttaatgaaatattttgatatcctagagatttttaaattacatccctgttaattatttacatctacagcatggggaaaggtggatttattgtcatttgctagccaagctctatgtatgctttaaaaaracaccagtcctttcaatttttagaagacattgtatgttattcttctgagcctttatttaatcctaaacacacatgtgtacacacataccctcagataaactgtgtttttaagcaaatgtgtcaccaagctttgtttgagactatagacgaaaataagacatccttcacattgtgttcctcccgcttgaaagcttttcttttatacatttgcacagggtgaagccagatgggagtgctgagcttcagggagcagct

SEQ ID NO: 612608 - DNA, 527 bp, Homo sapiens
ttttaaattttaacataaaaaagacaatctgacacaattttaacattttctgaagattatcataaggatagtgtgcaatgtagagagataaagcccttttggtagaattaatacaatcatgatacaaagattttccatgtttagtattgctcagtttagtgtaaacactggcaagkggaatgctatttacatgaagctgaataaccagccttgattcttgggcataactgtgcacagaaaacaatgaagtagttacagttgttgtgggtaaagttcccagtttcaccagaattgctccaggtttttgttccctgtactctccgtttggcttgctccaattccgtacttcagtactattcatttaccttaaacccctgtcccctttttacaaacataaaaatctcatgcattttaaaatgttgtttaatatatcaaaataaattacatatcaagactaaaagccagttgaaacaatgggctatgcacagccttgacatcagtctatatcccccaactccagacaccac

SEQ ID NO: 612609 - DNA, 574 bp, Homo sapiens
aagctcaggtgctcatattcttattataagttaaaaaaacattttttyaaaagttggtgaataataatttgcaactttatgtggcaaaatttctatgttcaattctgtttcaatattatctttttttcctccgccttttccagcaatgtttcatcataaagcttggatatatctatgaatcagatttagaaatattaataacatcaactacagaaataaattttttattaattgattcaggtactgtatattttctttacattcattaccttttaaaaaaaatttcagaattctatgaattagttaccattttttaactccttaatgaacatgaggaaaatgaggcttaggaagattagtagcttgcctgaaatcacctaaataatgagtagaataaatgaaatggaagtcaatttcatttggaggaagtcagcctccaaagaacatctaaattatacccatatatttttcttaattttgtagaatatagaaataaaaaatcaagtagatacagaaagcttgagtgaaatatttataaacagttattaacattttttgaaaacacagctgaact

SEQ ID NO: 612610 - DNA, 629 bp, Homo sapiens
  misc_feature 619: n = A,T,C or G
ggcttgggtttttattaactcaaaggtggaatcaaggtgaaagttcccacatgagggcagagcttttgtgctttaagtatcttgctagtccccaagaagggaacatacagccttcctattaaattgaattaaattaaattgccccaatgtgaggaggaagggaaagaagaagtgagactttaaaaaattgaggctttcaaagttgtcagcagtcaaacatcataacacgcagtcagactctttattatatagagaaagtaacaatagaaagtaataataaaartgataatagaaagtaacaataaaaatgtagaaagtaacaagagaaacgtctgtaaaagtaacaatagaaataacaatagaaagtctcagaaatagaggaaataatgtagagctaaggggaaattttagaactgaaataataactaaaatttaaaactgaacaaatgggctcaagaacagaatgaagagaatggaaaggacgaataactagaagacaaaatatttaaaattactgaatctgaacaaaagagagaaaaatagaccagaataaatgaacagagctttaagggtctctaggaccaaaacaaaaaattgatcattcatgtcattggaggtntaggagagca

SEQ ID NO: 612611 - DNA, 592 bp, Homo sapiens
ataatcagtatcttgagaaataacagagcccaggctggaggcttcctcaggggttgtttaaaaatgcacaaaagcaatagattggaaatacttgtcttatggtcaaaaggcatgaagacagaaggggagtttgggatacaagaagagcaacctgccatgatttgaggaaccaagaaaatatctacatacagatattcaaaaataattttcttaaaatagagcttaaagggctacttgattgtgtagaagacagcagagtgcttttttccttgaaaytatagttctacttctgctctgtttcccctttcctaggaaaaaaatatcaacaagttccacatttttactaacatgatttccctatttacctatatcatgtgaaccaattgatattacagaaaagcctttttcagtggaagagattataataactatcaacattttgggaggaggtagaaggagatttggggtgttatatgttacataatttttcatgtatttcagcagtaagaaaatagatattatctaaaatagtaaatcaatacataaaattaataaacattatttaatagatcgagggaactaaaccatgagg

SEQ ID NO: 612612 - DNA, 559 bp, Homo sapiens
cttttttctcatgagtttatatatcatatttattaattgaaacaaaatgtatagtactatctgatactcaagacaatgatatttaaatatgaggaagataaaaactaaatggaagtgagcytcctgcacattacttagagtggtaaaatgcatatgtatattgtaatacccagagccaccactgtgaaaactgtacaaagagatacacaatggtccttggtatttatgagagattgatttcagaccctcttttgaatatcagaatctagggatcctcaagtccttaatacaaaatgacatagtatttgcatataacttacacacattctcctatatactttaaatcatctctagattacttatcatacctaataaagtgaaaatgtcgtgtaaatagttgttacactatattgtttagagaataatgacaaaagaaaaatgtctataggtgttcagcacaagtgcaatttttaaaaaatattttccattaatgtttggttgaatccaggaatgtgcaacccacacatatgagggctgactgtactcaaaaacaccataa

SEQ ID NO: 612613 - DNA, 560 bp, Homo sapiens
caataatctgtgaaaaaattcaaagtaatgcaaaaccaatcaaactattaggtggcctaattgtgctatggtaaatagagcaaaaccactcaatgtagaaattgagaataaactactttaccattctaaackatatgtttcccaattcaaaaataaatacatatacacacactattgatataggctaaccattctaactatgaggtggcatagctaaggtcttattgtcacactgtaaagctgctatttctatattgagccagaaattgcttataagcaaggtgggaaaagcttaaggaggacagaggatggggtaaggatttgaggaggacactaaaaatgggatattgcattttaactgaggattttcataaaacataaattactgaaagtatgagaaaactgtgggaaagtaaaaattggggtggccatattttcttataactattacgagcttttaagttgagaagaaatcataaaatcaatgaattcgggggctgttttttgaaaaaaattaataaaatagactgttagactaataaagatgaaaataaagaata

SEQ ID NO: 612614 - DNA, 560 bp, Homo sapiens
caataatctgtgaaaaaattcaaagtaatgcaaaaccaatcaaactattaggtggcctaattgtgctatggtaaatagagcaaaaccactcaatgtagaaattgagaataaactactttaccattctaaacgatatgtttcccaattcaaaaataaatacatatacacacactattgatataggctaaccattctaactatgaggtggcatagctaaggtcttattgtcacactgtaaagctgctatttctatattgagccagaaattgcttataagcaaggtgggaaaagcttaaggaggacagaggatggggtaaggatttgaggaggacactaaaaatgggatattgcattttaactgaggattttcataaaacataaatyactgaaagtatgagaaaactgtgggaaagtaaaaattggggtggccatattttcttataactattacgagcttttaagttgagaagaaatcataaaatcaatgaattcgggggctgttttttgaaaaaaattaataaaatagactgttagactaataaagatgaaaataaagaata

SEQ ID NO: 612615 - DNA, 651 bp, Homo sapiens
atctacttttcagactgaaaattattttatagatatcaagataaattagtattatttttccaggatgcatatccccaagaaatccaaagcaaatattctttttaaaaaaggacaacttttaaaaactttaggttcaaggctgcatgtgcaggtttgttatacaggtaaatgggggtttggcgtagagattattatgccacccaggtatgccacccatcgcatagtagattttccatccttctcctccttccctccaccatcatataggcctcagtgtctgttgttcccttctttgtgtccatatatactcaagagaacattctattttttactggaaaaaagaattatactttggcttaaaatagtctagtattcataagggagaagtagcaaacacaaagttctaatatatcaatggaaaattctgttgcatttgaaatagatatttaaaccttgatataatcaaataaagaggagatattagccagcagctaataatgaaattgcctggtaaagcataaagttgcctcactgaattattgtgggtttgaaagrtttgtgacaataactgcttcacacatttaataagacccattaaagaacattatatgttttttaaaagggtcatcaatgaggtcatagtagtttatt

SEQ ID NO: 612616 - DNA, 522 bp, Homo sapiens
cttcaacagtttcatcaattctggaaaaagatgtgagattcctgtgtcagagaaaatggacagtttattactcacataacagtggtggccaggttatcagcatttgtgttggttcttccagtctcattccccactgaccaaggcagagccagctgacacctgcatatgtgtggattgcattatagaaaaggaagaacctattattttagaataattttataattatttttatgatggcaaaacacatctgccattttggtctaggtatagatgtcatctttgtcttccaaggctttaagcagacccttagctctgaagggatactaactctgtcttccaaagttactcactatataaacttatacttaagaaaattaactagaatggacagttgttgtctctgtttgcaagatgtstggaaacataagagacattgaaaattgtctctcaacatctataggcctcaaaatatccacttctgcactaaagcataatgagtgagaaaggagactcaattaaaat

SEQ ID NO: 612617 - DNA, 551 bp, Homo sapiens
ggtttgcagcttgagccacatattagacgacagtgttgagtcttaagattagtaacaacaagaggaaacgtacgagtcaatagacattgaatttactttgggatatatactgggaataaatctttcataatgattcagtaacactttgaaggcagacttacatttgtaggaggattggggttcattggggttcataggcttagggagtttgttttttaattgtgttcattagatacagttgatgaaaacataatttacaaatatttctttctttcaaaattttatgagtatatacacgtatatatttatggggcacgtgagatatgttgatatatacatacaatgtgtagtaagcacatcagggtaaatggggtgtccatcacctcaagcatttatcatttgttttgtgttacaawcattccagttatattcttccagtattttttaaatgtaaaataaattgttgttgactgtaatcacccttttgtgctatctttttttgctgtttgtttgagacagggtctcactctgttgccaaggctggagtgcat

SEQ ID NO: 612618 - DNA, 492 bp, Homo sapiens
aggtagacattgagaaaatgaataacaaatagaccatggtcagactccatacaaaatggaatatctgatcaacaatctgtatacaactagcctagaaagccaatataccacttatagtaactagtccaggaagacaattttaatctataaatcaggtttgcaggaagtcagactctctctagcacccagtcaagaatctaaacaaaaaccctcataacaattagtcccacatagccaggacttcattagtaattgacagattccctaactattgcccccacttccaacttgggaccaaacaagggatagtcaaatatatacccctaaccaatcacataggatgccccacttctaattagcctwtctgcaccttccccatgccaacagcctccagtcatgtcctacctgaagccctccctcttttccatcataaagctttcccactaccctatctgcctttgagtctctgccaaaggcaaatgatggttggta

SEQ ID NO: 612619 - DNA, 558 bp, Homo sapiens
atcatttcagcttttctctgtactaataattgttaggtcagtttgcaatacacagggaaatttttcctcaaagtctgtgcaaaggtaattcaacttagacatcacaggcaaaaaatagaatgggaaatgtaaaaagtttaccaggtgtaattgaatgaaggacaagtttcctaatctcttgtttactctgttggagatatatttaggagaatttcctagtctgctttataacttcctctttggccactatcttgacctggaataattacaaaaagaatgtattagagcacagtaatattgtccacagaaaatctgtctatctgtgctcatgtcctctggcatccacctagctttgtagctcatttcktttggaaaagaaaaaataaatacagaatattgccacttcctgagttacatttagggcatgatgttgttactaaatttaccgtctttcacagtaacataacctatgcaatgagattctttgagaagtaatttattttaaataagcgttagtatagaggcatttaaatctggcagatatattgctgtctttca

SEQ ID NO: 612620 - DNA, 558 bp, Homo sapiens
atcatttcagcttttctctgtactaataattgttaggtcagtttgcaatacacagggaaatttttcctcaaagtctgtgcaaaggtaattcaacttagacatcacaggcaaaaaatagaatgggaaatgtaaaaagtttaccaggtgtaattgaatgaaggacaagtttcctaatctcttgtttactctgttggagatatatttaggagaatttcctagtctgctttataacttcctctttggccactatcttgacctggaataattacaaaaagaatgtattagagcacagtaatattgtccacagaaaatctgtctatctgtgctcatgtcctctggcatccacctagctttgtagctcatttcttttggaaaagaaaaaataaatacagaatattgccacttcctgagttacatttaggrcatgatgttgttactaaatttaccgtctttcacagtaacataacctatgcaatgagattctttgagaagtaatttattttaaataagcgttagtatagaggcatttaaatctggcagatatattgctgtctttca

SEQ ID NO: 612621 - DNA, 546 bp, Homo sapiens
agaaaaaaatacatgctgtatttccaaatagtgttgtgaattttacctggtaagggaaggtatctgtagcatttttattgtttttatacttattgctcttctgagatttttaaggtctgtaaatgtaactgagaggaaaaaagccatgaaaaacacctagagaaaggrtatgggtgatgggaaaatgcagctgctgttggctataatttatatgattactattgttcctcattttaatgtctttccaatttgttacatttactccttattgtgtatgaacgaagcagagggagttcattaactcattgtctatctttgtattcaatgtcttttccccttctgaaatacgtttatttagttaattgtggctatgccattcaatatttgcaattatgtgcctccagtatatatagaacatattttccaaagcagaattcacacaactgggagctttctttcatcaatctctatagaaaaaaaaaaagacgagaacaaacacttatttcaggaacaatacctgcattctttgccaagatagatacaatt

SEQ ID NO: 612622 - DNA, 590 bp, Homo sapiens
tgcagacaagggtactgacagaagaaaaacaaacagaaagcaacaacaaaaacaacaccaacaaaaaagactccacaaaatccccattcaaaggtcatcagcctcaaagatcaaaggaagataaatccatgaagatggagaaaaaccaacacaaaagtgctgaaaatcccaaaaaccagaatgcctcttctgctccaaatgatcataacacttctccagcaagggcacagaatggggctgaagctgagttggatgaagtgayagaagtaggcttcagaggctgggcatggtgactcacacctgtaatccttgcactttgggaggctgaggcgggtggatcacctgaggtcaggggttcgagaccagtctggccaacatggcaaaacctcatctttactaagaatacacaaattagccgggtgtggtggtgggtgcctgtaatcccagctactcaggagactgaggcaggaaaatcacttgaacctgggaggtggaggttgcggtgagccgagatcacgccactgcactccagcctaggcaacagagtgagactctgtctcaatagaaaaataaaaataaaaaagaagtag

SEQ ID NO: 612623 - DNA, 429 bp, Homo sapiens
tcaacaggggcaatattgacyccaagcaggcaaaattgatcctgggggacagagaagcagcacaatgaaaactccattggtattacatgatttgtaaccctctaaaaagccattaatatatgtgtggtaattaaattttatggggtgaggtttatgaaggaaaaatatcttaaaaatgccatataggtataattaaacagttgagagacactgtcgtggacacatagcagaggacagaaagacaagatgtctactcaggtggaatttatgttatacaaggaaaagacagttcaacacatgaatacacaatcaacatttgagatcgtgaaaaatgtcctgaataaaccaaggtaaataaaacgagatttgtgttagattaacagagatgctactttaaattggaaagttatgattcacctttctactgat

SEQ ID NO: 612624 - DNA, 564 bp, Homo sapiens
tgctcaactcaaacacatggtgaaaagagcactgtatgcttgaggacctttatgcaccacattcagtgacagctgtcagctgtgagcgtaattataagttttcattacaggktttaattcaaaccaatctttatttatttgaaggctaatattaaaatgggcatgtgaaagttgcacgtattacgagcaaaactctgcctaaaaccatacgtatgaacctaaacactcaggcataaacataaaaagccatacacatctggtgcatgcacacacacagaagctttaaattgtctttatccttctcttaatttttttttggctgagcatgtatcattgaattgctataaagtaagtgtttatggagctgtaccacaattcataatctgattactagttgtgagacaaacaaaaatagaatgtatccataaaaatgaagaagtatttattatccattgatctttgttactgtatatttataactgagttatattgatcacttgtttaaagtatgcaattatataaaatatgattttgttaatgaaatcatatttatcatataagaca

SEQ ID NO: 612625 - DNA, 564 bp, Homo sapiens
tgctcaactcaaacacatggtgaaaagagcactgtatgcttgaggacctttatgcaccacattcagtgacagctgtcagctgtgagcgtaattataagttttcattacaggttttaattcaaaccaatctttatttatttgaaggctaatattaaaatgggcatgtgaaagttgcacgtattacgascaaaactctgcctaaaaccatacgtatgaacctaaacactcaggcataaacataaaaagccatacacatctggtgcatgcacacacacagaagctttaaattgtctttatccttctcttaatttttttttggctgagcatgtatcattgaattgctataaagtaagtgtttatggagctgtaccacaattcataatctgattactagttgtgagacaaacaaaaatagaatgtatccataaaaatgaagaagtatttattatccattgatctttgttactgtatatttataactgagttatattgatcacttgtttaaagtatgcaattatataaaatatgattttgttaatgaaatcatatttatcatataagaca

SEQ ID NO: 612626 - DNA, 564 bp, Homo sapiens
tgctcaactcaaacacatggtgaaaagagcactgtatgcttgaggacctttatgcaccacattcagtgacagctgtcagctgtgagcgtaattataagttttcattacaggttttaattcaaaccaatctttatttatttgaaggctaatattaaaatgggcatgtgaaagttgcacgtattacgagcaaaactctgcctaaaaccatacgtatgaacctaaacactcaggcataaacataaaaagccatacacatctggtgcatgcacacacacagaagctttaaattgtctttatccttctcttaatttttttttggctgagcaygtatcattgaattgctataaagtaagtgtttatggagctgtaccacaattcataatctgattactagttgtgagacaaacaaaaatagaatgtatccataaaaatgaagaagtatttattatccattgatctttgttactgtatatttataactgagttatattgatcacttgtttaaagtatgcaattatataaaatatgattttgttaatgaaatcatatttatcatataagaca

SEQ ID NO: 612627 - DNA, 564 bp, Homo sapiens
tgctcaactcaaacacatggtgaaaagagcactgtatgcttgaggacctttatgcaccacattcagtgacagctgtcagctgtgagcgtaattataagttttcattacaggttttaattcaaaccaatctttatttatttgaaggctaatattaaaatgggcatgtgaaagttgcacgtattacgagcaaaactctgcctaaaaccatacgtatgaacctaaacactcaggcataaacataaaaagccatacacatctggtgcatgcacacacacagaagctttaaattgtctttatccttctcttaatttttttttggctgagcatgtatcattgaattgctataaagtaagtgtttatggagytgtaccacaattcataatctgattactagttgtgagacaaacaaaaatagaatgtatccataaaaatgaagaagtatttattatccattgatctttgttactgtatatttataactgagttatattgatcacttgtttaaagtatgcaattatataaaatatgattttgttaatgaaatcatatttatcatataagaca

SEQ ID NO: 612628 - DNA, 587 bp, Homo sapiens
taaactctaacagaacatttgatatatttaaaagaaaagcatgctttcatagcccgtgaccggatttgaaaatggaactctatactgtttgaggtttctctggactttatattttagtagattgcttttacatatgaagggctgacccctgcaacctcagctaagtattagttgtttttcagaaatagtaggaaatgatgatgmgtttttccacctctttccaagtcttctgtatggcaataatatctactgacaggatggtttgtaaagatggggtgtggcttattggcaaatgacagagagatctgtctttacaactgaattccaagccaagaacagacaaggacaaacagctaagattctccctcctaccatcaaatattttgacaatttctcactggtataagtagacatattatcataatgaataaattcaatgaatatatccttattatttattcactgaatatatccttattattatagaaataaagaacaagatatttcagagctctctaaccaacacaccaatggatataaagatcaaacacaaaggtctctagcttaaaatgaaggatgccgtttaa

SEQ ID NO: 612629 - DNA, 587 bp, Homo sapiens
taaactctaacagaacatttgatatatttaaaagaaaagcatgctttcatagcccgtgaccggatttgaaaatggaactctatactgtttgaggtttctctggactttatattttagtagattgcttttacatatgaagggctgacccctgcaacctcagctaagtattagttgtttttcagaaatagtaggaaatgatgatgagtttttccacctctttccaagtcttctgtatggcaataatatctactgacaggatggtttgtaaagatggggtgtggcttattggcaaatgacagagagatctgtctttacaactgaattccaagccaagaacagacaaggacaaacagctaagattctccctcctaccatcaaatattttgacaatttctcactgrtataagtagacatattatcataatgaataaattcaatgaatatatccttattatttattcactgaatatatccttattattatagaaataaagaacaagatatttcagagctctctaaccaacacaccaatggatataaagatcaaacacaaaggtctctagcttaaaatgaaggatgccgtttaa

SEQ ID NO: 612630 - DNA, 511 bp, Homo sapiens
aatcagagccacattgagaaaccactttacacaaactaggatggttataatcaaaaggatagaaaataagtattgataagtattggtgaggatgtgaataaattggaacactatacatttctttctggaggtaatataaagtgatgaagctactctgtacagcagtgtacagagtacactgctttaacctctcaaaaggttaaacctctcaaaaggttaaacataaccttatcacatgacccaaaaattctactagctatattatcaagagaagtaaaaacatgtctacacaaaaatatgtacataaatattcataggagcgtttttataacaaacaaaaasagaggtgaccattgaatgatatccattgaaagaaaagtggataaacaaaatgtgttataaccatacaataagttattccaccataaaaatgagaatgtacggcatggatgaacaagttacagcatggatgaaatttgaaaattattatgttaaatttaaaaagtcataa

SEQ ID NO: 612631 - DNA, 532 bp, Homo sapiens
gatgtgtcccagtgcccagatcagtgcatggaacacagtaggtgtgcaataactcactgctgaaaggataaaaagtgtatgtggcattttattcccacattttacatagaagaacgcagagaaatattagcytagcagacttttgacatattgatttggaccctttctctgtgtgccctcccttggtgatctcacctaacaatctcattgagatctgcctgggcttaaatcccatccagattacttttgtgagtagatttatagggcatatttctggtttaagactcacatttaaaggtgacatctgtaggagtaaagacatttaaagagaaaaagaaattttaaccaaataatctattttccaccttctttcgggtttcttttttctcaaataaaaaaaggtcaaaattcaaaactattactggagttaaagtaaataccatgttacatttttacaaagagttaagaggtggcaatcttattagtacagaaataactaaaaataccacaaattttacttttttctctgtga

SEQ ID NO: 612632 - DNA, 533 bp, Homo sapiens
tcaagcttgcagtgagccaagattgtaccactgcaccccagcttgggtgacaggagtgtgaccttgccttaaaaaaaaaaaaaaaagaaatttatgctgggtgcagtggctcacgcctgtaatcccaacactttgggaggccgagytgggcagatcacctgaggtcgggagctcgagaccaacctgaccaacatggagaaactccatctctactaaaaatataaaattagccgggtgtggtggcacacgcctgtaatcccagctactcgggaggctgaggcagaagaatcgcttgaacccgggaggcggaggttgaggtgagccgagatcgtgccatcgcactccagtctgagcaacaagagcaaaaactctgtctcaaaaaaaaaaaaaaagaaagaaaaaagaaatttcaaaactaccagaaataatttgacctgagaattaggcagcccccaaaataaaaccaaaatatcaacaagcaacaaaaaataacatatgaaatccaatacttcaggaataatatttgaatgcta

SEQ ID NO: 612633 - DNA, 613 bp, Homo sapiens
catcttgctcctctgccatcagtttggcctgtttttctgagagcctctccctgtctgtgcggaaagaaagtggtgtagtttgaactgcactttcctagcacagctgcaacaaagggtggctccaaacatctccctgtggaccctgagaaaggacaggaattaggaccaagaaaaattctatgcactccctgagatgggccaaagggcccctgagggtaggactgctgagagggtagtaatggaagtggagaactcscaggctcctggaaggttctcacaggagaatcaccagagagctggcccggggctgtgaggaccactggtcaccacagcctgtgcttgtcagaggccaaaggatgagctccacaagagggtacagaggtggggagaggacaggacataccacaagggatggagagacagtgtgtgaaagagggatatgggacaagaggtgacagcaggtatgggaagaaagtgctgagctgggagaaggcaggaggggtgtttagaaagagcatttttagttagtctcttcatattatttttttgcactatttattttccattgtttttcttggaagtctcgtcctgataacgtgtcctaccattttcc

SEQ ID NO: 612634 - DNA, 613 bp, Homo sapiens
catcttgctcctctgccatcagtttggcctgtttttctgagagcctctccctgtctgtgcggaaagaaagtggtgtagtttgaactgcactttcctagcacagctgcaacaaagggtggctccaaacatctccctgtggaccctgagaaaggacaggaattaggaccaagaaaaattctatgcactccctgagatgggccaaagggcccctgagggtaggactgctgagagggtagtaatggaagtggagaactcgcaggctcctggaaggttctcacaggagaatcaccagagagctggcccggggctgtgaggaccactggtcaccacagcctgtgcttgtcagaggccaaaggatgagctccacaagagggyacagaggtggggagaggacaggacataccacaagggatggagagacagtgtgtgaaagagggatatgggacaagaggtgacagcaggtatgggaagaaagtgctgagctgggagaaggcaggaggggtgtttagaaagagcatttttagttagtctcttcatattatttttttgcactatttattttccattgtttttcttggaagtctcgtcctgataacgtgtcctaccattttcc

SEQ ID NO: 612635 - DNA, 520 bp, Homo sapiens
ttggctgcttctaacagcatatgctcatatgcattcacaaagagatgatctgaaattggaacttatatttaaaagggaagcagagcataaaagattggaaaatttgcagcctgaccatgtggtagaaaagaaaaaccaaatttctggtaagacattcaactcagctgcaggaatttscataagtaaagaggagcagaatgtgaatagccaagacaatggggaaaatgcctccaggacatttcagagatcttcacagtagcccttcccatcacaggcctgaaagattaggagggaaaaatggttttgtggcctaggcccaggaccccactgttgtgtacagcctcgggacatgtcacccggaatcccagctgctccagctccagctgtggctaaaagggccccagatacatctcaggccactgcatcagagggtgcagccataagaagcctttgtggcttccatgtggttttaagcttacaggtgcaaggaaggcaagagttgaggcttgggagtttccac

SEQ ID NO: 612636 - DNA, 599 bp, Homo sapiens
agaactctggactctcagtcccaaattctactagcagaactcctttttcatattcttcatacactgggggctttgctgagagtttgctggactgaatataggaagaacaacagacttctgaagttagtcacatctgtccttgattcaattatacaaacatgaggattctcaaagttatgatttttttcctagaaatactttattttcaggaaatatttatttagcgttgatgacttgagtattaatctcaaggcaaggaaatgagggaaatgacctcctgatgtctttcccatgaatctgtaacttggtggtcagcttcttcccaagttatttttcttgtggcacctcagtgattttattagtttcaccacaagtactcccagcaagggaaatcagtgatcccaaaggcaccaggctggagttttcccgcataaagatcactctttgaagcagctccttcctagaaatttgttatgtttacctttgccaatcatctatgattagtgtagtaattattctgtttttgctatcttttatttttgaaattcactgaaggcttcactgatcaacgattaagkcatgtgcttctgctttgattc

SEQ ID NO: 612637 - DNA, 190 bp, Homo sapiens
gtagtaattattctgtttttgctatcttttatttttgaaattcactgaaggcttcactgatcaacgattaagtcatgtgcttctgctttgattcagtgtcttcttagtatgagcrtggtggtataaatctcttgaatcagtgctgggatttatttgattatgaaaatttattttcattcaagtattttga

SEQ ID NO: 612638 - DNA, 190 bp, Homo sapiens
gtagtaattattctgtttttgctatcttttatttttgaaattcactgaaggcttcactgatcaacgattaagtcatgtgcttctgctttgattcagtgtcttcttagtatgagcgtggtggtataawtctcttgaatcagtgctgggatttatttgattatgaaaatttattttcattcaagtattttga

SEQ ID NO: 612639 - DNA, 607 bp, Homo sapiens
gagtttcaaagttttcactctccaagaattttcataaggtcagtttaattattaatagcatgttttacagttatagaattaatgcataaatacagtaaaacaatgtgaaactatagaattgtatgaaataaaaaataagaatatttcttctatctctgtacattttccatctttaccatgttcaacatatctttattactattatgaaaaatttaaagaatatacaaaaggaaataaatagcataatgaatgaatagtataattaactcattgacctaatacccagcttcagttttagacagtcctgattcctctgatcccacttccctgacatagattaattgaagagcatttctggcatcctgtcatttcatccatgaatatttggaggtatccacctccaaagggtaaggatcccctttttaaaataatacatctaaaaattagccagaattacttacttttamccaaaatccagtcgctgttcaaatttccctgattgtcttacttttttttttttttgagatagagtctcgccctgtcacccaggctggaatgcagtggcaagatctcggctcactgcaacctccgcctcctgggttcaagc

SEQ ID NO: 612640 - DNA, 499 bp, Homo sapiens
gtggaaatgctggatcatagggtaattctgtttctaatttcttgaggaatcaccatactgttttccataccagatgtatggttttatattcccaccaacaggaatataagcattccaaacatgaattttgtgggaacatatttcaaaccatagcagtcaccaaaagctcaagcaacaaaacaaaaaatagatcagttcratttcattaaaaagttctctgtttcaaagtcgacatggtttggctgtgtccccacctaaatctcatcttgagttgtaactcccagaattctcatgtgttgtcggagaaacccagtggaaggtgactgaataatgggggcaggcctttcttgtgctattctcatgatagtgaatgagtctcaggagatctgatggttttaaaaatgagagtttccctgcacaagctctctctttgcctgctgccatccatgtaagacgtgacttgctcctccttgcctttcatctttcaccatgattgtgt

SEQ ID NO: 612641 - DNA, 535 bp, Homo sapiens
actcaagccagccctgcctcggaacctgacaaagttaaatggaagcctacagagctgagctgcatttccatgggagacattttggtcattccaggtgatgatgaactacaccaattgttagtggctgagaagaacctcaggaatgtgccagcatcttttgacttttatttcagggggctgcatctactaccacaacatgcaatatgggtaacactggcatggctggttagatttgagtacctcatgtaaataagtcatgtggtaatagtgatattgatgatcaaatgtattgggagattgagttaargtctcctcaggatgtaataccaacggaaaatgaatctttagaagaactatatttagttaaccatcacctaatttccagataaatagttctgcacaggtcatataagatacaaagagcagtataccaagggggaggatgatcttggggactcctgaaatatactgtaaataacccagatatcctccagtaaataaatggatatacaaagtgtggtatacatacatatgt

SEQ ID NO: 612642 - DNA, 536 bp, Homo sapiens
aacctcaggaatgtgccagcatcttttgacttttatttcagggggctgcatctactaccacaacatgcaatatgggtaacactggcatggctggttagatttgagtacctcatgtaaataagtcatgtggtaatagtgatattgatgatcaaatgtattgggagattgagttaaggtctcctcaggatgtaataccaacggaaaatgaatctttagaagaactatatttagttaaccatcacctaatttccagataaatagttctgcacaggtcatataagatacaaagagcagtataccaagggggaggatgatcttggggactcctgaaatatactgtaaataacccagatatcctccagtaaataaatggatatacaaagtgtggtatacatacatatgtacatacagtggaacattaktcagccgtaaacaggaatgaagtactgatacagcctacacaatgaatgaacctcaataaaccgtaaaatcctgctaagtgaaagaagccagttagaaaagaccagatattggat

SEQ ID NO: 612643 - DNA, 580 bp, Homo sapiens
gaaaaaccctttacatagctgcaacaaacttttaaacaaacaaacaaaaaacaaaactctagaatatacctagcaaaggaatcaaaagacctctacatgaaaatacaaaacactgctgaaagaaatcatggatggagccaagcacggtggcgcatgcctataatcccagctactcgggaagctaatgcaggagaatcgcttgaacccaggaggcagaagttgtagtgagccgagatcacaccattgcactcccacctcrgcgacaagaccgaaactccctctgaaaaaaaaaaacaaaaaaaacaagaaagaaaagaaatcatagatgacacagacaaatggaaacgcatccccatgctcatggatgggtagaaccaatattgtgaaatttaccattctgttaaaggcaatctacaaattcaatgcaatccccatctgaataccaccgtcattcttcacagaattacaaaaacaattctaaaattaatatggaaccaaaagagagccatgtagccaaaccaaggctaagcaaaaagaacaaacctggaggcatcacactacttgatttcaaactgtacaa

SEQ ID NO: 612644 - DNA, 580 bp, Homo sapiens
gaaaaaccctttacatagctgcaacaaacttttaaacaaacaaacaaaaaacaaaactctagaatatacctagcaaaggaatcaaaagacctctacatgaaaatacaaaacactgctgaaagaaatcatggatggagccaagcacggtggcgcatgcctataatcccagctactcgggaagctaatgcaggagaatcgcttgaacccaggaggcagaagttgtagtgagccgagatcacaccattgcactcccacctcggcgacaagascgaaactccctctgaaaaaaaaaaacaaaaaaaacaagaaagaaaagaaatcatagatgacacagacaaatggaaacgcatccccatgctcatggatgggtagaaccaatattgtgaaatttaccattctgttaaaggcaatctacaaattcaatgcaatccccatctgaataccaccgtcattcttcacagaattacaaaaacaattctaaaattaatatggaaccaaaagagagccatgtagccaaaccaaggctaagcaaaaagaacaaacctggaggcatcacactacttgatttcaaactgtacaa

SEQ ID NO: 612645 - DNA, 509 bp, Homo sapiens
agcaaatctgtggcaaacctgggaaggtgacccaaactccagaccccaagcccggtgctttttttttttttccagatctatgtctcccccacatctgactctgtttccctgaggtccagagccatkccctgttcctttttaggattctcacgacccaggtttaggcacattagttgtccaaagcacacttggcttgctctgacttgagcagtacaatgagctatgtcttagtttcaggcaagaccaccttgaccatgggacatgaaaaggcactctatggggcctctactatgatgtagcagggactgtgttagcacattgctatagccctgggaagcaagaattcttagcacccattgcccagatgaagaaactcactttcagagagggtaaagaatgtctctgtggtaccacagctatatagtggctaggctggaattcaaaaccaggtttgcctgcctccttctcctgtatgatactgcttcatacacagtccccagaaccttaac

SEQ ID NO: 612646 - DNA, 610 bp, Homo sapiens
tttctcctatatttatgtctaagagttttacaatattgctcctaggttgaggtcttttatcaattttgagtcaatttttgtatgtagggtcagataagggttcagtttcattcttctgcatgtggatatccagttttcccaacaccatttattaaagagactaaacttttatcattgtgtattcttggcaccaatgctgaagatcaattgattgtaaaggcatggatttgtttctgtgctctctattcttttcccttggcctacatgtctgtttttatgccagtaccrtactattttaattactatagctttataatttagtttggaataaggtaatgtgatgcttccacttttgttttttctgctcaatgatgttttgactgtttggggtctgttgcacacagattttagaattgcttttttccatttctttgaaaaatgccactgaaattttgataggggttgcattatatctgtagatcacactgagtaatagagattcttttatcttcaaattctttcatcagtgttttatagtttttggtatatagaaattttactttctgatttaaatttattcctaagttaattttttgatgctattgtaaat

SEQ ID NO: 612647 - DNA, 584 bp, Homo sapiens
gatatgctcactttcttcctgtttattggagtttgtgtttctgtcttgttcctttgctggaccaagcagctcgtgtgttcatcagtgatttgccaagtgygggtttataacaataacatcagccagcatttgctcgatgcttactgtatctttcctgaatttctgcaaatagacacagtcacatgaaatatgaacttctggggattataggccagacccctcatgtccttatccctgaggtttagcacagtgcctcaaacatcaagggtgaccaatcaatgttttgtggatagatgatgtaaggatttatataagcaccaaagcttgctgtgagggtttattgtgcttaagccatcttttaaaactttcccctcactcttagtcttaatgcttcctctttgaaagagatccagaatttgaaacttttcatatctaacgttttctctgtggtatctcaacttttcttagtcaaatatttcattttgaaaaagaaataaatagctttgtggcaatggcaagatctcaggtttactttaggcctttaatgtgagaaagaaaatatacacttcggttaaaatatgcag

SEQ ID NO: 612648 - DNA, 407 bp, Homo sapiens
tttaaaaaaatcagcaaactttttcgagctcccttgaaccttctattttaatgtgcctttgtagataattcccaacatcttgtgtccttctttttataattcatctttatcaaacttgtcataaaccccaatactttgatctcttataggagagtccatactcctatccaatccagtgttgtttatcttcaaacttggacttcccctgctcattccattcttatctacttccattkggttcaccagctaattccattctcattctatccgcagactcactcccggttgtattattaaaacacacgccaataggacataaaaagaagcaagagtactgggctttaccatgagttcaaatctcatttctgccaattcctatgtctaaaaaaaaagcatcctaatctttt

SEQ ID NO: 612649 - DNA, 324 bp, Homo sapiens
ttaactcttaattgaattaatacaagtttaggtgtaaagatgatgtttatgttgacaaaaattattaatgttttacatatatgaaattaataatatattttttgtatttgtasaatactttgaaatctattattagctaatattttatattcattttgagttttcacattattgttagatccagagaaaagtaatattttgtgaatactcaaatcataaacattttgctggatgcattcatagatattttatttaaaatgtacactaattgaagttttataccattttatgattcatcaaacacagcaactgaatactggcgta

SEQ ID NO: 612650 - DNA, 324 bp, Homo sapiens
ttaactcttaattgaattaatacaagtttaggtgtaaagatgatgtttatgttgacaaaaattattaatgttttacatatatgaaattaataatatattttttgtatttgtagaatactttgaaatctattattagctaatattttatattcattttgagttttcacattattgttagatccagagaaaagtaatattttgtgaatactcaaatcataaacattttgctggatgcattcatagatattttatttaaaawgtacactaattgaagttttataccattttatgattcatcaaacacagcaactgaatactggcgta

SEQ ID NO: 612651 - DNA, 324 bp, Homo sapiens
ttaactcttaattgaattaatacaagtttaggtgtaaagatgatgtttatgttgacaaaaattattaatgttttacatatatgaaattaataatatattttttgtatttgtagaatactttgaaatctattattagctaatattttatattcattttgagttttcacattattgttagatccagagaaaagtaatattttgtgaatactcaaatcataaacattttgctggatgcattcatagatattttatttaaaatgtacactaattgaagttttayaccattttatgattcatcaaacacagcaactgaatactggcgta

SEQ ID NO: 612652 - DNA, 602 bp, Homo sapiens
ttaattaaattttaatttgaaaatactcatttcaggtgtaaacatttccattcatacctacattatggtcttaacatgtggcaacataaagwcattaaaattattatttcagcagtacagaactatctaccttaaaatatgactctgtgcctaataaaatttcataggtgacacaatgtcttttctcaaagtgaatcatctctcacctctaccttttatttcctagaaatgaggcatgtttctaagctgatatagtaaacacatttttcctttttttattaaaacagctttgttgaaatatagtttacatactatagaatgtatctgttttaacttaaagttaaaagatttttagtccatttactgagttgtgcagccatctctacaatccagctttacagcatttccatcactgcaagatccctcacgcccattagcagtcactaccagcttccagtcccagccctttgcaaacattaatctactttttgtccctatacgtttatcttttctggatgcttcatgtaaatgcaattatacagtatggtaaacacactttttaatctattgatttttatattcaactaagttcaacatgtatc

SEQ ID NO: 612653 - DNA, 581 bp, Homo sapiens
tttaatttgaaaatactcatttcaggtgtaaacatttccattcatacctacattatggtcttaacatgtggcaacataaagtcattaaaattattatttcagcagtacagaactatctaccttaaaatatgactctgtgcctaataaaatttcataggtgacacaatgtcttttctcaaagtgaatcatctctcacctctaccttttatttcctagaaatgaggcatgtttctaagctgatatagtaaacacatttttcctttttttattaaaacagctttgttgaaatatartttacatactatagaatgtatctgttttaacttaaagttaaaagatttttagtccatttactgagttgtgcagccatctctacaatccagctttacagcatttccatcactgcaagatccctcacgcccattagcagtcactaccagcttccagtcccagccctttgcaaacattaatctactttttgtccctatacgtttatcttttctggatgcttcatgtaaatgcaattatacagtatggtaaacacactttttaatctattgatttttatattcaactaagtt

SEQ ID NO: 612654 - DNA, 581 bp, Homo sapiens
tttaatttgaaaatactcatttcaggtgtaaacatttccattcatacctacattatggtcttaacatgtggcaacataaagtcattaaaattattatttcagcagtacagaactatctaccttaaaatatgactctgtgcctaataaaatttcataggtgacacaatgtcttttctcaaagtgaatcatctctcacctctaccttttatttcctagaaatgaggcatgtttctaagctgatatagtaaacacatttttcctttttttattaaaacagctttgttgaaatatagtttacatactatagaatgtatctgttttaacttaaagttaaaagatttttagtccatttactgagttgtgcagccatctctacaatccarctttacagcatttccatcactgcaagatccctcacgcccattagcagtcactaccagcttccagtcccagccctttgcaaacattaatctactttttgtccctatacgtttatcttttctggatgcttcatgtaaatgcaattatacagtatggtaaacacactttttaatctattgatttttatattcaactaagtt

SEQ ID NO: 612655 - DNA, 581 bp, Homo sapiens
tttaatttgaaaatactcatttcaggtgtaaacatttccattcatacctacattatggtcttaacatgtggcaacataaagtcattaaaattattatttcagcagtacagaactatctaccttaaaatatgactctgtgcctaataaaatttcataggtgacacaatgtcttttctcaaagtgaatcatctctcacctctaccttttatttcctagaaatgaggcatgtttctaagctgatatagtaaacacatttttcctttttttattaaaacagctttgttgaaatatagtttacatactatagaatgtatctgttttaacttaaagttaaaagatttttagtccatttactgagttgtgcagccatctctacaatccagctttacagcatttccatcactgcaagatccctcaygcccattagcagtcactaccagcttccagtcccagccctttgcaaacattaatctactttttgtccctatacgtttatcttttctggatgcttcatgtaaatgcaattatacagtatggtaaacacactttttaatctattgatttttatattcaactaagtt

SEQ ID NO: 612656 - DNA, 540 bp, Homo sapiens
acatggtgaaacctcatttctactaaaaatacaaaaaattagctgggcatggtgacacatgcctgtaatctcagctactagggaggctgagtcaggagaatcacttgaatccagtatgcatagggtgcagtgaggtgagaacacaccattgcactccagcttgggcaacaagagagaaacttccatttcaaaaaaaaaaaaaaaaaaaaaacactgctataggcttacttacctatcgtgctcttccttcagtttcttgggaaattgctgaggatacattttcccaatctttctttgtttggttaatctgtcagcagcagcagaagatgtactatgacatacattttctgatagttgtattttttcacttttrtttgtattatttccttctttgacctttaataaaagtaatatgaataataattattattttattcaataaaaaaaacctttttccctgattttttcacttgattcaggttaactatcaccattttaatgataaaagtattttgtgcttactttaattttatcattata

SEQ ID NO: 612657 - DNA, 540 bp, Homo sapiens
acatggtgaaacctcatttctactaaaaatacaaaaaattagctgggcatggtgacacatgcctgtaatctcagctactagggaggctgagtcaggagaatcacttgaatccagtatgcatagggtgcagtgaggtgagaacacaccattgcactccagcttgggcaacaagagagaaacttccatttcaaaaaaaaaaaaaaaaaaaaaacactgctataggcttacttacctatcgtgctcttccttcagtttcttgggaaattgctgaggatacattttcccaatctttctttgtttggttaatctgtcagcagcagcagaagatgtactatgacatacattttctgatagttgtattttttcacttttatttgtattatttccttctttgacctttaataaaagtaatatgaataataattattattttattcaataaaaaaaacctttttccctgattttttmacttgattcaggttaactatcaccattttaatgataaaagtattttgtgcttactttaattttatcattata

SEQ ID NO: 612658 - DNA, 540 bp, Homo sapiens
acatggtgaaacctcatttctactaaaaatacaaaaaattagctgggcatggtgacacatgcctgtaatctcagctactagggaggctgagtcaggagaatcacttgaatccagtatgcatagggtgcagtgaggtgagaacacaccattgcactccagcttgggcaacaagagagaaacttccatttcaaaaaaaaaaaaaaaaaaaaaacactgctataggcttacttacctatcgtgctcttccttcagtttcttgggaaattgctgaggatacattttcccaatctttctttgtttggttaatctgtcagcagcagcagaagatgtactatgacatacattttctgatagttgtattttttcacttttatttgtattatttccttctttgacctttaataaaagtaatatgaataataattattattttattcaataaaaaaaacctttttccctgattttttcacttgattcaggttaactatcrccattttaatgataaaagtattttgtgcttactttaattttatcattata

SEQ ID NO: 612659 - DNA, 402 bp, Homo sapiens
acacaatgtacagaactcagctttctactaaagagtcaaaggttaaatttttagctaagaaattatgcttcttacatgataaaaatcatacatgccaaaacttaccatactttattaaacaacataatgtaaggtctgattcaacagaaatattggagtggtgattttttaaaatatgtggaagtatatatttgttttcaaaatattggaaataaccatgatggaactataaattcaaacagtttgagctaagcagataaacttgcatgcatgaaaacacattaaacagactcatttggctgggaatattcattgcaactctcaaggctagacgtgtatttgtggctcatctcagtcattgcttccctcycattgtactcccattctatcattaaataaatg

SEQ ID NO: 612660 - DNA, 402 bp, Homo sapiens
acacaatgtacagaactcagctttctactaaagagtcaaaggttaaatttttagctaagaaattatgcttcttacatgataaaaatcatacatgccaaaacttaccatactttattaaacaacataatgtaaggtctgattcaacagaaatattggagtggtgattttttaaaatatgtggaagtatatatttgttttcaaaatattggaaataaccatgatggaactataaattcaaacagtttgagctaagcagataaacttgcatgcatgaaaacacattaaacagactcatttggctgggaatattcattgcaactctcaaggctagacgtgtatttgtggctcatctcagtcattgcttccctctcattgtaytcccattctatcattaaataaatg

SEQ ID NO: 612661 - DNA, 516 bp, Homo sapiens
tcagaaggtcacatggtatatggctgaattagtttcccagctcatatgccacttggaagactgagagtgagacttaggttgattaatgaagaaacattatgagaacattctccagaaccgttgtttagatagcaggactaatctactttgacacataattacacatttagaaaaccccgctgtaactgtacacatgagattttcttgaatagaaaatttgactaaatcaaataattgataaagagaaaaaagaagcagcaagtgaacctctgtctttttgaagttggattttctctttctccaaagccaggaactctacttgtaacatgcctacctcattctttttactattattatactttaagttctggtacatgtgcacaatgtgcaggtttgttacatatgtatacatgtgctatgttagtgmccttggaatatcttgctgtaagtcttctagctatatttttgatgttctctcactatgtggcaaagaataacccgcattttataattcaa

SEQ ID NO: 612662 - DNA, 556 bp, Homo sapiens
atttctttgtattttatattttgagagtttgaatgaaacaatgtttactgaaatatttacttctgtaagaaatacttctaattatccaaaacttcagcaaaccacttggggagacacyagatatcaccagattcaagccatgcaaaatcacagggtcactcacaaattgttccacccaacataagtcaacaaaactgttggaaacaaaacagaaatttgaaatacagtcaaaatatacaatgtaatgctttactatacttcataacagtatctttttaacaagacactgagttggcagttactaataatttgcaaaattattgttctttatacctcaattagtgtgcaccccattttttacatcacaaatgttttcccctgctttctgaaaaatttattttcatcttttaagactcagaaagtaggctgggcataatagctcacatctgtaatcccagcactttgaaaggccaaaatgggagaattgctcaaggccaagagtttaagacaagcctgggaaccataggtaaccttgactctacaaaaaattagacag

SEQ ID NO: 612663 - DNA, 556 bp, Homo sapiens
atttctttgtattttatattttgagagtttgaatgaaacaatgtttactgaaatatttacttctgtaagaaatacttctaattatccaaaacttcagcaaaccacttggggagacactagatatcaccagattcaagccatgcaaaatcwcagggtcactcacaaattgttccacccaacataagtcaacaaaactgttggaaacaaaacagaaatttgaaatacagtcaaaatatacaatgtaatgctttactatacttcataacagtatctttttaacaagacactgagttggcagttactaataatttgcaaaattattgttctttatacctcaattagtgtgcaccccattttttacatcacaaatgttttcccctgctttctgaaaaatttattttcatcttttaagactcagaaagtaggctgggcataatagctcacatctgtaatcccagcactttgaaaggccaaaatgggagaattgctcaaggccaagagtttaagacaagcctgggaaccataggtaaccttgactctacaaaaaattagacag

SEQ ID NO: 612664 - DNA, 556 bp, Homo sapiens
atttctttgtattttatattttgagagtttgaatgaaacaatgtttactgaaatatttacttctgtaagaaatacttctaattatccaaaacttcagcaaaccacttggggagacactagatatcaccagattcaagccatgcaaaatcacagggtcactcacaaattgttccacccaacataagtcaacaaaactgttggaaacaaaacagaaatttgaaatacagtcaaaatatacaatgtaatgctttactatacttcataacagtatctttttaacaagacactgagttggcagttactaataatttgcaaaattattgttstttatacctcaattagtgtgcaccccattttttacatcacaaatgttttcccctgctttctgaaaaatttattttcatcttttaagactcagaaagtaggctgggcataatagctcacatctgtaatcccagcactttgaaaggccaaaatgggagaattgctcaaggccaagagtttaagacaagcctgggaaccataggtaaccttgactctacaaaaaattagacag

SEQ ID NO: 612665 - DNA, 451 bp, Homo sapiens
attcaagccatgcaaaatcacagggtcactcacaaattgttccacccaacataagtcaacaaaactgttggaaacaaaacagaaatttgaaatacagtcaaaatatacaatgtaatgctttactatacttcataacagtatctttttaacaagacactgagttggcagttactaataatttgcaaaattattgttctttatacctcaattagtgtgcaccccattttttacatcacaaatgttttcccctgctttctgaaaaatttattttcatcttttaagactcagaaagtaggctgggcataatagctcacatctgtaatcccagcactttgraaggccaaaatgggagaattgctcaaggccaagagtttaagacaagcctgggaaccataggtaaccttgactctacaaaaaattagacaggtatggtgatatgttcctgttgtcc

SEQ ID NO: 612666 - DNA, 451 bp, Homo sapiens
attcaagccatgcaaaatcacagggtcactcacaaattgttccacccaacataagtcaacaaaactgttggaaacaaaacagaaatttgaaatacagtcaaaatatacaatgtaatgctttactatacttcataacagtatctttttaacaagacactgagttggcagttactaataatttgcaaaattattgttctttatacctcaattagtgtgcaccccattttttacatcacaaatgttttcccctgctttctgaaaaatttattttcatcttttaagactcagaaagtaggctgggcataatagctcacatctgtaatcccagcactttgaaaggccaaaatgggagaattgctcaaggccaagagtttaagacmagcctgggaaccataggtaaccttgactctacaaaaaattagacaggtatggtgatatgttcctgttgtcc

SEQ ID NO: 612667 - DNA, 390 bp, Homo sapiens
caggagtctgaggtttcagtgagtctcaatcatgccattgcactccatcctgggtgatagagtaagaacttgtctccaaaaagaggaaaaaaataaaggctcagaatgctatgtgaaatcttccttgattctagctatctttctccacacacacaggtgtctgcttcgttggggtcccttagtaccttgtcaatttttctagtgtcactttaccacctgamctgcacatcatgtctttacatgttgaccccctttgctgctagactgtagaggacaatcttttgaatcatctttgtataaacagtcttaattttgctaaataattagttattgagttcctgctaagtgttaggcactggggtaaaaggaaggaaaatagaagctgtcagg

SEQ ID NO: 612668 - DNA, 291 bp, Homo sapiens
ctgcttcgttggggtcccttagtaccttgtcaatttttctagtgtcactttaccacctgaactgcacatcatgtctttacatgttgaccccctttgctgctagactgtagaggacaatcttttgaatcatctttgtataaacagtcttaattttgctaaataattasttattgagttcctgctaagtgttaggcactggggtaaaaggaaggaaaatagaagctgtcagggatggctttcctaaagatcatgcatgagctgagacttagagagagaggttagccagattaa

SEQ ID NO: 612669 - DNA, 291 bp, Homo sapiens
ctgcttcgttggggtcccttagtaccttgtcaatttttctagtgtcactttaccacctgaactgcacatcatgtctttacatgttgaccccctttgctgctagactgtagaggacaatcttttgaatcatctttgtataaacagtcttaattttgctaaataattagttattgagttcctgctaagtgttaggcactggggwaaaaggaaggaaaatagaagctgtcagggatggctttcctaaagatcatgcatgagctgagacttagagagagaggttagccagattaa

SEQ ID NO: 612670 - DNA, 291 bp, Homo sapiens
ctgcttcgttggggtcccttagtaccttgtcaatttttctagtgtcactttaccacctgaactgcacatcatgtctttacatgttgaccccctttgctgctagactgtagaggacaatcttttgaatcatctttgtataaacagtcttaattttgctaaataattagttattgagttcctgctaagtgttaggcactggggtawaaggaaggaaaatagaagctgtcagggatggctttcctaaagatcatgcatgagctgagacttagagagagaggttagccagattaa

SEQ ID NO: 612671 - DNA, 291 bp, Homo sapiens
ctgcttcgttggggtcccttagtaccttgtcaatttttctagtgtcactttaccacctgaactgcacatcatgtctttacatgttgaccccctttgctgctagactgtagaggacaatcttttgaatcatctttgtataaacagtcttaattttgctaaataattagttattgagttcctgctaagtgttaggcactggggtaaaaggaaggaaaatagaagctgtcagggatggctttcctaaagatcatscatgagctgagacttagagagagaggttagccagattaa

SEQ ID NO: 612672 - DNA, 631 bp, Homo sapiens
ggagcataaaattctgaggcatataaatcaatgaacaaagataaaatataaggcaatgttgcaaagatgatgcaggcctgargagatgttttcagaaatatttaggatataggtatcagtggccattataagaatgaatttctattgaatgaataaatgtatatatctgggtccctggagaaatacactctgctcattactttacaaattttatcaaatgagaagtaaaataatatacataaactctttcagttacttgtatttactttacactttttctgtttcagttttactgtgccaaggaaatgcatttgggttttgtggtggttgtggtggttgtggtggctgttgttgtttgagatggagtctcactcttccggcccagtctgaagtgcagtggtgtgatctcagactcatggcaacctctgcctcctgggttcaagcgattagactgcctcagcctcccaagtagctgaaattacaggcatgtgccaccatgagcagctaattttgtgtttttagtagagatgggtttctccatgttgggcaggctggtctcaaactcccagcctcaggttatctggccgcttcagcctcccaaagtgctgggattacaggcactagccaccgc

SEQ ID NO: 612673 - DNA, 631 bp, Homo sapiens
ggagcataaaattctgaggcatataaatcaatgaacaaagataaaatataaggcaatgttgcaaagatgatgcaggcctgaagagatgttttcagaaatatttaggatataggtatcagtggccattataagaatgaatttctattgaatraataaatgtatatatctgggtccctggagaaatacactctgctcattactttacaaattttatcaaatgagaagtaaaataatatacataaactctttcagttacttgtatttactttacactttttctgtttcagttttactgtgccaaggaaatgcatttgggttttgtggtggttgtggtggttgtggtggctgttgttgtttgagatggagtctcactcttccggcccagtctgaagtgcagtggtgtgatctcagactcatggcaacctctgcctcctgggttcaagcgattagactgcctcagcctcccaagtagctgaaattacaggcatgtgccaccatgagcagctaattttgtgtttttagtagagatgggtttctccatgttgggcaggctggtctcaaactcccagcctcaggttatctggccgcttcagcctcccaaagtgctgggattacaggcactagccaccgc

SEQ ID NO: 612674 - DNA, 631 bp, Homo sapiens
ggagcataaaattctgaggcatataaatcaatgaacaaagataaaatataaggcaatgttgcaaagatgatgcaggcctgaagagatgttttcagaaatatttaggatataggtatcagtggccattataagaatgaatttctattgaatgaatamatgtatatatctgggtccctggagaaatacactctgctcattactttacaaattttatcaaatgagaagtaaaataatatacataaactctttcagttacttgtatttactttacactttttctgtttcagttttactgtgccaaggaaatgcatttgggttttgtggtggttgtggtggttgtggtggctgttgttgtttgagatggagtctcactcttccggcccagtctgaagtgcagtggtgtgatctcagactcatggcaacctctgcctcctgggttcaagcgattagactgcctcagcctcccaagtagctgaaattacaggcatgtgccaccatgagcagctaattttgtgtttttagtagagatgggtttctccatgttgggcaggctggtctcaaactcccagcctcaggttatctggccgcttcagcctcccaaagtgctgggattacaggcactagccaccgc

SEQ ID NO: 612675 - DNA, 574 bp, Homo sapiens
gtgaggagcataaaattctgaggcatataaatcaatgaacaaagataaaatataaggcaatgttgcaaagatgatgcaggcctgaagagatgttttcagaaatatttaggatataggtatcagtggccattataagaatgaatttctattgaatgaataaatgtatatatctgggtccctggagaaatacactctgctcattactttacaaattttatcaaatgagaagtaaaataatatacataaactctttcagttacttgtatttactttacmctttttctgtttcagttttactgtgccaaggaaatgcatttgggttttgtggtggttgtggtggttgtggtggctgttgttgtttgagatggagtctcactcttccggcccagtctgaagtgcagtggtgtgatctcagactcatggcaacctctgcctcctgggttcaagcgattagactgcctcagcctcccaagtagctgaaattacaggcatgtgccaccatgagcagctaattttgtgtttttagtagagatgggtttctccatgttgggcaggctggtctcaaactcccagc

SEQ ID NO: 612676 - DNA, 644 bp, Homo sapiens
gaggagcataaaattctgaggcatataaatcaatgaacaaagataaaatataaggcaatgttgcaaagatgatgcaggcctgaagagatgttttcagaaatatttaggatataggtatcagtggccattataagaatgaatttctattgaatgaataaatgtatatatctgggtccctggagaaatacactctgctcattactttacaaattttatcaaatgagaagtaaaataatatacataaactctttcagttacttgtatttactttacactttttctgtttcagttttactgtgccaaggaaatgcatttgggttttgtggtggttgtkgtggttgtggtggctgttgttgtttgagatggagtctcactcttccggcccagtctgaagtgcagtggtgtgatctcagactcatggcaacctctgcctcctgggttcaagcgattagactgcctcagcctcccaagtagctgaaattacaggcatgtgccaccatgagcagctaattttgtgtttttagtagagatgggtttctccatgttgggcaggctggtctcaaactcccagcctcaggttatctggccgcttcagcctcccaaagtgctgggattacaggcactagccaccgcacccagcaaca

SEQ ID NO: 612677 - DNA, 644 bp, Homo sapiens
gaggagcataaaattctgaggcatataaatcaatgaacaaagataaaatataaggcaatgttgcaaagatgatgcaggcctgaagagatgttttcagaaatatttaggatataggtatcagtggccattataagaatgaatttctattgaatgaataaatgtatatatctgggtccctggagaaatacactctgctcattactttacaaattttatcaaatgagaagtaaaataatatacataaactctttcagttacttgtatttactttacactttttctgtttcagttttactgtgccaaggaaatgcatttgggttttgtggtggttgtggtggttgtggtggctgttgttgtttgagatggagtctcactcttccggcccagtctgaagtgcartggtgtgatctcagactcatggcaacctctgcctcctgggttcaagcgattagactgcctcagcctcccaagtagctgaaattacaggcatgtgccaccatgagcagctaattttgtgtttttagtagagatgggtttctccatgttgggcaggctggtctcaaactcccagcctcaggttatctggccgcttcagcctcccaaagtgctgggattacaggcactagccaccgcacccagcaaca

SEQ ID NO: 612678 - DNA, 484 bp, Homo sapiens
atgtagtctggcaagtattatatcaaagataaataccagttttagaataaagcattaatatactcttacatttcaacttaagaggcaaatattaacagtaggatttgtaaactatttattrgactaaaaatcaatgaatttttaaaaattacaaaatgatttatgtatgttagatattttactgagtgaaaaaattcatgcttttttaaatgacttattgtttggagtagtgatacagtagatttaattttccccctcattaattaaaatcatgttttagccaagaaagtgaacaaaattcttattggcaattcagttgtttcccgttttggagactgacactctccagttctaagttaaataattgtcatggtaaagtaatttccttgaaaagaacggacattgattcagcccctgttactcacaaatgctatttgagtcaaattggaaaactattaagtttttgggaaaaaaatcaataggt

SEQ ID NO: 612679 - DNA, 484 bp, Homo sapiens
atgtagtctggcaagtattatatcaaagataaataccagttttagaataaagcattaatatactcttacatttcaacttaagaggcaaatattaacagtaggatttgtaaactatttattagamtaaaaatcaatgaatttttaaaaattacaaaatgatttatgtatgttagatattttactgagtgaaaaaattcatgcttttttaaatgacttattgtttggagtagtgatacagtagatttaattttccccctcattaattaaaatcatgttttagccaagaaagtgaacaaaattcttattggcaattcagttgtttcccgttttggagactgacactctccagttctaagttaaataattgtcatggtaaagtaatttccttgaaaagaacggacattgattcagcccctgttactcacaaatgctatttgagtcaaattggaaaactattaagtttttgggaaaaaaatcaataggt

SEQ ID NO: 612680 - DNA, 484 bp, Homo sapiens
atgtagtctggcaagtattatatcaaagataaataccagttttagaataaagcattaatatactcttacatttcaacttaagaggcaaatattaacagtaggatttgtaaactatttattagactaaaaatcaatgaatttttaaaaattacaaaatgatttatgtatgttagatattttactgagtgaaaaaattcatgcttttttaaatgacttattgtttggagtagtgatacagtagatttaattttccccctcattaattaaaatcatgttttagccaagaaagtgaacaraattcttattggcaattcagttgtttcccgttttggagactgacactctccagttctaagttaaataattgtcatggtaaagtaatttccttgaaaagaacggacattgattcagcccctgttactcacaaatgctatttgagtcaaattggaaaactattaagtttttgggaaaaaaatcaataggt

SEQ ID NO: 612681 - DNA, 484 bp, Homo sapiens
atgtagtctggcaagtattatatcaaagataaataccagttttagaataaagcattaatatactcttacatttcaacttaagaggcaaatattaacagtaggatttgtaaactatttattagactaaaaatcaatgaatttttaaaaattacaaaatgatttatgtatgttagatattttactgagtgaaaaaattcatgcttttttaaatgacttattgtttggagtagtgatacagtagatttaattttccccctcattaattaaaatcatgttttagccaagaaagtgaacaaaattcttattggcaattcagttgtttcccrttttggagactgacactctccagttctaagttaaataattgtcatggtaaagtaatttccttgaaaagaacggacattgattcagcccctgttactcacaaatgctatttgagtcaaattggaaaactattaagtttttgggaaaaaaatcaataggt

SEQ ID NO: 612682 - DNA, 484 bp, Homo sapiens
atgtagtctggcaagtattatatcaaagataaataccagttttagaataaagcattaatatactcttacatttcaacttaagaggcaaatattaacagtaggatttgtaaactatttattagactaaaaatcaatgaatttttaaaaattacaaaatgatttatgtatgttagatattttactgagtgaaaaaattcatgcttttttaaatgacttattgtttggagtagtgatacagtagatttaattttccccctcattaattaaaatcatgttttagccaagaaagtgaacaaaattcttattggcaattcagttgtttcccgttttggagactgacactctccagttctaagttaaataattgtcatggtaaagtaatttccttgaaaagaacggacattgattcagcccctgttactcacaaatgctatttgagtcaaattggaaaactattaagyttttgggaaaaaaatcaataggt

SEQ ID NO: 612683 - DNA, 675 bp, Homo sapiens
tggtggaactcgatgtcactcaacttccaatttagtgcttccactaaggttttctttaaaaaaaaaaaatgctttgtaggtwttctgtatcctctgttgtttgatttatgcccttaatgtaatgttagagccttttattttaatcctccaggcaatatgaggatcatatttttgcttttattttctcttgaagataagaattaaacactcctcccttactttatttacctgaacacttttgggcaatgatatgccttcatttaaaatatattagaaactttcttagttaagcgactatgttttctccctttctctttccctttttcacctttttaaaaaccagtcgaaattttcttactttttcaaaagtaataatcattaagaaatttaagaattattaagctgggccccatcattgagctctaatatatgtggcgggtaactggttgaattccttaggcataaactcattcttttgttatcagcatatattcagagattgcaaaatgaattggtagtttggaaacttaggcatatgttatgtaaaacatttatgagttggatttggatttggtgagagatgttaggaatgataccttaagatgtctcattctttaggcaataatttaaatcttaagaaaagtcttgattttgattatgtgaaaataaactaga

SEQ ID NO: 612684 - DNA, 675 bp, Homo sapiens
tggtggaactcgatgtcactcaacttccaatttagtgcttccactaaggttttctttaaaaaaaaaaaatgctttgtaggtattctgtatcctctgttgtttgatttatgcccttaatrtaatgttagagccttttattttaatcctccaggcaatatgaggatcatatttttgcttttattttctcttgaagataagaattaaacactcctcccttactttatttacctgaacacttttgggcaatgatatgccttcatttaaaatatattagaaactttcttagttaagcgactatgttttctccctttctctttccctttttcacctttttaaaaaccagtcgaaattttcttactttttcaaaagtaataatcattaagaaatttaagaattattaagctgggccccatcattgagctctaatatatgtggcgggtaactggttgaattccttaggcataaactcattcttttgttatcagcatatattcagagattgcaaaatgaattggtagtttggaaacttaggcatatgttatgtaaaacatttatgagttggatttggatttggtgagagatgttaggaatgataccttaagatgtctcattctttaggcaataatttaaatcttaagaaaagtcttgattttgattatgtgaaaataaactaga

SEQ ID NO: 612685 - DNA, 584 bp, Homo sapiens
attgctggacacagaggccgtggctcacaaccacaatcccaacaatttaggaggtcaaagcaggagaaacgcttgaggccaaaagttcgggaccagcctgggaaacacagtgagaccccctcaattaaacaacaaaaagaaataagaaaaaattagctgggcatggtggtatgcatctgtagtttcagctacttgagaggctgcggtgaaagaatcgctttagccccagagttcaagaccagcctcagcaatataacaagatcccatctctacaaaaaaaaaaaaacacaaaaattagctgggcatggatggtgtgcacctgtagtcccagatgcttggaaggcggaggcgggggaattgcttgagcccaggtggttgaggctgcagttagctaaaactccatcattgcactccagattcggtgaaacagagaatctgtgttcaaaagaaaaggaaaagaaatacacatttggtttctgcccctcatcctggcaaagagcttctcaagytcttataaaggccttggtgatgaaggtgatggggcatcttctgtttcaatatttggtcttagtaccaggtttcta

SEQ ID NO: 612686 - DNA, 584 bp, Homo sapiens
attgctggacacagaggccgtggctcacaaccacaatcccaacaatttaggaggtcaaagcaggagaaacgcttgaggccaaaagttcgggaccagcctgggaaacacagtgagaccccctcaattaaacaacaaaaagaaataagaaaaaattagctgggcatggtggtatgcatctgtagtttcagctacttgagaggctgcggtgaaagaatcgctttagccccagagttcaagaccagcctcagcaatataacaagatcccatctctacaaaaaaaaaaaaacacaaaaattagctgggcatggatggtgtgcacctgtagtcccagatgcttggaaggcggaggcgggggaattgcttgagcccaggtggttgaggctgcagttagctaaaactccatcattgcactccagattcggtgaaacagagaatctgtgttcaaaagaaaaggaaaagaaatacacatttggtttctgcccctcatcctggcaaagagcttctcaagttcttataaaggccttggtgatgaargtgatggggcatcttctgtttcaatatttggtcttagtaccaggtttcta

SEQ ID NO: 612687 - DNA, 424 bp, Homo sapiens
aatcccaaaagcatttttgcagaaacaaagaaactcattctaaagtcatacaaaaattcaaaggatctgacagacaaaacagtcttgaaaaagaacattggaaaactcacatttttcagtttcacagcctactacaaatctacagtaatcaagagagtgtggtactggmataagaccaatagactttcagaccaatacaatagaacagatttgagatcctacaagttagtcctcacatatatgctcaatgactgttcaacaaggtggccaagtcaagggaggaaagaacattctcttcaacagctggatgtcagtgcacaagagagaagttagacccctaccttgcagtatatacaaaaattaattctaaattaataaaagacttaaatgtaaggactaaaaatatgtaactcttagaagaaaa

SEQ ID NO: 612688 - DNA, 424 bp, Homo sapiens
aatcccaaaagcatttttgcagaaacaaagaaactcattctaaagtcatacaaaaattcaaaggatctgacagacaaaacagtcttgaaaaagaacattggaaaactcacatttttcagtttcacagcctactacaaatctacagtaatcaagagagtgtggtactggcataagaccaatagactttcagacmaatacaatagaacagatttgagatcctacaagttagtcctcacatatatgctcaatgactgttcaacaaggtggccaagtcaagggaggaaagaacattctcttcaacagctggatgtcagtgcacaagagagaagttagacccctaccttgcagtatatacaaaaattaattctaaattaataaaagacttaaatgtaaggactaaaaatatgtaactcttagaagaaaa

SEQ ID NO: 612689 - DNA, 632 bp, Homo sapiens
agtatcgttgccatgattttatttcagttttgttttcctcaaaatagaatttgctgaacttttagaaggaaaaaatgtttcttctatagacctaatcaagcttgttaaataaaattattacctgcttgctctgaggttccaaactwttcagatacccctaatgatcatctccccatgaattatgaaactggtttggctctgatatatggttattgacatttgtgtagcattgtacacagactgattttatgtggcataaaagatttcacaaagactttaaaattatgttcattttacttgatgggtgtgtgttcaattaaaaaaaaaagtccctgtgattgtatataaaatatagtatcctgtgatgatgagggtgttagatttagtttcttcctttataaatgaaaatagccatctcccataattattatgaaagctaaatgagaaaaatgtatataatttataaagttagattcaaggatttaattcatttgtaaagttggcttcaaatatagagtattactataatctagttgcctctaaacctcagtagccagctttttattgtgacagggaacctctattgaggtttgaggtaatgagggtaaaagtgtaatttcccagagaagaag

SEQ ID NO: 612690 - DNA, 632 bp, Homo sapiens
agtatcgttgccatgattttatttcagttttgttttcctcaaaatagaatttgctgaacttttagaaggaaaaaatgtttcttctatagacctaatcaagcttgttaaataaaattattacctgcttgctctgaggttccaaacttttcagatacccctaatgatcatctccccatgaattatgaaactggtttggctctgatatatggttattgacatttgtgtagcattgtacacagactgattttatgtggcataaaagatttcacaaagrctttaaaattatgttcattttacttgatgggtgtgtgttcaattaaaaaaaaaagtccctgtgattgtatataaaatatagtatcctgtgatgatgagggtgttagatttagtttcttcctttataaatgaaaatagccatctcccataattattatgaaagctaaatgagaaaaatgtatataatttataaagttagattcaaggatttaattcatttgtaaagttggcttcaaatatagagtattactataatctagttgcctctaaacctcagtagccagctttttattgtgacagggaacctctattgaggtttgaggtaatgagggtaaaagtgtaatttcccagagaagaag

SEQ ID NO: 612691 - DNA, 559 bp, Homo sapiens
atggccaggtaatttggaataaacaccctacagaaaaaatatatattcaagttgcataagtcactttgagcaatcctttgaggatatttcatttatatctaaatgaacctcaggtttagctggcttttccggaaaaccagaagcaaataatgtatgattataatgaaaaccatctcaagcaatttggaaatgaagtaccacatgtcttatgctgtcccttccawacacttgacaaaacagcctataacaaattgtttactttgagatttagcaggaaaattccatgagatttaaatgagatgactactaataagccatctacctttgactctattcctattaaaaatgggttaggaaagtgctttcaaaatcaagtgtgttcatcagggaatcatttacctaagtcttcttaacactgcttagtgaatattaagcctgatatagtaaatacacgctaaccactaaattgaaggggaaagagggagaacaaagaggcatgtaaagtacacttactttttctagtaggaaaaagccaattaaaactatcacctattagtta

SEQ ID NO: 612692 - DNA, 559 bp, Homo sapiens
atggccaggtaatttggaataaacaccctacagaaaaaatatatattcaagttgcataagtcactttgagcaatcctttgaggatatttcatttatatctaaatgaacctcaggtttagctggcttttccggaaaaccagaagcaaataatgtatgattataatgaaaaccatctcaagcaatttggaaatgaagtaccacatgtcttatgctgtcccttccatacacttgacaaaacagcctataacaaattgtttactttgagatttagcrggaaaattccatgagatttaaatgagatgactactaataagccatctacctttgactctattcctattaaaaatgggttaggaaagtgctttcaaaatcaagtgtgttcatcagggaatcatttacctaagtcttcttaacactgcttagtgaatattaagcctgatatagtaaatacacgctaaccactaaattgaaggggaaagagggagaacaaagaggcatgtaaagtacacttactttttctagtaggaaaaagccaattaaaactatcacctattagtta

SEQ ID NO: 612693 - DNA, 559 bp, Homo sapiens
atggccaggtaatttggaataaacaccctacagaaaaaatatatattcaagttgcataagtcactttgagcaatcctttgaggatatttcatttatatctaaatgaacctcaggtttagctggcttttccggaaaaccagaagcaaataatgtatgattataatgaaaaccatctcaagcaatttggaaatgaagtaccacatgtcttatgctgtcccttccatacacttgacaaaacagcctataacaaattgtttactttgagatttagcaggaaaattccatgagatttaaatgagatgactactaataagccatctacctttgactctattcctattaaaaatgggttaggaaagtgctttsaaaatcaagtgtgttcatcagggaatcatttacctaagtcttcttaacactgcttagtgaatattaagcctgatatagtaaatacacgctaaccactaaattgaaggggaaagagggagaacaaagaggcatgtaaagtacacttactttttctagtaggaaaaagccaattaaaactatcacctattagtta

SEQ ID NO: 612694 - DNA, 559 bp, Homo sapiens
atggccaggtaatttggaataaacaccctacagaaaaaatatatattcaagttgcataagtcactttgagcaatcctttgaggatatttcatttatatctaaatgaacctcaggtttagctggcttttccggaaaaccagaagcaaataatgtatgattataatgaaaaccatctcaagcaatttggaaatgaagtaccacatgtcttatgctgtcccttccatacacttgacaaaacagcctataacaaattgtttactttgagatttagcaggaaaattccatgagatttaaatgagatgactactaataagccatctacctttgactctattcctattaaaaatgggttaggaaagtgctttcaaaatcaagtgtgttcatcagggaatcatttacctaagtcttcttaacactgcttagtgaatattaagcctgatatagtaaatacacgctaaccactaaattgaaggggaaagarggagaacaaagaggcatgtaaagtacacttactttttctagtaggaaaaagccaattaaaactatcacctattagtta

SEQ ID NO: 612695 - DNA, 263 bp, Homo sapiens
caagccctactttacctctaattactcttacagcaatgcaatgaatcatgatttaaaatttaaaaaaaaaaactgctgttaaattattagtcaagcgcccagggcaatggacagtaaagaaataatgtaggccatgggycgagatgacaaaacggtccttttatttaaagctataacaataatctgaagccagccctgtaaaatagacatccattgaaaaaggcatgctagttcttttgcttttttgtgtacttggcctcctg

SEQ ID NO: 612696 - DNA, 503 bp, Homo sapiens
aaacaaattgaactgacatgccttgactctaattttcttttaagcacccctctcattatatctttttcaattatttaataaactaggcattagatatcttcatgttggtctaaggcccaatacttcttactactcacagaacccatcagccaaaattactcagtgaattgactccacgcaggtagctctaagtagcatgagagtgattgaaagtgtgtgatactctaaacgatgtttttgttttgttaagaggcttcttgttaatgtattggtgatagttcaggcaatataataagtgaaaagaggaaaagatwcgataatcgtaatttcctgcaaaagaataacctcactggcatttcagtctaagtataatctcctcaaatgttctacttttctcaatatcatgcaaatccttgtctaaatccatttctacctcaatgtctcagttgtttttttctttttccagattccaagtaccacatggggtctgtgcatgtgtagtt

SEQ ID NO: 612697 - DNA, 503 bp, Homo sapiens
aaacaaattgaactgacatgccttgactctaattttcttttaagcacccctctcattatatctttttcaattatttaataaactaggcattagatatcttcatgttggtctaaggcccaatacttcttactactcacagaacccatcagccaaaattactcagtgaattgactccacgcaggtagctctaagtagcatgagagtgattgaaagtgtgtgatactctaaacgatgtttttgttttgttaagaggcttcttgttaatgtattggtgatagttcaggcaatataataagtgaaaagaggaaaagatacgataatcgtaatttcctgcaaaagaataacctcactggcatttcagtytaagtataatctcctcaaatgttctacttttctcaatatcatgcaaatccttgtctaaatccatttctacctcaatgtctcagttgtttttttctttttccagattccaagtaccacatggggtctgtgcatgtgtagtt

SEQ ID NO: 612698 - DNA, 540 bp, Homo sapiens
tctccttccttccttccttccttctttctttctttctggagtcttactctgtcgccaggctggagtgcagtggcaagatctcggttcactgcaacgtccggctcygaagttcaggtgattcctcagcctcagtgtcccaagtagctggaattacaggtgtgtgccaccacgcccggctacttttttgtattttagtagagacagggtttcctcatgtcgtccaggatggtctcaatctcctggcctcatgatccacccacctcggcctcccaaagtactgggattacaggcgtaagccactgcgcccagcctaaaaattttcttaatagtatatttagaaggcttgagatacattatattactatagataaaataaccatataagtctactgttgaagcaatttcaaagtaaagcagattctgtgtgtgtgtgtgtttgtgtgtgtatacctaaatgattgcacaccacacatacacttagttacataagtacataggtacatataggtatatcatatgtagaactcttccatatttagt

SEQ ID NO: 612699 - DNA, 588 bp, Homo sapiens
aaaaccaactcataacaatatgaagaatatataaaatataactagtagaaaaaattaggaatgagactaatagatgaaaggtgaatacaactagtgtgagaaattaagagtacaaataatatgtctaagtacaaggttatcagggcttaaattgtaatgaaggagtcaaagaggtggtaaaaatataaagaagaaatacaatcctaaacacgaagtttaaaattctgtaggaaacagtcggcttatatttttactaagtttttcaatatgggtcctagagctggtttttccaaatattaacaatgatattcagtaagtccttctcttctctgcctcaaatgtactgcctcaaatttctcctgcaattgtacctttcttttacagactcttctgctcttaactaaatagttctaattgcatatagccaggctatattatatcccatctaatggaaaaaagaaaacatccctggataccatcgttccttctaattattgttccagtttttcagtttctttttcaagagttaactatactctgttaycttatcttttcctcacaatttaatcttgagctcattctagtcaa

SEQ ID NO: 612700 - DNA, 189 bp, Homo sapiens
tgattgccactggaatacacaaggtacaagccagcatgactgtttcagatcctatgcatctggttttctttttctttgctttgagaatgataatcttttagaagatgtcatgcttcagtrgtaaaccccatagatgccaaatattaggttggcacaaaagtaattgtggcttttgccattaaaagtaat

SEQ ID NO: 612701 - DNA, 467 bp, Homo sapiens
acaaaacagatatcaatgctgagcccgtgaaatggtgctaatggctccaaggagactaattcagttgctcatgagaaggtaattatttccagtccttgtatcctggagggaagcatttcatccaaaacagaattagctcttactttattactgattttccttccctgcctatagttttactgacaacaccaacatctaagatttataacatgtsacagcatttcagtttaaaagatccattttatataaaagacagggtgacaatgagaacatgattatgagatccactgattctatcccaggtcatattatccagaattaccaggctaatggtataatgggacgtcttattaaagactcaactatggtaccatgtccaacactcctcagggttgcagtgttgtctgcaagaatacagtgtatgcattgaaatgatttcttgaaatatgaaatttgaatcaaatggt

SEQ ID NO: 612702 - DNA, 467 bp, Homo sapiens
acaaaacagatatcaatgctgagcccgtgaaatggtgctaatggctccaaggagactaattcagttgctcatgagaaggtaattatttccagtccttgtatcctggagggaagcatttcatccaaaacagaattagctcttactttattactgattttccttccctgcctatagttttactgacaacaccaacatctaagatttataacatgtcacarcatttcagtttaaaagatccattttatataaaagacagggtgacaatgagaacatgattatgagatccactgattctatcccaggtcatattatccagaattaccaggctaatggtataatgggacgtcttattaaagactcaactatggtaccatgtccaacactcctcagggttgcagtgttgtctgcaagaatacagtgtatgcattgaaatgatttcttgaaatatgaaatttgaatcaaatggt

SEQ ID NO: 612703 - DNA, 453 bp, Homo sapiens
ggtctcgatctcctgaccttaggtgatccgcccgcctcagcctcccaaagtgctgggattacaggcatgagccaccgcacccggcctatggtgcttattacagtagaaaataatgcgtttgttttcccatctattttatccattagaatacaagtctcataagagcaagtaaagttttcatttttaaaccctagctcagagaatggtcatgaatgtttagcagattaaaaaaaactagtacaagatagagtgaactgaacaccccacaaaatacctggaaaagctagatctgctcagtttttcacaacaaaacatgtattgcttttctctgctttattttcaaattgcatatattaatatgttaaagaaagtaaacttaagttcttatygccctaaattaagtactattcatagactataattgtctgtttctctttctatagatatatatgc

SEQ ID NO: 612704 - DNA, 563 bp, Homo sapiens
gctaccctcaacctcaatcaatattgttactctagaaaatgggaaagattatttataaataatatttatattcattataaatcatcatgaatatttcttataggttttaaagaacacagctaaaaaaatggtgaaggcattgttttcctttaccctctctttgttgtcattattctttatattctaagtgcatctgtttttctcagggttcttttgcctggaaagtaatctgatattaattcctactaatgtgcccatgtctcaattattcatttattgtaaaaataggactcttgtcttaaaggtagatttggaatgattttcttggaatctaatctaaagactcctattcaagaagagagatctgaggtaagccgcctaggttttctgtcttttttgtttttgttgttgtttgtttgtttgtttttaaattgagacaggttctagttctgccacccaarctggagtgtagtggtataatcacagctcactgcagccttgacctttcttgacccccccaaactcaagagattctcccacctcagcctcctaagtagctggga

SEQ ID NO: 612705 - DNA, 569 bp, Homo sapiens
ctggtcagtaggatgaaacacacagcccagtagaaaacctactgacagaagtgcataggagtatacaagtaaagccaaaattaccctacccaacaaaatttattgcagatgagaaggaagcgacataagaagtctgcccacacaaaaaaatttgaacgttgtgatcccacgaaaacatcactctagctctcagcaatggtcccaaatcaagttggaaattcaggaatgatagataaagaattcaaagcatggattgcaagggagctcaaggagatccaggaygagattgaaaataaacacagtgaaaattctgaagcaattcaggaaatgaagtaagagataaaaatcttgaaaagaagtcaatcacattttctggaactgaaaaactcacttaaggaatttgaaaacactgttgaaagcttcttcagtagatggaccaggcagaagaaagaattttacagcttgaaaatgagcctttcaaattaacccaatcagaaaaaaaaaatgtttgaaacatttttaaaaaatgaacaaagtctctgagaaatatgggattatgtaaagcaacc

SEQ ID NO: 612706 - DNA, 592 bp, Homo sapiens
tgaatatatgtgttctgctgaagatctgaataaatgtgcttcactgagggcccaggatgttctcctcttcataatggaaattttgaagtttcagttggttttaaatctttggggagttttgtttaatgaaaatacattggtaatatgatgcctctacaaatttctatttaggaaattaatagaatttaaaaaggactagacgttttccaaagaaataactcttaaacatgtacattaatcacagcaaaagaagtgttaagacctaagaaacccaactttagaaggttattcttagcaattcacaaaagtaacatttaaactgcttgtactaacttcaaatttagaagatgaaactatgagtttttgttgctgttgttgttgtcattgttgttctattactttgtagataatagtaaagcmctattttaatgtaatttattccaactataataaaatttgtccaactggatgtagagtttagctacctttggcagcacatcaactagaattgaaagaattagcacggtaaaaaggtcggtgttaatctctgcatgggtgaaagtcatacttgccaaatattgacttgataaat

SEQ ID NO: 612707 - DNA, 577 bp, Homo sapiens
tttgataggaatagcatttaatctgtaaattgctttgggcagtatggccattttaacaattgtaattcttaggagcacagcatgtttttttcacttgtttgtctaatctctgatttctttcagcagtgttttgtaattcttgttgcagagaaaagatcttttactttcttgggtagctgcattcctaggtattttattctttctgtggctgttgtaaatgggattgtgttcttgatttggctttcagtttggatgttattggtgtatacaaatgctacttatttttgtaccttgactttgtatcctgaaactttactgtagtcacttggcacttttaggagccttttggtggagtctatagggttttttaggtgtagaatcatataatctgtgaagaaagatagcttgacttccccttttcctatttttattttttggtcttgcctgattactctggctaggacttctagtactatgttgaataggaayggtgagagtggacatccttgtcttattccagttgttaaaaagaatgcttctagcattttcctgttcagtatgatgttggctatggtcc

SEQ ID NO: 612708 - DNA, 576 bp, Homo sapiens
agtctcaaaaaaaaaaaaaagtctcaaaaacaaaaaacaaaacaaaacaaaaaaacaggatcatttagtgctttagggctgcgacctaagtgtttctttacttcattattccacagacccttccaaatactccacaccaaccaagaaaccgcacatccaccatctgaaccaactcaatttccccttcctccttgcccccttaccttctgccacacaggagatcttctactctgtgtcttctytgtcttcctatcacctaagtgcaccttactctctagccccaagttgataaccttgcacttccaagtgtgtccagattcgtctgaatagtcacttctttaacctttacaaaccatggcttccttccctctgaactgcagtcatgtctgcaagggcagcgtcaaactttgtgtgatctttattgttatatattttatctcggctgctggactcagcttgtttttctacaaagctgcttgaccccactctgaatatatattctctaggattaattgacctttactgctttaccgctttaattttgtcactaagccatcaatgagctcactgccccat

SEQ ID NO: 612709 - DNA, 597 bp, Homo sapiens
ttttagtttaattaagtcccatttatttatttatttttgtttttgttgcatttgcttttgagttcttggtcatgaactcttagcctaagtcaatgtctagaagagtttttctgatgttattttctagaatttttatggtttcaggttttagattcaartctttgatctatcttgcgttgatttttgtataaggtgagagatgagaatccagtttcattcttctacatgtggcttgctagttttctcagcaccgtttattgagtaggatgtcctttccccaatttatgtttttatatgcattgtcaaagatcagttggttgtaagtatttggctttattcttggattctctattttgttcctttgctctacttgcctatttttatgctagtaccatgctgttttggtaagtataaccttatagtatactttgaagtctagtaatatgatgcctccagatctgttcattttgcttagtattgctttggctatgcaggattttttttttggttctagatgaattttaggattattttttctagttctgtgaagaatgatgatttttgatgggaattgcattgaatctgtagattgcattg

SEQ ID NO: 612710 - DNA, 597 bp, Homo sapiens
ttttagtttaattaagtcccatttatttatttatttttgtttttgttgcatttgcttttgagttcttggtcatgaactcttagcctaagtcaatgtctagaagagtttttctgatgttattttctagaatttttatggtttcaggttttagattcaagtctttgatctatcttgcgttgatttttgtataaggtgagagatgagaatccagtttcattcttctacatgtggcttgctagttttctcagcaccrtttattgagtaggatgtcctttccccaatttatgtttttatatgcattgtcaaagatcagttggttgtaagtatttggctttattcttggattctctattttgttcctttgctctacttgcctatttttatgctagtaccatgctgttttggtaagtataaccttatagtatactttgaagtctagtaatatgatgcctccagatctgttcattttgcttagtattgctttggctatgcaggattttttttttggttctagatgaattttaggattattttttctagttctgtgaagaatgatgatttttgatgggaattgcattgaatctgtagattgcattg

SEQ ID NO: 612711 - DNA, 597 bp, Homo sapiens
ttttagtttaattaagtcccatttatttatttatttttgtttttgttgcatttgcttttgagttcttggtcatgaactcttagcctaagtcaatgtctagaagagtttttctgatgttattttctagaatttttatggtttcaggttttagattcaagtctttgatctatcttgcgttgatttttgtataaggtgagagatgagaatccagtttcattcttctacatgtggcttgctagttttctcagcaccgtttattgagtaggatgtcctttccccaatttatgtttttatatgcattgtcaaagatcagttggttgtaagtatttggctttattcttggattctctattttgttcctttgctctacttgcctatttttatgctagtaccatgctgttttggtaastataaccttatagtatactttgaagtctagtaatatgatgcctccagatctgttcattttgcttagtattgctttggctatgcaggattttttttttggttctagatgaattttaggattattttttctagttctgtgaagaatgatgatttttgatgggaattgcattgaatctgtagattgcattg

SEQ ID NO: 612712 - DNA, 567 bp, Homo sapiens
gttcttggtcagcggatctcattcattggagtagagtggaagagaggagttgcaaacgggtcatttgaagacctcccagcttctactgtcatgacagcatgtaaattgtaggccttaactgtagacttcacaccacgctaataaagaacattctgtactcaataggattacagtacttctatggaccaaggactggtatgtctggaattatgctgtgccagtttccatggtaaatgggawgtatcagtgggtagataactttccatttcatttttaaacatccagattaaaaagaaaccacattgtacaattggcttaacctataatgtagataaatctacaatgtagatagaatataaaaatacttcattttccaacatgatgattacaaggcatcacccaaaaggactggactttgatcttgatgatgtaactatgtgaattcttgagtcacttctgaaagagtttgagtgcagtttattaccaactagagagtgaattaggcttttaatggtctctagtagatactagtgatcttcacaattactcatttcctcttcctgttaa

SEQ ID NO: 612713 - DNA, 573 bp, Homo sapiens
atgaaccaatggagtcattttttacaatcatgctctgtaatgtcttccacatcagcaaacattatcaaacattctgtaagagaattttgcagatttttcctatagttggaaataataaacatttgctaatgaacraagatttgaatccacttattagaacgtcttgactccaataaatgtatgggtcttctcaataaattagctaacacttattcaagttttgatcaatgtattgatattgataggcaaaactttcaataccacagtcttaaaatttaatacaggaagccttttcaaggttaattgtgggaatatagatagtgttatagaaattaatttccacatagataattcccctaagttcatttttactaaattcaatctgcctgagaattgacctatatatgtctactggttcttctctcccatatccttccctaatatcttgtgctttacaaaaggaaaatacatctccttgctctttttaattttcttctgatgtattgcttaaggtggattgcacctgggatgcaacagaaagtgtcagttagaattattggttcttatggaagc

SEQ ID NO: 612714 - DNA, 573 bp, Homo sapiens
atgaaccaatggagtcattttttacaatcatgctctgtaatgtcttccacatcagcaaacattatcaaacattctgtaagagaattttgcagatttttcctatagttggaaataataaacatttgctaatgaacgaagatttgaatccacttattagaacgtcttgactccaataaatgtatgggtcttctcaataaattagctaacacttattcaagttttgatcaatgtattgatattgataggcaaaactttcaataccacagtcttaaaatttaatacaggaagccttttcaaggttaattgtgggaatatagatagtgttatagaaattaatttccacatagataattcccctaagttcatttttactaaattcaatctgcctgagaattgacctatatatgtctactggttcttctytcccatatccttccctaatatcttgtgctttacaaaaggaaaatacatctccttgctctttttaattttcttctgatgtattgcttaaggtggattgcacctgggatgcaacagaaagtgtcagttagaattattggttcttatggaagc

SEQ ID NO: 612715 - DNA, 621 bp, Homo sapiens
caccaaataacttggaaataataccctgcattctaccatacatctcactgcataaataacttgtagttttttttcttctttttttaacatttaagttcagggatataagtacagtttgttacatagatatatttgtgtcgtgtgggttttctgaacagactatttcatcacccaggtattaagcctagtgcccattagctattttcctttatcytccccctccttctgccctccaccctcctgaaggccccagtgtgtgttgttcccttctatgtgtctatatgttgtcatcatttagctcccagttatgagtgagaacatgcagtatttggttatctgttcctgtgtcactttgctaatgataataacctccagctccatccatgttcctccaaaggacatgatcttgttcttttttaaggctacatgctattccaagttgtatatgtactacacattctttatccagtctatcatcgatggacatttaggttgattttatgtctttgctcttgtaaatagtgctgcaatgaacatacacgtgcatttgtctttataatagaatcatttggatatatacccagaaatggaattgcttggtcaaatggtattcctgtcttt

SEQ ID NO: 612716 - DNA, 635 bp, Homo sapiens
tccagattctgactgtttcttcactttactaattttaggattaaagcatataaaagtattcatgggactgaaaaattgtttaatcctaatgtcaatatataaacatggaaaagtctcgaggtgttacatgaatctgacagtggcagttaagaagtaggtctctggtttcccgatgctgtttttattttattttattttattgatgtaagccatgttatttcttatcaatatcttttatatttttcatatctgtatattctttataatgacaatttaaattactatggttataaattactactagtgttaatayttcctggaacagtaaaaagaagtagaaaagatatgtgacatacaaatgaattgaaaataacttaaattacagaatatttttaaagccatatatttatcattctagtgttgcacaaacacgaaatctatgtaaacaataggattagcatgaaaactatgtaaacaacaagattagcatatttgccctagatcatttttcccttttgtaatgactgaccagtgatgagtgtcttggcaatacatacatacacacacacacacacacacacacacacacacacacacacacagagcattaggccatttgcattactattaaggaa

SEQ ID NO: 612717 - DNA, 580 bp, Homo sapiens
tacctctaaaaataagctccttgcttaaaatgtttaaggttggtttacttactcaaaaaagagatttgttggaagggttaaatgaatttacatctgcaaaaaagcttaacatagcatgttgtacatagtcaatatttaataacttaaggacatattggtgtaccctagttacaaaaactttttcctgtctaaacacataaagaagttattgaaggcattttttttcattttgtcagcatrcaagtattttatttttctaaaatcctggttaattgatcgtacatttttgtttcatattagagttgtatttcacatcaatgcagtaagtataattgcttcaatttatataaactcaaatgtttgaaagataaaatataatgtaaatatttaaaaactattaacatttctaattctgaaataatgatgggaagcgataattccctaacgttgatcagttaagattttcacattcttgatcattttatataaaatataatcaagtcaaattatttttgtcataaagcaaacctaccttttagacctaaaaaaattaaacaagaaaaagttgttttgtatcaca

SEQ ID NO: 612718 - DNA, 540 bp, Homo sapiens
aataggtacatacccaaaggaatataaattgtcctattataaagatatatgcatgtatatgtccattgcagcattatttatgacagcaaagacatggaatcaacttaaatgcccatcaatgagatagactgcataaatgtgatacattatacaccatggaatactatgtagccacaaaaargaacggatggtgcgggaggccattatccttagaaaactaatgcagaaacagaaaaatctaatagtatgtcttctcacttataaatagcagctaaatgatgagaacacatgtacacatgtaggggaacaacatacactgggtcctcttgcagggtgtgggttggaagtggggagcagatcaggaaaaaatagctaatggatgctgtacttaatacctggttgatgggatgatctgtgcagcaaaccaccatggcacgtttacctatgtaacaaacctgcacatacttcacgtgtccccctgtatttaaaagttggaaataaaaaacaattaattataagtcctacggtttgaaactgctg

SEQ ID NO: 612719 - DNA, 576 bp, Homo sapiens
gttattttatgactttttaataattgccattctgactggtgtgaaatggtatctcaccgtggttttgatttgcatttctctaatgattagatgattaatgattagkgtcttcttttgagaactgtctgttcacgtccttggcccatcttttaagaaggttatttggtttttgtttgtagaattgcttacattccttatagattctggacattagatctctgtcagatgtgtagtttgtgaatatctctcccattctgcaggttgtctgtttactctcttaatagtttctttatctgtgcagaagctttttagtttaattaggtcccacttgtcatttttttgttgttgcgattgcttttggtgacttaatcacaaaatcgacagtaacaaagagtggagaaaggaccccctatttaataagtggtgttgggataactggctagcccatatgcagaagattaaaactgaacccctacattttaccatatggaaaaattaactcaagacaaatcaaagacttaactgagaccctaaactatgaaaatcctagaagaaaacctaggaaataccactctg

SEQ ID NO: 612720 - DNA, 576 bp, Homo sapiens
gttattttatgactttttaataattgccattctgactggtgtgaaatggtatctcaccgtggttttgatttgcatttctctaatgattagatgattaatgattagtgtcttcttttgagaactgtctgttcacgtccttggcccatcttttaagaaggttatttggtttttgtttgtagaattgcttacattccttatagattctggacattagatctctgtcagatgtgtagtttgtgaatatctctcccattctgcaggttgtctgtttactctcttaatagtttctttatctgtgcagaagctttttagtttaattaggtcccacttgtcatttttttgttgttgygattgcttttggtgacttaatcacaaaatcgacagtaacaaagagtggagaaaggaccccctatttaataagtggtgttgggataactggctagcccatatgcagaagattaaaactgaacccctacattttaccatatggaaaaattaactcaagacaaatcaaagacttaactgagaccctaaactatgaaaatcctagaagaaaacctaggaaataccactctg

SEQ ID NO: 612721 - DNA, 540 bp, Homo sapiens
tgtttataatttgtgacatgaatagattatttaactcaaatttaaaaagtaaaagaaagattatatatctgatttattagaaaaacaaagcagagacaatggggaatttgataaagccaatagaatccaaagcagtagaaaaatgaaaatctagtatttgtaattcatctatattgtggttggtctgaaaatattgaaagaaattttatttttttacccaacwtgtaaggaaaattatagacacatatgtagcatagatgatatctgtgatccacagaaaaaaatagcttgtgttttcattattaatttttggagtgagggcttaattaatatgtattttaaacagcatttgggaagatcagtgttttcctatatcttggttatttagtcttataaaaaattcctctgtatcttttaaacttatattattatcttcatgtaaggaaattcaatcccaggaacttagcttaaaggcagagataatccctattttccataaagttatctgtgataataacactgacaccaacataccattta

SEQ ID NO: 612722 - DNA, 496 bp, Homo sapiens
taataaagaatactttacaaaagaaaattcagttactggattataactacattttactgcctgaaacattaataaatcccatcttcagcttttccttgtgacacacagatcttgttacaataaatacaatcttcaattagaaatcattatttaaatagtggctccagratcgattaagatatttaaaattatgtagcatagccaccaaatggactatgccattcccaattgcattagagtttcctagttatgtgtaaaacaaaaagacaaacaaaaaaaaagtaataaaccgatgaacaagaagaactccaatctaacctgactttaaggtaagcattacagataaatcagtgattgaaaactagagaaataaatattttaagaattaacattcatttatttttttttatggcaccctcaattggtgatgatgctatgagtagtatttttacatcttgcaagtttgagaataacttctctaatgtcatgtttctaa

SEQ ID NO: 612723 - DNA, 534 bp, Homo sapiens
taatatgcatttctgtcatttattatagttgccataacaaagcaccatgcaccaagtggctcaagcaacaggaatgtattatattagttatgaatgctagaagcccaaggctgaaggtataggcagggtaagtttcttctgaaggtgtctcttcttgagtttacattgagggccaattttacaggtgtattcacatggtgtttcttctgtcaatgtctgtcctaatctcctatccatataagagtatctgttataatggattaagggccrcaccagtgacctcatttaaccttaattatcactttaaagaccataactccaaataaactcacattctaagaagtagggagttagaacttctacatataaatttggggaatggaactcaattcaatgtataacacaatagtattttttccagagtaaatttcgaccttttttggctccagaaaatgttttccattatatataaatatcaagttcatttctaaaaagaagacatacaaatggccaacaggtatatgaaaaaaatga

SEQ ID NO: 612724 - DNA, 547 bp, Homo sapiens
cttttgtggtcgcattgccttctttttgcaaggaccattgtaattatattaggcctacccagataatccatgaaaatatccacatctcaagatcaataatttggtcacatgtgccaagtactttttgttgtacaaagtaacatattctctggttttggggattaggacgtggacatctattagaggtgagagtagcattattctgcctatcacatatagcaaatttaaaaacctatatcttttaaataattgtatatatttaaggtgtacaacatgatgtttttatatacagatacatgaaatgattactacagtcaagaaaattaacatatccatgtcctcccataattatcttttttgtcttttgtgtgtatggtaaaagcttctaaaatctactcttttarcaaatttccagtatacaatagagtattattaactgcagtcatcatgctgtacatttgatttccagacttacccatactctataactgcaattttgtacactttgacaaacatctccccatttcccccacctctctgctcctgg

SEQ ID NO: 612725 - DNA, 609 bp, Homo sapiens
gtaatgtcataatcatatatgcttgcatgtgttatcataaacataatgataatttagtgtcatttcaaggaaatacattttcattctatgcctstttcattctatgccacaattctgggcttgtttatgaaaagaagctgtgtggcatgagtgtaccaattcatgttaccttattcatgactgttctacctttatcataaacattaagaggatcaataaattaggggtgcttatcagagagctgaaataaataataaatttaaaatgtatagttgcctttggcgtcacccaacatccactgctgattcttggcccttttctattactggagacatctcccctgggccttaccattagtgccctcattaatgctgctgagaacaagtcacacagactttcccaagtcatgttccatggaaatctctacaatcatcacattcctggttgatgtgccctaggggtacttgccatctaaccaaattactgataaaatggaatgatggaacagcatatatgcaatgtgtttttggaatacagacctgaattgtccaataaagtaacctctacccaccaggagctatttaaaatttaataacattaaaattcagt

SEQ ID NO: 612726 - DNA, 609 bp, Homo sapiens
gtaatgtcataatcatatatgcttgcatgtgttatcataaacataatgataatttagtgtcatttcaaggaaatacattttcattctatgcctctttcattctatgccacaattctgggcttgtttatgaaaagaagctrtgtggcatgagtgtaccaattcatgttaccttattcatgactgttctacctttatcataaacattaagaggatcaataaattaggggtgcttatcagagagctgaaataaataataaatttaaaatgtatagttgcctttggcgtcacccaacatccactgctgattcttggcccttttctattactggagacatctcccctgggccttaccattagtgccctcattaatgctgctgagaacaagtcacacagactttcccaagtcatgttccatggaaatctctacaatcatcacattcctggttgatgtgccctaggggtacttgccatctaaccaaattactgataaaatggaatgatggaacagcatatatgcaatgtgtttttggaatacagacctgaattgtccaataaagtaacctctacccaccaggagctatttaaaatttaataacattaaaattcagt

SEQ ID NO: 612727 - DNA, 609 bp, Homo sapiens
gtaatgtcataatcatatatgcttgcatgtgttatcataaacataatgataatttagtgtcatttcaaggaaatacattttcattctatgcctctttcattctatgccacaattctgggcttgtttatgaaaagaagctgtgtggcatgagtgtaccaattcatgttaccttattcatgactgttctacctttatcataaacattaagaggatcaataaattaggggtgcttatcagagagctgaaataaataataaatttaaaatgtatagttgcctttggcgtcacccaacatccactgctgattcttggcccttttctattactggagacatctcccctgggccttaccattagtgccctcattaatgctgctgagaacaagtcacacagactttcccaagtcatgttccatggaaatctctrcaatcatcacattcctggttgatgtgccctaggggtacttgccatctaaccaaattactgataaaatggaatgatggaacagcatatatgcaatgtgtttttggaatacagacctgaattgtccaataaagtaacctctacccaccaggagctatttaaaatttaataacattaaaattcagt

SEQ ID NO: 612728 - DNA, 609 bp, Homo sapiens
gtaatgtcataatcatatatgcttgcatgtgttatcataaacataatgataatttagtgtcatttcaaggaaatacattttcattctatgcctctttcattctatgccacaattctgggcttgtttatgaaaagaagctgtgtggcatgagtgtaccaattcatgttaccttattcatgactgttctacctttatcataaacattaagaggatcaataaattaggggtgcttatcagagagctgaaataaataataaatttaaaatgtatagttgcctttggcgtcacccaacatccactgctgattcttggcccttttctattactggagacatctcccctgggccttaccattagtgccctcattaatgctgctgagaacaagtcacacagactttcccaagtcatgttccatggaaatctctacaatcatcacattcctggttgatgtgccctaggggtacttgccatctaaccaaattactgataaaatggaatgatggaacagcatatatscaatgtgtttttggaatacagacctgaattgtccaataaagtaacctctacccaccaggagctatttaaaatttaataacattaaaattcagt

SEQ ID NO: 612729 - DNA, 569 bp, Homo sapiens
ataactgttgacagtagcgaaatccttcacgtattttgattctattcacttagctacatatttgctgacaaaatgcttgtcaattctatgattcattctcactgagactgctgcaatatatttcttttgggttttagtctattccttccctcattcttcaccaataaaatgccacacaataggcagtgttttgtttgcttgtttgttttgctttacctaagttctcagataactttttgtgtatataatatgccaatcttttaacattttctgtaacctgaattgttatayaattgtgtaaaaaggatgaaaggcagtactatttataattacaccaaaacaataattatgacctaattttggacatgctgcactgcatggttgccctgtctctaatgacccatgacatctgcttcctacctacatattcaaccttattgcatttcactctccaactgtatttctccacttcaactgcaatgcccttctatttatgtgttcaatacaattatttgtgtcagttcaatacaaatggtattataagtgttcccaggttgggtttggtggat

SEQ ID NO: 612730 - DNA, 555 bp, Homo sapiens
ttcagatctttaaaatgtattataaagagaatgtaagagagttcacttttagcaacctcagttataggagtttttgaactctcctataagaacatgcaagtacatttcacacacacacagttattttctgttctcataagtgatttagattaacggtgtcccatttcctaatttcttgtagataaatcagattaacccaacatacaacttttgtccagtaatatgcaggtgccctccccccaccattgttttcttcaatcagttctgacacaagtttttaagtcttgatatctcactgtctatattttaaaaacaccatcgactatgataaggaatcaaaaaaatctaagcacttaagtaatacagctgtattccccacttacacaaagtctaatgtgaatgttctttgccacacgcgtctctttggtggctcctctccaaacgataaactcaaggactcatgcttcttccactgaatacctctattagcataacagttttcagtcatgcataccagaaaagagaragacagagggaaaggtcatcatcaaaatc

SEQ ID NO: 612731 - DNA, 400 bp, Homo sapiens
acccatattggttgaaaacctaaacctaaaacctaaatttttcaattcctttttttttttttttttttgagatgagtcttgctctgttgcctaggctggggcacagtggcacaatcttggctcactgcaacctccaccttctgggttcaagcgattctcccacttcagcctcccaagtagctgggacttcaggcacgtgccaccacgtcctgctaatttttgtgtttttagtacagtcagggtttcaccatgttagccagactggtcttgaactcctaaccttgtgatctcccrcctcggcctcccaaagtgctgggattacaggtgtgagccaccgtgtctggcctcaattctttttctacttgactaccaacatttgatggagaatttaccaatgaga

SEQ ID NO: 612732 - DNA, 584 bp, Homo sapiens
gtctgttcatatcctttgcccactttttgatggggttgtttgattttttcttgtaaatttgtttaagttctttgaggaaaaagcaccagaaacaatttgctttcatatggcgcaacaaaagtatatttttactgtcttattatataaatattatgtgtctcacattctgagatatgctgaagaggtattgatcttcttactcttccaccagaaattacattgtcctactacatgaatgggatcattctcacagggcctacttagcagcttgtctcatgtaccacaaatgttttgttaagacttagcatactacagcataggagaaagactccatgtaaaattcaggagtgaaacctgcccctcagtgttgtcttcttggtttaagtcaggtcagactattttttctaaagtgaaataaaagtcatttcacctatgagcctgttygagtttcagaaaaaatgtttttcaaatttggtaacagtattctgatctttttactgtataaatcataggactgtcagtatttttacaggcttagataagtctttgctctaaacaggtgtgttacttgattattatgacat

SEQ ID NO: 612733 - DNA, 498 bp, Homo sapiens
aatgcttatgcataagcttttagctttagattatttatctctccacttttgctttttcctctccaaaaagtaaacttaaataaatgcaccacatccacgcaaaataatcgtaaatataaaataaacatttcaccagacataccaactagagcatataaaccatgaatgattacaagagtcagctggaacctcaagggtagaacactagtgtaatctatcaataaaaaaactcttacctacaaggttaatcattgtaggtgtgggatgctgctacctaagttgaaataagtaccctccctcygaaaaaaggaaggactcttgtgattctgatatttctagtcccatcaatgcagcggactgatagctaatttgacagaaacaaacaaacaaaagacataattaaatatattatgcttatagaaaatttggggttgcttataattcacctgtactttacaaatgttatccacatttaggttttttgatatcatgaagcgg

SEQ ID NO: 612734 - DNA, 420 bp, Homo sapiens
ttttttttttttaatcaacttgcccttacgtgaggtacatgcaaaggaggaatggggggaggcttttttgtataataaattatttgcatagtcatttttcctgggttcctgggatgaagcttctatgctcttggaatctccccagtgataagagtatctttattaatcatggtggggacttcctgattttatggtaatgaggccatttatggtaggcccataaataatctctggatggggatgccattaggaaaagaccaaccatgtaattaaacggtggcctctaagccagatcatagaaacacaacatttaggraggggaggttggctagatattgagttcagctacacagccaatcattcccactaatgaaactccaacaaaaactgtggactcggaatttggatgacatgattggt

SEQ ID NO: 612735 - DNA, 522 bp, Homo sapiens
taatttgtacgttgatatttatgtaatgcttgaatgctttcattgaattcttttcttggatactttctttaaatggggtaaacaaatgattatgttctgaattttttttttttttgtatctgtaaatgtgcctcatttttaatgttatgtgtgtgaacgacagttcggctaagaaaagacttccaggctgtgggtcttcagaggtttgcaggtgcaaattccctctctcctaaaatctactacggcagataagaaatgtagcagggtgatttttaatcatttgtgagtcatttgtcctcacyctcttgagcttattatctcagctcagagatattatgagggtaaacccatattattataatagccttactattgtttctgcctgcatttgaatggtgggaacttttcaatataaagaataaagttacatattttattttaaattaactttacttgaaatattatgggtatccacaggatagacaaaatgatttaatgtacaatcataagctcaagtcttaa

SEQ ID NO: 612736 - DNA, 522 bp, Homo sapiens
taatttgtacgttgatatttatgtaatgcttgaatgctttcattgaattcttttcttggatactttctttaaatggggtaaacaaatgattatgttctgaattttttttttttttgtatctgtaaatgtgcctcatttttaatgttatgtgtgtgaacgacagttcggctaagaaaagacttccaggctgtgggtcttcagaggtttgcaggtgcaaattccctctctcctaaaatctactacggcagataagaaatgtagcagggtgatttttaatcatttgtgagtcatttgtcctcactctcttgagcttattatctcagctcagagatattatgagggtaaacccatattattataatagccttactattgtttctgcctgcatttgaatggtgggaacytttcaatataaagaataaagttacatattttattttaaattaactttacttgaaatattatgggtatccacaggatagacaaaatgatttaatgtacaatcataagctcaagtcttaa

SEQ ID NO: 612737 - DNA, 610 bp, Homo sapiens
gttacaagagatataagtagtaacaatgggtgggctggttcagggttttgactgcttaacacaaaagaatttgaaattaagtccaaagtaagagtaaccaaagaagttgattggctttgcaatcaacttggccacttgaattttggacaagtgataggtagagcaggctgctcagaggcagagacawcccctagtgccttgagggaaactccctttgtgagaaatgtacgtgtatattcataaaatactggtgaggtcaagtatggaaagacaaactgaggtttgatgcatacactcagttgtacatgctacaacacacatcagatatagtattagcatgtaaaatctccacctaaaggtgtgtgtgtgtgtgtgtgtgtgtgtgtgtgtgttgctattaaaatgaaggaaggtaattattagctaaaccttgagcctagctgtccttgcaagaacctatagaaatcccaagacccccaaggcagaaatttgtacttaatagcttcatgggctttgggtgcccattggttggaaattgcggaagttacatcaggaagaagggagttttgttctccttccgtgtccatatctggtatcaggagcctgtaac

SEQ ID NO: 612738 - DNA, 498 bp, Homo sapiens
tgctcagaggcagagacaacccctagtgccttgagggaaactccctttrtgagaaatgtacgtgtatattcataaaatactggtgaggtcaagtatggaaagacaaactgaggtttgatgcatacactcagttgtacatgctacaacacacatcagatatagtattagcatgtaaaatctccacctaaaggtgtgtgtgtgtgtgtgtgtgtgtgtgtgtgtgttgctattaaaatgaaggaaggtaattattagctaaaccttgagcctagctgtccttgcaagaacctatagaaatcccaagacccccaaggcagaaatttgtacttaatagcttcatgggctttgggtgcccattggttggaaattgcggaagttacatcaggaagaagggagttttgttctccttccgtgtccatatctggtatcaggagcctgtaaccctctggctgtctgctgctttcctgtaggattgcttaccttgcaaaagagttgagt

SEQ ID NO: 612739 - DNA, 555 bp, Homo sapiens
tgtgtagggaaaaatactgaaagagtttactttaaaacatatgttgttggctgggcggggtggctcacgcctataatcccagcacttcgggaggccgaggcaggtggatcacgaggtcaggagatcgagaccatcctggccaacatggtgaaacccagtctctactaaaaatacaaaaattagccgggtatggtgtcacgtgcctgtagtttcagctactcaggaggctgaggcaggagaattgcttaaatgtgggaggcggagcttgcagtgagccgagatcgcaccactgcctaggcgacagagcaagactccgtctcaaaaaaaaaaaaccaaaaaacatatgttgtcagttgttaccttggatggttggttttgtaactgkttttttagaatgctcttctgagtttttcagatgttctgtttgagtattattattgtttcattagaaacatcaataaagtagtcttcagaaaatgctaattgaggccaggcactgtggctcatgcctataatcccagcactttgggaggccaaggcaggagttcaagacca

SEQ ID NO: 612740 - DNA, 504 bp, Homo sapiens
gaccttttgagaagatacagtacatttccctcctagtacccaccaagagttcattgatttagtaaaacactctatgtgtcatctatgaggytgtctctttctcagatgactagaaatttgtaaaacattgaaaggacatttttaaatgtaaaaaacaaaacaaaaaagagttggagggggtgataacagtaaatgcaatcataatttatcatattgccaacaccataaacctcattttgatgcagtaatgtcagctaatgaagagagtaggctctgtcttcatctgagtttggaaacagcattatcagcacgagcataatctactgatttttctgttgacctctgaggattttctgtgcatatgtctaccagaaccctaacagagcacatgcatttatacagttagggaaaaatgagtcacattctcagagaagtcagccttgtaagtatttgggaaatactttatccatccctgcaggccctaaaacacccaagagctttctt

SEQ ID NO: 612741 - DNA, 504 bp, Homo sapiens
gaccttttgagaagatacagtacatttccctcctagtacccaccaagagttcattgatttagtaaaacactctatgtgtcatctatgaggctgtctctttctcagatgactagaaatttgtaaaacattgaaaggacatttttaaatgtaaaaaacaaaacaaaaaagagttggagggggtgataacagtaaatgcaatcataatttatcatattgccaacaccataaacctcattttgatgcagtaatgtcagctaatgaagagagyaggctctgtcttcatctgagtttggaaacagcattatcagcacgagcataatctactgatttttctgttgacctctgaggattttctgtgcatatgtctaccagaaccctaacagagcacatgcatttatacagttagggaaaaatgagtcacattctcagagaagtcagccttgtaagtatttgggaaatactttatccatccctgcaggccctaaaacacccaagagctttctt

SEQ ID NO: 612742 - DNA, 584 bp, Homo sapiens
attaaatagtgtggaacagggcagagggtaaagacaagataatgagggaagacctctcagaagtggtaccatttaaaccaaggagtagcactatttaaagtgtctgaaagaggagttcagtttaaccaggcacgtgaagcttgaaacccaaaaactctgggcagagggaataacacacacatctgaggcatagacaaagaacagagaaaggtcaatgtaggtctagagggatgtgaggcctgagatgagtgaaagattctccccacggcctgaaagcttgaagggatgaggaactcctcccttctcaggcccagtgccaaagagcaaggctacttgcaccagcagcatgcgccagcaagrgagcagaagcaggaagaaagccagccggaagacacctaccctggccggaagacacgtacccccgaagatcgagaaagaggctgtccgggtagtatgtagcagtcacgtcagactgagacacttcttgtttacaggagaccataaaacccctgccccatcctcatttggtgctgaggccgttttaggcctcagcccgcctgtacccaggcactcattaaaacagc

SEQ ID NO: 612743 - DNA, 596 bp, Homo sapiens
aattgttatgagaaattccaagagggccagacgcttctgtgggaatgcctgcaaattgagatgtgaaagaatgttccatctagggaaagaaaaaatgtttaaagaacactgttactcccaaccatcaacttcaagttccaaatggggagaaatgctgtatgccttggaaaaatgaagctcaactataaacaccctgtcttcagggagtggttggcactcactcctacaaggaccctgagattttttttttctttttccccacaataagcctttttataaaattctttttaaatttatatatatttaggggtctgaggccattttaacacatcaaactttagtcttcctgccactctgggcatcatgacagctgctttgagaaacaggtctctcccaatactctccactgctccaaaagaaagttgccctctgctatagatcctttgtgcaaacagacattttgcaggtactaagggtcagtttctgtatctattctgccacatttttgcctatttgattcctcttactcatgcttcactgcttcctgctgcttgctcctttctgctttytactgaaatttttgggcatttacccta

SEQ ID NO: 612744 - DNA, 543 bp, Homo sapiens
gtctattttgttacaatggtgcctcctggccaaggccagacacactcaaagaagggtcttgggcagataggaaagatttccctgcaggaggtttgagaggggcctaacaatttgtaggtctttgaaatataatttgaaatggttacaaagctacggccaatgatgtaagagaaggtgtgttttatagtaagtattaaaagaagacaaatagatgctaaggagagatggattggctaaragaaagattaacacacaaattgcacctactcattcctatataattcgttagggagaggtacaaattaggctctgaaatttccagcagccggctcatgtgtataatcccagcactttggaaggccaaggaggaatgcctgaggccaggagttcaagatcagcctgggcgacatagagagactctgtctctacaaaaatttttttaaaaattagccagatgtggtggtgcatacctgtagtcccagcgactatggaggctgaggcaggaggatcacttgagctcaggagttcaaaacctgatgggca

SEQ ID NO: 612745 - DNA, 543 bp, Homo sapiens
gtctattttgttacaatggtgcctcctggccaaggccagacacactcaaagaagggtcttgggcagataggaaagatttccctgcaggaggtttgagaggggcctaacaatttgtaggtctttgaaatataatttgaaatggttacaaagctacggccaatgatgtaagagaaggtgtgttttatagtaagtattaaaagaagacaaatagatgctaaggagagatggattggctaagagaaagattaacacacaaattgcacctactcattcctatataattcgttagggagaggtacaaattaggctctgaaatttccagcagccggctcatgtgtataatcccagcactwtggaaggccaaggaggaatgcctgaggccaggagttcaagatcagcctgggcgacatagagagactctgtctctacaaaaatttttttaaaaattagccagatgtggtggtgcatacctgtagtcccagcgactatggaggctgaggcaggaggatcacttgagctcaggagttcaaaacctgatgggca

SEQ ID NO: 612746 - DNA, 543 bp, Homo sapiens
gtctattttgttacaatggtgcctcctggccaaggccagacacactcaaagaagggtcttgggcagataggaaagatttccctgcaggaggtttgagaggggcctaacaatttgtaggtctttgaaatataatttgaaatggttacaaagctacggccaatgatgtaagagaaggtgtgttttatagtaagtattaaaagaagacaaatagatgctaaggagagatggattggctaagagaaagattaacacacaaattgcacctactcattcctatataattcgttagggagaggtacaaattaggctctgaaatttccagcagccggctcatgtgtataatcccagcactttggaaggccaaggrggaatgcctgaggccaggagttcaagatcagcctgggcgacatagagagactctgtctctacaaaaatttttttaaaaattagccagatgtggtggtgcatacctgtagtcccagcgactatggaggctgaggcaggaggatcacttgagctcaggagttcaaaacctgatgggca

SEQ ID NO: 612747 - DNA, 543 bp, Homo sapiens
gtctattttgttacaatggtgcctcctggccaaggccagacacactcaaagaagggtcttgggcagataggaaagatttccctgcaggaggtttgagaggggcctaacaatttgtaggtctttgaaatataatttgaaatggttacaaagctacggccaatgatgtaagagaaggtgtgttttatagtaagtattaaaagaagacaaatagatgctaaggagagatggattggctaagagaaagattaacacacaaattgcacctactcattcctatataattcgttagggagaggtacaaattaggctctgaaatttccagcagccggctcatgtgtataatcccagcactttggaaggccaaggaggaatgcctgaggccaggagttcaagatcagcctgggcgacatagagagactctgtctctacaaaaattttttwaaaaattagccagatgtggtggtgcatacctgtagtcccagcgactatggaggctgaggcaggaggatcacttgagctcaggagttcaaaacctgatgggca

SEQ ID NO: 612748 - DNA, 491 bp, Homo sapiens
gccccagtctcaaaaataaaataaaataaattttaaaatkaattttctaggagccagccaaagaggaaagtgccatcagttgcattgagccaccctgtccacaaggtgaatcagcagctcaggataagtacaactatttgggcaggtcagcaggcacaccactgccggggattagagagtcaggggacagggtgtcctcttctgtctaggactgaggaatttcctttgatatgattcttttagtgctaaaggcagtaaagtcttgggacaaccaggatgagttggtcaccctacctgggaatgtttgccagtcagcccatcctggcctggaccccccacctccacccagcaggcagactgctgtctgaggtctcacgcatatcccaagacttgcagctgcaggtgggtgacaggttccacaggcgctgaccctggggttctggcaagctgttggctcagtgtttgtggaacatagtcgaagccacggggtg

SEQ ID NO: 612749 - DNA, 491 bp, Homo sapiens
gccccagtctcaaaaataaaataaaataaattttaaaatgaattttctaggagccagccaaagaggaaagtgccatcagttgcattgagccaccctgtccacaaggtgaatcagcagctcaggataagtacaactatttgggcaggtcagcaggcacaccactgccggggattagagagtcaggggacagggtgtcctcttctgtctaggactgaggaatttcctttgatatgattcttttagtgctaaaggcagtaaagtcttgggacaaccaggatgagttggtcaccctacctgggaatgtttgccagtcagcccatcctggcctggaccccccacctccacccagcaggcagactgctgtctgaggtctcacgcatatcccaagacttgcagctgcaggtgggtgacagkttccacaggcgctgaccctggggttctggcaagctgttggctcagtgtttgtggaacatagtcgaagccacggggtg

SEQ ID NO: 612750 - DNA, 520 bp, Homo sapiens
ccatcagttacacttatgttaacaattatgtaattctgtgaataacctataaactgatgaaatatgagtacagaaaagagcagtttctatgataacaaggttgaatgccttggaaaacttaacagcaagtcaatcaaagaacagcctgctgttgagctgttgaattacagattggtgagagaactgaaaaatatgaagggaagaagttaatgctccggaaggatactgcactccattacttcccattttccatatttgaaagtcattcctccacgtttgagaaatccgcattatgggttgaggattcttcattgtggtttacaccaaaaagccaaagaagcagctctgttagrggactcagacttcgagagaagactttagccttgccctacacctgccagatgaaggtgcctttgcattgagttaaagtaaaacagttaatgaatatatatttagtcattattttatttttgatgatgatgatgataattttattttatttattatcattattattact

SEQ ID NO: 612751 - DNA, 464 bp, Homo sapiens
cagcaagctgagatcatgccactgcactgcagcctgggcgacagagtgagactctgtctcaaataataataatacaataaaggttacaatggtgacttctatgttgtgtatattttaccacagtaaaaaagtaaaaagattgtcctgtgagaaactgacattaccaagtgatttttttatttgataagcttgggaatttctatcataaaactattttttgatagctaacatgatgtggatctgtgttcctgcgaaatttcatgtggatttgttgtccccagcactggatgtagggcctggcagaaggtgactggattgactggattgyggggcagatttctcgtgaatggtttagcaccatcctcttggtgttgtcctcgcaatagtgggttcttgtgagatctagtcatgatcgcccccctctctctcgtgctcctgctttcaccatgtgatgtgcctgcccc

SEQ ID NO: 612752 - DNA, 587 bp, Homo sapiens
agggtgaagtgcactgatgactataatttgctttgcagtgcatcataaaaaataagaaagattagtgagtggattgggagagggacagatgaatagatacgtcataaagcaagcacagtaaaatgttaattcgagaatctaggtggtaggtgtccactataagattctctcaactttgctgtatctatgaatattttcataataaaatgtcatgggrtaacatgacattttaaagtcatgtttggccaggcgcggtggctcacgcctgtaatcacagcactttgggaagccaaggcaggcagatatcttgaggtcaggagttcgagaccagcctggctaaaatggtgaaaccccatctctactaaaaatacgaaaattatccaggtgtgctggcaggtgcctgtaataccagctactggcaggctgaggcatgagaattgcgtgaacctggaaggcagaggttccagtgagccgagattgtgccactgccctccagcctgggtgacaaagcaagactccgtctctaaataaataaataaacaaatacatcaataaagtcatgttctctgtgcttaaacagaacaaaa

SEQ ID NO: 612753 - DNA, 587 bp, Homo sapiens
agggtgaagtgcactgatgactataatttgctttgcagtgcatcataaaaaataagaaagattagtgagtggattgggagagggacagatgaatagatacgtcataaagcaagcacagtaaaatgttaattcgagaatctaggtggtaggtgtccactataagattctctcaactttgctgtatctatgaatattttcataataaaatgtcatgggataacatgacattttaaagtcatgtttggccaggcgcggtggctcacgcctgtaatcacagcactttgggaagccaaggcaggcagatatcttgaggtcaggagttcgagaccagcctggctaaaatggtgaaaccccatctctactaaaaatacgaaaattatccaggtgtgctggcaggtgcctgtaataccagctactggcaggctgaggcatgagaattgcgtgaacctggaaggcagaggttccagtgagccgagattgtgccactgccctccagcctgggtgacaragcaagactccgtctctaaataaataaataaacaaatacatcaataaagtcatgttctctgtgcttaaacagaacaaaa

SEQ ID NO: 612754 - DNA, 234 bp, Homo sapiens
catttttaaacaggcagtttaagacaacgagatgggaaagtatcattaatttctaattattgggcatcattgagaggcaaggacacagggcttggtacccatgcttcttgtgaactatgttatggtatccaaaaatatttctttytttttttttttttttttttttgagaaggagtttcgctttgtctcccaggctggagtgcagtggtgtgatctcggctcaccacaacctct

SEQ ID NO: 612755 - DNA, 575 bp, Homo sapiens
attttgagaaaatgtaaaaaggaggggacgaagaaatttattgggtaacataaccaggaaatcgagagatatcattggcttcaaagtcttaccaaggggacataatggcaccaagcaaccacagactcttttctctcaatgtataacaagtctagcagaaagacagctgatatccttcaacctccttagagccatcaaagggaagaatttgattggtgctgcttggaacacaaacattcctgaaccaatcactgggtgggtacaacaggkctgtggtattttcactgactgtccaattaatagtttgttaattgttcatgtgcctatccctgtgggataagtattttggggaagattaagtgatttatagttccccaaggaagctagaatgctagctgaatctaaagggaggagtgagtttgcagatgaaaagaaaatagaaaaaatgaaaaggaagaagatgccaggccagaagaattaggatggcaccttttctttacctgtcatttttaatgtcactttctgctaccatcaggactccttcctaggggattaagagcaaagaactgacaatg

SEQ ID NO: 612756 - DNA, 575 bp, Homo sapiens
attttgagaaaatgtaaaaaggaggggacgaagaaatttattgggtaacataaccaggaaatcgagagatatcattggcttcaaagtcttaccaaggggacataatggcaccaagcaaccacagactcttttctctcaatgtataacaagtctagcagaaagacagctgatatccttcaacctccttagagccatcaaagggaagaatttgattggtgctgcttggaacacaaacattcctgaaccaatcactgggtgggtacaacaggtctgkggtattttcactgactgtccaattaatagtttgttaattgttcatgtgcctatccctgtgggataagtattttggggaagattaagtgatttatagttccccaaggaagctagaatgctagctgaatctaaagggaggagtgagtttgcagatgaaaagaaaatagaaaaaatgaaaaggaagaagatgccaggccagaagaattaggatggcaccttttctttacctgtcatttttaatgtcactttctgctaccatcaggactccttcctaggggattaagagcaaagaactgacaatg

SEQ ID NO: 612757 - DNA, 575 bp, Homo sapiens
attttgagaaaatgtaaaaaggaggggacgaagaaatttattgggtaacataaccaggaaatcgagagatatcattggcttcaaagtcttaccaaggggacataatggcaccaagcaaccacagactcttttctctcaatgtataacaagtctagcagaaagacagctgatatccttcaacctccttagagccatcaaagggaagaatttgattggtgctgcttggaacacaaacattcctgaaccaatcactgggtgggtacaacaggtctgtggtattttcactgactgtccaattaatagtttgttaattgttcatgtgcctatccctgtgggataagtattttggggaagattaagtgatttatagttccccaaggaagctagaatgctagctgaatctaaagggaggagtgagtttgcagatgaaaagaaaatagaaaaaatgaaaaggaagaagatgccaggccagaagaattaggwtggcaccttttctttacctgtcatttttaatgtcactttctgctaccatcaggactccttcctaggggattaagagcaaagaactgacaatg

SEQ ID NO: 612758 - DNA, 642 bp, Homo sapiens
tgttttatatctagttacataatatgcccattacataatccttctcataggacctccccctagaatggtggttggcaaagtttcttggtaagaggccaaatcaaaaatatgttaggttttggggaccctagactgtcttttgctactactcaacactgccattttagtgcaaacacagccacagacagtaattcaatgaatgggtgtggctgtgttctaataaaactttatttacaaaaacgggtagagggccagatgggccacagctggctgacaccttctctggactctaggcttctggaaggcgggagctctgtaccgtatctgaaacactctacacattgtaaaataatgactagataaaatattgtagcttctccctcacccatagtgcaaattcagttcatttcaaaaaatgctttttgttgtcttgtcatgaactcccaagagaaaagaactggtatccttagggagaataacctgaacaaaaaggcatttgactgaagttagaggagcttatttctacgtgagtgagctgcggagaacagtagcacctcagrgtatctaagcttatataggttgccaagaaggcatattccagtacattaaattctatgcatatgcatttgcaactagatcatt

SEQ ID NO: 612759 - DNA, 524 bp, Homo sapiens
gacattgaagggacatacatttctccttttgccttgtttttgcatttttggatagctactcttagcaacataggcagatggtacaattgggaacatgggggatttgagcaggtgagtctcttatgggaagcaagatggccgagaaggtacagaaagaatactggtgtcctcatgtgagttcacatggaaaaggggatctgcatggccaagagcaatgaggattccttgaagaggagttgggctgtcaggactggtggaaaaggtcgtagctgattagcacagggttcctcagtcaggtcattctkaactgcctgtggagttttcctacccccatctccttcctctctggtctgagccgttggtgcagctccccactcttggtggagaccctgtgagccttcccatctttgaggagtgctgtccccaggatcttttccctgtgcatctctgcttcctgattctgtccacacctctaccctcaccacagtacctggcctcaccaacacaaggtgaccattctgcag

SEQ ID NO: 612760 - DNA, 524 bp, Homo sapiens
gacattgaagggacatacatttctccttttgccttgtttttgcatttttggatagctactcttagcaacataggcagatggtacaattgggaacatgggggatttgagcaggtgagtctcttatgggaagcaagatggccgagaaggtacagaaagaatactggtgtcctcatgtgagttcacatggaaaaggggatctgcatggccaagagcaatgaggattccttgaagaggagttgggctgtcaggactggtggaaaaggtcgtagctgattagcacagggttcctcagtcaggtcattcttaactgcctgtggagttttcctacccccatctccttcctctctggtctgagccgttggtgcagctccccactcttggtggagacccygtgagccttcccatctttgaggagtgctgtccccaggatcttttccctgtgcatctctgcttcctgattctgtccacacctctaccctcaccacagtacctggcctcaccaacacaaggtgaccattctgcag

SEQ ID NO: 612761 - DNA, 587 bp, Homo sapiens
ttgggttagtgccctgtagagtgccttgtcttcacctagcatgtggartccgcacacaaaaaccctttctcaaggcatcccagccctgggacaagagaagagcccttcctgaagcttctgttatggacagctccttcactcccttctcagccttctccacatcaatcttaagcacttttctgatcttctactggacagcatttcatcccatagaggtttccttctacacactgactccctggagccactcaacgtggtagtgctgttagctcatagaaccaaggcctttgtctttctccctctcagcatggaacatacctggtctacacgcaagagtgagggactcagcatgggagaggccttcttggccaatttcagcaaaacagccagggacgatgtggctagagcagatgaatggccatgattaaacctggctgggtgtggtggctcacacctgtcatctcagcatttgggaggctgaggctggagaattgcttgaggccaggagtgtgaaaccagctgggcaatgtagcaagaccttgtctctactttcaaaaaaaaaaaaaaaacaagaaaaaagattaagt

SEQ ID NO: 612762 - DNA, 445 bp, Homo sapiens
atacacctaaaagaaagtttagtagatagagaagagaatagactacctattattagggcagttcttcccagattgttcctttccagtatccagtgagttcaggtcagagtgaccaactgtcccatttgcccgggactgaagaccttcccagaatgtggaattttcagagttaaagccaggatagtcccagggacaccaggatggttgttcaccctaattcaggatgacaatgcatggtacctggatcatagctcttctgtgttgctgggtttttgtttgttttgtttgtttgtttgtttgtttgtttgtttgtttttaagagactggtgttactctgtagcccaggctggagtgcagtggtacaatcacagctcactgcagcctccaaytcctgggctcaagtgttcctcccacctcagcctcctgagttgctgggaccacaccc

SEQ ID NO: 612763 - DNA, 611 bp, Homo sapiens
catcccagcctcccaagtacctgggactaaaggcgtgtgccacgatgaccagctaatttttaattttttggtagagatgagggtcttgctacattgcccaggctagtctcaaactcctggcctcaagcaatctttctgactgggcctcccaaagtgttgggatcataggcatgagacactgcacctggcctcgggtcttagtttaaatgtcacttcagagaggaattctcraactcgagagagagctcaagtgatccacctgcctctgcctcccaaagtgctgggcatgagccactgcacctggcccagagaggaattctgttactgtcttgactagagtctatccctttgttcggcttccccataggaccctatcctcctattcctaatacagggctctgtctgtagtctactttagagtccttcgacagcgacagcataaaattactaattcctttttttttttttttttttttttgagatggagtctcgctgtgatgcccagactagagtgcaatggcatgatctcggctcactgcaacctatgcttcctgagttcaagcgattctcctgcctcagcctcccaagtagctggaactacaagcgtgcgc

SEQ ID NO: 612764 - DNA, 545 bp, Homo sapiens
ataattcctacctttcaacttttcatttggaaaaattttaatcttacagaaaagttgaaagattgtataatgaataccaggatatccttttatcaattgttaacattttgcacatgtcctctctttttctctttcccatttaaaaatcagaaacaacacaatacttcactgctaggtgtgacaggtattctaggtatctcctaagaaaaagaaaattctcctacataatcaaaatcgtgtgatcacacccaagaaatttaatatcaatattatttaatacagaatccatattcagagtccccagtagtytaaataatgtcctttatagtggtttagtcaaagtttctcattttgtttcttttaatacagagcactctcttgccttttttttttttttttttttttttggtttgttgttttaattgctgttgttttgtttgtgtgtttgcttgctttgaaggggatcagaacatgccaccctgaaactagccactctggcatattgattattttcagctgaagggaattgagaaacagtaggtgca

SEQ ID NO: 612765 - DNA, 495 bp, Homo sapiens
gtgccccttccaagggcctgggatggactttagcagtgcggttatatgttcatatatttcataatcttaaaamgtatgctattgtagctgtaatctgttacgattgccatctcctttcattcatgtttcccattctcttgggtagtgttgggatgattgtgggtgtttataagatccagttaataaaagaggagttggggatgcatttactttgggtttggtagcttatattgatgtggttcactcaaaggactctagaaaattaagagtgtaggattttcccattcctgccaaaactctgggtggggagttattgagtcaaaacaattgcgagaatttgggaagtgggaaagaagaggaaaatgaaaaagcttgcatggtcctcaaatggaagggtttacctttgcataatcggggctgttttaacaaccagcagtgctctggaatcaggcatgttgagaccaagagctttggaatcaagttcaaatttcagtt

SEQ ID NO: 612766 - DNA, 495 bp, Homo sapiens
gtgccccttccaagggcctgggatggactttagcagtgcggttatatgttcatatatttcataatcttaaaacgtatgctattgtagctgtaatctgttacgattgccatctcctttcattcatgtttcccattctcttgggtagtgttgggatgattgtgggtgtttataagatccagttaataaaagaggagttggggatgcatttactttgggtttggtagcttatattgatgtrgttcactcaaaggactctagaaaattaagagtgtaggattttcccattcctgccaaaactctgggtggggagttattgagtcaaaacaattgcgagaatttgggaagtgggaaagaagaggaaaatgaaaaagcttgcatggtcctcaaatggaagggtttacctttgcataatcggggctgttttaacaaccagcagtgctctggaatcaggcatgttgagaccaagagctttggaatcaagttcaaatttcagtt

SEQ ID NO: 612767 - DNA, 465 bp, Homo sapiens
aaagaagccaagctgggagaatttgtagcatggggattagagcttctcttcctgcaggtagcctgcctgtgagtgtggcacagcactggctcccaaactcagctcaccctcagaatcatttggttcacctcatgaaaatacaaagtcctaggccccaaacctggaatctttgcttccgtgggtctggagtaggacctgaaatcattaccattaatttggtgyttctgatgattctgtgtctgatttttttttttaatatgaaaggtaaagtcatggttgaaaatttgtttccacttggcatgactaaaaccagtgctttgaaaagaacacacaattatgatatgccgttgctatccaaaggattcaatgtctgttctagagttggtgagaatgaaaaatttcagtgtcatgaagaacagggagcatctcatagaaatgaagtatcattgctcctgagacaatgag

SEQ ID NO: 612768 - DNA, 571 bp, Homo sapiens
catagctttaatttggaccatttctatggcttatctagattttttcaggacttgccttcaacctattctttctgtaggtgattccattaactgttgcccatatggtagtccgaagacagacctccgagaaatgacccttgtctccaaaacttccgcaatatgtccaaatttcctagcctgacattcagactttgattatctgcctccaagtttatatcctatcatattcctttacatattctgttctccaggtacactgggaagcttgccattcctgatcatagcctacaaactcttcctgcytcccactcaccctcatctctgctgtcaaaatgcaaccttccctcaagagtcatttcacaggacccctctttctatgaagccctcaggtggaaataattttttgcctttttttccattttatttttggagtgtttatggcatttaacataccttactttgtatacaaatatttgccttgctccctcttttgcaaatttcttaaaggtagagaccattgtatgttttcttcatatgttgctggtgcctaacagaactatggccattgtcc

SEQ ID NO: 612769 - DNA, 572 bp, Homo sapiens
ctagggttttaaaatattctttacatcratgaagcagatttggtcatttcaacaaatatttatgtagcttctactacattataagagctgtgtcaggtgctggaggtgttgaacacaaaaataaatatggtctcttttttccatggtcttacagtctagtagaagagataatggcaggtaaaaacttcctaaaatgccaaagagaagctggtatctccaatatggagataaaagcttcatgctgtgcaactgtagagaatagtggaatacactgttcttgcaaaatataatgatgtgctctgaactgtaaaccacctatgttcattttcatgcctacttatgtggaaccctgaagctcaatcaatggaatggaacagcctctagataacagtttctacagttgctttggtcttttggaacaaaagaataggtcagccaaaaaataacaattgagcctccattctgtgtgcaagactctatggaaagtcctattctgcttagttgatggcagtgaaaatgagacttataagaaatcaagcacatctgcttcttgggtagccttaccagtgtaa

SEQ ID NO: 612770 - DNA, 423 bp, Homo sapiens
ccaagaaccctctattgatgaytgaattgggacccctttccagtaacaattttaggagatggcattgcagacaggctctcaaacagaagaaaaacaaaggataatgtttggtttattgaaaatgcctggaaaaaaaaaggttaatgttgggaatagtctatataccagtttttttagagtctggagggcagtcagttgaggtgtctagatattacagtcaaagcatctttggttaaagtggaagtaggcagtggcaatcggacagatttttctgttgtttgcatgtcacgaggttgtttacacaagcttcagcttgcagggcatcagggaaaaggtagttacaattttagtgaatttaagtcagaaaaatgaaggaaaaatttggaaatgttagtttggagacttgtagccaggaaagaattc

SEQ ID NO: 612771 - DNA, 566 bp, Homo sapiens
ggctgggaagccaagctaaagattggccactagaatgkgcctgtaatacctacatgaattcagtgaatttctctcttcttgaggttccccaaatatcttgagtttcttgggcctgtcagaaagtaacactctttacttactataaaatcaggaaccctgcaagggaacagtgtagacaaggtactaggccaatcttttcccagatctactggctttaacatcaaccttgattcctcaaagcaatctggtcacatctgaaaatacgacattccagtcaaagccttggtaaaataaccagtgtctctgattgtgtcctgtcacagaagaaaacacattcttattaaacttatgtaaataactacattgccaacttgtatgaatagtttttgaattctgatgaaatcagatacagaaaaaggtaaatgttttaattttgctcacaaaagtatactttacctaattgctgtaagctacaaacagcttaagataaaaaaagtttactgacaatggaaaacaaaacataagaatcagcaatgcttgagtgggacatccaacttctgagtaga

SEQ ID NO: 612772 - DNA, 583 bp, Homo sapiens
actctcttgcccaggctggagtgcagtggtgtgattttggctcactgcaacctctgcctcccgggttcaagcagttctcctgcctcagcctcccgaatagcttggattacaggcatgtgccgccaagcctggctaattttgatttttggtagagatggagtttcaccatgttgcccaggctagtctcaaactcatgacctcaggtgattcacccatctcagcctcccaaagtgctgggattacaggccagagccactgcacctagctgaaatgctcttccaaaaacactgagtctagcctagctcagcattggttaatagaactttctgtrataatggaagtgttctatatctgcactgtccaatactgtggccactaaacacatgggactatttaaatttaaaataaaattttaaattcatttagtcctgttgtgggaagtcagggacccccaaatggagggaccggctggagccgcagcagaggaacataaattgtgaagatttcatggacatttatcaattcccaaataatacttttataatttttatgcctgtctttaatctcttaatcctgttacctt

SEQ ID NO: 612773 - DNA, 568 bp, Homo sapiens
tgtatgaagttaatattttcaagtaagcaatcagtctactaccatcagattataagcttttttgtaataataggtacataaaatgtgtatgaaaaatctacaataaacatgtttatctgatagcaattgtcttgcttttttaatgacctgaagatatatgtacgaagatgaagcacaatcatccaaatccattgtgatatactatactttttcttacgcatcagtatcatagatgttgacttgcttttccactatgtgtcaaatattttaaaagaacaattaagttcttttgtttaaaaatgaatgtttcactagtctcagaagctaaaaaattgcagtgcaaattgtacatggcaggaggtaaatacatayagtattgagtttccttttttaaaaaaagtttacacatttaatacagagtaattccatataataacataaatgcaatggaacaggtttttggatcctggctaaagtataagtgcctcatatgagaaaagtcacaaatgtccatgtttctttgtttaaactggtttttaatttttattcttatttttggagacaggtt

SEQ ID NO: 612774 - DNA, 634 bp, Homo sapiens
tactattcttactatctggtgacaggatcattattaccccaaacctcagcctcatgcaatatattcasgtaacaaacctgtacatgtatcccctgaatctaaaagaaaagttgaaattaaaataataataatacaaaaataaggaaattataggcttgatcccttttagtgtttaagttctcaaatgatgttgtttaacatttgaatgagtttttgatggatctatttgaacactgattggggtggcaaagatgattcttccaatatcattggaagactttgatcataactgatcaggcattacctttagaaggttttataatctttcattgctcaataattgagtgtcttctatggcaacatggaatgcaattgaattttattttgaactcttctttatgtctagtaacacagttttatcatctttttctaaattcaattttccctttttgggagaaaagcatgtgggtattatataattcctagaagtctctttctgtaagatggaggggggctaatataactagaaggcaaatgtgagtcctttgacacctagttgaaaagttagcggctgagacttgtatgctgatacaggagtatttgtgacacataccgtttaaattttttgtttact

SEQ ID NO: 612775 - DNA, 634 bp, Homo sapiens
tactattcttactatctggtgacaggatcattattaccccaaacctcagcctcatgcaatatattcaggtaacaaacctgtacatgtatcccctgaatctaaaagaaaagttgraattaaaataataataatacaaaaataaggaaattataggcttgatcccttttagtgtttaagttctcaaatgatgttgtttaacatttgaatgagtttttgatggatctatttgaacactgattggggtggcaaagatgattcttccaatatcattggaagactttgatcataactgatcaggcattacctttagaaggttttataatctttcattgctcaataattgagtgtcttctatggcaacatggaatgcaattgaattttattttgaactcttctttatgtctagtaacacagttttatcatctttttctaaattcaattttccctttttgggagaaaagcatgtgggtattatataattcctagaagtctctttctgtaagatggaggggggctaatataactagaaggcaaatgtgagtcctttgacacctagttgaaaagttagcggctgagacttgtatgctgatacaggagtatttgtgacacataccgtttaaattttttgtttact

SEQ ID NO: 612776 - DNA, 634 bp, Homo sapiens
tactattcttactatctggtgacaggatcattattaccccaaacctcagcctcatgcaatatattcaggtaacaaacctgtacatgtatcccctgaatctaaaagaaaagttgaaattaaaataataataatacaaaaataaggaaattataggcttgatcccttttagtgtttaagttctcaaatgatgttgtttaacatttgaatgagtttttgatggatctatttgaacactgattggggtggcaaagatgattcttccaatatcattggaagactttgatcataactgatcaggcaytacctttagaaggttttataatctttcattgctcaataattgagtgtcttctatggcaacatggaatgcaattgaattttattttgaactcttctttatgtctagtaacacagttttatcatctttttctaaattcaattttccctttttgggagaaaagcatgtgggtattatataattcctagaagtctctttctgtaagatggaggggggctaatataactagaaggcaaatgtgagtcctttgacacctagttgaaaagttagcggctgagacttgtatgctgatacaggagtatttgtgacacataccgtttaaattttttgtttact

SEQ ID NO: 612777 - DNA, 634 bp, Homo sapiens
tactattcttactatctggtgacaggatcattattaccccaaacctcagcctcatgcaatatattcaggtaacaaacctgtacatgtatcccctgaatctaaaagaaaagttgaaattaaaataataataatacaaaaataaggaaattataggcttgatcccttttagtgtttaagttctcaaatgatgttgtttaacatttgaatgagtttttgatggatctatttgaacactgattggggtggcaaagatgattcttccaatatcattggaagactttgatcataactgatcaggcattacctttagaaggttttataatctttcattgctcaataattgagtgtcttctatggcaacatggaatgcaattgaattttattttgaactcttctttatgtctagtaacacagttttatcatctttttctaaattcaattttccctttttgggagaaaagcatgtgggtattatataattcctagaagtctctttctgtaagatggaggggggctaatataactagaaggcaaatgtgagtcctttgacacctagttgaaaagttagyggctgagacttgtatgctgatacaggagtatttgtgacacataccgtttaaattttttgtttact

SEQ ID NO: 612778 - DNA, 638 bp, Homo sapiens
agggtacttgtatagatagatatatgttacttaatgcagtactgtctggtgcagggtatcttcacgtggcataatagacccagagcttcaggtctaggctctgtaaagcgaaatgccaaactactgtgtgtgcatttctcgaaagaaaggtgatgtagttttatacaattttgaaacaagtccatgactcccaagggtttaaggaccaatggttcagtgagacatttacagattttgaagtyagaattcagtttgaattctatacacatttactagctatgcaaccttggacaagttacctaacatctgtgagcctcagtttctttacctgtaaaatgatatatttgccccattgggttgttagggttaaaaaaaaaaaaaaaaaaagatgcgtagcagaatgccgagtacctgacaggcattcaaatgtcaatttcttctttcatttttcttatttaaatatttagaaaacatttcctagtactaaatgtggattatgcaccttagcatttaaatcactccctggatgaaaataggatattgaggataccctaggtatatgtttggttcacataattcaaaacaccatactcaacctacatctgtttataaactagtaaataggttacaaattaaaa

SEQ ID NO: 612779 - DNA, 622 bp, Homo sapiens
gactattttaaaagggggggccaaattattattattttaaaatttgattacaaccaattttgttggcattaaaattagaggcattaagctggaatggatatataccaaaaccagaaattgagtttagcaaaaatgggaataggagttgttcagtaatttcagattasaaatcaatttagagaaacaaaccccatgcttacattgattgtgccacagatttaaacttcagtagtgcattagtaaactgttcacatttagatcttcaccttgagatttgacagctgtttcttgaaaaaaatctcagtaccttgtgcaaataaaatcggtcttccatgtgccttagcacacacttaaaatttatccattgtatatatacaaaacacctgcaatgtgggcagggcaaaatacatactttcataacaaaactataatatacctctcaagtatgaacaatatacacataatacatggtatacagtatttacaaaatataaaatataatacaagctgtttgtatgtaattttttaaactcatcttttgcaattgtatgttgcaacaaggcaaatttccatttctgtaccaattttctcaagagtccagggatatgggaaaaattatgtt

SEQ ID NO: 612780 - DNA, 524 bp, Homo sapiens
atgacattcatctgggttctacattgcaacaaaaaattaaatttgtggttgtattttttatttgttgctggactttctttcttgctccagtgggttttcctcagtgttaatgaccacttctagaaatgtcaattaaaattttaagccacagaaatggtgggaatttgagaggatttactttttgcacctctttatggcatgtggtkccctgtcttatgtttattatttatttatttatttatttatttattttgagacaaggtcttgcttgttgcccaggctggagtgcagtggtgcaatctcaggtcactgcaacctccatctcctgggctcaagcgatcctcctgccagtgcaccctaccacactcagctaattttttttttaagtttttttttttttggtagagacaaggctctctgttagagaccaggctggtctcaaactcccaggctcaagccatccttgcacctcagcctcccgatgtgctgggatcacaggtatgagtcactgtgcctggctgtcc

SEQ ID NO: 612781 - DNA, 564 bp, Homo sapiens
ttgtgggggcagatttgcatctgtagagaatctgcattgttgcagccagattttctctgaggcctccttttatccagatctaggaaagatttactgaaagtctgacacttttataggtctgaaaaaaacagttatcatgtattctttctgaggtctgctacctgtgaagtttcatctgcataacaagaccacttttgctagctaagcctcctcttctctacctcccataacctgttttgccaccataacctgttttttcaaattccaatcccaattctttcmgtaacatcaagatggtatttaagcttctgaactccaggaggggattaggaggtaatcaccctgtgtttctctcccacatgcatattaataatttttatgccctttctctaattaatcagacttttgcaagttgatttttttcgtggatcctcggaaggcaaaggagaactttttctttgacttttgtccattgtcaaactgctataaagaaatacctgagactcagtaatttctaagagaagaattttaattggctcatggttctgcaggctgtacagaaag

SEQ ID NO: 612782 - DNA, 564 bp, Homo sapiens
ttgtgggggcagatttgcatctgtagagaatctgcattgttgcagccagattttctctgaggcctccttttatccagatctaggaaagatttactgaaagtctgacacttttataggtctgaaaaaaacagttatcatgtattctttctgaggtctgctacctgtgaagtttcatctgcataacaagaccacttttgctagctaagcctcctcttctctacctcccataacctgttttgccaccataacctgttttttcaaattccaatcccaattctttccgtaacatcaagatggtatttaagcttctgaactccakgaggggattaggaggtaatcaccctgtgtttctctcccacatgcatattaataatttttatgccctttctctaattaatcagacttttgcaagttgatttttttcgtggatcctcggaaggcaaaggagaactttttctttgacttttgtccattgtcaaactgctataaagaaatacctgagactcagtaatttctaagagaagaattttaattggctcatggttctgcaggctgtacagaaag

SEQ ID NO: 612783 - DNA, 564 bp, Homo sapiens
ttgtgggggcagatttgcatctgtagagaatctgcattgttgcagccagattttctctgaggcctccttttatccagatctaggaaagatttactgaaagtctgacacttttataggtctgaaaaaaacagttatcatgtattctttctgaggtctgctacctgtgaagtttcatctgcataacaagaccacttttgctagctaagcctcctcttctctacctcccataacctgttttgccaccataacctgttttttcaaattccaatcccaattctttccgtaacatcaagatggtatttaagcttctgaactccaggaggggattaggakgtaatcaccctgtgtttctctcccacatgcatattaataatttttatgccctttctctaattaatcagacttttgcaagttgatttttttcgtggatcctcggaaggcaaaggagaactttttctttgacttttgtccattgtcaaactgctataaagaaatacctgagactcagtaatttctaagagaagaattttaattggctcatggttctgcaggctgtacagaaag

SEQ ID NO: 612784 - DNA, 564 bp, Homo sapiens
ttgtgggggcagatttgcatctgtagagaatctgcattgttgcagccagattttctctgaggcctccttttatccagatctaggaaagatttactgaaagtctgacacttttataggtctgaaaaaaacagttatcatgtattctttctgaggtctgctacctgtgaagtttcatctgcataacaagaccacttttgctagctaagcctcctcttctctacctcccataacctgttttgccaccataacctgttttttcaaattccaatcccaattctttccgtaacatcaagatggtatttaagcttctgaactccaggaggggattaggaggtaatcaccctgtgtttctctcccacatgcatattaataatttttatgccctttctctaattaatcagacttttgcaagttgatttttttcgtggatcctcggaaggcaaaggagaactttttctttgacttttgtccattgtcaaactgctataaakaaatacctgagactcagtaatttctaagagaagaattttaattggctcatggttctgcaggctgtacagaaag

SEQ ID NO: 612785 - DNA, 569 bp, Homo sapiens
tggtttccctcatcctgttattgtgatagtgagttctcacgagatctgatgggttttaaggggttcttccccccttcacctggcacttctccctcctgccaccccatgaagaaggtgtcttgcttcccattagccttctgccgtaattgtaagttccctgaggcctcctcagccatgaggaactgtgagtcaattaaacctctttctttccctaaattacccaatcttgggcagttctttatagcagtatgaaaatggactaatacatctgtctctwctaaaaatacaaaattagccaggtgaagtggcccacatctgtaatcccagctacttgggaggctgaggcacgagaatcgcttgaacccaggaagcagaggttgcagtgagtagagattgtgccactgcactccagcctgggcaacagagtcagactctgtctcaaaaaaaagagagagatcatcagaattcatttatttaacttgctttcactaaaaacttaagtgccttctatgtgctaaacactgtattagacttgggaattgttgtgttaaacaaggatcatgtttagg

SEQ ID NO: 612786 - DNA, 553 bp, Homo sapiens
ctggcttggtagtggcaaattctctcagcatttgtttgtctgaaaaagtctgtatctgtccttcatttatgaatcttattttcacaggatacaaaattattggcagataattgttttgctttaggagrctgaagatagggccttaatcctttttagctagtagggtttctgctgagaaatatactgttaatccgatagcttttcctttataggttacctggtgtttttgtctcacagctcttaagattcttaccttcttcttaactttagattacctgatgacagtgtgtctagttgatgatcttttggtgatgaatttcccaggtgttatttgtgcttcttgtatttggatgtctaggtctctagcaaggctggtgaagttttcctcaattattcctccaaataagcttttcaaacttttagatttctcttcttcctcagaaatgccaattattcttagatttagtcatttcacataatcccagacttcttagaggctttgttcatattttcttatatattttttgtctttgttggattgggttaattcaaa

SEQ ID NO: 612787 - DNA, 562 bp, Homo sapiens
atctatagtgggagaggagcataagaaatattgttggaacaaaatkggttgtatgttggtaatttttgaaattgggttattagttctttatagtattctctgtactgttttcatttgaattttttcataatggatgataataaaaagagcatctaataaagtttacagagaacctgagagaaaaagaagtctctattcatcttcattgcccactttttaaaagaggtatttgctttttctttctgatttaagttccttatagattctggatattagtcttttgtcaaatgcatagtttgcaaatatattcccctaatctgtaggttttttgcttatcacattagttgtttcttttgctgagcagaagctctttagtttaataaagtcctgtttgtgtattttttatttagctgcatttgcttttgttgtcttcattgtaaattcattacttagaccaatgtctagaagagtatttcctatattttattctagaatttttatagattgaagacttacatttaagtctttaattcatcttttgttaattcttgtatattgtgag

SEQ ID NO: 612788 - DNA, 378 bp, Homo sapiens
tgcaggcccagtttgagccagaaatgatgaaattggagagcacaggctaagtacagtgtggcacagactggctgctgcccagggtctgcaagccctgcrtgggttggagtgcaccttgttgagtctgtgcatgcacggcctctgacacatcatgtcctttcagtattgcattcagttcagtgttgattcggtattgcattcagaggcctgcattcagtacatggcctccacacgggtaggcatgaagctgaagactgaccttttcacagctggagtgctcaccaaagctgtgtgagtgtgaacacgtgggtgcatttctccctataatgaccatgcctggtgatatggtttggctgtgtccccatccaaatctcatct

SEQ ID NO: 612789 - DNA, 575 bp, Homo sapiens
aagtttccctggaatgtttcagctttaatcagggtagatggaagaaaaaaataaaaaggtggttaagccacatgacagaatwtctggacctcgattcatcagctcatttaggaagctctctatggagcaaaatatgcacagaaaggaggctttgtgtcattctaaaagctattttatgtccttggaaaggcaggtgtgtgttaatatttatactcttcgagtgttctgttttaagtgtcacatactgcaaatgtatctccaaagtcactccaggaaaaaaaaaaagtcattttattggggaacggggcatagttccccaattcccacatcctcattgtctgtgaagctcacaatttgtatcgttctatcactgtggttaccaatagcagagagctcctacttcgcatccattgagcattcctgttgaaccctggggatccagggataaatggtgaagtttcctacccctgggggccacagcctggcggggtgggtgggagaacagactccctagagagcctgagcctgctctttctcttttctgtgacaaggaattaagtctcaaggggtggctt

SEQ ID NO: 612790 - DNA, 575 bp, Homo sapiens
tcaggagttcaagaccggccgggctaacatggcgaaacccagtctctactaaaaatacaaaaattagctgggcttggtggcatgcgcctataatcccagctgcttgggaggctgaggcaggagaatcacttgaatccaggaggtagaggttgcagtgagacgaggtcacaccattgcactgcagcctgggtgacagagtgagactccatctcaaaacaaacaaacaaaaaacaaaacactgttttgtaaactaaagagactggaagacttactatctaggragagtgtctggaaaagttatgagaccaatctgagtgttccattccaacggagggaaagaactcaatgaggcttattaatggacaacgatggaaaggaatacaactgttctttgcgtaaatcctttagaatctgctcatcaggtaaaagcagttaccctctactgctttgtccaatttagagtaacatggagggatcactccatttggatgataagccccctgggcaggtaatttgaactttctaagccttaatttcttatctgatatctaaagtgtagaaaataacagtgaata

SEQ ID NO: 612791 - DNA, 575 bp, Homo sapiens
tcaggagttcaagaccggccgggctaacatggcgaaacccagtctctactaaaaatacaaaaattagctgggcttggtggcatgcgcctataatcccagctgcttgggaggctgaggcaggagaatcacttgaatccaggaggtagaggttgcagtgagacgaggtcacaccattgcactgcagcctgggtgacagagtgagactccatctcaaaacaaacaaacaaaaaacaaaacactgttttgtaaactaaagagactggaagacttactatctagggrgagtgtctggaaaagttatgagaccaatctgagtgttccattccaacggagggaaagaactcaatgaggcttattaatggacaacgatggaaaggaatacaactgttctttgcgtaaatcctttagaatctgctcatcaggtaaaagcagttaccctctactgctttgtccaatttagagtaacatggagggatcactccatttggatgataagccccctgggcaggtaatttgaactttctaagccttaatttcttatctgatatctaaagtgtagaaaataacagtgaata

SEQ ID NO: 612792 - DNA, 575 bp, Homo sapiens
tcaggagttcaagaccggccgggctaacatggcgaaacccagtctctactaaaaatacaaaaattagctgggcttggtggcatgcgcctataatcccagctgcttgggaggctgaggcaggagaatcacttgaatccaggaggtagaggttgcagtgagacgaggtcacaccattgcactgcagcctgggtgacagagtgagactccatctcaaaacaaacaaacaaaaaacaaaacactgttttgtaaactaaagagactggaagacttactatctagggagagtgtctggaaaagttatgagaccaatctgagtgttccattccaacggagggaaagaactcaatgaggcttattaatggacaacgatggaaaggaatacaactgttytttgcgtaaatcctttagaatctgctcatcaggtaaaagcagttaccctctactgctttgtccaatttagagtaacatggagggatcactccatttggatgataagccccctgggcaggtaatttgaactttctaagccttaatttcttatctgatatctaaagtgtagaaaataacagtgaata

SEQ ID NO: 612793 - DNA, 599 bp, Homo sapiens
attgccagctcacagcatctttgaggtgggaaaagcctcttacttaacacagaaatccacctcctatgaggcagccctaagagctgcaggtgcagtctctgcttgactgacccagccaccaactgggaactcaggccttcactgcttgcatttttgattagctgtcattgctaggaggtatttttctttctcattacttctacttccccagccctatcacccaatcattattagttttctagagccacacaraagagttctgcctgtttctccttgttacagcccttctaaaatctgaggccactttctgtgactttttggtgtcctttctccacattaagcatcccccatgtgctgaatcatgtcttagatgacttgatttcctggcccctcacttgaaaagtaacataatgcaatggaaataccagacagagacagaaccctgtgaagaaagctgtgagtgactggctaagtcacttctctatgtctcagctttttctttcttttttctctctctggtttttttgtttgtttgttttttgttgttttttttttttttgaaaaggagtttcactcttgttgcccaggctggagtgcag

SEQ ID NO: 612794 - DNA, 541 bp, Homo sapiens
gaagatctgaaatctgaactgttcctcacttggttaaaatcagggtatcagcaggcctgcattccttcttgtggttctagggaagagtctactttcttccttgccttttccagcttctagaggccacctatattctttgcctcatggcccaatttctccatagtcaaagccagcaatattgagctgtctttttcttgctgccgtctctctggttttctctcttttgttttcctctttcatttgtaagaacacttgtgattgaattgggcctactcagataatccaggaacatttagccatctcaaattcagttcattagcaactttaatttaatctgcaattttatttccctttgccatgtaacatagcacattctcaggtactggagatcaggatgttaacatctttgggaagcgatcattatgcctaccattcacatgttacctgaaatgaaactagaagaaatagaaaatataaatagccctacatttactaaaaattaaaatagygattaaaaatctgaaaagtctgggcagaaatg

SEQ ID NO: 612795 - DNA, 555 bp, Homo sapiens
tggcaatgatagaagctgtgattgatgtctggacctaggcaccagcgcaggcagggaagcaaagagcagaccacagagccctgtacgatgcacatgaggcctcccatgtgagtgggtggaaatttcaaggggactgaaagacttggggtagaagcagagaaatactttttcataatagttrtcatggtagccttatggctcttaattgagtatggctttgccaacccatgatgcaggcaacaaaagatttgcttagaacaggtaaacaagacaggaaggggagttgtttgcctctgtatgcaaaccaaaaaccttaagcacttcaacatgctagatgataatgtacataactgatgtggtcattgatttcagatcaagaaagcagttacgttagatttacaggttcactctaagtgtgagtccagtccctagtgacataagttcttaccttgagaacgtgcattagaaataatggtagcaatttcatcagtggacttacattttatagcttttgtttttcttttttccccttttatagtgatcaattttgatata

SEQ ID NO: 612796 - DNA, 483 bp, Homo sapiens
gctcctgggtttcctgaacatgaaactcacacactgcttaaaacaactcattagcatgcctggggagagttgaacagttcaggcttctcaaaagtccagtgtttccctaggaaggaatttactrgggtggtggtagggctggggtaagagactcctctacatgaccaacagcattgcattaggtaccttggcaagagccaagcgaggtaaacagttccattacacatacgccacatgaggagtgagagatgtcagagctgggccagtatggaggcagctgaggtacactggaaagaataccagtgcttgatgccaggaggatctgtcacttaccagctgtgtcttttggacaattcacacattgcctcttggagcctcctctgtgatctaactcatggggcagttgagagaatcacattaaataaagcaaatgaagaattttgccatctgcaaagccctctgcaaacgcgaggggttattaca

SEQ ID NO: 612797 - DNA, 612 bp, Homo sapiens
cttctcaaaagtccagtgtttccctaggaaggaatttactagggtggtggtagggctggggtaagagactcctctacatgaccaacagcattgcattaggtaccttggcaagagccaagcgaggtaaacagttccattacacatacgccacatgaggagtgagagatgtcagagctgggccagtatggaggcagctgaggtacactggaaagaataccagtgcttgatgccaggaggatctgtcacttaccagctgtgtcttttggacaattcacacattgcctcttggagcctcctctgtgatctaactcatggggcagttgagagaatcacattaaataaagcaaatgaagaattttgccatctgcaaagccctctgcaaacgcgaggggttattacaaggcagcttgtgagaatcattctttttagtgccgtgtattgacaagggagccactctctggttagtactgggccaacaaagctyggcttttgacgtctataaaaatcagtttaggtctttccttacctagatattaggttgtaaggaatctttaaagccctttagacattctgtcctacccctatgccagctttctttgccatttagcttcc

SEQ ID NO: 612798 - DNA, 493 bp, Homo sapiens
acttaaaatctggttaaactaaagcattgttgagcaccagtgggatgtagcaatgtgactgcaggtacttcagaatgctcttaagaactcactggaccttgctgcccaggaatacagtccacctcgaatacaggcaagagcactgctcctgggacaggaagataagacggctttaaaggctctcagycccttttggaatatgtgtgggtattcgtttttcagggctgctgtgacagagttccacgactggatggcttaaaccatgaacatgtattctctgtcaattctgaaggcttgaacccagccactgatattctttgctggaattgccttgaagaggaggtatgaggattgacttaataaataatctcaatgaggacttttaaaggagctctctgacttgggggttgagagctattgagttctatgatgctctattaagccccttggtgctctggcctcagcaacattgaaataaaatgatcatggaatt

SEQ ID NO: 612799 - DNA, 611 bp, Homo sapiens
ttcttttcttaataagccatgttgatacctagttttcattaacaggctagaaatcgaaaaacacaacttggctttgtagaatagaagccaacgtaaacagaaacatatttgatgtagttttacattgaggtctttctgccacaaattttgactgggggaaactggtagccaaagtttttcttatcttatttaataatgactactctgagagtacccaaaatattgaagatatggtgaataaacatttatggagtccttactgatagtaatagattgtgtgttaccaaagcagtatgaaatagtagctcaaccagcaaagaatttacgatgtagttcacatgtcacatatatacagagagtctacaaggcagtaaaggcctaatgakggatgcaagcactacttgctatggataggagtttagaggaaaaatggatcacctttatctttccccaaggcttttaggatgaagtgagatttgagctcattccaaaaacaaaggttggaatcaggtggagaaatgcaagaacactttgcacaaaagaagaaccagtctttagagcatgctcacttgggtagtaaatcaacatttttatcctcattaaacacatga

SEQ ID NO: 612800 - DNA, 656 bp, Homo sapiens
tgttttaacttctgctgtggatgcatttggagatagggcctttgggaggtaattaaggttaactgaggtttaggagatgatgaagtcttgagagcacagcctcatagttgagatcaggtcccctatgaaagggcttgagggaatgggttgctcagttttgttcttctgtcatgtgaggacacagtgttcatcttcattttgctatgtgaggatacctacatgccatctatgaagaagaggccctcacaagacactgaacttgccaacatcttgattttggacttctcagcttccagaacagtgaggaaataaatttcttcactttttaataagttacccagtctcagatcatttgttataacagcacaaatggacttaagayaatacaaaggtgccaaggatacacaatgggaaaacaataatttcttcaacaaaagatgttagaataacagcatatccacattcaaaagaatgtagttggacccttaacttataccctatgcaaaaattaactcaaaatgaattaactatagttacacaccatacccccaaatatgtataattaccatttgtcaactaagaataaaataaaacttaaaaatgaattaaatgcctaaacatagaaaactataaaactactagaagaaagcataggg

SEQ ID NO: 612801 - DNA, 594 bp, Homo sapiens
accaacattttctcatgtgtcgattgtgctcctgagtgtgtggacaaggtattgaagggttcagggatagagggtgaagatgctataaggcatgattcctgctctctctgggcatatagacaaataggcaaaatctgaacatgtaaatggtgagcaaacaacccccagaagcaatgataataacaggtaccatttattgagtgtttattataaaccatgcactgttccaagtgcttttcttttctttctttctttttctttctttctttctttctttctttctttctttctttctttctttctttctttcttycttccttccttccttccttccttccttccttcctttctttctttctttctttctttctttcttttctttctttctttcttttttttttttttttttgagatggagtcttactctgtcgcccaggctggagtgcagtggtgagatctcggctcactgcaacctctgtctcccaggttccagtgattctcctgcctcagcctcctgagtagctaggattacaggtgtgtgccaccatgccaggccaatttttgtatttttagtagagacagggtttcaccatg

SEQ ID NO: 612802 - DNA, 503 bp, Homo sapiens
agctccacacatgaaggccaaggccaagaggaacatgggttgttggaagccagggaaacaagaggcctggtagggaccacccagacctgcagggctgggggacctttcattctacagtctcgtgcccaccgtgtctccagggactagctgataatatgatttttattttaattaattaattaattttttcactgagacggagtctcactctgttgcccaggctggagtgcagtggagtgatcttgactaactgcaacctccacctcctgggttcaagtgatcctctcacctcagtttcccaagtagctggaactacaggcacccgccaccatgccgggctaatttttttcttgtttgtatttttagtagagtctgggtttcaccatgctgcccaggctgctctcagactcctgacctcaagtgatctaccagccttgacctcccaaagggctgggattacaggcgtgaamcactgcacctggccgatatgatttttaaataac

SEQ ID NO: 612803 - DNA, 560 bp, Homo sapiens
caggcactgctaacatttttgaagggatgcctgagtgagggccagggtgagggaggggcagggcctgccaaaggtcagacccccaaaacagaccctcaggcttcagggcatgcatgtggaccatcgcatgcatgaactgtttaagtgggcatggagctaatcaacagagctgcagaagagaatgaccaccttgggcctggcatgttttttggtgaccaaaaaagccacccccacctccattcctatactgagcttatccatttccaacacagattgctcatgggggaacctcaccccacacccctcttaccccaaargcagccgttctccctctagcctgctgggtgggctctggaccttccttgggcctcactcctgagaaggtccagctggtgggtccagctggggatttcaaggacgatggggcccatctggagggagcttggagtgagccagaggggccagtagggaggaaaagccccttgggaacagaagactgggctgggaggactctctcagaatgatgcaaagaagaaaaggaaaggccaggaacctgggct

SEQ ID NO: 612804 - DNA, 614 bp, Homo sapiens
cctgctgtcttttcatttgctcaatctggcacctctaactccagtggctgcactccttaacagtaccttaaaacacctcccwcactctaaggcctctgatgaacaggttaaggataggcccctgcctggggccccaggttctctctcccacccacttgcacttctacacctggtaactacatttgaagaagcacataaccagcccctcagaacttggttttaatagaggagagattggatctcaaacctcggtggggcccttagcagtcagggggatcactaaaaagggagtgccagaggagcaggttgtccctcaggggacttgggggcccaaatcccagaggcctgagctgcaagtccatggggtagaacagtggaaaggttatgcttgctctggaatgagcaaacctgggtttgaagatgggaactgccaccacatgatgctaggcaagtgacttcacccctccaagcctcattttctcatctatagaacaactatgaacaataatagcgcctttatctcatggggttattgtggggagtaaaggagataagtcatggcacattgtaagcactcagtgagtgtgacttattgttaccaatcccctgaagca

SEQ ID NO: 612805 - DNA, 590 bp, Homo sapiens
gtagatttgtagtaagttttactatcaaaaagtgtgaattctccatcttttttcttctttttcaagaatgttttggctattcaggtcccttgagattccatatgaatttgaggatgagtttttctgtttctgaaaaaaaaataatgctattttgatagggattgcattaaatctatggatctctttgggtagtactatcatctcagtcttccaatccatgaccacagatatccttcagttttctatgtcttctttaaattccttcagcaacttttgtgtgtgtgtgtgtgtgtgtgtgtgtgtgtgtgtgagatgggktctcactccatccagtctggagtgcagtggcatgatcacaactcactgcagccttgatctcccaggctcaagcaatcctcccacctcagcctcctgagtagttgggacaagaggtgttcaccaccacgcctggctttttaaaaaaactgtagtagagatgcagtcttgctatattgcccaggctgatctcaaactcctgaactcaagcaaccctacccgccttggccttcaaaagttctgagattacaggcatgaaccactgtgcctggacc

SEQ ID NO: 612806 - DNA, 596 bp, Homo sapiens
gcccagactagaaaattgacacccagagagggatgggaactttaccactgtcacacagcaaatcagtggcaaaactgggacaagaaccaggttggcttctttgtgctacatacatatcccacatccattcttcaagttatctttccagtccacctctggggagccttctcagagtacccctgtccctgctggtatccccaacagaatggctaacttccactgggttgactctaatggagttagtaagtcagtctttgggctcactgttggattttttcccctgttgcttcaccctttgtccagccccaacatgtaggcttcctgtccctatactatcrggtctcttgttccaccttctctggataaccactaagaagcttttgaaagtagccacttttccatgggatattctgtgggcagctcacagaggtagcactcagatacaggtagtgtgagccaagggaagttgataacaccccactctaagagcatggaaatcagggggactgtaaccctttccactcctctaaccgaggaagaggagagaggtgcagaaaaggtcacaaaaacaccttgggagttatctaagtaacctg

SEQ ID NO: 612807 - DNA, 596 bp, Homo sapiens
gcccagactagaaaattgacacccagagagggatgggaactttaccactgtcacacagcaaatcagtggcaaaactgggacaagaaccaggttggcttctttgtgctacatacatatcccacatccattcttcaagttatctttccagtccacctctggggagccttctcagagtacccctgtccctgctggtatccccaacagaatggctaacttccactgggttgactctaatggagttagtaagtcagtctttgggctcactgttggattttttcccctgttgcttcaccctttgtccagccccaacatgtaggcttcctgtccctatactatcgggtctcttgttccaccttctctggataaccactaagaagcttttgaaagtagccacttttccatgggatattctgtgggcagctcacagaggtagcactcagatacaggtagtgtgagccaagggaagttgataamaccccactctaagagcatggaaatcagggggactgtaaccctttccactcctctaaccgaggaagaggagagaggtgcagaaaaggtcacaaaaacaccttgggagttatctaagtaacctg

SEQ ID NO: 612808 - DNA, 503 bp, Homo sapiens
agctccacacatgaaggccaaggccaagaggaacatgggttgttggaagccagggaaacaagaggcctggtagggaccacccagacctgcagggctgggggacctttcattctacagyctcgtgcccaccgtgtctccagggactagctgataatatgatttttattttaattaattaattaattttttcactgagacggagtctcactctgttgcccaggctggagtgcagtggagtgatcttgactaactgcaacctccacctcctgggttcaagtgatcctctcacctcagtttcccaagtagctggaactacaggcacccgccaccatgccgggctaatttttttcttgtttgtatttttagtagagtctgggtttcaccatgctgcccaggctgctctcagactcctgacctcaagtgatctaccagccttgacctcccaaagggctgggattacaggcgtgaaccactgcacctggccgatatgatttttaaataac

SEQ ID NO: 612809 - DNA, 503 bp, Homo sapiens
agctccacacatgaaggccaaggccaagaggaacatgggttgttggaagccagggaaacaagaggcctggtagggaccacccagacctgcagggctgggggacctttcattctacagtctcgtgcccaccgtgtctccagggactagctgataatatgatttttattttaattaattaattaattttttcaytgagacggagtctcactctgttgcccaggctggagtgcagtggagtgatcttgactaactgcaacctccacctcctgggttcaagtgatcctctcacctcagtttcccaagtagctggaactacaggcacccgccaccatgccgggctaatttttttcttgtttgtatttttagtagagtctgggtttcaccatgctgcccaggctgctctcagactcctgacctcaagtgatctaccagccttgacctcccaaagggctgggattacaggcgtgaaccactgcacctggccgatatgatttttaaataac

SEQ ID NO: 612810 - DNA, 447 bp, Homo sapiens
aatgcaaacatcccaaagaaktttctgagaatgcttctgtctagattttacctgaagacaatcccgtttcccacgaaatcctcaaagctatgcaaatatcctcttgcagattctacaaaaagagtgtttcgaaactgctctatgaaaagaaaggttcaactctgtcagtagacggcacacatcacaaacaagtttctgagaatgcttgtgtctacttgttatgggaagatatttcctttttcaacataggcctgaaagcgctccaaatgtccacttccagatactacaaaaggagtgattccaacctgctctatgatagggaatgttcttctctgtgtcctgaatacaaacatcacaaagatgtttctcagaacgctgcagtctgcaatttgtatgaattcccgcttccaacgaaatcctcaaaactagccaaatatccacttgcag

SEQ ID NO: 612811 - DNA, 447 bp, Homo sapiens
aatgcaaacatcccaaagaattttctgagaatgcttctgtctagattttacctgaagacaatcccgtttcccacgaaatcctcaaagctatgcaaatatcctcttgcagattctacaaaaagagtgtttcgaaactgctctatgaaaagaaaggttcaactctgtcagtagacggcacacatcacaaacaagtttctgagaatgcttgtgtctasttgttatgggaagatatttcctttttcaacataggcctgaaagcgctccaaatgtccacttccagatactacaaaaggagtgattccaacctgctctatgatagggaatgttcttctctgtgtcctgaatacaaacatcacaaagatgtttctcagaacgctgcagtctgcaatttgtatgaattcccgcttccaacgaaatcctcaaaactagccaaatatccacttgcag

SEQ ID NO: 612812 - DNA, 426 bp, Homo sapiens
gtttcaaacctgctctgtgaaagggaatgttcaattctgtgacttgaatgcaatcatcacaaagaagtttctgagaatgctgctgtctgctttttatatgtaatcccgtttccaacgaaatcctgaaatctagcccaatatccacttgcagattccacaaaaagagtgtttcaaaactgttctgtctaaagaaawgttcaactgtgttagttgaggacacacatcagaaactagtttctgagaatgcttctgtctagttgttatgggaagatatttccttttccaacgtaggcctgaaagcgctccaaatgtccacttccatatactaaaaaaagagtgtttcaaacctgctctaccaaagggaatgttctactctgtgacttgaatgcaaacatcccaaagaagtttctgagaatgcttctgtct

SEQ ID NO: 612813 - DNA, 470 bp, Homo sapiens
actttgtgatatctgtattcaagtcacagagttgaatattccctttcttagagcaggtttgaaaccgtcttttygtggaatctgcaggaggatatttggatagctttgaggatttcgttggaaacgggattacatgtacaaagtagacagcagcattctcagaatctgctgtgtgatgtttgcttttaagtcacagagttgaacattccctttcatagagcaggtttccaacactctttctgtagtatctggaagaggacatttcgagcgcttttaggcctatggtgaacaaggaaatatcttcccataaaaacttgacagaagcattctcacaaactggtttgggatgtatgtcctcagctaacagagtacaacctgtcttttgatacagcagtattgaaacactctttccgtagaatctgcaagtggatatttggatagctctaacgatttcgttggaaacgggaata

SEQ ID NO: 612814 - DNA, 470 bp, Homo sapiens
actttgtgatatctgtattcaagtcacagagttgaatattccctttcttagagcaggtttgaaaccgtcttttcgtggaatctgcaggaggatatttggatagctttgaggatttcgttggaaaygggattacatgtacaaagtagacagcagcattctcagaatctgctgtgtgatgtttgcttttaagtcacagagttgaacattccctttcatagagcaggtttccaacactctttctgtagtatctggaagaggacatttcgagcgcttttaggcctatggtgaacaaggaaatatcttcccataaaaacttgacagaagcattctcacaaactggtttgggatgtatgtcctcagctaacagagtacaacctgtcttttgatacagcagtattgaaacactctttccgtagaatctgcaagtggatatttggatagctctaacgatttcgttggaaacgggaata

SEQ ID NO: 612815 - DNA, 470 bp, Homo sapiens
actttgtgatatctgtattcaagtcacagagttgaatattccctttcttagagcaggtttgaaaccgtcttttcgtggaatctgcaggaggatatttggatagctttgaggatttcgttggaaacgggattacatgtacaaagtagacagcagcattctcagaatctgctgtgtgatgtttgcttttaagtcacagagttgaayattccctttcatagagcaggtttccaacactctttctgtagtatctggaagaggacatttcgagcgcttttaggcctatggtgaacaaggaaatatcttcccataaaaacttgacagaagcattctcacaaactggtttgggatgtatgtcctcagctaacagagtacaacctgtcttttgatacagcagtattgaaacactctttccgtagaatctgcaagtggatatttggatagctctaacgatttcgttggaaacgggaata

SEQ ID NO: 612816 - DNA, 470 bp, Homo sapiens
actttgtgatatctgtattcaagtcacagagttgaatattccctttcttagagcaggtttgaaaccgtcttttcgtggaatctgcaggaggatatttggatagctttgaggatttcgttggaaacgggattacatgtacaaagtagacagcagcattctcagaatctgctgtgtgatgtttgcttttaagtcacagagttgaacattscctttcatagagcaggtttccaacactctttctgtagtatctggaagaggacatttcgagcgcttttaggcctatggtgaacaaggaaatatcttcccataaaaacttgacagaagcattctcacaaactggtttgggatgtatgtcctcagctaacagagtacaacctgtcttttgatacagcagtattgaaacactctttccgtagaatctgcaagtggatatttggatagctctaacgatttcgttggaaacgggaata

SEQ ID NO: 612817 - DNA, 214 bp, Homo sapiens
actcagctaacaaagttgaacctttcttttgatagagcagttttgaaatgctctttttgtggagtctgcaagtggatatttggytagttttgaggatttcgttggaagcgggaattcatacaaattgcagactgcagcgttctgagaaacatctttgtgatgtttgtattcaggacacagagttgaacattccctatcatagagcaggttggaa

SEQ ID NO: 612818 - DNA, 521 bp, Homo sapiens
ccaatcctgcacaagaaaatcttcccaaacgttggattatttcacttctctactcaaaaaccttcmaaaatgtacagttaactaacaaatgactacacaagtagaagtccgatatcatagtaatgtgggtttgtagccattcctggacaacactcaccaaaccatgagtcccagaatgcacgggggttcgcggggggaaggggggcggggtatgatagtgtctgaaagcggtgggagtttaagattaagggatgtagctagccttatgtagacaacagtgtgttataaagtggagtggagtggcatgctcatgactcactgcagcctcaacttcccgagttctagtaatcctccaacctcagcctccccattagctggaactacaggtgtgcaccaccatgctcagctaatttttgtattttgtatagagatgggtttttgccatgttacccaggctggtctcaaacttctaacctcaagcgattggcccaccttggcctcacaagtgtgagccaccactc

SEQ ID NO: 612819 - DNA, 585 bp, Homo sapiens
tcggttcacctgagtccattttctttgctttttgcaccacgggaaggtactccttcagtgtttacttttgtgcaaactatacatcagaaggagaaaccattttggttttgatggtagtcatccaggacagattttttaagtttctctgaattattttcatgaatggacatttatttatttttaacaattttaacagttttattgaaatgtaattgacctaccttcaccttgtttttggtaaagaaaaaaattgtgtttttacataaacatacacccatgagcccaagatggtaacatctatcaccccccaaaaatgcttccagcccttttatagtgtcactttcttacctgtcaccaagttctcatccccagacaagcattgatatgcttttgcctcctgtattagtccgttttcacactgctataaagaactacctgagamtggacaatttgtaaagaaagtaagtttaattgactctcagttctgcatggcttgggaggcctcaggaaacttacagtcacggtagaaggcaaaggagtaagcaggcatgtcttatgtggtggcaggagacagagagcaagggg

SEQ ID NO: 612820 - DNA, 554 bp, Homo sapiens
ctgaacattctgtgcccctcttcaaaaaaaaaaaaaaatgctttggctcaggacaaactgccaccttctttgtccacaatagaatgtaggagttagcaggaaatcctccattcttttattgatgatctaccagtgctttaacccggagaactctgagacatgaaaaaaaattcttaagatatttaagaatttataaataatgagcatagagggatacgctttttaaaaattacctttcacttacatttctcatatattatctcaagagtttttgcagcaaccattacttgtaagtactgtgtgaccatttatcaggtcaggaatgaggcttaaaaaattaggattttagcaaatgcctctggcctttattatgtgctcttaccattcaatttcagtgatcagagaaattatacataatatcatactaacaatatttatctatttcaagcaaacaaaaacgtattgacagacttgaaagttataagtcatatgtaaacacatattttatttatatattatagatawacacacatacatagacatatatatgtgag

SEQ ID NO: 612821 - DNA, 559 bp, Homo sapiens
ttgctgtttccttaacatactcaaaattgctacttttacataatgtggtttgattttgaagaaaggaaaatcaggatgtagtggtggctagaagggaatctttcacgttggtggcttcttatgtttacagtgaaatgacatattttaaaaacatggtggactagtcagagccacrtccttatttgcaaagtgggatttatgtaacttgtttgcaaaaaggaatggaagtattttgaaatgatttgagtaagacctgcatgactaacttctagtgctgttttctgtcgcagcagatatagttttctttatgaaacgaagagttcatggattacctcactatggaaaaatatccaaatagtttgaattaattcctggtttgaaaacaagttaaattaagccagtagttattaaccatctgctatttgtttcattattgttattattcaggtattttccttatctgaacatatgcattttaaattcagtgctatcttaaggtaacttggaaaggatccctctggaactgtgtatagttaatcaaagactatttgcccgaatt

SEQ ID NO: 612822 - DNA, 565 bp, Homo sapiens
tgtcttccatgagcctggattctccccgaggatctgacagaccagtaggagagataagtggtcaaacaaattataggggaagcacaaccacagcagtgaggacgtgatgggtgcacactgggccacagagtgccttgccctccgtggaaactgcgaaaggctcaggaagggcatgccaacagcatcgagtgcagtagtgcagtcaagagggtaaaagatgggggcatggaaggcaatggtattgcctgaaccgctcctcccaccaggaaagaaaagttataacaaagttgcgayatatgacagctcagtagaagtcctttctgtccattttgcagctggttgtaaatctatcctacatccactcatgtacgcagcctcagcagtcagctagcaggcacttaattaagcatcttttttgtcctaggtcctgtgctctgtgctatgtttgctttcgctctgaaactagcacaaccacactagaagtgttggaaaatggaggagagttacacacgcagacactgtttattttggatgaacaagcatctcattcctcctttttctcata

SEQ ID NO: 612823 - DNA, 390 bp, Homo sapiens
atataaatcccttattagtccttcttttgctaaatatttttatgatttattttggaatacatttacagcctgagatttctgtataatagtaatggcatttttttcacatctaaagagccagtctctattaaatgccaaaagctagctttaggcatttatgggtaaaaatctcaagaacaattctgggacttaaattttgaaaaaaatttgaaatacacacacacacacacacayatatatatataatttttaacaggtttgctttgctattgtgtacaaaagcaactaggagtcatttagaagaataaaattatttccattgtgatgagtgcaaatctcatcttatgataagtacaaatctcatcttttgacgagtgcaaatttgcatgt

SEQ ID NO: 612824 - DNA, 390 bp, Homo sapiens
atataaatcccttattagtccttcttttgctaaatatttttatgatttattttggaatacatttacagcctgagatttctgtataatagtaatggcatttttttcacatctaaagagccagtctctattaaatgccaaaagctagctttaggcatttatgggtaaaaatctcaagaacaattctgggacttaaattttgaaaaaaatttgaaatacacacacacacacacacatatatatatataatttttaacaggtttgctttgctattgtgtacaaaagcaactaggagtcayttagaagaataaaattatttccattgtgatgagtgcaaatctcatcttatgataagtacaaatctcatcttttgacgagtgcaaatttgcatgt

SEQ ID NO: 612825 - DNA, 492 bp, Homo sapiens
cagctatataaatattgatctgtaattatttttagttactgagcagtaaatatttctaaccggctttaagttttgtctagtataacatagtggtttagggtgcagatgagggaacataaaggtctgtaaaactgagtaagctcacaaaagaagtgggtataggcagagaagagacaaggtccacaggcagagcccctggacactccaatatgagcaggccaggagtccacgaagagtcgggaaaggagatggggaggaagcagccagtgagctagaaagccaagagagtgtggtgtcccggaggagaggggagaaagtgctccatggaagaagagaaaccgactcagtcaaataacgcyggggtggggatgggtcaagagaaacaaatgtgagagttgaacattggatttagaaatgtgcacactgctagccaggggcggtggctcatgcctgtaatcccagcactttgggaggccaaggcgggtggatcac

SEQ ID NO: 612826 - DNA, 443 bp, Homo sapiens
aaaacttacagccaccttatctagtgtgcttgcaaatacatctttctgtggtggattttgattgtatttgtcaggattccttcgttgtagctctaaaccacaaccctacagataaaattgtaatctcagacacgtaggccctgatcattactgttcatgtcactgatttccacagrcctttacgggaatcacatcactaaaacgttgctgatgggaatgacgtgaggaaaagaatgaagtcactgatttgtagcccgtctgtaaaatacgtagatttttttcttctgtttaaaaatagcgtatctctatctttgaataaactaagtttgaaatgttcctattgtttagatttatgctgttatgcaggtccccgagtagagatctttgtctcattgatgctgcaatgctgcagtcgattctagatgatctagtgatgaaagcca

SEQ ID NO: 612827 - DNA, 609 bp, Homo sapiens
ctccacttcttatctcagtaccctggttcacatcaccctccttgttctctggactacttcagtagtycctcaacactaattgatggaatgagtactaattatcattaaagaataaaggaatgaatgaattttgttttgttttgatttgatttttgagatgaagtctcattgttgcccaggctggagtgcaacggcgcgatctcggctcactgaaacctctgcctcccagattcaagcgattcttcagcctcagcctcctgagtagctggaaccacaggcgcccaccaccacacccggctgatttttgtagttttaatagggatggggtttcaccatattggccaggttggtcttaaactcctgatctcaggtgatccacctgccttggcctcccaaactgctagtgaatgaatatttttacttaaaggaatattaactgcctcaaattcatttagtttttttgtttctctgataactctcttcaaagttaaatgtgattactttgatttgatttgttaataatagacctaaactattggcactgatggatgctctacttaccagttgggcataaatgataccttttaaacatttctgtccccaagctta

SEQ ID NO: 612828 - DNA, 633 bp, Homo sapiens
tttggtttcccgctgcatataaaagttatatttgcactatcctataatctgttctgtgcaatagcattacatctaaaacacaatatgataccttaattttaaaatattttttgctaactaatgctaacaatgrtctgagtctttggcaagtcataatctttttgctggtggaggattttgccttgatgttgctggctgctgacccatcaggctgatggttgctgaaggctagggtggctgtagtaatctcttaaaatgaaacaatcaagcttgctacatccattgactccctttcatgaaaaatgtctctgtagcatgcgaagctgcaacagcattttacccagagtagaacgtctttcaaaattcgagtcaatcttctgaactcttaccactgctttatcaactgagtttatggaatttctaaatcctttgttgtcatttcaacaatgttcacagcatcttcaccagtagtagattccatctcaagaaaacactttgttcatccataagcagcaactcctcatccattaatatttgatcatgaggttgccgcagttcagtcacatctccaggctccacttctaattttggttctattgttgtttccaccacatctgcagttgctttctccac

SEQ ID NO: 612829 - DNA, 600 bp, Homo sapiens
gtggggcttaaaacctagatgacgggttgataggtgcagcaaaccaccatgacacatgtatacctatgtaacaaacctgcatattctgcacatgtatcccagaacttgaagtaaaattgttttttagaaatggatgtgctgtcatccatgctttgttattccatttatatagcaaagggagrgtagacttagcataattcttgaaggccctaggatttttggaattgcaaatgataattggcttcaacttaaaattaccagctgtattagcccctcacaagagagtcagcctggccttcgaagctttgaagccaggtattgtcccatctctagctgtgaaattcctaggtggcatcttcttccaatcaaaggctatttcacctacatagaaaatctgttgtttgctgtggccacctttatcaattattttagttagctgttctagataacttgctgcagctttacatcaaatgtgctgtttctcctcaccccttcatgttacggagacagtttgtttcctcaaatctcatgaatcaacctctgttatcttccagcatttttcctgcagtttcctcacctctctcagccttcataaaattg

SEQ ID NO: 612830 - DNA, 600 bp, Homo sapiens
gtggggcttaaaacctagatgacgggttgataggtgcagcaaaccaccatgacacatgtatacctatgtaacaaacctgcatattctgcacatgtatcccagaacttgaagtaaaattgttttttagaaatggatgtgctgtcatccatgctttgttattccatttatatagcaaagggagggtagacttagcataattcttgaaggccctaggatttttggaattgcaaatgataattggcttcaacttaaaattaccagctgtattagcccctcacaagagagtcagcctggccttcraagctttgaagccaggtattgtcccatctctagctgtgaaattcctaggtggcatcttcttccaatcaaaggctatttcacctacatagaaaatctgttgtttgctgtggccacctttatcaattattttagttagctgttctagataacttgctgcagctttacatcaaatgtgctgtttctcctcaccccttcatgttacggagacagtttgtttcctcaaatctcatgaatcaacctctgttatcttccagcatttttcctgcagtttcctcacctctctcagccttcataaaattg

SEQ ID NO: 612831 - DNA, 600 bp, Homo sapiens
gtggggcttaaaacctagatgacgggttgataggtgcagcaaaccaccatgacacatgtatacctatgtaacaaacctgcatattctgcacatgtatcccagaacttgaagtaaaattgttttttagaaatggatgtgctgtcatccatgctttgttattccatttatatagcaaagggagggtagacttagcataattcttgaaggccctaggatttttggaattgcaaatgataattggcttcaacttaaaattaccagctgtattagcccctcacaagagagtcagcctggccttcgaagctttgaagccaggtattgtcccatctctagctgtgaaattcctaggtggcatcttcttccaatcaaaggctatttcacctacatakaaaatctgttgtttgctgtggccacctttatcaattattttagttagctgttctagataacttgctgcagctttacatcaaatgtgctgtttctcctcaccccttcatgttacggagacagtttgtttcctcaaatctcatgaatcaacctctgttatcttccagcatttttcctgcagtttcctcacctctctcagccttcataaaattg

SEQ ID NO: 612832 - DNA, 600 bp, Homo sapiens
gtggggcttaaaacctagatgacgggttgataggtgcagcaaaccaccatgacacatgtatacctatgtaacaaacctgcatattctgcacatgtatcccagaacttgaagtaaaattgttttttagaaatggatgtgctgtcatccatgctttgttattccatttatatagcaaagggagggtagacttagcataattcttgaaggccctaggatttttggaattgcaaatgataattggcttcaacttaaaattaccagctgtattagcccctcacaagagagtcagcctggccttcgaagctttgaagccaggtattgtcccatctctagctgtgaaattcctaggtggcatcttcttccaatcaaaggctatttcacctacatagaaaatctgttgtttgctgtggccacctttatcaattattttagttagctgttctagataacttgctgcagctttacatcaaatgtgctgtttctcctcaccccttcatgttacggagacagtttstttcctcaaatctcatgaatcaacctctgttatcttccagcatttttcctgcagtttcctcacctctctcagccttcataaaattg

SEQ ID NO: 612833 - DNA, 591 bp, Homo sapiens
tagcttaaatgtaataaagtatatctttactgagaatttgttatgctgctcagtrcattatggatcataagatttcccatattattcttcaaggatctgcacactttttgtataaaggaccaaatagtacgtattgtagactttatggccatgtggtctctgatccagctgctcaactgggcctctccagcagaaagcagcggttgacagtatttaaactaatgggtcaagtggtgttccagtaaaccgacaaaaacaggaggtggctggttttggctcaagggcaactaaaccttgatctactcgcactcagcttctttctaatatagttggggaagattttttagaaaaacggacgatttgaaaggcaacttggctgtttcgtttcataatctggctcggatcctaatttctactctaccaagtggtatgatcccccataacagcatccactcattcgttcatcattcatttcttcattccttatttgctcactcttatttcatacaagcagtttactaaatcagaacgtcagtgtaacttaggagtctgcatgaatgcagcatcacagtcatcatcatgggtcaccgc

SEQ ID NO: 612834 - DNA, 531 bp, Homo sapiens
ccaaaccttgccctgacacattgtccaatgtagttcatcagggatcctgtaaccagaataaatgaaagtgttaaaataaaacaaaagagcagttctaataataaaatcccaatagcctcgatatccctccatatttgactggaagtctgcttccattattaagttcccagtgagaaaggaaagttcaaagatcaatatgctttgtaaattaaagtccagagatattcagttccaatggaattgaaatcccaaatctgattatcttgcctttctgagttaaatgtccaaaatttygtatgcataagttaaattattgtccccaaatcatcctttgcattttcttattttactcagtcttagctaaagaggttccagacatcttggtagagctgagacacttcagcattgtagtctgagctgtcaatcattgtattagcctgcttgggctgccatatcaaaataacagactagatggcttaaaaaacattcattttttcacagtctggaggctaaaagtccaagattaaggca

SEQ ID NO: 612835 - DNA, 607 bp, Homo sapiens
aaaaagctaaaaactcaaaaagccacaatgcctcttctcctccaaatgatcacaacacctctctagcaagggcacagaactgggtgaaggatgagatggatgaattgacagaaataggcttcaaaatgtgggtaataataacgaacttcattgagctaaaggaccatattctattctaatgtgaagaagctaacaggcatgacaaaacattacaggagctgttaacaagaataaacagtttagagaggaacataagtgacctgattgagctgaaaaacgcaacccaggaatttcacaatgcaaccacaagtatcaataactgaatagacaaagcagaatttcagagcttgaagcccgttttactgaaataagacaggcagacragattagagaaaaaaagaatgaaaagaaatgaacaaaacctccgagaactatgagattatgtaaaaagactgaacctataactgactggggtacctgagacagggagaatggaaccaaattggaaaacatacttcacgatatcatccaggagaactcctccaacctagcaatactggccaacattcaaatttaggaaatccagagaaccccagtaagacacttc

SEQ ID NO: 612836 - DNA, 592 bp, Homo sapiens
ctgttaaatatcaatttatatttgatttcctggatgaatatatatatatatatatatattatatatatatatataatatatatataatgtgtatataatatttatctgtgttttctatctrtaattgttagtgcttactacatttttgttagttttacttgttatatcatttttttccttagtcatcttttagttctgtaaggctggggttattccctattattctcttggtggttgtcttcttaaataatcattttcttttttattagctaagtgaattcacctcacttttaatttttttctctaatcatctaatgtctgattttttttctaattctggtacgttatttttcatagcttttattttgctcattgaaaatattactttacaatactcttatgttttggagaagcgttattttcattgtttcctgatttgctccaatcctttttgtgtggtcttctgatcttttatatttccataaaataacttgtatgagaagtaactatgattttttttctgttacctatctaaaagacaatgaacattatcaacacttttagagtcaggtagctaacttttcctaagtta

SEQ ID NO: 612837 - DNA, 592 bp, Homo sapiens
ctgttaaatatcaatttatatttgatttcctggatgaatatatatatatatatatatattatatatatatatataatatatatataatgtgtatataatatttatctgtgttttctatctataattgttagtgcttactacatttttgttagttttacttgttatatcatttttttccttagtcatcttttagttctgtaaggctggggttattccctattattctcttggtggttgtcttcttaaataatcattttcttttttattagctaagtgaattcacctcacttttaatttttttctctaatcatctaawgtctgattttttttctaattctggtacgttatttttcatagcttttattttgctcattgaaaatattactttacaatactcttatgttttggagaagcgttattttcattgtttcctgatttgctccaatcctttttgtgtggtcttctgatcttttatatttccataaaataacttgtatgagaagtaactatgattttttttctgttacctatctaaaagacaatgaacattatcaacacttttagagtcaggtagctaacttttcctaagtta

SEQ ID NO: 612838 - DNA, 533 bp, Homo sapiens
gtatttatataaagcaattgtcatatttaatgtaagtattataatacagtaaaacaaatatatcctttaactggagcaatgcactaygtgatacacattttcatttgttgtttatatgtttttatcctcttttaaaaaatttcactgcgaattgaccattttcagtgcagtctttgtgttgttcctccatcattcagcctttattcaggaaaataacagggtcactgcaaaaacttgccatagtgcagtctaatctaatagcatggataggcaaaatgtagtcactgaatatggaaccctgaaaagttcttccccctagtaaagctaaaaaaacatacctggataactggctctcaagagaggacatgcaatttaaatgtgatgggtacactcaattttcatgtttattttctgcatcttatcattaaactttaaactttatactcttttaaatttttgcaaaacatttattttatttttttaggattaagtattatgtttattgggatgtcttttattattaaaaatttatt

SEQ ID NO: 612839 - DNA, 587 bp, Homo sapiens
acttttaattaaaaaaaaaatatatatatatatatacatatttatatatattggattcagctatccaaattctgagtcagagattcaggttacttcatttaatggccacgataactgaggaagataatcaagaagatatggaggctgggcacggtggctcacacctttcatcccagcactttgggaggccaagataggcagattacttgagcccaagagttaagactagcctgggaaacatggcaaaaccccttctctacaaaaaatacaaaaagtagccaggcatcatggtgcaaacctgtagtcccagctactcaggaaagctgaggtgggaggactccttgagcctgggaggccaaggctgcagtgagctgtgatcccgccagtctggatgacagagaaagacccggtcttaaaaataaatcaatcaataaataagaaagaaagaaaaagatatggtggtatcgtttggctatgtccctacccaaatctcatcttcaattgtaactygcacaatttcacatatcacaggaggaatctggtgatgggtgattgaattatggtgatgggtctttcctgtgctgttc

SEQ ID NO: 612840 - DNA, 553 bp, Homo sapiens
ttagaaagctgtaaggaaagagttatgctactgttagaaagctgttatgattatcgcagttggatatggtatctgagcagtacgtttcagactttgcagtgagaagaatagcactgagatatatgatttttaaaggtaaaataaggtgtctggaatggttcagaactgtgattcagataatgcaatttgtggagttaggagacctcctgttctagttgctctgggctgacaaaggttcctgagcaaagattctggaaaaatttatatagatgctagtgtatttaccatattttagtaggtaagaactcaaatgcttgttttcaactggtcaaatatgtggatgccatagttttctgcattagaggcaccacaattggatgttttgtgtaaaaatctgaaaaaaatataatatactgtaaaataaatcttttacagtaaaactttattctctcccaaagaactcagtgaatctttattgtcttttgagcacccagatatcatcccattayttcgtccctgacaaaaaattgtattctttttcaatccaaaatgc

SEQ ID NO: 612841 - DNA, 553 bp, Homo sapiens
ttagaaagctgtaaggaaagagttatgctactgttagaaagctgttatgattatcgcagttggatatggtatctgagcagtacgtttcagactttgcagtgagaagaatagcactgagatatatgatttttaaaggtaaaataaggtgtctggaatggttcagaactgtgattcagataatgcaatttgtggagttaggagacctcctgttctagttgctctgggctgacaaaggttcctgagcaaagattctggaaaaatttatatagatgctagtgtatttaccatattttagtaggtaagaactcaaatgcttgttttcaactggtcaaatatgtggatgccatagttttctgcattagaggcaccacaattggatgttttgtgtaaaaatctgaaaaaaatataatatactgtaaaataaatcttttacagtaaaactttattctctcccaaagaactcagtgaatctttattgtcttttgagcacccagatatcatcccattatttcrtccctgacaaaaaattgtattctttttcaatccaaaatgc

SEQ ID NO: 612842 - DNA, 551 bp, Homo sapiens
gttaatggggagtcattaacggtttcagaaaagttaatgatatgataaatggtagttttggggattattctggttcgtgaaatttaaaataaattttattctgatatttttgacatttaaacctagtaaacaaaggttgcaaccacacaatcttatcatgatgtatcctactaataaaatttatgtcatggtttatattcccaaactagaaacacaatctgaaattgaagttaataaaatcagcatggcatatgtgattagtcatgtgtagaagctttctgccactaaaagtcatgtgtaaatgtgttactgatgtaacctaagcaatttctaaatttccctcatgaaactaatttcaaatcacattgagaagactaaagaagtaatgcaagataagatttgtcttacatgtgcaacataaaatctatggcaaaagacaagtgagcataaagataagaatataagccaggcgtagtggctcatgcctgtaaacccagaactttgggagactcaggcaggtggaycatttcagatcaggagttcaagaccag

SEQ ID NO: 612843 - DNA, 531 bp, Homo sapiens
acaaaaacataggatgttaaatttccatatttagagtggcactgaatcagtactaaagaattcttcatcacttttcacaataattgagayatggacagccaaatgaaactgaaggggacaatatgaatttttataatagttctcagagttaaacagatatacttcaaaaaattgtgatggttcagttggctttaagtattttgtaagtatgaatgcaagcaatgggagaagatgatgactgattttatcatattaagtaaaagctacagcgtgtcaactttcagaaagcaatgaaagacaagtgaaatgaaaaatcaagaagtgtttttcactaatttgcagtagcagatttctgcttttagtgatgctggtagaaaattgttcagaaattagtgatactacttttccttctagccaagatggagcaacaaagaccagatatactacaatattgggttcaacccttcaaaaaataaaatatatagaacaatggttttgatatattggagagcagggtgaccttgcggtgtt

SEQ ID NO: 612844 - DNA, 613 bp, Homo sapiens
agttgttttaattggttgctacttctgtggcttctatggatgcgaatgtgtcaaatatttttttttctttgatcaaaatatatggatcagcatgcagttgaggcaatgaaaaatacacacccatacacctaaattgaaataataactgaaactcctactaagatgccccatagtatcacaggatatatgatcaatgtgtgattcttaccagattcaaaattaaatcacacccagatamaaagtaatatttcaggcaacaaataggattcatcttcctaatgaccctaattcattcccaggcgagagtgactttcagttcagaaaaaacaaggtgtgaatcctgaaagcttcattaaagttttctcacttttctatgcttcaagcaatttcactttagcttttatgcttctaaaaagcagaggtaactgattttatacagtactaagttaaaagaaaatgtgggttatgtgtcaaaaccccctcacatttctacgtatatgattgatgtaagactttgaataatacaaataatttttaagctagtttctttaattttgtgagaaaatgtaatatatatatatatggccagggcttggtggctcacacctgtaat

SEQ ID NO: 612845 - DNA, 613 bp, Homo sapiens
agttgttttaattggttgctacttctgtggcttctatggatgcgaatgtgtcaaatatttttttttctttgatcaaaatatatggatcagcatgcagttgaggcaatgaaaaatacacacccatacacctaaattgaaataataactgaaactcctactaagatgccccatagtatcacaggatatatgatcaatgtgtgattcttaccagattcaaaattaaatcacacccagataaaaagtaatatttcaggcaacaaataggattcatcttcctaatgaccctaattcattcccaggcgagagtgactttcagttcagaaaaracaaggtgtgaatcctgaaagcttcattaaagttttctcacttttctatgcttcaagcaatttcactttagcttttatgcttctaaaaagcagaggtaactgattttatacagtactaagttaaaagaaaatgtgggttatgtgtcaaaaccccctcacatttctacgtatatgattgatgtaagactttgaataatacaaataatttttaagctagtttctttaattttgtgagaaaatgtaatatatatatatatggccagggcttggtggctcacacctgtaat

SEQ ID NO: 612846 - DNA, 438 bp, Homo sapiens
aatcctaccacagctgaatacaatagaagggggccaagcgctaaagcagarctttaccaaaagaaaaaatggtctctacttgctaccgctttattttctttaagaatatgcaacactgttcaccaggatagatccttagaaaagcaattcagaagcaggtttgtctagcaaggaagtttgcatgggcccttgataattaatataaagtagataagttaaagcaaacaaaggaattaaaacatagtcattataaaattaacattttcagtgataatataactcaggttttagaaatctacatttgatacactatttgatataatggaaaataaagtaatgctaacaagtatatgcagtgatttctcattttatacaattttagataaactatttttaattttagattttttttttttgagacggattctagctctgtcg

SEQ ID NO: 612847 - DNA, 566 bp, Homo sapiens
ctcggtgatgctagatccattgctgattttaacctcgattctcatgtggctgggggtttggggagatcttcctagaggtggagraggggagagaaaggaaatatattaaagggctgctttgtgccaaacactgccagagactttatatttattattagtagtagtagtattaaacagcaatcccatgaagagggtcctgttattacctccactttacagaaaaggagatgaaggcacagagaggttaagtaactttctaaaggccacccagccgagccaggtcagtctggctctgaccactactggttcattttcaagcatctcaaactgaatccataacaaactgaatcccataatagggatcctttttgttgttgttattagagacaggggtctcgatatattgcccaggctggactcaaactcctgggctcaagagatcctcccacctcagccttccaagtagctaggactagaggcgtgcgtcaccatacccggctcataatgtaggggttcttgagagcccagagcatgctagtttcttattgtggaggaagttcttccac

SEQ ID NO: 612848 - DNA, 566 bp, Homo sapiens
ctcggtgatgctagatccattgctgattttaacctcgattctcatgtggctgggggtttggggagatcttcctagaggtggagaaggggagagaaaggaaatatattaaagggctgctttgtgccaaacactgccagrgactttatatttattattagtagtagtagtattaaacagcaatcccatgaagagggtcctgttattacctccactttacagaaaaggagatgaaggcacagagaggttaagtaactttctaaaggccacccagccgagccaggtcagtctggctctgaccactactggttcattttcaagcatctcaaactgaatccataacaaactgaatcccataatagggatcctttttgttgttgttattagagacaggggtctcgatatattgcccaggctggactcaaactcctgggctcaagagatcctcccacctcagccttccaagtagctaggactagaggcgtgcgtcaccatacccggctcataatgtaggggttcttgagagcccagagcatgctagtttcttattgtggaggaagttcttccac

SEQ ID NO: 612849 - DNA, 566 bp, Homo sapiens
ctcggtgatgctagatccattgctgattttaacctcgattctcatgtggctgggggtttggggagatcttcctagaggtggagaaggggagagaaaggaaatatattaaagggctgctttgtgccaaacactgccagagactttatatttattattaktagtagtagtattaaacagcaatcccatgaagagggtcctgttattacctccactttacagaaaaggagatgaaggcacagagaggttaagtaactttctaaaggccacccagccgagccaggtcagtctggctctgaccactactggttcattttcaagcatctcaaactgaatccataacaaactgaatcccataatagggatcctttttgttgttgttattagagacaggggtctcgatatattgcccaggctggactcaaactcctgggctcaagagatcctcccacctcagccttccaagtagctaggactagaggcgtgcgtcaccatacccggctcataatgtaggggttcttgagagcccagagcatgctagtttcttattgtggaggaagttcttccac

SEQ ID NO: 612850 - DNA, 587 bp, Homo sapiens
ttttaattcatgttctaccacactctagatctcctatgggatttgcatcacagatggtaccttttcctgaagagccttaaattaacctgcctccctgktaacaccctcatttgtctcccattcctggcaagtcagccattcccccaagaagagagttgcaacacgatccaatagtttgctggaggagtgaaacttatcagccccacatccaacattggttgggagatgagtcatgtcgatttttgatatttaaaattttctcataaaaattggacttggcttttatagaacatttgaaaacaaaaagataaattaaaaaattcaaatcacgtacaatcccaggatccagagatagtcatgtgcaaggaaaatatcttgggtcccccaaatcactaagccaaagggaaaaatcaagctgggaactgctcagggcaaacctgcttcccattctattcaaagtcacccttctgctcacagatagatgtatatctgattgcatcctttggagaggctaatcagaaactcaaaggaatgcagccatttgtctcttacctacctatgacctggaagccccttccccgcttcaa

SEQ ID NO: 612851 - DNA, 587 bp, Homo sapiens
ttttaattcatgttctaccacactctagatctcctatgggatttgcatcacagatggtaccttttcctgaagagccttaaattaacctgcctccctgttaacaccctcatttgtctcccattcctggcaagtcagccattcccccaagaagagagttgcaacacgatccaatagtttgctggaggagtgaaacttatcagccccacatccaacattggttgggagatgagtcatgtcgatttttgatatttaaaattttctcataaaaattggacttggcttttatagaacatttgaaaacaaaaagataaattaaaaaattcaaatcacgtacaatcccaggatccagagatagtcatgtgcaaggaaaatatcttgggtcccccaaatcactaagccaaagggaaaaatcaagctgggaactgctcagggcaaacctgcttcccattctattcaaagtcacccttctgctcacagatagatgtatatctgrttgcatcctttggagaggctaatcagaaactcaaaggaatgcagccatttgtctcttacctacctatgacctggaagccccttccccgcttcaa

SEQ ID NO: 612852 - DNA, 596 bp, Homo sapiens
gtgacatcctctctgtggccctccctctccttacacctataccaagaccaagcgtggctctacaatgctggtctcatcttaccggcttgcagcaaaataggcaaataatgacaatgtctgacatttttcwtaaagctaaattattcagtttaaaggattattatctgagattttgttcttcttactgttttggtgttaatgtcttttttaaatgaaatgacaggatagtagggtatttttttttccttcctatgttctgatttgacaaaataagtttgaagaagagcaaggagctgagacttgcccaaacagattggaaacatattggaaagccttgataattggaacagtgttactggtgaatgtataggcagaccactggaacagaatggcaagtcccaaaactatagatatttagtgtattatagaagtggcatccaattcttcagggcaaattggactattccataaatggtattggcatagcttggtagctatctcagcagaataaagttggatccataccttgaactgtgcaccagaataaactccaatggctttcagatgtaaacacacaaccagactattgtctagta

SEQ ID NO: 612853 - DNA, 389 bp, Homo sapiens
tgtttccctttgcctctgaagaaacttgtgtctggggagctaccttttggggcaaacaacctcaggatttaaaaattcgtcccacaattcactcgtcattggttcattcatttgttcattcactcagcccacctcttcagggcttgctgacacctgcactgggaattcagaaagagctctttttgctgcctgtctggtttcgtgcacaccctggaacacagtggccttgctttgaagttttcatctgttcctccacctggggtgtttccttagtctgtcgtgtaataaaaaacaaatgtgggcccggggtgttggctcaygccaaggcaggaggatcacttgagcccaggagtttgagaccaatctggccaacatagggagaccctgtc

SEQ ID NO: 612854 - DNA, 638 bp, Homo sapiens
  misc_feature 325: n = A,T,C or G
catgtcctttgcagggacatgaatggagctggaagccattaacctcaggaagctaacacaggaacagaaaaccaaacactctgtgttctcaatcataagtggaagctgaacaatgagaacacatggacacagggaggggagcaacacacactggggcctgtcggggtgggggagtgggaagagggagagcatcaggaaaatagctaatgcatgctgggctaatacttaggtgatgggttgataggtgcagcaaaccacctggcacacgtttatctatgtacaaaccagcacatcctgcacaagtaccctagaacttaaagtaaantaaataaawttttaaaaaatgaaaaaaaaagaatcatacttcatgtgtattgcaggctattctgttcataaattggccacttgagttgggttgatacttaaaaagcaatgtttgatttaaatgtccaaaaccctgtccccctccaggtctgagacctatttttctctaagtctactgggtccaaattaacttaggtgcaatatatgtctagaatcctatgggattgtagagttcttttgaactctcttaacaatagttgaattcttataataattgctaactttaactgagcacttacattgtgcatgttggc

SEQ ID NO: 612855 - DNA, 524 bp, Homo sapiens
aacaacaatgacaacagttatttcttcttttggtacttttggyaagtattttgaatgtattttagccatttccctccaatgcttcaggtggttccctccctcacctaacctggatttgtattcgcatggaagaggttttacaaacatccttaagattcaagaaccctcactggatgcctcctgcgtcaagaaacctgctggggaactggtagaagtcaccaacagatagagtccctctcttttaagaatttgcaatgcatctgcagggagtagaggtaagagacacacacagtgaaaaccaccaaactgcagaaacagatgacaacaaaaactgaggcaaagtgtctaaagaaaggatccattccataaggaaaagcagagaacgcttccagaaataggtacgtcttgtgtctcattttcatagcggccatcttctaggtgaaatggcttgcactgaaaaagccagggaacacaactgtttcttttttttaattaaaaagaaattttatagagatggggtctca

SEQ ID NO: 612856 - DNA, 606 bp, Homo sapiens
tataataactatctccagagattgttttaaagattaaatgagatastgtatggtaagaacttagcataatcctcttatagtaaatgttcaataaatctcaggttttagcactgttgtgacataaccactgcttatagtctttgagtttgaagatgtctatttaacctctctaaaatacattgaaatgaaaaatgttaatcattcctgctctgcctactgtggcactcctactgtgattccttaccctaacacctcctttactggcttttctcctgctctgaatttctttctccactctcatcatcttgttaaattttaccttaaattaactatgtgctcccaaacctttgactcaggctctgtctgtaggagagttcagcaaagacagccctttatatgaattcactttcagagctaagtaaattaaaaccaaatttaaatggattgttatgataaagaaatttgtttgattcacacaattcaaagtcccagagaaaatatttattcctgcccttttactaaagtgccaatattacaaagatttgatttctctccaacaccttgcttagacttctaatataccggctttatcctatggttgctatt

SEQ ID NO: 612857 - DNA, 588 bp, Homo sapiens
taaaaaatataccggccaggtgcagtggctcacatctgtaattccagcactttgggaggccaaggcagtaggatcccttgagccaaggaattctagaccaacctgggcaacacagtgagaccctgtctctacaaaagataaaaacaatactagctgggtgtggcggtgcatgtckgtagtcccggctactcaggaagctgaggtagggggatggcttgagcccaggaggggaggctgcagtgagccatgatcaggccactgcattccagcctgggcaacagaatgagatcctgtctcaaacacacacacacacacacacacacacacacacacacacacacacaaaaataaaaccaaacaaaataaaaaataatagcaatatgtgatttttcacagctatgaggtttacctctcattcatctgacaattgcatgctaatattttcaatatgtgccatacataactcttgacaacatggtcattgtaaaaacaacagagaatggggaaaagctggaggagaaagaaagaggagtagaatagaagaaggacagagtaatatggaggcagaaatagatgcttccaaataac

SEQ ID NO: 612858 - DNA, 588 bp, Homo sapiens
taaaaaatataccggccaggtgcagtggctcacatctgtaattccagcactttgggaggccaaggcagtaggatcccttgagccaaggaattctagaccaacctgggcaacacagtgagaccctgtctctacaaaagataaaaacaatactagctgggtgtggcggtgcatgtcggtagtcccggctactcaggaagctgaggtagggggatggcttgagcccaggaggggaggctgcagtgagccatgatcaggccactgcattccagcctgggcaacagaatgagatcctgtctcaaacacacacacacacacacacacacacacacacacacasacacacaaaaataaaaccaaacaaaataaaaaataatagcaatatgtgatttttcacagctatgaggtttacctctcattcatctgacaattgcatgctaatattttcaatatgtgccatacataactcttgacaacatggtcattgtaaaaacaacagagaatggggaaaagctggaggagaaagaaagaggagtagaatagaagaaggacagagtaatatggaggcagaaatagatgcttccaaataac

SEQ ID NO: 612859 - DNA, 557 bp, Homo sapiens
gcaaaataaagttaattagttcacacacacacacacacacacaaacacactcacaccccaacatctgtgayggctgagaaattaaaaatagaacagaatgagagtttgggtgacatattccagcttgaatctttaagagcagtttagctgaggccctttgatgaaaaattacattgtgcttcttttgctaccatctttgttttaatttctaatccaaaccttaaatcttgacagattggtgggggtggaaagaaaaacagggcttcttgcttctagcagagtctcaatgtcctgctgagtttcctgccaaatctgcaggaatccatatagccaccactgccctattaagtgggtcgtgagacccccatagctagaaaagacttccatatgctgtccatttcagttctaccccatatctgttgcaatcatactcctggctggcatgaacctaaatcctaaactgggttttatttttcttattttaaatatttaattgacaacattgcatatatttaagatggataatgcaatggtttgatacatgtgtagactgtgta

SEQ ID NO: 612860 - DNA, 445 bp, Homo sapiens
ttgcatttcacagaatgttaatctaggtcatgtggagagaaaaaaaaatgattccatggtaactcaattttgaaatggctgtatttaaaaaaaaatttaagtagattattttaattttggacctatcaagaacattttatttgtcaataaccattgtgaaacttcaagagggacctataatattcagactttcaacttgttgtccataaaactactttgtacattttaatggtttccctytaaaaatttctttgtgcgagtatttctcaatgtgggcaattgtattttgttatatttcgtattttgtgtgggaacttatctctctctttaccttcaaaattcactcactgcaattgattagcataatagatactatatcaacactagataaatacatgattaatctatttctattaggaacttctatagagagtttagtactttg

SEQ ID NO: 612861 - DNA, 445 bp, Homo sapiens
ttgcatttcacagaatgttaatctaggtcatgtggagagaaaaaaaaatgattccatggtaactcaattttgaaatggctgtatttaaaaaaaaatttaagtagattattttaattttggacctatcaagaacattttatttgtcaataaccattgtgaaacttcaagagggacctataatattcagactttcaacttgttgtccataaaactactttgtacattttaatggtttccctttaaaaatttctttgtgcgagtatttckcaatgtgggcaattgtattttgttatatttcgtattttgtgtgggaacttatctctctctttaccttcaaaattcactcactgcaattgattagcataatagatactatatcaacactagataaatacatgattaatctatttctattaggaacttctatagagagtttagtactttg

SEQ ID NO: 612862 - DNA, 445 bp, Homo sapiens
ttgcatttcacagaatgttaatctaggtcatgtggagagaaaaaaaaatgattccatggtaactcaattttgaaatggctgtatttaaaaaaaaatttaagtagattattttaattttggacctatcaagaacattttatttgtcaataaccattgtgaaacttcaagagggacctataatattcagactttcaacttgttgtccataaaactactttgtacattttaatggtttccctttaaaaatttctttgtgcgagtatttctcaatgtgggcaattgtattttgttatatttcrtattttgtgtgggaacttatctctctctttaccttcaaaattcactcactgcaattgattagcataatagatactatatcaacactagataaatacatgattaatctatttctattaggaacttctatagagagtttagtactttg

SEQ ID NO: 612863 - DNA, 450 bp, Homo sapiens
gttactctacatgttttgcatctgacaagtgtaatccttgtagaaaggttttggctgaaatcacttacgagctagaaaggcctatggtgacaacattgaatttgggaaactcttctgtactttaaaaattattttagcagaatagtgaktagatccatacaaaatagttccaatgagagcttcataattcatgttattgactgactcccaaatctgtaaatgtctttttatgattgtctctgctgatttaccctcattttttgatgattgaggcatgtttccaaattatgtggtagtatttttgttagcactagtgttgtgattaaaacctattgtgcatcagacatttcctaaagtaccatgaaatattttacatatattatttcctttaatattttacatacattatttaatattttacatatatttttatatattacttattttaca

SEQ ID NO: 612864 - DNA, 450 bp, Homo sapiens
gttactctacatgttttgcatctgacaagtgtaatccttgtagaaaggttttggctgaaatcacttacgagctagaaaggcctatggtgacaacattgaatttgggaaactcttctgtactttaaaaattattttagcagaatagtgagtagatccatacaaaatagttccaatgagagcttcataattcatgttattgactgactcccaaatctgtaaatgtctttttatgattgtctctgctgatttaccctcattttttgatgwttgaggcatgtttccaaattatgtggtagtatttttgttagcactagtgttgtgattaaaacctattgtgcatcagacatttcctaaagtaccatgaaatattttacatatattatttcctttaatattttacatacattatttaatattttacatatatttttatatattacttattttaca

SEQ ID NO: 612865 - DNA, 450 bp, Homo sapiens
gttactctacatgttttgcatctgacaagtgtaatccttgtagaaaggttttggctgaaatcacttacgagctagaaaggcctatggtgacaacattgaatttgggaaactcttctgtactttaaaaattattttagcagaatagtgagtagatccatacaaaatagttccaatgagagcttcataattcatgttattgactgactcccaaatctgtaaatgtctttttatgattgtctctgctgatttaccctcattttttgatgattgaggcatgtttccaaattatgtggtagtattwttgttagcactagtgttgtgattaaaacctattgtgcatcagacatttcctaaagtaccatgaaatattttacatatattatttcctttaatattttacatacattatttaatattttacatatatttttatatattacttattttaca

SEQ ID NO: 612866 - DNA, 450 bp, Homo sapiens
gttactctacatgttttgcatctgacaagtgtaatccttgtagaaaggttttggctgaaatcacttacgagctagaaaggcctatggtgacaacattgaatttgggaaactcttctgtactttaaaaattattttagcagaatagtgagtagatccatacaaaatagttccaatgagagcttcataattcatgttattgactgactcccaaatctgtaaatgtctttttatgattgtctctgctgatttaccctcattttttgatgattgaggcatgtttccaaattatgtggtagtatttttgttagcactagtgttgtgattaaaacctattgtgcatcagacatttcctaaagtaccakgaaatattttacatatattatttcctttaatattttacatacattatttaatattttacatatatttttatatattacttattttaca

SEQ ID NO: 612867 - DNA, 629 bp, Homo sapiens
gatcatatgttttttgttcttcatttttagatgtgatgtatcacgtttattcatttgcagatgttggaccatccttgcattcctgagttaaatctcacccgattatggtgtattagctttttgatatactgctggatttggtttgctagtattttgttgacgattttttgcagctacgttcatcaggcataatggtctgttttgtgtatttgttgttgtatccttttctgattttggcataaaggtaatgctgccttgtaaaattaattagaaagaattccctcctcttaawttttttggaatagtttgcaaagaattgatgttagttcttctttaaaagtttgctagaattcaaaagtgaggccattctgttgtggacttctctttgttgggatacttcttattaatgattcaatcttgttacttgttattggactgttcaggtattctatttcttcctagttcaattttgctagcttatatgtgaccagatgtttattcattttctccaggttttcaaatttgttggcatatagttattcaagtagcctttaattatcctttgtatttctgtggtatcagttgtaatgtctcctttttcatttctgattttatttatttggatcttc

SEQ ID NO: 612868 - DNA, 570 bp, Homo sapiens
tgggacagctgagaatggtgcaccattttgctgcaactgtttgagtgccttccagaatgtaaagttaacacagaggaaaaaagagctgagagaagattagaggtagtgttctggtagtggtgtttcagtccttaaagatgaactcctggactttgtagtgacatgagccaataaattctctatctggattcaatttgaaataggtgttcttcatcagcacagacactttctgtgtgagcctatatttctcatttcctaaatattctgccttttcttctctactcactcaagagctacctgtccttgaaggcctcattcaagttccagcttattgatgataccttattcaactacccaggccttgatcactcactccctgtaatacccatagacaattagttcatttgcgttaaacagtcatgtagctttttgagtagctttctgatctttccagtatctttcaagttcttcaatgggtgtttatttgggggagacattgawattgaataatcagtataggtttctttttaaacttggtttcagtaatcatgctgggagacagagataggt

SEQ ID NO: 612869 - DNA, 400 bp, Homo sapiens
tggccaccaaggtatcaatgctcagaggccgtggagaacaaaagcatcagaatgttttcagcaacaccattttctttgtgcattggtcccttgcctttgttcagtcttaaggcaattgagataaaggaagaactggatttttaaaatatcctgttgccctgcctttcctaaagcatccactgatcagaaatatagtcactgaggccgaggttacatagtagacaagaaaggcagattgttaataatctactagattcagactaggtgtgccatgaaacacaaatatrgggacgagagtggatctggaagtactggattttccttttaccatctatacaacacagattcattaattcatcctttgtcttattttcacatttcagtccttaccacctctacc

SEQ ID NO: 612870 - DNA, 426 bp, Homo sapiens
tgaagcccaggggtgagacagcataacatgctggggaattgaaagaagttcaaaatagctgaaaggtagagtggggtagagatggagctgagaaggtggggagtagaggaagaaaacaggggccagatcctactggacttgaaagcctggtgagttaggactttcttcaaggtcaatgaaggactgctgtaggattttaagcaggagaggaaactgataagatttgcctttttaaaacatcactcttgctaccttgaggacagtggatcagaagagamtggaaatccagttgcaagctgcaattcagataagagatgatggtatgaacaaggagcatgtcagggaggacaagatatgtggacagattcaagatctttaaatgtcagtctatccccaaagatgtcacataataattgcattcccatc

SEQ ID NO: 612871 - DNA, 629 bp, Homo sapiens
gttagtaccctgaaggtaggaatttcagggctggcatttacttgggagcagggtaaccgattgtcctagtttgcctggactgtcagtgctaaacctgggactrtcctgagaaaacaaagacaggtggtcaccctagcaggcagtactcccagcacaaagagggtctgttctagccatgtttccccctcagtcagcacacagcattttcaggcaatgtgtgctaattccagaggacacctttagcaaatgctttcagaaaaatgaagagatcctaagagcctaatcttttgatgagaaatgcaagaatccttctacagcactgccccatgaaggcactggtgccagactgattagagaaacagtgaatctgctcctcagagtgtgtcctgcaccaataactctaaaaccatctttccccaggcagtcagagatcggaccttccacctggctgaactggagccctgtgaaacagtgtgaccactgggagggttgtgaggtgaataggaaggagaaaaataagagacttgtttgtgatgttttcccccagtgattttgaattattagagattgatgtctgatgattgagttgactccaccaaagaaagactgatgctgacattttcagataa

SEQ ID NO: 612872 - DNA, 482 bp, Homo sapiens
ccacatatccttggcaggagcaccctccagtaaacaaagacaagtaggagtggggctgttcataccttgtttctctcccaractcaccagttcaataacactccacctccccaggagtcaagcaagggctatggtaagcagttaggagtgttttggctaatgggtgttccccaacatggaaagaaacatcaggaataagaaataaattccctcctaatgacagagatagagacagagctatatgaaaaagaaagcccctgggtcaatgttattcttcgttgttattatgggtgatttttgttttcttccgtgtgtgtgtgtgtgtgtgtgtgtgtgtgtgtaattttccatatttcctgtaagtaggtagtatatttgaaatcaagttggaaaagaaaagtaattacttgggatcatatataagagaagacaaagacagaaccccccaccactgggcatcctagcccctgcctagaagatac

SEQ ID NO: 612873 - DNA, 492 bp, Homo sapiens
ggtctttttttaaaaaaaaattatgtccataggttttgggggaacaggtggtatttggttacatgaataagttccttagtggtgatttgtgagattttggtacacccatcacttaagcagtacacactgaacccagtttgaatttcagtgttatgtagttttcattgtagagatctttaacctgttcagagaaattkattccttggtattttttttttttggagttattgtaaatgggattactttcttaatttctttttcagctagttcattattggtattagaagcattaccaatttttgtaagttgattttgtatcttgcaactttactgaatttgttagttttaaaaggttttttggtggagtctttagaatttttttaatatgtaagattatgtcatctgcaaagagagacaatttgacttcttcttttccaatttgaatgctcttcattttttttttcttttgcatgattgatctggctagaactt

SEQ ID NO: 612874 - DNA, 471 bp, Homo sapiens
ccatttttttaaccctcattgttcttgaactacaatgtccaagttctcaaacatccayctgaattcatatagctgaggggaaggcctatttaatcgcgaaatatcgaaattccagactgatttcacagaaacgcaatcagacaatgttcaagttcattacaaattgcaaaccaatacaaattggtgctaataagtgaaataaaaagttaatgaagaaattatgattcatgagattcctgcattatcaaatgaagtactatcagctttccagtcctactcactaggggtttatcaagagcgtctttaacttcattagcccttagtgaatacattcaacaacatttattttgtacccattacatgtgaggccttagtcataggcagaggagcgaaggcacagcctgcccatgtgagtgacaaaatatacacctgggttctggagcctgtgctgggtgtctgggtgatggggca

SEQ ID NO: 612875 - DNA, 594 bp, Homo sapiens
tttcattttcaacacaactaggcaacagcattatcctagttttacaaaagtggaaacggaggccctgggaggtaaagtgccttccttaagcaggagagctgacaactacagcaagttctcctgattccagggtctgtggcctccttccacccracagtaggcaagaaaccaagtgatcaagaagaaggcttatgagccgggccgcagacgaagaggtggcaagtgcaggcagtttactgcagcgtcggagagtgacgagttggtgcgtaatgatttgccatgtggacagacaggctaaaacaaggatattctttgtatctgagcatcctttgtgtataaaacataaacaaggcaggtacagacttgtttcttgggaaatcccgtcctgtccctgtgggcttccttcatcttctcatcttatcctcacaatgttcactccttggagtcttcccgtccaccagcgcctgcctcattcaatccttgagctaatgggagcccagaaggatcctgacagtgccatgggacaagaaggaaaagagagaagggcaaagccacagcactccagaggaccctctccctctccctgtgtgaggc

SEQ ID NO: 612876 - DNA, 537 bp, Homo sapiens
cccagtccctctcaggaaagaataatagggaagagggttaaaaacaatgctgacatattcacaacttcatatgcaaattcccagagtataagtaataaaccaagygaacttgaaattctaagaatagaaaataaattggcctcatgggtccaaatgagggttaggagctcatggaactaaaaagtccagaggtagagctagttttaagcatgggtagtgtattagtccattcacccactattataaagaaatactcgacactgggtaatttatcaagaaaagaagtttcattggctcctggttctgcaggctgtgcaggaagcatggaagtatctgttgtgggaagtcagggaccccaaatggagggaccagctgaagccacagcagaagaacataaattgtgaagatttcatggacatttatcacttccccaatcaatactcttataatttcctatgcctgtctttactttaatctcttaatcccatcatcttcataatctgaggatgtatgtagcctcaggatcctgtgatgatt

SEQ ID NO: 612877 - DNA, 537 bp, Homo sapiens
cccagtccctctcaggaaagaataatagggaagagggttaaaaacaatgctgacatattcacaacttcatatgcaaattcccagagtataagtaataaaccaagtgaacttgaaattctaagaatagaaaataaattggcctcatgggtccaaatgagggttaggagctcatggaactaaaaagtccagaggtagagctagttttaagcatgggtagtgtattagtccattcacccactattataaagaaatactcgacactgggtaatttatcaagaaaagaagyttcattggctcctggttctgcaggctgtgcaggaagcatggaagtatctgttgtgggaagtcagggaccccaaatggagggaccagctgaagccacagcagaagaacataaattgtgaagatttcatggacatttatcacttccccaatcaatactcttataatttcctatgcctgtctttactttaatctcttaatcccatcatcttcataatctgaggatgtatgtagcctcaggatcctgtgatgatt

SEQ ID NO: 612878 - DNA, 475 bp, Homo sapiens
  misc_feature 196: n = A,T,C or G
acatttaaaaataaaactgctcatgttttttttgtttgtttcaaacagcaagtagaaaaattgtcatacagaatgttacctgtaaactttatctttgttcatgttttagatttttttccttgatttgaatgacttyttttttcttttcaggtacttatatgtgaattattttcaaactgtactttttaagcaatangatgcggaaaaaataggaatactgacttattatgtcctcaaagtctcctctcaacaaataccaggagatttccagttttctcttacatagtttggttggaattagctctgttttgattaatactcatgaacaatgtgtttgttctgccctcttttttaaatatgggagggagttgatgttggtaattatttattatttctctcaactttgctataaaacaggaggaatttcattcaacttccgatcacatttgaattagataccagaagactaataata

SEQ ID NO: 612879 - DNA, 475 bp, Homo sapiens
  misc_feature 196: n = A,T,C or G
acatttaaaaataaaactgctcatgttttttttgtttgtttcaaacagcaagtagaaaaattgtcatacagaatgttacctgtaaactttatctttgttcatgttttagatttttttccttgatttgaatgacttcttttttcttttcaggtacttatatgtgaattattttcaaaytgtactttttaagcaatangatgcggaaaaaataggaatactgacttattatgtcctcaaagtctcctctcaacaaataccaggagatttccagttttctcttacatagtttggttggaattagctctgttttgattaatactcatgaacaatgtgtttgttctgccctcttttttaaatatgggagggagttgatgttggtaattatttattatttctctcaactttgctataaaacaggaggaatttcattcaacttccgatcacatttgaattagataccagaagactaataata

SEQ ID NO: 612880 - DNA, 628 bp, Homo sapiens
gagtttaaataaatattagtgttagaatctaggtggtagatcaatgatgttcattgtaaaagacctttaaattcactgccccctttttttttttttttttttgagacagggtcttgctctgtcacataggctggagtgcagtggcacaatcatgactcactgcagcctcaatttcccaggcttaagctagtctcccaccttagtttcctgaatagttgggactaaacrtatggccgaccatgcccagctatttttttttttttttgtagagacgggggtctcactatttttcccaggctggtcttgaactcctggactcaagcaatcctcctgccttggcctcccaaattgctgagattacaggcatgagtcaccatactggctttcactgcacatttgaaattttcataataaaatgttgaaaaatttctacaggatgatttctaataaataatataatgcaattgaataccaattaaaaattgcattgacatgaatggtatcaacaaaaaatttaaaataaacacacaagtgaaaaaaatgaaaataatgcataacttcattgtcgatcacatttataaattaaaattaaattgatatttattctattatgtcttgaaagaagaaa

SEQ ID NO: 612881 - DNA, 628 bp, Homo sapiens
gagtttaaataaatattagtgttagaatctaggtggtagatcaatgatgttcattgtaaaagacctttaaattcactgccccctttttttttttttttttttgagacagggtcttgctctgtcacataggctggagtgcagtggcacaatcatgactcactgcagcctcaatttcccaggcttaagctagtctcccaccttagtttcctgaatagttgggactaaacatatggccgaccatgcccagytatttttttttttttttgtagagacgggggtctcactatttttcccaggctggtcttgaactcctggactcaagcaatcctcctgccttggcctcccaaattgctgagattacaggcatgagtcaccatactggctttcactgcacatttgaaattttcataataaaatgttgaaaaatttctacaggatgatttctaataaataatataatgcaattgaataccaattaaaaattgcattgacatgaatggtatcaacaaaaaatttaaaataaacacacaagtgaaaaaaatgaaaataatgcataacttcattgtcgatcacatttataaattaaaattaaattgatatttattctattatgtcttgaaagaagaaa

SEQ ID NO: 612882 - DNA, 570 bp, Homo sapiens
caactttttataaattttctgatttagagatttcaaaattacttctgctattaatcaaattttccttagacatgttttccattattattgtaatattatyattattaaaataatagtagtagctacattcttttacacattattcaattatggtaagtaatttgcatattttttcttatttaagatctatacaacagttttatgggatggtggtgttaaaattatttttccttggaataataagaataaatatttgggatacctggtttggattactgcattggagaaaaacgtacttcaaagcagactatcattgttaagattgttgcatttcttgagttaatcaagagtaagaccacatttttaatgaatatctcttactatataggaataatctttcttttttttttttttctggttttgaaacagtatctctctgtcacccaggcaggagtacagtggggcagctacagctcattgcagcttcaacctctcgggtccggtggtcctcccaacatcaccctcccaagtagctggaactataagcatgcacaacaccacccgactaat

SEQ ID NO: 612883 - DNA, 570 bp, Homo sapiens
caactttttataaattttctgatttagagatttcaaaattacttctgctattaatcaaattttccttagacatgttttccattattattgtaatattatcattattaaaataatagtagtagctacattcttttacacattattcaattatggtaagtaatttgcatattttttcttatttaagatctatacaacagttttatgggatggtggtgttaaaattatttttccttggaataataagaataaatatttgggatacctggtttggattactgcattggagaaaaacgtacttcaaagcagactatcattgttaagattgttgcatttcttgagttaatcaagagtaagaccacatttttaatgaatatctcttactatataggaataatctttcttttttttttttttctggttttgaaacagtatctctctgtcacccaggcaggagtrcagtggggcagctacagctcattgcagcttcaacctctcgggtccggtggtcctcccaacatcaccctcccaagtagctggaactataagcatgcacaacaccacccgactaat

SEQ ID NO: 612884 - DNA, 542 bp, Homo sapiens
tttttatatgtttatttaccatctgtatattttgggggttgaattgtctattcagatcttatgcacgtttaattagttctttgttttattattattgagttttaagaatccttttacatttggataaaaatcctttatcagatatgtgttttgccaatatttctccaagtagttatttttgttctcttaacagtgtcacttcagagcagattttacttttaaaaaagtccaaatttccattttctgtcatgaattatgctttcggtgttgtatcaaaaaatgtattgccaagcccagggtcatctacattttatcctatgttttctcctagaaattttgaagttaagtgttttacatttaggtatgtaattaatttgatcmaatttttgtgaaaagtgtaagctgtaaattcaatgcctagtccattttatttgcatatgaatatcaaattcttccaaaaccaattaataagaagactatacttttggctttgaattacatttgattatttatcacagattagttgactacatttgtgtggg

SEQ ID NO: 612885 - DNA, 379 bp, Homo sapiens
ttttgagaaggtcctttggtccgaaatatcttagaatatttcttttctcttaaaagatgccatcactcttcttatctctcatcaccaagcataattcacagcacttgataagtctctttagatttgtagctagcaaacatttggaaacactgctccaacctgtcttttttagtttattcaaaaggctgcttggctcacgcctgtaatccctgcgctttgggaggccgaggggggtggatcaygaggtcaggagattgagaccatcttggctaacacggtgaaaccccgtctctactaaaaaatacaaaaaattacctgggcgtggtgtcgggcgcctgtagtcccagctactcagaaggctgaggcaggggaatggcgt

SEQ ID NO: 612886 - DNA, 379 bp, Homo sapiens
ttttgagaaggtcctttggtccgaaatatcttagaatatttcttttctcttaaaagatgccatcactcttcttatctctcatcaccaagcataattcacagcacttgataagtctctttagatttgtagctagcaaacatttggaaacactgctccaacctgtcttttttagtttattcaaaaggctgcttggctcacgcctgtaatccctgcgctttgggaggccgaggggggtggatcacgaggtcaggagattgagaccatcttggctaacacggtgaaaccccgtctctactaaaaaatacaaaaaattacctgggcktggtgtcgggcgcctgtagtcccagctactcagaaggctgaggcaggggaatggcgt

SEQ ID NO: 612887 - DNA, 560 bp, Homo sapiens
ttctcatcacttaaaaatttccatgtctgttactggaccatagtaaaaactaagtgtcagtccatgggacagaatgactttcaatgaggtgcatgtccttaggtacataaaggttagtcaatctcagcaacaacctcttgtggcctaggagtagtatattctggttaaccccaagtaactctagaaagcattataaattacagacacctatatcacctccctaactcacactatattcacaaaaggagtttccttatgactaattaatggtagagaaatatactggggtatgactcacgtatgggttggtttatggtagcactattsaaaactgcacatcttcttcattataggcccacacaggacagcccagtaacatgatggagaacagaaatcctttcagaggatagatctctgagccctaaattgatcacacctttcaacagaacagatgacataccttttaaaagtcatccagtttctcttcaggtcaccccagtgttagcacagaaaagtcataaatgtcatggtggcacaaaaggttatgcacaggcccaata

SEQ ID NO: 612888 - DNA, 560 bp, Homo sapiens
ttctcatcacttaaaaatttccatgtctgttactggaccatagtaaaaactaagtgtcagtccatgggacagaatgactttcaatgaggtgcatgtccttaggtacataaaggttagtcaatctcagcaacaacctcttgtggcctaggagtagtatattctggttaaccccaagtaactctagaaagcattataaattacagacacctatatcacctccctaactcacactatattcacaaaaggagtttccttatgactaattaatggtagagaaatatactggggtatgactcacgtatgggttggtttatggtagcactattgaaaactgcacatcttcttcattataggcccacacaggacagcccagtarcatgatggagaacagaaatcctttcagaggatagatctctgagccctaaattgatcacacctttcaacagaacagatgacataccttttaaaagtcatccagtttctcttcaggtcaccccagtgttagcacagaaaagtcataaatgtcatggtggcacaaaaggttatgcacaggcccaata

SEQ ID NO: 612889 - DNA, 560 bp, Homo sapiens
ttctcatcacttaaaaatttccatgtctgttactggaccatagtaaaaactaagtgtcagtccatgggacagaatgactttcaatgaggtgcatgtccttaggtacataaaggttagtcaatctcagcaacaacctcttgtggcctaggagtagtatattctggttaaccccaagtaactctagaaagcattataaattacagacacctatatcacctccctaactcacactatattcacaaaaggagtttccttatgactaattaatggtagagaaatatactggggtatgactcacgtatgggttggtttatggtagcactattgaaaactgcacatcttcttcattataggcccacacaggacagcccagtaacatgatggagaacagaaatcctttcagaggatagatctctgagcmctaaattgatcacacctttcaacagaacagatgacataccttttaaaagtcatccagtttctcttcaggtcaccccagtgttagcacagaaaagtcataaatgtcatggtggcacaaaaggttatgcacaggcccaata

SEQ ID NO: 612890 - DNA, 642 bp, Homo sapiens
aatatagggcaagtggttgagaaggagtagcagagattttttttttttttcaggtagacagggaataaagtgtcttgaaaaacaaatagaggaaatgtttacaaaatctaggtgacacctttatcaaatggtactggggagactaataagttgaatgaatattaacaattatgtttcacaacatggaggtaattactggagttatcaagggctgtttctttagagtagttcaagaaaaagccagcctgatgtggtttgcagagccttcaaacttctggttttaatgctatagtgcactagctatttggataatatctaaaaatgctagaaaaatgtgatagtaatattttttacatgcttgtctgagatggtgtaaaacagaagaaagtagtgaaggccagaaatcaaacaaaaattagataagacctyaacaaagaaaaggataataaacccttataaaagacataaagcatgcacaaccctttggggagatataatatgcttgtgggcagaaagactcaatattgtcaggttgttaaacgtctctaaattaacctataaatttcaatccaaggcacccaaaataaaaatcacaattggacttttttcatagaaactgagaatattattcttaaactcata

SEQ ID NO: 612891 - DNA, 649 bp, Homo sapiens
taaagaaagatacttatgtaaggaaatgaaatatattttcattatttgtgattatttaaattttagtttgctaaattgaaggtaaattccataaacctgtattcactgaatcaattagrttatcaattatggcaacttctttttctaattattatttttataggacattaaaaaattgcaacttgtcaaagcttttaataactgaattaagtcatttcataataactgtagacttctgtagacccagcacagtagtacctcttgaaaagtaaatgtacacttttatttttaagttgtactgcaaaggaactatccaatggaagtttccacagcgattcaatctgttcctttatcccaatccatttccaagaaattctgtatctgtctgattcccggcacttatctccacctcttctctatgattgtatcctttccaatttgaacccgatgatctaaattcatgcttctccttatgaactcacttcaatattctgcaactgttctacactataagatttgctgagtattaaacccaccctatgaagccctgcttcagcattctctggatacaaatacacagacaattcaactcaaacttgctcaaagactaactcagttttatgcctgaggaaggaggtgtgctcctgat

SEQ ID NO: 612892 - DNA, 649 bp, Homo sapiens
taaagaaagatacttatgtaaggaaatgaaatatattttcattatttgtgattatttaaattttagtttgctaaattgaaggtaaattccataaacctgtattcactgaatcaattaggttatcaattatggcaacttctttttctaattattatttttataggacattaaaaaattgcaacttgtcaaagcttttaataactgaattaagtcatttcataataactgtagacttctgtagacccagcacagtagtacctcttgaaaagtaaatgtacacttttatttttaagttgtactgcaaaggaactatccaatggaagtttccacagcgattcaatctgttcctttatcccaatccatttccaagaaattctgtatctgtctgattcccggcacttatctccacctcttctctatgattgtatcctttccaatttgaacccgatgatctaaattcatgcttctccttatgaactcacttcaatwttctgcaactgttctacactataagatttgctgagtattaaacccaccctatgaagccctgcttcagcattctctggatacaaatacacagacaattcaactcaaacttgctcaaagactaactcagttttatgcctgaggaaggaggtgtgctcctgat

SEQ ID NO: 612893 - DNA, 649 bp, Homo sapiens
taaagaaagatacttatgtaaggaaatgaaatatattttcattatttgtgattatttaaattttagtttgctaaattgaaggtaaattccataaacctgtattcactgaatcaattaggttatcaattatggcaacttctttttctaattattatttttataggacattaaaaaattgcaacttgtcaaagcttttaataactgaattaagtcatttcataataactgtagacttctgtagacccagcacagtagtacctcttgaaaagtaaatgtacacttttatttttaagttgtactgcaaaggaactatccaatggaagtttccacagcgattcaatctgttcctttatcccaatccatttccaagaaattctgtatctgtctgattcccggcacttatctccacctcttctctatgattgtatcctttccaatttgaacccgatgatctaaattcatgcttctccttatgaactcacttcaatattctgcaactgttctacastataagatttgctgagtattaaacccaccctatgaagccctgcttcagcattctctggatacaaatacacagacaattcaactcaaacttgctcaaagactaactcagttttatgcctgaggaaggaggtgtgctcctgat

SEQ ID NO: 612894 - DNA, 649 bp, Homo sapiens
taaagaaagatacttatgtaaggaaatgaaatatattttcattatttgtgattatttaaattttagtttgctaaattgaaggtaaattccataaacctgtattcactgaatcaattaggttatcaattatggcaacttctttttctaattattatttttataggacattaaaaaattgcaacttgtcaaagcttttaataactgaattaagtcatttcataataactgtagacttctgtagacccagcacagtagtacctcttgaaaagtaaatgtacacttttatttttaagttgtactgcaaaggaactatccaatggaagtttccacagcgattcaatctgttcctttatcccaatccatttccaagaaattctgtatctgtctgattcccggcacttatctccacctcttctctatgattgtatcctttccaatttgaacccgatgatctaaattcatgcttctccttatgaactcacttcaatattctgcaactgttctacactataagatttgctgagtattaaacccacyctatgaagccctgcttcagcattctctggatacaaatacacagacaattcaactcaaacttgctcaaagactaactcagttttatgcctgaggaaggaggtgtgctcctgat

SEQ ID NO: 612895 - DNA, 568 bp, Homo sapiens
acaattatgcattcatatgttgttttcaatttcttcttggtcataaaaatattgattttgtactgtaactttacacaaggaaaaaaaaaaagaaacaattcaaattgtrcctggtgtaattatattccaaagactgtttcaaagcaaatttcagagcacaaacccaagatgatcatcaggctatagaatgtgatagttacagtcactatcaatcaaaagtaataaaagtgatttctgaccaaataataaaatttatgttttcattatctttatggtacacttaaaacgaccatgaaataaactaattcattctactttgtgaaataaactgaatttacttcacaccattactagcaattctactttaatagatttataaattaccaaataacattcctgaaggtgtagtaagaaataaatttaccacctagagttttatttcttctcttatcttttacaatgcatatgactgcttaaatgatctatttagccctttactttattttttcactatatattagttcatattacttagcaatatacttttattattatacatttattcaag

SEQ ID NO: 612896 - DNA, 568 bp, Homo sapiens
acaattatgcattcatatgttgttttcaatttcttcttggtcataaaaatattgattttgtactgtaactttacacaaggaaaaaaaaaaagaaacaattcaaattgtacctggtgtaattatattccaaagactgtttcaaagcaaatttcagagcacaaacccaagatgatcatcaggctatagaatgtgatagttacagtcactatcaatcaaaagtaataaaagtgatttctgaccaaataataaaatttatgttttcattatctttatggtacacytaaaacgaccatgaaataaactaattcattctactttgtgaaataaactgaatttacttcacaccattactagcaattctactttaatagatttataaattaccaaataacattcctgaaggtgtagtaagaaataaatttaccacctagagttttatttcttctcttatcttttacaatgcatatgactgcttaaatgatctatttagccctttactttattttttcactatatattagttcatattacttagcaatatacttttattattatacatttattcaag

SEQ ID NO: 612897 - DNA, 598 bp, Homo sapiens
ggtttgtgtgtgtgtgtgtgtgtgtgtatgtgtgactaagagagaattttgaaggactaacatgtgtcagatcctcttttagtgatattacatgagatgtctcattttaattaaagtccatgtaagagagatatcattcctattttacagacagagaaagaatcttgaggaagattgagtaacttgtccagtatgtgcttctctaaagaaaacattatcttaattgatgaaatctttacaataccatattataataatgtaggtattttcagaaaaaaatattagcaatattagttccaygggcattataaattttaatatcctcaaaattttcttgtaatatgtctttagttttttcaggtgtaccttgacttaattttgcaacaattcacttaaggttgctggtacttttatcttgtccaatgttactgtcttttcatatgaattctatataacttaatgaatatgaaccttaaagtgttttaaaattgtctctaatatcacatgtacttaattcttaggataatttggataataaaagtagaaaacaaataccattatttgtatcataacagtatatggtaataatatatgtcat

SEQ ID NO: 612898 - DNA, 458 bp, Homo sapiens
aaacacattttgtccagttacttttgctctgactggattaagttttcttcaaatatggcagtgacctaatggccaactcaactttgactaatgagaaacttttgacgattattcgtttgcctgtatacatgtgtttttttgttcctttcttagggaacttaagcatacttgaaaatagcaagtacttaaaaaacataagccagttacaagaatcaagaagatacaacatatattagatttagaaacttgaatatgaggcagctttayagacattgaaatacaaggatttccaaagtataattttagtgaagaaaagggggaatataaacagtatgctgatatttgtacagaaaatacatatatttacaatatatttctggaaatatatatcagagacggcaaaggtctttgtgtattagccagctcggctgccaaaagaaaatatcatagactgggtg

SEQ ID NO: 612899 - DNA, 575 bp, Homo sapiens
ggaataccggtataaattatctatttcaaccttttcatttaccagaggagaaacctgaggctgagagatttgaagcttsttttgttcagagttttctaaatcctagtttgatctcttttgctaaatcacacactcttggacaacagggactcattttattctcacatccctcacagcagctaacgtgaaaatgttgttctttattagagacagctcctatctcagggatgcactacaattactttccatgactggccctagtttaggaaagaattccaggccaaagacctatctagaacccaaggatttaggtggaaaccaccaggtatttgattccaagctaatctttaacctgaagtgtcttaatcatacttaataaatccttagatgcagtggaaagaacctcgctggcatttcgatgccacactcaatacaggggcatttgaaaggatagaagagctttatttcataggatttcactcgattgaacttgtcaagaaaattcagaagatgttagcttaatctacaagtaataaatccatagtggaccgttgatgcaatgaaggtcgtccatg

SEQ ID NO: 612900 - DNA, 477 bp, Homo sapiens
actgttcaccctgcggtcatctccctcactgttcacctagagcggtcatctccctyactgttcacctagagcggtcatctccctcactgttcacctagagtggtcatctccctcactgttcacctagaggagaggtcatctccctcactgttcacctaggatggttgccgtggggaggaggcgggtggtgaatcccaggccttttcagcggccctccaggcctgcaggttcaagcaggctccagtggcctgagggcaggcctttgagaaagaggctgactgttagaagcagaagcccttgaaggagcacacagaaggggtctgggctaagcggcagcgtggcgacctacacccgcccctcctccgtaccttgcaggaggcagcgggtgctgaggaaatgggaaaagagccgcaagattaaccagatacccgtggtattttcaagcaacaccatctgctgtatttccacagaaagggt

SEQ ID NO: 612901 - DNA, 564 bp, Homo sapiens
ggtgaaaccctgtctctactaaaaatacagaagttagccagacatggtggtgtttgcctgtagtcccagctactcaggaggctgaggcaggagaatcgcttgaacccaggaggtaaagattgcagtgagcagagattgtgctactgtactccagcctggctgacagagcaaggctctgtcacaaacaaacaaacaaacaaacaaamaaaaaacaaagaactgctggatacaggtcatcttggctgcagaaaggaacctgcctccttactatatatctgtgctaatatttatattttaattcatgcacttactaatttttcaaatattttatattaaaatcagaatttatgtgcttgcttctgcagcacatatactaaaactggaacgatacagagaagattagcatggcccctgcacaaggatgacacacaaattcatgacgtgttccatatttaaacaaaaaaaaaaagaaaaaaaaatcagaatttatgaaaactaccagtctgttgggttatgagctcaaatttgtagcataaatacataagcatattttgaaagaataag

SEQ ID NO: 612902 - DNA, 667 bp, Homo sapiens
tagaatagtgattgccagagactgggagttttagggagtaggggagatgacagtcaaagggtacaaggtctcagttagacaggaggaataaggtttctttagatctattctacagtatagtgaatatagttaataatagtgtattatatatttctaagttgctaaaagagtaaatttcaaatgttctcatcacagaaaggatacgtattkgaggtaatggatatgtgaattagcttgacttaattactccacatggaatgtataaatcataacatcactgtgttccccatgaatatatacaattatagtttgtcaacttgtaataaaattcttaaaagaaattcaaaaattcttcaggcataaataatatatcagaaagaaaatttgatatacaaaagaaaccaaaatacaggaaataaatagataaatataaatttaaattaatcagaatgaaaatttgatctacaaaagaaatcaaaatacaggaaataaatagataaatataaatttaaattaatcagaatgaaaatttgatctacaaaagaaatcaaaatacaggaaataaatagataaatataaattaaattaatattttcttatttttaattgctttgtagcaaaaataatagcaatatattatatgtttatagcatataaaaatagtaaa

SEQ ID NO: 612903 - DNA, 468 bp, Homo sapiens
aataataaaatataaataatataatatactttcctcytgagttttctaaattacttttgatggttgaagaaaatttataacatcatctgatgtgattttcaacatatatagaggaattacttaagacaattatgttaaaaagaggaagggcaaagacacctaaatgaaggtactcttcactttaactactaaaatgttgacaccagtagatgcacacaaaagcactatacctaaatcaaattgaaattctaaaatatgttgaagtaacccacaagaaagaaaatgaaaacagataaatgaaaaaagggagaacaaacaaaataaataattaaatgtcaggcttagacataaatatgtcaaaaactacattaaatataaaaggtctaaatataccagctaaaatacaagaattggcaaaatggataagaatgacacaattctatgctctggtatggtttgaatgtttct

SEQ ID NO: 612904 - DNA, 468 bp, Homo sapiens
aataataaaatataaataatataatatactttcctcctgagttttctaaattacttttgatggttgaagaaaatttataacatcatctgatgtgattttcaacatatatagaggaattacttaagacaattatgttaaaaagaggaagggcaaagacacctaaatgaaggtactcttcactttaactactaaaatgttgacaccagtagatgcacwcaaaagcactatacctaaatcaaattgaaattctaaaatatgttgaagtaacccacaagaaagaaaatgaaaacagataaatgaaaaaagggagaacaaacaaaataaataattaaatgtcaggcttagacataaatatgtcaaaaactacattaaatataaaaggtctaaatataccagctaaaatacaagaattggcaaaatggataagaatgacacaattctatgctctggtatggtttgaatgtttct

SEQ ID NO: 612905 - DNA, 390 bp, Homo sapiens
gcacatctcacatggcagcagacaagagaagagaacttgtgcagggaaactcccatttttaaaaccttcagatctcatgagacttatttattatcacgagaacagcacaggaaagacccgccctcatgacycaattatctcccactgggtccctcccataacacgtgggaattctgggagctacaagatgagatttgggtgaggatacagagccaaaccatatcagtatcctaatgaatcttctctataagtcaagaggaacacatagaggctaaagctttgatagtcactcatgttagccaagagaggaggatgtctggtatttgggtcatttggttttgcctgtgcttagacaaaattttgaagttgtcttgtctcacttgttttttc

SEQ ID NO: 612906 - DNA, 390 bp, Homo sapiens
gcacatctcacatggcagcagacaagagaagagaacttgtgcagggaaactcccatttttaaaaccttcagatctcatgagacttatttattatcacgagaacagcacaggaaagacccgccctcatgactcaattatctcccactgggtccctcccataacacgtgggaattctgggagctacaagatgagatttgggtgaggatacagagccaaaccatatcagtatcctaatgaatcttctcyataagtcaagaggaacacatagaggctaaagctttgatagtcactcatgttagccaagagaggaggatgtctggtatttgggtcatttggttttgcctgtgcttagacaaaattttgaagttgtcttgtctcacttgttttttc

SEQ ID NO: 612907 - DNA, 418 bp, Homo sapiens
aagatttattgttcaatatgtrtaattagaatgatttttgtcacaattaatcaagaggcagaacaagtgacaagtccatcagagtgcaacaaaagcatcaatttgggttacaagacaatccatagttgatcatggcttctattaagtcttagagctacaaaggttctaactttgccatctgctacttcatcaaatggtttataggaaagcttctaacctagagaaaaaccaatgcagctgtgggctgcttgcttctatctttttaaattaagacttttcaaaaaagtgtatggcccaattcaagctgcaagaaaaaggtaaatgattttatgtagtatagtgcccacaaaccctggaatttataattgtaaaagctcaaccacaatgtatttagaattgacggcatagtaggcactgt

SEQ ID NO: 612908 - DNA, 597 bp, Homo sapiens
gtccctagatgataacacagactaatgcccctaaacagacaacttcaaggtttytttaagtggcttagcttttatttactaagtcagtaaaaagtctttgtaggtctaagaccgaaaagaaagcataatcaactacagcttcaactgattcatttttaaaggagagtcagggtcataaagcaaacagaattactcatcgatagtgccaggaactgacctgtttctgataactggcccccttttttgagaggtgactgtatctgtttcttaatacctggggcaaagtcagttacacaccttgtgatgacagacaaaaagaggcagccaggacagaaagacaaacttcgcatgttctcactcatttgtgggagctaaaaattaaaacagttgaattcatggaggtagagagcagaatgatggttaccagaggctgggagggtagctggtagagggtagggggacagtgaggatggttaatgggtacaaaaatgtagttagatagaatgaataagatctagtatttcacagcacaacaggatgactacaatcaacaataatttattgtacattttaaaataactaagcatataactggat

SEQ ID NO: 612909 - DNA, 597 bp, Homo sapiens
gtccctagatgataacacagactaatgcccctaaacagacaacttcaaggtttctttaagtggcttagcttttatttactaagtcagtaaaaagtctttgtaggtctaagacygaaaagaaagcataatcaactacagcttcaactgattcatttttaaaggagagtcagggtcataaagcaaacagaattactcatcgatagtgccaggaactgacctgtttctgataactggcccccttttttgagaggtgactgtatctgtttcttaatacctggggcaaagtcagttacacaccttgtgatgacagacaaaaagaggcagccaggacagaaagacaaacttcgcatgttctcactcatttgtgggagctaaaaattaaaacagttgaattcatggaggtagagagcagaatgatggttaccagaggctgggagggtagctggtagagggtagggggacagtgaggatggttaatgggtacaaaaatgtagttagatagaatgaataagatctagtatttcacagcacaacaggatgactacaatcaacaataatttattgtacattttaaaataactaagcatataactggat

SEQ ID NO: 612910 - DNA, 597 bp, Homo sapiens
gtccctagatgataacacagactaatgcccctaaacagacaacttcaaggtttctttaagtggcttagcttttatttactaagtcagtaaaaagtctttgtaggtctaagaccgaaaagaaagcataatcaactacagcttcaactgattcatttttaaaggagagtcagggtcataaagcaaacagaattactcatcgatagtgccaggaactgacctgtttctgataactggcccccttttttgagaggtgactgtatctgtttcttaatacctggggcaaagtcagttacacaccttgtgatgacagacaaaaagaggcagccaggacagaaagacaaacttcgcatgttctcactcatttgtgggagctaaaaattaaaacagttgaattcatggaggtagagagcagaatgatggttaccagaggctgggagggtagctggtagagggtagggggacagtgaggatggttaatgggtacaaaaatgtagttagatagaatgaataagatctagtatttcacagcacaacaggatgactacaatcaacaataayttattgtacattttaaaataactaagcatataactggat

SEQ ID NO: 612911 - DNA, 578 bp, Homo sapiens
ccctgcagaagaggaaatgagggttagaggaccaaaatgagacagcttggaagtggcagggtgaaaacttaaatccacttctttctggactcaaagcctgtgcttaacataayattaaactgtactcaagacaagaatctagataataattcagaaagtctttttaggaagccatatcaacagactttaagtgcctattaattttatttctatgctggaaatctaacttaaggaaataatcagaaatgcacataaatattgatgtttattacagtcttctttttaagagccaggatctcactaggttgcccaggctcacctcaaattccaggttcaaataatcctctcagcgatagtcagaattatagatgtgcacctctacacccggactccagtctttttaataatgaattagatagatagatgacagatgatagatgattgatagattgatagatagatagatagatagatggatggataagatagatgtgtgtgggcacatatacatatataatggaatattgtgcaattattttaaatggttataattacaaatataataatataaataagta

SEQ ID NO: 612912 - DNA, 578 bp, Homo sapiens
ccctgcagaagaggaaatgagggttagaggaccaaaatgagacagcttggaagtggcagggtgaaaacttaaatccacttctttctggactcaaagcctgtgcttaacataacattaaactgtactcaagacaagaatctagataataattcagaaagtctttttaggaagccatatcaacagactttaagtgcctattaattttatttctatgctggaaatctaacttaaggaaataatcagaaatgcacataaatattgatgtttattacagtcttctttttargagccaggatctcactaggttgcccaggctcacctcaaattccaggttcaaataatcctctcagcgatagtcagaattatagatgtgcacctctacacccggactccagtctttttaataatgaattagatagatagatgacagatgatagatgattgatagattgatagatagatagatagatagatggatggataagatagatgtgtgtgggcacatatacatatataatggaatattgtgcaattattttaaatggttataattacaaatataataatataaataagta

SEQ ID NO: 612913 - DNA, 578 bp, Homo sapiens
ccctgcagaagaggaaatgagggttagaggaccaaaatgagacagcttggaagtggcagggtgaaaacttaaatccacttctttctggactcaaagcctgtgcttaacataacattaaactgtactcaagacaagaatctagataataattcagaaagtctttttaggaagccatatcaacagactttaagtgcctattaattttatttctatgctggaaatctaacttaaggaaataatcagaaatgcacataaatattgatgtttattacagtcttctttttaagagccaggatctcactaggttgcccaggctcacctcaaattccaggttcaaataatcctctcagcgatagtcagaattatagatgtgcacctctacacccrgactccagtctttttaataatgaattagatagatagatgacagatgatagatgattgatagattgatagatagatagatagatagatggatggataagatagatgtgtgtgggcacatatacatatataatggaatattgtgcaattattttaaatggttataattacaaatataataatataaataagta

SEQ ID NO: 612914 - DNA, 578 bp, Homo sapiens
ccctgcagaagaggaaatgagggttagaggaccaaaatgagacagcttggaagtggcagggtgaaaacttaaatccacttctttctggactcaaagcctgtgcttaacataacattaaactgtactcaagacaagaatctagataataattcagaaagtctttttaggaagccatatcaacagactttaagtgcctattaattttatttctatgctggaaatctaacttaaggaaataatcagaaatgcacataaatattgatgtttattacagtcttctttttaagagccaggatctcactaggttgcccaggctcacctcaaattccaggttcaaataatcctctcagcgatagtcagaattatagatgtgcacctctacacccggactccagtctttttaataatgaattagatagatagatgacagatgatagatgattgatagattgatagatagatagatagatagatrgatggataagatagatgtgtgtgggcacatatacatatataatggaatattgtgcaattattttaaatggttataattacaaatataataatataaataagta

SEQ ID NO: 612915 - DNA, 577 bp, Homo sapiens
gcactcccacatttattgcagcactattcacaatagccaaaatatgaattcaaccaaggtgcccatcaatggataaatggttagagaaatgtggtatatatatacacaatggaatattattcagacataaaaaagaatgaaattctgtaatttgcagcagcatggatgaaacccaaggtcattatgttacgcgaactaagccaagcccagaaagacaaatatcacatgttctcactcatattgggagctaaaaaatagtggatctcatgaagataccgagtagattggtgttttccagaggccgagatagtatggggaaggaggggatgaagagaagttggtttgtgggtacagatatacagtagctagaagaaataagatctggtgttcaatggatcatcggcgtgactatagttaacattaatctattgtacatttcaatagctaaaagagaataattccaatcttcctaaagaaaagataaatatttaaggtaatagatgtcccaattaccctgatttgattatatgaatgtatcaaatgamtgtacaaattaccacatgtacccctaaaatat

SEQ ID NO: 612916 - DNA, 614 bp, Homo sapiens
taggcacctaacctccttctaagagcacttatttgctttagaaaagttgtaattgtagattattttctgtgccctttttaagatgtaaatatttttaaaagcctcttccaagttttacaactaggaatgtctttctcaaagaccagaaagccattgctttcaaaagtaatcatcaaggaagatagcactccatctcctaggttctctaggaggacagtagcttaactttgtcaggtgccttctttcaagttgtaaaattaccccttgtcatgaagatactagacacagttttttttcttcttcttttgggtaaagccagttaacaaaatcaactggcctaagatcaacctagccgaactctttgtttcaggagagttgagctcagccatagttctagtctctctactctattgtaatagccttgaataaagtctttttttgcctgttaaagtagccagcgcagttttttctttgacactggctacccttatctattgaaaagaacctaatagttagggcagaccaaatggattaggccaattcatagcaatctgaacactcttggacaagttatcttctccaatgctcaatmtactcaccctttcaatcatgaa

SEQ ID NO: 612917 - DNA, 458 bp, Homo sapiens
acacaacaaagctaggaatcatcacagaaataactaccagattcaaatttataaagcataaaatattctacatagaaaaaagtttccgtaagcaaactgaagaagactaatgaagttattttaaaaaatatttgaaatatgtatgacaaggtagcaatgtacttaagatattttttaaaaacctatagaaattaatgaagaaaagaggactccccaacwgggaaatgaataggtagaggtcatgaacaggctactcataaaacaagtaacttaggatgagaatctggtaaaggtctggaggatgagaaattggatacaagaataagaaaatgatatggaaaatgtggagaatggacttaatatggaggaaaggaaaggaattgggagaaaagtctggcataattaaactggaggcaacctagacagcctttagggtcttggcatgaaatagacctggg

SEQ ID NO: 612918 - DNA, 573 bp, Homo sapiens
aggcacggtgccccccacactccatcactaaatccctttaatttgtgttaaaatcatgcttagtaaggctccatgtcttagcattgtcattgttcctcagaaaaggaaaagaaatttctagatgatatttattaagacaactaggaacaaaaattgagagcccctgtgatggtatcagtgtcagtttttccatgtattatgcagttatgcagggtgatcctttttcgtttttgcttgtgaccatgatcgagaaaatggctccctaaaaaagaacgtggtgatgaaaaaatggctccctaaaaaagaatgttgttgtaagtgtggaagtgagtgttgatgcatgttgtctattgtgaaaaattcctcctggcagtcttagcacttagcattctgcarcgggtgccatgtcacgttccccataacgctcttctcttgctgttggccctcctctttgatcaggatgtgctgatggagctccttgagcagtgcgcagatggactctggaaagccgagcgctacgagctcatcgccgacatctacaaacttatcatccccatttatgagaagcggagg

SEQ ID NO: 612919 - DNA, 640 bp, Homo sapiens
gcttcttaataataaaagttagatgtcaaaaattctttactttctctccttctcatttccatccccaccctagtcttccagttctgcccaatccatgctctccaaagtaaattctaattcctcgcacccaggagatagactgaaattctcccaaaaaaggcggctgcaaataaacatcagagttttactctcctcttttttccaccccaaaaaatatcacaaaccagtgcagatgttagctctgatgcaaatatttatggctgtctttttttttctcccctcctgaattacgggtacatgaattggatcttcaaagcaatgtacagggtttaagctgagcagttctcatccaagtctatgggaggtacacagcaagaaccctgtaatatctcagaggttttattcctttttaaattcttttataagaagactttgctaagggatttrcaagaactaaagattatttagtgataatggatgagaaatgttgctggaagtgtaaaaggcagttacattctcaccaaaagaatttcttataaataatgtcattatggcacaaaggataccaaatgaatttaatcattagcttctaattgaagagctctgccaaatttgcttctccttgctactttagctattt

SEQ ID NO: 612920 - DNA, 464 bp, Homo sapiens
tagtagtattacaaaaatagctttgacatcttggatccctcaaaagaatccagaggaccttcagagatgtgcagatcacacttcgaaagccagggtctaaaggattatcttaatgattacataattaaaaaatgtcaagccaatgctcagataaatttgctaagcaaaagccttaaatgtgtatgatttgattaaatagaaaacccaagttttacagcatttaatgtttgcacggagtacaagagtaggtaaattatgtcaaygcacacagagccacatagatcctccctcaacctttttttggttttggagttccttcaggtttgatcaaagtcatggaatattattattattattattattttgagctggagtctcgctctgtctcccaagctagagtgcagtggcaagatctcagctcactgcaacctccacctcccaggttgaagtgattctcgttcctc

SEQ ID NO: 612921 - DNA, 616 bp, Homo sapiens
gtatctcatttttatttttattcwtatttttctgactgctctggaattctgacatcttttcatagaattgccaacctctgaggcttcttgttctgagaaatatacattcatagatttgctcacttatgctatttttgcacttaacattatctcttgaatatttttctcataatatccatgaacattataatggatttataatattccataatatgccatatattgtttagccattgctcttttattaggcctttatgtggtttccagttttggctaactctgataaacatccctgtgcatacattcttgtctacaagcatgcttatttctttttgactgtcttggaagaatgattgattcaaaggacatgaaacaatttaagtcacttagtacatactgccaaattgcttccctgaaaggtttccattacattacagtttcattaagagtgcatacaagtacttatcttgccatatactcatattttccaaatcaccaccaatctgaggcatgaaaagctctagttcatttgtgcttaaattgcttactagtgacacctgaacctatttaacatagattagagatttgtatttcttcttttgtaaattatattcta

SEQ ID NO: 612922 - DNA, 583 bp, Homo sapiens
gcagatagaccacttgaggccaggatctcgagaccagcttggacaacatggtgaaaccctgtctctactaaaaatacaaaaattagcctggcatggtggcaggcgcctgtaatcccagctactygggtggctgaggcacaagagtcacttgagcccaggaggcagaggttgcagtgagccgagaccaccccactgcactccagcctgggtgacagagtgagactcaggctcaaaaaaaaaaaaaaaaaaaaagatggttaaaatggaaatcttatgtttcttatgttatgtgtgttttatcacaataaaaaaactggaaaaatatctttgataaaaacgtttgttaagtcttagcacattaggagtacaaagacatttgcccaacctaacaagttgagcaaaaagactcgagcaaacctcatacacaatgcacaaagttgaaaagcagacccctttaaaatcagaacataacaaggacatctgtgttcacaacttctattcaacatccactggaggtgcttagccagcaaaagaagacaagtaaaattcttttttaagcatgtaagaattggaaaggaggaaa

SEQ ID NO: 612923 - DNA, 543 bp, Homo sapiens
ttagcacatctcctcatgggtcataccctgtacctcaccttgagggacctgatgggacttgagcctaggtataggcctagaagcaaagggggtgggtcctgagaagaatcagtattgtcttccttccaggacaattgtcattacagtttcctcaggaaatgcagagttaactcctgagagagcgggatgcacctttcactgaaaatggaaaggcctctccactggcaaagaagacccattagaatttaggggctcaatgtctccagtttcatcagaatcttcccacatgtccccattctaacttataggatctcattttttcccagtcaatgccctcactttaacagtcaacctcagcaaggctgagagttcaacttacattcagccaatggaaagatgagattctatgtttgattttcagcaatctcagccttgtggcttcagggaataccaagcagctttcaggtcatgtatgcaacactattgagctgggaattcaaatccttgagttcatctttyactttcaccactttgtccagtgac

SEQ ID NO: 612924 - DNA, 584 bp, Homo sapiens
aataatcaaccatggccacttttcctactagtggttctgaactggtggcagcaccatttcccacacctcttcacctccacacacacaatggacatttggaaatgtgtgcagcatttggggttgttacaatgactaaaagtaaagatgttactgacattaataccgagaggtctgcaatgcactagccactcctgcattacaaaatgccaacaatgtcccattaagaatcactacaggtctataccaggttgtgtccattcagaaaaaagagagagttatggctaggtctataccaggttgtgtccacttagaaaaaaatacagggttatggctgtatcctgtctccctctttgcctcagaataaagcatggagaattgaggggtagggtgattagagaccttggytccagttctagctctggaattatatcgttgtgtgaccttagacaagacttcctgtccagacctcagtgacctggtctgtaaaatagtggtttagtcaagagggtcagcaagagctcttccaattagacattttgctcctttttctttcagagtatggtccagagaccacctgagaagct

SEQ ID NO: 612925 - DNA, 646 bp, Homo sapiens
ctctctctttcatggagagcaatctttctgagtttaatttgctaaaagcgatgacatataagatgagagacagttggttccaagatggccaaataggaacagctccggtctgcagctcctagcgtgaccartgcagaagacgggtgatttctgcattgccaactgaggtacctggttcatctcactgggactgtttggaaagtgggtgcagccaacagagggtgagccgaagcaggacacggcaacgcctcactcaggaagtacaaggggtcaggggatttccctttcctagccaagggaagctgtgacaggctataccagaaaaattgggacactgccacctaaacactgtgcttttccaatggtcttagcaaacggcacaccaggagattatatcctgcgcctggctcagtgggtcccacgaccataaagccttgctcactgctggtctgagatcgaactgcaaggtggcaagcctggctgggggaggggtgtccaccattgctgaggcttgagtaagtaaacaaagcagccaggaagctcgaactgggtggaacccaccatagctcaacaaggcccacctgcctctgtagaccccacctccgggggcagggcatagctgaacaaaaggcagcagcaacttctg

SEQ ID NO: 612926 - DNA, 448 bp, Homo sapiens
tgactagaactcaggtcgtctggtacagtgtgttttctgctataacatatctatgaaaagtctgcaaacttttcagaaagtaataataaatttttatcttacgtctattttaattaggggatgggttctgtattaatgttctcattcttaaatcttgggttttcctctcatttcccttgctcatcttgtagttgagtttcttaacttgtatgggtagtaaccagggatcagagcagccacatgatttcagggaattatgtatcctagttaaaaggctcctaagaagctgtacttaatttgatgaaacatgtctaccaggacagtgcctggcaccgagcggatgttaaataaatgttagttccctttctttctcctctccacttgaaaaataatagattggaagccattttccmagtgccaggataagcaaaacatttgcaaaacaata

SEQ ID NO: 612927 - DNA, 461 bp, Homo sapiens
tttttgtgctaaaatgacagaattgagctgctatgatagtcacaaagtctaaaatatttactttgtggccctttaaagaaaaggtttgctgacttctggtctagagttatgtttaagaaaatattttgattattatcataaaagcagtaaaagcyaccagctttctttattgaaaacttaatggtgaaacataagagtagacttatttctagcttccattatcaatgtcttctatctgaagtggtagaacagattcattctggaaaagccttagagatatttaattctcatgctttcattttcagaagtggaaattaatgctcaaaagtgtctaaaagaaggcagtaatggcattcaacttgctggtttttacttagtacatttccatttcagttgcacagtgcatctcaaactgaattacctaccacaaaataaatatgattcatctccccagttccaca

SEQ ID NO: 612928 - DNA, 461 bp, Homo sapiens
tttttgtgctaaaatgacagaattgagctgctatgatagtcacaaagtctaaaatatttactttgtggccctttaaagaaaaggtttgctgacttctggtctagagttatgtttaagaaaatattttgattattatcataaaagcagtaaaagctwccagctttctttattgaaaacttaatggtgaaacataagagtagacttatttctagcttccattatcaatgtcttctatctgaagtggtagaacagattcattctggaaaagccttagagatatttaattctcatgctttcattttcagaagtggaaattaatgctcaaaagtgtctaaaagaaggcagtaatggcattcaacttgctggtttttacttagtacatttccatttcagttgcacagtgcatctcaaactgaattacctaccacaaaataaatatgattcatctccccagttccaca

SEQ ID NO: 612929 - DNA, 461 bp, Homo sapiens
tttttgtgctaaaatgacagaattgagctgctatgatagtcacaaagtctaaaatatttactttgtggccctttaaagaaaaggtttgctgacttctggtctagagttatgtttaagaaaatattttgattattatcataaaagcagtaaaagctaccagctttctttattgaaaacttaatggtgaaacataagagtagacttatttctagcttccattatcaatgtcttctatctgaagtggtagaacagattcattctggaaaagccttagagatatttaattctcatgctttcattttcagaagtggaaattaatgctcaaaagtgtctaaaagaaggcagtaatggcattcaacttgctggkttttacttagtacatttccatttcagttgcacagtgcatctcaaactgaattacctaccacaaaataaatatgattcatctccccagttccaca

SEQ ID NO: 612930 - DNA, 623 bp, Homo sapiens
atgtttaagaaaatattttgattattatcataaaagcagtaaaagctaccagctttctttattgaaaacttaatggtgaaacataagagtagacttatttctagcttccattatcaatgtcttctatctgaagtggtagaacagattcattctggaaaagccttagagatatttaattctcatgctttcattttcagaagtggaaattaatgctcaaaagtgtctaaaagaaggcagtaatggcattcaacttgctggtttttacttagtacatttccatttcagttgcacagtgcatctcaaactgaattacctaccacaaaataaatatgattcatctccccagttccacaatgtcttagctttgtgacctcaggcaacttgcttgacctctctgtgtcttaatttattatctgtaaaataggctgttgtaagtatgagttaatccaggtraagtgcttaaaatagtgcctggcacatagtaaacattcattaaatgttagctattagtagtagtagtccagagtatgattattatcatcattattattagtcccaattttacttgaagatttggaagaaaaagacttttagaaatttaaaacaaatatgaacatgtttgg

SEQ ID NO: 612931 - DNA, 635 bp, Homo sapiens
tccctgtctgacagctttgaacagagtagtggttctcccagcacggagtttgagatctgagcctcctcaagtgagtccctgacccctgagtagcctaactgggagacgccttccagtaggggccgactgacacctcatacagccaggtgcccctctgagacaaagcttccagaagaaggatcaggcagcaacatctacagttctgcaatatttgttattctgcagcctccactggtgatacccaggcaaacagggtctggagtgggcctccaacaaactccaacagagctacagctgagggtcctgactgttagaaggaaaactaacaaacagaaaggacaaccacaccaaaaccccgtctgtatgtcaccatcatcaaagaccaaakgtagataaaaccacaaagatggggagaaaccagggcagaaaagctgaaaattctaaaaatcagagcacctcttctcctccaaaggaatgcagctccttgccagcaatggaacaaagctgtatggagaatgactttgacgagttgagagaagaaggcttcagatgatcagtaataacaaacttctctgagctaaaggaggatgttcgaacccattgcaaagaaggtaaaaaccttggaaaaagattag

SEQ ID NO: 612932 - DNA, 590 bp, Homo sapiens
ggtgttcccactcttcctacaccgaaatcgaatgttatttaaatcaaatatgattttaattttcacactgactgagatttgtagcgtggagttaggcagcttaaaaggaggctttggctttcctcttagccagtcctccctgctactgcttgataaagccatcttgtccataaatggagatactttgcatattggttaggaattcttcctgctgccagtaaattttaccagtcctgccaataagcacagatgatctatcccgtcactttcccattagagcagggccaaatatttgtcacgtgtgtacaaaatgtatgttgaccctgatggatgatagatgacattcctttgttcgtttgtaaatagaaacctatgaaatcaagtgaacttgcagataaaattcagatggctgatttacttgtacatgcaaagaattagctttgttggcaggattcaccygttggaatttgttagttatgtttctcaaataatggatcctaggtttctggggcactgtggatttaccacgtgagttatgacaagaggtagaggtctttgtgacttctttgataccacctatcttgtagatt

SEQ ID NO: 612933 - DNA, 679 bp, Homo sapiens
taaaattatgcagaaatgtttacatatcatattttataaatgtttttaagtaatgtatcacttctcaacttgcaagttatagcttatcaagctaaagaagcaaatttggaagacaatattctcattctatctttctgtattttaggtatgtgacatcaaagrtcattggtttaagaaacctggttcgtgataagttaggaattgcttactaaaacttcatagtccctcaaaagtccaaataccacatcaaccatttggaaaagaatgaaggctagtatggttttgctgtgaacccatccaaatctcatcttgaattgtagctcccataatctccatgtgtcacgggagggacctggtgggtggtaattgaatcatagggatggatttttccctttctgttctcgtgatagtgaaaaagtctcatgagatctgatggttttatagaggggagttcccctacacactctctcttgcccactgtcatgcaagatgtgtctttgcttctccttcaccttccaccatgattgtgaggccgccccagccatgtgaaactgtgagtccattaaagctctttttctttataaattacccagtcttgggtatttctttatagcagtatgaaaatggactcatatcagtatgaaaatacattaagttggtaccagtagagtggggtact

SEQ ID NO: 612934 - DNA, 679 bp, Homo sapiens
taaaattatgcagaaatgtttacatatcatattttataaatgtttttaagtaatgtatcacttctcaacttgcaagttatagcttatcaagctaaagaagcaaatttggaagacaatattctcattctatctttctgtattttaggtatgtgacatcaaagatcattggtttaagaaacctggttcgtgataagttaggaattgcttactaaaacttcatagtccctcaaaagtccaaataccacatcaaccatttggaaaagaatgaaggctagtatggttttgctgtgaacccatccaaatctcatcttgaattgtagctcccataatctccatgtgtcaygggagggacctggtgggtggtaattgaatcatagggatggatttttccctttctgttctcgtgatagtgaaaaagtctcatgagatctgatggttttatagaggggagttcccctacacactctctcttgcccactgtcatgcaagatgtgtctttgcttctccttcaccttccaccatgattgtgaggccgccccagccatgtgaaactgtgagtccattaaagctctttttctttataaattacccagtcttgggtatttctttatagcagtatgaaaatggactcatatcagtatgaaaatacattaagttggtaccagtagagtggggtact

SEQ ID NO: 612935 - DNA, 545 bp, Homo sapiens
tcagctcaatggtcaattccttcttaagttgttttatattaagagacaccccagaagaaaaagcacagtttagaactatggatacctgkgttctaatcttaacagaagcacttatcaagtagttacacatttggctttaattgaagcatttcatgaatcttaatcttatgccattgggctacaggttttgtagcaaagacaagctcttcttgaggaggatgaaggcattgttagagcagtcatcttatgaaataaattgataattttatttttaaaacatcaagtacttttgcaaagaagtgatctggtgatgcactgaaaaatctggctatgaaaatgttgacacacttttaggatttaactacagcaaaaacgtgtcttcaattcctgtcaacacatcatgtttctgcatctcagttttcatattagcaagaaaactatcaacatttgctttgttacatagtatatttagaagaaaaagtaaaactgtattgtcagaggtcacagtaacttcctccttcagttttagttgacacaatccttca

SEQ ID NO: 612936 - DNA, 338 bp, Homo sapiens
ctttccatgtttattccttccttcaggagctcttctaagggaggcctggtggttacaaaagccctcagcacttgcttgtctataaaggattttatttctccttcacttatgaagcttagtttggctggatatgaaattctgggttgaaaattcttttctttaagaatgttgaatattggcccccattctcttctggcttgtagaacttctgctgagagatctgctgttggtctgatgggcttccctttgtagtaacccgamctttctatctcgctgaccttaatattttttccttcatttcaactttggtgaatctgacagttatgtgtcttggagtt

SEQ ID NO: 612937 - DNA, 662 bp, Homo sapiens
tggaacacctcccaggttcaagcaattctcctgtctcagcctcctgagtagctgggactataggtgtgcaccaccatgcctggctaatttttgtatttttttgtagagatggagtttcaccatgttggctaggctggtctggaactccggacctcaagtgatccacccaccttggcctcccaaagtgckgggattacaggcatgagacaccatgcccagtggtagtgttatttttaagaacatgttttaaaatgcataaaataaaatacatagaattgctaaggaaaccaattataaggaaatacagttgtcaaaatatatatatttttaaaccctgacaaatccatgacataataataaaagtgctgctttattaacacattacataacaagatctaacggctggtctaataaccactctaatttcaaagtagtgatgagcataaaatatattttctgtgataaccataaagtgatacaaaaatatctgtgatttttcatgggtatgaaagccacagaaattactaataataagtggtttataacctccattcataattgaagtgatgctaactttcaaatacataatgatgagaacacagatgtaatttttccctatcctggctccaccggaattctctccatggagctattgtgggggt

SEQ ID NO: 612938 - DNA, 550 bp, Homo sapiens
atgggctttcttggaaccccatgaaggaggagatgggatctgtggaactttctattgcagtatgcacaggtggctcagatgcccactgctggtataccttgtagctgtgtttttaccctctttcccctccatagcaaagtcttttttggaagttctcactatatgcacacacagaacagcaaaacaggctgggcacagtgtctcacacctgtaatcccagcactttgggaggccaaggcaggtggatggcttgagctcagaagatggagaccagcctgggcagcatggtgaaaccccatctctaccaaaaatacaaaaaaaattagctgggcttgttggcaggcacctgttatcccagctacttgggaggctgaggttggaggattactcgagcctgggaagaggagttgtagtgacccragatcatgccactgcactttagcctgggtgacaaagtgagactctatctgaaaaaaaaaaaaaaaaaaagaaaaaacaaaaacaaaatgaaactcagcaaagcaaaaaaaaagaaaaaaaactgaaggtt

SEQ ID NO: 612939 - DNA, 238 bp, Homo sapiens
atatcttccaataaaagctacttagaagcaatgtcagaaactttttcatgatgtatctactcagctaacagagttgaacctttcctttgagagagcagttttgaaacactctttttgtggaatctgyaagtggatatttgtctagctttgaggatttcgttggaaacgggattacatataaaaagcagacagcagcattcccagtaacttctttgtgatgtttgcattcaagtcacag

SEQ ID NO: 612940 - DNA, 541 bp, Homo sapiens
tgaaacactctttttgtagtatctggatgtggacattttcagcgctttcaggcctaaggtgaaaaaggaaatatcttcccctgaaaactagacagaagcattgtcagaaacttatttgtgatgtgcgccctcaactaacagtgttggagctttcttttgatagagcagttttgaaacactctttttgtggaatctgcatgtggatatttttctagctttgaggatttcgttggaaacgggattacatataaaaagcagacagcagcattcccagaaacttctttgtgatgtttgcattcaagtcacagarttgaacattccctttcatagagcaggtttgaaacactctttttgtagtatctggatgtggacatttggagcgctttcaggcctatggtgaaaaaggaaatatcttcccctgaaaactagacagaagcattctcagaaacttatttgtgatgtgcgccctcaactaacagtgttgaacctttcttttgatagagcagttttgaaacactctttttgtaatatctgcaagagg

SEQ ID NO: 612941 - DNA, 541 bp, Homo sapiens
tgaaacactctttttgtagtatctggatgtggacattttcagcgctttcaggcctaaggtgaaaaaggaaatatcttcccctgaaaactagacagaagcattgtcagaaacttatttgtgatgtgcgccctcaactaacagtgttggagctttcttttgatagagcagttttgaaacactctttttgtggaatctgcatgtggatatttttctagctttgaggatttcgttggaaacgggattacatataaaaagcagacagcagcattcccagaaacttctttgtgatgtttgcattcaagtcacagagttgaacattccctttcatagagcaggtttgaaacactctttttgtagtatctggatgtggacatttggagcgctttcaggcmtatggtgaaaaaggaaatatcttcccctgaaaactagacagaagcattctcagaaacttatttgtgatgtgcgccctcaactaacagtgttgaacctttcttttgatagagcagttttgaaacactctttttgtaatatctgcaagagg

SEQ ID NO: 612942 - DNA, 644 bp, Homo sapiens
cttctttgggatgtttcaattgaagtcacagtgttgaacagttcctttcatagaacaggtttgaaacactctttttgtagtatctggaagtggacatttggagcgctctcaggactatggtgaaaaaggaaatatcttccaataaaagctasatagaagcaatgtcagaaactttttcatgatgtatctactcagctaacagagttgaacctttcctttgagagagcagttttgaaacactctttttgtggaatctgcaagtggatgtttgtctagctttgaggatttcgttggaaacgggtttacatataaaaagcagacagcagcattcccagaatcttgtttgtgatgtttgcattcaagtcacagagttgaacattccctttcatagagcaggtttgaaacactctttttatagtatctggatgtggacatttggagcgctttcaggcctatggtgaaaaaggaaatatcttctcctgaaaactagacagaagcattctcagaatcttatttgcgatgtgcgccctcaactaacagtgttgaagctttcttttgatagagcagttttgaaacactcttttcgtaaaatctgcaagaggatattttgatagctttgaggatttcgttggaaacgggattgt

SEQ ID NO: 612943 - DNA, 644 bp, Homo sapiens
cttctttgggatgtttcaattgaagtcacagtgttgaacagttcctttcatagaacaggtttgaaacactctttttgtagtatctggaagtggacatttggagcgctctcaggactatggtgaaaaaggaaatatcttccaataaaagctacatagaagcaatgtcagaaactttttcatgatgtatctactcagctaacagagttgaacctttcctttgagagagcagttttgaaacactctttttgtggaatctgcaagtggatrtttgtctagctttgaggatttcgttggaaacgggtttacatataaaaagcagacagcagcattcccagaatcttgtttgtgatgtttgcattcaagtcacagagttgaacattccctttcatagagcaggtttgaaacactctttttatagtatctggatgtggacatttggagcgctttcaggcctatggtgaaaaaggaaatatcttctcctgaaaactagacagaagcattctcagaatcttatttgcgatgtgcgccctcaactaacagtgttgaagctttcttttgatagagcagttttgaaacactcttttcgtaaaatctgcaagaggatattttgatagctttgaggatttcgttggaaacgggattgt

SEQ ID NO: 612944 - DNA, 644 bp, Homo sapiens
cttctttgggatgtttcaattgaagtcacagtgttgaacagttcctttcatagaacaggtttgaaacactctttttgtagtatctggaagtggacatttggagcgctctcaggactatggtgaaaaaggaaatatcttccaataaaagctacatagaagcaatgtcagaaactttttcatgatgtatctactcagctaacagagttgaacctttcctttgagagagcagttttgaaacactctttttgtggaatctgcaagtggatgtttgyctagctttgaggatttcgttggaaacgggtttacatataaaaagcagacagcagcattcccagaatcttgtttgtgatgtttgcattcaagtcacagagttgaacattccctttcatagagcaggtttgaaacactctttttatagtatctggatgtggacatttggagcgctttcaggcctatggtgaaaaaggaaatatcttctcctgaaaactagacagaagcattctcagaatcttatttgcgatgtgcgccctcaactaacagtgttgaagctttcttttgatagagcagttttgaaacactcttttcgtaaaatctgcaagaggatattttgatagctttgaggatttcgttggaaacgggattgt

SEQ ID NO: 612945 - DNA, 644 bp, Homo sapiens
cttctttgggatgtttcaattgaagtcacagtgttgaacagttcctttcatagaacaggtttgaaacactctttttgtagtatctggaagtggacatttggagcgctctcaggactatggtgaaaaaggaaatatcttccaataaaagctacatagaagcaatgtcagaaactttttcatgatgtatctactcagctaacagagttgaacctttcctttgagagagcagttttgaaacactctttttgtggaatctgcaagtggatgtttgtctagctttgaggatttcgttggaaacgggwttacatataaaaagcagacagcagcattcccagaatcttgtttgtgatgtttgcattcaagtcacagagttgaacattccctttcatagagcaggtttgaaacactctttttatagtatctggatgtggacatttggagcgctttcaggcctatggtgaaaaaggaaatatcttctcctgaaaactagacagaagcattctcagaatcttatttgcgatgtgcgccctcaactaacagtgttgaagctttcttttgatagagcagttttgaaacactcttttcgtaaaatctgcaagaggatattttgatagctttgaggatttcgttggaaacgggattgt

SEQ ID NO: 612946 - DNA, 482 bp, Homo sapiens
gatgtgcgccctcaactaacastgttgaagctttcttttgatagagcagttttgaaacactcttttcgtaaaatctgcaagaggatattttgatagctttgaggatttcgttggaaacgggattgtcttcatataaactctagacagaagcattctcagaagcttcattgggatgtttcaattgaagtcacagtgttgaacagtccctttcatagagcaggtttgaaacactctttttgtagtatctggaagtggacatttggagagatctcaggaatacggtgataaaggaaatatcttccaataaaagctagatagaagcaatgtcagaaactttttcatgatgtatctactcagctaacagagttgaacctttcttttgagagagcagttttgaaacactctttttgtggaatctgcaagtggatatttgtctagctttgaggatttcgttggaaacgggattacatataaaaagcaga

SEQ ID NO: 612947 - DNA, 482 bp, Homo sapiens
gatgtgcgccctcaactaacagtgttgaasctttcttttgatagagcagttttgaaacactcttttcgtaaaatctgcaagaggatattttgatagctttgaggatttcgttggaaacgggattgtcttcatataaactctagacagaagcattctcagaagcttcattgggatgtttcaattgaagtcacagtgttgaacagtccctttcatagagcaggtttgaaacactctttttgtagtatctggaagtggacatttggagagatctcaggaatacggtgataaaggaaatatcttccaataaaagctagatagaagcaatgtcagaaactttttcatgatgtatctactcagctaacagagttgaacctttcttttgagagagcagttttgaaacactctttttgtggaatctgcaagtggatatttgtctagctttgaggatttcgttggaaacgggattacatataaaaagcaga

SEQ ID NO: 612948 - DNA, 341 bp, Homo sapiens
cagtgttgaagctttcttttgatagagcagttttgaaacactcttttygtaaaatctgcaagaggatattttgatagctttgaggatttcgttggaaacgggattgtcttcatataaactctagacagaagcattctcagaagcttcattgggatgtttcaattgaagtcacagtgttgaacagtccctttcatagagcaggtttgaaacactctttttgtagtatctggaagtggacatttggagagatctcaggaatacggtgataaaggaaatatcttccaataaaagctagatagaagcaatgtcagaaactttttcatgatgtatctactcagcta

SEQ ID NO: 612949 - DNA, 482 bp, Homo sapiens
gatgtgcgccctcaactaacagtgttgaagctttcttttgatagagcagttttgaaacactcttttcgtaaaatctgcaagaggatattttgatagctttgaggatttcgttggaaacgggattgtcttcatataaactctagacagaagcattctcagaagcttcattgggatgtttcaattgaagtcacagtgttgaacagtccctttcatagagcaggtttgaaacactctttttgtagtatctggaagtggacatttggagagatctcaggaatacggtgataaaggaaatatcttccaataaaagctagatagaagcaatgtcagaaactttttcatgaygtatctactcagctaacagagttgaacctttcttttgagagagcagttttgaaacactctttttgtggaatctgcaagtggatatttgtctagctttgaggatttcgttggaaacgggattacatataaaaagcaga

SEQ ID NO: 612950 - DNA, 471 bp, Homo sapiens
ttcattgggatgtttcaattgaagtcacagtgttgaacagtccctttcatagagcaggtttgaaacactctttttgtagtatctggatgtggacatttggagcgctttcaggcctatggtttaaaaggaaatatcttcccctgaaaactagacagaagcattytcagaaacttatttgtgatgtgcgccctcaactaacagtgttgaagcattcttttgatagagcagttttgaaaaactctttttgtggaatctgcaagtggatatttgtctagctttgaggatttcgttggtaacgggattacatataaaaagcagacagcagcattcccagaatcttgtttgtgatgtttgcattcaagtcacagagttgaacattccctttcatagagcaggtttgaaacactctttttgtagtatctggatgtggacatttggagcgctttcaggcctatggtgaaaaaggaaata

SEQ ID NO: 612951 - DNA, 471 bp, Homo sapiens
ttcattgggatgtttcaattgaagtcacagtgttgaacagtccctttcatagagcaggtttgaaacactctttttgtagtatctggatgtggacatttggagcgctttcaggcctatggtttaaaaggaaatatcttcccctgaaaactagacagaagcattctcagaaacttatttgtgatgtgcgccctcaactaacagtgttgaagcwttcttttgatagagcagttttgaaaaactctttttgtggaatctgcaagtggatatttgtctagctttgaggatttcgttggtaacgggattacatataaaaagcagacagcagcattcccagaatcttgtttgtgatgtttgcattcaagtcacagagttgaacattccctttcatagagcaggtttgaaacactctttttgtagtatctggatgtggacatttggagcgctttcaggcctatggtgaaaaaggaaata

SEQ ID NO: 612952 - DNA, 471 bp, Homo sapiens
ttcattgggatgtttcaattgaagtcacagtgttgaacagtccctttcatagagcaggtttgaaacactctttttgtagtatctggatgtggacatttggagcgctttcaggcctatggtttaaaaggaaatatcttcccctgaaaactagacagaagcattctcagaaacttatttgtgatgtgcgccctcaactaacagtgttgaagcattcttttgatagagcagttttgaaamactctttttgtggaatctgcaagtggatatttgtctagctttgaggatttcgttggtaacgggattacatataaaaagcagacagcagcattcccagaatcttgtttgtgatgtttgcattcaagtcacagagttgaacattccctttcatagagcaggtttgaaacactctttttgtagtatctggatgtggacatttggagcgctttcaggcctatggtgaaaaaggaaata

SEQ ID NO: 612953 - DNA, 569 bp, Homo sapiens
gtcttcatataaactctagacagaagcattctcagaagcttcattgggatgtttcaattraagtcacagtgttgaacagtccctttcatagagcaggtttgaaacactctttttgtagtatctggaagtggacatttggagagatctcaggaatacggtgataaaggaaatatcttccaataaaagctagatagaagcaatgtcagaaactttttcatgatgtatctactcagctaacagagttgaacctttcttttgagagagcagttttgaaacactctttttgtggaatctgcaagtggatatttgtctagctttgaggatttcgttggaaacgggattacatataaaaagcagacagcagcattcccagaaacttctttgtgatgtttgcattcaagtcacagagttgaacattccctttcatagagcaggtttgaaacactctttttgtagtatctggatgtggacatttggagcgctttcaggccaatggggaaaaaggaaatatcttcccctgaaaactagacagaagaattctcagaatcttatttgtgatgtgcgccctc

SEQ ID NO: 612954 - DNA, 379 bp, Homo sapiens
gggatgtttcaattgaagtcacagtgttgaacagtccctttcatagagcaggtttgaaacactctttttgtagtatctggaagtggacatttggagagatctcaggaatacggtgataaaggaaatatcttccaataaaagctagatagaagcaatgtcagaaactttttcatgatgtatctactcagctaacagmgttgaacctttcttttgagagagcagttttgaaacactctttttgtggaatctgcaagtggatatttgtctagctttgaggatttcgttggaaacgggattacatataaaaagcagacagcagcattcccagaaacttctttgtgatgtttgcattcaagtcacagagttgaacattcccttt

SEQ ID NO: 612955 - DNA, 538 bp, Homo sapiens
caattgaagtcacagtgttgaacagtccctttcatagagcaggtttgaaacactctttttgtagtatctggaagtggacatttggagagatctcaggaatacggtgataaaggaaatatcttccaataaaagctagatagaagcaatgtcagaaactttttcatgatgtatctactcagctaacagagttgaacctttcttttgagagagmagttttgaaacactctttttgtggaatctgcaagtggatatttgtctagctttgaggatttcgttggaaacgggattacatataaaaagcagacagcagcattcccagaaacttctttgtgatgtttgcattcaagtcacagagttgaacattccctttcatagagcaggtttgaaacactctttttgtagtatctctatgtggacatttggagcgctttcaggcctatggtgaaaaaggaaatatcttcccctgaaaactagacagaagaattcttagaatcttatttgtgatgtgcgccctcaactaacagtgttgaagctttct

SEQ ID NO: 612956 - DNA, 569 bp, Homo sapiens
gtcttcatataaactctagacagaagcattctcagaagcttcattgggatgtttcaattgaagtcacagtgttgaacagtccctttcatagagcaggtttgaaacactctttttgtagtatctggaagtggacatttggagagatctcaggaatacggtgataaaggaaatatcttccaataaaagctagatagaagcaatgtcagaaactttttcatgatgtatctactcagctaacagagttgaacctttcttttgagagagcagttttgaaacactctttttgtggaatctgcaagtggatatttgtctagctttgaggatttcgttggaaacrggattacatataaaaagcagacagcagcattcccagaaacttctttgtgatgtttgcattcaagtcacagagttgaacattccctttcatagagcaggtttgaaacactctttttgtagtatctggatgtggacatttggagcgctttcaggccaatggggaaaaaggaaatatcttcccctgaaaactagacagaagaattctcagaatcttatttgtgatgtgcgccctc

SEQ ID NO: 612957 - DNA, 538 bp, Homo sapiens
caattgaagtcacagtgttgaacagtccctttcatagagcaggtttgaaacactctttttgtagtatctggaagtggacatttggagagatctcaggaatacggtgataaaggaaatatcttccaataaaagctagatagaagcaatgtcagaaactttttcatgatgtatctactcagctaacagagttgaacctttcttttgagagagcagttttgaaacactctttttgtggaatctgcaagtggatatttgtctagctttgaggatttcgttggaaacgggattacatataaaaagcagacagcagcattcccagaaacttctttgtgawgtttgcattcaagtcacagagttgaacattccctttcatagagcaggtttgaaacactctttttgtagtatctctatgtggacatttggagcgctttcaggcctatggtgaaaaaggaaatatcttcccctgaaaactagacagaagaattcttagaatcttatttgtgatgtgcgccctcaactaacagtgttgaagctttct

SEQ ID NO: 612958 - DNA, 569 bp, Homo sapiens
gtcttcatataaactctagacagaagcattctcagaagcttcattgggatgtttcaattgaagtcacagtgttgaacagtccctttcatagagcaggtttgaaacactctttttgtagtatctggaagtggacatttggagagatctcaggaatacggtgataaaggaaatatcttccaataaaagctagatagaagcaatgtcagaaactttttcatgatgtatctactcagctaacagagttgaacctttcttttgagagagcagttttgaaacactctttttgtggaatctgcaagtggatatttgtctagctttgaggatttcgttggaaacgggattacatataaaaagcagacagcagcattcccagaaacttctttgtgatgtttgcattcaagtcacagagttgaacattccctttcatagagcaggtttgaaacactytttttgtagtatctggatgtggacatttggagcgctttcaggccaatggggaaaaaggaaatatcttcccctgaaaactagacagaagaattctcagaatcttatttgtgatgtgcgccctc

SEQ ID NO: 612959 - DNA, 538 bp, Homo sapiens
caattgaagtcacagtgttgaacagtccctttcatagagcaggtttgaaacactctttttgtagtatctggaagtggacatttggagagatctcaggaatacggtgataaaggaaatatcttccaataaaagctagatagaagcaatgtcagaaactttttcatgatgtatctactcagctaacagagttgaacctttcttttgagagagcagttttgaaacactctttttgtggaatctgcaagtggatatttgtctagctttgaggatttcgttggaaacgggattacatataaaaagcagacagcagcattcccagaaacttctttgtgatgtttgcattcaagtcacagagttgaacattccctttcatagagcaggtttgaaacactctttttgtagtatctctatgtggacatttggagcgctttcaggcctatggtgaaaaaggaaatatcttcccctgaaaactagacagaagmattcttagaatcttatttgtgatgtgcgccctcaactaacagtgttgaagctttct

SEQ ID NO: 612960 - DNA, 547 bp, Homo sapiens
agttttgaaacactctttttgtaaaatctgcaagaggatatttggatagctttgaggatttcgttggaaacgggattgtcttcatataaactctagacagaagcattctcagaagcgtcattgggatgtttcaattgaagtcacagtgttgaacaktccctttcatagagcaggtttgaaacactctttttgtagtatctggatgtggacatttggagcgctttaagcctatggtttaaaaggaaatatcttcccctgaaaactagacagaagcattctcagaaacttatttgtgatgtgcgccctcaactaacagtgccccgcattctttgatagagcagttttgaaacactctttttgtggaatctgcaagtggatatttgtctagcttgaggatttcgtggaaacgggattacatataaaaagcagacagcagcattcccagtaacttctttgtgatgtttgcattcaagtcagagagttgaacattccctttcatagagcaggtttgaaacactctttttgaagtatctggatgtggacattt

SEQ ID NO: 612961 - DNA, 369 bp, Homo sapiens
gcggtgaaaaaggaaatatcttccaataaaagctagatagaagcaatgtcagaaactttttcatgatgtatctactcagctaacagagttgaaccttcctttgagagagcagttttgaaacactctttttgtggaatctgcaagtggatatttgtctagctttgaggatttcgttggaaaygggattacatataaaaagcagacagcagcattcccagaaacttctttgtgatgtttgcattcaagtcacagagttgaacattccctttcatagagcaggtttgaaacactctttttgtagtatctggatgtggacattttcagcgctttcaggcctaaggtgaaaaaggaaatatcttcccctgaaac

SEQ ID NO: 612962 - DNA, 369 bp, Homo sapiens
gcggtgaaaaaggaaatatcttccaataaaagctagatagaagcaatgtcagaaactttttcatgatgtatctactcagctaacagagttgaaccttcctttgagagagcagttttgaaacactctttttgtggaatctgcaagtggatatttgtctagctttgaggatttcgttggaaatgggattacatakaaaaagcagacagcagcattcccagaaacttctttgtgatgtttgcattcaagtcacagagttgaacattccctttcatagagcaggtttgaaacactctttttgtagtatctggatgtggacattttcagcgctttcaggcctaaggtgaaaaaggaaatatcttcccctgaaac

SEQ ID NO: 612963 - DNA, 369 bp, Homo sapiens
gcggtgaaaaaggaaatatcttccaataaaagctagatagaagcaatgtcagaaactttttcatgatgtatctactcagctaacagagttgaaccttcctttgagagagcagttttgaaacactctttttgtggaatctgcaagtggatatttgtctagctttgaggatttcgttggaaatgggattacatataaaaagcagacagcagcattcccagwaacttctttgtgatgtttgcattcaagtcacagagttgaacattccctttcatagagcaggtttgaaacactctttttgtagtatctggatgtggacattttcagcgctttcaggcctaaggtgaaaaaggaaatatcttcccctgaaac

SEQ ID NO: 612964 - DNA, 369 bp, Homo sapiens
gcggtgaaaaaggaaatatcttccaataaaagctagatagaagcaatgtcagaaactttttcatgatgtatctactcagctaacagagttgaaccttcctttgagagagcagttttgaaacactctttttgtggaatctgcaagtggatatttgtctagctttgaggatttcgttggaaatgggattacatataaaaagcagacagcagcattcccagaaactyctttgtgatgtttgcattcaagtcacagagttgaacattccctttcatagagcaggtttgaaacactctttttgtagtatctggatgtggacattttcagcgctttcaggcctaaggtgaaaaaggaaatatcttcccctgaaac

SEQ ID NO: 612965 - DNA, 306 bp, Homo sapiens
acagtgttgaacagtccctttcatagagcaggtttgaaacactctttttgtagtatctggaagtgkacatttggagcgctctcaggactgcggtgaaaaaggaaatatcttccaataaaagctagatagaagcaatgtcagaaactttttcatgatgtatctactcagctaacagagttgaacctttcttttgagagagcagttttgaaacactctttttgtggaatctgcaagtggatatttgtctagctttgaggatttcgttggaaacgggattacatataaaaagcagacagcagcattccc

SEQ ID NO: 612966 - DNA, 306 bp, Homo sapiens
acagtgttgaacagtccctttcatagagcaggtttgaaacactctttttgtagtatctggaagtgtacatttggagcgctctcaggactgcggtgaaaaaggaaatatcttccaataaaagctagatagaagcaatgtcagaaactttttcatgatgtatctactcagctaacagagttgaacctttcttttgagagagcagttttgaaacactckttttgtggaatctgcaagtggatatttgtctagctttgaggatttcgttggaaacgggattacatataaaaagcagacagcagcattccc

SEQ ID NO: 612967 - DNA, 451 bp, Homo sapiens
ccccatccactgtgatgtggattttctgggatcctgaaaataaaagtagaacatcttccttcccactacacctggacaccttctctgcactcaccatggacagtggtcagcattaagaaatcacagttctggccaggcgccgtggtccacacctgtaaacccaagcactttgggaggccaaggcggatggaccacgaggtcaggagtttgaaaccagcctggccaacacagtgaaacccygtctctgctaaaaatacaaaaagtagccgggcatggtggcatgcacttgtagttccagctacttgggaggctgaggcaggagaattgcttgaacctgggagccgagatcacacctctgcactccagcataggcaacagagggaaactctgtctcaaaaaaaaaaaaaaagaaaaatcacagttcttagccaagaatctgtgatttcagcac

SEQ ID NO: 612968 - DNA, 593 bp, Homo sapiens
aaaccgttctgcgtggacgtggctctctgcccacctcctcatagatctctatctctaaaggcttttaaagaatgggagaacaaagctgcatttccaacctgtttatggaaaacgccaaaaggcactacggaggacgtgggtaaaggcccatgggcttcccatcaagctccccagagtccctgaatcatgtggataatgaaggaatcttggcctctgccctctackgggccagaaaacacagcgccatgtaaacttttcagaattaaccggccaactgcgggactagagcaatcccctgcagacccttatccacactgacagttgatgttcccaagcagggcacaggggcttgctctaggctcatctgtccaatgtcaagggatgcattttagaaacagtcagtcgtgctgggaagagctggtttgttaatttccacctggaggtttgaaattggctgcagtacattgagatggagtcaataggacctttgacaaggatcgtggagaccttgaaccatgacctggcagccaaagccatcatcacaaaacaatgtctgaaagtggtgggaaaggggtgagatgtggacagtgagg

SEQ ID NO: 612969 - DNA, 593 bp, Homo sapiens
aaaccgttctgcgtggacgtggctctctgcccacctcctcatagatctctatctctaaaggcttttaaagaatgggagaacaaagctgcatttccaacctgtttatggaaaacgccaaaaggcactacggaggacgtgggtaaaggcccatgggcttcccatcaagctccccagagtccctgaatcatgtggataatgaaggaatcttggcctctgccctctacggggccagaaaacacagcgccatgtaaacttttcagaattaaccgrccaactgcgggactagagcaatcccctgcagacccttatccacactgacagttgatgttcccaagcagggcacaggggcttgctctaggctcatctgtccaatgtcaagggatgcattttagaaacagtcagtcgtgctgggaagagctggtttgttaatttccacctggaggtttgaaattggctgcagtacattgagatggagtcaataggacctttgacaaggatcgtggagaccttgaaccatgacctggcagccaaagccatcatcacaaaacaatgtctgaaagtggtgggaaaggggtgagatgtggacagtgagg

SEQ ID NO: 612970 - DNA, 608 bp, Homo sapiens
cacttgccagtcctgggccacctcccaattcctacagccaaccggagctctggtgtctggagcccagaagatgggagcgggggttcggcgaacaytcaggaatgtgaacttggctacttggctaggccacggtacccagatatttggccaaatactagcctgatattgctgggaaagtattttttagatgagatgaacatttcaatcagtagactttgagtcaaaccgactagagtccatgccatgggtgggcctcgttcaatcagtcgacggccctcatgaaaaacaggaagaggaactgctgtctccagtctgccttcggactcgagctgcaacatcagctcttccctgggtctccagcctgctgccctggcctgcaaatttttgatttgccggtccccacaattgcaggaaacaggcttaaatccttaaaataaattaatctctctctctcagcgtctcttcttatcacttcagtttgcttatcaatgagcctagagatgaatgctcagaaccactgagctggaggaatgagctctggccagggctgccctgtaacagggcctgggttcccatcctggccctggccattccctacactgtggcca

SEQ ID NO: 612971 - DNA, 608 bp, Homo sapiens
cacttgccagtcctgggccacctcccaattcctacagccaaccggagctctggtgtctggagcccagaagatgggagcgggggttcggcgaacactcaggaatgtgaacttggctacttggctaggccacggtacccagatatttggccaaatactagcctgatattgctgggaaagtattttttagatgagatgaacatttcaatcagtagactttgagtcaaaccgactagagtccatgccatgggtgggcctcgttcaatcagtcgacggccctcatgaaaaacaggaagaggaactgctgtctccagtctgccttcggactygagctgcaacatcagctcttccctgggtctccagcctgctgccctggcctgcaaatttttgatttgccggtccccacaattgcaggaaacaggcttaaatccttaaaataaattaatctctctctctcagcgtctcttcttatcacttcagtttgcttatcaatgagcctagagatgaatgctcagaaccactgagctggaggaatgagctctggccagggctgccctgtaacagggcctgggttcccatcctggccctggccattccctacactgtggcca

SEQ ID NO: 612972 - DNA, 478 bp, Homo sapiens
gcaagccttctcatggtgtggcactcagcagggcctccacctcctgctgggccctctgtgcccctctcccagcctcctcgggaaaactgacctctcccttctttgttttttccaaaatgtttggtgaaggagagagcaggtgttaactggcctttttcctgccttctacagagcaagtatggattaycaacaagcactaggctcacatccctccctcttttattgaggtcatttttattctttataagataaatctcaaaagtcttacagctttaaaggcctaatatgtttataaagtaagaaaacctttattacctttatcgtcgcatactttgactactgcccaaagtgacttaaacaaaatcaagacgatacacaatcacaactgtccacttcttcagaatgttctttccttctcccccaagcctttcctttcttccccttttcttctccttccagtgtgatggtgaagggaatt

SEQ ID NO: 612973 - DNA, 460 bp, Homo sapiens
atgaattcataaggagattaatctactgataataaagttgaggctggtggtactccaagtgcagtcgtgttatatrgtcaatcatacccaggatttgacctatcacccataggagtctgaacatcttacagaatacaactgagatgccaagggtccattcattttctgcttgggactcacagagttctggaaggcactagggaaaacagaagcccaggctgccatcttgaagtctgacacagtcatgaaattgatgtgggactagtctctggggcaaagctagtgtgaccaggaaaccatcaagtagaaacttaccaaatttatactcaaaggaatacggcatgtctttgcttaatactacacttgaaccctggcaaatgttgcagtgcatacggaaatcataagggtttgggtgcaccacttgtcaaatcatactcagaagtacgtgccaggatctcta

SEQ ID NO: 612974 - DNA, 460 bp, Homo sapiens
atgaattcataaggagattaatctactgataataaagttgaggctggtggtactccaagtgcagtcgtgttatatggtcaatcatacccaggatttgacctatcacccataggagtctgaacatcttacagaatacaactgagatgccaagrgtccattcattttctgcttgggactcacagagttctggaaggcactagggaaaacagaagcccaggctgccatcttgaagtctgacacagtcatgaaattgatgtgggactagtctctggggcaaagctagtgtgaccaggaaaccatcaagtagaaacttaccaaatttatactcaaaggaatacggcatgtctttgcttaatactacacttgaaccctggcaaatgttgcagtgcatacggaaatcataagggtttgggtgcaccacttgtcaaatcatactcagaagtacgtgccaggatctcta

SEQ ID NO: 612975 - DNA, 446 bp, Homo sapiens
agattaatctactgataataaagttgaggctggtggtactccaagtgcagtcgtgttatatggtcaatcatacccaggatttgacctatcacccataggagtctgaacatcttacagaatacaactgagatgccaagggtccattcattytctgcttgggactcacagagttctggaaggcactagggaaaacagaagcccaggctgccatcttgaagtctgacacagtcatgaaattgatgtgggactagtctctggggcaaagctagtgtgaccaggaaaccatcaagtagaaacttaccaaatttatactcaaaggaatacggcatgtctttgcttaatactacacttgaaccctggcaaatgttgcagtgcatacggaaatcataagggtttgggtgcaccacttgtcaaatcatactcagaagtacgtgccaggatctcta

SEQ ID NO: 612976 - DNA, 458 bp, Homo sapiens
gaattcataaggagattaatctactgataataaagttgaggctggtggtactccaagtgcagtcgtgttatatggtcaatcatacccaggatttgacctatcacccataggagtctgaacatcttacagaatacaactgagatgccaagggtccattcattttctgcttgggactcacagagttctggaaggcactagggaaaacagaagcccaggctgccatcttgaagtctgacasagtcatgaaattgatgtgggactagtctctggggcaaagctagtgtgaccaggaaaccatcaagtagaaacttaccaaatttatactcaaaggaatacggcatgtctttgcttaatactacacttgaaccctggcaaatgttgcagtgcatacggaaatcataagggtttgggtgcaccacttgtcaaatcatactcagaagtacgtgccaggatctcta

SEQ ID NO: 612977 - DNA, 458 bp, Homo sapiens
gaattcataaggagattaatctactgataataaagttgaggctggtggtactccaagtgcagtcgtgttatatggtcaatcatacccaggatttgacctatcacccataggagtctgaacatcttacagaatacaactgagatgccaagggtccattcattttctgcttgggactcacagagttctggaaggcactagggaaaacagaagcccaggctgccatcttgaagtctgacacwgtcatgaaattgatgtgggactagtctctggggcaaagctagtgtgaccaggaaaccatcaagtagaaacttaccaaatttatactcaaaggaatacggcatgtctttgcttaatactacacttgaaccctggcaaatgttgcagtgcatacggaaatcataagggtttgggtgcaccacttgtcaaatcatactcagaagtacgtgccaggatctcta

SEQ ID NO: 612978 - DNA, 459 bp, Homo sapiens
tgaattcataaggagattaatctactgataataaagttgaggctggtggtactccaagtgcagtcgtgttatatggtcaatcatacccaggatttgacctatcacccataggagtctgaacatcttacagaatacaactgagatgccaagggtccattcattttctgcttgggactcacagagttctggaaggcactagggaaaacagaagcccaggctgccatcttgaagtctgacacagtcatgaaattgatgtgggactagtctctggggcaaagctagtgtgaccaggaaaccatcaagtagaaacttrccaaatttatactcaaaggaatacggcatgtctttgcttaatactacacttgaaccctggcaaatgttgcagtgcatacggaaatcataagggtttgggtgcaccacttgtcaaatcatactcagaagtacgtgccaggatctcta

SEQ ID NO: 612979 - DNA, 458 bp, Homo sapiens
gaattcataaggagattaatctactgataataaagttgaggctggtggtactccaagtgcagtcgtgttatatggtcaatcatacccaggatttgacctatcacccataggagtctgaacatcttacagaatacaactgagatgccaagggtccattcattttctgcttgggactcacagagttctggaaggcactagggaaaacagaagcccaggctgccatcttgaagtctgacacagtcatgaaattgatgtgggactagtctctggggcaaagctagtgtgaccaggaaaccatcaagtagaaacttaccaaatttatactcaaaggaatacggcatgtctttgcttaatactacayttgaaccctggcaaatgttgcagtgcatacggaaatcataagggtttgggtgcaccacttgtcaaatcatactcagaagtacgtgccaggatctcta

SEQ ID NO: 612980 - DNA, 459 bp, Homo sapiens
tgaattcataaggagattaatctactgataataaagttgaggctggtggtactccaagtgcagtcgtgttatatggtcaatcatacccaggatttgacctatcacccataggagtctgaacatcttacagaatacaactgagatgccaagggtccattcattttctgcttgggactcacagagttctggaaggcactagggaaaacagaagcccaggctgccatcttgaagtctgacacagtcatgaaattgatgtgggactagtctctggggcaaagctagtgtgaccaggaaaccatcaagtagaaacttaccaaatttatactcaaaggaatacggcatgtctttgcttaatactacacttgaaccctggcaaatgttgcagtgcatacggaaatcataagggtytgggtgcaccacttgtcaaatcatactcagaagtacgtgccaggatctcta

SEQ ID NO: 612981 - DNA, 560 bp, Homo sapiens
gaaatcaatgaaagtgaaaacagaaaataatcaaaagagctgattctttgaaaagataaataaaatcaataaacctctatccaggttaattataggaaaaaagacatgttatttactatcaaatatgaaagaggggccatcactacagatcccatggacatttaaaggataataaaagaatattatggccgggcacagtggctcacacctgtaatcccaggactttgggaggccgagtcgggyggatcacttgaggctgggactgtgagaccagcctggctaacatgatgaaaccccatctctactaaaaacacaaaatattatcctggcgtggttgtgcatgtctgtaagccagctgctttggtggctgaggcacaagactctcttgaacccagaaggcagagggtgcagtgagccaaaatcatgccactgcactgggtcgctctgggcaacagagcaagactctgtctcaaaaaaaaaaaaaataaagggaatattatcaacaactctatgcccaccaatctgataacctcaacaaaatggaccaattctttaaaagg

SEQ ID NO: 612982 - DNA, 560 bp, Homo sapiens
gaaatcaatgaaagtgaaaacagaaaataatcaaaagagctgattctttgaaaagataaataaaatcaataaacctctatccaggttaattataggaaaaaagacatgttatttactatcaaatatgaaagaggggccatcactacagatcccatggacatttaaaggataataaaagaatattatggccgggcacagtggctcacacctgtaatcccaggactttgggaggccgagtcgggcggatcacttgaggctgggactgtgagaccagcctggctaacatgatgaaaccccatctctactaaaaayacaaaatattatcctggcgtggttgtgcatgtctgtaagccagctgctttggtggctgaggcacaagactctcttgaacccagaaggcagagggtgcagtgagccaaaatcatgccactgcactgggtcgctctgggcaacagagcaagactctgtctcaaaaaaaaaaaaaataaagggaatattatcaacaactctatgcccaccaatctgataacctcaacaaaatggaccaattctttaaaagg

SEQ ID NO: 612983 - DNA, 535 bp, Homo sapiens
acagttctgttatagaaaacagtaatgagtctacatattttaagcagaaaatattagagaggtttggtcagacaaacttgtcagaagggcaacaggaagaaaactttaggtgacctgcaggaatgactctcagaacaccactgatttagcccttcagggtagccacggcctctgccaaaagcagctatagaaaaaccaaatgcttctacaacagaggaggaatagctggtgcagcagaaacctggcttccacttgcacctttcagatcttcagcatctgatggatggactctaaattcattcagaagggtcaatacaaggaagtttgggaaacgtagtttttagctttccaggctctgttgtagaggaagtaaccccagaagaaggttgaatcccattccaccccatctgctgtacattgtaaatagttaattagaaattaaaacagtgtattgctgcatgttgagtggacaccattcctaaagtcttatgaatacggyagacttgtcagagctttaattttttttttttttttt

SEQ ID NO: 612984 - DNA, 583 bp, Homo sapiens
cacctctcatttacatgtgtttgatcatccccccgccccattgcattaaamtaccatcatagctcccttttaaaacagtctcaagaggtaatgaccagcttagaatcaaatggtgttaaattgtcttcaatgggctcggctttggggcctgttggacctgctggacccatgtggaagggcctggggaggcagggaaggtgagggggtcactggagaggccagtggcatgtggtagagagtgagaaagataatctgtggcagaggggggcagagtgagctccattccctgtggactctaacccatatctgggtttgcagggtgttgtctatcaaaaggaggaattgcccttcacagggagagtgttagagccactgaggcagaggtagccatctcgctaagtgctcacaagctgcttctgtgaaaggccctcatcagagtccctgcagaccctgagagaatgcagccctggcaccttgttttggtgacttaaagacaaggcagaggttctaacatgacagggcacaaaaataaaactcagaggaaggtggggtctattctgttctttttttttttttttttttt

SEQ ID NO: 612985 - DNA, 583 bp, Homo sapiens
cacctctcatttacatgtgtttgatcatccccccgccccattgcattaaactascatcatagctcccttttaaaacagtctcaagaggtaatgaccagcttagaatcaaatggtgttaaattgtcttcaatgggctcggctttggggcctgttggacctgctggacccatgtggaagggcctggggaggcagggaaggtgagggggtcactggagaggccagtggcatgtggtagagagtgagaaagataatctgtggcagaggggggcagagtgagctccattccctgtggactctaacccatatctgggtttgcagggtgttgtctatcaaaaggaggaattgcccttcacagggagagtgttagagccactgaggcagaggtagccatctcgctaagtgctcacaagctgcttctgtgaaaggccctcatcagagtccctgcagaccctgagagaatgcagccctggcaccttgttttggtgacttaaagacaaggcagaggttctaacatgacagggcacaaaaataaaactcagaggaaggtggggtctattctgttctttttttttttttttttttt

SEQ ID NO: 612986 - DNA, 559 bp, Homo sapiens
gtctacattattgctttttattttcatattggtcattatcatttctagaagagatgtttagtcaaaagaaaggtttttttttgccatttgtagcataaatgaaccagtttctcataagaaatcagtggctttacaaaaacaacaaaaaatattgtaaaagagactagagctttagcaatcagtgtaatatatgggccttatattaatcatgatgtaaacaaactaaatataaaaaagaaatctgtgaggcagttgtactgagtattagctagtattgagcaattgttaattttaagtgtggtaatggtatgatggttatgcttttacaaatgttatcagctagagatgtgtgctaaagtatttacaggtggtatctgacatgtccttaaaaatgctatagcaaaaagtagttggggaagggccagcrgatagatgaaatgagaggcggaagtgctagaattcttgtagtagtggtgaggctacatggaggctcactatactcatctctctacttttatgtgtgttcggaaatttccattttaaaaataatttctttttg

SEQ ID NO: 612987 - DNA, 532 bp, Homo sapiens
aaatgctatagaattacagagggaggagtcattgattccaattagggggttagggaaaacttcaccaatcaagatttcagtgatactcagttgttgcacaatggtatgaaaatgtttaacactactgaactgcactcttcaatatggttaacagagtagttttatattatgtgtttttttaacgtgcaatttaacaaattgatacttagcaaaactttccagttgggcttagactggatagcccaggtcttctcaatagctatccacttccaaactacaatattttaaagaattacaaaagttgttatgaggaatgagaatcatgatagcatttgggcaagatttttaaacctgagtaggattttctcagatagaggtagacaaagagaggtcaaggcaaaaggtagaggaaatggtacaagtaaagacattggtgctgggtaagttgcatccagtgagggtttataytgatgaagggaaggcaggaggaactgagactatgattttcttttattaagataaaatttgcata

SEQ ID NO: 612988 - DNA, 582 bp, Homo sapiens
gtaagaacttcccacatgcttgaccattagtgggagattggcccatggtgactagcattgatttcatatggggaccctcccagtaagggtcttcaggtcacttgagcctcatttgctgactccaaactcatcaatctccttcacccctcttcatgctctctacaagctatcatttctgcaagacaattccaatgaacctagatggacagaagtttctaacttataggccttcacccaagagtcaaaaamcaatatgtttttcttttgtttgttttgttttgagacagggtctcttttgttcaggctggagtgctgtggtacaatcatagttcactgcaacctggacctcccaggctcaagtgatcctcctgcctcagcctcccaagtagctgggaccatgggcatgcaacatcacacctggctatttttttttctttttttttttgggtagagacagggtctcactatagtgcccagactggtccagaactcctgggctcaaagcagtcctcccatcttggccttctaaagtgctggggttataggcatgagccatcacacccagctagctatgtcttttat

SEQ ID NO: 612989 - DNA, 530 bp, Homo sapiens
gacaactggctgttttaagtctcctttgtggatgaacccagggaaacttacttgagattgcagttggaggtatttaggtcagacatgaagaatcatgttctgatagtaggacttttataatttcagaatgagcaacttattctacaaagactctttagaaaacacagattctaatctttatwgaaaattgatcagcaataaaaggtctggaaaatatcttgtaggaggaaggactacagacctgggcaggtttattttgtagttgagaaaaccaaggttgagtgggtcagggttaccatgtagaaatcctggcaaagcaggcactggcttgcctcttgtagcccctaaggacagaacaagtgcctgtgtgtgtgtgtgtgtgtgtgtgtgtgtgtgtgtgtgtgtgtgtgtgtgtgtctgtgcgtttatgtgctggggatgatgcagggagggagggttggttatgagaagacaaatttcagcacaacaggagaaagactttctagttggaattggtacccaatagaaag

SEQ ID NO: 612990 - DNA, 528 bp, Homo sapiens
ggaagccctctctttcccactgttgctttttccatggaaatgtataaatcttagtatttcaatttgtcaagtagcagggacactctaaaatttttaggaaaatgaggaggctgtggctacagccctggttttcctgttatcctatctcttctaactcagtagcaagaaaagcaaatgaattagcctggtgtggggctcttttctgggaggtcaggaccctggccaaggttcctcaggggcagtgctgctgttgggatggctgtccatgctgctgagccagggctttctactgaatagactgcctgtggtttagtctttcaagactgtgttcctaacgggaaacatttggcccagcttctcagtactttccaaagacacagacagacatcaaattataggrtcaaaatcatgcttgagcaggacttagaagcaactgtagaagatcatttggtataggcatggcaagtctgtggcacaaaacacttcattctagtgcatggggcagacacagctaatcgataacaacac

SEQ ID NO: 612991 - DNA, 637 bp, Homo sapiens
ttcattttcactctgattaatattccatagggtgatracgcaaattttcttattgggtggactcaaagagtagcaaagaatgcaaaaccctcacaaaggcacctctgaaaagctggctcatggcctcacaccatgaagtcataccccaaaacaatctatttctgatgtcagttgtggcaccttcatctttataaagttaggtctatagttctgtagttgggtttcttatttaaacacaacaagacaaaagaaacaacaggaatgcctggaatagggttggccgggagaaggggaagacttaagggagaatttcagcagacactgtgaacaagataacctagtatcccttcctttcttccttagcttgtttccacagtaaagctaaactctgtggaataaaatcctgtggtcccacaacgcaccccacaataacacattcacaagcaagggatggctcccatgctctgcccagctcccgtctgtgggctgaagtttttttcttcttcagaaggaagggtgtgtaactaggaagtgactttgagactttctcagtttagtggatggccagctgaataagtgttttagtattgttacataacagtacatatggacttaaaaatataatttttgttcaact

SEQ ID NO: 612992 - DNA, 628 bp, Homo sapiens
gttgttgaacttcttctctaaagttgttcaaaattttccctttttatcattttaacatcaagagatttctagtgatgtctcttctttcatttgtgatataggtaatttgtaactccttttgaaaaaaccaatattattatagatttttattgatttttcaaggaatcattgtcatgcagttatataatatttgtcttattatttatgtgtgtcwgattgcaagtttgtattactgttttgatatattacaatccattttacaaaatgtccaaactgcttagcagaattcatataatctgaagaatgttgctgggggctgggcactgtggctaatgcctgtaatcccagcactttgggaggctgaggtgggtggatcacctgaggccagaagttcaagaccagcctggccatcatggcaaaaccccatttctactgaaaatacaaaaattagctgggcatggtggcacatgtctgtaatcccagctactcaggaggctaagaaccaagtattgcttgaacccaggaggtggaggttgcagtgagccaagatcacgccactacactccaccctgggtgacagagtgagattctgtctcaaaaatatatatatgtaacatatatgtatata

SEQ ID NO: 612993 - DNA, 628 bp, Homo sapiens
gttgttgaacttcttctctaaagttgttcaaaattttccctttttatcattttaacatcaagagatttctagtgatgtctcttctttcatttgtgatataggtaatttgtaactccttttgaaaaaaccaatattattatagatttttattgatttttcaaggaatcattgtcatgcagttatataatatttgtcttattatttatgtgtgtcagattgcaagtttgtattactgttttgatatattacaatccattttacaaaatgtccaaactgcttagcagaattcatataatctgaagaatgttgctgggggctgggcactgtggctaatgcctgtaatcccagcactttgggaggctgaggtgggtggatcacctgaggccagaagttcaagaccagcstggccatcatggcaaaaccccatttctactgaaaatacaaaaattagctgggcatggtggcacatgtctgtaatcccagctactcaggaggctaagaaccaagtattgcttgaacccaggaggtggaggttgcagtgagccaagatcacgccactacactccaccctgggtgacagagtgagattctgtctcaaaaatatatatatgtaacatatatgtatata

SEQ ID NO: 612994 - DNA, 460 bp, Homo sapiens
ttgaaaaagttattatctaaagatctggaatccatagaaaggagtgtctaggttcaggtaaggggttgtgaagaccaaggttttattatgttgatgaagtctcataggtkgtacccttagagacaacagatggcaaatgtttcccattcagacatttaaaaaatgctagactctgagctaatcactttggggtccacaaaagacctggaaaaagaagaggattctttagaaaatgtaaattttccctgcaagacacagctttgcagggccatttcaaaatgtgtcaaacaaagttatttttgggtaaaatatttcgatttctttcaaagcctgctatctgtcatgtgatgctataatagagttaggttggaatgtggtgtcttatttctacaaagagtctgttttgtcatgcttaagatctctgttttcatgtgaagtctggccagttgttcctgaattc

SEQ ID NO: 612995 - DNA, 548 bp, Homo sapiens
gggaggccgaggcaggtggatcacctgaggtcaggagtttgagagcagcctggccaacatggtggaaccccgtctctactaaaaatacgaaaagtagccaggcatggtggcaggcgtctgtactcccagctackcgggaggctgagacagaattgcttgaacccgggaggcggaggttgcagcgagctgagatcacgccactgcactccagcctgggcaacagagcaagattctgtcaaaaaaaaaaaaaattctttcctttccatagtaaattatgtagaagacattttccctaagcagcacctggaggaggggaagctctgacaaaatcctggcccagatggaaccactaactgcaccagcctgagccccctctttcctacgctcctttaagagaacttccaccaagacaagaaaatcctgttgagagaagagctggactccaacagtgaactattctcctaaggcagaatcctgcaaacacacgcaaatccacactcatccttttgctggtgaagagagagcactaatggcagaatgtacatacc

SEQ ID NO: 612996 - DNA, 548 bp, Homo sapiens
gggaggccgaggcaggtggatcacctgaggtcaggagtttgagagcagcctggccaacatggtggaaccccgtctctactaaaaatacgaaaagtagccaggcatggtggcaggcgtctgtactcccagctactcgggaggctgagacagaattgcttgaacccrggaggcggaggttgcagcgagctgagatcacgccactgcactccagcctgggcaacagagcaagattctgtcaaaaaaaaaaaaaattctttcctttccatagtaaattatgtagaagacattttccctaagcagcacctggaggaggggaagctctgacaaaatcctggcccagatggaaccactaactgcaccagcctgagccccctctttcctacgctcctttaagagaacttccaccaagacaagaaaatcctgttgagagaagagctggactccaacagtgaactattctcctaaggcagaatcctgcaaacacacgcaaatccacactcatccttttgctggtgaagagagagcactaatggcagaatgtacatacc

SEQ ID NO: 612997 - DNA, 548 bp, Homo sapiens
gggaggccgaggcaggtggatcacctgaggtcaggagtttgagagcagcctggccaacatggtggaaccccgtctctactaaaaatacgaaaagtagccaggcatggtggcaggcgtctgtactcccagctactcgggaggctgagacagaattgcttgaacccgggaggcggaggttgcagcgagctgagatcacgccactgcactccagcctgggcaacagagcragattctgtcaaaaaaaaaaaaaattctttcctttccatagtaaattatgtagaagacattttccctaagcagcacctggaggaggggaagctctgacaaaatcctggcccagatggaaccactaactgcaccagcctgagccccctctttcctacgctcctttaagagaacttccaccaagacaagaaaatcctgttgagagaagagctggactccaacagtgaactattctcctaaggcagaatcctgcaaacacacgcaaatccacactcatccttttgctggtgaagagagagcactaatggcagaatgtacatacc

SEQ ID NO: 612998 - DNA, 620 bp, Homo sapiens
gaaaaggtatttaattacattatrtggaattcatattcaatttcatgggaaaaagcaataattggttggcttttgtttttaaatgggaatagccactcattgggaaataattactataatttcaatttttattttactttagatcattctatgatgaaagcagttatcaaaaaagtcctccagaatggaaggagtgccaaatcagaggtatatcatgttttatttctccagaaagaattcttatttaattgcttttcttctgggatctcactgtactgcccagcctggcctcaaacttctgagctccagtgatcttcccccttcccagcttcctaggtagctaggactgtaggtatatatcgttgtgcccagcttttcgtctgtttttaataaaatgaaactattaaggcacttttctgccatcttaaatttacagtcaaatcaaatgtcttttctgtttttgtaaataccgtatgattctttaattttgggtcccagaactgctgattgcaaaccttttattaacatagagtatcttaacaatttccatttaagatgtagccctcataaatgatctgtaactgaaatatagtgtttattctgtctcttttagtaccagt

SEQ ID NO: 612999 - DNA, 593 bp, Homo sapiens
cactaaatgcctacctcgaaaaggctgaaagagcacaaataaacaatctaagctcaaacatcatggaactggacaaacaagaacaatccaaacccaaactcagccgaagaaaagacataactaagatcagaggaactaaatgaaattgaaacaaaaagcaacacaaaagataaatccaacaaaaagctggctctttaaaaagataaataaaattgatagaccattagtgagattagccaataagagaaagatcaaaataaactcaattagaaatgaattgggagatattgctactgataacacaaaaatacaaaagagtattcaaggctactatgaataaactggaaaacctagagaagataggtaaattcctggaaatgtatagccctcctagattaaaccaggaagatatagaaactcttaacagacgaacaacaagcggcaagattgaaatggtaattataaaactgccaacaaaaaaagttctaaatyggaccaattcacagccaagttctatcagacattcaaagaattggtaccaatcctattcattgcacaggatagaaaaagagggaatcctccctccatcattc

SEQ ID NO: 613000 - DNA, 633 bp, Homo sapiens
ataaatgtatacacatatatacaaatacacatgtatatatgcatatacacttatacatatatcaggctactattttttctgctatccattcactgtgagacttgagaaataaattcatttatttttactgcaaatcatttttaattgcttatttttagcagagtggtctgaggctgtcaccgtttacatgtaattcaactttaattctgcaagtatttgatgtctaggatgcgtgaaatccttttctataacattattcttaccatcagaattgtgtatatgttaataaattagtcatgcaaggaataattttattactttataatgtaaatattatacttaattattataattaaaatttgtatgagaaactgatgtctagagaacataaatwacaagaattttgttgggatttgctcacaatcatttcaattacctctgttataggttatggtatgtatatagcagtgctgaaggaagtatttgttaaattaatgaaaattgaatgagatggtaaagccaatgctccgtaccaaggttgtctgatgttaaagcctgaacataataaactttctcatttagtacattatctgttttccatcaaatatcaatctaagatgtactcagctctgc

SEQ ID NO: 613001 - DNA, 531 bp, Homo sapiens
caaagtgctgggattacaggcatgagccaccgcactcagcctctgagatgtttttaacatgaagkatgctgaattttatctaaggcctttcctgcagctattgatgcagaatcaatgatcgactcttatgccctcattgctctgacaccacttttatggtcactaacaactttttttcttgccatatcctgtcatttcttcttcctggcatctttctaaaccttaaagggtagtcgatagttgtgaactgcgtccttctggaacattctgtgcagttttcttctacctctttagctgcatattcttagtctctattgctaaatgccacccccttttatttaaaattagagtattccagtcttgccagtctgctttctttgctttatttatactattacagtatatgataatatcattttgtgattttaaatatctcttatattatacctttaactttatatcatcattaaaaaccctacaactgaatttcaaacatgtatattaaactgcctatattacactgtttcaaaa

SEQ ID NO: 613002 - DNA, 531 bp, Homo sapiens
caaagtgctgggattacaggcatgagccaccgcactcagcctctgagatgtttttaacatgaaggatgctgaattttatctaaggcctttcctgcagctattgatgcagaatcaatgatygactcttatgccctcattgctctgacaccacttttatggtcactaacaactttttttcttgccatatcctgtcatttcttcttcctggcatctttctaaaccttaaagggtagtcgatagttgtgaactgcgtccttctggaacattctgtgcagttttcttctacctctttagctgcatattcttagtctctattgctaaatgccacccccttttatttaaaattagagtattccagtcttgccagtctgctttctttgctttatttatactattacagtatatgataatatcattttgtgattttaaatatctcttatattatacctttaactttatatcatcattaaaaaccctacaactgaatttcaaacatgtatattaaactgcctatattacactgtttcaaaa

SEQ ID NO: 613003 - DNA, 531 bp, Homo sapiens
caaagtgctgggattacaggcatgagccaccgcactcagcctctgagatgtttttaacatgaaggatgctgaattttatctaaggcctttcctgcagctattgatgcagaatcaatgatcgactcttatgccctcattgctctgacaccacttttatggtcactaacaactttttttcttgccatatcctgtcatttcttcttcctggcatctttctaaaccttaaagggtagtcgatagttgtgaactgcgtccttctggaacattctgtgcagttttcttctacctctttagctgcatattcttagtctctattgctaaatgccacccccttttatttaaaattagagtattccagtcttgccagtctgctttctttgctttatttatactattacagtatatgataatatcattttgtgattttaaatatctcttatattatacctttaactttatatsatcattaaaaaccctacaactgaatttcaaacatgtatattaaactgcctatattacactgtttcaaaa

SEQ ID NO: 613004 - DNA, 633 bp, Homo sapiens
tctctttcctcatgtatcaagttcataagtattctcactcctccacatcttccctaccctttcacatttgctgattttattacatgccatgtcttctatctatcatctgttggcatttgagtgatgagattatcttcctttctctctgataatttyggaagaatctatccatttggcatttttcctgcccaactctcccacatatttctgactttattgataaaagcctacagacctattcttgattggtatcattctatctcagagaggaacaagggaaattagcaaaaactgagaatcctctttagttgataggaagaagagaaagctcaggtatatttataaagtaatcattttatctcatcacaggggcagtggtataagttgtatgggtgcaataaaaaaggaaggtatgtttgctagattacatgattctgaattaagatatgaagaacaaattgaagttaatcagataacatggaatatcaagtcatttcagatagaagtaatattatacacagtaggcgaggtttgagaatataggttgcaaatttgtagaattagttttgtatggctgaaatttactatgtatacactcacgaagcaaggttaaagaaattagaataatcttga

SEQ ID NO: 613005 - DNA, 633 bp, Homo sapiens
tctctttcctcatgtatcaagttcataagtattctcactcctccacatcttccctaccctttcacatttgctgattttattacatgccatgtcttctatctatcatctgttggcatttgagtgatgagattatcttcctttctctctgataatttcggaagaatctatccatttggcatttttcctgcccaactctcccacatatttctgactttattgataaaagcctacagacctattcttgattggtatcattctatctcagagaggaacaagggaaattagcaaaaactgagaatcctctttagktgataggaagaagagaaagctcaggtatatttataaagtaatcattttatctcatcacaggggcagtggtataagttgtatgggtgcaataaaaaaggaaggtatgtttgctagattacatgattctgaattaagatatgaagaacaaattgaagttaatcagataacatggaatatcaagtcatttcagatagaagtaatattatacacagtaggcgaggtttgagaatataggttgcaaatttgtagaattagttttgtatggctgaaatttactatgtatacactcacgaagcaaggttaaagaaattagaataatcttga

SEQ ID NO: 613006 - DNA, 336 bp, Homo sapiens
caacacgtgatgtatactggtaggctcttcttcawatcagtcttcttttctttctgagaacacaactaaattatatttctcaactattttgtagttagacggggtcataagcctaaaatatggccggtagaatattagcttgtattgtgtccaggtcttaagtataaaagctttccatatgttatgacttacaattatttttccttaacctggatgggtgttgaaaaacagagagtcccaagaagaaaatattcagggtccctgaatcactctttggaaggtagacctactctcatcaggaacacaaattttggaatttatgtgaatgaaaaataa

SEQ ID NO: 613007 - DNA, 336 bp, Homo sapiens
caacacgtgatgtatactggtaggctcttcttcaaatcagtcttcttttctttctgagaacacaactaaattatatttctcaactattttgtagttagacggggtcataagcctaaaatatggccggtagaatattagcttgtattgtgtccaggtcttaagtataaaagctttccatatgttatgacttacaattatttttccttaacctggatgggtgttgaaaaacagagagtcccaagaagaaaatattcagggtccctgaatcactctttggaaggtagacctactctcatcargaacacaaattttggaatttatgtgaatgaaaaataa

SEQ ID NO: 613008 - DNA, 531 bp, Homo sapiens
gtatttgtacagtagatcctcaggtttttaaacaactggatgtgacttagtatgcaattatagttgtcacatagtaagacatgagcttttactgaacttctatagattagttatcatagatgttttagagctgtttgtaaagttaaggaatccagattgtgtgacaatgttcacaactactcttgtatgtctttctaaatttctttttgttatggactttctaaatttccttttaatatgtacgatatcattagagtttcttagttgctggcaacagaactgactgatcaactggacagatgccaccaccggatagaaaccaaagtaggaatagcaccaagaaagtttggcgagcaccacaccattattgcctggtaataccatcaccagtgagaatcaaatatgaccacccacckcctttctgctttgtacctttgcatcacttgcttaacaaagtcccagctgggcatccacttggtcaagtctaagtaaagtccccatgttccaatatccagagatgtagataaaagg

SEQ ID NO: 613009 - DNA, 530 bp, Homo sapiens
gggcgaacatgttaggaagatggatttaatagcctttcttttgatgtcattcgtaaagtcatatctgaaatatgtgattcgatatatcactcatgagacacaaagccagggaagaatgggcttctaaagtcagatgcatgtactgaaacataatcttcaccttgctacctcaggacaaattttaggagaaatttcagagctatgacaagtcatatctattacagttgactgcctgtaatttccataagatttttttgagtatgtgtataacataaaaaagtgaaaattcattttctttttaagaaaatacataaagcaactgtgaatgggagttcactcatgatttggctctctgtttgactgttaytggtgtataagaatgcttgtgatttttgcacatcgattttgtatcctgagactttgctgaagttgcttatcagcttaaggagattttgggctgagacaatggggttttctagatatacaatcatgtcatctgcaaacagggacaatttgacttcctcttttcc

SEQ ID NO: 613010 - DNA, 530 bp, Homo sapiens
gggcgaacatgttaggaagatggatttaatagcctttcttttgatgtcattcgtaaagtcatatctgaaatatgtgattcgatatatcactcatgagacacaaagccagggaagaatgggcttctaaagtcagatgcatgtactgaaacataatcttcaccttgctacctcaggacaaattttaggagaaatttcagagctatgacaagtcatatctattacagttgactgcctgtaatttccataagatttttttgagtatgtgtataacataaaaaagtgaaaattcattttctttttaagaaaatacataaagcaactgtgaatgggagttcactcatgatttggctctctgtttgactgttactggtgtataagaatgcttgtgatttttgcacatcgattttstatcctgagactttgctgaagttgcttatcagcttaaggagattttgggctgagacaatggggttttctagatatacaatcatgtcatctgcaaacagggacaatttgacttcctcttttcc

SEQ ID NO: 613011 - DNA, 587 bp, Homo sapiens
aaaacttgactgtttgaactaaaaagaaatgaattcagcaaagagaaggataccacatcaacaggcaaagattagtcaatttccatagagcaacaatgaacaatatgaaaagaaattatgaaaacaagtctatttataaaagcctaaaaaataataaaatatttagaaattaaccaaggagctcaaaaacctgtacaatgaaaacaataaaaattgctgaaagaaactaaaaaagacataaatggaaacacatcccatgatcataaattggaagacttaatattattaagatgtccacactgcccaaagcaatccatcaatttactgtaatccctatcaaaatcctcatgatttttttttgcagaattagaaaagcccatcctaaaattcatatacaatctcaaagaaaccccactccccaaaacaatctttaaaaagaacaatgttggaagactcaaatttcctcatctcaaaacttactacaaagctacagtaatcacaatatcatggcaytggcataacaacaaacacacagtccaaatggaatagaatagacagcccagaaataaccttgacacatatggtca

SEQ ID NO: 613012 - DNA, 536 bp, Homo sapiens
caaataggaacagctccagtctatagctcccaatgagaccaatgcagaggcgggtgatttctgcatttccaaatgaggtacccagttcatctcattgggacaggttagacagtgggtgcaagccatgcagtgtgagcagaagcaggtggggcgtcatctcacccaggaagtgcaaagggtcagggaactccctacccaaccaagggaagccatgagggactatgccatgagagatcgtgctatgtggccaaggtactacgcttttcccatggtctttggaacccacaaccaggagaatccttcaggtgcctacaccacaagggccctgagtttcaagcacacaacwgtgcagccatttgggtagacaccgagctagctgcaggagttttgttttgttttgttttgttttgtttttgtaccccagtggagcctggaacaccagcaagacaaaacttttcactcccctggaaaggggactgaagccagggagctaagaggtcttgctcagtggatcccacccccacagagcccagcaa

SEQ ID NO: 613013 - DNA, 616 bp, Homo sapiens
ggatttgtcaaaactcagggaaggagagatagagatgtattcattctattttttattattttatttgatatctcatttaagtcctatagaataatgatatagaaatggtattagatatttatgaaatttttgacttacatttattttattactgtgttttcacttaacaaatctaaagtcagtttcaaaaaacattatgaccagctatagtatctttaaaagtaygttttattgtaccatatttcttttttatatatagcaactgatacttgtattattgtttctccttcctaagccctcaaagcaatttctctcatttcctttttttttttaaaggatgattctctcttggtggctcaaagtgagatagctagaagctgcttacacagccagcagttaccttcggtctgcttggttgaacagcagagattgaaattgtaagtagctattttctatttccctttttgtacttttcccataactgctgttttaccagagtggaatcattgctttccctctcatgacacacatctcccctgacattacacatgataaccgtatgtctgatagcataacaaagaaagtagcaataagacttagttccaaaagttaacca

SEQ ID NO: 613014 - DNA, 616 bp, Homo sapiens
ggatttgtcaaaactcagggaaggagagatagagatgtattcattctattttttattattttatttgatatctcatttaagtcctatagaataatgatatagaaatggtattagatatttatgaaatttttgacttacatttattttattactgtgttttcacttaacaaatctaaagtcagtttcaaaaaacattatgaccagctatagtatctttaaaagtacgttttattgtaccatatttcttttttatatatagcaactgatacttgtattattgtttctccttcctaagccctcaaagcaatttctctcatttcctttttttttttaaaggatgattctctcttggtggctcaaagtgagatagctagaagctgcttwcacagccagcagttaccttcggtctgcttggttgaacagcagagattgaaattgtaagtagctattttctatttccctttttgtacttttcccataactgctgttttaccagagtggaatcattgctttccctctcatgacacacatctcccctgacattacacatgataaccgtatgtctgatagcataacaaagaaagtagcaataagacttagttccaaaagttaacca

SEQ ID NO: 613015 - DNA, 459 bp, Homo sapiens
ttacttagagtgtcatctgtttctgggtggggaagggaatggatggaagagggaaaaatatcaggttggataacctgatggcacaactagtgacaaaaccactacaaacaagagatttaattgatattgaagattttctttaaataccacagtattttgcaaacaaaatatatgacaccacagttatttcacaggataaatatcctaatttctcttacatactgtacatcaagaacttgattaaaaataattatacatttaattagtgcagatgtacatgcaacccatgtgacatggatataaagtaagcatagagaaaacactactggaagcacatctagatgccaattcaggaagatytggttgtatatttacttttaaatagaaaaatccattttcaactgagacctaaaataaatggaacacagctcttttcttcagtgaataccaagaagaatg

SEQ ID NO: 613016 - DNA, 202 bp, Homo sapiens
agttgacccttaaacaacacgagtttgaactgggtccacttatatgtgaattttcattcacttctgccacccctgagacagtaagaccaagccctcatcttcctccacctcttcagcctacttaacatgamgaccatgagaatgaagaaccttatgatgatccacttccacttaatgaatagtaaatatattttgtcttcaa

SEQ ID NO: 613017 - DNA, 566 bp, Homo sapiens
ttcaactcccacatgtcatgggagggacccagtgggagataattgaatcatgggggcagtctttcctgtgctgttctcgtgatagtcaataagtctcacaagatctgatgatttcattgaggaggagatcccctgcacaggttctctctctctttgcctgctgccatccatgtaagatgcaacttgctcgtttttgtcttctgccatgattgtgaggcctccccagccatgtggaactgtgagtccattaaacctcttttctgtttaaattacccagtcttgggtatgtctttattagcagtgtgaaaacagactaatgcactattgcttcttccactcaatttccttctgtacwctgaagtaatgctcatctcccgcatgggcagcaaattgaataccattcacagctatgttcgttatatattgctatgtaacaaacaagttcaaaaccatggcttataatagcaatgatttattaattttctgaaagttggccggatatgttcttttgctggtttcactgaggcttattctaagacatgccttttggtgaattattcatgtat

SEQ ID NO: 613018 - DNA, 476 bp, Homo sapiens
ataagtgatcatgtattgcacctaggtaacatttttgtctgcaacctaaaagaatgacatttaaaaagcaatcagataaaccacagttcacttttttttttttttttgagacaaagtttcgttcttgttgcccaggcaggagtgcaatggcgcaatctgagtgcaatggcgcaatctcggctcaccgcagtctctgcctcctgggttcaagcaattctcctgcctgccccagcctcccaagtagctgggattacargcatgcgccaccacacccagccaatttttttttttttttctacttttagtagagacagggtttctccatgttggtcaggctggtctcgatctcctgacctcaggtgaccctcctgcttcagcctcccaaagtgctgagattacaggtgtgagccaccacgcccagcccacagttaacttttgttccaattaatgttttaggaaactgcaaggaagaacag

SEQ ID NO: 613019 - DNA, 476 bp, Homo sapiens
ataagtgatcatgtattgcacctaggtaacatttttgtctgcaacctaaaagaatgacatttaaaaagcaatcagataaaccacagttcacttttttttttttttttgagacaaagtttcgttcttgttgcccaggcaggagtgcaatggcgcaatctgagtgcaatggcgcaatctcggctcaccgcagtctctgcctcctgggttcaagcaattctcctgcctgccccagcctcccaagtagctgggattacaggcatgcgccaccacacccagccaatttttttttttttttstacttttagtagagacagggtttctccatgttggtcaggctggtctcgatctcctgacctcaggtgaccctcctgcttcagcctcccaaagtgctgagattacaggtgtgagccaccacgcccagcccacagttaacttttgttccaattaatgttttaggaaactgcaaggaagaacag

SEQ ID NO: 613020 - DNA, 476 bp, Homo sapiens
ataagtgatcatgtattgcacctaggtaacatttttgtctgcaacctaaaagaatgacatttaaaaagcaatcagataaaccacagttcacttttttttttttttttgagacaaagtttcgttcttgttgcccaggcaggagtgcaatggcgcaatctgagtgcaatggcgcaatctcggctcaccgcagtctctgcctcctgggttcaagcaattctcctgcctgccccagcctcccaagtagctgggattacaggcatgcgccaccacacccagccaatttttttttttttttctacttttagtagagacagggtttctccatgttggtcaggctggtctcgatctcctgacctcaggtgaccctcctgcttcagcctcccaaagtgctgagattacaggtgtgagccaccaygcccagcccacagttaacttttgttccaattaatgttttaggaaactgcaaggaagaacag

SEQ ID NO: 613021 - DNA, 592 bp, Homo sapiens
gattcttcattagtggctgcaggacgtctctccaccgtccctatcttgactgtggagtttggcagctgaggcatggtgctcctagtctgatcctgctctgtgttggatcctgtggcttagctcttggggatgagcttggatagttccagtcccaggagccatgtggatatgacctcaatggatgggcaaagttatatgaatccctatrccaaggcctgggccaggccttcctgctgactctctttccaagccattatgccagctccttcctgccctcctccccaatcaacgccattagcagtgagaatggaggagatcctcctggccttctctgtagcctgatcgtccacagcagcttttcattgcaacccccttgcaccccaccccacattctcttttgcttcagcctagaccgtttcgccagtcttcctgctaaatacagtaagaatgttacggttttcctgccttcctttctgatggactctttacgaggaaattacagacgttccatctaatgctggtatccacaagaaaaaaatacccattcaggtgctctaaagcagctgccacaggtcaggaggaagtggtcttg

SEQ ID NO: 613022 - DNA, 563 bp, Homo sapiens
ctctttgtctgccactctaactttgccacttatattaatttcacaaatcttgtttctagaattaagatctgccatctgacttctataattattccatcatacccttgctgtcaatgaacctaattctgaaatggtatcgcctgctgtgattgctggcctgtggaggagagctaccactaagcttttcaataactactaytccccactattagtacatttctcatttctctaataaaaagtatccatttttgtcagtttgtggatgttctggctttatataatattgtctagttttgcaaacccaactttttggtctgcttctttctttcttccccatctactataacaatttcagaatttataagtcacttaatgtggaccatctcttgctccaagtttcctatgggctatccttgcaaagtattagcactgtctcttgcagtctttgctgtaatatgcattacattccattcccttgatccagcaccctcagtatccagtttaattgtacatgtcttagttcatgacagtgaatttaagctagatcctgcagctccatataa

SEQ ID NO: 613023 - DNA, 603 bp, Homo sapiens
attgatattttagacttacttggttttttcctagattagagtgttgtgcaaaacaacaggtagggtgagaacaacttttataatttactcctatctcctgaagtaygttaaaaggaatctaaatcagaattctagcaatacctcctgaatttcatggttcattttcccagttatctttacctagtttctcttcaacactctcttaagcttctttttgccaaatagcctaaccctccctctgtaagattttatttatctagcccctattcacttggttcttactatatttctctcccttttttctttcagcttttacatggattcaccttctttttctctgggcttttcactgattctgtttcataaatgagatacaataatggtgggatgattcacagatattctcgaagtcctcatttaaaaaatctatatacatattgcaaataacatttgttactgttaaacttattttgagaatgcaaacatgtttcctgtcaacttaaataatcactgacatttactttttaacatataatagcaaacactatttcaagcatagtattttatatattttatcctaagtacttagttctaagtacttgt

SEQ ID NO: 613024 - DNA, 540 bp, Homo sapiens
gtttgttagtaaaaagatgtacattgttattttattataacatatatatatacaggaagatgatttcaaagtggtccgggatcttttcctatgatttgacataatccattagacagatttagagttcaatatcattgaactcaaagggcccggggttggactggggaaggtaatgtgagaaggagggtgtaatcccagggtcttgccaatttttccctcaacactgtcttctgctcctttgtaacagcaaatctgagcatagatacgtggtgggagtaacactacttaaatgcatcaaacaactgtacccaccaatggcattttagcctyagacttaatataacactttacacctgaaatcatcttgtaatactatttttcagaataagatattttatgttctgaagttgataattcttgctagtgatttggtaaatgttaaatatttttcaatactttataggtattaataataaaaagtaaaagtcatattttaacaaccatattttcttttaaagtctctgaaattgttgctttctc

SEQ ID NO: 613025 - DNA, 210 bp, Homo sapiens
ccactcccaccacatactgtttcttcatatccttcaatttcgaacacttaatcaacacagaaaaatagtctactctatttccataggaagaagttttattttaatatttattcctgcaccctgaaattcaattttccatgtctttaggcaggtaagyaccatgaccaatctgggccctgtcccacagattctgggagaagactggcccct

SEQ ID NO: 613026 - DNA, 605 bp, Homo sapiens
tgactaaatggacaatttatcaggagaacataacatttataaatgtataaacacatacctaacaactatgtctcaaaatacataaagaaaattgagaaattaaraagagtaatacacagttccaaagatagagtataaattattaagactcttgaaattattaagactcttgtctcagtaattgatataaaaactagacaaaatagctgcaaaacatagaaggtcttaataatcttaataacactaccaaccagctagaggtaattgacatttataaaactataaccaagaactgaagaatacacattctttgtaagtatgcatgctacagtcaccaagatagactacatacaggctcataaagtaagtctcaataatgtaaatgcattggaaataattgaccaaaatagaattcacagaaaatcccaaattcctggaaattaaaaattgttaaataatatatgggtcaaatggaaatataaatttgttgtaaatgacagtattgtattttgattggatcatctccagtgttgcttatttgtatattttttttctgcaaattatatctaatgtagcccaagctatccgctgagctgtacccaaca

SEQ ID NO: 613027 - DNA, 605 bp, Homo sapiens
tgactaaatggacaatttatcaggagaacataacatttataaatgtataaacacatacctaacaactatgtctcaaaatacataaagaaaattgagaaattaagaagagtaatacacagttccaaagatagagtataaattattaagactcttgaaattattaagactcttgtctcagtaattgatataaaaactagacaaaatagctgcaaaacatagaaggtcttaataatcttaataacactaccaaccagctagaggtaattgacatttataaaactataaccaagaactgmagaatacacattctttgtaagtatgcatgctacagtcaccaagatagactacatacaggctcataaagtaagtctcaataatgtaaatgcattggaaataattgaccaaaatagaattcacagaaaatcccaaattcctggaaattaaaaattgttaaataatatatgggtcaaatggaaatataaatttgttgtaaatgacagtattgtattttgattggatcatctccagtgttgcttatttgtatattttttttctgcaaattatatctaatgtagcccaagctatccgctgagctgtacccaaca

SEQ ID NO: 613028 - DNA, 605 bp, Homo sapiens
tgactaaatggacaatttatcaggagaacataacatttataaatgtataaacacatacctaacaactatgtctcaaaatacataaagaaaattgagaaattaagaagagtaatacacagttccaaagatagagtataaattattaagactcttgaaattattaagactcttgtctcagtaattgatataaaaactagacaaaatagctgcaaaacatagaaggtcttaataatcttaataacactaccaaccagctagaggtaattgacatttataaaactataaccaagaactgaagaatacacattctttgtaagtatgcatgctacagtcaccaagatagactacatacaggctcataaartaagtctcaataatgtaaatgcattggaaataattgaccaaaatagaattcacagaaaatcccaaattcctggaaattaaaaattgttaaataatatatgggtcaaatggaaatataaatttgttgtaaatgacagtattgtattttgattggatcatctccagtgttgcttatttgtatattttttttctgcaaattatatctaatgtagcccaagctatccgctgagctgtacccaaca

SEQ ID NO: 613029 - DNA, 622 bp, Homo sapiens
cacaaatagagaaattacaattatctgtaccaaccagtcagagttaaccactactaaaatttagcatgtgtagtcataattttctttttacatgtaatcaagattatatttttcataatgtacattcttttatattttaggaaattatttttatatgtttatgcatcctttgaagaggtatatatattacatacacatattataaaatatttaatcaatacatatatttgcatatatatttagtttctcatttgtaacaattatcaagagtcctttgactaatctccacataagaaactattttggaatacatttagttgcattattacacaaatctctatgtatgtaaatggtttgggaccaaaagtgaaatgctgaatgatttgattatggatgttttaaagacttcaatacatatttcaaaattttgattcagaaaaatctgtgcaatttttcctcttacctataatgtgtgagtgccagcatcagtgtattgaaatrcaatgcagaaaattaagtgaatccttcacctcaattttacagagtaggtgtaatgcgaaagagttacgttttgaattttgaagtaaaaactgaaatgtaatggtgattttaaatttaaaaa

SEQ ID NO: 613030 - DNA, 594 bp, Homo sapiens
cttctaataaaattacaatataattattttatatttcctcctaactttgttttttaattgatatataggtttcaaaccatgcagaatttatttctgtgcacgttgcaaagtgaacctctaacttaattttacaattcttacatctatacagatcacaaattatttttgtgttataaattgaaraacctattctatttttattttaaatgtgactttattatatactaaactctcatatactcttttaaatttaaactctttttaattttcttgactttaaattatatctctggtagaatatatctaccctcactgttcttcgctttaaaaattatgctttttttttggacgtcgagatgggcggatcacgagctcaagagatggagagcatcttggcctacatggtgaaaccccatcactactaaaaatacaaaaattagccgggtgtggtggcgcgtgcctgtagtctcagctactcaggaggctgaggcaggagaatcgcttgaacccaggaggcagaggttgcagcgagccaaaaaagcgccaatgcgctccagcctggcgacagagtgagactccatctaaaaaaaaaat

SEQ ID NO: 613031 - DNA, 613 bp, Homo sapiens
gacataatttgttcttttttatggctgcatagtattccaaggtgtatatgtaccaaatttgatttatccagtccaccactgatagacatctaagttgattctatgtctttgctattgtgaatagtgctgcaataaacatatgagtgcatgtgtttttaaaaawtttttttctgtgatctgggtttacttctgttatcatttgattttatcttgcagagattccgtagatatttcttgtactttagatctgtttgcaatacattatctcagctttgtctgaaaaacgtatttatttttgcctttacatttgaaaacattttttctggatgaaaattctagattgaactttcttcctccagcactatattaattcatttcattgtctcctggtttgcattgtttctgataagaagagaaatgactaatgcttcttattattgttcccagtttataatatgcctttacctactttggctgcttttaaaattttctcattaccattttttttagttaaaaataaactttttattatagaaacatttgaatatattcaaaaaaataaagacaccagtataatgaactcccacttacctatcacccagcagtaataatt

SEQ ID NO: 613032 - DNA, 613 bp, Homo sapiens
gacataatttgttcttttttatggctgcatagtattccaaggtgtatatgtaccaaatttgatttatccagtccaccactgatagacatctaagttgattctatgtctttgctattgtgaatagtgctgcaataaacatatgagtgcatgtgtttttaaaaaatttttttctgtgatctgggtttacttctgttatcatttgattttatcttgcagagwttccgtagatatttcttgtactttagatctgtttgcaatacattatctcagctttgtctgaaaaacgtatttatttttgcctttacatttgaaaacattttttctggatgaaaattctagattgaactttcttcctccagcactatattaattcatttcattgtctcctggtttgcattgtttctgataagaagagaaatgactaatgcttcttattattgttcccagtttataatatgcctttacctactttggctgcttttaaaattttctcattaccattttttttagttaaaaataaactttttattatagaaacatttgaatatattcaaaaaaataaagacaccagtataatgaactcccacttacctatcacccagcagtaataatt

SEQ ID NO: 613033 - DNA, 558 bp, Homo sapiens
tgagggtgggtctgcctctcccaatccattgactcaaacatcaccctcacagacacacccagaaacaatactttgcctccttcaatccaatcaagttgacactcaatattaaccatcacaccaattgtctcaaggatttttttttttaatatatatagttgggttgttcacctcaggactcaaacaaggtcctatattgcatcacattattttgtctcttaagttggttttatgctataacagtctttttgcctttataattttattgctttttgtttgtttgtttgtttgtttgagacagagtctctctctgtcgaccaggcttggagtgcagtggcgcgatrtccactcactgcaacctccgccttccgggttcacgccattctcctacctcagcctcccaagtagctggtactacaggcatgtgccaccacgccccactaattttttgtatttttagtaaagaccggctttcaccatgttagccaggatggtctcgctctcctgacctcgtgatctgtccggcttggcctcccaaagtgttgggattataggcgt

SEQ ID NO: 613034 - DNA, 558 bp, Homo sapiens
tgagggtgggtctgcctctcccaatccattgactcaaacatcaccctcacagacacacccagaaacaatactttgcctccttcaatccaatcaagttgacactcaatattaaccatcacaccaattgtctcaaggatttttttttttaatatatatagttgggttgttcacctcaggactcaaacaaggtcctatattgcatcacattattttgtctcttaagttggttttatgctataacagtctttttgcctttataattttattgctttttgtttgtttgtttgtttgtttgagacagagtctctctctgtcgaccaggcttggagtgcagtggcgcgatatccactcactgcaacctccgccttccgggttcacgccattctcctacctcagcctcccaagtagctggtactacaggcaygtgccaccacgccccactaattttttgtatttttagtaaagaccggctttcaccatgttagccaggatggtctcgctctcctgacctcgtgatctgtccggcttggcctcccaaagtgttgggattataggcgt

SEQ ID NO: 613035 - DNA, 279 bp, Homo sapiens
tttaccatttatatattaagtgatactatgcaagcactctgctaattgctgcaagcatataacagtagataaatataagtttattttmtctaagaattcacagtccagcaagaaggtggggaagagagatccaatgaccagtacaaatagtttctgaagatatatagtgtacattatgccacatcgacagggatactgtactcctcatagatatcataagtttgtatatatattaaaacaattttgggcagaagacaacaaattatcttattctcatga

SEQ ID NO: 613036 - DNA, 279 bp, Homo sapiens
tttaccatttatatattaagtgatactatgcaagcactctgctaattgctgcaagcatataacagtagataaatataagtttattttctctaagaattcacagtccagcaagaaggtggggaagagagatccaatgaccagtacaaatagtttctgaagwtatatagtgtacattatgccacatcgacagggatactgtactcctcatagatatcataagtttgtatatatattaaaacaattttgggcagaagacaacaaattatcttattctcatga

SEQ ID NO: 613037 - DNA, 279 bp, Homo sapiens
tttaccatttatatattaagtgatactatgcaagcactctgctaattgctgcaagcatataacagtagataaatataagtttattttctctaagaattcacagtccagcaagaaggtggggaagagagatccaatgaccagtacaaatagtttctgaagatatatastgtacattatgccacatcgacagggatactgtactcctcatagatatcataagtttgtatatatattaaaacaattttgggcagaagacaacaaattatcttattctcatga

SEQ ID NO: 613038 - DNA, 435 bp, Homo sapiens
taaatatattacataaaaaggttttcttaatcaaaggatatgattgtgtgatacaattgctgacccacagtacaggacctggctcctaatgtttaaagatatctggttaccatgactataattaccataattttacacctagtaattttttctgtagaattaatttccataacttatgacttgaaacaaagacatcagccttgttccatagtttccaagagcagaattattataaacctcataaatgccaaatgttattattttttcttttttgctctctctgaatcctccaaactggtttcctcttgttaaaattcaaacagctgtgaaatggtcaggcgatttcaagaygaaagtaaatgtgaagtgaccttcatccatgctgaacaaatagaatattataaacatactttccagttgaagttacacaaagca

SEQ ID NO: 613039 - DNA, 576 bp, Homo sapiens
aacaaacatttttaatacatgaatgataaatgattattctcccacaggcctgcaggagggttaggtcagatcccaggacagatgtgatcaaaatgcattcttgaggaatgtcaaatggtttgttgattttccaaatgtgcacttggtaattgcttgagtggacataaagtctactgcaaaagatgagaggaacaagccaaaggatgagaaaaaaatgatagagaatgtcagctgtgtataaagcgcactcaccttcactcccctaaaaggctgagaaaagcgtagctatcataccctgcaaggaggatggaaaggtgccctggaaagaaaacacccagggtgtgacactgggcaagtagtattacttggctgatycttgtctctaaaatcagagagttggataaggaagtctttgaagctcctttcaaccctaatattcttttacagtgtgaccttccataaacagaattcctattttttatatgctacagggaaattaaaagaaaatgaatatactttatagggccattcagtcaaatgaatcatctgctctaattcattttggaaaaatgtgtg

SEQ ID NO: 613040 - DNA, 481 bp, Homo sapiens
tctctcttgaacctgccctaactttgttcaaatagacttagccactgacctgctgtcaaaagaccacagccaatctgacttgttttcaayataatgatgaatattgatttggtcccttcatccaacattctcagctggatctttttttgaccaaggatatacattactaggcaagtacaggcagttaattcttccacacgggactttggagtttctgagttaaccagaatcacccaccttaacatctgccagtttataccccaagtcctgaccagtgccccctacctgctatgcctcatgttttcaatatagcataaaatcagaaatgaaagatgaaacatcatagccaatatcacagaaatacaaaggatcctaagaaactgctaggtataattacacactaaccaattggatcatctagaagaaatggataaattcccagacacataaaacctaccaagattgactcatgaagaaatta

SEQ ID NO: 613041 - DNA, 481 bp, Homo sapiens
tctctcttgaacctgccctaactttgttcaaatagacttagccactgacctgctgtcaaaagaccacagccaatctgacttgttttcaacataatgatgaatattgatttggtcccttcatccaacattctcagctggatctytttttgaccaaggatatacattactaggcaagtacaggcagttaattcttccacacgggactttggagtttctgagttaaccagaatcacccaccttaacatctgccagtttataccccaagtcctgaccagtgccccctacctgctatgcctcatgttttcaatatagcataaaatcagaaatgaaagatgaaacatcatagccaatatcacagaaatacaaaggatcctaagaaactgctaggtataattacacactaaccaattggatcatctagaagaaatggataaattcccagacacataaaacctaccaagattgactcatgaagaaatta

SEQ ID NO: 613042 - DNA, 481 bp, Homo sapiens
tctctcttgaacctgccctaactttgttcaaatagacttagccactgacctgctgtcaaaagaccacagccaatctgacttgttttcaacataatgatgaatattgatttggtcccttcatccaacattctcagctggatctttttttgaccaaggatatacattactaggcaagtacaggcagttaattcttccacacgggacttyggagtttctgagttaaccagaatcacccaccttaacatctgccagtttataccccaagtcctgaccagtgccccctacctgctatgcctcatgttttcaatatagcataaaatcagaaatgaaagatgaaacatcatagccaatatcacagaaatacaaaggatcctaagaaactgctaggtataattacacactaaccaattggatcatctagaagaaatggataaattcccagacacataaaacctaccaagattgactcatgaagaaatta

SEQ ID NO: 613043 - DNA, 481 bp, Homo sapiens
tctctcttgaacctgccctaactttgttcaaatagacttagccactgacctgctgtcaaaagaccacagccaatctgacttgttttcaacataatgatgaatattgatttggtcccttcatccaacattctcagctggatctttttttgaccaaggatatacattactaggcaagtacaggcagttaattcttccacacgggactttggagtttctgagttaaccagaatcacccaccttaacatctgccagtttataccccaagtcctgaccagtgccccctacctgctatgcctcatgttttcaatatagcataaaatcagaaatgaaagatgaaacatcatagccaatatcacagaaatacaaaggatcctaagaaactgctaggtataattacacactaacyaattggatcatctagaagaaatggataaattcccagacacataaaacctaccaagattgactcatgaagaaatta

SEQ ID NO: 613044 - DNA, 467 bp, Homo sapiens
ctaggtataattacacactaaccaattggatcatctagaagaaatggataaattcccagacacrtaaaacctaccaagattgactcatgaagaaattaaaaaatctgaatagactaatagcaagcaaggaggttgaatcagtaagaaaatgtctcccatcaatgaaaaacccaaaaccagatggcttcccagattaattctaccaaatattttaagaagaactaataccagtccttctcaaactcttccaaaaagctgaagtggagggaatacttccaaactcatcttacagggccagcattaccctgattccaaagccagacaagaacactacaagaaaggaaaattacaggccaatatccttgatctacatagatgcaaaaatcctcaacaaaatcctagcaaaccaaattcaatagcacattgaaagaatcattcaccatgatgatgtcatggttcaacataag

SEQ ID NO: 613045 - DNA, 467 bp, Homo sapiens
ctaggtataattacacactaaccaattggatcatctagaagaaatggataaattcccagacacataaaacctaccaagattgactcatgaagaaattaaaaaatctgaayagactaatagcaagcaaggaggttgaatcagtaagaaaatgtctcccatcaatgaaaaacccaaaaccagatggcttcccagattaattctaccaaatattttaagaagaactaataccagtccttctcaaactcttccaaaaagctgaagtggagggaatacttccaaactcatcttacagggccagcattaccctgattccaaagccagacaagaacactacaagaaaggaaaattacaggccaatatccttgatctacatagatgcaaaaatcctcaacaaaatcctagcaaaccaaattcaatagcacattgaaagaatcattcaccatgatgatgtcatggttcaacataag

SEQ ID NO: 613046 - DNA, 467 bp, Homo sapiens
ctaggtataattacacactaaccaattggatcatctagaagaaatggataaattcccagacacataaaacctaccaagattgactcatgaagaaattaaaaaatctgaatagactaatagcaagcaaggaggttgaatcagtaagaaaatgtctcccatcaatgaaaaacccaaaaccagatggcttcccagattaattctaccaaatattttaagaagaactaataccagtccttctcaaactcttccaaaaagctgaagtggagggaatacttccaaactcatcttacagggccagcattaccctgattccaaagccagacaagaacactacaagaaaggaaaattacaggccaatatccttgatctacatagatgcaaaaatcctcaacaaaatcctagcaaaccaaattcaatagcacattgaaagaatcattcaccaygatgatgtcatggttcaacataag

SEQ ID NO: 613047 - DNA, 562 bp, Homo sapiens
cccctttcggttttcatccttgttttctctcccttctcccacgacctcggtagtcttctgcaatccagattctcagacttcaggtttttctccctctgcccctttcctctctgtcctataactagaagcaccttttggcatagacccatatcccagtttcctctttcccaggtccagcagcatctcaaggacatctacaagagggatacctaatttcaggggtctctgaattrtatgtgggaaacatcgtctaaaaaagtaattttatccttattcatgcaaccagacccacactcatagaacttttctttaaggaaagtgtcttgcagatgtataaatgagtgttaacatctttaaaagcgaaactgaacaattccctggcatttgaattccctccttccttcccaaccctctccttttcattttctcatttattattaaaaacatttttaaaggatctccatgcttcatatttatctactataattcctccttctcggtgttgcagggatggggaaagaggatttttttaaaaacataataaaacgcaattgggagaaac

SEQ ID NO: 613048 - DNA, 562 bp, Homo sapiens
cccctttcggttttcatccttgttttctctcccttctcccacgacctcggtagtcttctgcaatccagattctcagacttcaggtttttctccctctgcccctttcctctctgtcctataactagaagcaccttttggcatagacccatatcccagtttcctctttcccaggtccagcagcatctcaaggacatctacaagagggatacctaatttcaggggtctctgaattatatgtgggaaacatcgtctaaaaaagtaattttatccttattcatgcaaccagacccacactcatagaacttttctttaaggraagtgtcttgcagatgtataaatgagtgttaacatctttaaaagcgaaactgaacaattccctggcatttgaattccctccttccttcccaaccctctccttttcattttctcatttattattaaaaacatttttaaaggatctccatgcttcatatttatctactataattcctccttctcggtgttgcagggatggggaaagaggatttttttaaaaacataataaaacgcaattgggagaaac

SEQ ID NO: 613049 - DNA, 562 bp, Homo sapiens
cccctttcggttttcatccttgttttctctcccttctcccacgacctcggtagtcttctgcaatccagattctcagacttcaggtttttctccctctgcccctttcctctctgtcctataactagaagcaccttttggcatagacccatatcccagtttcctctttcccaggtccagcagcatctcaaggacatctacaagagggatacctaatttcaggggtctctgaattatatgtgggaaacatcgtctaaaaaagtaattttatccttattcatgcaaccagacccacactcatagaacttttctttaaggaragtgtcttgcagatgtataaatgagtgttaacatctttaaaagcgaaactgaacaattccctggcatttgaattccctccttccttcccaaccctctccttttcattttctcatttattattaaaaacatttttaaaggatctccatgcttcatatttatctactataattcctccttctcggtgttgcagggatggggaaagaggatttttttaaaaacataataaaacgcaattgggagaaac

SEQ ID NO: 613050 - DNA, 581 bp, Homo sapiens
gctggtcttgaactcctgacctcaagggatctgcctgccttggcctcccaaagtgctgggattacacgtgtgagccactgcgcccggccgtttctgactttttctaaagtcttctttctctggagatgacattatataatagcactgttcaatagaagtttctttgatgatggaactgttctgtaatctgcattgtcccagccactagccatatgtgactactgaacacttgaaatgtgrctagagcaactgaagaactgaattttgcattttacttaattttaattaattaaaatagaaatgcaaataaccataagtggttagtagctaccatactggacagcaaagacctataattcagcatttaaaatcgattttgttttgttttcaaaaatggagtcagactgttacaacccaaaagaactgtaggttaaattaaggtaaatcaccaaatactacatacacatttgggaaatccaaaccagattttttcatgtgataaccacaccctcttttgactttagccttggaggtaatggagtatggcagaaaaaaccctgtatcagcagctggaagactca

SEQ ID NO: 613051 - DNA, 581 bp, Homo sapiens
gctggtcttgaactcctgacctcaagggatctgcctgccttggcctcccaaagtgctgggattacacgtgtgagccactgcgcccggccgtttctgactttttctaaagtcttctttctctggagatgacattatataatagcactgttcaatagaagtttctttgatgatggaactgttctgtaatctgcattgtcccagccactagccatatgtgactactgaacacttgaaatgtggctagagcaactgaagaactgaattttgcattttacttaattttaattaattaaaatagaaatgcaaataaccataagtggttagtagctaccatactggacagcaaagacctataattcagcatttaaaatcgattttgttttgttttcaaaaatggagtcagactgttacaacccamaagaactgtaggttaaattaaggtaaatcaccaaatactacatacacatttgggaaatccaaaccagattttttcatgtgataaccacaccctcttttgactttagccttggaggtaatggagtatggcagaaaaaaccctgtatcagcagctggaagactca

SEQ ID NO: 613052 - DNA, 552 bp, Homo sapiens
cctgggctcagtggatcctcccacctcagcttcccaagaagctgggactacaggtgcacgccaccatggccagctaatttttcttatttttttgtagagatgaggtcttgctgtattgcccaggctgctcttgagctcctggcttcaagccatcctcctgtcttggtttcccaaagtgctgggactataggtgtgactcaccatgcctggcctacatccagtttaatttatactacastgtgggtttagtcctcaaacatgtttttgttttacatataaaaatttgaggtaaaagaacatttttacattggtcaataatggtacatttaaacaatggacgactatatccattaaaatcatgttgtggaagaatattcagtgacatggaaagattgactcaagggcaagtgaaacgtgtcaagagtctgttaggtactagacactgtaaactgggtcttggctgtgctacttgcttacatcctccatcatgtgatcttttagataacaaaatcgagatacatagggatttgggatcttgcgcaaagtcaccca

SEQ ID NO: 613053 - DNA, 552 bp, Homo sapiens
cctgggctcagtggatcctcccacctcagcttcccaagaagctgggactacaggtgcacgccaccatggccagctaatttttcttatttttttgtagagatgaggtcttgctgtattgcccaggctgctcttgagctcctggcttcaagccatcctcctgtcttggtttcccaaagtgctgggactataggtgtgactcaccatgcctggcctacatccagtttaatttatactacagtgtgggtttagtcctcaaacatgtttttgttttacatataaaaatttgaggtaaaagaacatttttacattggtcaataatggtacatttaaacaatggacgactatatccattaaaatcrtgttgtggaagaatattcagtgacatggaaagattgactcaagggcaagtgaaacgtgtcaagagtctgttaggtactagacactgtaaactgggtcttggctgtgctacttgcttacatcctccatcatgtgatcttttagataacaaaatcgagatacatagggatttgggatcttgcgcaaagtcaccca

SEQ ID NO: 613054 - DNA, 552 bp, Homo sapiens
cctgggctcagtggatcctcccacctcagcttcccaagaagctgggactacaggtgcacgccaccatggccagctaatttttcttatttttttgtagagatgaggtcttgctgtattgcccaggctgctcttgagctcctggcttcaagccatcctcctgtcttggtttcccaaagtgctgggactataggtgtgactcaccatgcctggcctacatccagtttaatttatactacagtgtgggtttagtcctcaaacatgtttttgttttacatataaaaatttgaggtaaaagaacatttttacattggtcaataatggtacatttaaacaatggacgactatatccattaaaatcatgttgtggaagaatattcagtgacatggaaagaytgactcaagggcaagtgaaacgtgtcaagagtctgttaggtactagacactgtaaactgggtcttggctgtgctacttgcttacatcctccatcatgtgatcttttagataacaaaatcgagatacatagggatttgggatcttgcgcaaagtcaccca

SEQ ID NO: 613055 - DNA, 552 bp, Homo sapiens
cctgggctcagtggatcctcccacctcagcttcccaagaagctgggactacaggtgcacgccaccatggccagctaatttttcttatttttttgtagagatgaggtcttgctgtattgcccaggctgctcttgagctcctggcttcaagccatcctcctgtcttggtttcccaaagtgctgggactataggtgtgactcaccatgcctggcctacatccagtttaatttatactacagtgtgggtttagtcctcaaacatgtttttgttttacatataaaaatttgaggtaaaagaacatttttacattggtcaataatggtacatttaaacaatggacgactatatccattaaaatcatgttgtggaagaatattcagtgacatggaaagattgactcaagggcaagtgaaacgtgtcaagagtctgttaggtactagacactgtaaactgggtcttggctgtgytacttgcttacatcctccatcatgtgatcttttagataacaaaatcgagatacatagggatttgggatcttgcgcaaagtcaccca

SEQ ID NO: 613056 - DNA, 595 bp, Homo sapiens
aaaatgctgattttttccaggtactccaaaaatacctttataattttaacygtaatttgtttagtctaaaaaggtactcctccaataccagaagctacaggtgaaaaacatatctctcaactgaagacaacttcttgaataactgtgtcactgacaagtttactctctgagcttcagtttccaaactgagaaggaggaataactgccctgcctgtcccacacttctggctgctgaaataatctcaatcaatttcttttttctttctttattttttttttttacaaactacatgcaaatttaatttttccaattcataaagtaaaaggggtccaataaaacactatcatgtcctacctcacaggttactgtaggtattgttttcaaaatgtgaacaatactacagactgaaggtggaaaaaaaaactagttgaaagtagaattagtttttaagggcatggctaagccaaaattagaaatatatttataaggctgggtgtggtggcctacacatgtaatcccagcactttgggaggctgaggcatgaggatcacttgagcccaggagtttgagaccagcctaggcaacatagcaaga

SEQ ID NO: 613057 - DNA, 595 bp, Homo sapiens
aaaatgctgattttttccaggtactccaaaaatacctttataattttaactgtaatttgtttagtctaaaaaggtactcctccaataccagaagctacaggtgaaaaacatatctctcaactgaagacaacttcttgaataactgtgtcactgacaagtttactctctgagcttcagtttccaaactgagaaggaggaataactgccctgcctgtcccacacttctggctgctgaaataatctcaatcaatttcttttttctttctttmttttttttttttacaaactacatgcaaatttaatttttccaattcataaagtaaaaggggtccaataaaacactatcatgtcctacctcacaggttactgtaggtattgttttcaaaatgtgaacaatactacagactgaaggtggaaaaaaaaactagttgaaagtagaattagtttttaagggcatggctaagccaaaattagaaatatatttataaggctgggtgtggtggcctacacatgtaatcccagcactttgggaggctgaggcatgaggatcacttgagcccaggagtttgagaccagcctaggcaacatagcaaga

SEQ ID NO: 613058 - DNA, 479 bp, Homo sapiens
gtagtctggcaagtattatatcaaagataaataccagttttagaataaagcattaatatactcttacatttcaacttaagaggcaaatattaacagtaggatttgtaaactatttattagactaaaaatcaatgaatttttaaaaattacaaaatgatttatgtatgttagatattttactgagtgaaaaaattcatgcttttttaaatgacttattgtttggagtagtgatacagtagatttaattttccccctcattaattaaaatcatgttttagccaagaaagtgaacaraattcttattggcaattcagttgtttcccattttggagactgacactctccagttctaagttaaataattgtcatggtaaagtaatttccttgaaaagaacggacattgattcagcccctgttactcacaaatcctatttgagtcaaattggaaaactattacgtttttgggaaaaaaatcaata

SEQ ID NO: 613059 - DNA, 479 bp, Homo sapiens
gtagtctggcaagtattatatcaaagataaataccagttttagaataaagcattaatatactcttacatttcaacttaagaggcaaatattaacagtaggatttgtaaactatttattagactaaaaatcaatgaatttttaaaaattacaaaatgatttatgtatgttagatattttactgagtgaaaaaattcatgcttttttaaatgacttattgtttggagtagtgatacagtagatttaattttccccctcattaattaaaatcatgttttagccaagaaagtgaacagaattcttattggcaattcagttgtttcccrttttggagactgacactctccagttctaagttaaataattgtcatggtaaagtaatttccttgaaaagaacggacattgattcagcccctgttactcacaaatcctatttgagtcaaattggaaaactattacgtttttgggaaaaaaatcaata

SEQ ID NO: 613060 - DNA, 563 bp, Homo sapiens
ctataattcccttttgctataaatagttaaagcttctatcactataatttccataagaagatatatgtgtttacctgttaattttatcagggcaaattaaaacatggatagaatcatgtttctcaatgtgaagaaatatttttatttgatgaatattatatattttcacgtgcagtggcttctatgttttgggttgatgctgaattagggagtgatatttaccttgatggtaagttaaaaaacagttttcttttatctttcttggtttttttttttgttttttttttttttttctgagacagagtctcactttgttgcccagactggagtgcatggagtgcagtggcatgatctcggctcactgcaayctttacctcctgggttcaagtgattctcctgcctcagcctcccgagtagctgggactacaggcgtgcaccatcgtacctggctaatttttggatttttagtagagacggggtttcgccatgttggcctgactggtcttgaacccctgacttcaggtgatccgccagcctcggcctcccaaagtgctgggattaca

SEQ ID NO: 613061 - DNA, 634 bp, Homo sapiens
gctgaacattatgcttcctgatgcatttagcagacactaaacatttgtygtactctaaacaaagttacaaaggactagaagaattcttgttctgtatttagaaacccactcacattacttgatatttgggtatttaagtcatgaaaggtatttcttctaggaagcagtgattctaaagtgtatgcttaaccagtcagttgagtgtctactcttgtgtgttcacaagtgtgcacaaagtttttggtaaattaagaatattatttcaaataaattaatttcatccccataggagccagtttatcagataattcgtttctcatttctgcaaatcaatacacaatgagctcatattcagataaattgagctcatatccagataaatataatagtttttctttatttcaacattgttcattgattgcaacccatttctaaaacaaattatttaatataacaaaactcctttaacttctcaacttttcccactaaaactgtgaaacattatataaaatctttaatcaataggatatgatacatatttcatcatttgtttcaggttttggttgtgataaataacactgaaaaaccatcctaatatatgtattaactttatcattagaaaaggggattgttc

SEQ ID NO: 613062 - DNA, 634 bp, Homo sapiens
gctgaacattatgcttcctgatgcatttagcagacactaaacatttgttrtactctaaacaaagttacaaaggactagaagaattcttgttctgtatttagaaacccactcacattacttgatatttgggtatttaagtcatgaaaggtatttcttctaggaagcagtgattctaaagtgtatgcttaaccagtcagttgagtgtctactcttgtgtgttcacaagtgtgcacaaagtttttggtaaattaagaatattatttcaaataaattaatttcatccccataggagccagtttatcagataattcgtttctcatttctgcaaatcaatacacaatgagctcatattcagataaattgagctcatatccagataaatataatagtttttctttatttcaacattgttcattgattgcaacccatttctaaaacaaattatttaatataacaaaactcctttaacttctcaacttttcccactaaaactgtgaaacattatataaaatctttaatcaataggatatgatacatatttcatcatttgtttcaggttttggttgtgataaataacactgaaaaaccatcctaatatatgtattaactttatcattagaaaaggggattgttc

SEQ ID NO: 613063 - DNA, 596 bp, Homo sapiens
caatgtttcatctttgtcacattacaaygttcgtaaaagcttgttaggacttttgttcttcttcaattttagaaaagtggttaatccaaggaccaatgtgactttgatgtactgacctggaaagttaaagatggaatcactcaattactattctttttgtaaatttttaaacaccataaagcatttaatgaactggaattgataggtgaactgtgtcattttaataagcataatgtaatcacgtcatattttgttttgtttgcaggcagaaatttagataaggatatccttaaacagctgtttatagctactgtgacagaaacagaaaagcagtggacaacacatttcaaagaagatcaagtttgtacataacactagaggcatttcttatcaaaaggattggataataaaaataagtttctactgggtatatttcaagcatttatttattactttagttacgaattccaatatactttaaaatggtatttgttttacagcatacataaaatgtagcaaatcagtactgtaaaacatttaacattcatacaattatatataatatccttttttttaaagaatggtatttcacaaaa

SEQ ID NO: 613064 - DNA, 433 bp, Homo sapiens
tttttgtcaaataatgtgattttgctatgtatagaggagatgtctatatgtaagggcatatttatgaccagtagttcctaaaattaaggggactattattgtgttactcaaggtatcagttgtataggatacattatgtcatatttcaaacaatgtttataaagagattagtataattaacctgtatgtacttctcctctgggccaaccttgtgtcttctttrtctgctgacagtcccctccccactgaattattttgaatcaaatcccagatagtctatcattgtattgtatttttgaatatttctctaaaagataataattccatcaatgagactggatgcagtggctcctccctgtaatcccagctctttgggaggcagaggttggaggatcactttaggccaggagttcaagaccaccctgagcaacac

SEQ ID NO: 613065 - DNA, 433 bp, Homo sapiens
tttttgtcaaataatgtgattttgctatgtatagaggagatgtctatatgtaagggcatatttatgaccagtagttcctaaaattaaggggactattattgtgttactcaaggtatcagttgtataggatacattatgtcatatttcaaacaatgtttataaagagattagtataattaacctgtatgtacttctcctctgggccaaccttgtgtcttctttatctgctgacagtcccctccccactgaattattttgaatcaaatcccagatagtctatcattgtattgtatttttgaatatttctctaawagataataattccatcaatgagactggatgcagtggctcctccctgtaatcccagctctttgggaggcagaggttggaggatcactttaggccaggagttcaagaccaccctgagcaacac

SEQ ID NO: 613066 - DNA, 433 bp, Homo sapiens
tttttgtcaaataatgtgattttgctatgtatagaggagatgtctatatgtaagggcatatttatgaccagtagttcctaaaattaaggggactattattgtgttactcaaggtatcagttgtataggatacattatgtcatatttcaaacaatgtttataaagagattagtataattaacctgtatgtacttctcctctgggccaaccttgtgtcttctttatctgctgacagtcccctccccactgaattattttgaatcaaatcccagatagtctatcattgtattgtatttttgaatatttctctaaaagataataattccatcaatgagactggrtgcagtggctcctccctgtaatcccagctctttgggaggcagaggttggaggatcactttaggccaggagttcaagaccaccctgagcaacac

SEQ ID NO: 613067 - DNA, 595 bp, Homo sapiens
catgactcccaacatagcaatgaatgtacagccacccggtgatattgctcctagtattcacggaagaagcgtaggatattacttccaaaatcgcagggagtgtacacctcttctgtgatattgttcctggtatcccgagggggagaggatgataataattccagtatcgcaggctgtgatcacccaccctgtgatattgttattaacatcctgaaagggagaggatgatattactccccgtaatagatagatattactccccataacagagcaggaggtgtacacccaccctgtgatattgttcctaatattcagaggccgagaggtcgatattactcccaatatggcaggaagtgtacacccccgtgtgagatggtccttaataatattccaaggcggagggggagatattactcccaaaatcgcagaaagtgtacacccccagggatattgttctcatgatcctggagggaagaggatgatatcactttaaatatcacagaaggtgtgcacgcccccactgatatcggttmtaatttccacgtgggagaggaggatgtgacgcccaatcacacctgcagtagaaacacagctg

SEQ ID NO: 613068 - DNA, 400 bp, Homo sapiens
gggtgactgcaaccactgcctcccaggttcaagagattctcctgcctcagcctcctgagtagctgggactagaggcgtgtgtcaccacacccagctaakttttgtatttttagtagagatggggtttcaccatgtttgccaggatggtctttatctcctgcccttgtgatccacccacctcagcctcccaaagtgctgggattgcaggtgcgagccaccgggtccagcctctcaggcgattttcatacctgcatactctgatcactactctgttaaacagtcaaggagggtaagtattatcttcagatttccagagctctgtctctgtacagccctctcctcctcaatattctgccctatgaattctagccacattggccttcccaggctcacagttctg

SEQ ID NO: 613069 - DNA, 400 bp, Homo sapiens
gggtgactgcaaccactgcctcccaggttcaagagattctcctgcctcagcctcctgagtagctgggactagaggcgtgtgtcaccacacccagctaatttttgtatttttagtagagatggggtttcaccatgtttgccaggatggtctytatctcctgcccttgtgatccacccacctcagcctcccaaagtgctgggattgcaggtgcgagccaccgggtccagcctctcaggcgattttcatacctgcatactctgatcactactctgttaaacagtcaaggagggtaagtattatcttcagatttccagagctctgtctctgtacagccctctcctcctcaatattctgccctatgaattctagccacattggccttcccaggctcacagttctg

SEQ ID NO: 613070 - DNA, 400 bp, Homo sapiens
gggtgactgcaaccactgcctcccaggttcaagagattctcctgcctcagcctcctgagtagctgggactagaggcgtgtgtcaccacacccagctaatttttgtatttttagtagagatggggtttcaccatgtttgccaggatggtctttatctcctgcccttgtgatccacccacctcagcctcccaaagtgctgggattgcaggtgcgagccaccgggtccagcctctcmggcgattttcatacctgcatactctgatcactactctgttaaacagtcaaggagggtaagtattatcttcagatttccagagctctgtctctgtacagccctctcctcctcaatattctgccctatgaattctagccacattggccttcccaggctcacagttctg

SEQ ID NO: 613071 - DNA, 605 bp, Homo sapiens
gagcaggtagaatatagagagatgagactgactttataacttggtacctgtcaaaagttttatgctatgctgaaaagtttggacttgatattgggagacatatttttcagttttgttttttggttagcagaggtttgatgcaatcacatytggtgttagatagataacgctgggtacagtgtggagaataaatggggaggggctattgtcgctatcatagctgtggtgaagaaagtgaggtaaaaattgattcaagagatgttcaagaaatataatcaacagaactcaattgaattgaaatgggctcttggtccctctagattgtttttcctttctttttcttttctttttaaatacaagtctgcccttatttcaagatctaaattgttgagagcacctgccaccatctaagtagaagtcaattgctttcttgctgacttcttttttaagaacaaatcaaactctcgtccttgccctttagatattagagttatctttggatgagaacactgcttagttgtggaagaattgtcaagaaaatgatgcccatatatgtatttaaaagttacctccctatggtactacttaaaataggctaaatggca

SEQ ID NO: 613072 - DNA, 605 bp, Homo sapiens
gagcaggtagaatatagagagatgagactgactttataacttggtacctgtcaaaagttttatgctatgctgaaaagtttggacttgatattgggagacatatttttcagttttgttttttggttagcagaggtttgatgcaatcacatttggtgttagatagataacgctgggtacagtrtggagaataaatggggaggggctattgtcgctatcatagctgtggtgaagaaagtgaggtaaaaattgattcaagagatgttcaagaaatataatcaacagaactcaattgaattgaaatgggctcttggtccctctagattgtttttcctttctttttcttttctttttaaatacaagtctgcccttatttcaagatctaaattgttgagagcacctgccaccatctaagtagaagtcaattgctttcttgctgacttcttttttaagaacaaatcaaactctcgtccttgccctttagatattagagttatctttggatgagaacactgcttagttgtggaagaattgtcaagaaaatgatgcccatatatgtatttaaaagttacctccctatggtactacttaaaataggctaaatggca

SEQ ID NO: 613073 - DNA, 547 bp, Homo sapiens
tgcccagagccctctttggcacaacttcatttccaatcacctagtcagtcatctgtatatacacacattatataaatatatagtctgtatatgtatataatgtgtgtatatgtatacattatatagtctgtgtgtatatatatataacgtgtgtgtgtgtatatatatatgtgtgtgtgtatatatatgtgtgtrtatatatatatatatatatatatatacaacatagttgtaaaatcaactttggaaaaagatatgctagatcctctgagcaattattgatttttttgacatttatgcaggtaatcagattaatactttgccccatctttaaattctatgatagctttgtgaccctgacatgtgtgagatgtgcttctgggtaacattttaccaatatgaccttattgttaagcatcaacttctactgcttgaagtcagaaattttaacaggtgaagcacatgaaataggttgatagattgatatctcaatcctgatgctaatgtacttaaacacaggaaaattcatgaacgatatagggaatac

SEQ ID NO: 613074 - DNA, 538 bp, Homo sapiens
aaacagtaggttttcagtgtagatgacacagtcttctattggaaaaagatggcayctaggactttcatagctagagaggagaagtcaatgcctggcttcaaagcttcgccggaaagggtgactctcttgttaggggctaatgcagctgatgactttaagttgcagccaatgctcatttaccattcctaaaattttagggccattaagaattatactaaaactactctgcctattctctgtaaattgaacaacaaggcctagaagacagaacatctgtttacagcatggtttcctgaatattttaaggccactgatgagacttactgcttggtaataaaacattgctttcaaaatattactgctcattggcaatgaactagtcacccatgagctcttatggagatatgcaagaaaattaacattgttttcatgcctgttaactcagtatcctttcttcagcccatggatcaaataattttgatttgagaacatactgcttaagaaatatattttgtaagcctatagctgccatagtgat

SEQ ID NO: 613075 - DNA, 538 bp, Homo sapiens
aaacagtaggttttcagtgtagatgacacagtcttctattggaaaaagatggcatctaggactttcatagctagagaggagaagtcaatgcctggcttcaaagcttcgccggaaaggrtgactctcttgttaggggctaatgcagctgatgactttaagttgcagccaatgctcatttaccattcctaaaattttagggccattaagaattatactaaaactactctgcctattctctgtaaattgaacaacaaggcctagaagacagaacatctgtttacagcatggtttcctgaatattttaaggccactgatgagacttactgcttggtaataaaacattgctttcaaaatattactgctcattggcaatgaactagtcacccatgagctcttatggagatatgcaagaaaattaacattgttttcatgcctgttaactcagtatcctttcttcagcccatggatcaaataattttgatttgagaacatactgcttaagaaatatattttgtaagcctatagctgccatagtgat

SEQ ID NO: 613076 - DNA, 609 bp, Homo sapiens
aaacacagttacaactacaacaatatcagcaatggcttattaataagcaaacaagaatccaattggtatttgatttttcattagtgaccatgaagacatggagaacatctttataatccttaaaataatcagttttaaaagtagtcgaagatacaagagtctgggaagggtacagggagtgggggatagggagagtttgttaaagggtaatcaaattacagttagataggaggattaaattctagtgttctatagtaccgtaggatggctatagttgacagtgatttatcatacaatttcaaacagcaagaaagaacgttcccaacacacagaaataataaatatttgagattatggatatgctaatttatctgatcagatcactataaattgtgtatatggaaacatcacmtcataaatatgtacagttatcatgtgtcaaattttaaaagtatcagctcaaacacagaattctgtacagcctaattagcaatcaagtttgagggcaaaatgaaatgattttagacattcaacaattcacagaatttactattcacacatggcctatcaaggttttatcttttctttttaacgtggtatttttttcac

SEQ ID NO: 613077 - DNA, 635 bp, Homo sapiens
agaattgcattatataaagtatatgtatggtataatcataaagtataagcctagataaaaatacttataataaatattccaaaatgttagtagtgcttctgcttgggttgactgattttcttctttataagattatsttctattatttttcctctcatatagtatttttactgtaaatattttaaaaaccactctaacttccaaacttactctaataagtacaattacttctacaaataataaacacatttaaaaactatttgaatggtgacttgaaaagagtgatccttttttagagtaccttctttttagagacattagactgtaaactgaaagactgggaccctatcttacttatccttgttttcctattgcctgctagcatgtgctcaatatatgataactgaatgatcaacaaccaaaatatatgcaggatttgagatgactggtaagcaggaagaaagttttgacaaaaacatgcttttttttttttttttttgagacgaagtctcgctctgtcgcccaggctggagtgcagtggcgcgatctcggctcactgcaagctccgcctcccgggttcacgccattctcccgcctcagcctcctgagtagctgggaccgcaagcgcccaccgc

SEQ ID NO: 613078 - DNA, 595 bp, Homo sapiens
ctatccaatgtaatacaaccaataaataagataatatgagttaatatggaagaaaaaagagatatatatttacttaaagatgacatattttattacctggaaaatccaagcgaagaaattgagaaatcagtagacttaataagagcatttgttaaaatggctggttacaaaaatgcaaatagtaacataactctcctacatatttttaagaataaccacttagaaagcgaagtggctgaaaaaaattaatgaagaaaaatattaaatgcctcataaaatttttaacaatttatgtgtaggacctttacaatgcaaccaagactcattcytgatagatttaaaagaatgaaataaatgaaaagctcatattttattttgagagggtatgtctctaaatgaaatattgagcacaagacgactattgattcaaccaaaactaatccatagtttaatgaacttttttgaacataatacattgattttcatatttgtctatgagtttaaatgtgtagcccacaatgttggagaataaaaattaaaaaatatgcattgctgttattattgcttcataattattactttttaaaactgtgag

SEQ ID NO: 613079 - DNA, 415 bp, Homo sapiens
gaattcatatacttattatatgaagaatgcattcatctctcaaaatagaaatggtttaaaactttcttaggacagttaaattacaactcacatgtctcgttggtcaatttccaatggtaagaagctgcatccattagaaattattttacaagatatttggctatttggttatttgaaagagaacttatatgtgtttaaactctcataatactggtaataatatgaacaacataaataattactattattttagaaacatgtgccctgcaccgttttatatgctttccatgtatttatagcttctggaacagattttgggaakaacaaataggcccataaggcatagtttctcctaatttatgctttctgaaaacttatttaagtgtaaactgcaattttttttggcaaactcaaa

SEQ ID NO: 613080 - DNA, 511 bp, Homo sapiens
aggaattcccaaaacatgttccaaggaaccatagaatgaatgttaataggtttaattttcaggaaaataataatcagtgggggaaagggagattcaaagtaaaatgcacttaggaaaagttgggcgattaatgtgtattttaaattcaraaagtcactgcaattttaatattcatcatgacactccaaaagggaaatgaagtatgtatcatttcccaaacacatttatttcctgagccacttttcaaggactagtgctcctcaaaaatttatttgggaaatattgactcagatgaaaatgtggtaagaaacattgaaactgcactccatctaatgctttggggatttttaagattttcctactaatggagtcaaaatcccaaagtgtgaaaagacggaaatcacaatttgaggagtattacttaatttgaaccacagagaaacaatcataatcattgtcagcagaaaacaagcaaaaaaaaaaaaatcaatatacaaaagttaaaggaaac

SEQ ID NO: 613081 - DNA, 375 bp, Homo sapiens
aattttaatattcatcatgacactccaaaagggaaatgaagtatgtatcatttcccaaacacatttatttcctgagccacttttcaaggactagtgctcctcaaaaatttatttgggaaatattgactcagatgaaaatgtggtaagaaacattgaaacwgcactccatctaatgctttggggatttttaagattttcctactaatggagtcaaaatcccaaagtgtgaaaagacggaaatcacaatttgaggagtattacttaatttgaaccacagagaaacaatcataatcattgtcagcagaaaacaagcaaaaaaaaaaaaatcaatatacaaaagttaaaggaaacctgaccacgtaatttgaattcata

SEQ ID NO: 613082 - DNA, 609 bp, Homo sapiens
ctttcttagaaaatttatttactaaatattagaaattatattgtattttaaagtgaaacaaaggaaaatacttcggcaaacatttcaatagtttaaaatttaaaagacaatcttagtagaataatcccaagtaggtattcttccattaaaaatttttgacactgcatttgcatttctatttgtaacttatctaatatttatagcatcctgtgttaatttataattctatttatacaaaacttgtggaagacaatttaccatgaataaaagtgcttcatattcaaataagcttcataaatagattacctctaagttctttactagtgagtgtactctccaattgctgtaccctttatccatgagaacgaaaatttagyaattataaaaatgatgcctcatccatgtctgtgtagcctgtaaaatttgtaaatcaagctcacaaatgttgtcagaacaaaggtaggcttatatgatacatcaagctaaaatcattcatcctctacaccaataggcatagaactgcaaatgcagcctcagaactgctcatctctcccagttgtggcttctcgcaaaaggaaacagccagactgctagagatttaaatattcc

SEQ ID NO: 613083 - DNA, 609 bp, Homo sapiens
ctttcttagaaaatttatttactaaatattagaaattatattgtattttaaagtgaaacaaaggaaaatacttcggcaaacatttcaatagtttaaaatttaaaagacaatcttagtagaataatcccaagtaggtattcttccattaaaaatttttgacactgcatttgcatttctatttgtaacttatctaatatttatagcatcctgtgttaatttataattctatttatacaaaacttgtggaagacaatttaccatgaataaaagtgcttcatattcaaataagcttcataaatagattacctctaagttctttactagtgagtgtactctccaattgctgtaccctttatccatgagaacgaaaatttagtaattataaaaatgatgcctcatccatgtctgtgtagcctgtaaaatttgtaaatcaagctcacaaatgttgtcagaacaaaggtaggcttatatgatacatcaagctaaaatcattcatcctctacaccaataggcatagaactgcaaatgcagcctcagaactgctcatctctcccagttgtggcttctygcaaaaggaaacagccagactgctagagatttaaatattcc

SEQ ID NO: 613084 - DNA, 621 bp, Homo sapiens
acacaaacacacacacacacagacacacgatttagcctcttggttatgtttcccacatattgggtccaaatgatcacttcaaaaataatttagataataaacactcaaactgtgcaatcagggccaaaaagtaaaataaggtgaaaaagtgcttcaacttgagtgcaaaaatgacagttttcatcagatatagacatattttaatttctacttgaccctgatccagagtactgcaaattttgtcctattctatgaaaaaaaatcatcaagcttaaacaatacatgtggcttatgtcagaagcaacttttcatgatattgcaaagattccaaaaattaaatatgctagaattgacaaaagtttatatggttcaaagttacaggctacttgtcaattgtttagagagttttttyagaagaaattactttatttaaaactgtagtctttttatattttcacttagttaaaaagtgttatctaattaaatacttaagagtcagtcttatttttaaatctttttgtttcaaataagccagagtttattggacactttctgattgcactgtcttaagggcagtgaggtctgcatgagatgtatatgatgtttccttgtaccaggaac

SEQ ID NO: 613085 - DNA, 621 bp, Homo sapiens
acacaaacacacacacacacagacacacgatttagcctcttggttatgtttcccacatattgggtccaaatgatcacttcaaaaataatttagataataaacactcaaactgtgcaatcagggccaaaaagtaaaataaggtgaaaaagtgcttcaacttgagtgcaaaaatgacagttttcatcagatatagacatattttaatttctacttgaccctgatccagagtactgcaaattttgtcctattctatgaaaaaaaatcatcaagcttaaacaatacatgtggcttatgtcagaagcaacttttcatgatattgcaaagattccaaaaattaaatatgctagaattgacaaaagtttatatggttcaaagttacaggctacttgtcaattgtttagagagttttttcagaagaaattactttatttaaaactgtagtctttttatattttcacttagttaaaaagtgttatctaattaaatacttaagagtcagtcttatttttaaatctttttgtttcaaataagccagagtttattggacacwttctgattgcactgtcttaagggcagtgaggtctgcatgagatgtatatgatgtttccttgtaccaggaac

SEQ ID NO: 613086 - DNA, 604 bp, Homo sapiens
taaaataaaagtaagagcttgtgtgtaagggacagctatttttattaccaactctattgggcataaataaaacaaaaatgawtcaacttcaattttctaaattttctcatgcatagtttacatatggtatgtgctatataagtgtataatgttatgacaaatgtgccttttattaatctctggtaaacaggcataatattagatgtgatgaaggaaaagagaaaaggagtaagaaggagtctcaaatccttaggcctttgttaaaggtagccgttatagctgttgtcatgcctatatcaagttgcaattccaattaatacaactaaaaggtaatacacttaggcaaatactattttttaatcactggctgggctatgacatttcaaatgcaatctccttcagtgactggaacttggaggcatgttaattcccattgcacagttaggattgttactggctctgcagtctcctttccttgatccccatctccattcctgcctggccaattaatactagcagtaccactcattccatagagggcagaagcataagacgttttccatactggtagaattaagccatcaaagggaagacaatctaaata

SEQ ID NO: 613087 - DNA, 604 bp, Homo sapiens
taaaataaaagtaagagcttgtgtgtaagggacagctatttttattaccaactctattgggcataaataaaacaaaaatgaatcaacttcaattttctaaattttctcatgcatagtttacatatggtatgtgctatataagtgtataatgttatgacaaatgtgccttttattaatctctggtaaacaggcataatattagatgtgatgaaggaaaagagaaaaggagtaagaaggagtctcaaatccttaggcctttgttaaaggtagccrttatagctgttgtcatgcctatatcaagttgcaattccaattaatacaactaaaaggtaatacacttaggcaaatactattttttaatcactggctgggctatgacatttcaaatgcaatctccttcagtgactggaacttggaggcatgttaattcccattgcacagttaggattgttactggctctgcagtctcctttccttgatccccatctccattcctgcctggccaattaatactagcagtaccactcattccatagagggcagaagcataagacgttttccatactggtagaattaagccatcaaagggaagacaatctaaata

SEQ ID NO: 613088 - DNA, 604 bp, Homo sapiens
taaaataaaagtaagagcttgtgtgtaagggacagctatttttattaccaactctattgggcataaataaaacaaaaatgaatcaacttcaattttctaaattttctcatgcatagtttacatatggtatgtgctatataagtgtataatgttatgacaaatgtgccttttattaatctctggtaaacaggcataatattagatgtgatgaaggaaaagagaaaaggagtaagaaggagtctcaaatccttaggcctttgttaaaggtagccgttatagctgttgtcatgcctatatcaagttgcaattccaattaatacaactaaaaggtaatacacttaggcaaatactattttttaatcactggctgggctatgacatttcaaatgcaatctccttcagtgactggaacttggaggcatgttaattcccattgcacagttaggattgttactggctctgcagtctcctttccttsatccccatctccattcctgcctggccaattaatactagcagtaccactcattccatagagggcagaagcataagacgttttccatactggtagaattaagccatcaaagggaagacaatctaaata

SEQ ID NO: 613089 - DNA, 561 bp, Homo sapiens
ttgctcctttgttcagtttcctattagagtttctctttagaattgaagagggtgagagcacaagtgartggtaagccatctactgagttatacacatcttgttatacccttgtttttttctgtttttaaactctgtatgaaaataaaatacatgctcattatgtagagactatgtacttgcttttaaattcatgagagtgctttgacaaattacttcttttctcttaatatcttaacaattagcaattttaaatggaattttgctatccaatttatcctatcaaatttttggaaatcagcagattacatagcttatttgaaaggtaaaaaacagcaattgaaatgatttctttgcttcaataaaaatttcacacctgtagaaaggagtaatctcgaaacatttataaaagttagtatagttggaaggctgaggcaggagaatcgcttgaacccaggaggtggaggatgaggtgagcagagaatgcaccaatgcactccagccagggtaacaagagcaaagctccgtctcaaaaaaaaaaaaaaaaaaaaaaagagttagta

SEQ ID NO: 613090 - DNA, 608 bp, Homo sapiens
ttaaagtaactgaaaaaaatgggacactttactttcataaaaatcgagataatagttaaaaaggtggcatatctattcaatggaatatcactgaaattaatcatcttcacaaagaacatttaacattatgggaaaatgttcacaatatgctaagtaaaaacagtgcaattctgagtcctctgacatttaattaacactcattggattgaataatgttgattagaagtaccaaaatttagaattttgaaagacctaaaaatacgccaatgcatgcattttctaacatttctttctctctttttttggagtaagtaaattctcctattcaaggaaatttttaagcagaagtccaatgagaaaaattgtttttttaatttgtatttttattttaagttccagagtacatgtgcaggatgcgcaggtttgttacattggtaaacgtatrccatggtggtttgctgcacctatcaacccatcacataggtactaagcctggcgtgcattaggtatgtttgctaatgctctccctcccccatcccaaacccctacaggccccagtgtgtgttgttccccttcctgtgtccatgtgatctccttgttcagctcca

SEQ ID NO: 613091 - DNA, 580 bp, Homo sapiens
tctcacttcagtactattttcagttacatttcttacaaatatttagctgttagaaatagtgcttggataagtctcattataaaatttgatccactttrattactttcttagaataaattcttagaaacaaaatcacaagcaattggtaatgtcgaattccaagattatgagaacaattagagacaatgtcatttacaaagctcatgttaatttatatgcagccaaaaaaattgatatcgtagggcctgatatggtttggatctgtgtcctcacccaaatgtcatgaagaattgtaatccccattgctggaggtgttgaccggtgggaggttattggatcatgagggttgtttcctatggtttaacaccatctccccttagtgctgtcctcgggatagtgagttattgtgagatctggtgatttaaaagggtgtggcacctcccccactctcatcctcctgtgctggccatgtgaggtgcctagctcaccctttgccttccaccaagtttggaagcttcctgaggtctgtttagaagcagaagccgctatgcttcctgtacagcctgcagaactatcagcc

SEQ ID NO: 613092 - DNA, 599 bp, Homo sapiens
ctcgtgcctcagcctcctaagtagctagaattacaggcgcccaccaccaggcctggctaagttttgtatttttagtagagatgaggtttcagtatgttggccaggttggtctcaaactcctgacctcaggtgatccacctgcctcagcctcccaaagcgctgggattacaggcgtgagccattgtgcccggcctatatgagtcttttatttgaagttgcagtgagctatgattgcaccactgatccccagcctgggtgaaacaatgggaccctgtctcccaaaataataataatgataataataataatatgagtcttttctgttttatgccactgcacttttgggatattttgttatgtagcaatgaatggctggaagaactyccctttccattgtctagacattgcatgagttttatgaacaattgtgcccttaaggagggaagggtgcctgataatggctaagactgaattctctctttaggctaatttaagtggatttaaaagaagtggacatgtgctgtttcctctttatctgagttggtagactaagattcatttatggtctttaccatgatgaagtcaagggataggcctat

SEQ ID NO: 613093 - DNA, 599 bp, Homo sapiens
ctcgtgcctcagcctcctaagtagctagaattacaggcgcccaccaccaggcctggctaagttttgtatttttagtagagatgaggtttcagtatgttggccaggttggtctcaaactcctgacctcaggtgatccacctgcctcagcctcccaaagcgctgggattacaggcgtgagccattgtgcccggcctatatgagtcttttatttgaagttgcagtgagctatgattgcaccactgatccccagcctgggtgaaacaatgggaccctgtctcccaaaataataataatgataataataataatatgagtcttttctgttttatgccactgcacttttgggatattttgttatgtagcaatgaatggctggaagaacttccctttccattgtctagacattgcatgagttttatgaacaattgtgcccttaaggagggaaggstgcctgataatggctaagactgaattctctctttaggctaatttaagtggatttaaaagaagtggacatgtgctgtttcctctttatctgagttggtagactaagattcatttatggtctttaccatgatgaagtcaagggataggcctat

SEQ ID NO: 613094 - DNA, 581 bp, Homo sapiens
tacaggaagaaaagcggcttctattttaaaatattttcttatgtcagatgaagctggtttatatccacaacccttcctttcatgtcatctcttaacttattttcccaccacttaagcatgctggctgctgccaaaagtgagatcttctgccctaccrgggctaatggttcatcagcaagcaaggccagtcacaagagccatctcagtggctggtcggatagattctgggtcagatacagaaggagcaggaactcaaaggacctgatgtcttacaaagcactcagctctggctctgagagtggcaatctgggaacatactggaaatgtggggagccacagcagaggggagcttgcatgggtatggaagctataatcagaggccagcctccaaagctgcttggattaaagatccatggtgcaggtccctgaggtgaccaggccagaggtcgcccccttgcctctgcagtggatcctctgtgctgtacactgagccatccagggccaggccagggctcctgcaggatgcatgcagggtctcctgcagggaccggagaacttgatactgttggtgcaattgcagg

SEQ ID NO: 613095 - DNA, 581 bp, Homo sapiens
tacaggaagaaaagcggcttctattttaaaatattttcttatgtcagatgaagctggtttatatccacaacccttcctttcatgtcatctcttaacttattttcccaccacttaagcatgctggctgctgccaaaagtgagatcttctgccctaccagggctaatggttcaycagcaagcaaggccagtcacaagagccatctcagtggctggtcggatagattctgggtcagatacagaaggagcaggaactcaaaggacctgatgtcttacaaagcactcagctctggctctgagagtggcaatctgggaacatactggaaatgtggggagccacagcagaggggagcttgcatgggtatggaagctataatcagaggccagcctccaaagctgcttggattaaagatccatggtgcaggtccctgaggtgaccaggccagaggtcgcccccttgcctctgcagtggatcctctgtgctgtacactgagccatccagggccaggccagggctcctgcaggatgcatgcagggtctcctgcagggaccggagaacttgatactgttggtgcaattgcagg

SEQ ID NO: 613096 - DNA, 581 bp, Homo sapiens
tacaggaagaaaagcggcttctattttaaaatattttcttatgtcagatgaagctggtttatatccacaacccttcctttcatgtcatctcttaacttattttcccaccacttaagcatgctggctgctgccaaaagtgagatcttctgccctaccagggctaatggttcatcagcaagcaaggccagtcacaagagccatctcagtggctggtcggatagattctgggtcagatacagaaggagcaggaactcaaaggacctgatgtcttacaaagcrctcagctctggctctgagagtggcaatctgggaacatactggaaatgtggggagccacagcagaggggagcttgcatgggtatggaagctataatcagaggccagcctccaaagctgcttggattaaagatccatggtgcaggtccctgaggtgaccaggccagaggtcgcccccttgcctctgcagtggatcctctgtgctgtacactgagccatccagggccaggccagggctcctgcaggatgcatgcagggtctcctgcagggaccggagaacttgatactgttggtgcaattgcagg

SEQ ID NO: 613097 - DNA, 621 bp, Homo sapiens
aattcacctgcttgctaaaatttatttgtaacycgaaaatcaatactcatgtcattttctcggtcattcacagatgtgtgcagaacagcaaaaatttgagaactcaatgtgcatgttcccagctgaaatcaaacaaggtgatactctgcctttgtttcagctctcatcctgtaaacaagtgccctttttgcagtctatcgagtgccatatttttcatatttttgtgcgttttgttggtcattttgctgtttaaaatgccctcaagcataatgctgatgtgctgactcgtattcctaagtgcaagaaggctatgacaggcctgccaaggaaaataacatccattagagaagcttcattcaggcatgggttatggcgctgttggtggtgagttcaatgttaacgaatcaacaaaaaatattaaataaggtgtttttaaacagaaacacacatgaagcaagattatctattgattagttgacaatagctcacagaaatctaaacctatgtttcccttaagagcaatgggtcagtgttcgctaattcagtgttcatagtgactttataaaacacaattaccatgaataatgagaagtgactatatctattcaaccaattatttat

SEQ ID NO: 613098 - DNA, 600 bp, Homo sapiens
agatctagcaggcagaaaatcagtaagggtakagctgaactcaacgataccatcaattaaatggaaataatgggcatctatggaatactttatccagtacagcagaatgtacactcccgccaatctcacatggaaaattcacgaagatagaccacaaaggaagaaaggctattacaaggaagaaaagatagtctttcaataagttgtgctataacaactggacatccacatgcaaaacaaaacaatacaaaacaaaactagaaacagaccttactcccatcagaaaaattaacgtgaataggttataaacttaaatgtaaaactataaaatctttagaagataacataggagaaaatctagacaacattggttttttagatgagtttttagatacaacaccaaaggcgtgaactgtgaaggaaataattaataagctagacttcattaaaactataacttgctgctctatgaaggacattgtcaagaaaatgaaatggcaagacacagactgggagaaaatatttgaaaagacaaatgtgataaagaactattatctgaaatatacaaaaaactcttaaaactcaaccataagaaaataa

SEQ ID NO: 613099 - DNA, 615 bp, Homo sapiens
agcttaaaattaaaacaattgaactcatggagatagagaatagaatgatggttaccagaggctgtgaagggtagtgacggggggtactggggttggttaacgggtacaaaaaaatagttagaatgaataatatccaatatttgatagtacaatagggggactagtcaataataatttgactacattttaaaataactgaaagaatataattggattgtttgtaactcaaaggrtaaatgcttgtggtaatggatatcttgtttaccatgatgtgattatgcactgcatatctataccaaaacatctcatgtactgcctataattatatatacctactatatgcccacaaaaattaaaaatttaaaaggactaaatatggccgggtgtggtggctcatgcctgtaatcccagcactttgggaggccaaggtgggtggatcatctgaggtcaggagttcaagaccagcctgatcaacatggagaaaccccatctctactaaaagtacaaaattagccaggcgtggtggtgcctgcctgtaatccccactactcaggaggctgaggctgaagaatcacttgaatccaggaggtggaggttgaggtgagccgagatcac

SEQ ID NO: 613100 - DNA, 615 bp, Homo sapiens
agcttaaaattaaaacaattgaactcatggagatagagaatagaatgatggttaccagaggctgtgaagggtagtgacggggggtactggggttggttaacgggtacaaaaaaatagttagaatgaataatatccaatatttgatagtacaatagggggactagtcaataataatttgactacattttaaaataactgaaagaatataattggattgtttgtaactcaaagggtaaatgcttgtggtaatggatatcttgtttaccatgatgtgattatgcaytgcatatctataccaaaacatctcatgtactgcctataattatatatacctactatatgcccacaaaaattaaaaatttaaaaggactaaatatggccgggtgtggtggctcatgcctgtaatcccagcactttgggaggccaaggtgggtggatcatctgaggtcaggagttcaagaccagcctgatcaacatggagaaaccccatctctactaaaagtacaaaattagccaggcgtggtggtgcctgcctgtaatccccactactcaggaggctgaggctgaagaatcacttgaatccaggaggtggaggttgaggtgagccgagatcac

SEQ ID NO: 613101 - DNA, 181 bp, Homo sapiens
attctaagtgaagtaactcagaaatgaaaaaccaaacaycatatgttcttgctgatatgtggaggctaaactatgaggaggtgaaggcataggaatgatacaatggactttgggaacttgggggtggagagtgggaagggggcaaggaataaaagacaacaaatatggtgcagtgtatact

SEQ ID NO: 613102 - DNA, 489 bp, Homo sapiens
gtggcatgtgtctgtaatcccagctactcaggaggctgaggtaggagaatggtttgaacctgagaggcrgaggttgcagtcagctgagatcgcaccacagcattctagcctgggcgacagagcaagactctgtctcaaaataaaataaaataaaataaaataaaataaaataaaataaaataaatagaattagaattaagtagaaaataaagataaatattattctgagaaacttttgttccatatatgcatacatgtacataaatgtagcacatgtatgtgctgggtttccatgtagctgtgtggacaaaacattttgaaaaatgctattgtagagaagcttttgtatgttaggagaaggaaatgtacaagaacactcactgaagcattgtttataattgtgtaaaattaaaagcaatctaagtgttcatcaacagaagaacagataaatatatagtggtctgttcatgaaacaaagcagttcaaatg

SEQ ID NO: 613103 - DNA, 570 bp, Homo sapiens
tagaatgatttgagaatgtctattaagtcaaagatgtgtattatttgtgattcagaaattctattcacaaggagctctgtacaagatacccataactacgttctttgaaattaaaaaaaattgaagcaatctaaatgcccataaatgggggaatggataaaaaggatacataaaacatggtatatttatacaatgggatgttatacagtagttaagatgaatgaagcaggcctagatttagcaaattgaaaaacctcaaaaccataatgtcaggcaaacaagtgtggtttacagaattatagatacaatttaacagtatttacctaaagcttataagatagctgggcgggctggctcacacctgtaattccagcactttgggaggccaacgtaggcggctcacctgaggtcaggatttcaagaccagcctggcctacacgggaaaaccccgtctctactaaaaatacaaaaaatagctgggtgcagtgacaygtgcctgtaatcccagctacttgggaagatgaggcaggaggatcgcttgaacaagggaagtggaggttgcagtgagcc

SEQ ID NO: 613104 - DNA, 581 bp, Homo sapiens
  misc_feature 101: n = A,T,C or G
acttatgactgatcttaggtagatttgatttaaagccttttgaatgagttaaatcaattttcatttaagaagaaggaggaatagaaggaggaggaagaggnagagtgagatgaagaagaaggaaagcacaccacattaaatatagtgccaattggatacatttttcagattaattttgcactaaaggaggaagcagaatattaatttggtttatgagtgcatggttactaattgaagtgaatacttgtcaagtcatwacaaggagaaatgtctctaattaaacatattaatcataaatttagagaggatatttttgcacactgtgctataagcatacaagaaggatagccactgtcacatttaaacagtacacgtttaaattattttacttaaggaaaaaatactaagcttgtatattctgtatagtttcctcatgtttattttttataaaaacagcatatggacttttaatctgtttcacatttctaaacgttaaatataatcctttaaaatgaaattcaaatgggctttcttccaggtcaacaaataaatatatgatgatgaattatgtagttaattcc

SEQ ID NO: 613105 - DNA, 581 bp, Homo sapiens
  misc_feature 101: n = A,T,C or G
acttatgactgatcttaggtagatttgatttaaagccttttgaatgagttaaatcaattttcatttaagaagaaggaggaatagaaggaggaggaagaggnagagtgagatgaagaagaaggaaagcacaccacattaaatatagtgccaattggatacatttttcagattaattttgcactaaaggaggaagcagaatattaatttggtttatgagtgcatggttactaattgaagtgaatacttgtcaagtcataacaaggagaaatgtctctaattaaacatattaatcataaatttagagaggatatttttgcacactgtgctataagcatacaagaaggatagccactgtcacatttaaacagtacaygtttaaattattttacttaaggaaaaaatactaagcttgtatattctgtatagtttcctcatgtttattttttataaaaacagcatatggacttttaatctgtttcacatttctaaacgttaaatataatcctttaaaatgaaattcaaatgggctttcttccaggtcaacaaataaatatatgatgatgaattatgtagttaattcc

SEQ ID NO: 613106 - DNA, 422 bp, Homo sapiens
ttagtgatatggtttggctgtgtccccacccaaatctcatcttgaattgtagctcccataattcttacctcttgtaggasggaccctgtgggagataattcaatcatgggggcagtttctctcatactgttctcgtggtagtgaatagttctcacgagatctggtgattttataaggggtttccgctttcacttggctgtcattctttctcttgcctgccatcatgaaagatatgctttttgccttctgcaatgattgtgaggcctccccagacagatgaaactgtgagtccattaaacctatttttatttataaattacccggttttgagcatgtcactatcagcaacataaaaacagactaatacagagtttcacccattagaagagtcatagaacagggaaagaaatgaaaactccaca

SEQ ID NO: 613107 - DNA, 422 bp, Homo sapiens
ttagtgatatggtttggctgtgtccccacccaaatctcatcttgaattgtagctcccataattcttacctcttgtaggagggaccctgtgggagataattcaatcatgggggcagtttctctcatactgttctcgtggtagtgaatagttctcacgagatctggtgattttataaggggtttccgctttcacttggctgtcattctttctcttgcctgccatcatgaaagatatgcyttttgccttctgcaatgattgtgaggcctccccagacagatgaaactgtgagtccattaaacctatttttatttataaattacccggttttgagcatgtcactatcagcaacataaaaacagactaatacagagtttcacccattagaagagtcatagaacagggaaagaaatgaaaactccaca

SEQ ID NO: 613108 - DNA, 548 bp, Homo sapiens
ctgacttcaaaatatattacaagcctacagtaaaaaaacaaaactaaactaaacaaaaaacaggctgatactggtataaaatggatacctaaactaacagaacaaaatagagaacccagaaataaagccacatatttacagccagcaaatctttgacaaagccaacaagaacttacactggggaaaagacactattttaaacaaatggtgatgggaaaattggatagtcacatgtagaataacgaaaccggactcctatctctcaccacatacaaaaatcaactcaacaaatgggttaaagacttagacgtatgacccccaaatacaaaaatactacaagcaaacctagggagaactcttatagacattgagctaaggaaagaatttatgacaaaaccttcaaatgcacaggtagtaaaaacaaaaataaacaaatgagwctcaactacagaacttctgctcagcaaaattcaaaataactggactgaaaacacaacctgaaaaatgggcaaaaatatctgtaaactattcatccaacacggaagtaa

SEQ ID NO: 613109 - DNA, 548 bp, Homo sapiens
ctgacttcaaaatatattacaagcctacagtaaaaaaacaaaactaaactaaacaaaaaacaggctgatactggtataaaatggatacctaaactaacagaacaaaatagagaacccagaaataaagccacatatttacagccagcaaatctttgacaaagccaacaagaacttacactggggaaaagacactattttaaacaaatggtgatgggaaaattggatagtcacatgtagaataacgaaaccggactcctatctctcaccacatacaaaaatcaactcaacaaatgggttaaagacttagacgtatgacccccaaatacaaaaatactacaagcaaacctagggagaactcttatagacattgagctaaggaaagaatttatgacaaaaccttcaaatgcacaggtagtaaaaacaaaaataaacaaatgagtctcaactacagaacttctgctcagcaaaattcaaaataactggactgaaaacacaacctgaaaaatgggcaaaaatatytgtaaactattcatccaacacggaagtaa

SEQ ID NO: 613110 - DNA, 520 bp, Homo sapiens
agatcattaatatttccaaaattttattttcttattgacaaaatagaaatataaataatgtcttcagtagaaggattgtaaagctcaaataaagacaattcatgtgaagcacttagccaagtgtatgatccctagcattttagaaagcaatagatgatggttgctattatcactcataaggctatttatcaagggtatctttgccatgaggtaggctttagggacagcaagctttctagaggcaagtgtatcayggactgcaaatgcattccaagctactaacgtaggatgcccaaacccaaagagctggaaagcttcaggataaattcatccttctgatagggctgaaatacaaatagaaatggcaagaggggtacatttccatttcattttagatcataattattgacaagaaagagctattaagagtctgagagaagagacaggcatgataatcactgtatttcttaaagataattctgatagcagaaagaacagagtatatgaaagtggagagggt

SEQ ID NO: 613111 - DNA, 520 bp, Homo sapiens
agatcattaatatttccaaaattttattttcttattgacaaaatagaaatataaataatgtcttcagtagaaggattgtaaagctcaaataaagacaattcatgtgaagcacttagccaagtgtatgatccctagcattttagaaagcaatagatgatggttgctattatcactcataaggctatttatcaagggtatctttgccatgaggtaggctttagggacagcaagctttctagaggcaagtgtatcacggactgcaaatgcattccaagctactaacgtaggatgcccaaacccaaagagctggaaascttcaggataaattcatccttctgatagggctgaaatacaaatagaaatggcaagaggggtacatttccatttcattttagatcataattattgacaagaaagagctattaagagtctgagagaagagacaggcatgataatcactgtatttcttaaagataattctgatagcagaaagaacagagtatatgaaagtggagagggt

SEQ ID NO: 613112 - DNA, 525 bp, Homo sapiens
gcttttcaatttggggttctaatctgaaaaaaatggctccctgtggtagagaatgtaattattattatctaygcataacaataatcatataaaattataataataaacatccttgaaactaccacccaacatgaaaattataaccttatgattttaacaaactgagtatgaaacaacttcaaataactgggtattcctcttcataatccatattggattgtttaatagcatataataagacaaagtaacagtaacttgaaaaaaaaatagttaaccttctcaagcgaaagaagtctggaagaaggaggaccaggattgaggctccatggtgaccaaggatctgagacttccttcatttgctttgccatctttaacttgaagcttttttttgtaagatcgctttttagtccaagatggctgtaagagttccaagcttcatgtctgcattccagacagcaggagaagctttcctgcaaaactcacccaactacttcagcttatatctcattcacaccccaaccctga

SEQ ID NO: 613113 - DNA, 535 bp, Homo sapiens
gcaaacatgttccaccagatcatcagtcagaggatctgaacttgatcccccttttttgtatttactggagctggaggtactagagcagcactgtatctcttgtgtctggcattgttcaatccagatgttagttgggacagaaagaataacccagagccctggaacaaactgggtcccaatgatctatacaagttctactcagtgaatgtggattacagccaactgaagaaagaaggtccagatttctaaatgaaatgtttcactataaagctgctttagaatgaaggtcttccagaagcaatccacacaattttccacttaaccaggaaatatttctcctctaaatgcatgaaatcatgttgatgtaatctactrgggagattacactgattaataaataactgaaacttgaaaaaaaaagttattatccaacttgatagaaaactggagtctggaaatctgaaatatcaccttcctcttttcatgcggctcttcttcctgcttgtcaatggaattcactttccgtggtaccatg

SEQ ID NO: 613114 - DNA, 620 bp, Homo sapiens
gtgtgtaaaactcatttggtgataacatccaaaatgaattttaggcctgatatgatttggatgtgtgacccctccagatttcatgttgaaatgtgatctgcgatgctgaaggtggggcyaggtgggaagtgttaaatcatgggggtagatccctcatgaatagcttagcaccacttccttggtgattagtgagttctcattcagctagttcactcaagatctggttatttaagagtgtgggacctccccctgctctctcttgctccctcttgccatgtggtatactggctccccctttgccttctattatgactaaaaagcttcctgaggccctcaccagaagctgagctgatgttggtgccatgcctgtacagcctgcagaactgtcagctgaaataaacctcttttctttataaattacccagtctcagatattcctttgtagcaattccttttagctgtgtccccactcaaatctcatcttgaattgtagttcccataatccccatgtgtcatgggaaagacctggtaggaggtaattgaatcatgggggcagctacccccatgctgctgttctcatgatagtgagtgcattcccatgagatctgatggttttataa

SEQ ID NO: 613115 - DNA, 554 bp, Homo sapiens
gattctatgaacagactaaaaaaaccattggagtgtacattttaagtgggtgaattgtatctatgtgaattctatctcaataaaaccgtaaaagaattgaaagcagagtctaaataaagatatttgtacacccatgttcatagcagcattattcacaatagcyaaaaggtagaagcaacccgagtgtctatcaacagacgaatggataaacaaaatgcagcatacaatggaatattattcagctttaaaaaggaaggaaattctgacacacactacaatgtggatgaaacttgaggacattgtaccaagtgaaataagccagacacaaaaagacaacaactctatgatttcacttacgtgaggtacatagtgtagtcaaattgatagagacagaaagcagaatggtggttgctagggggtggtggggaggatgaatggagagttgttgtttaatggtatagagttttaattttgcaagatgaaaagagttctgaagattggttgcccaacaatgtgaatacacttaatgctactaatctgaacacttaaaaatg

SEQ ID NO: 613116 - DNA, 616 bp, Homo sapiens
gacattccttgcagctttaacattctatgagcataaggagtatatgggcatgattttaaggactggttgtttatgagccaatcagaggtgttgaataaacacctccctactaggtcaaggtagaaaggggagggcaaatattggaaaaaaaaaacatgatgagaagtctataaaaattgtgtgctaccaaagatctgtcttatttggcagctgctgcctcacccacagcttttgatatctaggaggactcttctctcccaaactgtaagtaaaaaagcttcctttgtatacctggacagcaccagtgaataggggttaataatactactaagctatagaagggaagattggtttgcctttgttttcgggaaaaacttgatggtggctgaaacatgatggctctgcttgaaggaaatgcttgtttcctctctctaagtataaatgctcattcacacctttcctgactttttgaraggtggcaaaatgcccaagattgattgccagttacttgtgttacctgaatgaggcccttgtgagtctctgatctaggaaaaacaacttgaacactcctatcgttaggttctaatcagtttttgagattcctgttcatttcaac

SEQ ID NO: 613117 - DNA, 605 bp, Homo sapiens
tattttgatacatttgctctactatctgaaaaataggcattgtgagaatatgttgcctttttaaaaaataacttctctttaaatagttacctagggctccattagacaatttggatgcaccagagcttgaactctgctaccctgctattcatcactttagctaaggcacatctgggtagcacccaggcccaggttagagccagagatactggggcagggaatggggaaatgttgaatatctaagaggtcctttggcttcattccaagtttagaggaaagagcaccaytcaggactcgttctgggctgctccgcgtgtgttaaagggcactggaaatcaggctgtcctaggactgccctagatcatcccactgcacttgtcactgggacattggggtggataatgaagctattggcagctttaagcatcatgtacaaaagtgctgcatgcagtgcctagaaatcatgggctatcaataaataagcctcctcatatttgccttaaaaatccatttgtcttgtacatagagaagcaaatgaactttctgctgccttctatttctccaggaattaaatatccatgttacaaataattatgttttcacag

SEQ ID NO: 613118 - DNA, 605 bp, Homo sapiens
tattttgatacatttgctctactatctgaaaaataggcattgtgagaatatgttgcctttttaaaaaataacttctctttaaatagttacctagggctccattagacaatttggatgcaccagagcttgaactctgctaccctgctattcatcactttagctaaggcacatctgggtagcacccaggcccaggttagagccagagatactggggcagggaatggggaaatgttgaatatctaagaggtcctttggcttcattccaagtttagaggaaagagcaccattcwggactcgttctgggctgctccgcgtgtgttaaagggcactggaaatcaggctgtcctaggactgccctagatcatcccactgcacttgtcactgggacattggggtggataatgaagctattggcagctttaagcatcatgtacaaaagtgctgcatgcagtgcctagaaatcatgggctatcaataaataagcctcctcatatttgccttaaaaatccatttgtcttgtacatagagaagcaaatgaactttctgctgccttctatttctccaggaattaaatatccatgttacaaataattatgttttcacag

SEQ ID NO: 613119 - DNA, 588 bp, Homo sapiens
accaccttctgggattattttcaagaaaaattatatagtgcatgtaaagccattagcagagtgcttgacaatacatgatcacttgttgttattattattattgggctgattttcccttttgtttcattaagaaaatatctttctttcttggtaattgtcaactcctttgtacaaatgcctaaactgagagagaaagtttgcaccttgctctgaagatcacacccaggttggcttttttcagcatgatgatctggaggccaggtccaaagctaaaagtctttgactccaatattacagctaatatataaacagggcaaacwtgctctgctggtggctgggacataatgggccttagaaggtcatcttctctagaaattgttgcccactagcttgtcctattaccccagtaacagcattgcagtttcattcttttggggtaagacaagaacctctgttgaaatggagaggcaacaatgagatcatcagttataccttctcatgaattagctcagtggctactgactttttatatcaagggacagagtactgacagcctaccctgaagggatgcagaaaatgtggagaaat

SEQ ID NO: 613120 - DNA, 588 bp, Homo sapiens
accaccttctgggattattttcaagaaaaattatatagtgcatgtaaagccattagcagagtgcttgacaatacatgatcacttgttgttattattattattgggctgattttcccttttgtttcattaagaaaatatctttctttcttggtaattgtcaactcctttgtacaaatgcctaaactgagagagaaagtttgcaccttgctctgaagatcacacccaggttggcttttttcagcatgatgatctggaggccaggtccaaagctaaaagtctttgactccaatattacagctaatatataaacagggcaaacatgctctgctggtggctgggacataatgggccttagaaggtcatcttctctagaaattgttgcccactagcttgtcctattaccccagtaacagcattgcagtttcrttcttttggggtaagacaagaacctctgttgaaatggagaggcaacaatgagatcatcagttataccttctcatgaattagctcagtggctactgactttttatatcaagggacagagtactgacagcctaccctgaagggatgcagaaaatgtggagaaat

SEQ ID NO: 613121 - DNA, 545 bp, Homo sapiens
atctctttgcatctcaatctcatttcttaaaatgggaatctacctcatgatgttcttacagggatgaaatgactaaaagtttctaggctggacgtggttgcttactgctgtaatcccagcactttggaaggcagaggcaagaggatcgcttgagctcaggagtttgagaccagactgagcaacacagtgggaccttgtctctactaaaaatcaaaaacattagccagatgtgttggtgcatgcctgtagtcccagctactcaggaggctgacgtggaaagattgatcacctgagccctggaggtcgaagctggagtgagctatggtcataccactgcactccagcctggatgaccctgtctcaaaaaaaaaaagagtaagatcctgtctaaaaaaaaaaaraaagaaagaaaaaagaaaagaaaaagtttatattgcgtaattattgttaatggtaactatcataattattgaagcatttactattctatcttataactaggtcttccaatagtgcataaacttctcaaaagtgaaaactagtat

SEQ ID NO: 613122 - DNA, 631 bp, Homo sapiens
tgcttaaccattaggagcttcagtttccacctttgtaaaatgagtatcatattaactattggtttcttctattctatatatggagtagatagtatgtatgtcaaaacactatttattaaatctaagtcttctggttcagtgttgtgattaatgctgatatgcttggctgttttcaatcctcaagcacagtggattgaaagctaagcaaagggagaactccttccctttattagaagccccatggatcaggtacaaaggtacaaagaagcctttctctcttttgtgacttgcagggcttgatggcctctcagagcgctgtgctcagtacaagaaagatggtgttgactttgggaagtggcgtgctgtgctgaggattgccgaccagtgtccatccagcctcgctatccaggaaaacgccaacgccctggctcgctacgccagcatctgtcagcaggtgctctgccttccccttgggctgaaaaagagtaggctagagttttcttcagagcttttcttttcaattatactataactacamatggacctccttttccctcaccagtatatcctagtggcatttttcacaacttttgctatagccaactgtggtagggaaagatttggtcccaca

SEQ ID NO: 613123 - DNA, 554 bp, Homo sapiens
atctaccacacccacctaggacacaggagctgggatcagatccttcattcaagattagatgactgctttgctgaaaatccaaccacatggagttatgtagtcattcaggagtatgttcttgtttactttttaaaacatttttttaaaagatttaaccaattgttgcacagtagcctgtggtgtccaatggcacctataatttatttcaccttactgatctggttttaagaagaatggccagctggatgtggtgcctgaagcctgtaatcccagcactttaggaggctgaggcaggtggatggcttgagcccaggagattgagaccagcctgggcaacatggcaaaacctagtctcaacaaaagatacaaaaattagccaggcatggtagcatgttcctgtagtcctagctactcagtaggctgaggcaggaggattgcctgagccccagcaggtcgaggccgcagtgagctgtgatcgcaccaccgcactccagcctggwtgacagagaaaaaccctgtctcaaacaaaaacaaacaaacacacaaacaaaaaa

SEQ ID NO: 613124 - DNA, 496 bp, Homo sapiens
atggaatcctagggcctactttgtttagtgggtaggcaaggtgcaaaggagacaggaataaccagaagtatgggaaacccaacatgtagtgataacttctgtcggaaagtgatccagaagcatgctgcagagaggctgaggaagggttgaagagtgtcttttggatttgataattagtcattaatgggtttctgtaagaacagcttctggagttaggaagagccagttttcagggggctaaatggtgtccggagagtagatcatcagctcccaaatacggtcaattcttaaaaattattctacattcaagtagcaaaaataatgataatataatatccttgttaaaaaaaagataaattgattattagagatcyttgttctgaaagtatgctctttcctaaaaaaaaaaaaaaaaaaactaagtccttttttgaaataatagtgatttgggaggatagtctgttacatttatgtctttacttaaaaaaaatggcaa

SEQ ID NO: 613125 - DNA, 358 bp, Homo sapiens
caagtgggacaagatcaattaacatgtatttaaaaaatttaaaaatacctgctaggtgttatgtcagtttgatagttgcgtcaagcagccctttatcatcaaggagacttgaagacttgaggaatgcatagtaagccacgtgtgttacatgagacrgggggaaaatcacctaactttccaaaacactgaattttgattgtgtgatttcattcacacaaataaaacatggtgtgtgtgtcttgcctgtgttgttgcctatctgggagccatgctctaagaacaggtttctcatgttagtccactggctgaggtaaatcctcacattacatgacagtcattgtgtccctgcaacccagaa

SEQ ID NO: 613126 - DNA, 613 bp, Homo sapiens
ttagctaggtttgtgctttggactgaatgtttgtcctcctcctgcccagccaaaattcgtgtyataaatcctaatctccaatatgatggtatttggagatggggtctttggaaggtaatcaggtcataagggtgcagacctcagtaatgcatgttctttattagtgtccttataagaaaagacaggagagatcacttctcttctctgctttctcacatgcaaaccggaaagagagccctcaccaaaacttgaccatgctggcaccctgatctggaacttccagctttcagaattttgagagataaatgtgtctgttgtttaagccacctagtctttgagaatgtgttacagcagctcaagtagactaagaccagaagggagaaatgcaaactatatcagtgcaaattacagaaaaatgtacagagatatgaccattttatttttaatgtggagtataatttagtgaaggagaaaagaagggtatggggatggcaatttcctgttttgatatctacacttctgcaaagatcattacttttataatcataattaagcatttgattcaacactgagtcttgtgttagacactgggaaggtgaacatgacagtcagg

SEQ ID NO: 613127 - DNA, 613 bp, Homo sapiens
ttagctaggtttgtgctttggactgaatgtttgtcctcctcctgcccagccaaaattcgtgttataaatcctaatctccaatatgatggtatttggagatggggtctttggaaggtaatcaggtcataagggtgcagacctcagtaatgcatgttctttattagtgtccttataagaaaagacaggagagatcacttctcttctctgctttctcacatgcaaaccggaaagagagccctcaccaaaacttgaccatgctggcaccctgatctggaacttccagctttcagaattttgagagataaatgtgtctgttgtttaagccacctagtctttgagaatgtgttacagcagctcaagtagactaagaccagaagggagaaatgcaaactatatcagtgcaaattacagaaaaatgtacagagatatgaccattttatttttaatgtggagtataatttagtgaaggagaaaagaagggtatggggatggcaatttcctgttttgatatctacacttctgcaaagatcattacttttataatcataaytaagcatttgattcaacactgagtcttgtgttagacactgggaaggtgaacatgacagtcagg

SEQ ID NO: 613128 - DNA, 436 bp, Homo sapiens
aagccaaatacagtcaacttatcttcaacaaagcaaacaaaacataaaagcagggaaaggacactctattcaacaaatggtgctgggataattggctagccacatgtaggagaatgaaactggatcctcatctctcacctyatacaaaatcaacccaagatggattaagctcttaaacctaagacctgaaaccataaaaattctagaagataacattggaaaaacccttctagacattggcttaaggaaggatttcatgaccaagaacccaaaagcaaatgcaataaaaacaaagataaatagctgggacctaaacttataattttatatatatatgtgtgtgtctgtgtgtgtatatatatgtatgtgtgtatatatatatgtatgtatatatatacatacatatacatatatatagtaaataataaattaaaga

SEQ ID NO: 613129 - DNA, 577 bp, Homo sapiens
cagttttggtaagcccacatgctaaccatagccaaaatgagtaaaaaacaaacgtcaatggagagcttctttgaaaargggaaaatacccaattatgaaacagcagaagactaagactgtgagcaaaaagaaagctccatttaaaagaaaataccaagtgtcctacttaaattacaggtctattgcaacaggtgagtcacattctccaagcccactatgtataacatatggcaactggctatccaacaaagccatgaaaccttcaaaactgcttcaccacatagagacaaagcaccctgcattaaaaggtaagcctctgcagtttttcaaaagaaaaaaaaaacatgaacataacgaacagaagcaattattgaaggacaccgcttcatcaaatgtgtctgcactcagaataattcttggtggctaactgcactgctaaagctaagaagccctttactattggtgaagaattgatcctgcctgttgctaaggacatatatcatgatctttaggacagactgcagttcaaaaggtggcatgtgttcctctttcacctagcaccataactagatgaatt

SEQ ID NO: 613130 - DNA, 577 bp, Homo sapiens
cagttttggtaagcccacatgctaaccatagccaaaatgagtaaaaaacaaacgtcaatggagagcttctttgaaaaagggaaaatacccaattatgaaacagcagaagactaagactgtgagcaaaaagaaagctccatttaaaagaaaataccaagtgtcctacttaaattacaggtctattgcaacaggtgagtcacattctccaagcccactatgtataacatatggcaactggctatccaacaaagccatgaaaccttcaaaactgcttcaccacatagagacaaagcaccctgcattaaaaggtaagcctctgcagtttttcaaaagaaraaaaaaacatgaacataacgaacagaagcaattattgaaggacaccgcttcatcaaatgtgtctgcactcagaataattcttggtggctaactgcactgctaaagctaagaagccctttactattggtgaagaattgatcctgcctgttgctaaggacatatatcatgatctttaggacagactgcagttcaaaaggtggcatgtgttcctctttcacctagcaccataactagatgaatt

SEQ ID NO: 613131 - DNA, 577 bp, Homo sapiens
cagttttggtaagcccacatgctaaccatagccaaaatgagtaaaaaacaaacgtcaatggagagcttctttgaaaaagggaaaatacccaattatgaaacagcagaagactaagactgtgagcaaaaagaaagctccatttaaaagaaaataccaagtgtcctacttaaattacaggtctattgcaacaggtgagtcacattctccaagcccactatgtataacatatggcaactggctatccaacaaagccatgaaaccttcaaaactgcttcaccacatagagacaaagcaccctgcattaaaaggtaagcctctgcagtttttcaaaagaaaaaaaaaacatgaacataacgaacagaagcaattattgaaggacaccgcttcatcaaatgtgtctgcactcagaataattcttggtggctaactgcactgctaaagctaagaagccctttactattggtgaagaattgatcctgcctgttgctaaggacatatatcatgawctttaggacagactgcagttcaaaaggtggcatgtgttcctctttcacctagcaccataactagatgaatt

SEQ ID NO: 613132 - DNA, 604 bp, Homo sapiens
actggcagcacatttcagtgacacagtatgggtcacaaaacttgcttacttgtgtgacatattcaacctgctcaacaaattcaacctgtcactttgggggagaacaacagctgggttcaagttggcagataaagtggcagcattcaaagccaaactaaaattatgggggccactagtgaacgtggggatttctgacatgtttcaaacattaggagagactttgagagagactgagccagggccttttttytttcagctggtgggtgatcacctatctcagctttcaaaagagtctgagcattacttcccaaccacaaaagacccccagactgggaaggaatggatacacgacccatttgtgaataagccaggtgaattgactttgtccacgctagaataggatcaactgcttgacactgcaagtgacagtggccttaaaaggatgtttaagacaacttcaaatcctaactgtcaaggtggaatatccggcaattgccacaagagcactgaaaagcctgtttccatttctaacatcctacctttgtgaaacagggttttctgcagtgacagcaaataaaacgaggttacagagtagactgaatgt

SEQ ID NO: 613133 - DNA, 497 bp, Homo sapiens
atcttcaattttaatgactctttccgcaatgacttgcagattgccaccttattactgtgtcttcacatggcagaaggggagagagatagagcaaacgttctgrtctttgttcctctttttataagaacactaatcccatcatgggggcccaaccttcatgacctcatctaaatttaattacttcccaaaggccccgcctccaaatatcatcacattgtggattagggcttcaccatatgaatatttggtgggaacacaaacattcagtctataacactgtcttatctcttttttctccttgacggtttagtcttttctccttatgttcacattcttctgtccttttggcttctggtttgataggttacaattctagctaccttccgaataactagcgatttcagttttaattccaggttctttggcgaaacccactttgagacaactatctgtgtagaaaaattggccatgaccacaggatgggaagatattgcata

SEQ ID NO: 613134 - DNA, 497 bp, Homo sapiens
atcttcaattttaatgactctttccgcaatgacttgcagattgccaccttattactgtgtcttcacatggcagaaggggagagagatagagcaaacgttctggtctttgttcctctttttataagaacactaatcccatcatgggggcccmaccttcatgacctcatctaaatttaattacttcccaaaggccccgcctccaaatatcatcacattgtggattagggcttcaccatatgaatatttggtgggaacacaaacattcagtctataacactgtcttatctcttttttctccttgacggtttagtcttttctccttatgttcacattcttctgtccttttggcttctggtttgataggttacaattctagctaccttccgaataactagcgatttcagttttaattccaggttctttggcgaaacccactttgagacaactatctgtgtagaaaaattggccatgaccacaggatgggaagatattgcata

SEQ ID NO: 613135 - DNA, 490 bp, Homo sapiens
gactctttccgcaatgacttgcagattgccaccttattactgtgtcttcacatggcagaaggggagagagatagagcaaacgttctggtctttgttcctctttttataagaacactaatcccatcatgggggcccaaccttcatgacctcatctaaatttaattacttcccaaaggccccgcctccaratatcatcacattgtggattagggcttcaccatatgaatatttggtgggaacacaaacattcagtctataacactgtcttatctcttttttctccttgacggtttagtcttttctccttatgttcacattcttctgtccttttggcttctggtttgataggttacaattctagctaccttccgaataactagcgatttcagttttaattccaggttctttggcgaaacccactttgagacaactatctgtgtagaaaaattggccatgaccacaggatgggaagatattgcataagcattgc

SEQ ID NO: 613136 - DNA, 497 bp, Homo sapiens
atcttcaattttaatgactctttccgcaatgacttgcagattgccaccttattactgtgtcttcacatggcagaaggggagagagatagagcaaacgttctggtctttgttcctctttttataagaacactaatcccatcatgggggcccaaccttcatgacctcatctaaatttaattacttcccaaaggccccgcctccaaatatcatcacattgtggattagggcttcaccatatgaatatttggtgggaacacaaacattcagtctataacactgtcttatctcttttttctccttgacgrtttagtcttttctccttatgttcacattcttctgtccttttggcttctggtttgataggttacaattctagctaccttccgaataactagcgatttcagttttaattccaggttctttggcgaaacccactttgagacaactatctgtgtagaaaaattggccatgaccacaggatgggaagatattgcata

SEQ ID NO: 613137 - DNA, 497 bp, Homo sapiens
atcttcaattttaatgactctttccgcaatgacttgcagattgccaccttattactgtgtcttcacatggcagaaggggagagagatagagcaaacgttctggtctttgttcctctttttataagaacactaatcccatcatgggggcccaaccttcatgacctcatctaaatttaattacttcccaaaggccccgcctccaaatatcatcacattgtggattagggcttcaccatatgaatatttggtgggaacacaaacattcagtctataacactgtcttatctcttttttctccttgacggtttagtcttttctccttatgttcacattcttctgtccttttggcttctggtttgataggttacaattctagctaccttccgaataactagcgatttcagttttaattccaggttctttggcraaacccactttgagacaactatctgtgtagaaaaattggccatgaccacaggatgggaagatattgcata

SEQ ID NO: 613138 - DNA, 490 bp, Homo sapiens
aaataaaatgggagaacaatcaggattaaattaatatgcaatgttaagtatagttgtgtgagattagaagcatatgaatggaaaatgacattaaataacaaagatacttcagagaatcctaagtattccttctcttgttggacaagttttttttggaaattgctatatgcacagttaatcaacaagtattttctgggcccttattctggaacttgctctaaatgtgtatatttcctttgtgccaagccttgcttttttgcccccgttttaagaacccattgtctgtgtagctggtgaatagaaataatgatcccaacagcctacctggagattttctggcattgtaaacctaactaagtatctttaggcgtgatgattttggttgaatgcaccgagatcgtattactcatagaaataataaaaacatccmggaggttgttagcagacacaaccaaagaatggtttactgtagaaaatactttagagtctg

SEQ ID NO: 613139 - DNA, 566 bp, Homo sapiens
ttcacccaagccaaaaagaagaattgttcattcaaactggaaatgatctccagcttggaaatgagactyctcatgagcttattctaagatcagagtctgaaaattattttctcaaaagttacaaataaatgtcttttaacagtactgtcagactagtgaccaacaagttactttatgaggatggatgatgatattagagttcaagcaattgtccagtttgtttcgatgccacagtttgcttttaaattcccatagtgagcttccatcttgagacccactcaacacagaaggattacataaaggttgatcacccacgctctacagatgaacaaattgagacccagagatgctaaactgctctgcaggtcacaaacctgaacagcagcatagccaaaatgggaacggagctcttctgacttcaagcccctgcacttttttcttaaccacattaattttatgaatatctatgtggtcaaagtctcttttgtaaaatctgagtataagctgaactagatcatgtctctgtaagctaagatggcagaaacacattgtcatgttagtttgga

SEQ ID NO: 613140 - DNA, 593 bp, Homo sapiens
atttatccatctttttctgggtaaaaaaagtgggggtcactgctaccacccagatcatcttacctctcactggtatacccctggtacaatgtggtgatcattccttcactctttcctgcctcttgccctaaaagtcttagaataagttgcagagctgccatgggtggtattcctgtctagtgctccattggccaccccaagaacatgcagcaacacctgtaggctgaaagagaaaacccagccttcccctgagagaaacacgcagagatccctcacacccatcctccccccactcccaacacacacactgaaaacaaaaccactaacaacaacaaagtaaaaaacagctgtgtgyagtgatggaaagacttcctcttagcacttgccattccctctgcttggaatgcatgtaaaaaacttttttataggggctaaaattgtacactataaccaattctcagtccctagaccccattctttgttcctcttcttcctgattttcttccctagtccatttctttttgtccagtattccttttgttcataggcagttccactgtgagtcctgtactctttctcattcattcatggct

SEQ ID NO: 613141 - DNA, 612 bp, Homo sapiens
cagacaataggacacaatcataagcttatgggaaaaggcttaatctcattatcaaagaaatgcaaattaaaatcatggtgtgtatttcatacctaaaaggttggcaacaattaaaaattccaaaaataagagttggttaggaagtgaatcactcagactcaagccctactaagggaatataaattggtaccaccactttggaaagcaattggacattgtctaataaatgtgacaatatgaataacttttgacccagcaattcttcttctagagaataaaaataaatgaattacaactacatgcaataacctggatgaatcttataaacataatgtcgttagaaactagtcataaatacacataaataaatctttcaaatttgtatttgctgaactaaaactataggccacatttttggagtaaatctttaaacaaaagcaaggaaaggattactgagagtctggattgyggtgaaaaattacattaaaagaatggaagtaagtaaatgaaaaaaatacatacctagcaagagaacctgcccccaaaatttcagcgtaggttctattttccctaagtgtcggctggtctgagaaataaagagaaagagtacaa

SEQ ID NO: 613142 - DNA, 575 bp, Homo sapiens
gataggacatctgaacagctgaacatgaaacatcatggaaacaataagatcattgttgctactttcaaggaaatacagataatcaaattcagattggacatgggattgaccagatagcaacggaagcttgtgcttattttcaacctattgtggaattgtcttgaattgatgatttggggcccatgaagagctttttatttttttgaaaataaattcacaattttagaaagtagtcatatggattttgatgtatagtataaaccatgctgtaaatttctgaagctctttttggcatgcaaatgttaatacatctgcatcagaaagtattttcctgtctgtattcagtttcaagaagaaaaacyatgataatgaaattaaattattttctccaaaaaaacacagtatcccagaaaagatataggggggtctgacatgaatcccaggagatcctgaaatttctagagatttgagcaatgtgtgaccctttactcttcaagaaaggaataaggatgaagacaggaactaaaatcattcctgccaactagaaacagaattgtgacctctccctaatgaaa

SEQ ID NO: 613143 - DNA, 607 bp, Homo sapiens
tggcagctttttggtgcccaacccaatgcccaccagccaagttgtggcttggctctgagattcccttgaccaacttagccagtgatttttccttaccttagcccattagaataaaagtaatgaagggaaggaaacccaaatttctgaaaacttgtgaaaggtggagtcaccttctggaagtaactgccatttactgcaattgctctcagttacctttaaaactaaagcccackgatcactgttaacacccaaaatcatatgccctatgacagcacaaacaaactcttgggacaaaaaagccaaagagatcagggtgctcaaatgtaaaagacagcagagcttggacctgagagaaacagagaggcacagaaagagagagaaagttgctcatgacttccaggctctatgaggaagacagtagactttaaaggtatcagcagtctttcctttgggtccctttgtggttgccagaattgttaaaaataaagtttcaacaaatttaatttaaagatgtaattggcttttattagtgactcatgaaccaggcagcatcccacctacaaatacagggaaactccactgaacataacagaacagtggttttttt

SEQ ID NO: 613144 - DNA, 475 bp, Homo sapiens
ttcactctatgaaaacaggattttttttctctcttgttcactaccgtatcctcaacacctaaatagcaaactagtacatttccaatgttcaataaacatctgttaaatgaatgaggccagtgtggtggcttatgcctgtaatcccagcactttgggagtctgaggcaggaggatcacttgggtgcaggaattcaagaccaacctgagcaacatggcaagaccttgtctctattttttaaaaaaatgactgaattayccttccttagatattttttcccatccaattcaaacaaaggttgccatttggttttttgtttgtttttgttttttgagaaggggtcttgctctgtcacccagggtgtactgcagtgacagaagacagatcatggctcactgcaacctccacctcctgggctcaagtcatcctccagtcctcttgcctcagccttccgggcagctgagactacaggcagtg

SEQ ID NO: 613145 - DNA, 612 bp, Homo sapiens
tttcccagaaatataaataaacctgtacgtttggaaatggtataatgggaaaaatattaagtttttttatccagtcactatggagcacagcttttttcaaacagatagctaacaataggctatgaaattcttctttttgaaacataatcagaaaaccagagaccaacaaacattcagaaaatgatgcaaatacaagacagacactaaaacatatacacaaaaagtgaaaatatttgaagataacagagacagtgcaaagagttctaaacaaacaaaaacatatacaacctgagataataaacaatattgaacttgaatcattcaggagagactgggtcacactgcagtaagaaaaaaacaaaactgtagtggcttaaaaaatgaagatggatggcctgtaatcccagcactttgggaggccaaggygggcagataatgaggtcaagagatcaagaccatcctggccaacatggtgaaaccccatctctactaaaaatacaaaaattagcagggtgtggtggcacacttatgtagtcccagctactcgggaggctgaggcaggagaatagcttgaacctgggaggcggaggttacagtgagttgagatcatgc

SEQ ID NO: 613146 - DNA, 612 bp, Homo sapiens
tttcccagaaatataaataaacctgtacgtttggaaatggtataatgggaaaaatattaagtttttttatccagtcactatggagcacagcttttttcaaacagatagctaacaataggctatgaaattcttctttttgaaacataatcagaaaaccagagaccaacaaacattcagaaaatgatgcaaatacaagacagacactaaaacatatacacaaaaagtgaaaatatttgaagataacagagacagtgcaaagagttctaaacaaacaaaaacatatacaacctgagataataaacaatattgaacttgaatcattcaggagagactgggtcacactgcagtaagaaaaaaacaaaactgtagtggcttaaaaaatgaagatggatggcctgtaatcccagcactttgggaggccaaggcgggcagataatgaggtcaagagatcaagaccatcctggccaacatggtgaaaccccatctctactaaaaatacaaaaattagcagggtgtggtggcacactyatgtagtcccagctactcgggaggctgaggcaggagaatagcttgaacctgggaggcggaggttacagtgagttgagatcatgc

SEQ ID NO: 613147 - DNA, 612 bp, Homo sapiens
tttcccagaaatataaataaacctgtacgtttggaaatggtataatgggaaaaatattaagtttttttatccagtcactatggagcacagcttttttcaaacagatagctaacaataggctatgaaattcttctttttgaaacataatcagaaaaccagagaccaacaaacattcagaaaatgatgcaaatacaagacagacactaaaacatatacacaaaaagtgaaaatatttgaagataacagagacagtgcaaagagttctaaacaaacaaaaacatatacaacctgagataataaacaatattgaacttgaatcattcaggagagactgggtcacactgcagtaagaaaaaaacaaaactgtagtggcttaaaaaatgaagatggatggcctgtaatcccagcactttgggaggccaaggcgggcagataatgaggtcaagagatcaagaccatcctggccaacatggtgaaaccccatctctactaaaaatacaaaaattagcagggtgtggtggcacacttatgtagtcccagctactcgggaggctgaggcasgagaatagcttgaacctgggaggcggaggttacagtgagttgagatcatgc

SEQ ID NO: 613148 - DNA, 585 bp, Homo sapiens
ccccacctctaaaagatatacaaaaagaactaacaaataaccaggcatggtgctgcactcttgtagtcgcagctacttgggaggcccacgaattcraggctgcggtgagctataatcgtgccactgtgctccagcctgggtgacagaagaagtccctgcactcccagcccccacagaaagaagtaaaatatggttagatgacacatttctcaagaagcaatgctactgaaatttcaaattgcacaattcagaaaatatctggggccaagatggctgtctctatgcagccaggtggaacagctgccatggaaggaccaggatgactggcggcacttctaacagatcttcagatggaaagcactgagagtggacagagggaagatacagaagctgggtgaaggaggaggaagtcgggagccctggacggggctactgtgcactggtactcattgctggctcccaataattcctggagaactggcaaagaacaacctacttacacctctgcactctggaaccctggaaggaggagaccccttgaccaccagagataattgagttggcagggagagctccttagacaag

SEQ ID NO: 613149 - DNA, 585 bp, Homo sapiens
ccccacctctaaaagatatacaaaaagaactaacaaataaccaggcatggtgctgcactcttgtagtcgcagctacttgggaggcccacgaattcgaggctgcggtgagctataatcgtgccactgtgctccagcctgggtgacagaagaagtccctgcactcccagcccccacagaaagaagtaaaatatggttagatgacacatttctcaagaagcaatgctactgaaatttcaaattgcacaattcagaaaatatctggggccaagatggctgtctctatgcagccaggtggaacagctgccatggaaggaccaggatgactggcggcacttctaacagatcttcagatggaaagcactgagagtggacagagggaagatacagaagctgggtgaaggaggaggaagtcgggagccctggacggggctactgtgcactggtactcattgctggctcccartaattcctggagaactggcaaagaacaacctacttacacctctgcactctggaaccctggaaggaggagaccccttgaccaccagagataattgagttggcagggagagctccttagacaag

SEQ ID NO: 613150 - DNA, 586 bp, Homo sapiens
cttttgtatcctccttatttactttcaaaaccagtatgtaaagacacttgttctatacaatgtttcctgacctagttgtgagaatttatgttactttcttcttggtgtccattatacattatacagagtagtagagtcagcatttttacattgcaatttatttatttgcttgcctgtttttttcatatatatttctccctcgctaggctgtgggcttctttgagttcaagaggtccagatctttgaagtcattaaggtttaattaattgaactatgtgaaagttgggaacttcttcatgctctccggcataccaaattatcttaytatcaacatgcaaaaaagtttttcctagtctttgtaaatgccacttgcaaacatcttcatcttgagtttgaacttttaagtggtactcaactatatttgtaatgtttttattaaatagtcataatttaatgactaaaagagaggcaattactttgagtttgtcacatactgcctgtctcgggtttttaattgtaaaatagggatagtaattattaataattttttcatatattttcctgaaaggttaaatgatatattaaa

SEQ ID NO: 613151 - DNA, 574 bp, Homo sapiens
ttaaaagatcaaaggtttatctgaaataaagagaaactacaggattttgttctgagattcagtcaagacctggtaagacagataatgtagagcaagctttgatcttatcaatgtttatatcagctgaaagaaacactcgcacactcagagtctttcctagtgattaaagaatttaattttcattcacaattcacagtaaggaattgttgtaagaaaatactggatttcaatatagcattttctcctttttttgttgttttaatggcataatatgctatgtgtgaggtcaacatgaggagagacaaaaagaacaagtttataaatgtggttatattgtcccctaacctaggaaaaaatgacaatattgacattaaaatttgcattgtttgcctctggctttcatgggaattgttttgtttgtttgtttttgtttgttttgtttttgttttttacagttggtatgccattttttaatgttacytataactagcattagaattgtatgggagcttttgtttcttttgttttggaggatgtgattcttaaaatgaaattaattttttagaacataaaa

SEQ ID NO: 613152 - DNA, 574 bp, Homo sapiens
ttaaaagatcaaaggtttatctgaaataaagagaaactacaggattttgttctgagattcagtcaagacctggtaagacagataatgtagagcaagctttgatcttatcaatgtttatatcagctgaaagaaacactcgcacactcagagtctttcctagtgattaaagaatttaattttcattcacaattcacagtaaggaattgttgtaagaaaatactggatttcaatatagcattttctcctttttttgttgttttaatggcataatatgctatgtgtgaggtcaacatgaggagagacaaaaagaacaagtttataaatgtggttatattgtcccctaacctaggaaaaaatgacaatattgacattaaaatttgcattgtttgcctctggctttcatgggaattgttttgtttgtttgtttttgtttgttttgtttttgttttttacagttggtatgccattttttaatgttacctataastagcattagaattgtatgggagcttttgtttcttttgttttggaggatgtgattcttaaaatgaaattaattttttagaacataaaa

SEQ ID NO: 613153 - DNA, 386 bp, Homo sapiens
aattccatatgtctgggacattaggtactgatgtgaacatggaagaaaagtgtgggggcaaaggagaaaaaggataaatgggaatttctatttctgtctacatyatgccaagcattataattttactttctagaccaagaagatatttttatgttttttttggggcagacaagtgacaaagtgagatatttatgctttagaaaggttagttgtatcaaaatgtagaaaatattttaagaaataagaaataaagactgtatggcaaactttgagatattttaaaaataggctacattaagaacctaaactagaaacatgtttttctaagagaaataatgtgttggtactattaaacatgataggggaaaattgatgggaatcagtga

SEQ ID NO: 613154 - DNA, 386 bp, Homo sapiens
aattccatatgtctgggacattaggtactgatgtgaacatggaagaaaagtgtgggggcaaaggagaaaaaggataaatgggaatttctatttctgtctacattatgccaagcattataattttactttctagaccaagaagatatttttatgttttktttggggcagacaagtgacaaagtgagatatttatgctttagaaaggttagttgtatcaaaatgtagaaaatattttaagaaataagaaataaagactgtatggcaaactttgagatattttaaaaataggctacattaagaacctaaactagaaacatgtttttctaagagaaataatgtgttggtactattaaacatgataggggaaaattgatgggaatcagtga

SEQ ID NO: 613155 - DNA, 386 bp, Homo sapiens
aattccatatgtctgggacattaggtactgatgtgaacatggaagaaaagtgtgggggcaaaggagaaaaaggataaatgggaatttctatttctgtctacattatgccaagcattataattttactttctagaccaagaagatatttttatgttttttttggggcagacaagtgacaaagtgagatatttatgctttagaaaggttagttgtatcaaaatgtagaaaatattttaagaaataagaaataaagactgtatggcaaactttgagatattttaaaaataggctacattaagaacctaaactagaaacatgtttttctaagagaaataatgtgttggtactattaaacatgatagrggaaaattgatgggaatcagtga

SEQ ID NO: 613156 - DNA, 574 bp, Homo sapiens
tttccagtttgctactgtgcccacctagttacatcacttattcaactgacctcttttgcctctgtaaatatttcasttatcaattcctctctcatagtatattttggtaaagatttcaagttatcaaagacagtttataggtgtttataatatatagtttatattttacattaattcattaataatggggtagtcttctagaatttagaatattttttaaatgattatttttcttcatataaaccataaataatcatcttctattagaaggcctttaagccttcttagattaatcatggttatatttgaataggttatgcatattgcagaaaatattatatctttctccgcagaattgtcccttaaaattcaagttatttagtggcttctattttgctaagccatatacatgagttagaactttcattaataagccattttattcatgcttctgatattttgccaaaaaatagtatcaattacaatagaaaccagaataaaaatggattattgcattttaagaagtagatatgcattaggatcctaggagtatcattataatagagaataaaat

SEQ ID NO: 613157 - DNA, 571 bp, Homo sapiens
ggccattctctttattttgttgtttccattgattctgttgctgcatcattgccattgaaactgcttctgcagtctggtaatgattgacctttgtgaccaggatgcccttagtaacgcagatctctcagccttcatggtgtagacttcgaagttattacatgtttttaaagttcacgtacatattctcagccattgtttccaaagtaccagcaccccactctggcagctagaacttttagctttagccacacacatagtgagcaaattgacccttcttctcacactcaaaacctgacgtgaaacccacatcttagcctggatatggcctagaccttcatggtaagttatcctttgattggcttttttctattttctctagccaatattagttgtggtagtttgaaactgtaactcaggttgaaataatgttacaggaagaaattagagatccattttgtctttgttaccagatctatatctctggycctttatatcctgtgtagcaccattttgtaggtagtggaaggtctcaccttattctgtaaaatcccatgtcatctttcccaagttg

SEQ ID NO: 613158 - DNA, 608 bp, Homo sapiens
aataggagattatttttcaaagatacctactgagtgcagaagtcagaaaagcaattctttgttgagaagcgcaggttatgttacatagtcttgtaccaacaaggtctcactrttatcaaattcattccctctaagttgaaaccaaataagatatatttacttcattagaacaagatgtgttgttctatctgctggataattagtgtgttaatagtaattttggtacaacaagttactctgttcctactagccaaaatagtatcattataaatattcaactagctcaactctaggctcaacaaattataataaaagtggaaaaaattttcacaataacaaaagtgctactgtgatacataaatgtgaaacaatacattgtacaatatgaactgtatgagcacatctttaatttattacatatttatcaaaggacttctataagttagattttgcaagtggcaggagaccaagatggaatacacatagtctgggtctttaaggtgctcataatacaatagagctgtctctattgaatttctgcatttttccaacagaatttcctaactatgttttttatttgtttatccacttgtccacttaacaaataa

SEQ ID NO: 613159 - DNA, 611 bp, Homo sapiens
caaagtttgggttgaatgaggatgtaatgtgtcaacttctaattcaatatgttaatgataaaaatctggtttctcaagaactagattatggagacagggacctgtctttattcccttaaagacaactagggaagaacccgatccagctctcaaattgaaaagtcagatgagctgactcccacacctaaagccagcacatgggattccctataccattttgccctgctcagtgcctctgtcccttcccctcgggcagctgttgccaccccagatcccaccccagatccttctcctgctcaagctgttcctcctccttacatctaattcttgggagttatcatcccatgagcctgtcccctgtcaacctaaatacctctccctaaagggactccagcatgaggtacagcaatgtaaaaaggacrttcagaacttcccttttctctccacacataaggagtcagccccaactctcttccccttaaaagacatgccactaggaggaggaaccattgtatttgtgaatgctctcttgaccagttcagaagcctgaagtttgaaaaaggaaattaagccattgttagacgacccttatgaggtggcaaatcaggttg

SEQ ID NO: 613160 - DNA, 462 bp, Homo sapiens
gaggaaacaataccccattcccctagagggcaggatagggttgaaacctataattgaaggtcttattaaagatgggcttcttgagccctctatgtccccttataacacctcaatattgccagtcaagaaatyacatgggtcataccggctggtacaggaccttagggctattaaccaaatagtccaaactacccaccccattgtcctcgatccttacagcattctcagcaagattccatataataatcaatggtttactgtaatagatttgaaggatgctttttgggcatgtctcctggcagaagataggccagatatatttgcttttgagtgggaggatccccattcagggtagaaacaacaatatcgatggatagtcttaccccaagggttcacaaactcccctaaccttttcagtcaaattttagaacaagtattagaaaaagttatcatcccaaacaa

SEQ ID NO: 613161 - DNA, 462 bp, Homo sapiens
gaggaaacaataccccattcccctagagggcaggatagggttgaaacctataattgaaggtcttattaaagatgggcttcttgagccctctatgtccccttataacacctcaatattgccagtcaagaaatcacatgggtcataycggctggtacaggaccttagggctattaaccaaatagtccaaactacccaccccattgtcctcgatccttacagcattctcagcaagattccatataataatcaatggtttactgtaatagatttgaaggatgctttttgggcatgtctcctggcagaagataggccagatatatttgcttttgagtgggaggatccccattcagggtagaaacaacaatatcgatggatagtcttaccccaagggttcacaaactcccctaaccttttcagtcaaattttagaacaagtattagaaaaagttatcatcccaaacaa

SEQ ID NO: 613162 - DNA, 462 bp, Homo sapiens
gaggaaacaataccccattcccctagagggcaggatagggttgaaacctataattgaaggtcttattaaagatgggcttcttgagccctctatgtccccttataacacctcaatattgccagtcaagaaatcacatgggtcataccggctggtacagsaccttagggctattaaccaaatagtccaaactacccaccccattgtcctcgatccttacagcattctcagcaagattccatataataatcaatggtttactgtaatagatttgaaggatgctttttgggcatgtctcctggcagaagataggccagatatatttgcttttgagtgggaggatccccattcagggtagaaacaacaatatcgatggatagtcttaccccaagggttcacaaactcccctaaccttttcagtcaaattttagaacaagtattagaaaaagttatcatcccaaacaa

SEQ ID NO: 613163 - DNA, 610 bp, Homo sapiens
gtctcctggcagaagataggccagatatatttgcttttgagtgggaggatccccattcagggtagaaacaacaatatcgatggatagtcttaccccaagggttcacaaactcccctaaccttttcagtcaaattttagaacaagtattagaaaaagttatcatcccaaacaaatatgcctgctccaatacgctggtgaagatatagagaaggtagctggcttctctacacatattctcaaccatctgcagttcgaggggttatgagtctcaaagggaaagcttcagtatgtagaacctgaaattaaatatttagaccacttgataagtgcagagaagtgaagaatagggcctgaacgagttgagggaatcgtgtccctacccttgcctcaaacttaagaactcaggaaatttttarggttagttggatactgctgcttatggattaactcacatgcactaaacagtaaaattctatatccaaaactttcccaggggaagactgaccatttcctgtggatttctgaggaagtcgatcaggttgaagagctgaaaaaaaggcttataacagcccctctcttagccttaccttccctagaaaagccattccac

SEQ ID NO: 613164 - DNA, 548 bp, Homo sapiens
aatccattgtggctacagcactaatggtcaaagaaagcaggaagttaacctttggaggaaaattgacagtaagaatgccccatcaagttagaactatcttaaaccagatagcagggaggtggcttactgactcaagaatcttaaagtatgagactattctgttagaaaaagatgatttaacattaaccactgataattcccttaacccagcagtttttctaataggggatccaaakctaaagagatagcacacatgtttagatttaactgattaccatacaaaagtctgaccagacctaggagaaactcccttcaggatgggatgacacttatttatagatggttcttcccaggtgattgaggcaaaaagatgcaatgggtattcagtaattgatggagaaactcttgaagaaattgaggcaggaaaattgtctaagaattggactgcccaaacttgtgagctgtttgcactcagccaaaccttaaagtacttgcagaaccaggaaggagccatctataccaattctaagtacgcctttggagtggct

SEQ ID NO: 613165 - DNA, 584 bp, Homo sapiens
tctgttagaaaaagatgatttaacattaaccactgataattcccttaacccagcagtttttctaataggggatccaaagctaaagagatagcacacatgtttagatttaactgattaccatacaaaagtctgaccagacctaggagaaactcccttcaggatgggatgacacttatttatagatggttcttcccaggtgattgaggcaaaaagatgcaatgggtattcagtaattgatggagaaactcttgaagaaattgaggcaggaaaattgtctaagaattggactgcccaaacttgtgagctgtttgcactcagccaarccttaaagtacttgcagaaccaggaaggagccatctataccaattctaagtacgcctttggagtggctcatacattcggaaaaatttggactgaacgaggtctcattaatagtaaacgtcaagatctttttcataaggagatattcacccaagtattgaataaccttcagttgccagaagaaatagtgactgtccatgacccagacaccagaaaagtctttcttttgacagtctaggaaataacccagcagattacatagg

SEQ ID NO: 613166 - DNA, 605 bp, Homo sapiens
gcaggaacacagtggaaaagtttgagcaggggaatcacaagattagatttgagtatcagggcattctggtcatggtataaagcagagattggcaaacttttcctgtaaagtgccagatarcgaatatgatgggccatgtggtctctattacagctattcaactctgccattgtagggtgacaggagtcatagataatggatgggcaaagaggcatgattgtactccaataaaagtttgtataaaaaaccatttagaaagctgaatttggcctgtggcctatagtttctggcccttcatatagaagatagatggaggataatcacataaaaagatttaaagatgaagtttttgtagtagttcatgcgatggtcttttttttttgtaacaaatctgtggcctagtatcaatctattatgaaagtttgatccatcaagggtaaaatgaatcaagttcagaagctcaatttacacatttaaacatgtaggtccttctttggcattattttattttgattaatttttttaacttaaaaaataagaacagtaatttgtagggtttcttttttccctgtgaaagccatcagttaaggggccacgtttaacta

SEQ ID NO: 613167 - DNA, 609 bp, Homo sapiens
ataaaagtttgtataaaaaaccatttagaaagctgaatttggcctgtggcctatagtttctggcccttcatatagaagatagatggaggataatcacataaaaagatttaaagatgaagtttttgtagtagttcatgcgatggtcttttttttttgtaacaaatctgtggcctagtatcaatctattatgaaagtttgatccatcaagggtaaaatgaatmaagttcagaagctcaatttacacatttaaacatgtaggtccttctttggcattattttattttgattaatttttttaacttaaaaaataagaacagtaatttgtagggtttcttttttccctgtgaaagccatcagttaaggggccacgtttaactaggaaatataaatataaaataaataagtatgtatttccagtggcactggaaagataaagcaaaggcagaaaagaggtgcagttaatatggcttagtgataattgagtttaaaaagctaggggacagataaaatctcaggtcattcataagttttcagattgtgcacaagcatttacaatgatcatggggaaggagtaggaatttctcaggttaacagagaagtgcaaacagt

SEQ ID NO: 613168 - DNA, 609 bp, Homo sapiens
ataaaagtttgtataaaaaaccatttagaaagctgaatttggcctgtggcctatagtttctggcccttcatatagaagatagatggaggataatcacataaaaagatttaaagatgaagtttttgtagtagttcatgcgatggtcttttttttttgtaacaaatctgtggcctagtatcaatctattatgaaagtttgatccatcaagggtaaaatgaatcaagttcagaagctcaatttacacatttaaacatgtaggtccttctttggcattattttattttgattaatttttttaacttaaaaaataagaacagtaatttgtagggtttcttttttccctgtgaaagccatcagttaaggggccacgtttaacwaggaaatataaatataaaataaataagtatgtatttccagtggcactggaaagataaagcaaaggcagaaaagaggtgcagttaatatggcttagtgataattgagtttaaaaagctaggggacagataaaatctcaggtcattcataagttttcagattgtgcacaagcatttacaatgatcatggggaaggagtaggaatttctcaggttaacagagaagtgcaaacagt

SEQ ID NO: 613169 - DNA, 609 bp, Homo sapiens
ataaaagtttgtataaaaaaccatttagaaagctgaatttggcctgtggcctatagtttctggcccttcatatagaagatagatggaggataatcacataaaaagatttaaagatgaagtttttgtagtagttcatgcgatggtcttttttttttgtaacaaatctgtggcctagtatcaatctattatgaaagtttgatccatcaagggtaaaatgaatcaagttcagaagctcaatttacacatttaaacatgtaggtccttctttggcattattttattttgattaatttttttaacttaaaaaataagaacagtaatttgtagggtttcttttttccctgtgaaagccatcagttaaggggccacgtttaactaggaaatataaatataaaataaataagtwtgtatttccagtggcactggaaagataaagcaaaggcagaaaagaggtgcagttaatatggcttagtgataattgagtttaaaaagctaggggacagataaaatctcaggtcattcataagttttcagattgtgcacaagcatttacaatgatcatggggaaggagtaggaatttctcaggttaacagagaagtgcaaacagt

SEQ ID NO: 613170 - DNA, 434 bp, Homo sapiens
attcataatgttgtgcaatcatcaaaactatgtatttccaaaaagttttttcaccccaaactgaaactctgtactcattaagcaataactcctcattctccctttcctcccaagtccctggtaggaataaattttatggtattttaattaatttaaatgtaaaaaactaaatgcagctggtggctatcatackggacctcacagttctaacaccaccagtatcaacccctggacagatataatcatttctaagctgcctttgcatttcttattattctatttatggtaatctgtaatctattctcccacaaagctggactattcctgtaagaacatatcttataccatttcattcccagctctgaatcctccagtggttacctatgacaattaacaaagaaatccaagctctttactatggtctgtatttatct

SEQ ID NO: 613171 - DNA, 434 bp, Homo sapiens
attcataatgttgtgcaatcatcaaaactatgtatttccaaaaagttttttcaccccaaactgaaactctgtactcattaagcaataactcctcattctccctttcctcccaagtccctggtaggaataaattttatggtattttaattaatttaaatgtaaaaaactaaatgcagctggtggctatcatacgggacctcacagttctaacaccaccagtatcaacccctggacagatataatcatttctaagctgcctttgyatttcttattattctatttatggtaatctgtaatctattctcccacaaagctggactattcctgtaagaacatatcttataccatttcattcccagctctgaatcctccagtggttacctatgacaattaacaaagaaatccaagctctttactatggtctgtatttatct

SEQ ID NO: 613172 - DNA, 434 bp, Homo sapiens
attcataatgttgtgcaatcatcaaaactatgtatttccaaaaagttttttcaccccaaactgaaactctgtactcattaagcaataactcctcattctccctttcctcccaagtccctggtaggaataaattttatggtattttaattaatttaaatgtaaaaaactaaatgcagctggtggctatcatacgggacctcacagttctaacaccaccagtatcaacccctggacagatataatcatttctaagctgcctttgcatttmttattattctatttatggtaatctgtaatctattctcccacaaagctggactattcctgtaagaacatatcttataccatttcattcccagctctgaatcctccagtggttacctatgacaattaacaaagaaatccaagctctttactatggtctgtatttatct

SEQ ID NO: 613173 - DNA, 434 bp, Homo sapiens
attcataatgttgtgcaatcatcaaaactatgtatttccaaaaagttttttcaccccaaactgaaactctgtactcattaagcaataactcctcattctccctttcctcccaagtccctggtaggaataaattttatggtattttaattaatttaaatgtaaaaaactaaatgcagctggtggctatcatacgggacctcacagttctaacaccaccagtatcaacccctggacagatataatcatttctaagctgcctttgcatttcttattattctatttatggtaatctgtaatctattctcccacaaagctggactattcctgtaagaacatatcttataccatttcattcccagctctgaatcctccagtggttayctatgacaattaacaaagaaatccaagctctttactatggtctgtatttatct

SEQ ID NO: 613174 - DNA, 586 bp, Homo sapiens
tctttctctacttaaataattagaaattaaaagtacctcttctgcattctacagtttatgtaatattaaaagaaggaattttggcaaagtaactgaggttatcagttcagttcagtttataaatttagtgacatcaacttgtcccagcaaaataatcagtagatactccataatcaccactgtttctgttttcaagcggagagaaaaaaaataaattaattgtattatatgttacaatcttgggtaaattcttttctaaattgktgggtatagcacagcaaatcaaaggttgataacataaaatagtggactaaacttcagctctaaaaagttaacaaatcttgaagtctgcttgctcagttgtaaaatggggataatattctcacctttgagtatctcacacagttgctgtaggatttatttgagaaaaaatatgcataaagatgctttggacattataaaactgcttcctaatacagagtaaaattataaaatttgatttgaatgataccaactagttggggataaaatcttttacataagaactccctgaaaaaggcaatcatgtgtcatgtcatgtttgtca

SEQ ID NO: 613175 - DNA, 586 bp, Homo sapiens
tctttctctacttaaataattagaaattaaaagtacctcttctgcattctacagtttatgtaatattaaaagaaggaattttggcaaagtaactgaggttatcagttcagttcagtttataaatttagtgacatcaacttgtcccagcaaaataatcagtagatactccataatcaccactgtttctgttttcaagcggagagaaaaaaaataaattaattgtattatatgttacaatcttgggtaaattcttttctaaattgttgggtatagcacagcaaatcaaaggttgataacataaaatagtggactaaacttcagctctaaaaagttaacaaatcttgaagtctgcttgctcagttgtaaaatggggataatattctcacctttgagtatctcacacagttgctgtaggatttatttgagaaaaaatatgcataaagatgctttggacattataaaactgcwtcctaatacagagtaaaattataaaatttgatttgaatgataccaactagttggggataaaatcttttacataagaactccctgaaaaaggcaatcatgtgtcatgtcatgtttgtca

SEQ ID NO: 613176 - DNA, 586 bp, Homo sapiens
tctttctctacttaaataattagaaattaaaagtacctcttctgcattctacagtttatgtaatattaaaagaaggaattttggcaaagtaactgaggttatcagttcagttcagtttataaatttagtgacatcaacttgtcccagcaaaataatcagtagatactccataatcaccactgtttctgttttcaagcggagagaaaaaaaataaattaattgtattatatgttacaatcttgggtaaattcttttctaaattgttgggtatagcacagcaaatcaaaggttgataacataaaatagtggactaaacttcagctctaaaaagttaacaaatcttgaagtctgcttgctcagttgtaaaatggggataatattctcacctttgagtatctcacacagttgctgtaggatttatttgagaaaaaatatgcataaagatgctttggacattataaaactgcttcctaatacagagtaaaattataaaatttgatttgaatgataccaactagttggggataaaatmttttacataagaactccctgaaaaaggcaatcatgtgtcatgtcatgtttgtca

SEQ ID NO: 613177 - DNA, 628 bp, Homo sapiens
taaagatgctttggacattataaaactgcttcctaatacagagtaaaattataaaatttgatttgaatgataccaactagttggggataaaatcttttacataagaactccctgaaaaaggcaatcatgtgtcatgtcatgtttgtcatcaaggatgacaaggtttcaatttgcctaggtcagaaatgttgtggttctattccctcaacaactagttacttctgcttcgagtacatgttttccaaaagctagaaaacacccatcaaaaggctactttccaaacataaaaaataggtttacttcaacacattatgtctgtaggaagagtcaaatgaaacaaaactactgaatcatttccaggatagagtcatagtwtccaaaatttggaacagaattggatgatacttgtaggtcaagtccctttgcaggtataaatcccccctttaaagtggaaaagtatacaaattgtgtaatataggtatatattatagactatacatgactggaatttcagaggcatgtatgcaatatgagtttagcatggagaaatagccaactgggtaaacataattgatccatgctgctatgaaagacaatcaaagctaaagctgattgccagttacacatt

SEQ ID NO: 613178 - DNA, 448 bp, Homo sapiens
ttctttgtgatgcgtgcattaatctcacagagttaaacctttcttttgattgagcagattggaaactctctttttgtagaacctgcaagtggacatttkgcagcgctttgaggcctgtggtggagaaggaaatatcttcacataaaaagtagatagaagcattctgagaaagttctctgtgatgtctgcattcatctcctggagttccaactttctttaggagaaccagttttcaaattctctttttggagaatctgcaaggggacatttcaagcaccttgaggcttaagttggaaaaggaaatatgttcacaaaaaaaaaacagaagaattctgagaatcttttttatgatgtgtacgttcatctaacagagttgaacctttcttttgattgcgtagtttgggaacaccctttttgtagaatcggcaagtggacatttggagcgctt

SEQ ID NO: 613179 - DNA, 452 bp, Homo sapiens
cattaatctcacagagttaaacctttcttttgattgagcagattggaaactctctttttgtagaacctgcaagtggacatttgkcagcgctttgaggcctgtggtggagaaggaaatatcttcacataaaaagtagatagaagcattctgagaaagttctctgtgatgtctgcattcatctcctggagttccaactttctttaggagaaccagttttcaaattctctttttggagaatctgcaaggggacatttcaagcaccttgaggcttaagttggaaaaggaaatatgttcacaaaaaaaaaacagaagaattctgagaatcttttttatgatgtgtacgttcatctaacagagttgaacctttcttttgattgcgtagtttgggaacaccctttttgtagaatcggcaagtggacatttggagcgctttgcggcctatgatagaaaag

SEQ ID NO: 613180 - DNA, 458 bp, Homo sapiens
atagcaatgctctggaatagtgtgtgatggagaaacttttagaccccagcagcagtgttctgtaatcctttgtaagagaaaaacaatcagaccctcatagstgtgttctggaatcccatgtgatggacaaccactcagaacccagcagcagtgttctgtaactatatgtgaggggcaaacattcagaacacagcaggattgttctgtaatcccatgtgagggacaatcattcagaccctcgtggctgtgttctggaatcctaagtgagggacagacattcagacaatcatagcagtgttctggaatcccatgtgagggaaagacattcagaccctcccagcagtgttctggaatcctatgtgagggacaaacattcagacaaacgtagcagtgttctggaaacctatgtaagggaaaaacattcaaacaacaccgagattgttctggaatcctatgtt

SEQ ID NO: 613181 - DNA, 458 bp, Homo sapiens
atagcaatgctctggaatagtgtgtgatggagaaacttttagaccccagcagcagtgttctgtaatcctttgtaagagaaaaacaatcagaccctcataggtgtgttctggaatcccatgtgatggacaamcactcagaacccagcagcagtgttctgtaactatatgtgaggggcaaacattcagaacacagcaggattgttctgtaatcccatgtgagggacaatcattcagaccctcgtggctgtgttctggaatcctaagtgagggacagacattcagacaatcatagcagtgttctggaatcccatgtgagggaaagacattcagaccctcccagcagtgttctggaatcctatgtgagggacaaacattcagacaaacgtagcagtgttctggaaacctatgtaagggaaaaacattcaaacaacaccgagattgttctggaatcctatgtt

SEQ ID NO: 613182 - DNA, 501 bp, Homo sapiens
atagcaatgctctggaatagtgtgtgatggagaaacttttagaccccagcagcagtgttctgtaatcctttgtaagagaaaaacaatcagaccctcataggtgtgttctggaatcccatgtgatggacaaccactcagaacccagcagcagtgttstgtaactatatgtgaggggcaaacattcagaacacagcaggattgttctgtaatcccatgtgagggacaatcattcagaccctcgtggctgtgttctggaatcctaagtgagggacagacattcagacaatcatagcagtgttctggaatcccatgtgagggaaagacattcagaccctcccagcagtgttctggaatcctatgtgagggacaaacattcagacaaacgtagcagtgttctggaaacctatgtaagggaaaaacattcaaacaacaccgagattgttctggaatcctatgttacggacaaccattaataatctcttcacagtgttatggaattct

SEQ ID NO: 613183 - DNA, 458 bp, Homo sapiens
atagcaatgctctggaatagtgtgtgatggagaaacttttagaccccagcagcagtgttctgtaatcctttgtaagagaaaaacaatcagaccctcataggtgtgttctggaatcccatgtgatggacaaccactcagaacccagcagcagtgttctgtaactatatgtgaggggcaaayattcagaacacagcaggattgttctgtaatcccatgtgagggacaatcattcagaccctcgtggctgtgttctggaatcctaagtgagggacagacattcagacaatcatagcagtgttctggaatcccatgtgagggaaagacattcagaccctcccagcagtgttctggaatcctatgtgagggacaaacattcagacaaacgtagcagtgttctggaaacctatgtaagggaaaaacattcaaacaacaccgagattgttctggaatcctatgtt

SEQ ID NO: 613184 - DNA, 458 bp, Homo sapiens
atagcaatgctctggaatagtgtgtgatggagaaacttttagaccccagcagcagtgttctgtaatcctttgtaagagaaaaacaatcagaccctcataggtgtgttctggaatcccatgtgatggacaaccactcagaacccagcagcagtgttctgtaactatatgtgaggggcaaacattcagaacacagcaggattgttctgkaatcccatgtgagggacaatcattcagaccctcgtggctgtgttctggaatcctaagtgagggacagacattcagacaatcatagcagtgttctggaatcccatgtgagggaaagacattcagaccctcccagcagtgttctggaatcctatgtgagggacaaacattcagacaaacgtagcagtgttctggaaacctatgtaagggaaaaacattcaaacaacaccgagattgttctggaatcctatgtt

SEQ ID NO: 613185 - DNA, 500 bp, Homo sapiens
atagcaatgctctggaatagtgtgtgatggagaaacttttagaccccagcagcagtgttctgtaatcctttgtaagagaaaaacaatcagaccctcataggtgtgttctggaatcccatgtgatggacaaccactcagaacccagcagcagtgttctgtaactatatgtgaggggcaaacattcagaacacagcaggattgttctgtaatcccatgtgagggacaatcattcagaccctcgtggctgtgttctggaatcctaagtgagggacagacattcagacaatcatagcagtgttctggaatcccatgtgagggaaagacattcrgaccctcccagcagtgttctggaatcctatgtgagggacaaacattcagacaaacgtagcagtgttctggaaacctatgtaagggaaaaacattcaaacaacaccgagattgttctggaatcctatgttacggacaaccattaataatctcttcacagtgttatggaattc

SEQ ID NO: 613186 - DNA, 406 bp, Homo sapiens
gcagcagtgttccagaaacctatgtgagggactcacattcagaccacggcaggattgttctggaatccyatgtgagggacaaacactcggaacacagcaggagtgttttggattcctatgtgcggaacaaacattcagaacctcgtgacagtgttcgtgaatcctataggaggaactaacattcagaacacagcaggagtgttctggaatcctatgtgaagaacaaacattcagacccccgtagcaatgttttggaatcctatgtgaaggacaaacattcagacgatcgtagcagtgttctggaatccaatgtgagggacaaacatttaagctacggggagggggcgttctggaatcctatgttacggacaaacattcagaacctcgtcgcagtgttcttgaattc

SEQ ID NO: 613187 - DNA, 404 bp, Homo sapiens
gcagcagtgttccagaaacctatgtgagggactcacattcagaccacggcaggattgttctggaatcccatgtgagggacaaacactcggaacacagcaggagwgttttggattcctatgtgcggaacaaacattcagaacctcgtgacagtgttcgtgaatcctataggaggaactaacattcagaacacagcaggagtgttctggaatcctatgtgaagaacaaacattcagacccccgtagcaatgttttggaatcctatgtgaaggacaaacattcagacgatcgtagcagtgttctggaatccaatgtgagggacaaacatttaagctacggggagggggcgttctggaatcctatgttacggacaaacattcagaacctcgtcgcagtgttcttgaat

SEQ ID NO: 613188 - DNA, 218 bp, Homo sapiens
atggaattctacgtgagggagaaacacacagaacccagcagcagtgttccagaaacctatgtgagggactcacattcagaccacggcaggattgttctggaatcccatgtgagggacaaacactcggaacacagcaggagtgttttggattcctrtgtgcggaacaaacattcagaacctcgtgacagtgttcgtgaatcctataggaggaactaaca

SEQ ID NO: 613189 - DNA, 570 bp, Homo sapiens
tgcattatatcacatttccaattccctttttctaataagtttaataaagtttaaattttatgcttaataaccaaaaatacagtgcaattgggaatacatattttttctttatttttcttttttaaattatggtaaaatacacatactgtaaaatttgtcactttaatgaattttaaatgaacagttcagagggcattacattcaccaagttgcacaacctttaccactgtccatttccagaactctttaatcatcccatatagaagctctgtacccattaaacaataacttctcacccacactagtccctggtaatgattattctgtctctgtgatttgcttattctaagtacttcaagcaatatttatccttttgcatctggcttatttcagtaagcataatgttttcaaagtttacatatgttgtagtcattgaagttctgtagtgtatattagaawttcattccttaataaggctgaataagtttccattatgtgaatatgttgtattttgtttattcattcatttattgatgaacctttgagttgcttcctgcttttggttactgt

SEQ ID NO: 613190 - DNA, 522 bp, Homo sapiens
atgaggtggaaatagtaagtatgagacaaaggccaagcaagatgagagcaagtggataagttgaatagcaggtaacccagatcctcatgtcacccaccatgtttgcaccagcaaccttccttcagctcacacctgtgcctgcatttgtgtccctgtggccatctgaaggagggagaaaggggcaatctctgtttaaaggtgtagttgcattgcagcccaatgcaagaatgactctgaaagacagaaggaaattaaaatattccctattagcagcactgggagcagtggccctggccatctactttacatagaagaagcatgacctaaggcaggaatataaacagatttctttgccgtagtcagtgggtgaatcatctgggcagaggcttagacagaaaagaactgaaatatctgagacaaggaagctgggttagargcatatgagtggacatgcaggagcaggcacggagtgtaaagaatcttgtattgcacgttaacactcacaagaaagcactcaccaca

SEQ ID NO: 613191 - DNA, 286 bp, Homo sapiens
tctccatttagatgattcaaagagtatccatgaagaaatgcacattttattgaatatacagaagtgtgattagtggtgaaggagggtgaattctgtttgttatatgactatgacatgtagagaacttctcattcaaggtgagtgtgaaaaaatattacaaaacatgtggagaattaactattagagagataatgaaataattatacaaagaaacctcctagagatgaattcaccacarcaaatatgagaaatattatagcaaactaaattttccttttaagtgagt

SEQ ID NO: 613192 - DNA, 563 bp, Homo sapiens
atataaaaaaaagtgtaaatgcaataaacacaaagaattagtcaattgggagataatgatgaatttatccagataaaaggatttaaaagtcagaaagaccagtcaagaaagtccccaatacatgtatgataggagttycaaaaggagtccaaagagaatggagaagccatatttaaggacagtattcatccactcagcaaactctcactaagggcccactttgatgacgtttccattctaatggtagagaatacttatacacaagaaaacactggcaatgccttcactatttgtatacttgacatgatgccataaaatttccattgcagaggaaagacttgaggactctaatttaaagtataaaacaagtgctgagcagaagaaataaaaatgaatccatatccagacacattgatgactctgaattttagtgtttacaaagcagttctttaaaattaattttcagtaagaggatgtgtatatcaccttcactgttttcctttttgttttgatctattcctcttgcttattctagtttcaaatgatttcttcaaaaaaagtct

SEQ ID NO: 613193 - DNA, 192 bp, Homo sapiens
gaaataaaaatgaatccatatccagacacattgatgactctgaattttaktgtttacaaagcagttctttaaaattaattttcagtaagaggatgtgtatatcaccttcactgttttcctttttgttttgatctattcctcttgcttattctagtttcaaatgatttcttcaaaaaaagtcttaaaagtctt

SEQ ID NO: 613194 - DNA, 669 bp, Homo sapiens
tgtctatacttatactgtatacatacatatagtgtgtatgtatatatgtatatatagtatatatacatacttattttcattctagatagaaatttttgagatgcagttagaagaaaaagtcagaaagaatagtcaagattattccagcagtacaggcatgatgtgatgaatgactacattaaaacatcagcagcaacacagaagagaaatggcagaatagaaaggtaattcaaggtagaaacagctgaacttaataattcatttagaaggaagagtcaaggtatatatactctaaattttcttggcgactggcttgatattatcatcattagctgagatgggcaatgctttaaaagaaatagatttatttgccaaaatataaaatgtgtttatggctatgtcaaatttgagatgcaggtggtgaagacgggggggagaatcagttgacattttaaaatataggtytgaaacctacaggaaaatattggagtaaaaaaaaataaagaaaatcaaacgtcaaaggaaatgctggaagtgtgggaatggataaaaggagcacaggaaaagtgtgcagagcattgttacccaaagtgctgtgggaattttatacacatatgaatacaactcgcaaaacacacaaatatttttcttccctggatcatttactgg

SEQ ID NO: 613195 - DNA, 669 bp, Homo sapiens
tgtctatacttatactgtatacatacatatagtgtgtatgtatatatgtatatatagtatatatacatacttattttcattctagatagaaatttttgagatgcagttagaagaaaaagtcagaaagaatagtcaagattattccagcagtacaggcatgatgtgatgaatgactacattaaaacatcagcagcaacacagaagagaaatggcagaatagaaaggtaattcaaggtagaaacagctgaacttaataattcatttagaaggaagagtcaaggtatatatactctaaattttcttggcgactggcttgatattatcatcattagctgagatgggcaatgctttaaaagaaatagatttatttgccaaaatataaaatgtgtttatggctatgtcaaatttgagatgcaggtggtgaagacgggggggagaatcagttgacattttaaaatataggtttgaaacctacaggaaaatattggagtaaaaaaaaataaagaaaatcaaacgtcaaaggaaatgctggaagtgtgggaatggataaaaggagcacaggaaaagtgtgcagagcattgttacccaaagtgctgtgggaattttatacacatatgaatacaactcgcaaaacwcacaaatatttttcttccctggatcatttactgg

SEQ ID NO: 613196 - DNA, 547 bp, Homo sapiens
  misc_feature 1, 2, 3, 4, 5, 6, 7, 8, 9, 10, 11, 12, 13: n = A,T,C or G
nnnnnnnnnnnnncatttcgagttcaagctcgtaccccctctattaatagtggctactttctagtcttagctggcagggtttcccaagatatgttgatatcttagattatttgtgtcacagaggcaactgcaagttaatctctactctcaggaaaggcttaatgtggacacctataaaatccccagtggtcataacttgcaggaatctctccagaggacagcatcatacccagtagggcgacattaatttcctcaggayagaccaccaattaaaaaaaaatacagaactaggcatgagtcaacttctcccttaaaattgtatttctcatctaaatgaaagcacatttttaagagagaaagatgtgtaagatatagaaatattaaagtaagggctacagtacatataatacaaagcaaatgaagagaggaggctaaatatcaagttgtaggtggtgagttatactcagatacttcatttgacagtttaagaagtcagatctaagtcaaaagaagtaacttctatctctttggaaaagtgaattgataa

SEQ ID NO: 613197 - DNA, 547 bp, Homo sapiens
  misc_feature 1, 2, 3, 4, 5, 6, 7, 8, 9, 10, 11, 12, 13: n = A,T,C or G
nnnnnnnnnnnnncatttcgagttcaagctcgtaccccctctattaatagtggctactttctagtcttagctggcagggtttcccaagatatgttgatatcttagattatttgtgtcacagaggcaactgcaagttaatctctactctcaggaaaggcttaatgtggacacctataaaatccccagtggtcataacttgcaggaatctctccagaggacagcatcatacccagtagggcgacattaatttcctcaggatagaccaccaattaaaaaaaaatacagaactaggcatgagtcaacttctcccttaaaattgtatttctcatctaaatgaaagcacatttttaagagagaaagatgtgtaagatatagaaatattaaagtaagggctacagtacatataatacaaagcaaatgaagagaggaggctaaatatcaagttgtaggtggtgagttatactcagmtacttcatttgacagtttaagaagtcagatctaagtcaaaagaagtaacttctatctctttggaaaagtgaattgataa

SEQ ID NO: 613198 - DNA, 547 bp, Homo sapiens
  misc_feature 1, 2, 3, 4, 5, 6, 7, 8, 9, 10, 11, 12, 13: n = A,T,C or G
nnnnnnnnnnnnncatttcgagttcaagctcgtaccccctctattaatagtggctactttctagtcttagctggcagggtttcccaagatatgttgatatcttagattatttgtgtcacagaggcaactgcaagttaatctctactctcaggaaaggcttaatgtggacacctataaaatccccagtggtcataacttgcaggaatctctccagaggacagcatcatacccagtagggcgacattaatttcctcaggatagaccaccaattaaaaaaaaatacagaactaggcatgagtcaacttctcccttaaaattgtatttctcatctaaatgaaagcacatttttaagagagaaagatgtgtaagatatagaaatattaaagtaagggctacagtacatataatacaaagcaaatgaagagaggaggctaaatatcaagttgtaggtggtgagttatactcagatacttcatttgacagtttaagaagtcagatctaagtcaaaagaagtaacttctwtctctttggaaaagtgaattgataa

SEQ ID NO: 613199 - DNA, 599 bp, Homo sapiens
caaacatttgtttgttcattagtcttaagcaagacttttacggcaggggatgcattaaacctaacgtatgtctgcgaccaagatacttggttgttttaaagatgaagacacaaagccgtgcatatagtttatgcagagcggccttgaactacctgtaatggagtgagatacagttattatgtattaatgctgtgaatcttcatccagagagagaaaacaaacagggaaagaatgcagcatctttgaagataaagacttagagggccccattctgcaattggtattgagtttgcataaactcattttgttgttgttgttgttgcataatttttaaaaacgcaactggtttaaatctgttccctgaggtaatttatgctaaagcagcattctaacaccatagattccctgcttatggcaatctctgcttgggtgtcaggtcggtgtaggttactgagcaaatggccgcttcaaaatttttagggtaattgcctctataactcgtttagcataggccytgtcaggaaatctctaattgtaattgacgcctctgcttccttttatacctccttcttttaaccacattgttgtatcaaaagctt

SEQ ID NO: 613200 - DNA, 614 bp, Homo sapiens
taattatgagaaaattcatgctcaggcacactayagtcaaatttaaaaaaatgataacaagaaaatacagaaagcagctgggtaactatcatcaataataacttgactgtacattgtaaaataactcaaagaacataattgatttgtttgtgactcaatggataagtgcttgtggagatgaatacctcattctccatgatatgattattacacagtgcatgcctgtatcaaacacctcatgtaccccataaatataaacatctactatgtacccataaaatgtaaaattttttaaattttaaaagagaaaaaaaagaaagaactcaaaacagcatacagaataatagttacgtgaattgacactgactttttatcagatactgcaaaaaccagaagataaccagacagcatctttaaggtgatgaaaggaaaaacaacaaacaactatgagtctggaatatcatattatacaaaaatatccttcaaaaatgaaggcagaagcaaaactatattaagatactaaaactaaaaggttatgtcaccagcagacccatactaaattagtagcaagagatgatcttcaggttaaagggaaatgataccagagataatgc

SEQ ID NO: 613201 - DNA, 614 bp, Homo sapiens
taattatgagaaaattcatgctcaggcacactacagtcaaatttaaaaaaatgataacaagaaaatacagaaagcagctgggtaactatcatcaataataacttgactgtacattgtaaaataactcaaagaacataattgatttgtttgtgactcaatggataagtgcttgtggagatgaatacctcattctccatgatatgattattacacagtgcatgcctgtatcaaacayctcatgtaccccataaatataaacatctactatgtacccataaaatgtaaaattttttaaattttaaaagagaaaaaaaagaaagaactcaaaacagcatacagaataatagttacgtgaattgacactgactttttatcagatactgcaaaaaccagaagataaccagacagcatctttaaggtgatgaaaggaaaaacaacaaacaactatgagtctggaatatcatattatacaaaaatatccttcaaaaatgaaggcagaagcaaaactatattaagatactaaaactaaaaggttatgtcaccagcagacccatactaaattagtagcaagagatgatcttcaggttaaagggaaatgataccagagataatgc

SEQ ID NO: 613202 - DNA, 387 bp, Homo sapiens
aagcagctgggtaactatcatcaataataacttgactgtacattgtaaaataactcaaagaacataattgatttgtttgtgactcaatggataagtgcttgtggagatgaatacctcattctccatgatatgattattacacagtgcatgcctgtatcaaacacctcatgtaccccataaatataaacatctactatgtacccataaaatgtaaaattttttaaattttaaaagagaaaaaaaagaaagaactcaaaacagcatacagaataatagttacgtgaattgacactgactttttatcagatactgcaaaaaccagaagataaccagacagcatctttaaggtgatgaaagraaaaacaacaaacaactatgagtctggaa

SEQ ID NO: 613203 - DNA, 614 bp, Homo sapiens
taattatgagaaaattcatgctcaggcacactacagtcaaatttaaaaaaatgataacaagaaaatacagaaagcagctgggtaactatcatcaataataacttgactgtacattgtaaaataactcaaagaacataattgatttgtttgtgactcaatggataagtgcttgtggagatgaatacctcattctccatgatatgattattacacagtgcatgcctgtatcaaacacctcatgtaccccataaatataaacatctactatgtacccataaaatgtaaaattttttaaattttaaaagagaaaaaaaagaaagaactcaaaacagcatacagaataatagttacgtgaattgacactgactttttatcagatactgcaaaaaccagaagataaccagacagcatctttaaggtgatgaaaggaaaarcaacaaacaactatgagtctggaatatcatattatacaaaaatatccttcaaaaatgaaggcagaagcaaaactatattaagatactaaaactaaaaggttatgtcaccagcagacccatactaaattagtagcaagagatgatcttcaggttaaagggaaatgataccagagataatgc

SEQ ID NO: 613204 - DNA, 627 bp, Homo sapiens
catagcacagtgcctggcaaagtagtgaacactgaggaagattttttttgttcgctttaaaaaaaaataaatgtataatcattgagtccaaacatcaggaataactgccataaagcgcagaatrtgcatggtctttcccaaaggggctttggggaacttgtgcatttaagtaaatcagtgcttttgtcacccctctgggggaagagtcactttagaaccatgcaatgtccagagtgctacaaacagcatccaacttaacggtttcaaattctcttttagtcatgagcctgtttctcagccaaagctgtgtccaaaccccaacatataaaccacatgaaatcaaaggtctctggctaatgtaggggctggggcagaggggaaggaatttttagaatcttcactcttccctagtggtgtacctagggtggcgcaggagggtgtttcactttggggtgtaggcaatagggggtatattatctgtagagaatttaaaaacaataatgcaatcgataaacaacaaatataaaccaataatattaactaaaatttggtctgtttttcaataggcagtgctagacagtatcaatgataaaatgctcttccctgtcccccatcccctcccaacac

SEQ ID NO: 613205 - DNA, 585 bp, Homo sapiens
aatctttgctgttctgcagcctccactggtgataccctgrcaaacagggtctggagtggaccctagcaaactgcagcagacctgcagcagaggggcctgactactagaaggaaaactagcaaacagaaaggaatagcatcagcataaacaaaaagaatgttcacacaaaaaccccatctgaaagtcaccaacatcaaagaccaaaggtagataaatccatgaagatgaggaaaaaccagtgcaaaaaggctgaaaattccaaaaaccagaactcctcttctcctccaaaggatcacaactcctcaccaacaagggaacaaaactggatggagaatgaatttgatgaactgacagaagtaggcttcagaaggtgggtaataacaaactcctctgaactaaaggagcatgttctaacctaatgcaaggaagctaggaacctcaaaaaaaggttagaggaattgctaactagaataaccagtttagggaagaacataaatgacctgatggagctgaaaaacacagcatgagaacttcatgaagcacacacaagtatcaatagccgaatcgatcaagtggaagaaagga

SEQ ID NO: 613206 - DNA, 518 bp, Homo sapiens
atggcacaaatgttatagtcctatggctaggatgggccacagggaggtaaagtgcactgcccctgcctccccacatcaccttctgtactagcatgtgtgtgcatttgtgtgtgtgtgtgcctgttgggttcagcctgttttatgtgcgataaaacagaaagcctctgctgcccagttgatgtgtgtgataagaagaggtgcaggtacaggtgagtatgcyagacatctatgcgggtgcacatacacataaaaacacacatgggagggtgttggatgcaaatgggcatgggtggtaactactaaggagacttatttgatgaggaagaggtgaattacatattaggtggtaggagatgtgtgcatatatggcatacctttatgtgtgaatcacagttctagggtgggaggtcctgtatgtgaaaaaagtggtcattggaagggaggggtgcataagcatggatttatgcacaagactatgaccagattcttatcaaacatcacccataaatcagttaagg

SEQ ID NO: 613207 - DNA, 603 bp, Homo sapiens
cataggttcaactacaggatagtggaaaactaygagaggtgaaaggtagattttttaaaacattcacttttttttatttcctcctgtattttatcttcattatataattttgaagttccttagtatcttagtttgagactaagcttcaagaagccttgggagccttcattttttctcctgggaatctgcaaccactacatgaacaaagtggcctgctggggaatgagagaccatgtaggacagagatgaattatcctagctgagatcattttaaccagcccactagtagactagagacacgtgattgatcccagcaaagactgggatcaatatctcctccaccagataggtatcaatatctcctccaccagaagaactatctgctgagcccaccccaaactgccaaatggcatcataagcaaaatcactggttgttgttttgagctgcagtgtttaggggtgatttgttacacagcaaagactaactgatgctgtaagctagcaccaagcactaagaggccagaaaaaaatttacccagaaagaaggagagcatgtgccaaaatatctgaaggaaagagaaagagagcagaattgctatcaaa

SEQ ID NO: 613208 - DNA, 579 bp, Homo sapiens
gacctttttcaacaagatactaccttctctatcaccaaagagcatcattgtccttatataataataataataattatatctgccatttatattgaaaatgatcagtctactaagcacttccatttaattctcaaaataactctatcaggataagcatgattatttccattttattgaggaaagtgggatttagagatgctgtcactttctcatttgttttcagwatgacaccaccacactcagctaagcctgatgtcccctataataagttatgttcataataagttatggagctgggattcaaacataggtctgatctgactgcaatcatagatctggtctgactgcaaagttacttgaaactttgaagtaagcttatcactgtatacatatatatatatagtgcatatatgtgtttgtgtgtatatgtgtgtgtgtatgtgtgtgtgtgtgtgtgagcgagagagagagaatattttccacttaatcttttatagctaaattttctattagggtccccacttgcttgtattttccttctgaattaatatctatcatttgatcgtaattttgtttctt

SEQ ID NO: 613209 - DNA, 566 bp, Homo sapiens
tgtattcaatgcaatatcaatattactttgtttacttgaggttattttatttttaatactctcagatgaataaaacatattcatgaatacgataccagaactggtttaattgaggaagcatcatctattaaatcactgtgtctctgaaactggactgaacagtaatggctaccataagtgggctcaktcacatttcttttggggatatagtaatagcacttaaagaaatttggcttagctgcttagtcttcatctgtttagccggatattttaactggatattccatcatcaattctcaaatcaaaataagccagacatagctgtttgtgaaattcatctttcttttcattctcaggtatcagatagtcatcttggataaaattttagattgatctataacagaattcttctcagtaaaaatgagcttatgttctcaaagccatggtgcctagcacttaataagaacttaattaaggaaagaaattgatatggccagaacctttgtattatgatacatatgtttataaactgtaagatttatagtttcttttgatatttaataata

SEQ ID NO: 613210 - DNA, 637 bp, Homo sapiens
cttcataaattacccaggctcaggtagttctttatagcagtgtgaaaacggactaatgctctcataaatagatactctacatctttcattttaaatttataggaawacttaggatatattgcagattcagttccagaccaccacaattaagaaaatattgcaataaatctagtcacacagatgttattgttatatggtgtgtatgaaagtaatgtttacactacattgtagtcattaagtatgcaatagcattatgtctaaaaatgtacatacttcaatttaaaatactttattgctaaaaaaaatctgattattatcaaagccttcaaggagttttaatcattctgctgttggagtgtcgtaccttagtgttgatggctgctgaccgatcagggtggtagttgctgaaagcggaggtagctgcagcaatttcttaaagtaagacaacaataaagtttgcttcattgatcggttcttcctttcgtgaatgattactctgtagtatgtgatgctgtttgatagcattttacccactgtagaacttctttcaaaattggaaccaatcctctgaaaaccctgctcttgctttatcagctaagtttatgtaatattctcaatcctttttttgtcatttcaa

SEQ ID NO: 613211 - DNA, 637 bp, Homo sapiens
cttcataaattacccaggctcaggtagttctttatagcagtgtgaaaacggactaatgctctcataaatagatactctacatctttcattttaaatttataggaaaacttaggatatattgcagattcagttccagaccaccacaattaagaaaatattgcaataaatctagtcacacagatgttattgttatatggtgtgtatgaaagtaatgtttacactacattgtagtcattaagtatgcaatagcattatgtctaaaaatgtacatacttcaatttaaaatactttattgctaaaaaaaatctgattattatcaaagccttcaaggagttttaatcattctgctgttggagtgtcgtaccttagtgttgatggctgctgaccgatcagggtggtagttgctgaaagcggaggtagctgcagcaatttcttaaagtaagacaacaataaagtttgcttcattgatcggttcttcctttcrtgaatgattactctgtagtatgtgatgctgtttgatagcattttacccactgtagaacttctttcaaaattggaaccaatcctctgaaaaccctgctcttgctttatcagctaagtttatgtaatattctcaatcctttttttgtcatttcaa

SEQ ID NO: 613212 - DNA, 566 bp, Homo sapiens
cctctttctgtagggcttggagcaatggacctcatccctgggcaaggctaaagtataaccaccaactatataacyaccaaccatcctgcctctctacctatgctcaactgcatccactcccccacacatcttgctttcttcctatattttgtgcacaaatcctcttattcacgaccacttactcatgcaaatagccacctggaggctaactgccatcagctggttcaggcacaactttgtggagcccctttctgatcagcataattcttaagaatgctttgcttctctaaccatgcttaggtctctggccatgcttaggcctgaactttcaatgtcctgtttgatctttctcccctgttacatgaagactgagatggggtacaaaacaggttgtttttatagtttagtttttcatagagccgtgaccaaggaaactgcaaagaagctggaaacctatcagaaagtgcctcctcgcatctagacattctaatctcttcattagaaaaaaaaaacagttatattgctaactttggagaaatattaatggggaattttcagagtgaaaa

SEQ ID NO: 613213 - DNA, 566 bp, Homo sapiens
agcctggaaaacagagtgagacaaaagaaaagaaaagaaaaagaaaagaaagagagaaaggggggagggagggaggaaggaaggaaggaaggaaggaaagaggaaggaagggaaggaaaagatctgttcccacagctcaaacaggacaaggaatgacttctgttcctgtgagttagagtgggaaacctcataatttacaggcatccagtgagaatactcagaaagttttgcctgtgtagggaaagctagttctagattaaaccctgctttggtttcagttttaaagagtttaaaaataggacctgagaggatcaaactcttttcaaaaactataaccacatttcagaacaaaccacaagaatatttatagcaattcaatattgagcacctaaaaaggtcactttaagtcgagaaaragagacctaagtgaccctgttagcatgcttagtatgttatgctctgtaccaacttgggactgtgaagagtccctaccaacaagaaaactttcgccagatgcagcctctcaaccttgtacttctcagcctctagaactgcaagaaataaat

SEQ ID NO: 613214 - DNA, 566 bp, Homo sapiens
agcctggaaaacagagtgagacaaaagaaaagaaaagaaaaagaaaagaaagagagaaaggggggagggagggaggaaggaaggaaggaaggaaggaaagaggaaggaagggaaggaaaagatctgttcccacagctcaaacaggacaaggaatgacttctgttcctgtgagttagagtgggaaacctcataatttacaggcatccagtgagaatactcagaaagttttgcctgtgtagggaaagctagttctagattaaaccctgctttggtttcagttttaaagagtttaaaaataggacctgagaggatcaaactcttttcaaaaactataaccacatttcagaacaaaccacaagaatatttatagcaattcaatattgagcacctaaaaaggtcactttaagtcgagaaagaragacctaagtgaccctgttagcatgcttagtatgttatgctctgtaccaacttgggactgtgaagagtccctaccaacaagaaaactttcgccagatgcagcctctcaaccttgtacttctcagcctctagaactgcaagaaataaat

SEQ ID NO: 613215 - DNA, 594 bp, Homo sapiens
aaaccctgtctctactaaaaatacaaaaaatyagctgggtgtggtggcgggcacctgtaatcccagctactcaggaggctgaggcaggagaatcgcttgattcttctgaacccaggatgcgcttgaacccagatccgcttgaacccaggatgcgaaggttgcagtgagccaggattgctccactgcactccaacctgggtgataagactgaaactccgtctcaaagaaaaaaaaaaaaagatactttctttggacagtctagtgactctatgccttggtgatgtttattttgaatagtatctcacaggtgttctctgaatttcttccatctggatatctacctctctgacaagattggggaaattttcttggattattctctcaactatgatttccaggttgtttactttttcttctctctgagaaatgccaataatttatatttagtttttctttacataattccatatttcttgaagattttgttcatatttttaaattactttttctatttttgtctgactaggttagttctacagattagtcttcaagctctgaaattacttcttctgtttggtctggcctattgaaaaa

SEQ ID NO: 613216 - DNA, 431 bp, Homo sapiens
catcccctaccctatgactaagaggctacagcccactgtcacaacagacaagcacagtgcaggtggtcctctgtgtgcctccccagcctctctccccagtggccacacagcaggatgtgtgattaaacccagactgagtctctatacaccataactatgtaaccatcttccacagctgggttacacagtgtctctacttacactccttgcacaactcttcatttctcctggatttaatacttggctcagttattcacctgttattgcctctgagccggacaggccaactgcctcctcctggtctgtgcctttgtcccacgctcctggcccatccatgggaaggctggcactgtggatttcagcctgagcctccctccacctcctcttcaggatggtgtgcgtgcacacrctccccagcactgggaaggcac

SEQ ID NO: 613217 - DNA, 402 bp, Homo sapiens
ggttacccttatgctgttcttgtgataggtcagtgagttctcctgagatctgatggttttataaggggcttttcccccttttgatcagcacttctccttgctgcttgtttgcytccccttcagccatgagtgtaactttcctgaggcctccctagccatgctaaactgtgtgtcaattaaacctctttcctttataaattacccagtctcaggtatgtctttattagcagtgtgagaacggactaatatagctcccgtaacaaaacaccacagactgaatagccttttaaacaacagaaatttatttctcatagttctggaggctgggaagtccagaattaaagtactagcaaagtaggtttcattctgaggcctctctcttggcttgtagatggccgccat

SEQ ID NO: 613218 - DNA, 553 bp, Homo sapiens
ttggctcattgcaacctctgcctcctaggttcaagctattctcctgtctcagcctcctgtgtagctgggattacaggcacccgtcaccatatctggctaatttttgtatttttagtaaagacagggtctcaccatgttggccaggctggtctcaaactcctgagttcaggtgatctgcctgcctcagcctcccaaagtgctgagattacagacgtgagccaccttatctttctttcttctatcttttttttttttttttttttttaagagacagagtctcactctctcacctaggctggactgcagtgacacaatcatagctcgctctaaccttgcattccttggctcaaatgatcttcctgcatcagcmtcccgagtagctgggacaacagcacatgccaccacacccagctagttaaaaaaatattttttgtagaggcagagtcttgccatgtttcctaggctggtcttgaacttctggcctcaaacaatcctcccacctcagctcaccgaactgctgggattataggtgtgagccaccatgcttggttat

SEQ ID NO: 613219 - DNA, 525 bp, Homo sapiens
gctaggaagacaggtacatgccaccgtgcttggctaatttttaagtttttatagaggtaagctcttgctatgttgcccaggatggtcttgaactcctggcctcaaggaagcctcctgccttggtctctcgaagtgctgggattacaagtgtgaggcacrgagcccgacccccatcagtgtttttgaactttgcccatagtgttcttcagggaaatgaagtttttaattttgaagtaatcaaattaatcattttaattgtagttatgtttgcacaactctgtgaatatactataaaccattgaattgtacactttcaatgaatgaatatgtggcatataaattatatctcactaaagctattattattatttttaaagatattggccagattgccctccaaaacaaaaggccataccctggtcaaagtcctggccaatcctaatagatcagaaaaaaatgaatatatgacttagaaaaaaggaataaaactcttataatttataggtaatgtataaaaggaataaa

SEQ ID NO: 613220 - DNA, 592 bp, Homo sapiens
taaccttatgcgtgtctttgaaagtgcaatgcttcgattactaaggttttatgactattatcaacaaaacattctataagtgtaaggggtaactctcttcaaggacatcattccactctactgaggctccctgtttcttacatgcttagtgtagaagttctagcagctgcctggcattattttttcttgcagagaaataagaccatccaagtaaatattataattaggaccataatggcacattttgattgcttttaataaataacaccaaccagaatttttcttagatgtgacactaataaycactaatggccaaactattagatttatatcagaaattcttggctgaaaatttttatcagtacaggctacaatattatctaagcagaaaatgaatgtaaaactttctgcagttgtctcattatcttgtcataatctccaagaattcataagagaaaaatgcaaggaactaggagctggtatagctcagcaggcattttgtgaagagaatatgggtaaaattagaataaagagaacaggattggagcatcgttcacaagtctaggccctgtttggtcttcgtgttttggaa

SEQ ID NO: 613221 - DNA, 592 bp, Homo sapiens
taaccttatgcgtgtctttgaaagtgcaatgcttcgattactaaggttttatgactattatcaacaaaacattctataagtgtaaggggtaactctcttcaaggacatcattccactctactgaggctccctgtttcttacatgcttagtgtagaagttctagcagctgcctggcattattttttcttgcagagaaataagaccatccaagtaaatattataattaggaccataatggcacattttgattgcttttaataaataacaccaaccagaatttttcttagatgtgacactaataatcactaatggccaaactattagatttatatcagaaattcttggctgaaaatttttatcagtacaggctacaatattatctaagcagaaaatgaatgtaaaactttctgmagttgtctcattatcttgtcataatctccaagaattcataagagaaaaatgcaaggaactaggagctggtatagctcagcaggcattttgtgaagagaatatgggtaaaattagaataaagagaacaggattggagcatcgttcacaagtctaggccctgtttggtcttcgtgttttggaa

SEQ ID NO: 613222 - DNA, 537 bp, Homo sapiens
gaaaaccaaacaaatccttaattcctctccccctgcaaggtgtccttcctccatttagagctgcccttttccagagttcccagggtctctgggtcattaccaggttcccttatcacaaagagaaagagtggaagtttcctatgttttctctcctcaacctccagtcagttttctccattccaggctgcctttgctgtgtgcaaagctcaattgtctgcctcaattttaataattcagtgttgaatgggcacatttgcatatgcaaatatttgaagaattgaaatggcaattaacagatgtatatttgggattaatttaaaatattttttgtctyttcctgtttactttcatggtccagcagtaattctgatcttagtgacttgctgtgattcctccatccaatgtgtttccaggtctactctagccagagtcagatttctaaaagatgctgtgctgtctttgaatacgattgaaaaatcaccattttaacccctttatagaacctaataaagcatttcagaagtacctgcatttctt

SEQ ID NO: 613223 - DNA, 515 bp, Homo sapiens
ttttagccatgctttctgttcttagttacatcatttctatggtaagagaagttgaaggagtgtagggaatgagggctccctgctctatgctgtgatttgggaaatgaccctcaacttcatagtggtcagctcaggaaagtattcaggacaaggacagtctcatggcagtaaatggtccatgttcccatgaagtttggggggaaaaaatgaagtacatgaggaatcatctggggatgggtagagagttctgaggctctggctggcaggaagccasgctccccacactgggcctctgctgctgagcctccctcactgcccagacccccccaggtgatgcaactcaagcagctgttaatgggtggagatcaccgcagccctcatgccctatgatgtaggtcaggagccagccttgggtggcgggggtggggatgttgtcagctgtcaccagcaagatacagggcacatcagtgtcccaggaatgctgttttcaacaagaaggtggacagtcactactg

SEQ ID NO: 613224 - DNA, 595 bp, Homo sapiens
aagtacttcccaccacctaggccacagccggacgcggcggcccaggccgcaattgctgcytagagcgcagacagggagctcgggtcgcgtgtctgttttggagagtggcgggctgcggccgccgcggaggatcctgggggattccaagcgcggcactgggccggggtgcagagctggggccgcggtggggaggggggcgcgctctcctcttcccctacttccccggaggttaattccgacaagttttgcaggcgctcagtggcaccggcgggggccggaacgcgcgcgctccagctgcctgcagaccccctctcaagaaaaacagatcgtgtaaccaccctggcaccaaccagtcggtttcaagtttccgcgagtaatttttttttgttgtttttaaacaactactgcactatccaaatattggctggcgctcaggacgctggcaggcaaatcattgccccgggcttagtgtaattatctcaggcgtatttggtttaccccttaggcaattgttggcgacgctatgctaggaagaggggttccatgcaagcttttattgcgtttaattggctctatggaggggagtaaaaaaaga

SEQ ID NO: 613225 - DNA, 542 bp, Homo sapiens
cttgctctgtcacccaggctggagtgcagtggtgtgatctcggctcactgcaacctccgactccctggtttaagcaattctcctgcctcagcctcctgagtaactgggatcacaggcatgtgccaccacacctggctgattttttgtatttttagtagagatgggatttcaccatattaaccaagatggtctcgattacctgacctcgtgatccgcccgcctgggcctcccaaagtgctgggactacaggcgtgagctaccaagcctggccaagtgcaacaagcttctaaagcaagaatgtggactccacgttctgatttgcccacttactagttgtktggcttcggttggacttgtgttagtcatttttgcttctgctcctctgagttctcttatttttaaaatgtggataatggtacctagctcaaagggtttctgtgagagttaactgagttaatcactgtaaagtacttagaacagcatgctctaaagggagaagaagaggtgtggagaaatggagtagggttgaagaaactcctaaa

SEQ ID NO: 613226 - DNA, 542 bp, Homo sapiens
cttgctctgtcacccaggctggagtgcagtggtgtgatctcggctcactgcaacctccgactccctggtttaagcaattctcctgcctcagcctcctgagtaactgggatcacaggcatgtgccaccacacctggctgattttttgtatttttagtagagatgggatttcaccatattaaccaagatggtctcgattacctgacctcgtgatccgcccgcctgggcctcccaaagtgctgggactacaggcgtgagctaccaagcctggccaagtgcaacaagcttctaaagcaagaatgtggactccacgttctgatttgcccacttactagttgtgtggcttcggttggacttgtgttagtcatttttgcttctgctcctctgagttctcttatttttaaaatgtggataatggtacctagctcaaagggtttctgtgagagttaactgagttaatcactgtaaagtacttagaacagcatgctctawagggagaagaagaggtgtggagaaatggagtagggttgaagaaactcctaaa

SEQ ID NO: 613227 - DNA, 623 bp, Homo sapiens
cttccttgttcagagctttacacattgctcagcaacaaatggttgtttgctaattggtatgtaaagggcaataaacaagttaattgctggctacattctcgaatmgctagaggaagttcaaagcttctcaaccttatttcagctccaagaaagaggacctctgatgtgggtcaaagacctaatggagtcctcaaaagcccaccatgcgccatagtgggtggaggctgggcaggagggagaagcttcaaagccccctctttccatgacatgcttcttcttcacatcaatttccatcacttccctttccctctctcagctactgttaaaagatggacttttgtattaggttgctggggttgccaaagtaaagtgccacagacttaaatcacagaaatttattttctcaaaattctagggtctagaagtctgagatcgcagtggcagcagggttggtttcttctgagacctctctcctagctggcagatgccctttttcctgtgtcttcacatggtcttccctctctgtgtgtctgggtccgaatctcctcttcttatgaagatatcagtcatattggattagaacccacactaatgacctcatttaacttaaaggctctatctcc

SEQ ID NO: 613228 - DNA, 549 bp, Homo sapiens
gagggaccggccgatttgcagagcctcaggggcctgagctaatggagttgctgccattttgaccattgccaaccatgataccagagggaaatgaaatgtggtaagctttgtctcttaaggtttctgtccaaaagtgcccaaagtcactctcacatttcagtgccccaagtcacatggatgtatttgcttctagaggtgggacagtgccatctgcttatgggccaggaagagagaaaagcaaaagatgtgtgatcaccctgakgactggcagagaattactctaataatcttataaaagctgtggactctccctcccacaatatgcacagatgtacacattcctggtacaatttcattttaatttcaagtggttcacaggcgtcctgaagcctatatactgattctgtaaagatccaactaaaggatgagaactatacttcccaattatatattcgttgctaatttctctaccaatatttacctgtgagctttctcactctcttgctctcttaaaagcaatctcagttcttttcacttactatgtgaagt

SEQ ID NO: 613229 - DNA, 629 bp, Homo sapiens
ttttgggtttgttttccctcttcctgacttgtcacatatagaaacccaatccccactctgaaattttggtcagtttttgtgtttccatgcatcttttattcacttcctcagaaagaaccctgtttaaggtgcatgcatttttaaaataattggatttctgtattatcatttatagttaatggtggcagtcttaaatgttttgcagaaataaaggttgagagtggctgttatagaagcagagattgggggcttttcagcactcatggctattggaagagatggcagtcagtccttccaacttatcatttctaggctgaaaaaaaaaaacattattctggaataattggaggctaaaaaccctaaattgactttttaggcatataggccatgaatactaaatagtgttcttaataatgctcccccagttcaacagaattttccccacatttggtactratcaaaatgtgcggtaccagtaaacactaagtgttttgtttaaatattaaactttaaagtgccacatcaatttttaatgtgtaagctctccttgaaagtctccaccaggctgctcttccctatcagtgaaacacttgaggggcactagccaagctctcaggttacagggaaaa

SEQ ID NO: 613230 - DNA, 621 bp, Homo sapiens
acttttattttagatacaaggggtccatgtgcaggtttgttacaggggtatatcgcatccagctagtgagtatagtacccactaggcagcttttcagctcacatcccccgctctccctcccccgtctaataatccacagtgtctattactcccatgttcatgtccatgtgtgctcaatatttagctccacttataagtgagaaaatgaggtatttggtttcttgttcgtgagttagtctgcttaggattacggcctccatctccatccatgttgctgcaaaggacatgattattttacttgcttttttaatcttacaatttactttcttttcttcttttctctatttcctgtgatattgcacagctttctcattatctcatcttcggttaagattaagtcattaatcatcattttatacctttttctaaaaataatacaaatttttatttttgtaaaaataatttaatataatcaccattgaaatttacaaaatacattgaagaaaaaagacraaaatgaaagtcattcaaaatcctaccactgagagacagctgctcttgacttttgggtatacagctacccagtctcttttctatgcattaatatatattttataagtt

SEQ ID NO: 613231 - DNA, 537 bp, Homo sapiens
cccaagtagctgggattacagatgcctaccaccacgcccagctaatttttttgtatttttagtagagatgggatttcaccatgttggccaggctggtcttgaactcctgacctcaagtgatcagtccgcctcggactcccacagtgttggcattacaggcgtgagccaccccgcccagcagataactatttttttttaatttaaaaatttttccctcccaggaaggttttttgttgtttgatatactgagtaccacttacttttgtaaaagcttttgctgtattttcatgagtattacttgtaaatagcatagggtggtggtgagcacycctatctcccacaaaatattaaagtagaaaataaaacaaggttgtgttttcagagttaagctatgaaacaaaaaaagaatttaagcatagctgtatacatttcatacaacaagctatacacatggatagctatacaaagctataccttaaacaggaagaatgacctccaggctaaggccaaacctggaatataattgaagttatttgt

SEQ ID NO: 613232 - DNA, 625 bp, Homo sapiens
ccatgctgcacaaaggaagacaatgttggacattaagtaggataagacagcattgtcaaacatgtcttcaacactgacatttaaggagttcctagagaagaggaaaggttgaagtaaggaatcctgcaaaatgattgaggtaagaagaggctgggaatgaaagagcaccacaaagaggaaaggatgggaaccagctgaaatgaaagcagacactgaggcacatcttcctttggccagtaactctttttcttgactgcaaatctrtaactctagaaactctacctgtttagtttaaaacgaccttaccatgatccttgatcttataaaatttttgtgaataaaatagttaaaatcccattcattgttttctcttactccagaaattctgtgacagaaaagaaccaacatccaccatccttccctatttttgtttgtttttgtttttgttttgagacagggtctcattctgcagcccagtctggagtgcagtggcatgatcatagtccactgcagccttgactttcaacctcaatgtcctgggctcaggaactcctaagctcaagtaatcttcccatctcagcctccctaagtgctgagattataggcatgagccaccacaactgtc

SEQ ID NO: 613233 - DNA, 563 bp, Homo sapiens
tattaagcctcactttgggaagtagaggtatttatcatatgctgcaaggcatactgaatttaaaatatcaaataccgtcataaaagaaatttattttggaactatacagaaaaaaaaaagactgmttctgaataactggtatggtttcatcttaaggacagtaaaactaaaaggtatattgagtcatgtttgccatttctctctgtccaacagaaagaccagaaccaaatgcataatccaatcttaataaataggtagagtccctgatagcctatctttattcttacattcccatccatagtgctcttttgtcataatttttacaagcctggttcgatttcagattggattaacatattcttcaatcatcctgccctcctccttctctttcttttttcataaatatattttaataggctactgaaattctctgtggactaaaaagtggtgcacaaaactttggcacttaaaatacattaacaaagcttactgttttaacaaattctttcacaaaaatcaacaaacccatattgctacttacgaaattatatttatgtgtttgc

SEQ ID NO: 613234 - DNA, 529 bp, Homo sapiens
actgtacgtgtaatgcttttccaagcatagtggggccatattaggcactcaaatgtttactaagttagaaaagatctggattttataatctaaatcttgtaattcagatgtttactaacttagtaaatatgygaaaattataagatctagatcaaggctgggcgcagtggctaatgcctagtaatcccagcactttgggaggctgaggcagaaggactgcttgagcccaacagtttgaggccagcctgggcaacatgctgaaaccctgtctctataaaaaacagaaaaattacccaggcgtattggcacatgattgtaatcccatctactcaggaggctgagttgagaggatcacttaagcccagaaggttcaaaaggctgcagtgagccatgatcatgccagtgcattccagcctgggcatcagagtgagaccctgtcttacataaataaatattaaaaaaaaaaaaagacctagatcagttgtctccaagatggagtacccttactgcaaaggtttctgaaagaata

SEQ ID NO: 613235 - DNA, 561 bp, Homo sapiens
tcacctacactaaattattcctaaggaagttttcaaccagtttatccaacaacctgaaacatgtaatatcaactcaatattttataagagatagatatcagaggtaattgtcaagtttaaaagaatacttaatgtttaaaattacccaattttttatctccaatgtagccagcaatggtaattcctaatccttggacatttttagtgagttctacatcaaatgtctcactttcttcacctttctgagtagaagcatcaacctaaaataaaatcaataaatatacagtgaaataatacgtaaaaaaaacaaaaaacaaaaaacaaacaaacaaacaaaaaaaccatgataaaataaagccacaggcctactttaattctctagcaaagaattatagcagagacgattcctttaatcctgaaaacagggataggcatcatcatatttttgctcagaaagggatatcaggcaggaataaggttgaaccttcccttatcagagaatacattattgtttgygtacaataaattttaaatcaaacaggttttttttagcaaattcta

SEQ ID NO: 613236 - DNA, 591 bp, Homo sapiens
cactgaaggtcacaagttgtgaaactatcaccatcccaacagcacacagaaatttaaaaccttaactaaagaactggcaaactcagcctgggcaacatagcaaaaccccttctctacaaataaaagttaaaaagaaaattagcctggcatagtggcaccacttgtagtcccaactactcatgaggctggagcaggaggatcacttgagcccaggaattcaaggccgcagtgagctatgatggcgccactgccctctagcctgggtgaaaaaatgagaccctgtcaccacctctccagaaaaaaagaactggcaaacgccaatttgcctcagggtggggcttttcaaaaagcactgaggcattcaaagtctgaaacaaaacacccaacgaatcttgcccaagtgtgagccaagctagtcacaaaccatgactcaatggaggagttgtcttaattattccytaataaacagtggtcatcattgttttccagactctgacccccactccactgtctgcacagtctgagcaggtaatgccaacttcccactgcacagtaaggaactctttcttgatttagaaaagtataatgcat

SEQ ID NO: 613237 - DNA, 507 bp, Homo sapiens
tccctcagcacccactgagattgtggcacccacatggggccagctggacccaggagagctgagggtctgaccctcagggcatgctgttccaaggaaaaggcagagtgcagcatgccaagggaacacctgttaggacaaaagaaaccatagagtgtgctctcctattcctgagagctccccacttctgtgctgaaagtgactgcactcctttcaacagcgacatgggcactgtgcttggctctgtgggtgaagagtgtggttctgccatagcagccaggtggccccagtgcttgggcctggtaatggagatgaagcctcctactccccgcatagctgctgcygccagggtttggcttaagcatacctgtagacagccattccagggctattaaggatgactgcatccttactggcaatgtccccactgggccctagattgtacaaaagacagggcccctccacctctgtacagacagtggcagcattcctgcagcaagaacaggtgag

SEQ ID NO: 613238 - DNA, 419 bp, Homo sapiens
gaattctcagattcataaaaacaaatattactagacctaagaaaagaagtatacagcaatgcaataatagtgagagacttcaacaatccaatgacatcactagacagattattgaggcagaaaatcaacaaagaaactctggacttaaatcaractctagattaaatggacctaacagacatttatacaacattctacccaacaactgccaaacatacatttttttctcatctgcacatgaacaattcttcaaaatagaccatactttaagcaacaaaacaagtcacaataaatttttaaaaatcaaaattatatcacttctcagtcttttggctaagatcaagtgtaaaaatcaaaattatatcaaatatcttctcagactacagtggaataaaactagaaatcaataccaaagcaga

SEQ ID NO: 613239 - DNA, 419 bp, Homo sapiens
gaattctcagattcataaaaacaaatattactagacctaagaaaagaagtatacagcaatgcaataatagtgagagacttcaacaatccaatgacatcactagacagattattgaggcagaaaatcaacaaagaaactctggacttaaatcagactctarattaaatggacctaacagacatttatacaacattctacccaacaactgccaaacatacatttttttctcatctgcacatgaacaattcttcaaaatagaccatactttaagcaacaaaacaagtcacaataaatttttaaaaatcaaaattatatcacttctcagtcttttggctaagatcaagtgtaaaaatcaaaattatatcaaatatcttctcagactacagtggaataaaactagaaatcaataccaaagcaga

SEQ ID NO: 613240 - DNA, 419 bp, Homo sapiens
gaattctcagattcataaaaacaaatattactagacctaagaaaagaagtatacagcaatgcaataatagtgagagacttcaacaatccaatgacatcactagacagattattgaggcagaaaatcaacaaagaaactctggacttaaatcagactctagattaaawggacctaacagacatttatacaacattctacccaacaactgccaaacatacatttttttctcatctgcacatgaacaattcttcaaaatagaccatactttaagcaacaaaacaagtcacaataaatttttaaaaatcaaaattatatcacttctcagtcttttggctaagatcaagtgtaaaaatcaaaattatatcaaatatcttctcagactacagtggaataaaactagaaatcaataccaaagcaga

SEQ ID NO: 613241 - DNA, 566 bp, Homo sapiens
aaatattactagacctaagaaaagaagtatacagcaatgcaataatagtgagagacttcaacaatccaatgacatcactagacagattattgaggcagaaaatcaacaaagaaactctggacttaaatcagactctagattaaatggacctaacagacatttatacaacattctacccaacaactgccaaacatacatttttttctcatctgcacatgaacaattcttcaaaatagaccatactttaagcaacaaaacaagtcacaataaatttttaaaaatcaaaattatatcacttctcagtcttttggctaagatcaagkgtaaaaatcaaaattatatcaaatatcttctcagactacagtggaataaaactagaaatcaataccaaagcagatatgctgatggcaaataagtatatgaaacaatactcaacatcatatctcattacagaattacaaattaaaacaacaatgagatactgtgatacaccagttagatggataagacccaaaactgacactgacaataccaaatgctagtgagaacgtggagcagaggaattc

SEQ ID NO: 613242 - DNA, 630 bp, Homo sapiens
tgtccattcaccatgacttttgtcacagaaaagatgcttactatacctatcattaagtacatgcaggtactatgtccagacagggaacattttctgtgttttgtggaagcttcagtgaggtaaatttaaatgtatgcactgttgacatttttgttaatttgaaataatacgtaataactccagcttagctgacagctaccccctttctattttcttgtatttgccgttattctaacaccctcccttgaccttactttcccctcagttacytccaattataacaaaattccttgacagacgatttcacttctcctacattttattaacctgctccagtctggctctgtccccttaccaagggcaccagcgacttccactttcttcaatgcggtggtcagttcttggatctcatcttactgacccatggcagttttggacacagatggccacttgctcctcctggaaacttgtcctcttcttgcttccaggaccctccccattgcctgaatttcctcctcccctctttgtcccccaactctgcttcccagcctctttgtctcttcagctcctttttgggctggactcagaaaaagagagtgcaatcatgacaaagataaatgtagagggagt

SEQ ID NO: 613243 - DNA, 630 bp, Homo sapiens
tgtccattcaccatgacttttgtcacagaaaagatgcttactatacctatcattaagtacatgcaggtactatgtccagacagggaacattttctgtgttttgtggaagcttcagtgaggtaaatttaaatgtatgcactgttgacatttttgttaatttgaaataatacgtaataactccagcttagctgacagctaccccctttctattttcttgtatttgccgttattctaacaccctcccttgaccttactttcccctcagttacctccaattataacaaaattccttgacagacgatttcwcttctcctacattttattaacctgctccagtctggctctgtccccttaccaagggcaccagcgacttccactttcttcaatgcggtggtcagttcttggatctcatcttactgacccatggcagttttggacacagatggccacttgctcctcctggaaacttgtcctcttcttgcttccaggaccctccccattgcctgaatttcctcctcccctctttgtcccccaactctgcttcccagcctctttgtctcttcagctcctttttgggctggactcagaaaaagagagtgcaatcatgacaaagataaatgtagagggagt

SEQ ID NO: 613244 - DNA, 630 bp, Homo sapiens
tgtccattcaccatgacttttgtcacagaaaagatgcttactatacctatcattaagtacatgcaggtactatgtccagacagggaacattttctgtgttttgtggaagcttcagtgaggtaaatttaaatgtatgcactgttgacatttttgttaatttgaaataatacgtaataactccagcttagctgacagctaccccctttctattttcttgtatttgccgttattctaacaccctcccttgaccttactttcccctcagttacctccaattataacaaaattccttgacagacgatttcacttctcctacattttattaacctgctccagtctggctctgtccccttaccaagggcaycagcgacttccactttcttcaatgcggtggtcagttcttggatctcatcttactgacccatggcagttttggacacagatggccacttgctcctcctggaaacttgtcctcttcttgcttccaggaccctccccattgcctgaatttcctcctcccctctttgtcccccaactctgcttcccagcctctttgtctcttcagctcctttttgggctggactcagaaaaagagagtgcaatcatgacaaagataaatgtagagggagt

SEQ ID NO: 613245 - DNA, 313 bp, Homo sapiens
ctcttcagctcctttttgggctggactcagaaaaagagagtgcratcatgacaaagataaatgtagagggagttttgtagcctaatttatataactaaacaattggaaacagtaggagaatggttaagtaaatcataaaaatgttcatatggtagaatattgtgcaactggtgaaatatattttctaagaaaaattgatgacattggaaatatttatgatcttttgttttattaaagtagggtatacaactgtgtatacaatgatatgattttgtaaaatatcatatatatacacacgcacatgcgcgcgcgc

SEQ ID NO: 613246 - DNA, 460 bp, Homo sapiens
gactggtatttcattttcctggagaatgtctcggcccctggacttgytgtcccacttctctgctccctgagtagaggagaagggaatgggagatggtgaagaggggagagctatgaggacgagcttgacgaattttccatcaacccatacagtgactctgaaggttgctgaacttgagtgcattgttgccaccccaccagaaggctgctggtgaggccaggagacccatgcaaattgtgagtggtggaggctgaggaactgggtcgaggtggacacagctggaactgagtggagaggagactctggcagaacccttcaaggactgcattaatgctgagagttggggcacctgccccccagaggccccggtggccagacagggttaggtggatgaacagtagccactaagagaaaaggggctgcagtcctgctcccccgttcctcctgcctgccctggccc

SEQ ID NO: 613247 - DNA, 654 bp, Homo sapiens
ctgttaggacattaatgaatgtagggctgaagtgtcctggaatgacctatggcatgacagaaggtcctgattcactcttagtgtctatgggactttttcccttgggggcccagggtgtgttgcacacacatttttacattcaaaattagattgtatattttacaaataaakacaagagtagataacaacaaacaccatgaactgccatctggcttgggaaggagtccattaacaaacaccatcaacagccccctgtggacgcctgtctcttctcatttcttgttttctcctccccagggttacttgctatcctgaatttggtgctgcaaatgcatatcactgtaatacgctttgagtaggacaacttttccaggcaactatgcccagttaaatagaagagagctcaagataccatttcctgactgagtgtaacataatccctttcctaccagaggtcaggtcaggaggcatccgaggtggttttcctggctaaccttccctttttccatcgtgctggccctgtgaggatttttgtggaaggacagggtcaccaaaacctgtggagttgctgatgtggcagaatcttccagacaagtgactctggatggctcatcacagacttgaagtgccctatgctgacccctgggcatgtgg

SEQ ID NO: 613248 - DNA, 447 bp, Homo sapiens
gggcaccatggctcatgtctgtaatcccagcactttgggaggccgaggtgggcagatcacttgaagtcatgagttcaaaaccatccttggcgaaatcctgtctctactaaaaatacaaaaaatttgccrggtgtggtggtgggcgcctgtaatcccaactactcaggaggctaaggcatgagaatcacttgaaccaggaaggcagaggtttcaatgagctgaaagtgccattggcactccaccctgggtaataaagcaagactctgtccccaaaaataaaaaatttttaaaaagaaagaatgtaggactacaaaaggaagttagaaaaatgcctgtttgtttttccattgcaaccatccccaggggtgtccatctttgaatggactcttttgctaatggtctagggcttttgacagatttgtagttctgtttctgagatgagcaagc

SEQ ID NO: 613249 - DNA, 447 bp, Homo sapiens
gggcaccatggctcatgtctgtaatcccagcactttgggaggccgaggtgggcagatcacttgaagtcatgagttcaaaaccatccttggcgaaatcctgtctctactaaaaatacaaaaaatttgccaggtgtggtggtgggcgcctgtaatcccaactactcaggaggctaaggcatgagaatcacttgaaccaggaaggcagaggtttcaatgagctgaaagtgccattggcactccaccctgggtaataaagcaagactctgtccccaaaaataaaaaatttttaaaaagaaagaatgtaggactacaaaaggaagttagaaaaatgcctgtttgtttttccattgcaaccrtccccaggggtgtccatctttgaatggactcttttgctaatggtctagggcttttgacagatttgtagttctgtttctgagatgagcaagc

SEQ ID NO: 613250 - DNA, 722 bp, Homo sapiens
aggtttgattcaaaaagaataatcttaaacgttttaagttctttgagaaatcttcgaactgctttccacaatggctgaactaatttggattcccaccagcagtgtataagcattccctttactctacagccttgctagcatctgttattttttgattttttaataatagccatctgactggtgtgagatggtatcctcattgtggtttttatttgcatttctctgataattagtgatgttgagcattttttcacatgtttgtcggttgcttctatgttgtgttttgaaaastgtcagttcatgtccttcattcattttttaatggggttgtttgttttttgcttgttgaattgtttaagttcctcatagattccagatattaggtctttgtcagatgcatagtttgagaatattttcttccactctgtaggttgtctgtttactctgttgatagtttcttttgctgtgaaaaagctctttagtttaattaggtcccacttgtcaattttgcttgtgttgcaattgcttttaaagatgtagccataaatctttgatgtttaccaaggctgatgtcaagaaatgtatttcctagattttcttctaggatttttatagtttgaggtcttacattgaaatatttaatccatattgaattcacttttgtatatggtaaatagatacctcctgtcattttaaacacacacatacacacatgtgtaggt

SEQ ID NO: 613251 - DNA, 535 bp, Homo sapiens
cctctggtagcctacttaatttatttcccccattttccttgtcgtgttttcttcattatttaatgtggacaatgtctaaagtcatttatcattcatgctctttaattaatcagtcaacatttaatggggcggtgttgatggtcccagttaggcctgggaacttggaaggagatttgtcaatgaatgagacaaggtccctgcccttaaaaacctcaccattgagtgggtaaacttgtgattagccacggaggtctttgtggagaaagtgaattttgagtgtgaaatawagtgaggagaataattcaaatattaggaaagtggaagtattggcatctgattttttaaaacggggtccccttttctatattgtaggcattctgtttatgacttcatcttttgtaatcccacctgtcctaatccatagttttaagtagttgggtgcttcctttcactgttgatcaattttcactcgagtttcatgactaaatttgcatttaaagatggctaaatcaatggaactgtgtgagattcacat

SEQ ID NO: 613252 - DNA, 635 bp, Homo sapiens
tcattaatatattatattacatattaatgatacatcatagtagatgtattayatatacatagtatatgtatatagatacataatgtatatgatgtatgatatacaacatatacattaatatattagaatcctgtaaaatagctcttttttttccttaaatttttttgaaggtttttaagaatcattgacctggaagagaatttcgaattctctttgttaggttcacctaatttttacagataagcaatcttcatgtgtgtgcatatatgtatgtgaatgacacagtacattagtgactgaatggagttgaaagttgggtcttcagatgttttgcctaacattctttctactgcttcatactaacctgttccttctttgcccttctctggttgacctgagtcatgtctgggtcatgggaatcctggaaacaaacacttagtgattccagacggtaatttctctctgtccctgaagtggggaatcagtgcaggttgtaccagaaacccaaggggcttgacaggaaagccagctttagatgtgagacatgatgtgtctcttgttcagaatttaatgaccagaagaacttaaatacttgcaaatcatttttctcagttttaatgaaatcacttaattta

SEQ ID NO: 613253 - DNA, 564 bp, Homo sapiens
aatattgcctaagctggcatcatttctcttttgctagatttgatactcttacatgtctattcattggtatttcattcctccttaaaattggcaacacaggctgggcacagtggctcacacatgtaatcccagcactttgagaggccaaggtgggcggatcacttgaggccgggagctcgagaccagtctgtccaacatggtgacaccctgtctctactaaaaataaaaaatttagccaggtgtgatggcgtgggcctgtaatcccagctacttgagaggctgaggcacgagaatggcttgaacctgaggggtggaagttacagwgagccgagatcatgccactgcactccagcctgggtgacagagtgagaccctgccacacacacaaaaagaaaaaaattgacagtatatttgtaaagtacccatgtctatgtaggactcacaatctgtcttccccggctcttgccacatttccccttaattaatgggggaatttgataacttagaaaaaattctagtacatatgttgtattctatatattggcaaggaatattatttagaaa

SEQ ID NO: 613254 - DNA, 598 bp, Homo sapiens
gggaatcaatcttagatatgtatccaagtctagccacaaagttagaggacagcaggacagaaatgagctaacagccagaaacgcagattggtggtggggaagggtmtgcacaaggtaggaccctgtcttagttaattttgtgcagccataatggaataactgggactgggtaatttataaagaacagatatttatttcttacagttctggaagctgggaagtccaaggtcaaggggcccacatctggcgagggccttcttgctgtgtcatctcatggcagaaggtggaagggcgaaacagcatgtgtgtgcaagaaagagaggaggccaatgttattctcctttcatcaggagcccattcccacaataactaaccctctcctgcagtaactaacccacttgcaagataatggcattaatgcatgcatgaggactaaacccttgacctaaccaccttttaaaggtcccatctctcaacactgttgcatgggagattaagtttccaacacatgctttatggggaacatatccaaaccatagaagaccccagggcagctcgcacagtgctgcttacttagtaccttttcaacaaaggcagg

SEQ ID NO: 613255 - DNA, 579 bp, Homo sapiens
agtgacttgcatgtgagttggacctgaagggagatggaaaagggaactacaaggctaccattagtttccaagtcaaagtgacaatggcctctaagttaccaaggatggacaaagggaatcaatcttagatatgtatccaagtctagccacaaagttagaggacagcaggacagaaatgagctaacagccagaaacgcagattggtggtggggaagggtatgcacaaggtaggaccctgtcttagttaattttgtgcagccrtaatggaataactgggactgggtaatttataaagaacagatatttatttcttacagttctggaagctgggaagtccaaggtcaaggggcccacatctggcgagggccttcttgctgtgtcatctcatggcagaaggtggaagggcgaaacagcatgtgtgtgcaagaaagagaggaggccaatgttattctcctttcatcaggagcccattcccacaataactaaccctctcctgcagtaactaacccacttgcaagataatggcattaatgcatgcatgaggactaaacccttgacctaaccaccttttaaaggtcc

SEQ ID NO: 613256 - DNA, 598 bp, Homo sapiens
gggaatcaatcttagatatgtatccaagtctagccacaaagttagaggacagcaggacagaaatgagctaacagccagaaacgcagattggtggtggggaagggtatgcacaaggtaggaccctgtcttagttaattttgtgcagccataatggaataactgggactgggtaatttataaagaacagatatttatttcttacagttctggaagctgggaagtccaaggtcaaggggcccacatctggcgagggccttcttgctgtgtcatctcatggcagaaggtggaagggcgaaacagcatgtgtgtgcaagaaagagaggaggccaatgttattctcctttcatcaggagcccattcccacaataactaaccctctcctgcagtaactaacccacttgcaagataatggcrttaatgcatgcatgaggactaaacccttgacctaaccaccttttaaaggtcccatctctcaacactgttgcatgggagattaagtttccaacacatgctttatggggaacatatccaaaccatagaagaccccagggcagctcgcacagtgctgcttacttagtaccttttcaacaaaggcagg

SEQ ID NO: 613257 - DNA, 609 bp, Homo sapiens
ctgggtaatttataaagaacagatatttatttcttacagttctggaagctgggaagtccaaggtcaaggggcccacatctggcgagggccttcttgctgtgtcatctcatggcagaaggtggaagggcgaaacagcatgtgtgtgcaagaaagagaggaggccaatgttattctcctttcatcaggagcccattcccacaataactaaccctctcctgcagtaactaacccacttgcaagataatggcattaatgcatgcatgaggactaaacccttgacctaaccaccttttaaaggtcccatctctcaacactgttgcatgggagattaagtttccaacacatgctttatggggaacatatccaaaccatagaagaccccagggcagctcgcacagtgctgcttacttagtaccttttcaacaaaggcaggtgcttctcaacttgcaatggggcaatgtcccaatttcaacccaccctaggttgaaaatagcataagttgaagacacatttaatgycccaataaacccagcacaaagccaaaaaattgtaagttgaaccattgtaagtccagatgatcttcaacttatgatggggttatgtcctaat

SEQ ID NO: 613258 - DNA, 591 bp, Homo sapiens
ggagggaaataatttcccacccttcagaaacctccctcatttgaacttaaaattaggaaacaatgagcttttctgattttaattttactttgtcaaataaataaatttgtccaacagggcaaagggacgacgtgattacaaacaaaaccacattgaactggccatgygaagtctcaggactccatgagtcagctcctaaagctttatgatccagctttccttacctgcaaggtgagattccaaaagctgacgtcccatacattgagaaaagttctccagtaacaaccaaaagaaagtttctgaactttgtgaatacatagttcaaatcacagcatttatactactttaaggaactttcttaagagactcatgtttttagctttggccctcctgctaatttttttctaagaagaattgcaacagaagacaataggattaaaaaacaaaatattttccaaatcctagagccaacataaatatggtgtgtgtgatgtgtggcaggatgagaggaaaaaaaggtcatttggacctgctccagaccctttggccaacctagaaggttattttaccagtccaggggaaatggcagag

SEQ ID NO: 613259 - DNA, 233 bp, Homo sapiens
caagtgattctcatgcctcarcctcccgagtagctggaattacaggaaggtgctgccatgcccggctaatttttgtatttttattagagatggggtttcatcatgttggccaggctggttccaaactcctgaccccaagtgatccgcccgcctcagcctcccacgtgctggaattacatgtgtgagccactgcacccagccataccttcctgtatattaattttatggcagaa

SEQ ID NO: 613260 - DNA, 549 bp, Homo sapiens
tcggaagctttgacaggcgcaaccccacccagaggctggctgcggctgaggattagggggtgtgttggggctgaaaactgggtcccctatttttgatacctcagccgacacatcccccgaccgccatcgcttgctcgccctctgagatcccccgcctccaccgccttgcaggctcayctcttactttcatttcttcctttcttgcgtttgaggagggggtgcgggaatgagggtgtgtgtggggagggggtgcggggtggggacggaggggagcgtcctaagggtcgatttagtgtcatgcctctttcaccaccaccaccaccgaagatgacagcaaggatcggctaaataccgcgtgttctcatctagaagtgggaacttacaaatgacagttcttgcatgggcagaacgagggggaccggggacgcggaagcctgcttgagggaggaggggtggaaggagagacagcttcaggaaaaaacaaaacacgaatactgtcggacacagcactgactacccgggtgatgaaatcatctgcacactgaacac

SEQ ID NO: 613261 - DNA, 554 bp, Homo sapiens
ccagaggctggctgcggctgaggattagggggtgtgttggggctgaaaactgggtcccctatttttgatacctcagccgacacatcccccgaccgccatcgcttgctcgccctctgagatcccccgcctccaccgccttgcaggctcatctcttactttcatttcttcctttcttgcgtttgaggagggggtgcgggaatgagggtgtgtgtggggagggggtgcggggtggggacggaggggagcgtcctaagggtcgatttagtgtcatgcctctttcaccaccaccaccaccgaagatgacagcaaggatcggctaaataccgcgtgttctcatctagaagtgggaacttacaratgacagttcttgcatgggcagaacgagggggaccggggacgcggaagcctgcttgagggaggaggggtggaaggagagacagcttcaggaaaaaacaaaacacgaatactgtcggacacagcactgactacccgggtgatgaaatcatctgcacactgaacacccccgtcacaagtttacctatgtcacaatcttg

SEQ ID NO: 613262 - DNA, 444 bp, Homo sapiens
  misc_feature 341: n = A,T,C or G
acagttcttgcatgggcagaacgagggggaccggggacgcggaagcctgcttgagggaggaggggtggaaggagagacagcttcaggaagaaaacaaaacacgaatactgtcggacacagcactgactacccgggtgatgaaatcatctgcacactgaacacccccgtcacaactttacctatgtcacaatcttgctcatgtatgcttgaasgacaaataaaagttcggggggagaagagaggagagagagagagagagagagatggggagggggggggagagagagagagagagagagagagagagagagagagagagagagagagagagagaagtaaanccaaacaccacctccttgacctgagtcggaggtttctggccttttgggagaacgttgagcgacaatgcagtatttgggcccgttcttttttttcttcttcttc

SEQ ID NO: 613263 - DNA, 603 bp, Homo sapiens
cggcttctgcccaagaagtgtgccctctcttttgtccatcctgcaactcatggtacaaagaagtggtgtggggctgcccagatgagatgatgagagaggcctggcctcgatggacatgtcctgggctgctctgtgttatctgtaggtgcacttggccaatggccaggggtatcaggaatgagggctgagttgatatctgtgttatcagagaaggcttttacattgaggctttgtaaggctagaactcagaaatatcaaggcacaatgaaaggacatctcactctcttgagcatctctcaccaacagaggtggatacagagctgtctcaagaatgtgggttcctggtttcttaactgctgtggggttctgtcaccaggaaagtgtgttaaactcttcaaggttccatctactgggccccttmtttctataagacctacccaaaggccccactatgctattgattgctcagtctcctcttccatgtcaactctttatttgtacacaattatgcaaacacaacttccccttaattccctggaaagacctaaatgcatcctgggttccaggatataagagacagctggaaaataaccttgtttttct

SEQ ID NO: 613264 - DNA, 555 bp, Homo sapiens
gacaacaggatttaatttctcacactcctagaggttggaaatttgagatcagggtatcagcatggttgagctctggtgatgactcttctgaatttcagactgcacacatcaaattttattctyatttggtagaaggagacagacatccctctggggtttcctgtataaagccagtaatctcaatcatgatggcctcaacctcaggagttaattacaacctatctccttatagcattacactgggggttacaattttaatacaaattattgtaactctcaagtttttttaaagctgtcattattcctcctactgggtttttcctatttgcttcctcagtctttccatttctttatgtctctttgtgtgaaactgtttgcctaattctgtctctcaattgtattcctcaaacagaggaagcaagctccaatgctatgagatgctctatgtacagacgcacataacaaagaacggagggagtgctcaggcagtagacagaagtaaagtcatgctctcagtctaccctgaaccctgccaattttcacaagcatgagctt

SEQ ID NO: 613265 - DNA, 555 bp, Homo sapiens
gacaacaggatttaatttctcacactcctagaggttggaaatttgagatcagggtatcagcatggttgagctctggtgatgactcttctgaatttcagactgcacacatcaaattttattctcatttggtagaaggagacagacatccctctggggtttcctgtataaagccagtaatctcaatcatgatggcctcaacctcaggagttaattacaacctatctccttatagcattacactgggggttacaattttaatacaaattattgtaactctcaagtttttttaaagctgtcattattcctcctactgggtttttcctatttgcttcctcagtctttccatttctttatgtctctttgtgtgaaactgtttgcctaattctgtctctcaattgtattcctcaaacagaggaagcaagctccaatgctatgagatgctctatgtacagacgcacataacaaagaacggagggagtgctcaggcagtagacagaagtaaagtcatgctctcagtctaccctkaaccctgccaattttcacaagcatgagctt

SEQ ID NO: 613266 - DNA, 530 bp, Homo sapiens
agggtatcagcatggttgagctctggtgatgactcttctgaatttcagactgcacacatcaaattttattctcatttggtagaaggagacagacatccctctggggtttcctgtataaagccagtaatctcaatcatgatggcctcaacctcaggagttaattacaacctatctccttatagcattacactgggggttacaattttaatacaaattattgtaactctcaagtttttttaaagctgtcattattcctcctactgggtttttcctatttgcttcctcagtctttccatttctttatgtctctttgtgtgaaactgtttgcctaattctgtctctcaattgtattcctcaaacagaggaagcaagctccaatgctatgagatgctctatgtacagacgcacataacaaagaacggagggagtgctcaggcagtagacagaagtaaagtcatgctctcagtctaccctgaaccctgccaattttcacaagcatgagcytaaaggttgatgcttttccggtccac

SEQ ID NO: 613267 - DNA, 467 bp, Homo sapiens
gactcttccgctcgggtttgacagatggcagctccactttaggccttgttgttgttggggactttcctgattctccccagatgtagtgaaagcaggtagatttgccttgcctggmcttgcctggccttgccttttctttctttctttctttattactttctctttttcttcttcttcttcttcttcttcttcttcttcttcttcttcttcttcttcttcttttttttttgagacagagtttcactcttgttgcccaggctagagggcaatggcgcgatctcggctcaccgcaccctccgcctcccaggttcaagcgattctcctgcctcagcctcctgattagctgggattacaggcatgggccaccgtgcctggctgatgtttgtacttttagtagagacggtgtttttccatgttggtcaggctggtctcccactcccaacctcaggtggtccgcctgccttagc

SEQ ID NO: 613268 - DNA, 621 bp, Homo sapiens
tgtatatttacacgcaccagactatggaggattcattaccagactgggaagcaacagcctgggctccagagtcagccacgtgtccatgcacagatgaggagaggtctcatgaaacttcagcacagtctgggaccctagctctttttgtaatgtgttgtttggcatgaggcgcagtcacaggtgcccttcacaamtgggctcaaggaacacaaaagatcaacttgtttttgcaattgtctgttgttttttcaataactaatgtataggaatggattgaaagatttctctgaaacagcgctggatgaacacctcaaggggctcatgcaacctgttccaggacttcgtgaccattgtttgtgcccatgttcaattgagttcatattaaatatttaacttttcctccacattagattcccaattctcagaaccatgtccactgccacagggcctggctgggaatattgtcactcatagagtttagaagatggaatgctggtcagtgatgatgctagggtgttaggtgaaggcagccgggacagtccctccaggttgagggaggagctggcctctcttgtggggtccttggcatgtcattgccgctttgggcctctgttttcttat

SEQ ID NO: 613269 - DNA, 541 bp, Homo sapiens
agcaaattgcaatgggaaggacagaaagaaaatatatatatgtatatttacacgcaccagactatggaggattcattaccagactgggaagcaacagcctgggctccagagtcagccacgtgtccatgcacagatgaggagaggtctcatgaaacttcagcacagtctgggaccctagctctttttgtaatgtgttgtttggcatgaggcgcagtcacaggtgcccttcacaaatgggctcaaggaacacaaaagatcaacttgtttttgcaattgtctgttgttttttcaataactaatgtataggaatggattgaaagatttctctgaaacagcgctggatgaacacctcaaggggytcatgcaacctgttccaggacttcgtgaccattgtttgtgcccatgttcaattgagttcatattaaatatttaacttttcctccacattagattcccaattctcagaaccatgtccactgccacagggcctggctgggaatattgtcactcatagagtttagaagatggaatgctggtcagt

SEQ ID NO: 613270 - DNA, 621 bp, Homo sapiens
tgtatatttacacgcaccagactatggaggattcattaccagactgggaagcaacagcctgggctccagagtcagccacgtgtccatgcacagatgaggagaggtctcatgaaacttcagcacagtctgggaccctagctctttttgtaatgtgttgtttggcatgaggcgcagtcacaggtgcccttcacaaatgggctcaaggaacacaaaagatcaacttgtttttgcaattgtctgttgttttttcaataactaatgtataggaatggattgaaagatttctctgaaacagcgctggatgaacacctcaaggggctcatgcaacctgttccaggacttcgtgaccattgtttgtgcccatgttcaattgagttcatattaaatayttaacttttcctccacattagattcccaattctcagaaccatgtccactgccacagggcctggctgggaatattgtcactcatagagtttagaagatggaatgctggtcagtgatgatgctagggtgttaggtgaaggcagccgggacagtccctccaggttgagggaggagctggcctctcttgtggggtccttggcatgtcattgccgctttgggcctctgttttcttat

SEQ ID NO: 613271 - DNA, 462 bp, Homo sapiens
aatttaggaatgatgagcctgttgggcaggcctcacaaggtggtgatggggctcagggagacagagaatctgagggtgcttgtgtctggctcatcctgagagggatgatggtgacagcaatcatgacaaccacatgaaaccgaggtggtaagaggccttgtgaggtagttggttcccaccacactttccagttgaggaaacagctcagggaaacccgactgcatgcccaaaatgacacatccagggagtgttggacctgggagtgagtctagaatcagagcttactggagatgatcagagcattggacaagctgactcaggccacttatccgtgtccaaggttagtgtagctgaggcgtaactgaaagaagcatattttcactgaccttgtccctcatcttagcaggtgaacascgtacaagttgtctaccctgtagcggagccccagagagcttagatgag

SEQ ID NO: 613272 - DNA, 568 bp, Homo sapiens
acattccctggtcccttcttccgcatctaagatttattgaaagggagtaatacacagagaaggaggagacctatcctaatgcagggtgcaatcaggggagtgaagttgatgacaacttcctagaggaagggccgtttacattcaactctgagaaccagttagggctgcatgatattggaggggaggtgagagccccttaaaagaaacacctcagagaccagccctcctcccttcttttataaggcccctacagagtctttcacccaggccctgtcagcatcctgtctttccctctgtytccagaagattaaagtcctccaggagatgcagcagttccacacagctggaaaccatcatcatcttcagactcaagaggaatttcgggcttggttccaagcctggagcagcacaatcagaataaaaggcaaagacctagcagatgagcagagggtaggaggggagactgtcttgccgccagcctcacacagcctgtggccagggttccctggccagcatcaggtcctgttgcacctggactccagctgctggggaggaactgggggacctg

SEQ ID NO: 613273 - DNA, 568 bp, Homo sapiens
acattccctggtcccttcttccgcatctaagatttattgaaagggagtaatacacagagaaggaggagacctatcctaatgcagggtgcaatcaggggagtgaagttgatgacaacttcctagaggaagggccgtttacattcaactctgagaaccagttagggctgcatgatattggaggggaggtgagagccccttaaaagaaacacctcagagaccagccctcctcccttcttttataaggcccctacagagtctttcacccaggccctgtcagcatcctgtctttccctctgtctccagaagattaaagtcctccaggagatgcagcagttccacacagctggaaaccatcatcatcttcagactcaagaggaatttcgggcttkgttccaagcctggagcagcacaatcagaataaaaggcaaagacctagcagatgagcagagggtaggaggggagactgtcttgccgccagcctcacacagcctgtggccagggttccctggccagcatcaggtcctgttgcacctggactccagctgctggggaggaactgggggacctg

SEQ ID NO: 613274 - DNA, 568 bp, Homo sapiens
acattccctggtcccttcttccgcatctaagatttattgaaagggagtaatacacagagaaggaggagacctatcctaatgcagggtgcaatcaggggagtgaagttgatgacaacttcctagaggaagggccgtttacattcaactctgagaaccagttagggctgcatgatattggaggggaggtgagagccccttaaaagaaacacctcagagaccagccctcctcccttcttttataaggcccctacagagtctttcacccaggccctgtcagcatcctgtctttccctctgtctccagaagattaaagtcctccaggagatgcagcagttccacacagctggaaaccatcatcatcttcagactcaagaggaatttcgggcttggttccaagcctggagcagcacaatcagaataaaaggcaaagacctagcagatgagcagagggtaggaggggagactgtcttgccgccagcctcacacagcstgtggccagggttccctggccagcatcaggtcctgttgcacctggactccagctgctggggaggaactgggggacctg

SEQ ID NO: 613275 - DNA, 568 bp, Homo sapiens
acattccctggtcccttcttccgcatctaagatttattgaaagggagtaatacacagagaaggaggagacctatcctaatgcagggtgcaatcaggggagtgaagttgatgacaacttcctagaggaagggccgtttacattcaactctgagaaccagttagggctgcatgatattggaggggaggtgagagccccttaaaagaaacacctcagagaccagccctcctcccttcttttataaggcccctacagagtctttcacccaggccctgtcagcatcctgtctttccctctgtctccagaagattaaagtcctccaggagatgcagcagttccacacagctggaaaccatcatcatcttcagactcaagaggaatttcgggcttggttccaagcctggagcagcacaatcagaataaaaggcaaagacctagcagatgagcagagggtaggaggggagactgtcttgccgccagcctcacacagcctgtggccagggttccctggccrgcatcaggtcctgttgcacctggactccagctgctggggaggaactgggggacctg

SEQ ID NO: 613276 - DNA, 544 bp, Homo sapiens
cctacctttctctataatcaccatgacctgatctctgctagcatttttcttaaaatggataaacatatgttatatagtatatattattcttcctcatgatttttttgytatattgtctctttccactcatatgagatatttacagcagttaagttcatagaaacacgaagtagaagagtagtttccagggactacacaaagggcaatggaaggggagtgttgtttactgggtacagagtttcacttttaaaagattgaaaaacagttccttatgaacttggacaatggttgcaaaacaatgtgaatgtatttaatttctttaaactgcacacacaaaaaaataaaatggttaatttcatgtatttttatattttactaaaaggtaaaaactactttctaaaatgaacagactatagctatttgcaactggtgggtgaatatcacaaatgtaatgttgcataaaagaaagcagacatgccagtttgggcaacatggtgaaaccctgtctctaccaaaaatacaaaacaattagccgggcatggtg

SEQ ID NO: 613277 - DNA, 655 bp, Homo sapiens
cacaaatgtaatgttgcataaaagaaagcagacatgccagttkgggcaacatggtgaaaccctgtctctaccaaaaatacaaaacaattagccgggcatggtggtgcaaggctgcggtcccagtgactcaaaaggctgaagtggaaggatatcttaagcctggtaggcagaggttgcagtgagatcatgccactgcacaccaacctggggaaaagaaagaaagaaaaaagaagagagaaagaaagaaggaaagaaagagagaaagaaagaagacagaaaaggaaagaaagaaagaaaacagaaaaggaaataaagaaaacagatgtacaagtatacatactatataattttgtttatataaaatgctacaatcaaataaaactgaggttctgacttccactaagtgtggactagcttgttgaactctcacaaataacaatgatgaaacttgaataaaatatattattatagaaaaacgcctatgcataatacatatatgatatgtgtgtttaacaactgaatgaagatttcagctatacccactgtagcagacacaagcattggtttgacactagcccaatgaaccctgtttataaaacaaaagtcttcaaggtaaaacaacaaaatccagagtttctattctataattatcatt

SEQ ID NO: 613278 - DNA, 544 bp, Homo sapiens
cctacctttctctataatcaccatgacctgatctctgctagcatttttcttaaaatggataaacatatgttatatagtatatattattcttcctcatgatttttttgttatattgtctctttccactcatatgagatatttacagcagttaagttcatagaaacacgaagtagaagagtagtttccagggactacacaaagggcaatggaaggggagtgttgtttactgggtacagagtttcacttttaaaagattgaaaaacagttccttatgaacttggacaatggttgcaaaacaatgtgaatgtatttaatttctttaaactgcacacacaaaaaaataaaatggttaatttcatgtatttttatattttactaaaaggtaaaaactactttctaaaatgaacagactatagctatttgcaactggtgggtgaatatcacaaatgtaatgttgcataaaagaaagcagacatgccagtttgggcaacatrgtgaaaccctgtctctaccaaaaatacaaaacaattagccgggcatggtg

SEQ ID NO: 613279 - DNA, 655 bp, Homo sapiens
cacaaatgtaatgttgcataaaagaaagcagacatgccagtttgggcaacatggtgaaaccctgtctctaccaaaaatacaaaacaattagccgggcatggtggtgcaaggctgcggtcccagtgactcaaaaggctgaagtggaaggatatcttaagcctggtaggcagaggttgcagtgagatcatgccactgcacaccaacctggggaaaagaaagaaagaaaaaagaagagagaaagaaagaaggaaagaaagagagaaagaaagaagacagaaaaggaaagaaagaaagaaaacagaaaaggaaataaagaaaacagatgtacaagtatacatactatataattttgtttatataaaatgytacaatcaaataaaactgaggttctgacttccactaagtgtggactagcttgttgaactctcacaaataacaatgatgaaacttgaataaaatatattattatagaaaaacgcctatgcataatacatatatgatatgtgtgtttaacaactgaatgaagatttcagctatacccactgtagcagacacaagcattggtttgacactagcccaatgaaccctgtttataaaacaaaagtcttcaaggtaaaacaacaaaatccagagtttctattctataattatcatt

SEQ ID NO: 613280 - DNA, 576 bp, Homo sapiens
gacagaaaaggaaagaaagaaagaaaacagaaaaggaaataaagaaaacagatgtacaagtatacatactatataattttgtttatataaaatgctacaatcaaataaaactgaggttctgacttccactaagtgtggactagcttgttgaactctcacaaataacaatgatgaaacttgaataaaatatattattatagaaaaacgcctatgcataatacatatatgatatgtgtgtttaacaactgaatgaagatttcagctatacccactgtagcrgacacaagcattggtttgacactagcccaatgaaccctgtttataaaacaaaagtcttcaaggtaaaacaacaaaatccagagtttctattctataattatcatttatagtttctagtgcacaattttaaaattcataagacttgtaaagaaacgtgaaaatgtcatccatacacaatatcaaaagcaggcagtagaagctatcccaggatgttgcaatcagcagacaagaatttgaaggcagtttttatgaatatgttcatggggaaaaaagaaaatattctattcataaacaaac

SEQ ID NO: 613281 - DNA, 576 bp, Homo sapiens
gacagaaaaggaaagaaagaaagaaaacagaaaaggaaataaagaaaacagatgtacaagtatacatactatataattttgtttatataaaatgctacaatcaaataaaactgaggttctgacttccactaagtgtggactagcttgttgaactctcacaaataacaatgatgaaacttgaataaaatatattattatagaaaaacgcctatgcataatacatatatgatatgtgtgtttaacaactgaatgaagatttcagctatacccactgtagcagacayaagcattggtttgacactagcccaatgaaccctgtttataaaacaaaagtcttcaaggtaaaacaacaaaatccagagtttctattctataattatcatttatagtttctagtgcacaattttaaaattcataagacttgtaaagaaacgtgaaaatgtcatccatacacaatatcaaaagcaggcagtagaagctatcccaggatgttgcaatcagcagacaagaatttgaaggcagtttttatgaatatgttcatggggaaaaaagaaaatattctattcataaacaaac

SEQ ID NO: 613282 - DNA, 576 bp, Homo sapiens
gacagaaaaggaaagaaagaaagaaaacagaaaaggaaataaagaaaacagatgtacaagtatacatactatataattttgtttatataaaatgctacaatcaaataaaactgaggttctgacttccactaagtgtggactagcttgttgaactctcacaaataacaatgatgaaacttgaataaaatatattattatagaaaaacgcctatgcataatacatatatgatatgtgtgtttaacaactgaatgaagatttcagctatacccactgtagcagacacaagcattggtttgacactagcccaatgaaccctgtttataaaacaaaagtcttcaaggtaaaacarcaaaatccagagtttctattctataattatcatttatagtttctagtgcacaattttaaaattcataagacttgtaaagaaacgtgaaaatgtcatccatacacaatatcaaaagcaggcagtagaagctatcccaggatgttgcaatcagcagacaagaatttgaaggcagtttttatgaatatgttcatggggaaaaaagaaaatattctattcataaacaaac

SEQ ID NO: 613283 - DNA, 625 bp, Homo sapiens
cactagcccaatgaaccctgtttataaaacaaaagtcttcaaggtaaaacaacaaaatccagagtttctattctataattatcatttatagtttctagtgcacaattttaaaattcataagacttgtaaagaaacgtgaaaatgtcatccatacacaatatcaaaagcaggcagtagaagctatcccaggatgttgcaatcagcagacaagaatttgaaggcagtttttatgaatatgttcatggggaaaaaagaaaatattctattcataaacaaacagatgtggaacttcagcagagaaatgaacatatatataaaaaaattatagataaggaaatgaaaaaaatcttttgmgtttagccatagatttaaaacagaagacacagcaatagaaattatccagtctgggaaaaaaaaagtacaaaaagtttaaaggaaatgaacagagctctcgagacctgtggaatgactgagtctaaggagaagggagagacaaaaaaaattaaatagggaacaaaagtaaatcaacaactaatagcggaatacttccaaaaactgtccaaatacctaaatatttatatccaaaaggtcaataaatacaaaacaaaatacaaataaaaccaca

SEQ ID NO: 613284 - DNA, 625 bp, Homo sapiens
cactagcccaatgaaccctgtttataaaacaaaagtcttcaaggtaaaacaacaaaatccagagtttctattctataattatcatttatagtttctagtgcacaattttaaaattcataagacttgtaaagaaacgtgaaaatgtcatccatacacaatatcaaaagcaggcagtagaagctatcccaggatgttgcaatcagcagacaagaatttgaaggcagtttttatgaatatgttcatggggaaaaaagaaaatattctattcataaacaaacagatgtggaacttcagcagagaaatgaacatatatataaaaaaattatagataaggaaatgaaaaaaatcttttgcgtttagccatagatttaaaacagaagacacagcaatagaaattatccagtctggraaaaaaaaagtacaaaaagtttaaaggaaatgaacagagctctcgagacctgtggaatgactgagtctaaggagaagggagagacaaaaaaaattaaatagggaacaaaagtaaatcaacaactaatagcggaatacttccaaaaactgtccaaatacctaaatatttatatccaaaaggtcaataaatacaaaacaaaatacaaataaaaccaca

SEQ ID NO: 613285 - DNA, 625 bp, Homo sapiens
cactagcccaatgaaccctgtttataaaacaaaagtcttcaaggtaaaacaacaaaatccagagtttctattctataattatcatttatagtttctagtgcacaattttaaaattcataagacttgtaaagaaacgtgaaaatgtcatccatacacaatatcaaaagcaggcagtagaagctatcccaggatgttgcaatcagcagacaagaatttgaaggcagtttttatgaatatgttcatggggaaaaaagaaaatattctattcataaacaaacagatgtggaacttcagcagagaaatgaacatatatataaaaaaattatagataaggaaatgaaaaaaatcttttgcgtttagccatagatttaaaacagaagacacagcaatagaaattatccagtctgggaaaaaaaaagtacaaaaagtttaaaggaaatgaacagagctctcgagacctgtggaatgactgagtctaaggagaagggagagacaaaaaaaattaaatagggaacaraagtaaatcaacaactaatagcggaatacttccaaaaactgtccaaatacctaaatatttatatccaaaaggtcaataaatacaaaacaaaatacaaataaaaccaca

SEQ ID NO: 613286 - DNA, 357 bp, Homo sapiens
taaaggtagatgactttccagcatgtcgaaaggggcgtggcaggggaggggcgaggagaagggtcggggctgagggaggggccctgcaaaggtctgggcgcgcccagctccccgagagcaagcgttacrgcaacactgggcaggctgttagaggctcccgggctctgtcttgtcagagagaaatcaaacttcaggcacaaatagtcgtacaactggcacgtggggagactgtgtcacaattacaagtgagaccacctgccctggccacgctgtctcctcgcacgcagaagtttgggaacagataggctcccctcagcagggcggaattgcactggaaacatggaggggcggaggaga

SEQ ID NO: 613287 - DNA, 469 bp, Homo sapiens
acctaaatatttatatccaaaaggtcaataaatacaaaacaaaatacaaataaaaccacagcaaggccatatcgtggtttatgaaacaggcaaggcagggcttttgcttgacttgctatgatatctaattgctactatttatggatactatggaaataaatactaaatagaatgggagataggttattctcagagttttttttttttttttgcaaagatgactgttattaaaggtagatgactttccagcatgtcgaaaggggcgtggcaggggaggggcgaggagaagggtcggggctgagggaggggccctgcaaaggtctgggcgcgcccagctccccgagagcaagcgttacggcaacactgggcaggctgttrgaggctcccgggctctgtcttgtcagagagaaatcaaacttcaggcacaaatagtcgtacaactggcacgtggggagactgtgtcacaatt

SEQ ID NO: 613288 - DNA, 357 bp, Homo sapiens
taaaggtagatgactttccagcatgtcgaaaggggcgtggcaggggaggggcgaggagaagggtcggggctgagggaggggccctgcaaaggtctgggcgcgcccagctccccgagagcaagcgttacggcaacactgggcaggctgttagaggctcccgggctctgtcttgtcagagagaaatcaaacttcaggcacaaatagtcgtacaactggcacgtggggagactgtgycacaattacaagtgagaccacctgccctggccacgctgtctcctcgcacgcagaagtttgggaacagataggctcccctcagcagggcggaattgcactggaaacatggaggggcggaggaga

SEQ ID NO: 613289 - DNA, 558 bp, Homo sapiens
aatagtcgtacaactggcacgtggggagactgtgtcacaattacaagtgagaccacctgccctggccacgctgtctcctcgcacgcagaagtttgggaacagataggctcccctcagcagggcggaattgcactggaaacatggaggggcggaggagaagatgaaattatcccckcagtgttggaactgtagtctcagagaagatgaaattttccccgtagtgttggaactgtagtctcagatccactcccagcctttctgtcgcggcagtcggactatgatcccagcatgcgctgggcttaggggaggttcccagccctggaggaagggtcaacagggtgggtccctcgcaaggcgtcctgggagtcatagtccttaaacagtttccagcacgttgatcgcaaggctaccgaactacaatgccagcatgcaccgggattggggcggtgtgtaacgctggagggaaggatagagaggcgcgtccctggccagggatgctgggagttatggtctcttaatggtttccagcgatggcccccggcctgcagactaaaatcc

SEQ ID NO: 613290 - DNA, 562 bp, Homo sapiens
ctgtgtcacaattacaagtgagaccacctgccctggccacgctgtctcctcgcacgcagaagtttgggaacagataggctcccctcagcagggcggaattgcactggaaacatggaggggcggaggagaagatgaaattatccccgcagtgttggaactgtagtctcagagaagatgaaattttccccgtagtgttggaactgtagtctcagatccactcccagcctttctgtcgcggcagtcggactatgatcccagcatgcgctgggcttargggaggttcccagccctggaggaagggtcaacagggtgggtccctcgcaaggcgtcctgggagtcatagtccttaaacagtttccagcacgttgatcgcaaggctaccgaactacaatgccagcatgcaccgggattggggcggtgtgtaacgctggagggaaggatagagaggcgcgtccctggccagggatgctgggagttatggtctcttaatggtttccagcgatggcccccggcctgcagactaaaatcccagcagccaccgggcttcgaggcggtgtgtagc

SEQ ID NO: 613291 - DNA, 484 bp, Homo sapiens
agctttcagggggtgatgcgggctgtggctccttcgtgaaaatgtcaccgtctgcagcgcctttcttgtgatatagaacttgacgggtgagagcgggtatttcttgggttactcaggatctgctaacagcagaggagaaaaccacaattcccaggcataagaatctacctaaagacgatggtttagatattttacagttgaaatcaccagcctcatctcaactgagtcctgactgacgagtgtctcaaaaaagcagytggtgacctcatccctcaggaacaggtggtgctccagctttgtggggatgactttcaaggtgcagagcacttgagccgcatttgaagtcattcatgttttacatctctgctttggatggaaagttgatcccccacagccgttggggatgtaccttaatatactggggcttatcagttaaatttttctgtctagacaatgaaaacccagaagttccacttgcaggtag

SEQ ID NO: 613292 - DNA, 484 bp, Homo sapiens
agctttcagggggtgatgcgggctgtggctccttcgtgaaaatgtcaccgtctgcagcgcctttcttgtgatatagaacttgacgggtgagagcgggtatttcttgggttactcaggatctgctaacagcagaggagaaaaccacaattcccaggcataagaatctacctaaagacgatggtttagatattttacagttgaaatcaccagcctcatctcaactgagtcctgactgacgagtgtctcaaaaaagcagctggtgacctcatccctcaggaacaggtggtgctccagctttgtggggatgactttcaaggtgcagagcacttgagccgcatttgaagtcattcatgttttacatctctgctttggatggaaagttgatcccccacagccgttggggatgtaccttaatatactggggcttatsagttaaatttttctgtctagacaatgaaaacccagaagttccacttgcaggtag

SEQ ID NO: 613293 - DNA, 631 bp, Homo sapiens
gtggtgctccagctttgtggggatgactttcaaggtgcagagcacttgagccgcatttgaagtcattcatgttttacatctctgctttggatggaaagttgatcccccacagccgttggggatgtaccttaatatactggggcttatcagttaaatttttctgtctagacaatgaaaacccagaagttccacttgcaggtagcctcttaataatcgacgtycctaagttccttatgtcctcaggatagttccttttgttcccagatgttaccaactttgatgatgcatctaatctgtacaaacctgtgtatttctctatgtgaaaagaaaactttgttcaaattacatgttcttataattttcacttgtgatcggtgagtatgggacactataaaaaaatcctgaaaaacctcatcatagcaattgaatcacgttactgtactttatgaggaattaaccccttcaggatgaattactcatgggttcatcagcacatttgtgaagaaaggaagaaaaactgtatggcctttatgaaattggaaaaataaagaactatatataggaggaccacagcacaatactagggcccttctcttattttaaatagactctatggggtcgaatgcctgca

SEQ ID NO: 613294 - DNA, 631 bp, Homo sapiens
gtggtgctccagctttgtggggatgactttcaaggtgcagagcacttgagccgcatttgaagtcattcatgttttacatctctgctttggatggaaagttgatcccccacagccgttggggatgtaccttaatatactggggcttatcagttaaatttttctgtctagacaatgaaaacccagaagttccacttgcaggtagcctcttaataatcgacgttcctaagttccttatgtcctcaggatagttccttttgttcccagatgttaccaactttgatgatgcatctaatctgtacaaacctgtgtatttctctatgtgaaaagaawactttgttcaaattacatgttcttataattttcacttgtgatcggtgagtatgggacactataaaaaaatcctgaaaaacctcatcatagcaattgaatcacgttactgtactttatgaggaattaaccccttcaggatgaattactcatgggttcatcagcacatttgtgaagaaaggaagaaaaactgtatggcctttatgaaattggaaaaataaagaactatatataggaggaccacagcacaatactagggcccttctcttattttaaatagactctatggggtcgaatgcctgca

SEQ ID NO: 613295 - DNA, 631 bp, Homo sapiens
gtggtgctccagctttgtggggatgactttcaaggtgcagagcacttgagccgcatttgaagtcattcatgttttacatctctgctttggatggaaagttgatcccccacagccgttggggatgtaccttaatatactggggcttatcagttaaatttttctgtctagacaatgaaaacccagaagttccacttgcaggtagcctcttaataatcgacgttcctaagttccttatgtcctcaggatagttccttttgttcccagatgttaccaactttgatgatgcatctaatctgtacaaacctgtgtatttctctatgtgaaaagaaaactttgttcaaattacatgttcttataattttcacttgtgatcggtgagtatgggacactataaaaaaatcctgaaaaacctcatcatagcaattgaatcaygttactgtactttatgaggaattaaccccttcaggatgaattactcatgggttcatcagcacatttgtgaagaaaggaagaaaaactgtatggcctttatgaaattggaaaaataaagaactatatataggaggaccacagcacaatactagggcccttctcttattttaaatagactctatggggtcgaatgcctgca

SEQ ID NO: 613296 - DNA, 631 bp, Homo sapiens
gtggtgctccagctttgtggggatgactttcaaggtgcagagcacttgagccgcatttgaagtcattcatgttttacatctctgctttggatggaaagttgatcccccacagccgttggggatgtaccttaatatactggggcttatcagttaaatttttctgtctagacaatgaaaacccagaagttccacttgcaggtagcctcttaataatcgacgttcctaagttccttatgtcctcaggatagttccttttgttcccagatgttaccaactttgatgatgcatctaatctgtacaaacctgtgtatttctctatgtgaaaagaaaactttgttcaaattacatgttcttataattttcacttgtgatcggtgagtatgggacactataaaaaaatcctgaaaaacctcatcatagcaattgaatcacgttactgtactttatgaggrattaaccccttcaggatgaattactcatgggttcatcagcacatttgtgaagaaaggaagaaaaactgtatggcctttatgaaattggaaaaataaagaactatatataggaggaccacagcacaatactagggcccttctcttattttaaatagactctatggggtcgaatgcctgca

SEQ ID NO: 613297 - DNA, 497 bp, Homo sapiens
aattactcatgggttcatcagcacatttgtgaagaaaggaagaaaaactgtatggcctttatgaaattggaaaaataaagaactatatataggaggaccacagcacaatactagggcccttctcttattttaaatagactctatggggtcgaatgcctgcattcctaacctatcctgcagtattctcatcctactcttcactgtgtatttaggtgggggkttctgaattcacttgtccacagcgttagtggggatgttgtaacgtgagggtatccatcatctatcatcttaataattaatgaagagaagagccttgagatctgtcttcagatacactgctgccgagtatgtgcctgcaaagacactgcccacaccggtggtctcagaaagttgaacctgatgccaccacaagctgctgttcacagatctaggtgctccttgtgatttgagtctccttcttacatttgtggttgtgaacctgctatgctcaccccatt

SEQ ID NO: 613298 - DNA, 497 bp, Homo sapiens
aattactcatgggttcatcagcacatttgtgaagaaaggaagaaaaactgtatggcctttatgaaattggaaaaataaagaactatatataggaggaccacagcacaatactagggcccttctcttattttaaatagactctatggggtcgaatgcctgcattcctaacctatcctgcagtattctcatcctactcttcactgtgtatttaggtggggggttctgaattcacttgtccacagcgttagtggggatgttgtaacgtgagggtatccatcatctatcatcttaataattaatgaagagaagagccttgagatctgtcttcagatacactgctgccgagtatgtgcctgcaaagacactgcccacaccggtggtctcagaaagttgaacctgatgccaccacaagctgctgttcacagatctaggtgctccttgtgatttgagtctcctkcttacatttgtggttgtgaacctgctatgctcaccccatt

SEQ ID NO: 613299 - DNA, 600 bp, Homo sapiens
cagatctaggtgctccttgtgatttgagtctccttcttacatttgtggttgtgaacctgctatgctcaccccatttatggtagtatattttgtgtcaccttttctattccatttgtttcctgggaactcactgtgtaactgcaattcagagaatatgtagggattccacccccgactacctaagtcactgtayactggtcacatttgtgtcatgttttcagactacacactcttcctctctaatggaatttgttgaagaaatatagttgcctgtagatctcctcagtgtaatgtggctgggattgattatgaagctgggcatgttgtccttggcctcatagacattattcaaaatacctttcccatattttgaagtttgatactactttgttaatgtgaacacttgccatagcaggctctattaaatatctctgtgaatttaactgtcaaaacaacttatgaagtaggcacatgatccccattttacaggtgaggaaacaaatgttccaagattttgagtaattttattaactttacacagctttctggtgcattttgaatcttaagttggatctctttctccacaatgcgtgggcttac

SEQ ID NO: 613300 - DNA, 553 bp, Homo sapiens
gtgtcatgttttcagactacacactcttcctctctaatggaatttgttgaagaaatatagttgcctgtagatctcctcagtgtaatgtggctgggattgattrtgaagctgggcatgttgtccttggcctcatagacattattcaaaatacctttcccatattttgaagtttgatactactttgttaatgtgaacacttgccatagcaggctctattaaatatctctgtgaatttaactgtcaaaacaacttatgaagtaggcacatgatccccattttacaggtgaggaaacaaatgttccaagattttgagtaattttattaactttacacagctttctggtgcattttgaatcttaagttggatctctttctccacaatgcgtgggcttacctccttttctattttgtgcctctctgctagcatctgcaagggtacattttatttttagtacatcttccacttgatggtgggaaacttgacaaacagatccttagtgggagaggaaactcactggcatttgtccttctctctgctccttcttaccctggc

SEQ ID NO: 613301 - DNA, 553 bp, Homo sapiens
gtgtcatgttttcagactacacactcttcctctctaatggaatttgttgaagaaatatagttgcctgtagatctcctcagtgtaatgtggctgggattgattatgaagctgggcatgttgtccttggcctcatagacattattcaaaatacctttcccatattttgaagtttgatactactttgttaatgtgaacacttgccatagcaggctctattaaatatctctgtgaatttaactgtcaaaacaacttatgaagtaggcacatgatccccattttacaggtgaggaaacaaatgttccaagattttgagtaattttattaactttacacagctttctggtgcattttgaatcttaagttggatctctttctccacaatgcgtgggcttacctccttttctattttgtgcctctctgctagcatctgcaagggtacattttatttttagtacatcttccacttgatggtrggaaacttgacaaacagatccttagtgggagaggaaactcactggcatttgtccttctctctgctccttcttaccctggc

SEQ ID NO: 613302 - DNA, 269 bp, Homo sapiens
cacacccggctaattttttgtatttttagtagagacagggtttcaccgtgttagccaggatggtcttggtctcgatatccggccccctgatctgcccmcttcgtcttctcagagtgctgggattagaggcgtgagccaccgcccccggcctgttctataaatttctaagtgatacacataaagtttattttaaaaattacatcacactacattaaaatttactctttctccaggtgtattccatctatttatttatctatctatctatc

SEQ ID NO: 613303 - DNA, 568 bp, Homo sapiens
tttcgtttccacgcgtttacttatatgtaktaatgtaaacgtttctgtacgcttatatgcaaacaacgacaacgtgtatctctgcattgaatactcttgcgtatggtaaatacgtatcggttgtatggaaatagacttctgtatgatagatgtaggtgtttgtgttatacaaataaatacacatcgctctataaagaagggatcgtcgataaagacgtttattttacgtatgaaaagcgtcgtatttatgtgtgtaaatgaacgagcgtacgtagttatctctgtttcctttcttcctctccttcgtgtttttcttccttcctttcttcctttctctccttctttaggtttttcttcctctcttcctttccttctttctctctttctgtccttttttccttcgtgctttatttctctttcgttccctgtctttccttcttttttctttcctctctgtttctttttcccttctttccttcgtttctttcctcattctttctctctttttcgtgtttctttcctttccgcctgtcttttaaaaaatggagtgtttcagaagtttactttg

SEQ ID NO: 613304 - DNA, 504 bp, Homo sapiens
aacgacaacgtgtatctctgcattgaatactcttgcgtatggtaaatacgtatcggttgtatggaaatagacttctgtatgatagatgtaggtgtttgtgttatacaaataaatacacatcgctctataaagaagggatcgtcgataaagacgtttattttacgtatgaaaagcgtcgtatttatgtgtgtaaatgaacgagcgtacgtagttatctctgtttyctttcttcctctccttcgtgtttttcttccttcctttcttcctttctctccttctttaggtttttcttcctctcttcctttccttctttctctctttctgtccttttttccttcgtgctttatttctctttcgttccctgtctttccttcttttttctttcctctctgtttctttttcccttctttccttcgtttctttcctcattctttctctctttttcgtgtttctttcctttccgcctgtcttttaaaaaatggagtgtttcagaagtttactttg

SEQ ID NO: 613305 - DNA, 464 bp, Homo sapiens
agcttatggaagattattttatcacatatgcaagggtttatttctgggatctctattctgtttcgtcatctatgtatctgtttttgtggcaataccatattgtttttatttttgtagctttgtatcatgattttgaatcagaaaatgtaatacctctttgttctttttaaagggtgtttggctagtcacctttcctaagcaacgtttagaattatacacaaaaattctgcaaaaaaaataccattgggattttgacaaaaattaccttacatttttatatcatcatgagtagtactgrcaacattttttttttttttttttggagatggagttttagtgagtcactcaggctgaagggcaggggtgcgagatgtgctcactgcaggctccgcttcccaggttcaagcaattctccagtctcagccaccagagtagctgggattgcagtcgtgcaccatcatgtc

SEQ ID NO: 613306 - DNA, 212 bp, Homo sapiens
ctacaggtttttttggtaatcatcctgagaaataaagacttcataaatcatcttaaagttatgacagtatagaacaacyatatttcaactgaatgcaaagttgtacctcttcacactcccactgttttattaatatcacatattatctttccttatggtctatgatcacaaatttatgcagatttctgcttcatgttttaaactccatggca

SEQ ID NO: 613307 - DNA, 212 bp, Homo sapiens
ctacaggtttttttggtaatcatcctgagaaataaagacttcataaatcatcttaaagttatgacagtatagaacaaccatatttcaactgaatgcaaagttgtacctcttsacactcccactgttttattaatatcacatattatctttccttatggtctatgatcacaaatttatgcagatttctgcttcatgttttaaactccatggca

SEQ ID NO: 613308 - DNA, 212 bp, Homo sapiens
ctacaggtttttttggtaatcatcctgagaaataaagacttcataaatcatcttaaagttatgacagtatagaacaaccatatttcaactgaatgcaaagttgtacctcttcacacycccactgttttattaatatcacatattatctttccttatggtctatgatcacaaatttatgcagatttctgcttcatgttttaaactccatggca

SEQ ID NO: 613309 - DNA, 212 bp, Homo sapiens
ctacaggtttttttggtaatcatcctgagaaataaagacttcataaatcatcttaaagttatgacagtatagaacaaccatatttcaactgaatgcaaagttgtacctcttcacactcccactgttttattaatatcrcatattatctttccttatggtctatgatcacaaatttatgcagatttctgcttcatgttttaaactccatggca

SEQ ID NO: 613310 - DNA, 636 bp, Homo sapiens
tgtatttattctttgtgatttgacgcacagatgaaaaactaaacacataataacggaagttggtggttaataaatcacatcctagtctttcagagcttccgtaagcagacgacatcttcagtttctagggtcttgcagttttaacactgcaaaaccaatgagcatatgtccagaatcagctaaaaagagcgtcagattctttttctcttagtttgtctatttttcactgtctcttcttcaaaagtgtatctgaatgattaccttccggcattctctgttattactcgttggggtgctctcgattgtccccgtgtttgagggctggttgggagagggtgcttgggaaggatgtgccactgtcgggagtttatgagtcaccaggatgtctccagggaaggtcccttccatggatgcaggaagtcctcctggacccacrcccaagatgcctggatgaatttcttgctggtctatttcccaccaaagcacagatgtgacaaagaattcctcgttcacacagtttcttaagcttcctgggatgcgacctgtgatggctcggcggagctcggtggcagctgtctccctcatctccagtgacacctgctggctgtagcaggcagtgagaggagtgcagatgag

SEQ ID NO: 613311 - DNA, 636 bp, Homo sapiens
tgtatttattctttgtgatttgacgcacagatgaaaaactaaacacataataacggaagttggtggttaataaatcacatcctagtctttcagagcttccgtaagcagacgacatcttcagtttctagggtcttgcagttttaacactgcaaaaccaatgagcatatgtccagaatcagctaaaaagagcgtcagattctttttctcttagtttgtctatttttcactgtctcttcttcaaaagtgtatctgaatgattaccttccggcattctctgttattactcgttggggtgctctcgattgtccccgtgtttgagggctggttgggagagggtgcttgggaaggatgtgccactgtcgggagtttatgagtcaccaggatgtctccagggaaggtcccttccatggatgcaggaagtcctcctggacccacacccaagatgcctggatgaatttcttgctggtctatttcccacmaaagcacagatgtgacaaagaattcctcgttcacacagtttcttaagcttcctgggatgcgacctgtgatggctcggcggagctcggtggcagctgtctccctcatctccagtgacacctgctggctgtagcaggcagtgagaggagtgcagatgag

SEQ ID NO: 613312 - DNA, 636 bp, Homo sapiens
tgtatttattctttgtgatttgacgcacagatgaaaaactaaacacataataacggaagttggtggttaataaatcacatcctagtctttcagagcttccgtaagcagacgacatcttcagtttctagggtcttgcagttttaacactgcaaaaccaatgagcatatgtccagaatcagctaaaaagagcgtcagattctttttctcttagtttgtctatttttcactgtctcttcttcaaaagtgtatctgaatgattaccttccggcattctctgttattactcgttggggtgctctcgattgtccccgtgtttgagggctggttgggagagggtgcttgggaaggatgtgccactgtcgggagtttatgagtcaccaggatgtctccagggaaggtcccttccatggatgcaggaagtcctcctggacccacacccaagatgcctggatgaatttcttgctggtctatttcccaccaaagcacagaygtgacaaagaattcctcgttcacacagtttcttaagcttcctgggatgcgacctgtgatggctcggcggagctcggtggcagctgtctccctcatctccagtgacacctgctggctgtagcaggcagtgagaggagtgcagatgag

SEQ ID NO: 613313 - DNA, 602 bp, Homo sapiens
tttgtttttgttatggctctgttttgttttaggtttttagcagcctgcagcaatggtttttgggttctgtgtctagtgataagtggaaaagggggatgaggaaagsgccttactggctcaaccagaaacagaaactaagaactcatggctgtagtctcccgtggatgcccctgtcctacagtaaaggaaatatctttggaatgtaaaaagagagagaataataggcaacaccccaatagggaagaatgaacaaataacaaagatgagaggtgcaaaggccaaggagaaaaccttaaaaatgtggtgttggaagttctgcttcaaagaaattggttctggaaaattctaaatttacttcttttgctgccacaggtggaaatttcctaccctatgcttattatgctcttaaatcttctaaggcttctctgttcatccactaacattccagggcattcacagtgacagccaaagttcgcctcttctttctgctattcccatgaagctcttgtggtctgagtgcttttccattgtttttgggatctgaggaaatctgcacattttgtgagacttctatgttaagctgtcttgtaaaaatctgtgcc

SEQ ID NO: 613314 - DNA, 567 bp, Homo sapiens
ccgaggtctcgccactacactccagcctgggtgacaaagcgagactccatctcaaaaaattaaaaaaaataaataaattatagcctttccatttgtataaaaagaggagtaatatattaagaacataataaaaagtgtctctaatatcattgaaatctttattaaaattttcttctaaatgctctttatgggagattataatgtatttgttgtgcaattttgttactctaaccatatgctaagaattcaaaatctgctctttatgggagcccagttatggttgaacatgctagttatctagaaagagtcttcttccgttgcatgctttgtttattcggtatttcacaggctaatgtttatttaattttattttctaatatatatattcttgtatttccttgttaggataggctggcttacattatttaattgtgtttttagattctgcytatatattataattttgtatgactatattcaactgtgtacagttgaatatgaatcagtcaaatatgaatcaaccacacgtctattgccaacataattctctgttcatttgcctgtata

SEQ ID NO: 613315 - DNA, 583 bp, Homo sapiens
ttatcaatttcttctaggttttccactttatttccgtagaggtgtttatagtattctctgatggtagtttgtatttctgtgggtttcgtggtgatatcccctttgtcgttttttattgcgtctctttgattcttctctcttttctcctttatttgtcttactagtggtctatctattttgttaatcttttcaaaaaaccggctcctgggttgattgattttttgaagtgttttctgtaacattcaattttttttaattctgttaaaaaatttttttccttatatttatttttaggacaatgttttatgagcttttgacaagactgtgagttttgttgttgtgtagagtgatctctatgcmtctgttacatctaactgttttacagtattttcatgtcctctgttttcttcttaacattctctctggctttattattaattacagaactggtgtattaaaatattgttctcagtatattgcagttttttgtttatgttctgacaaaatattattgatttattttaaaatcttcatgtgaggttcatatatatgtgtgtctgtatacataattagataaatacac

SEQ ID NO: 613316 - DNA, 607 bp, Homo sapiens
gttggtaattgtaatgctgagggaatttcccagcattgatgatgcttgcttactgcttataagttaaagtgtcaatatagggactggttgttacaagagaaatgtaagctggaaaaggaaaattttaatctgacttccagactggccctggtaccatgccaggcctgtcttgactgatcaggctcaaagctatcagcctattgctgaaaaagcagctgtccgagttgcccagtcagggtaaaactgaataactagtcagttttcagggcagaagagggtaaaaacccaaatcctatctcaaggatgggaagttaactctaataaaattcaatggcctgcacaaagtgtaaagttccttggcatcctatggamtgcagggaaacagtccattttaccaaaggctaacgctaaaatactagaatttgcagccctaccactgaaaaggaggtccaaaattgtattggcttgtttggattctggagacatcatattctccacttgggtaacatattacaacctctgcatgcagtcactagaaaacactatgaatatcactggagagagaaagacagcctggcttttcaacaagcaaaacaagcggagcaac

SEQ ID NO: 613317 - DNA, 607 bp, Homo sapiens
gttggtaattgtaatgctgagggaatttcccagcattgatgatgcttgcttactgcttataagttaaagtgtcaatatagggactggttgttacaagagaaatgtaagctggaaaaggaaaattttaatctgacttccagactggccctggtaccatgccaggcctgtcttgactgatcaggctcaaagctatcagcctattgctgaaaaagcagctgtccgagttgcccagtcagggtaaaactgaataactagtcagttttcagggcagaagagggtaaaaacccaaatcctatctcaaggatgggaagttaactctaataaaattcaatggcctgcacaaagtgtaaagttccttggcatcctatggaatgcagggaaacagtccattttaccaaaggctaacgctaaaatactagaatttgcagccctaccactgaaaaggaggtccaaaattgtattggcttgtttggattctggagacatcatattcyccacttgggtaacatattacaacctctgcatgcagtcactagaaaacactatgaatatcactggagagagaaagacagcctggcttttcaacaagcaaaacaagcggagcaac

SEQ ID NO: 613318 - DNA, 604 bp, Homo sapiens
ccgctcccggggggctcttcgtgatcgatgtggtgacgtcgtgctctcccgggccgggtccgagccgcgacgggcgaggggcggacgttcgtggcgaacgggaccgtccttctcgctccgccccgcgggggtcccctcgtctctcctctccccgcccgccggcggtgcgtgtgggaaggcgtggggtgcggaccccggcccgacctcgccgtcccgcccgccgccttctgcgtcgcggggcgggccggcggggtcctcygacgcggcagacagccctcgctgtcgcctccagtggttgtcgacttgcgggcggcccccctccgcggcggtgggggtgccgtcccgccggcccgtcgtgctgccctctcgggggggtttgcgcgagcgtcggctccgcctgggcccttgcggtgctcctggagcgctccgggttgtccctcaggtgcccgaggccgaacggtggtgtgtcgttcccgcccccggcgccccctcctccggtcgccgccgcggtgtccgcgcgtgggtcctgagggagctcgtcggtgtggggttcgaggcggtttgagtgagacgagacgagacgcgcccctcccacgcggggaag

SEQ ID NO: 613319 - DNA, 519 bp, Homo sapiens
cggccttgggggtaccggatcccccgggccgccgcctctgtctctgcctccgttatggtagcgctgccgtagcgacccgctcgcagagaaccctccttcggcttccccctcgacggggttggggggagaagcgagggttccgccggccacccgcggtgtggccgagtgcggctcgtcgyctactgtggaccgcgcctccccccttccgagtcgggggaggatcccgccgggccgggcccggcgttcccagcgggttgggacacgtcggccggcgggcggtgggtgtgcgcgcccggcgctctgtccggcgcgtgaccccctccgccgcgagtcggctctccgcccgctcccgtgccgagtcgtgaccggtgccgacgaccgcgtttgcgtggcacggggtcgggcccgcctggccctgggaaagcgtcccacggtgggggcgcgccggtctcccggagcgggaccgggtcggaggatggacgagaatcacgagcgacggtggtgcgggcgtgtcgggtt

SEQ ID NO: 613320 - DNA, 385 bp, Homo sapiens
tgggtgtgcgcgcccggcgctctgtccggcgcgtgaccccctccgccgcgagtcggctctccgcccgctcccgtgccgagtcgtgaccggtgccgacgaccgcgtttgcgtggcacggggtcgggcccgcctggccctgggaaagcgtcccacggtgggggcgcgccggtctcccggagcgggaccgggtcggaggatggacgagaatcacgagcgacggtggtgckggcgtgtcgggttcgtggctgcggtcgctccggggcccccggtggcggggccccggggctcgcgaggcggttctcggtgggggccgagggccgtccggcgtcccaggcggggcgccgcgggaccgccctcgtgtctgtggcggtgggatcccgcggcc

SEQ ID NO: 613321 - DNA, 455 bp, Homo sapiens
gcttgtctcaaagattaagccatgcatgtctaagtacgcacggccggtacagtgaaactgcgaatggctcattaaatcagttatggttcctttggtcgctcgctcctctcctacttggataactgtggtaattctagagctaatacatgccgacgggcgctgacccccttcgcgggggggatgcgtgcatttatcagatcaaaaccaacccggtcagcccctctccggccccggccggggggcgggcgccggcggctttggtgactctagataacctcgggccgatcgcacgccccccgtggcggcgacgacccattcgaacgtctgccctatcaactttcgatggtagtcgccgtgcctaccatggtgaccacgggtgacggggaatcagggttcgattccggagagggagcctgagaaacggctaccacatscaaggaaggcagcaggcgcgc

SEQ ID NO: 613322 - DNA, 555 bp, Homo sapiens
cacccgagattgagcaataacaggtctgtgatgcccttagatgtccggggctgcacgcgcgctacactgactggctcagcgtgtgcctaccctacgccggcaggcgcgggtaacccgttgaaccccattcgtgatggggatcggggattgcaattattccccatgaacgaggaattcccagtaagtgcgggtcataagcttgcgttgattaagtccctgccctttgtacacaccgcccgtcgctactaccgattggatggtttagtgaggccctcggatcggccccgccggggtcggcccacggccctggcggagcgctgagaagacggtcgaacttgactatctagaggaagtaaaagtcgtaacaaggtttccgtaggtgaacctgcggaaggatcattaacggagcccggagggcgaggcccgcggcggcgccgccgccgccgcgcgcttacctccgcacacccacccccccrccgcgacgcggcgcgtgcgcgggcggggcccgcgtgcccgttcgttcgctcgctcgttcgttcgccgcccggccccgcc

SEQ ID NO: 613323 - DNA, 495 bp, Homo sapiens
cagtaagtgcgggtcataagcttgcgttgattaagtccctgccctttgtacacaccgcccgtcgctactaccgattggatggtttagtgaggccctcggatcggccccgccggggtcggcccacggccctggcggagcgctgagaagacggtcgaacttgactatctagaggaagtaaaagtcgtaacaaggtttccgtaggtgaacctgcggaaggatcattaacggagcccggagggcgaggcccgcggcggcgccgccgccgccgcgcgcttacctccgcacacccacccccccaccgcgacgcggcgcgtgcgcgggcggggcccgcgtgcccgttcgttcgctcgctcgttcgttcgccgcccggccccgccggccgcgagagccggagaactcgggagggagacgggggrgagagagagagagagagagagagaaagaagggcgtgtcgttggtgtgcgcgtgtcgtggggccggcgggcggcggggag

SEQ ID NO: 613324 - DNA, 510 bp, Homo sapiens
tcaataaactaggtattgaaaaaaacatacttcaatataataagaaccatgtatgacaaacccacagccaatatcatactgaaagggcaaaagctgaaagcattcccttttaaaacgggcacaagacaaggatgccctctctcatgactcctatttcagatagtattggaagtactgggcagagcaatcaggtaagagaaaaaggcattcaaattgaaagaaaagaaattaaacaacacctgatgtcagamgacatgattctatatcttgaaaacccctattgtctcaaccccaaagcttcttaagctgataaatatctttaacaaagtcccaagatacaaaataaatgggcaaaaatcactagcactaaatccttatataccaacaacagtcaagccaagagcaaaatcgtgaatgaacactcattcacagttaccacaaaaagaataaaataccaaggaatgtatctaacaagagaagtgaaaggccactacaaggagaactataaac

SEQ ID NO: 613325 - DNA, 568 bp, Homo sapiens
aggggagcaacacgcaccagggcctatcaggaggtagggggtgagaggagggagagaatcagaaaaaataactaatagttagtagacttaatacctgggtgataaaacaatctgcacaaccaaacttcgggacgtatgtttccatatttaaagaacctgcacatcctgcccatatacccctgaacttaaaacaaagttcaaaaaagaaaaacattttagcaaaatgacagactatttttgactaccttcgtgtacagttcagagtcagactgcccagctctaacatccttatttatgagaaagaaagcattctctctcttatctgcactattatattgggttttcttttttaatttttttgagacggagtttcactcttattgcccagactggagtgcaatggcgcgatctcggttcaccacaatctctacctcccgggttcaagcgattctcctrcctcagcctctcaagaagcagggattacaggcatgcaccactacgcctggaaaattttgtatttttggtagagactgggtttctctatgttggtcaggctggtcttaaactc

SEQ ID NO: 613326 - DNA, 417 bp, Homo sapiens
gggggacaatattcaacattcttaaagaaaagaattttcaatccagaatttcatattcattcaaactaagcttcataagtgaaggagaaataaaatcctttacatacaagcaaacgatgagagattttgtcaccaccaggcctgccctaaaagagctcctgaaggaagcactaaacatggaaaggaacaaccggtaccagccactgcaaaaacatgccaagttgtaaagaccatcgaggctaggaagaaactgcatcaactaaygagcaaaataaccagctaacatcataatgacaggatcaaatgcacacaaaacaatattaaccttaaaagtaaatggactaaattctcccattaaaagacacagactggcaaattggataaagagtcaagacccatcagtgttctgtattcagg

SEQ ID NO: 613327 - DNA, 632 bp, Homo sapiens
tttttctattttttttttttgccaggaattttgtaatcatgttccttccgtgtcattggtcatgtagccaattcatgggccacagcagtgttgcaggagtgagtatcataggatctcaaactcctgttcttaagcaatccttgcctcaacctcttaagtagctgagactataggtgcaccccacaacgcctarctaattttgttttatttttagtagagattagattttgctatgttttccaggctgttctcacactccccacctcaagcgattctcccagctttgcctgcaaagtgctttgactagagtcaaacctccacacccagcacctataatttgatattttaaacaatactatgtagcgaaagcaattacgaagttatctagggaaagaaagctcactatcacagtgtaaaattgtatagatatgatgcgggcatgtgtgtatacatgcttgcttgtgtgcataggtgcgtgttttctgagaaatggtaccttattgctaccaggctaggatagcattcatgttcttctgaagatgtcaaatattgaagctccaggattcatagaacaagattcctaagtggttcacgagagggtgaacgattgagtaatgggtattttggaagaa

SEQ ID NO: 613328 - DNA, 632 bp, Homo sapiens
tttttctattttttttttttgccaggaattttgtaatcatgttccttccgtgtcattggtcatgtagccaattcatgggccacagcagtgttgcaggagtgagtatcataggatctcaaactcctgttcttaagcaatccttgcctcaacctcttaagtagctgagactataggtgcaccccacaacgcctaactaattttgttttatttttagtagagattagattttgctatgttttccaggctgttctcacactccccacctcaagcgattctcccagctttgcctgcaaagtgctttgactagagtcaaacctccacacccagcacctataatttgatattttaaacaatactakgtagcgaaagcaattacgaagttatctagggaaagaaagctcactatcacagtgtaaaattgtatagatatgatgcgggcatgtgtgtatacatgcttgcttgtgtgcataggtgcgtgttttctgagaaatggtaccttattgctaccaggctaggatagcattcatgttcttctgaagatgtcaaatattgaagctccaggattcatagaacaagattcctaagtggttcacgagagggtgaacgattgagtaatgggtattttggaagaa

SEQ ID NO: 613329 - DNA, 557 bp, Homo sapiens
gaatgtataaaacgataatgttctctgtttaccttaggcacatgtcctcagaacctcctgaggctgtcacgggtatgcgtcctgaaccttggttacgtaaactttctaaattaactgagacctctctcaagttttcagggttcacaacggaaagtgcattgtagctccaccctagggcttaycattaagaaaaactatcctaaatctctgcagatacagtcaaaccggttgtatgtaaactgtatgaaactaaatgcacttattacaagtaaatgaataaatgctgagaaaaaaaatcatgaaccgctcacctttcaaagaagcaataatactatgaattatgtgtaatttccagagtcagctagtttcaaaattgtccccactaaacttggaaaggttccagagtgagctattgtgtctccagcctttgctcctcccccttctttcccctgcgccctcccctcaacctttgccggcaatcacattctctgattctgcaaaagcaggtgggagccctagagagagttctcgtttttttttttttttttttctttttt

SEQ ID NO: 613330 - DNA, 557 bp, Homo sapiens
gaatgtataaaacgataatgttctctgtttaccttaggcacatgtcctcagaacctcctgaggctgtcacgggtatgcgtcctgaaccttggttacgtaaactttctaaattaactgagacctctctcaagttttcagggttcacaacggaaagtgcattgtagctccaccctagggcttaccattaagaaaaactatcctaaatctctgcagatacagtcaaaccggttgtatgtaaactgtatgaaactaaatgcacttattacaagtaaatgaataaatgctgagaaaaaaaatcatgaaccgctcacctttcaaagaagcaataatactatgaattatgtgtaatttccagagtcagctagtttcaaaattgtccccactaaacttggaaaggttccagagtgagctattgtgyctccagcctttgctcctcccccttctttcccctgcgccctcccctcaacctttgccggcaatcacattctctgattctgcaaaagcaggtgggagccctagagagagttctcgtttttttttttttttttttctttttt

SEQ ID NO: 613331 - DNA, 557 bp, Homo sapiens
gaatgtataaaacgataatgttctctgtttaccttaggcacatgtcctcagaacctcctgaggctgtcacgggtatgcgtcctgaaccttggttacgtaaactttctaaattaactgagacctctctcaagttttcagggttcacaacggaaagtgcattgtagctccaccctagggcttaccattaagaaaaactatcctaaatctctgcagatacagtcaaaccggttgtatgtaaactgtatgaaactaaatgcacttattacaagtaaatgaataaatgctgagaaaaaaaatcatgaaccgctcacctttcaaagaagcaataatactatgaattatgtgtaatttccagagtcagctagtttcaaaattgtccccactaaacttggaaaggttccagagtgagctattgtgtctccagcctttgctcctcccccttctttcccctgcgccctcccctcaacctttgccggcaatcacattctctgattctgcaaaagcagrtgggagccctagagagagttctcgtttttttttttttttttttctttttt

SEQ ID NO: 613332 - DNA, 638 bp, Homo sapiens
atgaggtgtctgtcaacccctgttaggaggtttctcccagtcaggagtcacggggaacccacttgaggagacagtctgtctcttagcagagctggtgcactgtgctggcagaatccctctagtcaaaatcagctgctctcttcagagccagcaggcaggaatgatgaaatccactgaagctgcacccacagcctccccttcccccatgtgctctgtcccagggagatrgaggttttctgtgtaagcctctgactagggctgttacctttccttcaaatatgacctgcccaatgaggaggactctaaagaagcagtctgccacagccactttgctgcacccaacccggaccttccagcctccttggcactgtcaggggaaaactgtctactaaagcctcagtaatggtggactccactccctccaactgacctcaattggcccaggtcaacttcagactgctgtgctggcagcgagaatttcaggatgaggaacgcattagctgtttgtgattttcatgtctgttgcagggatttgacccattgttagtgctagatttggagtcttaaaaaacagatttatcttactgaactcaaagtacaacttgaagatgtactcagctgtttacttaaattgcagc

SEQ ID NO: 613333 - DNA, 559 bp, Homo sapiens
ttgacctcacaaaaataattcatgraatcttatatttatgttataaattaatttaatgaaacaaaatttgtgcatggctaaatattacttgttgagtacaatttagaatttctactgtcattttagtgtcctaaaagatatgagctgttgaatttctgctctcataaaatgaatgatattgttaggcctaaacccttgccatttattttccccctctgtcatacagtgtgtatctttggttcactgctgaaaaattttattaatttttctctcttgctagtagtcatactttctaataaagttatcattacttgtgtttatttagttactgtatgttaaacatttgatttctgatggtcttaatgtcatttaatataattgtaaatatttcaatttgtcattattaacaaatttctgtattatatattttagactcagttattaagtatatgtgggtaaatgacttagaataatttctaaaacattgtaggggctactaagtactaataaccctgattcattaaatttttattccttataatattctttattgactaaa

SEQ ID NO: 613334 - DNA, 559 bp, Homo sapiens
ttgacctcacaaaaataattcatggaatcttatatttatkttataaattaatttaatgaaacaaaatttgtgcatggctaaatattacttgttgagtacaatttagaatttctactgtcattttagtgtcctaaaagatatgagctgttgaatttctgctctcataaaatgaatgatattgttaggcctaaacccttgccatttattttccccctctgtcatacagtgtgtatctttggttcactgctgaaaaattttattaatttttctctcttgctagtagtcatactttctaataaagttatcattacttgtgtttatttagttactgtatgttaaacatttgatttctgatggtcttaatgtcatttaatataattgtaaatatttcaatttgtcattattaacaaatttctgtattatatattttagactcagttattaagtatatgtgggtaaatgacttagaataatttctaaaacattgtaggggctactaagtactaataaccctgattcattaaatttttattccttataatattctttattgactaaa

SEQ ID NO: 613335 - DNA, 559 bp, Homo sapiens
ttgacctcacaaaaataattcatggaatcttatatttatgttataaattaatttaatgaaacaaaatttgtgcatggctaaatattacttgttgagtacaatttagaatttctactgtcattttagtgtcctaaaagatatgagctgttgaatttctgctctcataaaatgaatgatattgttaggcctaaacccttgccatttattttccccctctgtcatacagtgtgtatctttggttcactgctgaaaaattttattaatttttctctcttgctagtagtcatactttctaataaagttatcattacttgtgtttatttagttactgtatgttaaacatttgatttctgatggtcttaatgtcatttaatataattgtaaatatttcaatttgtcattattaacaaatttctgtattatatrttttagactcagttattaagtatatgtgggtaaatgacttagaataatttctaaaacattgtaggggctactaagtactaataaccctgattcattaaatttttattccttataatattctttattgactaaa

SEQ ID NO: 613336 - DNA, 559 bp, Homo sapiens
ttgacctcacaaaaataattcatggaatcttatatttatgttataaattaatttaatgaaacaaaatttgtgcatggctaaatattacttgttgagtacaatttagaatttctactgtcattttagtgtcctaaaagatatgagctgttgaatttctgctctcataaaatgaatgatattgttaggcctaaacccttgccatttattttccccctctgtcatacagtgtgtatctttggttcactgctgaaaaattttattaatttttctctcttgctagtagtcatactttctaataaagttatcattacttgtgtttatttagttactgtatgttaaacatttgatttctgatggtcttaatgtcatttaatataattgtaaatatttcaatttgtcattattaacaaatttctgtattatatattttagactcagytattaagtatatgtgggtaaatgacttagaataatttctaaaacattgtaggggctactaagtactaataaccctgattcattaaatttttattccttataatattctttattgactaaa

SEQ ID NO: 613337 - DNA, 569 bp, Homo sapiens
ggcataccagctgtctagatctggaaacatggattgttacaaattagaagtaaataacttgataggcccaatttaacaaatgaagctcaagaagtgggagatatgagacctataatgaaagattaaattattttaaaaatcttaccacaaagaaaaatcagagtcaaatactttaactgttaaattatacaaaatatttcataaaaataccaatcctttacaaatacacaccatacatagataagagataaacaacccctaactactttatgaggccaatattactataccraagccagacaaacccatcatgtgttaggattaatatgggtacatatggctgataaataaagacacataattctcaaaaagtactaataagttaaatacagaaacacgtaaaagtaattatacaccatggccaagtacaatctttttacaaatgaagtggcttaatatctaaaaaccaataatctaatacacaacattgataaagtgaagaacataaaatgatccttttaatagacacagaaaagcttgtgatacaaacaacactgattcattataaa

SEQ ID NO: 613338 - DNA, 569 bp, Homo sapiens
ggcataccagctgtctagatctggaaacatggattgttacaaattagaagtaaataacttgataggcccaatttaacaaatgaagctcaagaagtgggagatatgagacctataatgaaagattaaattattttaaaaatcttaccacaaagaaaaatcagagtcaaatactttaactgttaaattatacaaaatatttcataaaaataccaatcctttacaaatacacaccatacatagataagagataaacaacccctaactactttatgaggccaatattactataccgaagccagacaaacccatcatgtgttaggattaatatgggtacatayggctgataaataaagacacataattctcaaaaagtactaataagttaaatacagaaacacgtaaaagtaattatacaccatggccaagtacaatctttttacaaatgaagtggcttaatatctaaaaaccaataatctaatacacaacattgataaagtgaagaacataaaatgatccttttaatagacacagaaaagcttgtgatacaaacaacactgattcattataaa

SEQ ID NO: 613339 - DNA, 569 bp, Homo sapiens
ggcataccagctgtctagatctggaaacatggattgttacaaattagaagtaaataacttgataggcccaatttaacaaatgaagctcaagaagtgggagatatgagacctataatgaaagattaaattattttaaaaatcttaccacaaagaaaaatcagagtcaaatactttaactgttaaattatacaaaatatttcataaaaataccaatcctttacaaatacacaccatacatagataagagataaacaacccctaactactttatgaggccaatattactataccgaagccagacaaacccatcatgtgttaggattaatatgggtacatatggctgataaataaagacacataattctcaaaaagtactaataagttaaatacagaaacacgtaaaagtaattatacaccatggccaagtacaatctttttacaaatgaagtggcttaatatctaaaaaccaataatytaatacacaacattgataaagtgaagaacataaaatgatccttttaatagacacagaaaagcttgtgatacaaacaacactgattcattataaa

SEQ ID NO: 613340 - DNA, 546 bp, Homo sapiens
atgctgtcacctctcactcatgagactgaagctgtgtctcaactgaagcttgactgggaaggatgcacttctgagctcaatctggttagttgtgcattattgttttgactcagttcttagtttctttstgtctttggtcagggcactgtctccattctctgtcacacaagcctgtaaaaatgaaagcttaaaacattgaagctcgcttctccagagcaaagtatgcgacagacagagagaaagacaggaaaaaaggaagtaaacaatatcacaagagagagaaagtaagaagcaagtgacaatcttttcataatcaaatattggcagtgacattccctattttccaatgtattctactgccatgaagtgagtcactaaccacttactgtttacatttgggtgtgtatagttggaaataaaaattattatgagccatcatgaaggctgtgcactacgtatgccaaggtgagacaaatgggcctgattctaaatataacgagaaggtactacaatgtgtgttgttgttattgttgttgttctggccaa

SEQ ID NO: 613341 - DNA, 546 bp, Homo sapiens
atgctgtcacctctcactcatgagactgaagctgtgtctcaactgaagcttgactgggaaggatgcacttctgagctcaatctggttagttgtgcattattgttttgactcagttcttagtttctttgtgtctttggtcagggcactstctccattctctgtcacacaagcctgtaaaaatgaaagcttaaaacattgaagctcgcttctccagagcaaagtatgcgacagacagagagaaagacaggaaaaaaggaagtaaacaatatcacaagagagagaaagtaagaagcaagtgacaatcttttcataatcaaatattggcagtgacattccctattttccaatgtattctactgccatgaagtgagtcactaaccacttactgtttacatttgggtgtgtatagttggaaataaaaattattatgagccatcatgaaggctgtgcactacgtatgccaaggtgagacaaatgggcctgattctaaatataacgagaaggtactacaatgtgtgttgttgttattgttgttgttctggccaa

SEQ ID NO: 613342 - DNA, 546 bp, Homo sapiens
atgctgtcacctctcactcatgagactgaagctgtgtctcaactgaagcttgactgggaaggatgcacttctgagctcaatctggttagttgtgcattattgttttgactcagttcttagtttctttgtgtctttggtcagggcactgtctcyattctctgtcacacaagcctgtaaaaatgaaagcttaaaacattgaagctcgcttctccagagcaaagtatgcgacagacagagagaaagacaggaaaaaaggaagtaaacaatatcacaagagagagaaagtaagaagcaagtgacaatcttttcataatcaaatattggcagtgacattccctattttccaatgtattctactgccatgaagtgagtcactaaccacttactgtttacatttgggtgtgtatagttggaaataaaaattattatgagccatcatgaaggctgtgcactacgtatgccaaggtgagacaaatgggcctgattctaaatataacgagaaggtactacaatgtgtgttgttgttattgttgttgttctggccaa

SEQ ID NO: 613343 - DNA, 546 bp, Homo sapiens
atgctgtcacctctcactcatgagactgaagctgtgtctcaactgaagcttgactgggaaggatgcacttctgagctcaatctggttagttgtgcattattgttttgactcagttcttagtttctttgtgtctttggtcagggcactgtctccattctctgtcacacaagcctgtaaaaatgaaagcttaaaacaytgaagctcgcttctccagagcaaagtatgcgacagacagagagaaagacaggaaaaaaggaagtaaacaatatcacaagagagagaaagtaagaagcaagtgacaatcttttcataatcaaatattggcagtgacattccctattttccaatgtattctactgccatgaagtgagtcactaaccacttactgtttacatttgggtgtgtatagttggaaataaaaattattatgagccatcatgaaggctgtgcactacgtatgccaaggtgagacaaatgggcctgattctaaatataacgagaaggtactacaatgtgtgttgttgttattgttgttgttctggccaa

SEQ ID NO: 613344 - DNA, 553 bp, Homo sapiens
gtggagcccctgagaggcacaatgacatacttggcatcacakaattaatacattaaacataaagactttaactcagcttgtatcctcaaacttgtggctctggctgcattccatttcctccggcactggtgcaggaggtgctgtatttgcataattgtgcacaagtaatcagatgacttgggagagaatggtgagcagtcagcagtgcagaaaagcctttgagtaggtcttattgaaggaagataggtcttattgaaagaagaataataccttcaagaagtgacctcatttctttggtgaaaggtcctaacagtactaagtattctggtaaccaaaaactcacattctaaagacagtccaccatacagcactgttggccagaatctctcaagagagaaagatgttctgctgtataacaactttctgaggctctttcttgtgaggttctgttcctcacaagtagcaccttctagctatgtcttcacacgacagaaggggcatgaatattcctttcaacctccgtcacacgggcactattattttctcgttaaca

SEQ ID NO: 613345 - DNA, 553 bp, Homo sapiens
gtggagcccctgagaggcacaatgacatacttggcatcacagaattaatacattaaacataaagactttaactcagcttgtatcctcaaacttgtggctctggctgcattccatttcctccggcactggtgcaggaggtgctgtatttgcataattgtgcacaagtaatcagatgacttgggagagaatggtgagcagtcagcagtgcagaaaagcctttgagtaggtcttattgaaggaagataggtcttattgaaagaagaataataccttcaagaagtgacctcatttctttggtgaaaggtcctaacagtactaagtattctggtaaccaaaaactcacattctaaagacagtccaccatrcagcactgttggccagaatctctcaagagagaaagatgttctgctgtataacaactttctgaggctctttcttgtgaggttctgttcctcacaagtagcaccttctagctatgtcttcacacgacagaaggggcatgaatattcctttcaacctccgtcacacgggcactattattttctcgttaaca

SEQ ID NO: 613346 - DNA, 467 bp, Homo sapiens
taatacggtgaaaccccgtctctactaaaagtccaaaaacattgctgggtgtggtggcgggcgcctgtagtccccgctactagggaagctgaggcaggaaaaaggtgtgaacccaggaggtggagctttcagtgagctgagatcacaccagtgcactmcagcctcggagacacagcaagactccatcaaaaaaataaaattaaattaaaacatataacaaaattaaggtccaattaaaggtaaatatatatagcaaaaaaaaaattcaagctctgataaggttaattgtaacagattgtgccagaattttgagatttctggggatggacagagcccaagagtttccttctataacaatttctgtgaagtttcttacactcttattcaatttgaacgtggataaatgggttttctctgttttgttatttaagagattcatgataaggaaggcctatttatgcatgatt

SEQ ID NO: 613347 - DNA, 564 bp, Homo sapiens
ttgagtcagtggtgtctgctgaggaagggcacagaatctcatgcccacagaagcatgatgttctgtcagataggagacttctcccagagccagaacttcatctttcaaatggaattagagattttcacaggcatacattgctctgaagccctatcagaggcttagcactgagaatatgaccaaakaaggtgactaataaacatatgacctagtactctgatctacagtgattctaccctctcaaatagctcttccctggctctggaatcttttctggattcatctaccagaaacagatacactgaaagattgagaagaagcttttattctcactgtgagtcttgccctgtctcaccatcttctctagaagtgcaatgttctaactattcctgagagacttcatctcaggtagctctctctgacaacataattgagaagagaaacgagcaagactcagattatcttgaaggcttgtctagggttcttacatgatttatgtctccaatttatgtcaatattgacaaatatagattcatctctagatggtagaaaaacagaaggagg

SEQ ID NO: 613348 - DNA, 595 bp, Homo sapiens
aaggtgactaataaacatatgacctagtactctgatctacagtgattctaccctctcaaatagctcttccctggctctggaatcttttctggattcatctaccagaaacagatacactgaaagattgagaagaagcttttattctcactgtgagtcttgccctgtctcaccatcttctctagaagtgcaatgttctaactattcctgagagacttcatctcaggtagctctctctgacaacataattgagaagagaaacgagcaagactcagattatyttgaaggcttgtctagggttcttacatgatttatgtctccaatttatgtcaatattgacaaatatagattcatctctagatggtagaaaaacagaaggaggagcctctgctcacagagaaaataaaagatgaattcaatgttttgtagagccagcttattttaaaccatggggcatttaatctttttagaaaaaaacaaaagcaatagggttttttgtttttgtttttgcttttgcttttgtgttttggttttggttttttttcttttgttttttccctgaagcaactcaactgtggcctcagacaactgggcactg

SEQ ID NO: 613349 - DNA, 595 bp, Homo sapiens
aaggtgactaataaacatatgacctagtactctgatctacagtgattctaccctctcaaatagctcttccctggctctggaatcttttctggattcatctaccagaaacagatacactgaaagattgagaagaagcttttattctcactgtgagtcttgccctgtctcaccatcttctctagaagtgcaatgttctaactattcctgagagacttcatctcaggtagctctctctgacaacataattgagaagagaaacgagcaagactcagattatcttgaaggcttgtctagggttcttacatgatttatgtctccaatttatgtcaatattgacaaatatagattcatctctagatggtagaaaaacagaaggaggagcctctgctcacagagaaaataaaagatgaattcaatgttttgtagagccagcttattttaaaccatggggcatttaatctttttagaaaaaaacaaaagcaatagggttttttgtttttgtttttgcttttgcttttgtgttttsgttttggttttttttcttttgttttttccctgaagcaactcaactgtggcctcagacaactgggcactg

SEQ ID NO: 613350 - DNA, 554 bp, Homo sapiens
aagtgctgggtgtgagctgctgtgcccagcccaaaggattcttaagggtgatatgggggatggaatggaaaaaataaacttagtctttgcacttccacctggtctaactaaccctactctcatcctatcccaaaattattgccagacttttctggagtgtgccaggggcaattcagaaggaaaagaggytattcatgcctatccatttcccatagctcctgagatctaagtcgttcactcccctggtttcaggttgttgctccccttctatatcttcagaattaatgtgatccattccaatacttataattgtacctttatctgatcccctcctattttgctgtagacattttatgtagtagatccagttgtaatagagacaagaatgtttatatacaccataatcagaactaaattggagttccataaccccttttttgactgggctgctactcagaaatcatacaaaccaggctgcctggaggttgcagttaggagaaatcacatcttgcccaggaatgtcagtgtggaacctcaaatttggaaaatagatt

SEQ ID NO: 613351 - DNA, 554 bp, Homo sapiens
aagtgctgggtgtgagctgctgtgcccagcccaaaggattcttaagggtgatatgggggatggaatggaaaaaataaacttagtctttgcacttccacctggtctaactaaccctactctcatcctatcccaaaattattgccagacttttctggagtgtgccaggggcaattcagaaggaaaagaggctattcatgcctatccatttcccatagctcctgagatctaagtcgttcactcccctggtttcaggttgttgctccccttctatatcytcagaattaatgtgatccattccaatacttataattgtacctttatctgatcccctcctattttgctgtagacattttatgtagtagatccagttgtaatagagacaagaatgtttatatacaccataatcagaactaaattggagttccataaccccttttttgactgggctgctactcagaaatcatacaaaccaggctgcctggaggttgcagttaggagaaatcacatcttgcccaggaatgtcagtgtggaacctcaaatttggaaaatagatt

SEQ ID NO: 613352 - DNA, 449 bp, Homo sapiens
cagtcccaaagaagatgttcttaattagacagttaatcattttsaatatggaagcctaaacacgtagaatgtggcaataacccagaactctcagttctgacaattgagtgaagtaatcaccccagattcaggttcttcattggctgacaatgagataaaacacccacaccagcccagtgaacaccatgaggtgtcatcttccctggcccattagtgaaccaggaacagatatttagaaaatattcagtaaattggggagtcccacagagtcagaaattttgcttgagatagtggagggtggcataaaatttctaccgaatatgaattttaatttttactttagtgccgtttctattttagtctaatttccttctagaatatgttatttctatttaccaagtggcctcctgtggtctttttcatagagttcaaatcgacccatctaaaaa

SEQ ID NO: 613353 - DNA, 449 bp, Homo sapiens
cagtcccaaagaagatgttcttaattagacagttaatcattttgaatatggaagcctaaacacgtagaatgtggcaataacccagaactctcagttctgacaattgagtgaagtaatcaccccagattcaggttcttcattggctgacaatgagatmaaacacccacaccagcccagtgaacaccatgaggtgtcatcttccctggcccattagtgaaccaggaacagatatttagaaaatattcagtaaattggggagtcccacagagtcagaaattttgcttgagatagtggagggtggcataaaatttctaccgaatatgaattttaatttttactttagtgccgtttctattttagtctaatttccttctagaatatgttatttctatttaccaagtggcctcctgtggtctttttcatagagttcaaatcgacccatctaaaaa

SEQ ID NO: 613354 - DNA, 558 bp, Homo sapiens
ttttagccctctcaaaatatgaatcttctgatcctttcatctagaatctctatgtgtgccataaagtcctaactctgcttgtgcctatactttctgttcatgcagagattaaaagacaaacaggtgggagcttagtgttttagcgtttttcctgagaatctgtctagcctagagcatccccatttttttctagattccaaggagtactatcactatcctaattctcagtgtcttgtttccaagtatttcctcctacgattgtcagcgtgactacctttttaccccactgatagtgtttgctccaggtgaactgggtagttcatttttatttaaatgcttccataagcrttaagctattaatttaagatttctttgttttttataaagtaattctgctgtttccctcagagctcaactttcactaagtctcataaattttattatgttttgtctaaatgtctatttatgttaaaatattctctgacactatttgtacattttttattcattaattatttaagattgtgtcatttaatgcacacatgtttgcatttccca

SEQ ID NO: 613355 - DNA, 459 bp, Homo sapiens
agcttgcaatttttattgttgaaactattgttgcaactatttctgcctttatttctatcagttttgctttatgtacttctgtgaacttttgttacattcatatatgttaatttattttcctcatgaatttatccttctaattataatctatcttcatctctagtaatagtatttgttgtcttaargtatatcctaattttttgatttttggtttttctgggtgcatagtaggtgtatacctttatgaagtatatagaatattttgataccgtcatacaatgtgtaataattacatcagagttaatggggtattcatcacatgaagtattactattggatttcaaataaccaaattatacaatttctgttattttaaaatgtacacttaaattattcttaactagagtcacctcgtgccgtcaaatgctagaactgattcattctttctaactatatttt

SEQ ID NO: 613356 - DNA, 459 bp, Homo sapiens
agcttgcaatttttattgttgaaactattgttgcaactatttctgcctttatttctatcagttttgctttatgtacttctgtgaacttttgttacattcatatatgttaatttattttcctcatgaatttatccttctaattataatctatcttcatctctagtaatagtatttgttgtcttaaggtatatcctaattttttkatttttggtttttctgggtgcatagtaggtgtatacctttatgaagtatatagaatattttgataccgtcatacaatgtgtaataattacatcagagttaatggggtattcatcacatgaagtattactattggatttcaaataaccaaattatacaatttctgttattttaaaatgtacacttaaattattcttaactagagtcacctcgtgccgtcaaatgctagaactgattcattctttctaactatatttt

SEQ ID NO: 613357 - DNA, 459 bp, Homo sapiens
agcttgcaatttttattgttgaaactattgttgcaactatttctgcctttatttctatcagttttgctttatgtacttctgtgaacttttgttacattcatatatgttaatttattttcctcatgaatttatccttctaattataatctatcttcatctctagtaatagtatttgttgtcttaaggtatatcctaattttttgatttttggtttttctgggtgcatagtaggtgtatacctttatgaagtatatagaatattttgataccgtcatacaatgtgtaataattacatcagagttaatggggtattcatcacatgaagtattactattggatttcaaataaccaaattatacaatttctgttattttaaaatgtacacttaaattattcttaactagagtcacctygtgccgtcaaatgctagaactgattcattctttctaactatatttt

SEQ ID NO: 613358 - DNA, 459 bp, Homo sapiens
agcttgcaatttttattgttgaaactattgttgcaactatttctgcctttatttctatcagttttgctttatgtacttctgtgaacttttgttacattcatatatgttaatttattttcctcatgaatttatccttctaattataatctatcttcatctctagtaatagtatttgttgtcttaaggtatatcctaattttttgatttttggtttttctgggtgcatagtaggtgtatacctttatgaagtatatagaatattttgataccgtcatacaatgtgtaataattacatcagagttaatggggtattcatcacatgaagtattactattggatttcaaataaccaaattatacaatttctgttattttaaaatgtacacttaaattattcttaactagagtcacctcgtgcygtcaaatgctagaactgattcattctttctaactatatttt

SEQ ID NO: 613359 - DNA, 585 bp, Homo sapiens
atgagggttcccttttctccgcatgcttgtcagcatttgttattgccttttagctaaaacccactttaactggggtgmggtaatagctcattgtaattttgatttgcatttctctgatgattcatgatgttgatcatcttttcatatacctatttgccatttgcgtgtctttattggagtaatgtctgtttacatattttgcctattttttaaaataggattattagattttattttctatagagttatttgagcgccttctatgttttggttacaaatccattttcagataggtagtttgaaaatattttctttcattctgtgggttgttttctcactttgttgattcttttctgtgccatgcaaaattttataacttggtgtgataccaattttccattttgctttggttgcctgtgcttgtgaggtgttactcaagaaatctttgcttaatccaaggttttttagaatttccccaatgttttctttcagaagttttatagtttgcagttttacatttaaatatttaatccattttgatttagtttttgcacgtggcaaaagatagaggtctagttttattcc

SEQ ID NO: 613360 - DNA, 554 bp, Homo sapiens
atgagggttcccttttctccgcatgcttgtcagcatttgttattgccttttagctaaaacccactttaactggggtgcggtaatagctcattgtaattttgatttgcatttctctgatgattcatgatgttgatcatcttttcatatacctatttgccatttgcgtgtctttattggagtaatgtctgtttacatattttgcctattttttaaaataggattattagattttattttctatagagttatttgagcgccttctatgttttggttacaaatccattttcagataggtagtttgaaaatattttctttcattctgtgggttgttttctsactttgttgattcttttctgtgccatgcaaaattttataacttggtgtgataccaattttccattttgctttggttgcctgtgcttgtgaggtgttactcaagaaatctttgcttaatccaaggttttttagaatttccccaatgttttctttcagaagttttatagtttgcagttttacatttaaatatttaatccattttgatttagtttttgcac

SEQ ID NO: 613361 - DNA, 501 bp, Homo sapiens
tgttttctcactttgttgattcttttctgtgccatgcaaaattttataacttggtgtgataccaattttccattttgctttggttgcctgtgcttgtgaggtgttactcaagaartctttgcttaatccaaggttttttagaatttccccaatgttttctttcagaagttttatagtttgcagttttacatttaaatatttaatccattttgatttagtttttgcacgtggcaaaagatagaggtctagttttattcctctgcatatggatatccagatttaccatcactgtttattgaagagactgagtttttattcttaatatattttcttggtgcctatgtaaaaaatgagttcactgtagatggatggtttggttctgggttctctattctgctccattttcctgtgtgtctgtttttatgccagtactatgctgttttggttactacacatcggtagtataattttgtgtaatgtaataatgtatgctatgtaatg

SEQ ID NO: 613362 - DNA, 585 bp, Homo sapiens
atgagggttcccttttctccgcatgcttgtcagcatttgttattgccttttagctaaaacccactttaactggggtgcggtaatagctcattgtaattttgatttgcatttctctgatgattcatgatgttgatcatcttttcatatacctatttgccatttgcgtgtctttattggagtaatgtctgtttacatattttgcctattttttaaaataggattattagattttattttctatagagttatttgagcgccttctatgttttggttacaaatccattttcagataggtagtttgaaaatattttctttcattctgtgggttgttttctcactttgttgattcttttctgtgccatgcaaaattttataacttggtgtgataccaattttccattttgctttggttgcctgtgcttgtgaggtgttactcaagaaatctttgcttaatccaaggttttttagaatttccccaatgttttctttcagaagtttyatagtttgcagttttacatttaaatatttaatccattttgatttagtttttgcacgtggcaaaagatagaggtctagttttattcc

SEQ ID NO: 613363 - DNA, 501 bp, Homo sapiens
tgttttctcactttgttgattcttttctgtgccatgcaaaattttataacttggtgtgataccaattttccattttgctttggttgcctgtgcttgtgaggtgttactcaagaaatctttgcttaatccaaggttttttagaatttccccaatgttttctttcagaagttttatagtttgcagttttacatttaaatatttaatccattttgatttagtttttgcacrtggcaaaagatagaggtctagttttattcctctgcatatggatatccagatttaccatcactgtttattgaagagactgagtttttattcttaatatattttcttggtgcctatgtaaaaaatgagttcactgtagatggatggtttggttctgggttctctattctgctccattttcctgtgtgtctgtttttatgccagtactatgctgttttggttactacacatcggtagtataattttgtgtaatgtaataatgtatgctatgtaatg

SEQ ID NO: 613364 - DNA, 501 bp, Homo sapiens
tgttttctcactttgttgattcttttctgtgccatgcaaaattttataacttggtgtgataccaattttccattttgctttggttgcctgtgcttgtgaggtgttactcaagaaatctttgcttaatccaaggttttttagaatttccccaatgttttctttcagaagttttatagtttgcagttttacatttaaatatttaatccattttgatttagtttttgcacgtggcaaaagatagaggtctagttttattccyctgcatatggatatccagatttaccatcactgtttattgaagagactgagtttttattcttaatatattttcttggtgcctatgtaaaaaatgagttcactgtagatggatggtttggttctgggttctctattctgctccattttcctgtgtgtctgtttttatgccagtactatgctgttttggttactacacatcggtagtataattttgtgtaatgtaataatgtatgctatgtaatg

SEQ ID NO: 613365 - DNA, 501 bp, Homo sapiens
tgttttctcactttgttgattcttttctgtgccatgcaaaattttataacttggtgtgataccaattttccattttgctttggttgcctgtgcttgtgaggtgttactcaagaaatctttgcttaatccaaggttttttagaatttccccaatgttttctttcagaagttttatagtttgcagttttacatttaaatatttaatccattttgatttagtttttgcacgtggcaaaagatagaggtctagttttattcctctgcatatggatatccagatttaccatcactgtttattgaagagactgagtttttattcttaatatattttcttggtgcctatgtaaaaaatgagttcactgtagatggatggtttgrttctgggttctctattctgctccattttcctgtgtgtctgtttttatgccagtactatgctgttttggttactacacatcggtagtataattttgtgtaatgtaataatgtatgctatgtaatg

SEQ ID NO: 613366 - DNA, 513 bp, Homo sapiens
tcttttgtgattatatataaatttaagattttttagagctgttgtatttatttgtgtgaggaatgtcaatggtatttttacagaaattgcgttgaatctgtagcttgctttgtgtagcatggacattttaatattgattcttccaatccataaacacagaacactgactaatacaatctgcaaatgggtagtttgacttcctctcctcttatttgaatgcctttatttttttctcttgtctgattgctctggccaggattttcaayactatgttgaacagggctggtaagagagggcatctttgtcttgtgccagtttccaagaaaaatgcttccagtttcacccattcagtataatgttggctgtgggtttgtcatagatgacttttattatttcaaagcatgtttcctcaatacctagtatatggagagttttaacataaagtggttttgaattttaataaaagctctttctgcatctattacaataatcatgaggtttttgtctttagtt

SEQ ID NO: 613367 - DNA, 513 bp, Homo sapiens
tcttttgtgattatatataaatttaagattttttagagctgttgtatttatttgtgtgaggaatgtcaatggtatttttacagaaattgcgttgaatctgtagcttgctttgtgtagcatggacattttaatattgattcttccaatccataaacacagaacactgactaatacaatctgcaaatgggtagtttgacttcctctcctcttatttgaatgcctttatttttttctcttgtctgattgctctggccaggattttcaacactatgttgaacagggctggtaagagagggcatctttgtcttgtgccagtttccaagaaaaatgcttccagtttcacccattcagtataawgttggctgtgggtttgtcatagatgacttttattatttcaaagcatgtttcctcaatacctagtatatggagagttttaacataaagtggttttgaattttaataaaagctctttctgcatctattacaataatcatgaggtttttgtctttagtt

SEQ ID NO: 613368 - DNA, 513 bp, Homo sapiens
tcttttgtgattatatataaatttaagattttttagagctgttgtatttatttgtgtgaggaatgtcaatggtatttttacagaaattgcgttgaatctgtagcttgctttgtgtagcatggacattttaatattgattcttccaatccataaacacagaacactgactaatacaatctgcaaatgggtagtttgacttcctctcctcttatttgaatgcctttatttttttctcttgtctgattgctctggccaggattttcaacactatgttgaacagggctggtaagagagggcatctttgtcttgtgccagtttccaagaaaaatgcttccagtttcacccattcagtataatgttggctgtgggtttgtcatagatgacttttattatttcaaagcatgtttcctcaatacctagtatatggagagttttaacataaagtggttttgaattttaatraaagctctttctgcatctattacaataatcatgaggtttttgtctttagtt

SEQ ID NO: 613369 - DNA, 368 bp, Homo sapiens
tcagtaggaatgataccaaattcttctttgcatatccagtagaatttggctgggaattcatcttttcctkggctttttaaaattgatagtctatttattacagattcaattttggagcatgttattggtctgttcagggattcaatttcttcctggttcagtcttggaaaggtgtacatgtccaggaatttatctatttgttctaggtgttgtagtttttttgcataaaggtgttcatcatattctctgatgtttatttctatttctgaggagccagtggtaatatcccctttgttgtttctgattgtctttatttggatcttctctcttttcctctatattagtctagctagtagtccacatttaaa

SEQ ID NO: 613370 - DNA, 368 bp, Homo sapiens
tcagtaggaatgataccaaattcttctttgcatatccagtagaatttggctgggaattcatcttttccttggctttttaaaattgatagtctatttattacagattcaattttggagcatgttattggtctgttcagggattcaatttcttcctggttcagtcttggaaaggtgtacatgtccaggaatttatctatttgttctaggtgttgtagtttttttgcataaaggtgttcatcatattctcygatgtttatttctatttctgaggagccagtggtaatatcccctttgttgtttctgattgtctttatttggatcttctctcttttcctctatattagtctagctagtagtccacatttaaa

SEQ ID NO: 613371 - DNA, 406 bp, Homo sapiens
ggtgttcagcaacatcagtttttttctcaacactgatttagttgcatctcagggattctggtaggttgtgtctttgttctcattastttcaaataactttttgattgatgtcttaatttcattattcacacaaaagtcattcaggagtgagttatttaatttttatgtaatcatatggtattgagtattggttttctcaacttttacctccaattttactatactctggtctcagagagtggttgtcataatttgaattcttttataatttctgagaacagttttatgtcgattaagtggttgattttagagtatgtgccatgtggcaatgagaacgtatatgttgttgtttttggtggagagttctgaaagtgtctgttacatccatttgatccagtgctgcatt

SEQ ID NO: 613372 - DNA, 390 bp, Homo sapiens
tgttactttttgtggtgggtgttcagcaacatcagtttttttctcaacactgatttagttgcatctcagggattctggtaggttgtgtctttgttctcattagtttcaaataactttttgattgatgycttaatttcattattcacacaaaagtcattcaggagtgagttatttaatttttatgtaatcatatggtattgagtattggttttctcaacttttacctccaattttactatactctggtctcagagagtggttgtcataatttgaattcttttataatttctgagaacagttttatgtcgattaagtggttgattttagagtatgtgccatgtggcaatgagaacgtatatgttgttgtttttggtggagagttctgaaagt

SEQ ID NO: 613373 - DNA, 281 bp, Homo sapiens
aaagtcattcaggagtgagttatttaatttttatgtaatcatatggtattgagtattggttttctcaacttttacctccaattttactrtactctggtctcagagagtggttgtcataatttgaattcttttataatttctgagaacagttttatgtcgattaagtggttgattttagagtatgtgccatgtggcaatgagaacgtatatgttgttgtttttggtggagagttctgaaagtgtctgttacatccatttgatccagtgctgcattcagatct

SEQ ID NO: 613374 - DNA, 387 bp, Homo sapiens
ggtgttcagcaacatcagtttttttctcaacactgatttagttgcatctcagggattctggtaggttgtgtctttgttctcattagtttcaaataactttttgattgatgtcttaatttcattattcacacaaaagtcattcaggagtgagttatttaatttttatgtaatcatatggtattgagtattggttttctcaacttttacctccaattttactatactctggtctcrgagagtggttgtcataatttgaattcttttataatttctgagaacagttttatgtcgattaagtggttgattttagagtatgtgccatgtggcaatgagaacgtatatgttgttgtttttggtggagagttctgaaagtgtctgttacatcca

SEQ ID NO: 613375 - DNA, 426 bp, Homo sapiens
ccatttgatccagtgctgcattcagatcttgaatatcttgttaattttctgccttaataatctaatattgtaaatgggttgttgaagtttttcactataattgtgtaggaatctcagtctttttaaagacctctaagaacttgctttatgaatttgggtgttcctgtgttgggtgtgtatatatttaaaatgtatatatttaaatwtgaatacatatattcttgttgaatttaaccctttagcattttgtaatgcctttttgcctttttaaatctttgttgttttaaagtctgtttgtctaaaattagggttgcaacccattctttcttctgttttccatttgcttggtagattttttatcccgtcattttcagcctatgaaactgattgcatgtgaaatgagtcttgatgacagcatatcattgg

SEQ ID NO: 613376 - DNA, 651 bp, Homo sapiens
tttgttgttttaaagtctgtttgtctaaaattwgggttgcaacccattctttcttctgttttccatttgcttggtagattttttatcccgtcattttcagcctatgaaactgattgcatgtgaaatgagtcttgatgacagcatatcattggttctttgttctttatccagtttcccactgtttgccttttaattggaacattcagcccatttacattcatagttagtgttgatatgtgtgcatttgatgctgccattataatggtagctgcttattatgcagacttgtttgtgcgtaactggtctgtatacctcagtgtgtttttttagtggctaataaaggtttttttcacctatatttagttcttccttcaggagctcttgtaaggcatgtcttgtagtaatgaatttcctcagcatttgcctgtttaaaaagaactttatttctcctttacttatgaagcttagtttggccaaatacgagattgttgattggaatttattttcttcaaggaggttaaatattggtattggtctcttctggcttgtaggatttctgctaaaaggcgtacttttacactgataatctttcctttgtggttgacctccctttcctctctagctgcatttgtcattttttcttttatttca

SEQ ID NO: 613377 - DNA, 426 bp, Homo sapiens
ccatttgatccagtgctgcattcagatcttgaatatcttgttaattttctgccttaataatctaatattgtaaatgggttgttgaagtttttcactataattgtgtaggaatctcagtctttttaaagacctctaagaacttgctttatgaatttgggtgttcctgtgttgggtgtgtatatatttaaaatgtatatatttaaatttgaatacatatattcttgttgaatttaaccctttagcattttgtaatgcctttttgcctttttaaatctttgttgttttaaagtctgtttgtctaaaattagggttgcaacccattctttctkctgttttccatttgcttggtagattttttatcccgtcattttcagcctatgaaactgattgcatgtgaaatgagtcttgatgacagcatatcattgg

SEQ ID NO: 613378 - DNA, 651 bp, Homo sapiens
tttgttgttttaaagtctgtttgtctaaaattagggttgcaacccattctttcttctgttttccatttgcttggtagattttttatcccrtcattttcagcctatgaaactgattgcatgtgaaatgagtcttgatgacagcatatcattggttctttgttctttatccagtttcccactgtttgccttttaattggaacattcagcccatttacattcatagttagtgttgatatgtgtgcatttgatgctgccattataatggtagctgcttattatgcagacttgtttgtgcgtaactggtctgtatacctcagtgtgtttttttagtggctaataaaggtttttttcacctatatttagttcttccttcaggagctcttgtaaggcatgtcttgtagtaatgaatttcctcagcatttgcctgtttaaaaagaactttatttctcctttacttatgaagcttagtttggccaaatacgagattgttgattggaatttattttcttcaaggaggttaaatattggtattggtctcttctggcttgtaggatttctgctaaaaggcgtacttttacactgataatctttcctttgtggttgacctccctttcctctctagctgcatttgtcattttttcttttatttca

SEQ ID NO: 613379 - DNA, 651 bp, Homo sapiens
tttgttgttttaaagtctgtttgtctaaaattagggttgcaacccattctttcttctgttttccatttgcttggtagattttttatcccgtcattttcagcctatgaaactgattgcatgtgaaatgagtcttgatgacagcatatcattggttctttgttctttatccagtttccyactgtttgccttttaattggaacattcagcccatttacattcatagttagtgttgatatgtgtgcatttgatgctgccattataatggtagctgcttattatgcagacttgtttgtgcgtaactggtctgtatacctcagtgtgtttttttagtggctaataaaggtttttttcacctatatttagttcttccttcaggagctcttgtaaggcatgtcttgtagtaatgaatttcctcagcatttgcctgtttaaaaagaactttatttctcctttacttatgaagcttagtttggccaaatacgagattgttgattggaatttattttcttcaaggaggttaaatattggtattggtctcttctggcttgtaggatttctgctaaaaggcgtacttttacactgataatctttcctttgtggttgacctccctttcctctctagctgcatttgtcattttttcttttatttca

SEQ ID NO: 613380 - DNA, 651 bp, Homo sapiens
tttgttgttttaaagtctgtttgtctaaaattagggttgcaacccattctttcttctgttttccatttgcttggtagattttttatcccgtcattttcagcctatgaaactgattgcatgtgaaatgagtcttgatgacagcatatcattggttctttgttctttatccagtttcccactgtttgccttttaattggaacattcagcccatttacattcatagttagtgttgatatgtgtgcatttgatgctgccattataatggtagmtgcttattatgcagacttgtttgtgcgtaactggtctgtatacctcagtgtgtttttttagtggctaataaaggtttttttcacctatatttagttcttccttcaggagctcttgtaaggcatgtcttgtagtaatgaatttcctcagcatttgcctgtttaaaaagaactttatttctcctttacttatgaagcttagtttggccaaatacgagattgttgattggaatttattttcttcaaggaggttaaatattggtattggtctcttctggcttgtaggatttctgctaaaaggcgtacttttacactgataatctttcctttgtggttgacctccctttcctctctagctgcatttgtcattttttcttttatttca

SEQ ID NO: 613381 - DNA, 515 bp, Homo sapiens
tgatatgtgtgcatttgatgctgccattataatggtagctgcttattatgcagacttgtttgtgcgtaactggtctgtatacctcagtgtgtttttttagtggctaataaaggtttttttcacctatatttagttcttccttcaggagctcttgtaaggcatgtcttgtagtaatgaatttcctcagcatttgcctgtttaaaaagaactttatttctcctttacttatgaagcttagtttggccaaatacgagattgttgattggaatttattttcttcaaggaggttaaatattggtattggtctcttctggcttgtaggatttctgctaaaaggcgtacttttacactgataatctttcctttgtggttgacctccctttcctctctagctgcatttgwcattttttcttttatttcatgcttgaacaatctgataactatgtgttttggtgattattatattatgaagtatcttactggagttttctgcatttcctaaatttgaatgctgg

SEQ ID NO: 613382 - DNA, 634 bp, Homo sapiens
ggaggcaatgggccttggggggaagctgcagtgaggagaggcagcaggcaggctgatgcctggatggggycaccccactggagctgtctactagtcagacatgatctgccagttcaggatctatgatgcaggcccccagggtactcaaggctgcactgcaagcatgcagggccgaattggggtcgcaggagaggccagcacaccaacgcaagctcaggtcaaaacagccccatctgatgcgccaccaccctgcagactttttgtccaaaatttcccctagggctaacgtctcttgtgggagcaagttaagcttattggtgtgggcatccctggacatgcttcactacacatgttcccacaataaaccctcttggctgtgcactggctggtgtgctgcccctgtcacttctctaagcagctcttcctttcaactcattttccatgatggtcagagggtctctgccggtgggattccagaggccagtcaggaaagcaggtagctccttgccacttaaactcacctgtttttctcagagtcactgggggccagaaatcagttccactgtgctttagccctgtgcagggttcccagcttctgaatcttaagttcagatgttgtgtctttcctccttcc

SEQ ID NO: 613383 - DNA, 634 bp, Homo sapiens
ggaggcaatgggccttggggggaagctgcagtgaggagaggcagcaggcaggctgatgcctggatggggccaccccactggagctgtctactagtcagacatgatctgccagttcaggatctatgatgcaggcccccagggtactcaaggctgcactgcaagcatgcagggccgaattggggtcgcaggagaggccagcacaccaacgcaagctcaggtcaaaacagccccatctgatgsgccaccaccctgcagactttttgtccaaaatttcccctagggctaacgtctcttgtgggagcaagttaagcttattggtgtgggcatccctggacatgcttcactacacatgttcccacaataaaccctcttggctgtgcactggctggtgtgctgcccctgtcacttctctaagcagctcttcctttcaactcattttccatgatggtcagagggtctctgccggtgggattccagaggccagtcaggaaagcaggtagctccttgccacttaaactcacctgtttttctcagagtcactgggggccagaaatcagttccactgtgctttagccctgtgcagggttcccagcttctgaatcttaagttcagatgttgtgtctttcctccttcc

SEQ ID NO: 613384 - DNA, 634 bp, Homo sapiens
ggaggcaatgggccttggggggaagctgcagtgaggagaggcagcaggcaggctgatgcctggatggggccaccccactggagctgtctactagtcagacatgatctgccagttcaggatctatgatgcaggcccccagggtactcaaggctgcactgcaagcatgcagggccgaattggggtcgcaggagaggccagcacaccaacgcaagctcaggtcaaaacagccccatctgatgcgccaccaccctgcagactttttgtccaaaatttcccctagggctaacgtctcttrtgggagcaagttaagcttattggtgtgggcatccctggacatgcttcactacacatgttcccacaataaaccctcttggctgtgcactggctggtgtgctgcccctgtcacttctctaagcagctcttcctttcaactcattttccatgatggtcagagggtctctgccggtgggattccagaggccagtcaggaaagcaggtagctccttgccacttaaactcacctgtttttctcagagtcactgggggccagaaatcagttccactgtgctttagccctgtgcagggttcccagcttctgaatcttaagttcagatgttgtgtctttcctccttcc

SEQ ID NO: 613385 - DNA, 544 bp, Homo sapiens
tgcactgcaagcatgcagggccgaattggggtcgcaggagaggccagcacaccaacgcaagctcaggtcaaaacagccccatctgatgcgccaccaccctgcagactttttgtccaaaatttcccctagggctaacgtctcttgtgggagcaagttaagcttattggtgtgggcatccctggacatgcttcactacacatgttcccacaataaaccctcttggctgtgcactggctggtgtgctgcccctgtcacttctctaagcagctcttcctttcaactcattttccatgatggtcagagggtctctgccrgtgggattccagaggccagtcaggaaagcaggtagctccttgccacttaaactcacctgtttttctcagagtcactgggggccagaaatcagttccactgtgctttagccctgtgcagggttcccagcttctgaatcttaagttcagatgttgtgtctttcctccttccactatcagtacctgccctcggttaagagtgtgccagtcatcctggtcccttggtgtcagct

SEQ ID NO: 613386 - DNA, 626 bp, Homo sapiens
gctccttgccacttaaactcacctgtttttctcagagtcactgggggccagaaatcagttccactgtgctttagccctgtgcagggttcccagcttctgaatcttaagttcagatgttgtgtctttcctccttccactatcagtacctgccctcggttaagagtgtgccagtcatcctggtcccttggtgtcagctgttccaccttggtttgtctattcagccatcttgctcaaatacacaaagtcttataaatcaataataaatagacaattgactacttgaaaaatgtgcaaggaatttgaattaaaaatttctacagataagaagcaaaatttgtcattaaatttaaaatatgtgacattattagtttagagaaatgcaaatcaaaagctcaatgacrtacttactagaagacctgtaaaaggcaataaaaaaggttgccaaagatatcaaaaatatgaaagcctcacacattgtatgtgggagtgtaaaaaacaaccgatttaaagaacaatttggcaattattcaaaatgctataaatagtatcaccatatgactgagacattttactctgttacgtactcaaaagaaatgaaaacctatgactacacaaagaatcagatg

SEQ ID NO: 613387 - DNA, 569 bp, Homo sapiens
aacgtgtggtgtgtccatacaataaaatactatgtgccaaacaaagaaaatgaagtaataatacctgctatgtcargaaaaaacctcaaaatcactaaagtaagtaaaataaaccaaatgcaaaagggcagataatttatgatttcacttaaaataacttttaataaaaggcttatatataaaaacaggctgattgcctatgaccagggtaatgaaatcagtaagtacaaaagagattaatttctttttccatagtgataaggttatttcaaaattagattgtggttatgggtgtctgtaaatacactttaaaaacttggaattgtacacttaaaacatgtgatggttttgttataaaattatatccctctaaaatgtttccaaatgaaactgttgacttttggagaactaagtcacagactgtaaaaccaaacccatttattgttcatctcaaggcatgttaaataaagaggaaaagacaaagatatagttataacattaaaatcttcatggcaaatagttataagaaaaaaattacaattgtaaaatgtattaatagacataaatta

SEQ ID NO: 613388 - DNA, 569 bp, Homo sapiens
aacgtgtggtgtgtccatacaataaaatactatgtgccaaacaaagaaaatgaagtaataatacctgctatgtcaagaaaaaacctcaaaatcactaaagtaagtaaaataaaccaaatgcaaaagggcagataatttatgatttcacttaaaataacttttaataaaaggcttatatataaaaacaggctgattgcctatgaccagggtaatgaaatcagtaagtacaaaagagattaatttctttttccatagtgataaggtkatttcaaaattagattgtggttatgggtgtctgtaaatacactttaaaaacttggaattgtacacttaaaacatgtgatggttttgttataaaattatatccctctaaaatgtttccaaatgaaactgttgacttttggagaactaagtcacagactgtaaaaccaaacccatttattgttcatctcaaggcatgttaaataaagaggaaaagacaaagatatagttataacattaaaatcttcatggcaaatagttataagaaaaaaattacaattgtaaaatgtattaatagacataaatta

SEQ ID NO: 613389 - DNA, 569 bp, Homo sapiens
aacgtgtggtgtgtccatacaataaaatactatgtgccaaacaaagaaaatgaagtaataatacctgctatgtcaagaaaaaacctcaaaatcactaaagtaagtaaaataaaccaaatgcaaaagggcagataatttatgatttcacttaaaataacttttaataaaaggcttatatataaaaacaggctgattgcctatgaccagggtaatgaaatcagtaagtacaaaagagattaatttctttttccatagtgataaggttatttcaaaattagattgtggttatgggtgtctgtaaatacactttaaraacttggaattgtacacttaaaacatgtgatggttttgttataaaattatatccctctaaaatgtttccaaatgaaactgttgacttttggagaactaagtcacagactgtaaaaccaaacccatttattgttcatctcaaggcatgttaaataaagaggaaaagacaaagatatagttataacattaaaatcttcatggcaaatagttataagaaaaaaattacaattgtaaaatgtattaatagacataaatta

SEQ ID NO: 613390 - DNA, 569 bp, Homo sapiens
aacgtgtggtgtgtccatacaataaaatactatgtgccaaacaaagaaaatgaagtaataatacctgctatgtcaagaaaaaacctcaaaatcactaaagtaagtaaaataaaccaaatgcaaaagggcagataatttatgatttcacttaaaataacttttaataaaaggcttatatataaaaacaggctgattgcctatgaccagggtaatgaaatcagtaagtacaaaagagattaatttctttttccatagtgataaggttatttcaaaattagattgtggttatgggtgtctgtaaatacactttaaaaacttggaattgtacacttaaaacatgtgatggttttgttataarattatatccctctaaaatgtttccaaatgaaactgttgacttttggagaactaagtcacagactgtaaaaccaaacccatttattgttcatctcaaggcatgttaaataaagaggaaaagacaaagatatagttataacattaaaatcttcatggcaaatagttataagaaaaaaattacaattgtaaaatgtattaatagacataaatta

SEQ ID NO: 613391 - DNA, 516 bp, Homo sapiens
gacttgttttattgtaaaacaaggctaatatacagtatgtgaaagtttccataaaattcttaaattatatatttaaaagatattatgaaaataaaaaatcttagcaaacatagggagaattataaactaacatttatcatacatacccaccacaaggcttcagcaattctcatattttttatctttcatttttaattatcaacttcaattattctggtaatattttcaagtaagcatattatgttgtcagtttgtagaaatttgagtacctatatctaagaaataaagagaaaaataaaaatagtactataaaatctaagtaaatacaagtattctctaatattgtactaaagagtttcttgatkttttacgtgcaaaacagtagaacttagcaacctccaagactttatgagaaataacaatttaagactaatatttatcctggagactcaaagtgactataaataaatatatctttagttaataaagcttaaaaataaagtattagtaaaaaca

SEQ ID NO: 613392 - DNA, 516 bp, Homo sapiens
gacttgttttattgtaaaacaaggctaatatacagtatgtgaaagtttccataaaattcttaaattatatatttaaaagatattatgaaaataaaaaatcttagcaaacatagggagaattataaactaacatttatcatacatacccaccacaaggcttcagcaattctcatattttttatctttcatttttaattatcaacttcaattattctggtaatattttcaagtaagcatattatgttgtcagtttgtagaaatttgagtacctatatctaagaaataaagagaaaaataaaaatagtactataaaatctaagtaaatacaagtattctctaatattgtactaaagagtttcttgattttttacgtgcaaaacagtagaacttagcaacctmcaagactttatgagaaataacaatttaagactaatatttatcctggagactcaaagtgactataaataaatatatctttagttaataaagcttaaaaataaagtattagtaaaaaca

SEQ ID NO: 613393 - DNA, 516 bp, Homo sapiens
gacttgttttattgtaaaacaaggctaatatacagtatgtgaaagtttccataaaattcttaaattatatatttaaaagatattatgaaaataaaaaatcttagcaaacatagggagaattataaactaacatttatcatacatacccaccacaaggcttcagcaattctcatattttttatctttcatttttaattatcaacttcaattattctggtaatattttcaagtaagcatattatgttgtcagtttgtagaaatttgagtacctatatctaagaaataaagagaaaaataaaaatagtactataaaatctaagtaaatacaagtattctctaatattgtactaaagagtttcttgattttttacgtgcaaaacagtagaacttagcaacctccaagactttatgagaaataacaatttaagactratatttatcctggagactcaaagtgactataaataaatatatctttagttaataaagcttaaaaataaagtattagtaaaaaca

SEQ ID NO: 613394 - DNA, 467 bp, Homo sapiens
attggttatgatttgaaggactgcctgcaacttcatgatgcggctgaggatatagattatggtgcagtaccctcatgacctgtcttgcacctaggtagctggcccatagcatgtcatgattctttcaggaggtcatttattatctttttagtctcctgtgtccacatcttttttgatatttttgttacttttgtgattatgctttttctagttcttcttttatttttattataaactggatattctaagaatttcccttgctttagaggaattagaaagaaggatggcttgattgcttttaacagacacgcccctgcccattttgctggcagttgccaatatgyccatgctccacagatccaatataggccagagggtgcctttcaagcatttgaatcatctacctgatgccaagtgcagcttagagtaaggaatccagagaaagtgtttggatctggtaagtagga

SEQ ID NO: 613395 - DNA, 557 bp, Homo sapiens
tgtgaccagcttagaaagctgcactttttccacagcaggcaaamcggagcctggataccccagggtcacagctcatgagaacatagggctggactgtgagaaaacaagaagcaattagtgcagaggagttgacaagacaccaactgggctgagaaaaaagagctgatagattaatttccaaattatactacaaaacatacaataagcagaccccatagctttatacattaaaaccaaatgatgacaaagagtgaggattgcattaaattaaattaggagcaactaaagactggtttatgatcttgaaactttagtcactctccatagttccatcccatgacccggtaattatttcctgctttctgcatgccttggacactggtccatttctggccccaaagtgttcctttttctaataagagtacttacttcatctcttaatacaattcctttccttgcatactgtgccccaaagaagaaatattaaaaactttcctgatgtttttctgctgcggggttaatgggctcagagtgatgataagaacggccaatgagtg

SEQ ID NO: 613396 - DNA, 557 bp, Homo sapiens
tgtgaccagcttagaaagctgcactttttccacagcaggcaaaacggagcctggataccccagggtcacagctcatgagaacatagggctggactgtgagaaaacaagaagcaattagtgcagaggagttgacaagacaccaactgggctgagaaaaaagagctgatagattaatttccaaattatactacaaaacatacaataagcagaccccatagctttatacattaaaaccaaatgatgacaaagagtgaggattgcattaaattaaattaggagcaactaaagactggtttatgatcttgaamctttagtcactctccatagttccatcccatgacccggtaattatttcctgctttctgcatgccttggacactggtccatttctggccccaaagtgttcctttttctaataagagtacttacttcatctcttaatacaattcctttccttgcatactgtgccccaaagaagaaatattaaaaactttcctgatgtttttctgctgcggggttaatgggctcagagtgatgataagaacggccaatgagtg

SEQ ID NO: 613397 - DNA, 590 bp, Homo sapiens
agccaaaatatgagtacagcgtccatcacatcctactcctatggctggtgaacttgtagctatgggagaagaaactgaaggcatagtacagtttcctaaagatgaaaaacaatattatgttcccctctgttttggttattacagagaataacctgtttactaatggtcagtacctgtgtctctgtgtctgatgccaagaataaattcatcatctgcatagccaccactgcaacagaagccaactgcagtcaatgttggctatgcgtggaattgccagaggccaccaaaaatgggctacgttggagaatcgtccctgtaccttactgcataccgaatgttgtgtgtatatccctgacaattctcacactacgactctccttgcacagccatggtgggtgtggttttcattaactgtgcttttaattctcctgtgcttaccctgartctgtaatctgtatcaactatgctttccccaagtatctgtaagggtattttcctacaattgagtatcaaattgaagccaaatttggaagaaaagttaaatattcaattttatctcaattgaacatggacacaaacaatggtcacca

SEQ ID NO: 613398 - DNA, 638 bp, Homo sapiens
aaaactttagtgcactcttggtgggaatgtaaattagtataaccactataaaaaagtgtggaggttcctcaaaaagctaaaaattgagctgccacagctacaatgcaacccaacaatcccagtgatgggcattgacacaaaagaaagaaaatcggcttgttgctgcactgtttacaatagctaagatttgaaagcaaacwgtctacaaatgaatgaatgtataaaaaaagtagtacatatatacattggagtagtattcagccataaaaatgagattttgtcttttacgacaacatggataaaagagaagagtatgttaagtgaaataagccaggcacagaaagataaacactgtgcgttctcacttattcgtgggatggaagaattaatacaactgaattcacggacatagagagcagaaggatggttttcagaggctaagaaagacagtggaggctgggggaaaggtggggactgttaatgtgtacaaaaaaatagaataaataagacatattatttgatagcacaacgagatgactctggtcaataataatgtaattgtacattttaaactagctaagaaggaataatcagattttaacccaaagaataaatgcttgagtgggtgggtatcccat

SEQ ID NO: 613399 - DNA, 479 bp, Homo sapiens
attattttcacagtaatataaattatggacatcaaaatatcctcagggttaaaaatgttggagtccaagcattctatattcttgatttgtatggtttcaattatgactcagcattttaggaaaacattggctctataatctgtcaccctcaccccatttaaataaaaacatacttttttggacacaaggatcaggcatacacatctacacagtggatcacatcatttttgggggcaaastgaaaactgtttttatactcaaacatactgttgggaaactgtgaaataaaaatttctgatgtttgttaaaaattgggaagaaagacattaatactattgtagtagattttatggccatcgtaatagggttcagttcagaaattgatcataactctgaacacagacaacgaagaatttatagtcaataagcagaataaatcagtggataagaattattgaaaaacatttgataaaatacca

SEQ ID NO: 613400 - DNA, 402 bp, Homo sapiens
atggtgatgcaagcacacctgtaatcccagctacttgaaaggctgaggcaggagaatcacttgaacccaagggtcagaggttgcagtgarccaaaatcacaccactgcactcagcctggtgacagagtgagactccatcaaacaaaacaaaacaaaacaaaacaaaacacaaaattagaaatttagttttattcaaacagcaacttacaaacacaaaggttatagtttctgacccctattcaagacaattggttgtaaccataagtattgatgggacttcagggagattcctcagatggagctgatgcagctgtgcaagccactttgaccttgcatctttcctacttcttagcctttgaaatggacatggttgctggtgcaggcttgtgctcctacagccag

SEQ ID NO: 613401 - DNA, 585 bp, Homo sapiens
agacctaccaactggggtttccagtcacctcctacaggtgtgttcgagccctcaacatgtctgcacccgccctgggatggagctcccagggaagggagtgggctgctatctttcttgtttcacagccttcactggtgatacccccagatactggaaaatccgaggtgacaagagagtggagcagatgcccaacaaactacagcagccccacacaaaatggccaaacagttaaaaggaagagaaacaaacaaaaatctcattcaaaggccagcaacctcaaakattaaagatagataggcacacaaaggtgagaatcacaacaagaatactaaaaactcaaaaatcagggtgctctccctctcccaaatgaccacactacttctccagcaagagttcagaataagggtgaggctgtgatccctgaaataacagaagtagaccccagaatgtggataaaaatgaacttcactgatctaaaggagcatgctctaactcaatacaagaaagctaaaaattacaatataatattgcaggagctgacaaacaaattagccaggatagagaggagactaaccaacccgatag

SEQ ID NO: 613402 - DNA, 458 bp, Homo sapiens
aggcacacaaaggtgagaatcacaacaagaatactaaaaactcaaaaatcagggtgctctccctctcccaaatgaccacactacttctccagcaagagttcagaataagggtgaggctgtgatccctgaaataacagaagtagaccccagaatgtggataaaaatgaacttcactgatctaaaggagcatgctctaactcaatacaagaaagctaaaaattacaatataatattgcaggagctgacaaacaaattagccaggatagagaggagmctaaccaacccgatagcactgtaaaacacaatacaaaaatttcataatgcaatcacaagtattaatgaggaaagaaactcagagcttgaagtttgtatttctgaaagaagacatgcagagaagaatagaaaaaaagaatgaaaggaataaacaaaacctttgagaaatatgggattatgtaaag

SEQ ID NO: 613403 - DNA, 515 bp, Homo sapiens
ttacaatataatattgcaggagctgacaaacaaattagccaggatagagaggagactaaccaacccgatagcactgtaaaacacaatacaaaaatttcataatgcaatcacaagtattaatgaggaaagaaactcagagcttgaagtttgtatttctgaaagaagacatgcagagaagaatagaaaaaaagaatgaaaggaataaacaaaacctttgagaaatatgggattatgtaaagagaccaaatctacaactgattggtgtacttgaaagagctggggagaatggaaccaatcaggaaaacatatttcaggatatcatcaatgagaacttccccaaccttgctacactggccaacaattcagaaaatggagagaagttcagtaagatactccaagaaaaaatcatacccaagacacgtraacgtcagattccccaaacttgaaatggaagaaaaaaaaagaaaaaaaagctcagccgcagagaaaagccaagtcacctacaaaaagaagtt

SEQ ID NO: 613404 - DNA, 644 bp, Homo sapiens
acaaacagcctgctttttttcaggactaagccatctttcctcttggcttatataaaagcttaaatattgacacttttagaggagatttgagcttttttctgacactttttattctgccttctacagcaggtgcagtggttcttgggtttcttctgcgtgtagtagcccttggctggtgtgtgtgtgtgattttttggttctgtttttttgggtttttttggtttgttttttgtttcttttactattgccctgatcattttcattatttctttgacatttatgcttccagtgtctttccttttgcaccatgcacattaatctctctctagcctcggctggccttcacactcctgtccagactagcctttttcatgactacgttcacgcccgcgtccatgcctccttgtaaagccagctcctcttcccggaagggctgctgctagtaagttagcctttcttaagcctgtgatcagccttttcctttgcctcctcatctcggttaattaacaccttggttgtcactttaataagctgagtagcattcacgcctacggagcttgtaacttctgcaatttatgcctgatatctcctkgggtctgccttacaagtgctggattcaccctgcactgatttttgagtagcct

SEQ ID NO: 613405 - DNA, 319 bp, Homo sapiens
gaggagcggtctctattcttttctgtggttgtgacaaaaccggtttttctgccttttctgagattttttcatttgtcttcagytgctggggcagctgattttactttcacttttggctgggaggtgctacaagcctctgtgtctccttttaactctgtagctgccagagcagctgattttctcttgccgtgagctgcgagcattctacagtaaactgctaggcagggctgcattcatttagccatgagtcaatataaagactaggtctgaatgtcctggctgttctctgaccctagtcaccaccttaaaacacacggcc

SEQ ID NO: 613406 - DNA, 532 bp, Homo sapiens
gaggtgctacaagcctctgtgtctccttttaactctgtagctgccagagcagctgattttctcttgccgtgagctgcgagcattctacagtaaactgctaggcagggctgcattcatttagccatgagtcaatataaagactaggtctgaatgtcctggctgttctctgaccctagtcaccaccttaaaacacacggccaatttttctatagtgcctttggcaagccatctgacactaaaacagggctattctaattcacagtatgtccttaacttttgaacactcagtttcatcctataatcacctctaactctttttttaaaattctttattatgcttttcaaaggagccacttttgatgttttcactctcatttcctctcttgcagttcactttcactctgactttcactcttgagtccaccagacctggtcctattgcgggagtttcagatgctgcttagccaggaccatgccttcccctgtcgcagactgctgcagctgtaaarctggtactatcagccatatgaag

SEQ ID NO: 613407 - DNA, 606 bp, Homo sapiens
ctattttaaaatatattaaaaattagtgctaactgtagttatcctactgtgctgtcagacactagaaattattcctcctatgataaaaagtttaggctgtatcccatgggtagtaggacaccacatgactgagtggtcatctgggaaattatctggatgactttggaacattcctggttgagccasgtggctgttgcaacaaactgtggggaagcccctcccctaatgccccctaagccagctgtcactacatggcaggaaacctccaaacctgagggccccaggaaacaatgacagtccccactcacatgcaacttgtgctgtgctcagtgccctccacattgagcctgatctagctttacccgagggctgtgaggtgggacaatcagtatccctttattttaaaaggctcagtgaagttttgggcttaatgtgagtgaagtgatcctaaaagctgactctgggatcccggctccaccactgaccagtcctgcaggtggcgagagttgcctctcctcccctcgatttcattttgtcctctgtgaagtgcagccgtgctgatgactcacatatcagggatacatgggaactgtcaatgaacggagt

SEQ ID NO: 613408 - DNA, 586 bp, Homo sapiens
agagtcctatgtcagtgacagggcaaactgagaccagctcaaacacagcctcttcctcagcagcagggcccaactaaggcacttggtgttttggttcatttcctgcagcttcaatgtaaagaatattgtgagacatttgctggaacaactgaaaatcagaagaagaagagacagctcttctccatctccctgagagctcttccccagaatgtgtttatccagagaggaggggaaatatttatttttcgtaaatagtaaatgctagagtcraatattatatgaaaatctcattctactacaaaatcggagttgtggttgtggttctttttatttcacttgtgtaagcttaaatgagatacagactctaacatttctccttgaattatgaaatcctaaagagtcagcagcataatgtatgaggaagaagagaaaagcagtcatagtttctggctgccggataagacacccaggtccatttttctcagagcatatgttcattttaatattaacccaaggaaagagtgaagatagatcattcgaacttgcagaattaataatttgaaggtattttcacaaagcatagcga

SEQ ID NO: 613409 - DNA, 441 bp, Homo sapiens
aacactgtttagtttctaaaatttcaaagaacacgtcaattaccacatgccaaaatatataatctgagtatatataatgacattttagaagatttattaatgatgaataggaagaatggctctatatcttcagatgtttgcttaaaaattatagaagtccaaaaaaaaaaaacttcctaagtaaattgaggataagaccattattggttatttgtccaagacgctcagttgccataattatagaagtaagcgtggtcaaacgtggaccaagtgcttctgttgcaatgcctgtgactggcatctgcctctgcgtctgggatggggtggggttgggggaaagttgcgggggttggtaggtgggctgggtgttagtcaggcacagctttctccagagataactgctcaccgaakccctcttcaaaatcgtctctttccacactg

SEQ ID NO: 613410 - DNA, 470 bp, Homo sapiens
aaattataaatcaaaatcaaagcagaaacrctcttatggtaaaaaaaaaagtattattagaattttccaaaagtaatacgttttaagaaattaagcttacatacttattaatgtgttccctccttgatgtcttactgatgtgtgatcattaaatcacatatcagtaagattaaatctcatataaaatctcgccttgaattgccataatccctatgtttcaaggaaggaccaggtggagatcattgaatcatgggggcagtttctgccatgttgttctcatgatggtgagtgagttcccacgagatctgatggttttataagtagtttccttcttcactcagcacttatttctctctccaaaagtttagggaaaaataaaggctgaagatcaagatagtagctgatatctaattatagatttataaaaattattcatctaactatttacatatatgtttgggggagaattc

SEQ ID NO: 613411 - DNA, 581 bp, Homo sapiens
cctgttgggtgggagtgttcccagagcatttgaattagacatttggtctcctttgcccagtgtatctccttttgatctttttatttcttgaaaaatactatccctttgaaatagtgtaattgtagaatgttcatctagggttctagctagtataaattaaatagttgtaaattaagctttggttgtgaaggatatttagtatattatagtatttgcaccctgtccaatgcatcacagaaattcacaggcagctttaaatagcaatgcagtgtacacttgatagtatttgtttttgtgatctgttaacttaaaatcctaaaattaattttttttttagttcggccttcttcctcttctgctctgagtatcgcccaaaaatcaaaggagaacatcctggcctgtccattggtgatgttgcgaagaaactgggagagatgtggaataacactgctgcagatgacaagcagccttatgaaaagaaggctgcgaagctgaaggaaaaataygaaaaggtaagaagtgtgggtttgcttggtaaaatgatgacaagtacgccagatgtatgattgtacttagtttga

SEQ ID NO: 613412 - DNA, 570 bp, Homo sapiens
cccgggcgagcgtgccgggggcccgagtctggggccgaggttcggccgccgctcgcggctgccagccgagtggtggcctcttctggcagcccggggatgctgcgcagggcgctgcgcgccctgctcctccgccgggtcgtttctgcccgacttgcagtttcagggcatgccaggactgcagcaccctctccgtcctcccccggaaacgactttcaattcacctggaggctctcgaggctcccccgcgggcgggtagcgtgacagtgggtgcagaggagagggaggagcgcgggaacggcggcggccccagtgcgcctcccgcttgcttggcgagaagcgcgcagccctctccagccgctctcttctggactgcagtcctgacgtcacccccaccaccccccaccccgcggaggagcggcgcggagggtggggtgcagggagtgaggacgcgcgagtgtgagctggagtgtaagcgcgtgcstgtgcacgcgcgcgtgtgccctgcagggctggggacggatgggaaccgcgtctggatcctgtgaggagccagagctcgctccctgcaaa

SEQ ID NO: 613413 - DNA, 586 bp, Homo sapiens
ctttcgcattggtctattaccatgtacatgttttaaattttgggggtttggacctcagaagcactgttcaaagtacattacaaatatttcccattgcttaggaagcagcacatcatttaagttgggtatatgtgttggtggtgagttcagaaacactgttagctcaacgtgccctggactgtgccctaatcagtgtgaggagagtcagagtccagcaactgcaattatagcccaacaggccacaggccaatgtttatgactatgctctcaaacacaagccgcttatggccaggtggttcaattgtcaagcacaataaagggaccaggtagaaaattagccacacacacacacacacacacacacacacacacacacacacacacacacacacgtacatcaatccatagctatggagccagaacatcatgtttacaaggaaggaatagctctgttgggtgtcaaagagtagggtcttggagtgggaaggtaactastttaatactgcagtggcttttcatcacatactccatagccattaaagcttctaagccaaaccctctagcaaatacatgttggcaaaactat

SEQ ID NO: 613414 - DNA, 597 bp, Homo sapiens
atgctctcaaacacaagccgcttatggccaggtggttcaattgtcaagcacaataaagggaccaggtagaaaattagccacacacacacacacacacacacacacacacacacacacacacacacacacacgtacatcaatccatagctatggagccagaacatcatgtttacaaggaaggaatagctctgttgggtgtcaaagagtagggtcttggagtgggaaggtaactactttaatactgcagtggcttttcatcacatactccatagccattaaagcttctaagccaaaccctctagcaaatacatgttggcaaaactatggagaatcataattctgtccttctagaagctatctccacagcaaaacaagctccccctatcctggaggcagcttctcattttctgtaacacaaaagcaaattttaaaaagacaagaataagaataaaaattaattatttctcataggacttaccttcctataggcccctgaaaaccagttagcaccratcttgtacatatttatagcatacctatatatacgtatttgtatatgtagctatacatatatgcatatatatgtatatagacaga

SEQ ID NO: 613415 - DNA, 616 bp, Homo sapiens
ctaatcagatagagttaaccctgaagacaaaaatcgaagtggccaattcctttttaaggagtcctaaactgataagaaggcctaaactgataaactcaataaattcaaatttcaaaaatatcataaccaaaacaagtagttgacattatacatttataaatagtactcccaaggtagtgccaagttaaatttcatactaaaatgttaatgaagaagcatttagataaccaactattttgtggataatgacagattagcaawaattttgtgatgaaagttggactcggctattatatttagaaataaggacattttacttacacatatgtttatatgtggtaactgtacttcatcatagattttcgtatggaacttacaatagaccattccctgaatcttttgtgatatatggaacactcttcctaagtggactgcactgacatcaaagaacatctttgtgacattatcaaacctaatgatcaatagtaaaaggacaattcattgttgtttccagttcaagttttaagaagggcttccttaaagggtagatcgttacgtgtttttataaagggtacctctatatgtagatttgcttatctgtgaaagcactgccgct

SEQ ID NO: 613416 - DNA, 583 bp, Homo sapiens
aaaactgcattgcactggctgtgctccaggtctgggaaggaagggcagcttcccccatgaggcctgccagcaaagcctttgtaaatgtctatagtcagacatgaaagatcatacagatgaggccaggcgcggtggctcacacctgtaatcccagcactttgggaggccgaggcgggcagatcacraggtcaggagatcgagaccatcctcactaacacagtgaaaccccgtctctactaaaaacaaaaaaaaaaatagctgggcgtggtggtgggcgcctgtagtcccagctactcaggaagctgaggcaggagaatggcatgaacccaggaggcagagcctgcagtgagcagagatggagccactgcactccagcctgggcaacagagcaagactccatctcaaaaaaaaagagagcatacagatgattttggcctggagctggactcctcaaggggaggcaaaaagtactgctatgatctgaatgtttgtgtccctccaaaattcatgttgaaacttaatcccccatgcaatagtgttaagaagtagggcttttaagaggtgattaggtcatggaggctct

SEQ ID NO: 613417 - DNA, 583 bp, Homo sapiens
aaaactgcattgcactggctgtgctccaggtctgggaaggaagggcagcttcccccatgaggcctgccagcaaagcctttgtaaatgtctatagtcagacatgaaagatcatacagatgaggccaggcgcggtggctcacacctgtaatcccagcactttgggaggccgaggcgggcagatcacaaggtcaggagatcgagaccatcctcactaacacagtgaaaccccgtctctactaaaaacaaaaaaaaaaatagctgggcgtggtggtgggcgcctgtagtcccagctactcaggaagctgaggcaggagaatggcatgaacccrggaggcagagcctgcagtgagcagagatggagccactgcactccagcctgggcaacagagcaagactccatctcaaaaaaaaagagagcatacagatgattttggcctggagctggactcctcaaggggaggcaaaaagtactgctatgatctgaatgtttgtgtccctccaaaattcatgttgaaacttaatcccccatgcaatagtgttaagaagtagggcttttaagaggtgattaggtcatggaggctct

SEQ ID NO: 613418 - DNA, 596 bp, Homo sapiens
gtaagttttctgaacatgcttaaggtaggctgggctaagctatgattttctgtaggttaggtatattaaatgcattttcaacttaggagattttcaacttatgatggattttcccaaatgtaactgcatcataagtcaaggagcatctgtacatatgtgtatgtgtatgtttgtgtgtgtgtgtgtgtgtgtgtgcctattaaatctctgttcttgttcttgtggtggcctagagaagcagattttatattttaaactatacccacataaarctatattaaaaagtattcttttagaaattcaagacacctataaagaaacgtactttttcttcaaagcttgctggcttatctgctccacacgactgccagtaatgccttaaattataaccacaatgttaacaatgagtctgatgtctaaaattttttcctgggacttctgaaatctttaaaaaggaaaaaaaataactaactcaggaaaccaggtaagggaaaatccctgagaaccaagcactaactcttcttgaaagacttccaacaaggtggttcctgtctgcccatgtgataatcacaggtagtctgtctttctccattttc

SEQ ID NO: 613419 - DNA, 560 bp, Homo sapiens
ttttcctgtatgccatttatctaattgagaaaaaaattaatcaggaatgaatattgaatttggtcaaatactttttgggggtatattgagagttatacgatttttttaatttgttaatataaattgtgttgataaatttctaaatggtaaacagaccctgcttaggataaacatgacttggtcatgtttctaaaatacacattgttgaatttgacttgccaaagtttggttaagaattttgcatttatgttcatgagagatattgctctgtagttttctatttttgtcatatatttgttgtgtctgggcataagagtaatgctgtctacatagratgacctgggaagaatgccccatgcttctgctttctggaagagtttgtgcagaattggtattacttcttccttaaacgtttggtaaaatttaccaatgaaatcaagaaggcctggagtttttactatgtattcaattactttgataaatacggggctattcaggttatttatttcttcttagagagctttagtggtttgtgtcttccaagggatttattcatttcc

SEQ ID NO: 613420 - DNA, 551 bp, Homo sapiens
ctaaaccatgagggtctattgtctttcttttcttttcctcatgattttttaacatttttggtttctttcttggttattatgctatgcaaatctgctgtgctcttgagtctacagtttcctggaaaattatctctttgctatatattctaacttctttttgtttttcttaaaagcagatgaaatgcagtattctagcttctttwgctcccttgctgtcttatcaaagtttcctttgatactttctagtgatttgaaagttacatgtccaatttctattttcctggttatctttacattaacaatatgtttgaactcacatttctctgccattctaaagaacaaaataatatctacttactcacctcatgctgtctcccactccttcccaaagaagctaaaaagtttgggaggccaaagaagaggatcatgaagggaggagttcgagaccagcctgaccaacatggtgaaaccctgtttctactaaaaatacaaaaattagccaggtgtggggctgtgcacctgtaatcccagctattcaggaggctgaggca

SEQ ID NO: 613421 - DNA, 552 bp, Homo sapiens
ttcttttggagatttttctccttgcacttgaaaaacactttttggaaattcygtaagtgagaaaacattggtggtaaatcctttcagttttatcatacagaaaatatcttcttcatgtttgtaaaagatagttttcctatggatgcaattcttgggttcttttgtggttttttttgtttgtttgttttcttttgttgtgttgtgtttttgagacagagcctcattctgtcacccaggctggagtgcagtggcacgatcgcagctcgggttcaagcaattttcctgcctcagcctcctgagtagctggaatttcaagggggcaccaccacgcccagctaatttttgtatttttagtagagataggggtctcaccatgttggccaggctagtctcaaactcctggcttcaagtgatctgcccacttcggcctcccaaattgttggagttataggcgtgagccaacaaactggcattattcttgttttatatttccatctatacttcgaagattttaatattctaccatctttaggctccatcactgctgttgac

SEQ ID NO: 613422 - DNA, 552 bp, Homo sapiens
ttcttttggagatttttctccttgcacttgaaaaacactttttggaaattctgtaagtgagaaaacattggtggtaaatcctttcagttttatcatacagaaaatatcttcttcatgtttgtaaargatagttttcctatggatgcaattcttgggttcttttgtggttttttttgtttgtttgttttcttttgttgtgttgtgtttttgagacagagcctcattctgtcacccaggctggagtgcagtggcacgatcgcagctcgggttcaagcaattttcctgcctcagcctcctgagtagctggaatttcaagggggcaccaccacgcccagctaatttttgtatttttagtagagataggggtctcaccatgttggccaggctagtctcaaactcctggcttcaagtgatctgcccacttcggcctcccaaattgttggagttataggcgtgagccaacaaactggcattattcttgttttatatttccatctatacttcgaagattttaatattctaccatctttaggctccatcactgctgttgac

SEQ ID NO: 613423 - DNA, 552 bp, Homo sapiens
ttcttttggagatttttctccttgcacttgaaaaacactttttggaaattctgtaagtgagaaaacattggtggtaaatcctttcagttttatcatacagaaaatatcttcttcatgtttgtaaaagatagttttcctatggatgcaattcttgggttcttttgtggttttttttgtttgtttgttttcttttgttgtgttgtgtttttgagacagagcctcattctgtcacccaggctggagtgcagtggcacgatcgcagctcgggttcaagcaattttcctgcctcagcctcctgagtagctggaatttcaagggggcaccrccacgcccagctaatttttgtatttttagtagagataggggtctcaccatgttggccaggctagtctcaaactcctggcttcaagtgatctgcccacttcggcctcccaaattgttggagttataggcgtgagccaacaaactggcattattcttgttttatatttccatctatacttcgaagattttaatattctaccatctttaggctccatcactgctgttgac

SEQ ID NO: 613424 - DNA, 580 bp, Homo sapiens
tgcaattcttgggttcttttgtggttttttttgtttgtttgttttcttttgttgtgttgtgtttttgagacagagcctcattctgtcacccaggctggagtgcagtggcacgatcgcagctcgggttcaagcaattttcctgcctcagcctcctgagtagctggaatttcaagggggcaccaccacgcccagctaatttttgtatttttagtagagataggggtctcaccatgttggccaggctagtctcaaactcctggcttcaagtgatctgcccacttcggcctcccaaattgttggagttataggcgtgagccaacaaactggcattattcttgttttatatttccatctatacttcgaagattttaatattctaccatctttaggctccatcactgctgttgacaacwcagctttcaatctaatcatgatttcttcttgggtaaattgcctttttttcccatctttggctgctcttaactacttctttgtgttttctgtgttccatagtttcactgagacaattctaattatggattttttgtatttacctagagagacatttgttggtcttttg

SEQ ID NO: 613425 - DNA, 580 bp, Homo sapiens
tgcaattcttgggttcttttgtggttttttttgtttgtttgttttcttttgttgtgttgtgtttttgagacagagcctcattctgtcacccaggctggagtgcagtggcacgatcgcagctcgggttcaagcaattttcctgcctcagcctcctgagtagctggaatttcaagggggcaccaccacgcccagctaatttttgtatttttagtagagataggggtctcaccatgttggccaggctagtctcaaactcctggcttcaagtgatctgcccacttcggcctcccaaattgttggagttataggcgtgagccaacaaactggcattattcttgttttatatttccatctatacttcgaagattttaatattctaccatctttaggctccatcactgctgttgacaacacagctttcaatctaatcatgatttcttcttgggtaaattgccttttttycccatctttggctgctcttaactacttctttgtgttttctgtgttccatagtttcactgagacaattctaattatggattttttgtatttacctagagagacatttgttggtcttttg

SEQ ID NO: 613426 - DNA, 536 bp, Homo sapiens
cttcatactgttgaaaacacactaatcccttctgcaaaatatggctttcatgatttcaatattatggattttaatctttcaggagtgtgattttagacattaaagattttagttgttaggggtatttagactttagggatttgatctttagggattttgctcttttgggatttcaacattcaggattatggcatttgggattgtgtcttttggaatttgatgtttcaggatcatgatcagcactggtctatgcaagaaacaaggccaggctgagctgttcaggggacaagacgctggcaggtctgagactggtctaggctaaacacaaggatgrggactactactgaatggggcatatctgaggcccagtcatgggtaaagacccatggcaacctccctgggcaagatgcaatgagagttgtgacttccccagagtcagaaggccaggtctgaagcaagctccaggagaggcttaagtcagttgaaagcttgaagcaattggtgattcagctaggcagttcaggcttccccagtca

SEQ ID NO: 613427 - DNA, 569 bp, Homo sapiens
caaatgactaattctttctttattctcaaacagcttgcaatctaaatgttgtcatatgcctgggaaaatagtctatgcagggatgataattacaatggaattatagtcacatggcaaagcacatgaactagtagtaattgcaaacacattccttcatggagatgatgttgagctgagtcatgatgtagaaattagtgaagttgaatgggaaaaaaaaagaataaaaattttctaagcatagggagctctctgagcaagaaggagtcaagagaaggcattttgcatcgtggaagttacaaagaaaggcatagtttgatagggtgacttgatgagtatgagagaaaagggaagatttgaggatagaaaactgagaaagggcaagctcttgaaagaccttatatgctgcacaaataagtttagaatatatctcataggcaatgggaatcaataaaataagaacgtgctataatttgatttgtgtttctgaaagactcttttggttgtaccataaaggattagaagagaacaatactagaagcaagaasaattgttagcctgctgatgcaaaa

SEQ ID NO: 613428 - DNA, 566 bp, Homo sapiens
agcatttgtataaagaaagataattatggatatctgtaaaaatacatgcattaaaattcacaggaaaaggactgaaaagaagaaggtgaatggaaagggaatgaatgagaaactttattttttgttttgaattttaatattttgcttggttcttcataatgacatcatatttatgtggtaccttcatataaaagctgttgaaaaagaaagcaaaaatactattttacatggaaacttttctcagctgcaaaattttggtttatcctaattagttttgaagcttctcacaaagagttggtattcttacaaaagaataattttgagagagatatatatttaaaattagattatgttttaggttttctaatgcaatgttcctaatcctcacattgatttagttttgtgtttttgcatgtgagagaaaytagtggaattacaaccagtactttcgaatgttgcacagtgtggtactatgtaaatatcatgtgtttgtaatcatcaggagaggttatgaataaacaacaattcaaaaatgttagcatcctaaaataacaaagaatttttat

SEQ ID NO: 613429 - DNA, 525 bp, Homo sapiens
gaacctatcccacatgcaggatgtttcagattcagccacatatttgggtttatcgtttatactcagtttaaacacagaatttggacttcccttgattggctctattctttaaggtatttcttcttttattctctagcggctttgggaagccagaattatatgttctggttctgcaaaccagtaggactcttgatttcttcctaagttttagctgttcgtggtgtcaacaggcacttctcaggtataaagacataaaaacaaacgaacaaacaaacaggaaaagtgccaagtgtttttacctatgttggttttcagtggtttcaagtggtttttgttttcttgtgctttctctttaaaatttttcccagtttacagttatccaaaggagggctggtttgaaaagggcagttcctccataatcaaaagccaatstgacacattttgaatgttcaatataaagtccaggctccacatctgaagttttatactttcctgttgttgttcaattttgctgatttaaatgca

SEQ ID NO: 613430 - DNA, 516 bp, Homo sapiens
gacacattttgaatgttcaatrtaaagtccaggctccacatctgaagttttatactttcctgttgttgttcaattttgctgatttaaatgcatatttaactcgcttaaatgtacctactcatagctaatggaattgcatgttttaatgatcataagttgtagggtgtattttatttgtgctcatttacataatttgctgattaaactataaatttaatctattaacctttacatatatcttacttatacaagcatataatcaatgcatattctttgctgaatgaagtttataacttataaacttctttattgttgatcaagctctgaaatactgaaaacaagagctcagcttctatgcataaactgagcgtaaactataaactcaaatatctggctgaatgcttccagtgtttttctgctaggcaggctctgttattagcttctttgaaaaatacatactttttactaaacttggctaatttttctgtttttcccctactttctactgcattaatt

SEQ ID NO: 613431 - DNA, 676 bp, Homo sapiens
aaattgagcaaaacctgattgtgaaactgaacatttttattcaagagactcacagacttaagaaacaaaaattscaacaaaaaatccaccaaagagatgtttgtgctaacatccaagtagtttagttgaaatttcttcagaattatacttaaaattgggagccaaaccaagattgacacttagcctcaggtcaactaagtttcttactggatttaggtgatttttcccctaatttggctctctggcgtagagtagggtaaattctcattaagggcagatgacactatccaaaagctcaatagttttttacatctaatggttgacatctaatcagaaatctaacagcccttccaagagagaataccacaaaaggaaaaaaggagggaatagaaacagtcagaaatgacacctatagtggagttttcatatatataatttaaaatagtgtgattaatacattccagatggagatgacaagatagagaatctcatcagagagctgaaatctataactaagaatcaaatggccaatctatatttgaaatcaagaacagtgtaattggaaacagcatgaaaagagaattagtgaatgagaagacaggtgcatagaaaattacaatccgaaagacagaatttgagaaattgaaatacagaaaagggtgtaagagatgtgtgg

SEQ ID NO: 613432 - DNA, 676 bp, Homo sapiens
aaattgagcaaaacctgattgtgaaactgaacatttttattcaagagactcacagacttaagaaacaaaaattgcaacaaaaaatccaccaaasagatgtttgtgctaacatccaagtagtttagttgaaatttcttcagaattatacttaaaattgggagccaaaccaagattgacacttagcctcaggtcaactaagtttcttactggatttaggtgatttttcccctaatttggctctctggcgtagagtagggtaaattctcattaagggcagatgacactatccaaaagctcaatagttttttacatctaatggttgacatctaatcagaaatctaacagcccttccaagagagaataccacaaaaggaaaaaaggagggaatagaaacagtcagaaatgacacctatagtggagttttcatatatataatttaaaatagtgtgattaatacattccagatggagatgacaagatagagaatctcatcagagagctgaaatctataactaagaatcaaatggccaatctatatttgaaatcaagaacagtgtaattggaaacagcatgaaaagagaattagtgaatgagaagacaggtgcatagaaaattacaatccgaaagacagaatttgagaaattgaaatacagaaaagggtgtaagagatgtgtgg

SEQ ID NO: 613433 - DNA, 676 bp, Homo sapiens
aaattgagcaaaacctgattgtgaaactgaacatttttattcaagagactcacagacttaagaaacaaaaattgcaacaaaaaatccaccaaagagatgtttgtgctaacatccaagyagtttagttgaaatttcttcagaattatacttaaaattgggagccaaaccaagattgacacttagcctcaggtcaactaagtttcttactggatttaggtgatttttcccctaatttggctctctggcgtagagtagggtaaattctcattaagggcagatgacactatccaaaagctcaatagttttttacatctaatggttgacatctaatcagaaatctaacagcccttccaagagagaataccacaaaaggaaaaaaggagggaatagaaacagtcagaaatgacacctatagtggagttttcatatatataatttaaaatagtgtgattaatacattccagatggagatgacaagatagagaatctcatcagagagctgaaatctataactaagaatcaaatggccaatctatatttgaaatcaagaacagtgtaattggaaacagcatgaaaagagaattagtgaatgagaagacaggtgcatagaaaattacaatccgaaagacagaatttgagaaattgaaatacagaaaagggtgtaagagatgtgtgg

SEQ ID NO: 613434 - DNA, 588 bp, Homo sapiens
cagtgagccgagatcgtgccactgcctccagcctggcaacagagtgagactccatctcaaaaaaaagaaagaaacccgactccgaattttgaattttgatattttcctggactaccaatatgtggcacaatgctctctcacaatgttgtgcaacagcrgtgagctgcagcttccagtcagccaaatgataataaaggtagataatccatcttgatatcttcctgaagaacataatgcctgcctaccatcaacaggcatcaatactttctaccagctattctcaaccctcatgatcggaagagacagagactgactgtgtcaaagtattagtcccatcattcagcaattaaccttagctcaatgcttcaaaaattcttcaggccctgtgtaatttcagctacgtacattaatgataagtacccatacaaccattctgtttcttattttcagtaccatatttaataaatatcagttattcaatactttatttagacattttgttagattattttgaccaactgaagtctaatctaaatgttctgagcatgttcaaagtaagctaggccaacctataattttcggtgtgct

SEQ ID NO: 613435 - DNA, 548 bp, Homo sapiens
ctacatacatctgaaaactctatttcacataaaactggagctgaaagaracaaatatttacctataaagttaaaagttatatagggaacaaacactaattttttttagaaaaaattataaaaagagtaaaaatatgccttatactaccgtaatttcatgttttacagctctgggaaaatagaaaataaaatgttctgttagcatgaatccctctgtgcccccaaaaagccctatggattgcatcattattacctaaaaagtctattctcaaatgcagcagagtgatattttttacaaggtagatattaattttagatatggaataatattggtgatttcaattttataacactgggttaagatgaaagaatgagaagataaaggtccctcagcaatataactcacaaacatgttcagaagcagtaagaagttacattaattatcttttgaaagtcgataatctacatctttaatgtatgcatatagcatagctaatgtactatcgctgggtccatttattcaatgaataattgccgctatgtgtcaga

SEQ ID NO: 613436 - DNA, 548 bp, Homo sapiens
ctacatacatctgaaaactctatttcacataaaactggagctgaaagagacaaatatttacctataaagttaaaagttatatagggaacaaacactaattttttttagaaaaaattataaaaagagtaaaaatatgccttatactaccgtaatttcatgttttacagctctgggaaaatagaaaataaaatgttctgttagcatgaatccctctgtgcccccaaaaarccctatggattgcatcattattacctaaaaagtctattctcaaatgcagcagagtgatattttttacaaggtagatattaattttagatatggaataatattggtgatttcaattttataacactgggttaagatgaaagaatgagaagataaaggtccctcagcaatataactcacaaacatgttcagaagcagtaagaagttacattaattatcttttgaaagtcgataatctacatctttaatgtatgcatatagcatagctaatgtactatcgctgggtccatttattcaatgaataattgccgctatgtgtcaga

SEQ ID NO: 613437 - DNA, 545 bp, Homo sapiens
tattcaatgaataattgccgctatgtgtcagacatttttctaggcctaggaatggatacayaagtgaacaaagcaaagattctggttcttgtagagtttccattaaaagacaatttagtaaaacttttcttcccccaaattataaaatctgtaagatgatttaacaacatgtgtaaaagtcattgtgggccaggcacggtggctcataccaggtgtggtgactcatagcactctgtcacccaggctggagtgcagtggcacaatctctgctcactgcaacctctgcctcctgggtacaagcgattctcctgcctcagctttctgagtagcaaggactacaggtgcacaccatcacgcctggctaatttttgtactattagtacagacggagtttcaccatgttggccaggctggtctcgaactcctgacctcaaatgatccatctacctcggcctcccaaagtgctggaattacagatgtgagccacaatgcccggccttattttctacaactttggtaactttagcatataccccaaatctgta

SEQ ID NO: 613438 - DNA, 407 bp, Homo sapiens
taataccagttttaattctgacacaaaagcatgggagttctaatcaaaatccaaccttttatcataaaaaytatgaagaaattatgagtagaacttaaacaggaaaataggcctattaattagatttgtctttgtagcatttaactctataataaataacataatattttatgcctatgagtacccaacaaagcctccagcgtctatttagatataaaatgtaaaagtcactactggatccacaagcaagactatggtaaataaatttctccacctaaccagcttcttttacatgatgttacatgtttcttttgttttttcattttggcaaatattgattgtcatcttcttgtttgtctatgtcctaagtgctgggatacagaatctgaaaagatggacacaggacc

SEQ ID NO: 613439 - DNA, 407 bp, Homo sapiens
taataccagttttaattctgacacaaaagcatgggagttctaatcaaaatccaaccttttatcataaaaattatgaagaaattatgagtagaacttaaacaggaaaataggcctattaattagatttgtctttgtagcatttaactctataataaataacataatattttatgcctatgagtacccaacaaagcctccagcktctatttagatataaaatgtaaaagtcactactggatccacaagcaagactatggtaaataaatttctccacctaaccagcttcttttacatgatgttacatgtttcttttgttttttcattttggcaaatattgattgtcatcttcttgtttgtctatgtcctaagtgctgggatacagaatctgaaaagatggacacaggacc

SEQ ID NO: 613440 - DNA, 420 bp, Homo sapiens
aaatgctacaaagacaatctcacaggaagatgggatgtagaatgataaggctctcagaatagtaagagaaactattgcttcttacgatgtttgtctttctttgtatcagtgctcagctgagtctgcagtgcttcagaggcagctttcattttataaaaatctatgatttctccttccagttgttttttctcttcctcragcttccttatctcctcctgttgaatcattttaagatgctcgaatttgtcctgcagctgtgaaaccaatgtgcagttgtgacaccaaagcagtgtggctgaacacccaaaagaatatgcttttttctgattatcaaacaaacccaaatcatcacagtagagcacgatcttaataacaatctcaaaaactcaggagtaaacactcagatatggaatttttctt

SEQ ID NO: 613441 - DNA, 208 bp, Homo sapiens
taggcaaaccattgtcaggttatgrgagtttgagaaggaaagtagagaaaggagaagaaagcttatttaaagaatggctgaaaactgcctaaatcatgggaaagatttagacatctaaatccatgaagcttaaagattcctaaagaggttcaaaccaaatagatactcaccaagtcacaatataatcaaatagtcaaaagttaaagaa

SEQ ID NO: 613442 - DNA, 208 bp, Homo sapiens
taggcaaaccattgtcaggttatgggagtttgagaaggaaagtagagaaaggaraagaaagcttatttaaagaatggctgaaaactgcctaaatcatgggaaagatttagacatctaaatccatgaagcttaaagattcctaaagaggttcaaaccaaatagatactcaccaagtcacaatataatcaaatagtcaaaagttaaagaa

SEQ ID NO: 613443 - DNA, 208 bp, Homo sapiens
taggcaaaccattgtcaggttatgggagtttgagaaggaaagtagagaaaggagaagaaagcttatttaaagaatggctgaaaactgcctaaatcatgggaaakatttagacatctaaatccatgaagcttaaagattcctaaagaggttcaaaccaaatagatactcaccaagtcacaatataatcaaatagtcaaaagttaaagaa

SEQ ID NO: 613444 - DNA, 433 bp, Homo sapiens
ggagctgtgcctgttgaggctcctccaaaaggtcatctgtacacacacagtaaaaatctgggagtaactgaagacagagttggtaagtraaataagaaacagttataagaaattaaactatggtatccataggcacccggtaaaaggtcagttgatgttagctgctacttttttgttgtttagagacagggtctcactctgtcacccaggctggagtgcagaggcctgatcatgactcactgcagtctcagcctccctgggctcaagtgatcctcccacctcagcctcccaagtagctgggactacaggaacatgccaccacactaggctaattcatgtatttttctatagggatggtgactccctttgtttccaaggcctatcgcaaactcttggcctcaagccatcctcctgcctcagcctcccaaagtgt

SEQ ID NO: 613445 - DNA, 433 bp, Homo sapiens
ggagctgtgcctgttgaggctcctccaaaaggtcatctgtacacacacagtaaaaatctgggagtaactgaagacagagttggtaagtaaaataagaaacagttataagaaattaaactatggtatcmataggcacccggtaaaaggtcagttgatgttagctgctacttttttgttgtttagagacagggtctcactctgtcacccaggctggagtgcagaggcctgatcatgactcactgcagtctcagcctccctgggctcaagtgatcctcccacctcagcctcccaagtagctgggactacaggaacatgccaccacactaggctaattcatgtatttttctatagggatggtgactccctttgtttccaaggcctatcgcaaactcttggcctcaagccatcctcctgcctcagcctcccaaagtgt

SEQ ID NO: 613446 - DNA, 433 bp, Homo sapiens
ggagctgtgcctgttgaggctcctccaaaaggtcatctgtacacacacagtaaaaatctgggagtaactgaagacagagttggtaagtaaaataagaaacagttataagaaattaaactatggtatccataggcaccyggtaaaaggtcagttgatgttagctgctacttttttgttgtttagagacagggtctcactctgtcacccaggctggagtgcagaggcctgatcatgactcactgcagtctcagcctccctgggctcaagtgatcctcccacctcagcctcccaagtagctgggactacaggaacatgccaccacactaggctaattcatgtatttttctatagggatggtgactccctttgtttccaaggcctatcgcaaactcttggcctcaagccatcctcctgcctcagcctcccaaagtgt

SEQ ID NO: 613447 - DNA, 433 bp, Homo sapiens
ggagctgtgcctgttgaggctcctccaaaaggtcatctgtacacacacagtaaaaatctgggagtaactgaagacagagttggtaagtaaaataagaaacagttataagaaattaaactatggtatccataggcacccggtaaaaggtcagttgatgttagctgctacttttttgttgtttagagacagggtctcactctgtcacccaggctggagtgcagaggcctgatcatgactcactgcagtctcagcctccctgggctcaagtgatcctcccacctcagcctcccaagtagctgggactacaggaacatgccaccacactaggctaattcatgtatttttctrtagggatggtgactccctttgtttccaaggcctatcgcaaactcttggcctcaagccatcctcctgcctcagcctcccaaagtgt

SEQ ID NO: 613448 - DNA, 539 bp, Homo sapiens
taatttgaagccttccttttcatagctgtgctccttaattgggagcaaacatgaatggaccacaacttagccaattttctatatacgatctttgccatcctaatttaaaggaatattaattctttcttttcctctttcattccacaaacctgtattgactacatctaagttctaaatggtgcactggatgttgaaaaagttgatgatgagcaagaacaaaattccwcctttcaggagacttacagttcaatatgggaaatataatttgttaaaatataaaagtgcaattgtgttacatgctgtacgaagtacatgttgacatgtgagcatataataaatgggctggaggccagaggattgccaaagagaatgggcctcctgctgagatgaaaagttgagcagggattagttggcgaaagtggagggacgaccctttctaggcaggaggaagaacatgtacagaatctctgaggtgtgatgcgacaaagtctatatgaaaaactgaagaaaggtctaatgtggcttaaatacagaagcca

SEQ ID NO: 613449 - DNA, 539 bp, Homo sapiens
taatttgaagccttccttttcatagctgtgctccttaattgggagcaaacatgaatggaccacaacttagccaattttctatatacgatctttgccatcctaatttaaaggaatattaattctttcttttcctctttcattccacaaacctgtattgactacatctaagttctaaatggtgcactggatgttgaaaaagttgatgatgagcaagaacaaaattccasctttcaggagacttacagttcaatatgggaaatataatttgttaaaatataaaagtgcaattgtgttacatgctgtacgaagtacatgttgacatgtgagcatataataaatgggctggaggccagaggattgccaaagagaatgggcctcctgctgagatgaaaagttgagcagggattagttggcgaaagtggagggacgaccctttctaggcaggaggaagaacatgtacagaatctctgaggtgtgatgcgacaaagtctatatgaaaaactgaagaaaggtctaatgtggcttaaatacagaagcca

SEQ ID NO: 613450 - DNA, 590 bp, Homo sapiens
tttgttaaaatataaaagtgcaattgtgttacatgctgtacgaagtacatgttgacatgtgagcatataataaatgggctggaggccagaggattgccaaagagaatgggcctcctgctgagatgaaaagttgagcagggattagttggcgaaagtggagggacgaycctttctaggcaggaggaagaacatgtacagaatctctgaggtgtgatgcgacaaagtctatatgaaaaactgaagaaaggtctaatgtggcttaaatacagaagccagtaggagaggagtcgaaaagaggctggagaagtagaaagtgtctgcattctgcaggaacttatattgtataaaaagaatttctctttattctaagtgcaatgtgaagccaatgaagtgccttaaacaggtgatgtgatttgattgaatttattacttcacttaacaaatattcattacatgcccactgtttgtcagatattgctgtagcccctggtgatacagtagggaataaaacaggcaaaaatccctgtcctcttgcagcttataatggactgcaatgtttaatatgtcagaggaggtccacggaggagtga

SEQ ID NO: 613451 - DNA, 590 bp, Homo sapiens
tttgttaaaatataaaagtgcaattgtgttacatgctgtacgaagtacatgttgacatgtgagcatataataaatgggctggaggccagaggattgccaaagagaatgggcctcctgctgagatgaaaagttgagcagggattagttggcgaaagtggagggacgaccctttctaggcaggaggaagaacatgtacagaatctctgaggtgtgatgcgacaaagtctatatraaaaactgaagaaaggtctaatgtggcttaaatacagaagccagtaggagaggagtcgaaaagaggctggagaagtagaaagtgtctgcattctgcaggaacttatattgtataaaaagaatttctctttattctaagtgcaatgtgaagccaatgaagtgccttaaacaggtgatgtgatttgattgaatttattacttcacttaacaaatattcattacatgcccactgtttgtcagatattgctgtagcccctggtgatacagtagggaataaaacaggcaaaaatccctgtcctcttgcagcttataatggactgcaatgtttaatatgtcagaggaggtccacggaggagtga

SEQ ID NO: 613452 - DNA, 590 bp, Homo sapiens
tttgttaaaatataaaagtgcaattgtgttacatgctgtacgaagtacatgttgacatgtgagcatataataaatgggctggaggccagaggattgccaaagagaatgggcctcctgctgagatgaaaagttgagcagggattagttggcgaaagtggagggacgaccctttctaggcaggaggaagaacatgtacagaatctctgaggtgtgatgcgacaaagtctatatgaaaaactgaagaaaggtctaatgtggcttaaatacagaagcyagtaggagaggagtcgaaaagaggctggagaagtagaaagtgtctgcattctgcaggaacttatattgtataaaaagaatttctctttattctaagtgcaatgtgaagccaatgaagtgccttaaacaggtgatgtgatttgattgaatttattacttcacttaacaaatattcattacatgcccactgtttgtcagatattgctgtagcccctggtgatacagtagggaataaaacaggcaaaaatccctgtcctcttgcagcttataatggactgcaatgtttaatatgtcagaggaggtccacggaggagtga

SEQ ID NO: 613453 - DNA, 425 bp, Homo sapiens
agaaagtgtctgcattctgcaggaacttatattgtataaaaagaatttctctttattctaagtgcaatgtgaagccaatgaagtgcyttaaacaggtgatgtgatttgattgaatttattacttcacttaacaaatattcattacatgcccactgtttgtcagatattgctgtagcccctggtgatacagtagggaataaaacaggcaaaaatccctgtcctcttgcagcttataatggactgcaatgtttaatatgtcagaggaggtccacggaggagtgacttctaagcaagaatctgaaaaaaatgaggatatctaaggagggaacaaatggttcaaaagccctataattgcaagcaggcatgatgaagcaattgtagttgtcctgactctcaacaccgtggaactcaaaggagatggaaag

SEQ ID NO: 613454 - DNA, 573 bp, Homo sapiens
ctacaagtgtatgttttgacttatttctttaaattttttgacatggatttgttagcttttaatgttattgcaaagacttccttatattcttctaattccgtagtaagctcttcataagcggttttcattttggagaattgacattccacgtctttcagtcagagttctcttttattcatcaaagccatattattctcttttaactgctgtgtttttcatattctgcttgtttctaaaacaaataaaaaatcatacttttaaaacaattataacctaattagtctctatttgttgcctttcattttgagtcagtgattcagaaagcaattttaaatatgtgttttaaaaaggggctgaagtttaaaacatctattagcaatttcatctaaattgataacagaattcagaattaaatatgaattataaaaatttgaaatcattcttgttagtgttcatgtaatctaatcatttaaaaataatagaatccattggaaatgttaaaaactgaacaatgtakcgtaagaccaattcaaaagtaccatataattttaaatcagagttttctttttctaa

SEQ ID NO: 613455 - DNA, 587 bp, Homo sapiens
tgctcgccaacaaggaaaacttttaagtagagcagaacctgaatagacaagacatttctttcttttggtagaaaatgatttaccatcactgtgtagttaattgtagactaggtaattttaactttgtgatttattgccggagacattttcttctgtactgtaaagtgtgtgtcaaaaaaaaatagcgattttggaggattaggggactttgataaattgcctgcaattctggcagtatgaactgcatattaatttctctctktcaagaacatttttatttattaattccttacaaaaactccctaaactttggaacagctctcaattgcctgtattcttttttttcttattatggtactcttctagagatttggcttgcatctgtgaataagccaggacatcttcagaaattgtctgattaaaaacaccaccaatggagtttcattaaatttgtattgctctgactagtgaaacacacacatctatgttgctgaggatattttactgcagttcgagttgtaataatagctctgtttaagatccgtcagtcacttgaatcttctctaaggctttgtatgttagaagtt

SEQ ID NO: 613456 - DNA, 502 bp, Homo sapiens
attgctctgactagtgaaacacacacatctatgttgctgaggatattttactgcagttcgagttgtaataatagctctgtttaagatccgtcagtcacttgaatcttctctaaggctttgtatgttagaagttaatttgctttcttacaaggccacattctatcttgtaactaaacaactgaattttatgtcttagcgtagatggtttattactttctggtttttctttagtaagaatcctataaaaacactagtatttttctctgagtttaaaattcaatacatgcctactgatatggttaggctttgtatccccacctgaatctcrtcttgaattgtaatccccatagcccccataatccccacaggtcaagggagagaccaggtggaggtaattgaatcatgggggcagtttcccctgtgctgttcttgtgatagtgagttctcacgagatttgatggttttataagggattctttcccctttgctcggcacttcttca

SEQ ID NO: 613457 - DNA, 567 bp, Homo sapiens
ctgaattttatgtcttagcgtagatggtttattactttctggtttttctttagtaagaatcctataaaaacactagtatttttctctgagtttaaaattcaatacatgcctactgatatggttaggctttgtatccccacctgaatctcgtcttgaattgtaatccccatagcccccataatccccacaggtcaagggagagaccaggtggaggtaattgaatcatgggggcagtttcccctgtgctgttcttgtgatagtgagttctcacgagatttgatggttttataagggattctttcccctttgctcggcacttcttcatgctgccttgcgaagaagctggcttgcttcctctttgtcttccgccatgattgtagatttcctgaggcctcccaagctgtgctgaactgtgagccaattaaacttctttcctttataaattacccagtcttgggcakttctttatagcagtatgaaaacagaaaaatacacctactatgtaaaacttaaaatacaaaaaaaaaaacattatctcactaacataggagctaatattttggtgta

SEQ ID NO: 613458 - DNA, 579 bp, Homo sapiens
acacctactatgtaaaacttaaaatacaaaaaaaaaaacattatctcactaacataggagctaatattttggtgtactttgtttagtattttatattaaaaatatgtacatatatatttatatataattaagaacatgtatgtacaatcgtgcatacatcatgtayatacatctacttaagaaaatagctatgtaatataccattactcaactagattataattttttctccatttctttattgtaatttatcattttctacttttttgttttctcatttttattgcataatatttaattatgcaaaaaatacattaaatacattgaaaatatatagtgtagctataagaataaagaacgatggtaaaacaaatgctaatacccactacctgacttaaagaatatgatattatttttttccaattgaaattccctcaactactcagaattactgctatccctcttatcctttcattaattttcttctagttttctcacatgtgaatctatttctaaatacatttctttattttgcaagtttttggacttcatataaatgtaaccatattgtatatattc

SEQ ID NO: 613459 - DNA, 306 bp, Homo sapiens
aacccacaaaaaagcaaacagcaaacaaacaaaaaacaggggaagaagtcgaaacaccctgggttgtgactacttccaggaaggggctacaagaggcagttggaaattctatttgctttgcaactgtgagttttccagcctgctccctttctaaagtatattactctgcttttggttcatgaagttatccatttctgttttctggaacagctatgtattttctttatctatcatctatctatctatttaccatctatcttttctacctttcrctatcaagagcttgggtcaagcaggatagaattc

SEQ ID NO: 613460 - DNA, 426 bp, Homo sapiens
acttttttgttttctcatttttattgcataatatttaattatgcaaaaaatacattaaatacattgaaaatatatagtgtagctataagaataaagaacgatggtaaaacaaatgctaatacccactacctgacttaaagaatatgatattatttttttccaattgaaattccctcaactactcagaattactgctatccctyttatcctttcattaattttcttctagttttctcacatgtgaatctatttctaaatacatttctttattttgcaagtttttggacttcatataaatgtaaccatattgtatatattcttcttcagcttcttagtttttcactaaacaatatgttttgctgatacttacattcatatgtacagtaatagttgatttattttaatggctatatattattccattgt

SEQ ID NO: 613461 - DNA, 611 bp, Homo sapiens
acttcatataaatgtaaccatattgtatatattcttcttcagcttcttagtttttcactaaacaatatgttttgctgatacttacattcatatgtacagtaatagttgatttattttaatggctatatattattccattgttagaatacaccaggatttatttttacttattttttttgctggaaaattgggtgtcttttttattttttgatataacaaacaatgttgtaatcattttgtgtttacttcctagtccactcctgtaagtttctcttgagtacatactagcaatgaatatgctgagtcactgcatatacatactcacaactttattctataatgtaatattctataaagtagctgtatcagtttatactttaaccagtaatggacaagattttctgttacttcccatctttgttaattattacttttagactctaacttttatcaggctcatggatgtaaaaagcatctcagggtggttttaatttgcatttatctgctcatctatgaagatgagyttcttttcatataattatgagtcattatttttgttttgccttcttttgtttatgcattttgcttgttctatgtcttatttttcctgt

SEQ ID NO: 613462 - DNA, 588 bp, Homo sapiens
ctgagtcactgcatatacatactcacaactttattctataatgtaatattctataaagtagctgtatcagtttatactttaaccagtaatggacaagattttctgttacttcccatctttgttaattattacttttagactctaacttttatcaggctcatggatgtaaaaagcatctcagggtggttttaatttgcatttatctgctcatctatgaagatgagtttcttttcatataattatgagtcattatttttgttttgccttcttttgtttatgcattttgcttgttctatgtcttatttttcctgttgatttttgggarttcatatatattctaaatgtatatttattcactcatatatatgttgtaaatattacagtttatgatttgtcaccttatgatatcatccaaatagagaagctttatattttgatgtagtcatatgttcatttttcctccttaatgtttgtttttcttggttctatgacctaccaaaagtaacaaaaattctcatttatttttaatctaaatgttttaagtattttcctggaattcaccttgaattgatttctattggagatagg

SEQ ID NO: 613463 - DNA, 440 bp, Homo sapiens
ttctgttacttcccatctttgttaattattacttttagactctaacttttatcaggctcatggatgtaaaaagcatctcagggtggttttaatttgcatttatctgctcatctatgaagatgagtttcttttcatataattatgagtcattatttttgttttgccttcttttgtttatgcattttgcttgttctatgtcttatttttcctgttgatttttgggaattcatatatattctaaatgtatatttattcactyatatatatgttgtaaatattacagtttatgatttgtcaccttatgatatcatccaaatagagaagctttatattttgatgtagtcatatgttcatttttcctccttaatgtttgtttttcttggttctatgacctaccaaaagtaacaaaaattctcatttatttttaatctaaatgtttt

SEQ ID NO: 613464 - DNA, 565 bp, Homo sapiens
cttgggcatctaatgggaaaagtttctcaagccatcataaaaatttcacttttactataaatactatgagaaaccatgggatgttttacagtaagaaaggtggcataatatgttacatgttttaaacaaactctatagcttctgagttgaaatagattgtaggggctcctggcagaagcagagggaacatttaggagactactgtaaagaatatcatgaaaagaacaaacaacgctatgtaacatgcttaaatggactgaagaagatgtataraatcaaaatgatgttaccttcacaccttgaatcagtacgataaacccccctccccaatcacaaaagaaaaactaaacacaaaaaccaggctttggttgctcagacaattttacaggtgagttctagcaaacatgcaaagaacgtttaattgcactgttacagaaattcttctggagacaagaaaatacgacacatcacccaaccaatttcatgataacaatgtcaatgtataataacagaaaaagtggatctctgaagaaataaatttatttggaaataaacaagttttata

SEQ ID NO: 613465 - DNA, 565 bp, Homo sapiens
cttgggcatctaatgggaaaagtttctcaagccatcataaaaatttcacttttactataaatactatgagaaaccatgggatgttttacagtaagaaaggtggcataatatgttacatgttttaaacaaactctatagcttctgagttgaaatagattgtaggggctcctggcagaagcagagggaacatttaggagactactgtaaagaatatcatgaaaagaacaaacaacgctatgtaacatgcttaaatggactgaagaagatgtataaaatcaaaatgatgttaccttcacaccttgaatcagtacrataaacccccctccccaatcacaaaagaaaaactaaacacaaaaaccaggctttggttgctcagacaattttacaggtgagttctagcaaacatgcaaagaacgtttaattgcactgttacagaaattcttctggagacaagaaaatacgacacatcacccaaccaatttcatgataacaatgtcaatgtataataacagaaaaagtggatctctgaagaaataaatttatttggaaataaacaagttttata

SEQ ID NO: 613466 - DNA, 551 bp, Homo sapiens
taatgataaaagtttaatattaattagggccttatgctattattggaagagcttggtgaatagatattagaaaagcagctagacaaaatcagaagaggtctgttttatatcagagatcttagcctgacagtctagagtgtgggcacagaacccaagcttataggaatttctgaaaggtctgtaaatcttatccagatggacagtgggagctcataaaggattctgcaagccatcacatctgtcaaacctgctatgtctaatccttaagcctgctttatgtgaagacctcctcttcactcctcacttccagctctcatgagtttctttcataggcaaacccaaacctggaacaatgtgcctgaagacttcgsgtgacacagtacccagacttaaataggaggggagccatggtggaagtggccatccagcacagttttcttggtctttactcatagttttgattccttaaaaaaattaaccacattaaaatatgtgtttcataatctacatctaataatacaaatatttaaagtcttttcaagtttgaatat

SEQ ID NO: 613467 - DNA, 551 bp, Homo sapiens
taatgataaaagtttaatattaattagggccttatgctattattggaagagcttggtgaatagatattagaaaagcagctagacaaaatcagaagaggtctgttttatatcagagatcttagcctgacagtctagagtgtgggcacagaacccaagcttataggaatttctgaaaggtctgtaaatcttatccagatggacagtgggagctcataaaggattctgcaagccatcacatctgtcaaacctgctatgtctaatccttaagcctgctttatgtgaagacctcctcttcactcctcacttccagctctcatgagtttctttcataggcaaacccaaacctggaacaatgtgcctgaagacttcgcgtgacacagtacccagacttaaataggaggggagccatggtggaagtggccatccagcacarttttcttggtctttactcatagttttgattccttaaaaaaattaaccacattaaaatatgtgtttcataatctacatctaataatacaaatatttaaagtcttttcaagtttgaatat

SEQ ID NO: 613468 - DNA, 573 bp, Homo sapiens
actgtactctggctctcttatcayatacaaacgtctatgttaggtatttgtgtctgtcttgattcttggtaggcttttaaactctgtgaatgttggactgtgatgtagacatcatttcaccgcacactctgtaaccaccaaaccttagcagcttattcagtaagcacatacttggctcttaatgagtattgcttaaattgatgaattgaattagtactttaccttctctgttgcttagctaagcagaagaatttgtcatttttttaatgtagtgactggttctattaaaagttacctttgtctatatcattttgttatactaaagcacaaatgtataaggtcaaaaaacattctcaagattttgtttaaaccacagccctcagctgtgtatatttatctcttgttttcatatgcaagatttctcctgaaatgggcaacaattacaagagtttttttcctcttctgaactaagaaaataaatatttaattcacaagtttagaaaagtgaacctgaaaaatcacagggctaggtgggttatgaggcccactggtacatgatagtgttgaatgtgg

SEQ ID NO: 613469 - DNA, 594 bp, Homo sapiens
gggctaggtgggttatgaggcccactggtacatgatagtgttgaatgtggattagaatgaactccgtggattagaatctcagaccataggcaaacatttacttgttttagaataagcacatttgagtctgcaataagtattactatttttaagttgaaaatgtaattggtttctaataataaccatattggctagcattatttctcatgtttaatgttttccaatgtcatttcatgtcagatatctctcttgattcttagtaacaatttggacaagacagcaaatgctattgtccaagttttctaaagaagaatctgaaatgaaatgacatcaagagacctatcaagacctgtatccagaaaaaggtaaatctgagctgaaactgtagcccttgtaaattacctatgtgacataccagatagtgttcatgatccattyagtactctgttctaaaaatgagacaatatccatttattcacttgttcatttatttagtgtttgttcagcccttactgcatattccaggcactattctgactgtggcaggagtgaacaaacaggcatggttcttacttgcatgtaattacagtctta

SEQ ID NO: 613470 - DNA, 621 bp, Homo sapiens
caggggaaaaatactccaggaataaagaacaggtacaaaggtcaggttctgggaagagcttgtcttggtccaggagctaaaaaatgttagagtggctggatctgggaaagagacaaagagttattaaatgaggcagcaggcttcagcaggtgccacattgctcagggccttgtaggccatgctaaggatttgggatgttaatgtcagtacaaacaattgagtcataagcagaaagtaaaagcatgattccatcaaatgttattctctaaacagtaattttataaatacaggttaaatgtgtgtggtyccagctactcaggaggtcccagctactcagtattccttttcaacaaatattaggtgcctactattagccaggtacagcccttagcttctttgaatgaagcatatattacaaactggcagaatttcttaaacaaagaatctaaagttgtttatacaccataatctcggtattttataaatttcttgaaattatttttatgtacactgctttgcagaattttaactggctttgaaataaacaatgacaatagtcctccatgttactagtttcaaattttcccaatacctactaagacattacttaatccacagatt

SEQ ID NO: 613471 - DNA, 614 bp, Homo sapiens
ttgtcttggtccaggagctaaaaaatgttagagtggctggatctgggaaagagacaaagagttattaaatgaggcagcaggcttcagcaggtgccacattgctcagggccttgtaggccatgctaaggatttgggatgttaatgtcagtacaaacaattgagtcataagcagaaagtaaaagcatgattccatcaaatgttattctctaaacagtaattttataaatacaggttaaatgtgtgtggtcccagctactcaggaggtcccagctactcagtattccttttcaacaaatattaggtgcctactattagccaggtacagcccttagctwctttgaatgaagcatatattacaaactggcagaatttcttaaacaaagaatctaaagttgtttatacaccataatctcggtattttataaatttcttgaaattatttttatgtacactgctttgcagaattttaactggctttgaaataaacaatgacaatagtcctccatgttactagtttcaaattttcccaatacctactaagacattacttaatccacagatttactgtcaatagtttgtatcaaattgtgataacatatttgaagttaatattt

SEQ ID NO: 613472 - DNA, 621 bp, Homo sapiens
caggggaaaaatactccaggaataaagaacaggtacaaaggtcaggttctgggaagagcttgtcttggtccaggagctaaaaaatgttagagtggctggatctgggaaagagacaaagagttattaaatgaggcagcaggcttcagcaggtgccacattgctcagggccttgtaggccatgctaaggatttgggatgttaatgtcagtacaaacaattgagtcataagcagaaagtaaaagcatgattccatcaaatgttattctctaaacagtaattttataaatacaggttaaatgtgtgtggtcccagctactcaggaggtcccagctactcagtattccttttcaacaaatattaggtgcctactattagccaggtacagcccttagcttctttgaatgaagcatatattacaaactggcagaatttcttaaacaaagaatctaaagttgtttatacaccataatctcggtattttataaatttcttgaaattatttttatktacactgctttgcagaattttaactggctttgaaataaacaatgacaatagtcctccatgttactagtttcaaattttcccaatacctactaagacattacttaatccacagatt

SEQ ID NO: 613473 - DNA, 625 bp, Homo sapiens
tttcttaaacaaagaatctaaagttgtttatacaccataatctcggtattttataaatttcttgaaattatttttatgtacactgctttgcagaattttaactggctttgaaataaacaatgacaatagtcctccatgttactagtttcaaattttcccaatacctactaagacattacttaatccacagatttactgtcaatagtttgtatcaaattgtgataacatatttgaarttaatatttcaaattaaagcaaaatcacaaatttatactttatattatgaatgagattcacaaaaggagcatgataatatattctgttgtcatcgcatacaaaataataacatatagagtatgaatcaataatttttcaaatacaaagctattacaattaggaatacaaagaaatcataattaggaatacttctacaatattaacacacaatagtggtaacacttgcaaaatgatggtggtggttttttttttttttttccccgacagagtcttgctcttgttgcccaggctggagtgcaatggcgtgattttggctcactgtaaactccacctcctgggttcaagcgattctcctgcctcagcctccctagtagctggtattacaggt

SEQ ID NO: 613474 - DNA, 625 bp, Homo sapiens
tttcttaaacaaagaatctaaagttgtttatacaccataatctcggtattttataaatttcttgaaattatttttatgtacactgctttgcagaattttaactggctttgaaataaacaatgacaatagtcctccatgttactagtttcaaattttcccaatacctactaagacattacttaatccacagatttactgtcaatagtttgtatcaaattgtgataacatatttgaagttaatatttcaaattaaagcaaaatcacaaatttatactttatattatgaatgagattcacaaaaggagcatgataatatattctgttgtcatcgcatacaaaataataacatatagagtatgaatcaataatttttcaaatacaaagctattacaattaggaatacaaagaaatcataattaggaatacttctacaatattaacacacaatagtggtaacacttgcaaaatgatggtggtggttttttttttttttttccccgacagagtcttgctcttgttgcccaggctggagtgcaatggcrtgattttggctcactgtaaactccacctcctgggttcaagcgattctcctgcctcagcctccctagtagctggtattacaggt

SEQ ID NO: 613475 - DNA, 519 bp, Homo sapiens
attgccttctggatagaatcacaactctttaccacaatcaacacacagccctgcttttattatttccactcctcctccttattttccttctgacaatgccgatggattgtcagcttcccagatgtgcaagaatctctcctcccttcccgacattctcatgctctccctctgcctctcaagaacttcctgtcccatctctcatgacaaatctcttcttcattctttaagatgcagcccctttgctccttccttaaggatgtctgtctggctttattttgggtgacatgctccttctgcatctcccagagccagcctctgtgtgtcagctacagcatttctttgcatctctgtgtcatatatcatcaaatctgcctaagcttgagtgagtcactgcatgacaacttcagactccaccagcattgtctgcactaacmacgaggcttagagatttgtccagtatgctcggggttgtggggtggtagcagtaaccagctggtgagcatcatctcttacatcaga

SEQ ID NO: 613476 - DNA, 468 bp, Homo sapiens
tctcatcatttagctcccacttataactgagagtatgctgtatttggttttctgttcctgcattagtttgctaaggataatagaaggtccatccatattccagcaaaagacatgatatcattttttaatggcggcatagtattccatggtgtatatgtacagcctgcatataaactgtgggctaaagaccttcacccagagcagtctgacagaacctctctgaaagacttctcctaggctgtaatcctcagtctcttgttctcagacccctaaataaatctaactttaatttcttaaaagcttaatttttttctttagttgacaccaaaaatctccccagccagatccacaaactttttcggtatttttcctattttttatatcattccaggcaagcgttttctaactctcccatcagaatatgactttggtgcgttttcctcagyctccactgatgattttttctca

SEQ ID NO: 613477 - DNA, 371 bp, Homo sapiens
ttaagcctgtcatttatattcttatctgtgtttttagcagcattattctctccacttcccactttttttcctgcttttattgatcttcatttctttcatggttgtctttactcattacatcctgaattttgccagattattttttatcactttattttgtatttattttcaattatgtcttctaaatatcatttcagagagaaaacattttagagaaggcatatttttaaaaaacatagaaaatttgatcctrttttttactgcttcatggtataatttgtatgttctgtaccttatgtaattttccctttttcttctagtatttttataaaggtcatcaagttttatttttgtaatacaattattataaa

SEQ ID NO: 613478 - DNA, 638 bp, Homo sapiens
attattataaataattatataatattattagtctttgaatattctagatacttgtgaaaggatattgtggaggaggagctgggggtagtaagtatgatggaaggcagacgagttttggaatcttgtctccaaaacactctcatctgttagaatgactcctaggctataggattgactatggcttagagtggattcatagttgttaatttcgtcatgtgacttgtgacttatccttttcttttcataatagaatgaarattgccatctgtctggcttcttccccatctttttgccttctttcattacaccacacacgtgtcctaattattccaaaggtgatacatttgcatgtttccctttaaactcctttccctctgtcactctgtggagggttcacatgctgcaatatttctgttccaagtaaagatcacaggttttgatcctcagtcctcagtatacacacctcttttagggatttctgggcttcttgactagctcaagctcttcagaggcatgcactttatcttggtgttcagtcttgactggtttaaacttttgatgtccagaaggttttcttcatgtgttgttgtgtggaattgtaaatattttctagcttttgtaaggttgtggctcatatt

SEQ ID NO: 613479 - DNA, 607 bp, Homo sapiens
  misc_feature 508: n = A,T,C or G
atgtcaaattgagactcttagattggaaatctgaatttatttacacgattgagattgatctagagttttattttttctgctgtaactgaaatttggattcaagattatatgtgttttgtgaatatgtttggtaacattgtgacttttctataatttagggaagtttgatgtaggagraagagaaaaaatttttgagagaatcctaaattcatatatggcctaaccttttaatatctatgtaattttagataataaataatttgtttgagattatgtggctctaacaacacctgcttcacagtgtaattatgaggatttcatagaatttgtatagtgagcgttagttttgatgttactttaaacctctttgcattatacattctattttttcccatggaatattatatgatttcatgtccacatattaatctcatactttcaattacattttatgtttaaattgaatataatggtaatcgttatgtaaatgattaaaaatttaaaggancaacatttaatgatgctctggaattcacctttagtcataaaataaagatttaaagtatcatctgtagacaatggcaaaagcccttttttgtcataagaa

SEQ ID NO: 613480 - DNA, 607 bp, Homo sapiens
  misc_feature 508: n = A,T,C or G
atgtcaaattgagactcttagattggaaatctgaatttatttacacgattgagattgatctagagttttattttttctgctgtaactgaaatttggattcaagattatatgtgttttgtgaatatgtttggtaacattgtgacttttctataatttagggaagtttgatgtaggagaaagagaaaaaatttttgagagaatcctaaattcatatatggcytaaccttttaatatctatgtaattttagataataaataatttgtttgagattatgtggctctaacaacacctgcttcacagtgtaattatgaggatttcatagaatttgtatagtgagcgttagttttgatgttactttaaacctctttgcattatacattctattttttcccatggaatattatatgatttcatgtccacatattaatctcatactttcaattacattttatgtttaaattgaatataatggtaatcgttatgtaaatgattaaaaatttaaaggancaacatttaatgatgctctggaattcacctttagtcataaaataaagatttaaagtatcatctgtagacaatggcaaaagcccttttttgtcataagaa

SEQ ID NO: 613481 - DNA, 516 bp, Homo sapiens
catttgctgttgccactagagaaggaggatgcagcagggatcaggcaccgtggagaaaagtcgccgtgtgtaggcagctaagaatgtaggaaaatgaacatctcggctcccaaaggacgagaataaagctgtagaagaatgtcagggaggaatctgagttgatcgtatgactattcatccttcttcccacattttcccgactgtttagccctacttttcttcgcgttgggtctcattttccttcctgtgtggcctgtgccttatggtcagctcggacgtccatcagtctatcaaatgyctagaaacctttcgccctttgtcaccttctgtgtcacccagcattccccttctcagcccttttcattctcatggtggaatccttttggtttgatttcaagggtccagcactgttgatgtcacaacagagtggcatggaaagtttctgaaaattttgtcatctaacctctcgtggggacttttaattaattcagcttttgacaactccatcacattcat

SEQ ID NO: 613482 - DNA, 555 bp, Homo sapiens
tcaatcttctcttaagggaactcttccctacgtttttctttttcctccatttgatacatcacacttatagatggggcatcttccctaattactggcttcatcctcaattcccrggacccataccttcactggcttcctaaatttatttaataattctcatatacctttgagaagtttctaatgataggcaacaaatgaatattgactacctttcttattttcctttattcaccaaaatgatttttaggatgtagacaatctgtatgcttcaacatacaccaaacttaccatttttgaaatattttacaatctacttgaaaagacttctttagaccctatattcatgtattgtaatatttatcctcttttatggctatactcaaatgccacatcactatagtgccttccctcatcactgtagctatctcttttcactctacttatattgtagaggatttgttacacttcttgaactgctgatctcaagcgatttgcttgctttggcctcccaaagtgctgggctgacaggcgtgagccactgcacctggcctgatt

SEQ ID NO: 613483 - DNA, 555 bp, Homo sapiens
tcaatcttctcttaagggaactcttccctacgtttttctttttcctccatttgatacatcacacttatagatggggcatcttccctaattactggcttcatcctcaattcccaggacccataccttcactggctycctaaatttatttaataattctcatatacctttgagaagtttctaatgataggcaacaaatgaatattgactacctttcttattttcctttattcaccaaaatgatttttaggatgtagacaatctgtatgcttcaacatacaccaaacttaccatttttgaaatattttacaatctacttgaaaagacttctttagaccctatattcatgtattgtaatatttatcctcttttatggctatactcaaatgccacatcactatagtgccttccctcatcactgtagctatctcttttcactctacttatattgtagaggatttgttacacttcttgaactgctgatctcaagcgatttgcttgctttggcctcccaaagtgctgggctgacaggcgtgagccactgcacctggcctgatt

SEQ ID NO: 613484 - DNA, 555 bp, Homo sapiens
tcaatcttctcttaagggaactcttccctacgtttttctttttcctccatttgatacatcacacttatagatggggcatcttccctaattactggcttcatcctcaattcccaggacccataccttcactggcttcctaaatttatttaataattctcatatacctttgagaagtttctaatgataggcaacaaatgaatattgactacctttcttattttcctttmttcaccaaaatgatttttaggatgtagacaatctgtatgcttcaacatacaccaaacttaccatttttgaaatattttacaatctacttgaaaagacttctttagaccctatattcatgtattgtaatatttatcctcttttatggctatactcaaatgccacatcactatagtgccttccctcatcactgtagctatctcttttcactctacttatattgtagaggatttgttacacttcttgaactgctgatctcaagcgatttgcttgctttggcctcccaaagtgctgggctgacaggcgtgagccactgcacctggcctgatt

SEQ ID NO: 613485 - DNA, 555 bp, Homo sapiens
tcaatcttctcttaagggaactcttccctacgtttttctttttcctccatttgatacatcacacttatagatggggcatcttccctaattactggcttcatcctcaattcccaggacccataccttcactggcttcctaaatttatttaataattctcatatacctttgagaagtttctaatgataggcaacaaatgaatattgactacctttcttattttcctttattcaccaaaatgatttttaggatgtagacaatctgtatgcttcaacatacaccaaacttaccatttttgaaatattttacaatctacttgaaaagacttctttagaccctatattcwtgtattgtaatatttatcctcttttatggctatactcaaatgccacatcactatagtgccttccctcatcactgtagctatctcttttcactctacttatattgtagaggatttgttacacttcttgaactgctgatctcaagcgatttgcttgctttggcctcccaaagtgctgggctgacaggcgtgagccactgcacctggcctgatt

SEQ ID NO: 613486 - DNA, 530 bp, Homo sapiens
tcattagtcatggctactatgtttttaaatgagaattgttttaattatgcattttaaaattattggaaaacatragggagaggaatgaaccataagtaataaagattattgacttgaagttaagaccttactatgatctgggattattagtcttacttgtcaatcaagaactatccactttctattcgtttgtgggtatctaatatggttatatacacagaagtaatgataattgatatgaaaaggtctcctcctgttatatcaatttaggtatttttcacacattgtatacctcattcttctcctattcaattttcactaattcctaaagggtcaggtcaatgtccttggcataacctcctccacctgttcttaatggcaatcgtctcttctgccctccaatatctataacacttttttctttaaaactctttgaatgtttatcttaatactcatttgatatatattgtataccacatatgattgtttgttatatgtacaatacatgttttttcaactttttttggttc

SEQ ID NO: 613487 - DNA, 566 bp, Homo sapiens
actatttattcatagtgacattgcaatattgattttagtacatattattatcttcataatcacaatttcctccccattttcttagttctcataattttagccacagcccagttggctggaccaatggatggagagaatcactcagtggtatctgagtttttgtttctgggactcactcattcatgggagatccagctcctcctcctagtgttttcctctgtgctctatgtggcaagcattactggaaacatcctcattgtrttttctgtgaccactgaccctcacttacactcccccatgtactttctactggccagtctctccttcattgacttaggagcctgctctgtcacttctcccaagatgatttatgacctgttcagaaagcgcaaagtcatctcctttggaggctgcatcgctcaaatcttcttcatccacgtcattggtggtgtggagatggtgctgctcatagccatggcctttgacagttatgtggccctattaagcccctccactatctgaccattatgagcccaagaatgtgcctttcatttctggctgttgcc

SEQ ID NO: 613488 - DNA, 570 bp, Homo sapiens
aagcgcaaagtcatctcctttggaggctgcatcgctcaaatcttcttcatccacgtcattggtggtgtggagatggtgctgctcatagccatggcctttgacagttatgtggccctattaagcccctccactatctgaccattatgagcccaagaatgtgcctttcatttctggctgttgcctggacccttggtgtcagtcactccctgttccaactggcatttcttgttaatttacccttctgtggccctaatgtgttggacagcttctactgtgaccttcctcrgcttctcagactagcctgtaccgacacctacagattgcagttcatggtcactgttaacagtgggtttatctgtgtgggtactttcttcatacttgtaatctcctacatcttcatcctgtttactgtttggaaacattcctcaggtggttcatacaaggccctttccactctttcagctcacagcacagcggtccttttgttctttgggccacccatgtttgtgtatacatggccacaccctaattacagatggacaagtttctggctatttttgaatgcaaatt

SEQ ID NO: 613489 - DNA, 570 bp, Homo sapiens
aagcgcaaagtcatctcctttggaggctgcatcgctcaaatcttcttcatccacgtcattggtggtgtggagatggtgctgctcatagccatggcctttgacagttatgtggccctattaagcccctccactatctgaccattatgagcccaagaatgtgcctttcatttctggctgttgcctggacccttggtgtcagtcactccctgttccaactggcatttcttgttaatttacccttctgtggccctaatgtgttggacagcttctactgtgaccttcctcggcttctcagactagcctgtaccgacacctacagattgcagttcatggtcactgttaacagtgggtttatctgtgtgggtactttcttcatacttstaatctcctacatcttcatcctgtttactgtttggaaacattcctcaggtggttcatacaaggccctttccactctttcagctcacagcacagcggtccttttgttctttgggccacccatgtttgtgtatacatggccacaccctaattacagatggacaagtttctggctatttttgaatgcaaatt

SEQ ID NO: 613490 - DNA, 641 bp, Homo sapiens
gcttttaaaattctagtatgaattcactatattcattttgttgaatgctgagtagaattagttagagcagacatctttgacttgttcctgttatgaaatatattaaatatttcatcattaagtataatgttagctataatttttttcataggtactctttaacaggctgagaaagttttctgtattcacagtttgctgaaaatttcttttatctttagtcaggaatggatcttggattttgtaaagctttttcatttcagaatcagggtaatgctggccctttagaatgagttgggaagcatctgctcttcttaaattttctgccataattttgtagaattcatataatttttttctttaaaaagggaagtacttaagtattttttcccwtaagttacccataagtaaatctaaaggaaagtgggaaactttgatacgcattggttgccccctggtggagatttctgggttcttgattattttaacactggagatagaatctggtggaatgatgtcaatgctaccgtgattaagaggtgtgtaggaaatgcttcatgtaagagagaaaatagtctttatgagaatctgcctggtggaaaggagttggtgcaacaataacaatataaattagtgaaaaattt

SEQ ID NO: 613491 - DNA, 644 bp, Homo sapiens
agatatctcttcagcatattgacttaaattcctttggatatatacaaggaagtgggattgctggatcatatagtaattctagttttagttttttgagtaacttttatctatttttcataatagtattaatttacatttccaccaacagtgtacgagggttcccttttctctgtatcctcttcaacacttgttatcttttatcattttgatagtagccattctaacaggtatgaagtggcatctcactgtcattttaatttgcatttccctgataattaggatgacaaactttttttatgttagtcatttgtattttttttgagaaatgtctatttaggaccttgcccattttttgacttggttatttgttttcttgatattgagttgagtcccttatatatttggagattagcctttcatcagatgtaygctctgcaaatattttctcacaacttgtaggttgtctcttcaccatattgtttcctttgctgtgcagaagctttttagtttgatgcaatcccatatatttttgcttttgttgcctgtgctttgggggttatatccaagaaatctttgaccaaaccaacattgtggaacttttcccctatgttttcatctagtagttttacagttttatgtttaaa

SEQ ID NO: 613492 - DNA, 392 bp, Homo sapiens
tttgttattacctaccttctgaaacctacttctctcaattcgtcaaactcattctcygtccagttttcttttgttcccttgctggtgaggagttgtgatcctttggaggagaagaggcgttctggtttttggaattttcagccttttgctctggtttctctccatcttcatggatttatctacctgtggtttctgatgttggtgaccttctgatggggtcactgagtggctgtcctttttgttgatgttgatgctattcctttttgtttgttagttttccttctaacagtcaggcccctctgctgcaggtctgttggggtttgccctaggtctactctagaccctgtttgcctgggtatcaccagcagaggctggagaacagccaagattgc

SEQ ID NO: 613493 - DNA, 392 bp, Homo sapiens
tttgttattacctaccttctgaaacctacttctctcaattcgtcaaactcattctctrtccagttttcttttgttcccttgctggtgaggagttgtgatcctttggaggagaagaggcgttctggtttttggaattttcagccttttgctctggtttctctccatcttcatggatttatctacctgtggtttctgatgttggtgaccttctgatggggtcactgagtggctgtcctttttgttgatgttgatgctattcctttttgtttgttagttttccttctaacagtcaggcccctctgctgcaggtctgttggggtttgccctaggtctactctagaccctgtttgcctgggtatcaccagcagaggctggagaacagccaagattgc

SEQ ID NO: 613494 - DNA, 392 bp, Homo sapiens
tttgttattacctaccttctgaaacctacttctctcaattcgtcaaactcattctctgtccagttttcttttgttcccttgctggtgaggagttgtgatcctttggaggagaagaggcgttctggttttyggaattttcagccttttgctctggtttctctccatcttcatggatttatctacctgtggtttctgatgttggtgaccttctgatggggtcactgagtggctgtcctttttgttgatgttgatgctattcctttttgtttgttagttttccttctaacagtcaggcccctctgctgcaggtctgttggggtttgccctaggtctactctagaccctgtttgcctgggtatcaccagcagaggctggagaacagccaagattgc

SEQ ID NO: 613495 - DNA, 584 bp, Homo sapiens
catttttctagtctagctaatggtttgtcagttttatcttttcaaagaacaaattcttagtttcattgatctgttctattttctttcacagtcttttttgtatttgaaggacttgtatttgttaactggctcaagcctggacatttgttgaggtgctatgagtctctattgctctcatttctcttcactagacatagaaattttctgattacacgaatcaaataagactaataagcttcccagggatgaatcccacttaagcatggygaatttttttgctgtgtttttttaaaaataatatttgctaatatttggctgaaggtttttccatccaagttcatcaggagtattggtctgccatttatttttattatagtgtccttctctggttttggtatcagggtaatgctggttttgaaaaatgaatttggaagtattcctcttcttcattttttttggaagagtttgggaaggattggtgttagtcatctaagtgtttgttggaattcagccaccaagccattcaatcctgggtctttcttttatgagagaactttcattggtgatttaatttccttattcat

SEQ ID NO: 613496 - DNA, 584 bp, Homo sapiens
catttttctagtctagctaatggtttgtcagttttatcttttcaaagaacaaattcttagtttcattgatctgttctattttctttcacagtcttttttgtatttgaaggacttgtatttgttaactggctcaagcctggacatttgttgaggtgctatgagtctctattgctctcatttctcttcactagacatagaaattttctgattacacgaatcaaataagactaataagcttcccagggatgaatcccacttaagcatggcgaatttttttgctgtgtttttttaaaaataatatttgctaatatttggctgaaggtttttccatccaagttcatcaggagtattggtctgcmatttatttttattatagtgtccttctctggttttggtatcagggtaatgctggttttgaaaaatgaatttggaagtattcctcttcttcattttttttggaagagtttgggaaggattggtgttagtcatctaagtgtttgttggaattcagccaccaagccattcaatcctgggtctttcttttatgagagaactttcattggtgatttaatttccttattcat

SEQ ID NO: 613497 - DNA, 584 bp, Homo sapiens
catttttctagtctagctaatggtttgtcagttttatcttttcaaagaacaaattcttagtttcattgatctgttctattttctttcacagtcttttttgtatttgaaggacttgtatttgttaactggctcaagcctggacatttgttgaggtgctatgagtctctattgctctcatttctcttcactagacatagaaattttctgattacacgaatcaaataagactaataagcttcccagggatgaatcccacttaagcatggcgaatttttttgctgtgtttttttaaaaataatatttgctaatatttggctgaaggtttttccatccaagttcatcaggagtattggtctgccatttatttttattatagtgtccttctctggttttggtatcagggtaatgctggttttgaaaaatgaatttgraagtattcctcttcttcattttttttggaagagtttgggaaggattggtgttagtcatctaagtgtttgttggaattcagccaccaagccattcaatcctgggtctttcttttatgagagaactttcattggtgatttaatttccttattcat

SEQ ID NO: 613498 - DNA, 584 bp, Homo sapiens
catttttctagtctagctaatggtttgtcagttttatcttttcaaagaacaaattcttagtttcattgatctgttctattttctttcacagtcttttttgtatttgaaggacttgtatttgttaactggctcaagcctggacatttgttgaggtgctatgagtctctattgctctcatttctcttcactagacatagaaattttctgattacacgaatcaaataagactaataagcttcccagggatgaatcccacttaagcatggcgaatttttttgctgtgtttttttaaaaataatatttgctaatatttggctgaaggtttttccatccaagttcatcaggagtattggtctgccatttatttttattatagtgtccttctctggttttggtatcagggtaatgctggttttgaaaaatgaatttggaagtattcctcttcttcattttttttggaagagtttgggaaggattggtgttagtcatctaagtgtttgttggaattcagccaccaagccattcaatcctkggtctttcttttatgagagaactttcattggtgatttaatttccttattcat

SEQ ID NO: 613499 - DNA, 639 bp, Homo sapiens
caagaggatgcaaaggggtctgtcaaagattcagtgaaatgagggtttttggatattcacagctaatagattaatgcattaggaatgagcaaaaaaattgatggtagtcaaacagagggagggaggtagattttgaatgattcaaagcaggagtgttttgaagataaacagaataactaaaaagaaagactcagatgaaaagcctagatttaaagcatttgaatcaagaggtggtaatctaggaattaggttgatttctttttttttaaatttgtgtagctttttattttattttttattgtactttaagttttagggtacatgtgcacaaagtgcaggtttgttacatatgtatacatgtgccatgttggtgtgctgcacccagaagactggttaatttcaataacctaaaaatccacaaggtgggagtgtttcactgaagccagttgttagagaaacgttagaaccaacttcctttttttctgtcccttcttctctgctttcttcttttctcctcctcckcctcctccctttactctcattcttctctctctttctaatcatgaaaacaaacgaaaaaaactatgagcaagagcacagaaaaaagactagcaaagactgcagttattgaaagtatca

SEQ ID NO: 613500 - DNA, 564 bp, Homo sapiens
tagctttttattttattttttattgtactttaagttttagggtacatgtgcacaaagtgcaggtttgttacatatgtatacatgtgccatgttggtgtgctgcacccagaagactggttaatttcaataacctaaaaatccacaaggtgggagtgtttcactgaagccagttgttagagaaacgttagaaccaacttcctttttttctgtcccttcttctctgctttcttcttttctcctcctcctcctcctccctttactctcattcttctctctctttctaatcatgaaaacaaaygaaaaaaactatgagcaagagcacagaaaaaagactagcaaagactgcagttattgaaagtatcagatacagaaaataaaataaaataactatatttagtatgtttaaagtaaaacaaaaaattaaaaatatcataatggaacaggaaactctagagaatggccaagaagattaaaagaaaacaaatagaatgtccatagagaataacataattgaaatttaaacccaaatgaatggttttaacagaatattagtatgttagaagc

SEQ ID NO: 613501 - DNA, 604 bp, Homo sapiens
aacgttagaaccaacttcctttttttctgtcccttcttctctgctttcttcttttctcctcctcctcctcctccctttactctcattcttctctctctttctaatcatgaaaacaaacgaaaaaaactatgagcaagagcacagaaaaaagactagcaaagactgcagttattgaaagtatcagatacagaaaataaaataaaataactatatttagtatgtttaaagtaaaacaaaaaattaaaaatatcataatggaacaggaaactctagagaatggccaagaagattaaaagaaaacaaatagaatgtccatagagaataacataattgaaatttaaacccaaatgaatggttttaacagaatattagtatgttagaagcagttgaagagtgaactagtaaactgtaatataggtcagaaggggctatccaaaatgaacacaggaataaagacatggaaaataagaaacatgtagttaggagacatggaagacagagggggaaatgctaaaaagttttaaagagtgtttcagaaggagagaaaggagatcatgaatcagtgtatatattttttwaattttattttatgttctgggataca

SEQ ID NO: 613502 - DNA, 549 bp, Homo sapiens
tatatatcacattttctttatccaatatatcattgatgggcatttgggttgattccatgtattttctatcrtaaatagtgctgcaataaacatatgtgtgcatgtatatgtatgtgtgtgtgtatatatatgtagttataatatgtatatatatgtgtatatatatgtgtgtatatatatacacatatatatacatttacatatataatatctgtatatatgtatatatatgtgtatatatatgtatgtatatgtatatatatatatttttttgagatggagttttgctcttgttgcccaggctggagtgcaatggtatgatcttggctcactttgacctctgcctcctgggttccagcgattctcctgcctcagcctccaaagtagctggtattacaggtgtgcaccactatacctggctaatttttgtatttttagtagagatggagtttccccatgttggctaggctggtctcaaactcctgtgctcaggtgatccacccgccttggcctcccaaagtgctgggattacaggtgtgagccactgca

SEQ ID NO: 613503 - DNA, 549 bp, Homo sapiens
tatatatcacattttctttatccaatatatcattgatgggcatttgggttgattccatgtattttctatcgtaaatagtgctgcaataaacatatgtgtgcatgtatatgtatgtgtgtgtgtatatatatgtagttataatatgtatatatatgtgtatatatatgtgtgtatatatatacacatatatatacatttacmtatataatatctgtatatatgtatatatatgtgtatatatatgtatgtatatgtatatatatatatttttttgagatggagttttgctcttgttgcccaggctggagtgcaatggtatgatcttggctcactttgacctctgcctcctgggttccagcgattctcctgcctcagcctccaaagtagctggtattacaggtgtgcaccactatacctggctaatttttgtatttttagtagagatggagtttccccatgttggctaggctggtctcaaactcctgtgctcaggtgatccacccgccttggcctcccaaagtgctgggattacaggtgtgagccactgca

SEQ ID NO: 613504 - DNA, 549 bp, Homo sapiens
tatatatcacattttctttatccaatatatcattgatgggcatttgggttgattccatgtattttctatcgtaaatagtgctgcaataaacatatgtgtgcatgtatatgtatgtgtgtgtgtatatatatgtagttataatatgtatatatatgtgtatatatatgtgtgtatatatatacacatatatatacatttacatatataatatmtgtatatatgtatatatatgtgtatatatatgtatgtatatgtatatatatatatttttttgagatggagttttgctcttgttgcccaggctggagtgcaatggtatgatcttggctcactttgacctctgcctcctgggttccagcgattctcctgcctcagcctccaaagtagctggtattacaggtgtgcaccactatacctggctaatttttgtatttttagtagagatggagtttccccatgttggctaggctggtctcaaactcctgtgctcaggtgatccacccgccttggcctcccaaagtgctgggattacaggtgtgagccactgca

SEQ ID NO: 613505 - DNA, 652 bp, Homo sapiens
acaataagtacataatggaaaattggatattcatcccctcaagcatttattatttgtgttataaacaatccaattatactctttcagttatttttaaatgtataattgaattttagactgcaatccccctgttgtgctatcaaatactaggtcttattaaatctttctttttttgtacccattarccatcccccacctctcccaacccccactacccttcacagcctctggtatacttccttctactctctatctccatgagttcagttgtttgctttttggattccacatataagtgataacacatagtatttgtctttttgtgcctggcttatttcacttaacataatgacctccagtttcatctatgttgttgcaaatgacagggtctcattcctttttatggctgaataatacttcattgtatataagtaccacattttctttattcattcatctgttgatggacacttaggttgactccataacttcgctattgaaaatagtgctgcaacaaatacgggagtgcagatatctcttcgatatactgatttcttttttggggggtatatatgcagcagtgggattgctggaccacatggtagctctatttttacttttttgaggagccttcaaactgttctccataggg

SEQ ID NO: 613506 - DNA, 567 bp, Homo sapiens
aaaaccctcaacaatataggtatagatggagtatacctcaaaaaatgagtcatctatgacaaagccacagccaacatcatcctggatgggcaaaagttagaagtgttgcttctagaaactggaaaaaagcaargatgttcaccttcttcattcctattcaatacagtactggaagtgctagccagaactatcagaaaggagaaagaaataaaaggtatacaaattagaaaagaagtcaaatgatctctgctcactgatgacatgactgtaggcctagaaaaccctaaagtcttcagaagactcctagacttgatacacgacttcagtaaagtcttgggataaacaagccacaaaaatcagttgtatttctatacaccaaatacattcaagctgtttgaatgtttgttgagattaatttgttgagaaccaaattaagaactcaactgaatttacaatagccatgaaaaatacctaggaatgcataactatataaatgaaagatctctacaaagagaactacaaaatactaatgaaagaaattatagatgacataaacaaatggaaaaa

SEQ ID NO: 613507 - DNA, 500 bp, Homo sapiens
acaaattagaaaagaagtcaaatgatctctgctcactgatgacatgactgtaggcctagaaaaccctaaagtcttcagaagactcctagacttgatacacgacttcagtaaagtcttgggataaacaagccacaaaaatcagttgtatttctatacaccaaawacattcaagctgtttgaatgtttgttgagattaatttgttgagaaccaaattaagaactcaactgaatttacaatagccatgaaaaatacctaggaatgcataactatataaatgaaagatctctacaaagagaactacaaaatactaatgaaagaaattatagatgacataaacaaatggaaaaacatcccatgctcatggattagaaaaatcaatagctaaagtgaccatatcacccatacaatctatagagttaatgcaattcccatcaaattaccaacgttatttctcacaaaattaaaaaaaaatcctaaagttcacatggagccaaaaaaa

SEQ ID NO: 613508 - DNA, 500 bp, Homo sapiens
acaaattagaaaagaagtcaaatgatctctgctcactgatgacatgactgtaggcctagaaaaccctaaagtcttcagaagactcctagacttgatacacgacttcagtaaagtcttgggataaacaagccacaaaaatcagttgtatttctatacaccaaatacattcaagctgtttgaatgtttgttgagattaatttgttgagaaccaaattaagaactcaactgaatttacaatagccatgaaaaatacctaggaatgcataactatataaatgaaagatctctacaaagagaactacaaaatactaatgaaagaaattatagatgacataaacaaatggaaaaacatcccatgctcatggattagaaaaatcaatagctaaagtgaccatatcacccatacaatctatagagttaatgcaattcccatcaaattaycaacgttatttctcacaaaattaaaaaaaaatcctaaagttcacatggagccaaaaaaa

SEQ ID NO: 613509 - DNA, 500 bp, Homo sapiens
acaaattagaaaagaagtcaaatgatctctgctcactgatgacatgactgtaggcctagaaaaccctaaagtcttcagaagactcctagacttgatacacgacttcagtaaagtcttgggataaacaagccacaaaaatcagttgtatttctatacaccaaatacattcaagctgtttgaatgtttgttgagattaatttgttgagaaccaaattaagaactcaactgaatttacaatagccatgaaaaatacctaggaatgcataactatataaatgaaagatctctacaaagagaactacaaaatactaatgaaagaaattatagatgacataaacaaatggaaaaacatcccatgctcatggattagaaaaatcaatagctaaagtgaccatatcacccatacaatctatagagttaatgcaattcccatcaaattaccaacgttatttytcacaaaattaaaaaaaaatcctaaagttcacatggagccaaaaaaa

SEQ ID NO: 613510 - DNA, 516 bp, Homo sapiens
acaaagagaactacaaaatactaatgaaagaaattatagatgacataaacaaatggaaaaacatcccatgctcatggattagaaaaatcaatagctaaagtgaccatatcacccatacaatctatagagttaatgcaattcccatcaaattaccaacgttatttctcacaaaattaaaaaaaaatcctaaagttcacatggagccaaaaaaagatccctaatagccaaagcacttctaagcaaaaaacaaagcaaaacaaaacaaagcccccagagcaaaagacaaatatggttcctacaaatgaagaccaayggtaatgcttatctgttcgtggtagaagtgtaaattggtaggattgttaaaaaaaatagtgtagcatctcatggtaatgttgaataactcaataattttacttttaaatatataccccagaggatatcttgcacatatgaaccaggtgatttacaaaagaatgttcatagcagcattgtttgtaatggttaaaaactggaaaa

SEQ ID NO: 613511 - DNA, 516 bp, Homo sapiens
acaaagagaactacaaaatactaatgaaagaaattatagatgacataaacaaatggaaaaacatcccatgctcatggattagaaaaatcaatagctaaagtgaccatatcacccatacaatctatagagttaatgcaattcccatcaaattaccaacgttatttctcacaaaattaaaaaaaaatcctaaagttcacatggagccaaaaaaagatccctaatagccaaagcacttctaagcaaaaaacaaagcaaaacaaaacaaagcccccagagcaaaagacaaatatggttcctacaaatgaagaccaacggtaatgcttatctgttcgtggtagaagtgtaaattggtaggattgttaaaaaaaatagtgtagcatytcatggtaatgttgaataactcaataattttacttttaaatatataccccagaggatatcttgcacatatgaaccaggtgatttacaaaagaatgttcatagcagcattgtttgtaatggttaaaaactggaaaa

SEQ ID NO: 613512 - DNA, 644 bp, Homo sapiens
ttgctggtgagactctcagtgaagatcgacattttcactatcctttgcgttttatccaaatgacagttgaatccagaggtttgactaggacacgtgcttggttctatttttggtaagattgtwggtgatggtgtgttcattcaccaggaggtttaattatggcttttatcttagcacctactactactttctactaacacctgttaatacaaagaaagttaatattttctactagcacctgttaatcctcaatatgtatagataggatatgtatagacacacgtgtgtctatgcatataatatataatatgtacatattatatttttttaagagaaggaaagagcatgtgagagagcacattgcatatttatgttgataatactgattctaatgtaactcagtgggctgcttctttccttgtcttattccatatctgtatctctgtcctttcacagtgagaatctggggttctagcaatacaaatatattaatatttactcattggcttaatcttacaatgcacatacatttgtttcagaattgttatatttatactaatataaaaagaaaaaatcctatcatgaagatttaataattttttgcagatattttattttttcaagcaatagtatgtagtcaaagt

SEQ ID NO: 613513 - DNA, 634 bp, Homo sapiens
cttgctctgtcgcccaggctggagtgcagcggtgcgatctcagctcaccgcaagctccgtctcccgggttcacgccattctcctgcctgagcctcctgagtagctgggactacaggygcccgccactatgccctgctaattttttgtatttttagtacagacggggtttcaccgtgttagccaggatggtctcgatctcctgacctcgtgatccacccgcctcggcctcccaaagtgctggaattacaggtgtgagccaccacgcccggccagggtacacttttaagcagagacactactttgaaggtcataaaaaatataataagagataaggctaatttcctttaataataataaaatcctttaataaaaatataaaggaataatataataattttctttaataaaatataataagagataaggctaatttcctttaataaaatatagtaactacataccaacagaattccaaaaaaagaaatggagaggaagggagcatgggtcattaatcttgtcaaaaatataaaattatatacgaggaattcctagaaactgttttccttgtctgcggccattgtgctgctgctacacaactaccgcaagcagcccttcacgccctcctcccagtaca

SEQ ID NO: 613514 - DNA, 556 bp, Homo sapiens
atctttggtggagcgagatgaagcagtgaatcattgaagactgaaagaaagaaaaaggtcttttcccttttctttaagaagcatcattagttaaaaacatgttagttgataccagagaactatatttaaagggacagcaataagcaaattgattactctggtgattattggagtgacattgccytttagttgtactttcacaaaaattcacaatatttgccaaagtcaagttatccattacactattaatttgtcattcttgtgtttatatagtcaatatctctatctcaattggatctatctcaactgcttctaaacaagccaccatagtctctcccatttcaacaatctcttccaagtaccacttcatttcttcttttcatatttttgaaaacttttgaaaaagtacctattttcctcctccatttcttgttcattccattctagtggacatggaatctgttcctcctccaaaacggaatttggtaacccttaaattactaaacccaaaacaatatgttgtctttatctttacctctctgtggcatttaatgat

SEQ ID NO: 613515 - DNA, 539 bp, Homo sapiens
gatgaagcagtgaatcattgaagactgaaagaaagaaaaaggtcttttcccttttctttaagaagcatcattagttaaaaacatgttagttgataccagagaactatatttaaagggacagcaataagcaaattgattactctggtgattattggagtgacattgccctttagttgtactttcacaaaaattcacaatatttgccaaagtcaagttatccattacactattaatttgtcattcttktgtttatatagtcaatatctctatctcaattggatctatctcaactgcttctaaacaagccaccatagtctctcccatttcaacaatctcttccaagtaccacttcatttcttcttttcatatttttgaaaacttttgaaaaagtacctattttcctcctccatttcttgttcattccattctagtggacatggaatctgttcctcctccaaaacggaatttggtaacccttaaattactaaacccaaaacaatatgttgtctttatctttacctctctgtggcatttaatga

SEQ ID NO: 613516 - DNA, 539 bp, Homo sapiens
gatgaagcagtgaatcattgaagactgaaagaaagaaaaaggtcttttcccttttctttaagaagcatcattagttaaaaacatgttagttgataccagagaactatatttaaagggacagcaataagcaaattgattactctggtgattattggagtgacattgccctttagttgtactttcacaaaaattcacaatatttgccaaagtcaagttatccattacactattaatttgtcattcttgtgtttatatagtcaatatctctatctcaattggatctatctcaactgcttctaaacaagccaccatagtctctcccatttcaacaatctcttccaagtaccacttcatttcttcttttcatatttttgaaaacttttgaaaaastacctattttcctcctccatttcttgttcattccattctagtggacatggaatctgttcctcctccaaaacggaatttggtaacccttaaattactaaacccaaaacaatatgttgtctttatctttacctctctgtggcatttaatga

SEQ ID NO: 613517 - DNA, 352 bp, Homo sapiens
attaatctgcctctcctctcactctatactatctctgttagctaattttatttgtgcacattgcttatactgggcattatatacacatatgcatgtgtgtacatgtgcacacacacactgtatgtggacatgtatatatatatgtgtgtgtgtatatatatagtatatatataaattacaataacataaaggtggcattttaaattagtggaaattaccctgatttgatcactacacattctatacatgtaaagaaatatcactctgtatcccaagaatatgtacaattatggtttgycaaatgaaaaagttcatacattgaaaaattttagataaatatcaaactttctct

SEQ ID NO: 613518 - DNA, 405 bp, Homo sapiens
ctccttgactggggttgctgaaggggttttagaaatgaggctgtcaaaaaacatcacagctgcctactgcttaatttctagctgactctgtgtttctaaccgtctgtagagactccacacagataaagcccctgtgccacggattctagggggacggggcaagaagcccagtgccagggtaggaaggaggccttgggaggggaggctgaagagtgaaaactcaggagcagatgccgggaggcagaagtgacatctgaacacacagcctccgagacagtccctgggtgggagacactgaggtttctgttgtgcgctggatacggcttaagcctaattttacctcaaatttcaaaggccagggygatccaagctgatatttgagttccattaccaggcatattcctt

SEQ ID NO: 613519 - DNA, 550 bp, Homo sapiens
cttccctgtaactcattcatgaacttcattttgataagtcacacttatatcttatgatgaatttctctatttagtttatactagcattagttggtttctgttgcttgcaaccaaaggaacttggcgcaattcacgttcacctttctgagcattagtttgttcacctgaaaaattacaatagtgatgctgagttacaggattgttgaaagcatcaaatggatgtgggaaatgctgtaaaatggaatattattgcaggaaagagataccatggatggaacaaaatggccaagagagaaattttgctctaaactttttaaatgctgattagaaaaataatgatagaaactaaccagtaatttatcagaatataccagacactgttttaagtatttcattcatgttgacttctttaatattcacatcaagttcattttgcacaggttttattcttatcttccattatgcagttgaggaaactaaaatgtaaaggaggtttaataataggatgtaaaaaaaaattaactgggcrtagtggcgcatgcttgtatta

SEQ ID NO: 613520 - DNA, 576 bp, Homo sapiens
aaataaaattcaagaacaaaattaacatttttccaagaaggaaattttaatgagaaatttacaatggaatttataatttaacagtatagaaaaaaaaactctgaaagttagtttacctgatattcaataaagcatctgtccacagatgatctaaatgaaacactgtaaaactgccatttgattttaagcgcctcaagaataggtcaggtgtggtgactcacacttacaatcccagcactttggaaggccaaggcaggaagatcacctgaggtcagctttctattgcttataattcacacttgtttttgcacttgtgaccaattcctgtttcaaaactaaaggtgcaggagggtgagctctctttcccagaagttgagacacttatcccttccaaatttgattgagtagtcaakgtggtaagatactttatggaggtatcagcatgtttatccatgacgtgtgtaagtctcatagagcctctccacaagaacacctgcagagacttttagctcagcttgaaggtgcacatcagggttggcaccttgagcactctgctgctgcaaggcatttagagat

SEQ ID NO: 613521 - DNA, 571 bp, Homo sapiens
tggtcatgctaagagaggagggaaagcctggattggagaggagagctgaatggcctgatcctgtgtccaggaggaggtctaccttcctctctttgagttccagaatcacctggggctcctggatgttaatggtagtctggaccactggagctggggagaggagccccatgacccatcaatcctgctggaccatttgagggactggctctagacccagtgacctgcgtttctgggtacagtacaccctccagtggcccccattgcaaattggacagggtcaaagtagcttcctcctgctgttcagacagtccttcataaagtgctctggcttgctacatttgtagtagctaaaaacgcgtctcagagactctgaggtttgtgagcctgcagggaagttattagagcctctgccttttccttgtatcttctttctcttttttggtcttcctcctggttcctatattaaagaccaaggtggctactttcaggaaattctctaacatactatttkgttctataacctgtttctgtagcttcccttgatatcaggggctgtctgtgtgataaactt

SEQ ID NO: 613522 - DNA, 582 bp, Homo sapiens
accatctaataatgatccttctagtcacacagcttggagaaagctgctttcttttaaaatattaaaaaatgwttcacaaatctaacagaaataattagagcagaatcattttcatgaaatacaggtcccattggtaatttgagaattcacagagttgttctaaccctaggacacagacagcaaacaattgcccttgatattttttttaaatgtgcatatattgctattttacagaatctaccttccacccaggacaattcataaggaattataaaaatgcactgattaaatgatctaatctagcatcattttaaaagaagaacggcttctaaccttctaaaaggggagccaccacaaaacaaaggtgagggggaacaaataggcctgctcacaaaacaccataccctggaatgatgctcagtttctagaagatcactgtaagctcactttgtgcatcctcttttcctaaatcctctatccctaaatgtccactcacctgcctttcttagacatctcgtggacttctcttccgggccagtgcattctgctttcagtggccaaaacccatccccaccacaaaag

SEQ ID NO: 613523 - DNA, 456 bp, Homo sapiens
acacagaggtgttgaggatgttaakaggcccattttttcaacagttatcaagtgcttattacagggcaggcactacactgggcaatgagctcttcaccagtcacaaaatgagatgcaggctgtgccatcagagaccttccgactaggaaggtgttctagcaaggtgtcaagggttttaagaaggagggagtggtcaatagggtcagatcactccaaggtcaaaatcaactaggtagaggactgagaagtgagccctagatatggtagttttgtgtcattaatgatcattccaagaagagaaaaatgtcagagggttgaggagagtagaagagaaaatggagtgaatatagacagtatttacaagaaacgtggtgtgagctgaaagactgagatgggatgaaggcgagagaggaagacaggagagttttagggtagcagggactttggagggttcaa

SEQ ID NO: 613524 - DNA, 638 bp, Homo sapiens
tctcttgagctaaatatgttgtcagtgaccaacaacacaacaaatagaaaaaaaattcaaactcccaaatgcgattgttcatccagggaggcaatgtctactctctctgacctcaacaagttgattattgtccacttaagaccctgacctgataatcttctctgttttgtatttctgaggtttctcttttaaggtggttaggtgctttgatctattgaactaacaaaagctaatcttacatattaacctttttttttttttttttttttgagacggagtctcgctctgtcacycaggctggagtgcagtggcgcgatctcggctcactgcaagctccgcctcccgggttcacgccattctcctgcctcagcctcccgagtagctgggactacaggcgcccgctaccacgcccggctaattttttgtatttttagtagagacggggtttcaccgtgttagccaggatggtctcgatctcctgacctcgtgatccgcccgcctcggcctcccaaagtgctgggattacaggcgtgagccaccgcgcccggcctattaatctcttttaaaaagaacagatttgggctctattttgaaagccagtctaaggctgggcacagtggcttatgccctaatcctag

SEQ ID NO: 613525 - DNA, 509 bp, Homo sapiens
gttgtgttgtagttaatcgataaacatatggacagatgtaggagcaaagatgtattctcatatgccactagagaagatggttatagtgaatgaaaactgtgaaatgtccatagctgagggcagtaaaaactaaatatttattcccttattcatttataattataaatatttatttgtgaaatacttatggatgtgaactattatcattaggcaatatctcaaggtatacagtattcccttatggtaaggtttgttgttattggatttgaatctatatttaatttaatttatttatttttaaagttttttgtagagataggctctccctgtgttgcccaggctggtctcaaactcctgggctcaagtgatcctcgtgctttggcctcccaaagttctgggattgcaggtgtgagccaccttgcctggcctaaatctatattttaaataatcttttagtaatttcttataktttggctgacttgtaaggtctgatttggttgtcataattt

SEQ ID NO: 613526 - DNA, 511 bp, Homo sapiens
gataactcttatcataagacttaggacaaagaaaaggagtccctactttatgtcattcactgataagatgatttatatatatcttcaacagaaaagaaaaaggctaactcattgagatagyctcaactgaaatacttttggtttttcccaagactatgtctaaacttcctaatttctttaaactctatttcatattcaaggctcatttcatacttactaccttcatgaagccttctccaatcctaccaactcagggcatcatcttcttcctttgaagtcccatgacacattgctttcatttccctcatatcatcatgttctgcttagtgtcataatttattatttttctctcttgactctcctacattcaccacaacagagcgataagctcctcattgaactgcttatattttatgtgtaattattgctccttgaaagcaggacaatgctttgctcataatattccctgcagctcccagcatagcatcctctacagtgcacacacaatcag

SEQ ID NO: 613527 - DNA, 511 bp, Homo sapiens
gataactcttatcataagacttaggacaaagaaaaggagtccctactttatgtcattcactgataagatgatttatatatatcttcaacagaaaagaaaaaggctaactcattgagatagtctcaactgaaatacttttggtttttcccaagactatgtctaaacttcctaatttctttaaactctattkcatattcaaggctcatttcatacttactaccttcatgaagccttctccaatcctaccaactcagggcatcatcttcttcctttgaagtcccatgacacattgctttcatttccctcatatcatcatgttctgcttagtgtcataatttattatttttctctcttgactctcctacattcaccacaacagagcgataagctcctcattgaactgcttatattttatgtgtaattattgctccttgaaagcaggacaatgctttgctcataatattccctgcagctcccagcatagcatcctctacagtgcacacacaatcag

SEQ ID NO: 613528 - DNA, 644 bp, Homo sapiens
agtgttggcaacctaatggattaaaaagtcccaaactggagataccaccaagacactacttgaaagtataatgttgccgtttattacaacaaaaacaaagataaatagatgggacttaaactaaagtttctgcacagcaaaagaaataatcagcagagttaacagacaacccasagagtgggagaaaatcttcacaacctgtacatctgacaaaggactaatatccagaatctacaaagaactcaaacaaattagcaagaaaaaaacaatcccatcaaaaagtgtgctgaggacatgaatagacaattctaaaaagaagatataaaaatggccaacaaacatgtaaaaaatgctcaacatcactaatgatcagggaaatggaaatcaaaaccacaatgcaacaccaccttaattctgcaagaatggtcataatcaaaaaaatcaaaaaataatagatgttggcatggatgtggtgaaatgggaacacttttacactgttggtgggaatgtaaactggtacaaccactatggaaaacagtgtggggattccttaaagaactaaaagtagatctactatttgatccagcaattccactactggggatctacccagaggaaaagaagttattatatgaaaaagatat

SEQ ID NO: 613529 - DNA, 589 bp, Homo sapiens
ccatcaaaaagtgtgctgaggacatgaatagacaattctaaaaagaagatataaaaatggccaacaaacatgtaaaaaatgctcaacatcactaatgatcagggaaatggaaatcaaaaycacaatgcaacaccaccttaattctgcaagaatggtcataatcaaaaaaatcaaaaaataatagatgttggcatggatgtggtgaaatgggaacacttttacactgttggtgggaatgtaaactggtacaaccactatggaaaacagtgtggggattccttaaagaactaaaagtagatctactatttgatccagcaattccactactggggatctacccagaggaaaagaagttattatatgaaaaagatattaatacttgcacacacaggtttacaacagcacaattggtagttgcaaaactatggaaccagcccaaatgcccatccatcaaccaaagaataaagagaatgtggaaaatatataccatggactactactcagccataaaaaggaatgaaataatggcactcccagcaacttggatggaattggagaccattattataagtgaagtaactcagaaatg

SEQ ID NO: 613530 - DNA, 589 bp, Homo sapiens
ccatcaaaaagtgtgctgaggacatgaatagacaattctaaaaagaagatataaaaatggccaacaaacatgtaaaaaatgctcaacatcactaatgatcagggaaatggaaatcaaaaccacaatgcaacaccaccttaattctgcaagaatggtcataatcaaaaaaatcaaaaaataatagatgttggcatggatgtggtgaaatgggaacacttttacactgttggtgggaatgtaaactggtacaaccactatggaaaacagtgtggggattccttaaagaactaaaagtagatctactatttgatccagcaattccactactggggatctacccagaggaaaagaagttattatatgaaaaagatattaatacttgcacacacaggtttacaacagcacaattkgtagttgcaaaactatggaaccagcccaaatgcccatccatcaaccaaagaataaagagaatgtggaaaatatataccatggactactactcagccataaaaaggaatgaaataatggcactcccagcaacttggatggaattggagaccattattataagtgaagtaactcagaaatg

SEQ ID NO: 613531 - DNA, 244 bp, Homo sapiens
tgataggttttcctctataggtsgcctgatgcttttgcctgaaagctcttaagattctttccttcatcttgactttagataacctgaagactatttgtctaggtgatgatctttttgtaatgaatttcccaggtattctttgaacttcttttatttgggtgtctagctctgtagcaaggtagggaagttttcctggcttattacctcagatatgttttccaaagttttagatttctcttctttt

SEQ ID NO: 613532 - DNA, 599 bp, Homo sapiens
tatttttataaaatatgttatttatgccaatatgaaatgagtatattgttattttagtaaattaatagataaattatttttccattttaatttcttaaattttgataggtatgattaatataaataaaaccctttggggtcttcagtaagttttaagaatgtaacggcattatgagattatgctgatccaacaatcttcrtttgggagtatcaggaaaaacttcctagcatttgatagagcttttgtggcttggctggggatttggcaattgaagattagggttgggcatataagaggatgttctagacagagggatcagtatgagctgaggcccagaggtgtgaaagtttggagagaatttgggaaacaatgaatagtcagtccatttcaattcaactatctacagagcaccctttgggtggtaggtggatgctgtgtgtagtgccagagagtaagacactatctctaccctcaaactcacagttcgtattggtgggagaattatattttgagtggaaaagcagtcaacaatacacgtggcctgacctcaacattattttcccaggtgctttctttttttaaaaaacaatttgcttaa

SEQ ID NO: 613533 - DNA, 399 bp, Homo sapiens
tagcaaggcaggtgtatgggttcagagtcaacacgatttgatgtcactgccctccatgtgacactcccacatcatttagtagaggagctggcagcacctgcaacacatcatctcagcttatcttttcttgggtggttacytttacaaagcagcagtaagaggatagattaaattaatccttctcaacttttcatcagaatatcccctacagccatgaagggtgagcactctggattttggggcagaagggtggtgaaatagaaggctggcagaatattttggagctgtctgctgcaaaactaaaatttatttgaagtcttgtgctttttacttaagatgtttaactttgaattttattccatagaatatccatgtgatttttcaagtgttttttcttac

SEQ ID NO: 613534 - DNA, 554 bp, Homo sapiens
ctgcagtgagctatgatcataccactgcactccagcctgggtaacagagtaagcccctatttcaaaaaaattttgttttgccttttttattctcagtaactaacactcatacccctgtccaaactaagggcagcatgttcttaaatggctgtgttttcagtggctgcaggccaatcctgacgcttcacctcccctgccccattccatgatggccggaaggactcctgttagtctttactcccagtctagggtgagtgaggattagtctcaagggaaatcatgggcttatggtaattacagtaactcatcacttccatatttctacatcgggcctgccctcctttatgactgcatcctggtagaacaggtggatgtgattagtcattctttaatgcacatttatgtcctttgccttggttactaagatagatgggtattaggagwccttgctttggagccaagttatgccctggggattttagttaggctaaatccatcaaagatactaaaaaaagtatatgagatcaagaagtaaattagctcttgagctatgg

SEQ ID NO: 613535 - DNA, 564 bp, Homo sapiens
agctgggtttttcttcttattcaacatggtttttttcaatatgtttttttcattttgaatataaaattttttcattaattctggaaaattctcattcattttcttttcctcattgcttctaatttttttttaagttgaacattttcattctgttatctatgtgccttttttccaattctcatattgcctttccastctgtgttccattttgagtaatctcagatatatattccaattcattagtaccttttcatctaagactaatttagtctttaacatctattgagtttttaattttaagaactttggtttttcacaatactttcttttgttctgtagattgcatgtttactctgtttatagtttcttttgctgtttagaaactctttattttaattaggtgccaattgtcaatttttgtctttgtttgatttgcttttgaggtattagtcatgaattcctcacctaggctattgtacagaagagtattttctaggctttcttctaggatttctatagtttgaggtcttatatttaagtctttagtccatctctagttatttt

SEQ ID NO: 613536 - DNA, 528 bp, Homo sapiens
ctcacacttcctgagactggataatttcttaaggaaagaagtttaatttactaacagttccacatggctggggaagcctcaggaaacttacaatcatagctgaatgggaagcaagcacctcttcacaaggcagcaggagggagaagargagaaaactaagggggaaaagccccttataaaatcatcaaatctcatggtaactcattcaccattatgagaacagcatggaggaaaccgcccccatgacccaattacttccctccattgacacgtggggattacaggtctctcactcgacacatggttattacaagtcgagatgaaatttgggtgagggcacagagccaaaccatatcatcttggttttgattttgagaggaaagtctttaggtttttcccattaaatatgatattacttgtaaataatttagagacactcttaaataccttttcttgtatttatagtttgctgagagcaattatcataaatggatgttgacatatgtaaattcattttctatatctatt

SEQ ID NO: 613537 - DNA, 604 bp, Homo sapiens
gtgaaaaaaaaaaaagacaataaaaaagctgaatacaagtctccaccaaacacagcttgctgctgtttttagtatgactattagatttttttttacacctgaattttccctaagtcagtacaccacttttggtgttttgaggctaaattggaagaccaatattcattatcctytgtgttagattactattccttttactctgatgaagactaagccagaagagaacatgaagaacagcaaaactactcaggtagatgcaagacagaagagattaatgaggccatggaagcagagaggggacataagaaaatttgcttctggagcttgtatgcatcagtaaccaaaatcaaatgtataagtcagaggatagagggacaactatgagcaaattcagctacgcttaaaaagttatgttttactactaagttagttattaataagtaaagaaaatcagccctcatatacttaaaaataattatgcatattatgatattgactttttaaaacatgtttctttggcacatagttgtggaacaccaactgcagaatcactgtggttttaactattttgaagttaattgattaaatgaatagatagcaagcc

SEQ ID NO: 613538 - DNA, 613 bp, Homo sapiens
atatttatcactggatattttttcacacagtgtctattcttcataggagaaacaggcagaatttactgcccaatacattctagaatgttaaatatatatttgaaaatataatgctttaaaaaatgcagactgctctgacaaagactactacataaattagatgataaaagtaatagatgttattgtatcagattctgcatatttacattaggtaaaaaccattctgtggctattatcaaattgacagaaaataacagatgctgtcaaggatgcacagaaaagagaacccttgtacattgctcatgggactgtaaaatagcatggtccagtcattatgaaaaacagtatgragcttctttgaaaatgtaaaaatataactaccatatgatatagcaacctcactactgggttggtatccaaagaaaataaaattaatatgtcagaaagatatctgcatatctatttttgttgtagcactattcacaatagccaagatagagttacactaagtgtccatcaacagatgaatagataaagaaaattggatagatatgtatatagatagatagatagatagatagatatagatatatatactattcagccttaaaaa

SEQ ID NO: 613539 - DNA, 613 bp, Homo sapiens
atatttatcactggatattttttcacacagtgtctattcttcataggagaaacaggcagaatttactgcccaatacattctagaatgttaaatatatatttgaaaatataatgctttaaaaaatgcagactgctctgacaaagactactacataaattagatgataaaagtaatagatgttattgtatcagattctgcatatttacattaggtaaaaaccattctgtggctattatcaaattgacagaaaataacagatgctgtcaaggatgcacagaaaagagaacccttgtacattgctcatgggactgtaaaatagcatggtccagtcattatgaaaaacagtatgaagcttctttgaaaatgtaaaaatataactaccatatgatatagcaacctcactactgggttggtatccaaagaaaataaaattaatatgtcagaaagatatctgcatatctatttttgttgtagcactattcacaatagccaagatagagttacactaagtgtccatcaacagatgaatrgataaagaaaattggatagatatgtatatagatagatagatagatagatagatatagatatatatactattcagccttaaaaa

SEQ ID NO: 613540 - DNA, 505 bp, Homo sapiens
ctctgactatgaaacacagtttagaaatcaaggctcaaattctttctgttttgttgtcatggacacaatagaaatagccactagcacttgtagagtgctttattctttacaaaacattttcatgcctcttttcttacttaatcattgtgtagaatgttgtggcttgggagttaaaaatatttctcttgctggttgacaaggaggcttggtatagggataaaaattctatttcagaattattattattcctatctatttttaaacatttagctacccaactygtagtggcaatgttaccaacattgatgggaccctcctgtgagaaagatgtacagccacccaagggcttgggaggccatggatcaggcagtgagaggtatgggtcaacatcaaggggggcaaagactggacctgtttgccaagagccaaggaaagaggcatttgctcttgggagtacaaagacacatgaggtctaatcagcccagagggcaaaactgggtaactg

SEQ ID NO: 613541 - DNA, 505 bp, Homo sapiens
ctctgactatgaaacacagtttagaaatcaaggctcaaattctttctgttttgttgtcatggacacaatagaaatagccactagcacttgtagagtgctttattctttacaaaacattttcatgcctcttttcttacttaatcattgtgtagaatgttgtggcttgggagttaaaaatatttctcttgctggttgacaaggaggcttggtatagggataaaaattctatttcagaattattattattcctatctatttttaaacatttagctacccaactcgtagtggcaatgttaccaacattgatgggamcctcctgtgagaaagatgtacagccacccaagggcttgggaggccatggatcaggcagtgagaggtatgggtcaacatcaaggggggcaaagactggacctgtttgccaagagccaaggaaagaggcatttgctcttgggagtacaaagacacatgaggtctaatcagcccagagggcaaaactgggtaactg

SEQ ID NO: 613542 - DNA, 569 bp, Homo sapiens
tcctattttttctccggactctgactatgaaacacagtttagaaatcaaggctcaaattctttctgttttgttgtcatggacacaatagaaatagccactagcacttgtagagtgctttattctttacaaaacattttcatgcctcttttcttacttaatcattgtgtagaatgttgtggcttgggagttaaaaatatttctcttgctggttgacaaggaggcttggtatagggataaaaattctatttcagaattattattattcctatctatttttaaacatttagctacccaactcgtagtggcaatgttaccaacattgatgggaccctcctgtgagaaagatgtacagccacccaagggcttgggaggccatggatcaggcagtgagaggtatgggtcaacatcaaggggggcaaagactggacctgtttgccaagagccaaggaaagaggcatttgctcttgggagtacaaagacacatgaggtctaatcagcccagagggcaaaactgggtaactgargctgaccctgcctctcttatattcttactctagaatggcactcc

SEQ ID NO: 613543 - DNA, 569 bp, Homo sapiens
tcctattttttctccggactctgactatgaaacacagtttagaaatcaaggctcaaattctttctgttttgttgtcatggacacaatagaaatagccactagcacttgtagagtgctttattctttacaaaacattttcatgcctcttttcttacttaatcattgtgtagaatgttgtggcttgggagttaaaaatatttctcttgctggttgacaaggaggcttggtatagggataaaaattctatttcagaattattattattcctatctatttttaaacatttagctacccaactcgtagtggcaatgttaccaacattgatgggaccctcctgtgagaaagatgtacagccacccaagggcttgggaggccatggatcaggcagtgagaggtatgggtcaacatcaaggggggcaaagactggacctgtttgccaagagccaaggaaagaggcatttgctcttgggagtacaaagacacatgaggtctaatcagcccagagggcaaaactgggtaactgaggctgaccctgcctstcttatattcttactctagaatggcactcc

SEQ ID NO: 613544 - DNA, 510 bp, Homo sapiens
cgatgtaattcagaacagccatatggaagagatgcacaaggtgaggtatggtgaggctgtagagcttccatgccctctctgggggtgccagcctcccagcacctccatgtgttcagctacccagaaactctctgaacctttcagttcggggattttatggaggctttgttgwgtaggcatgatccattattagctcagtctgtagcccatatccccttcctggagatgggcaatagggatgaaagttctaagtttctaatcatggcctggtttttctggggatcagctcctatccggagtcacctcattagaacaaaagatgttcctattactcaggaaattccaaaggatttatgagctctgtgtgagggagaagtatcaaagaccaaatattattagaacaaaagattctcctagcaccttgttgctcaggaaattacaagagttttagggatctctgtgccaggaactgcggataaagaaaaaaatatatttcttattacaaatcac

SEQ ID NO: 613545 - DNA, 510 bp, Homo sapiens
cgatgtaattcagaacagccatatggaagagatgcacaaggtgaggtatggtgaggctgtagagcttccatgccctctctgggggtgccagcctcccagcacctccatgtgttcagctacccagaaactctctgaacctttcagttcggggattttatggaggctttgttgagtaggcatgatccmttattagctcagtctgtagcccatatccccttcctggagatgggcaatagggatgaaagttctaagtttctaatcatggcctggtttttctggggatcagctcctatccggagtcacctcattagaacaaaagatgttcctattactcaggaaattccaaaggatttatgagctctgtgtgagggagaagtatcaaagaccaaatattattagaacaaaagattctcctagcaccttgttgctcaggaaattacaagagttttagggatctctgtgccaggaactgcggataaagaaaaaaatatatttcttattacaaatcac

SEQ ID NO: 613546 - DNA, 532 bp, Homo sapiens
tttctggagttaaataataattttgaaatactagcaatgcatacaaataattggtatttgagtagtttattctttctgtaatgataacctctctagaggggaaccagctcagtcatcatctgtaaaatgggaaagatggcacctactttatagtatagaatatatatttggattctgacaacagaggtgagttgatacggtttgaatgtttgtcccccgcaaatcttatgttgaaatgtaattaatcccttatattgaaggtggggcctcctgggaggtgtttgagtcataggggtggatccctcatgaattagmttggtgccctcctcatggtaatgagtgagttcttacctgagttcacatgagatctggttgttcaaaagagcctgatacctccctcttctctcttgcttgctctttccatgtgacatgctggctccccttcatcttccaccatgatcggaagcttcctgagtcctcaccagaagctgagcagatgcctgtgctgtgcttttggtacagcctgcagaac

SEQ ID NO: 613547 - DNA, 596 bp, Homo sapiens
cctttgcacagtccctcatgaatcccaagtaaaggggcttgtgggctcctctgcttagaatcttttcctgcctgccacctaacttggaatcagatctgaacttcttaccagggcccctctcagacctcatcctattctccctacactctgggcactctggccttcttataaatgctcccatcttgttcccatcttggagccttgaacttgctcttttgttcctggcttctctcctctgatactcacttttccttacatttcacctctcgctggctgttccatcaccatgtcttatttatttgcaatatgtatcaatatataaatttatcctattcaagtatttgcctcacccccatgacagcagcactctattgccagggccaagcacaatgtctggaaaataataaaccctcaataaatattcattgaatgaataattaaagaacgatgcctggagaatattaggttttcaatatatattgttggatggatgactgtatttcattctaaagtgatakccctagattcctagagggtcagggattcatcaacaaaatagagcaaaataatttcacttttgatcaaaatagagcaaa

SEQ ID NO: 613548 - DNA, 628 bp, Homo sapiens
ttcttattaattacttgtgtaaatgaaggacattttctaaaagaacccaaaggaacaaaatacaaaagcttgcatttgagggtaaaacttttattcttgttaaattcaaggccactgagaatagtttgcaagatgatcaatgccagactgatacctttcccttagaattttatggttctgtttgttaaaaaaaacccctattggaaaaccagtgcatggcctattatggtctccagttatcatagaaacccaattattccaacaagattcacatgctcagtctgcctcactgacccttgggagctgatttgaaaatgatgatgctggggaaagaacagaacactaggtgacatcagggagttgtgcagaggctgtaggcttagatttattttcatttgtgaaattgaaataagtctcatgaggacaggctgagatgacatatttaaatgcacactgatacaagtgaaacatgctgaatacatmattaataacttaaacaaaatatttataattcatccatagaataatcactctatcgaagcagggcaacctttataataaacagaaaggaaaaagtctgatgtagaaaaaaggaaagccaccccattctatatacaatgtatttggt

SEQ ID NO: 613549 - DNA, 682 bp, Homo sapiens
agatggagttttgctcctgttgctcaggctggagtgcaatggcatgatcttaactcactgcaacctccaccttccgggttcaagtgattctcctgcctcagcctcacaagtagctgggattatgggtatgtgccaccatgcccagctaattttgtattttttgtagagatggggtttcatcatgttgaccaggctggtcttgaactcctgacctcaagtgatctgcccccttggcctcccaaagtgctgggattacaggcgtgagccactgtgtctggccagtggcaccattttatattcccaccagagatgcatagggttctaacttccccacatcctcaccaacatttgttagtttctgtttgttttgcttttataataaccatcccagtgggtgtgatgcattggtttcttggaaaagyatgcatttgccacctgctcctgaagccccaggcctcacttaggtgccacctgtgttggctggaagcacagccgatgaccactgttgagttttccagggtgaatggatgctggtagagctcaagttctgcccatggagggttttaaagggtgacagagtgcacagaaagctgtataagttgtttggaattcacttatttacatgtttgaactcaatttttacaaaatctgccacaggagaatactgtcaagcagaaacaaa

SEQ ID NO: 613550 - DNA, 682 bp, Homo sapiens
agatggagttttgctcctgttgctcaggctggagtgcaatggcatgatcttaactcactgcaacctccaccttccgggttcaagtgattctcctgcctcagcctcacaagtagctgggattatgggtatgtgccaccatgcccagctaattttgtattttttgtagagatggggtttcatcatgttgaccaggctggtcttgaactcctgacctcaagtgatctgcccccttggcctcccaaagtgctgggattacaggcgtgagccactgtgtctggccagtggcaccattttatattcccaccagagatgcatagggttctaacttccccacatcctcaccaacatttgttagtttctgtttgttttgcttttataataaccatcccagtgggtgtgatgcattggtttcttggaaaagcatgcatttgccacctgctcctgaagccccaggcctcacttaggtgccacctgtgttggctggaagcacagccgatgaccactgttgagttttccagggtgaatggatgctggtagagctsaagttctgcccatggagggttttaaagggtgacagagtgcacagaaagctgtataagttgtttggaattcacttatttacatgtttgaactcaatttttacaaaatctgccacaggagaatactgtcaagcagaaacaaa

SEQ ID NO: 613551 - DNA, 489 bp, Homo sapiens
cagtagttcactggctaatgatatgtatttgatgagtgaattttgcactgttaatgaggtgggtcagaagagcttttttttttttttttaaaggcctcagttatgaatatgaaatgcatggttttggagataaaagggctttattttgatacaaaattgaaatgtggagacttggaagaaacattgataaccccaagaacccctggtgtgatataaatgttactgctggtgacagaaagttaaatgaatttgaaataaaaataattaatttcattgcttcctggttaaagggaccaggggcgcagaagctccatggaacactgtgagatttgtgatttagttgtaacagatttccataaatgrgatttagaactggatttcatccattaaaaattgattgctctggataaagaacagttctaatttcaattacttggccctcatggtccaatgtggtaaatatttcatggcttggtgtacagggctgtt

SEQ ID NO: 613552 - DNA, 535 bp, Homo sapiens
ctggttttcctggtcactgagactggcatttcgcatgaattggttacggcaaagacgtttcttgcctgcgtgaagagatgtggtgcttctgggtattggtgtttcaaattaaatagtggactgttgactgctctgagcgtaattcttccaggaatgtgtatgctactgggcattgttcatctttttctgttgctgtctcttctctttcgttagactgcaagctttaaaaaataaatcccagtgcaaatagctttagaatttttctgattataaaaataatgtttttatggttttgaggtttacatttaagtctttgataggtgcagtaaaccaccatggcacatgtatacctrtgtaacaaacctgcacgttctacacatgtatcccagaatttaaagtaaaataaaaaaaagttaattgcaaataatttagaaactacggaaatatatgtttaaaaaagaacccatagactctctacccagaaatagcttctgataatactttaatgtatggtcgtccaagattcttttttgat

SEQ ID NO: 613553 - DNA, 574 bp, Homo sapiens
gtccatcaacagatgaatgaataaagagaatgtggtatatatatgcaatggaatattattcagctattaaaggaaatgaaatcctgtcatttacaaaaacatgatgaaattggaggccattatgttacgtgaaataagccagggacagaaagacaaacactgtgtgttctcattcatatgtggaaactaaaaaagttgatcttatggaagcaaagagtagaaagatagttcacagaggctgggaagaatgtacrggtggttaaagagaggtagattaataggtacaaacattaaaacaagaaatatagaagaaataagtcctaatgtttgatggcacattaggtgactatagttaataacaatgcattgggtatttcaaaatagctaggagaaagtatttgaaatgttcctaacacaaagaaatgataaatgcttgaggtgatggatatcctaagtgaactgacttgatcattacacattctgtgcacgtatcaaaatatcacatgtaccccataagtatgtacaaacattatgtatcaaaaaataaatacaaaagctagaaataattaagctt

SEQ ID NO: 613554 - DNA, 574 bp, Homo sapiens
gtccatcaacagatgaatgaataaagagaatgtggtatatatatgcaatggaatattattcagctattaaaggaaatgaaatcctgtcatttacaaaaacatgatgaaattggaggccattatgttacgtgaaataagccagggacagaaagacaaacactgtgtgttctcattcatatgtggaaactaaaaaagttgatcttatggaagcaaagagtagaaagatagttcacagaggctgggaagaatgtacgggtggttaaagagaggtagattaataggtacaaacattaaaacaagaaatatagaagaaataagtcctaatgtttgatggcacattaggtgactatagttaataacaatgcrttgggtatttcaaaatagctaggagaaagtatttgaaatgttcctaacacaaagaaatgataaatgcttgaggtgatggatatcctaagtgaactgacttgatcattacacattctgtgcacgtatcaaaatatcacatgtaccccataagtatgtacaaacattatgtatcaaaaaataaatacaaaagctagaaataattaagctt

SEQ ID NO: 613555 - DNA, 515 bp, Homo sapiens
ttgcttcttccttggtcaggtgtgcccttggtccagtcaacagtcactgattagggtcctaagataagcccagctgcctatgtctagctttcaataggggctgtgggtgccctgtccatatgccctcccaattacgcttcctgtrtgcacaaatgcaatggtgtccttccgcacagctcaggagtgctgaaactctcttctgaggctgtctctggctgcttcacagagcatgtcagatgtgctggggaattaaacattttcacaaccaatgcccttgaccaatgactgacggcagttgatatataaccctgtctagatctctgttgagatagcaatgtagtgttcttcactctgccccagaattgcccagcagaattaagtctcagctgcccagaacattaacccttttgatccctgtctcagtccatttgtgctgctgtaaccgaacatgtgacgctgggtaatttataaggaccagaaatttatttttcacagttctaaaggctgggaagtcc

SEQ ID NO: 613556 - DNA, 515 bp, Homo sapiens
ttgcttcttccttggtcaggtgtgcccttggtccagtcaacagtcactgattagggtcctaagataagcccagctgcctatgtctagctttcaataggggctgtgggtgccctgtccatatgccctcccaattacgcttcctgtatgcacaaatgcaatggtgtccttcygcacagctcaggagtgctgaaactctcttctgaggctgtctctggctgcttcacagagcatgtcagatgtgctggggaattaaacattttcacaaccaatgcccttgaccaatgactgacggcagttgatatataaccctgtctagatctctgttgagatagcaatgtagtgttcttcactctgccccagaattgcccagcagaattaagtctcagctgcccagaacattaacccttttgatccctgtctcagtccatttgtgctgctgtaaccgaacatgtgacgctgggtaatttataaggaccagaaatttatttttcacagttctaaaggctgggaagtcc

SEQ ID NO: 613557 - DNA, 515 bp, Homo sapiens
ttgcttcttccttggtcaggtgtgcccttggtccagtcaacagtcactgattagggtcctaagataagcccagctgcctatgtctagctttcaataggggctgtgggtgccctgtccatatgccctcccaattacgcttcctgtatgcacaaatgcaatggtgtccttccgcacagctcaggagtgctgaaactctcttctgaggctgtctctggctgcttcacagagcatgtcagatgtgctggggaattaaacattttcmcaaccaatgcccttgaccaatgactgacggcagttgatatataaccctgtctagatctctgttgagatagcaatgtagtgttcttcactctgccccagaattgcccagcagaattaagtctcagctgcccagaacattaacccttttgatccctgtctcagtccatttgtgctgctgtaaccgaacatgtgacgctgggtaatttataaggaccagaaatttatttttcacagttctaaaggctgggaagtcc

SEQ ID NO: 613558 - DNA, 515 bp, Homo sapiens
ttgcttcttccttggtcaggtgtgcccttggtccagtcaacagtcactgattagggtcctaagataagcccagctgcctatgtctagctttcaataggggctgtgggtgccctgtccatatgccctcccaattacgcttcctgtatgcacaaatgcaatggtgtccttccgcacagctcaggagtgctgaaactctcttctgaggctgtctctggctgcttcacagagcatgtcagatgtgctggggaattaaacattttcacaaccaatgcccttgaccaatgactgacggcagttgatatataaccctgtctagatctctgttgagatagcaatgtagtgttcttcactctgccccagaattgcccagcagaattaagtctcagctgcccagaacattaacccktttgatccctgtctcagtccatttgtgctgctgtaaccgaacatgtgacgctgggtaatttataaggaccagaaatttatttttcacagttctaaaggctgggaagtcc

SEQ ID NO: 613559 - DNA, 530 bp, Homo sapiens
ctttatataatgatactctcattagtcaccttgatctttccacaattgcaagccaggatgtttctttgcaagtcaaggtatgaacagatttttgtactttattttaaggctcaagatcttgacatgagaaaacacagggccataggactgacttgaagagaaaggtgattatctcttaaacgcaaagagggagcacagtccctcagggcttcccttggctaggggwgggagtttcctgatcccttgcacttcccaggtggggcgacaccccaccctgcttctgctcatcctctgtgggctgcacccactgtctaaccagtcccaatgagatgaaccaagtacctcagttggaaatgcagaaatcaccagccttctgcattggtcgcactgggagctgcagaccagagctgttcctatttggccatcttgcccaggaatcctcagtctgtttttttgtgtgtgttttgttttgtttttgcaagaatcaaagactagtgccagagccagggttgcaggaggttcagccaaaa

SEQ ID NO: 613560 - DNA, 518 bp, Homo sapiens
ctttatataatgatactctcattagtcaccttgatctttccacaattgcaagccaggatgtttctttgcaagtcaaggtatgaacagatttttgtactttattttaaggctcaagatcttgacatgagaaaacacagggccataggactgacttgaagagaaaggtgattatctcttaaacgcaaagagggagcacagtccctcagggcttcccttggctaggggagggagtttcctgakcccttgcacttcccaggtggggcgacaccccaccctgcttctgctcatcctctgtgggctgcacccactgtctaaccagtcccaatgagatgaaccaagtacctcagttggaaatgcagaaatcaccagccttctgcattggtcgcactgggagctgcagaccagagctgttcctatttggccatcttgcccaggaatcctcagtctgtttttttgtgtgtgttttgttttgtttttgcaagaatcaaagactagtgccagagccagggttgcaggag

SEQ ID NO: 613561 - DNA, 598 bp, Homo sapiens
caagctccctgatgggtgaaaatctcttcaaatctcaggcacaagggcctgggaggaaccttagggccatctccttcaatctcccctcctttagcatctacctcatgaggtcactttgtggatgacaggacagccatggagtcaagccctgaccaccctctggtcccatttgcaggtgtctcccattagccttcaggacttccagccacagaccctgtcctgctgccttcaggcctttcttctcyacactagcatcccacatgtccattgtcctttcctaaaacggcccttcaccatcctgtttatgcccctctgcatgagctccaaattctctctatccctctcaggatgtggggccccagaaagaagaaataattcaagttgaagtgccagccagaggagaatagagtagaactgtcacctccattgcagtactaatctctatttatgcaaactgcagtggcctgataatggctcccaaaggtgcatccatgtcctgattcccagaacctgtgttaacatatttggaaaaagagtctttgcagctttgcaggcgtgattaagttaaggaactcattatgtagggggtggagagatg

SEQ ID NO: 613562 - DNA, 637 bp, Homo sapiens
tctttccttctacaaaaaagccaataatgaagtggcacagctgagaggaagatgtgctatttttttttttttcctatgctcagaatatggaaagagggccttagtagaagttggagactgattggctgtgtgaccttggataagtcagcctatctttgggtcactttccccatttgtaaatgaagaaataacctctatagtctccccagatcattccatgagtctgcatagctttttactcagttatcaatttcacagtctccagctgaccactgacctcacgtcacctccttaaggatcacctcccctgggaagtcttctctgattcacctccattctctaygctccaatagatcttgtgtgtatctatattgcaacatgtattgcactgtgctctaatgatttgtgtccaagaccatcttcctcactagacaagagtttcttgagggcaagagcctcatattattcatatctctccagtgcttagttcatcaataaatggacaaatgaagaaattaatgagttgctatgaggtaatgactttctcattgtacacaactgactgatgtaaatgtctgaaaaccagagttctggagcccaaacctctgctgcaggggagccattgatcaaatagtcc

SEQ ID NO: 613563 - DNA, 543 bp, Homo sapiens
cttggaatttgcttgtcatatttatttataaatcaggattttcatatttaccaatggaaaccttctagacataaaatttccttaagtaagtaagttattaaatacaaatgtaaagccctctagatgtaatttttctaacgtcgttttaggaatttaaggtccctgatgacataagccaaaatccccgttttgtttcacctcatagctttaaatgktttccagaattatcaacccctcatttaaaaaaaaaaaaaaactgtatctataccagtgactctcacattttgctttttagagcccaggtattctgactcagactaaaatgtttccaacgttggctaacttttcttaagtcacataagggaaaatagaaagaggcagttttcccaattacacattttcttctattttattccaaaaatttcagcaagtgctattgcttgaaggatagcagataaaattattgaattactaataagcaactaccagggaatatagaatttatttcaatcaaatggttagttcaatatggtgtaaagaaag

SEQ ID NO: 613564 - DNA, 603 bp, Homo sapiens
agacttttttttaagtttaaaaattgtttctgcaaatcattgctgaatccctggtgaaacttgttggaaaaataggacagctgtgggaaaatgtatcggtggaatgcagcatactggatgaacagtctttctcctctgggagtcaggagagagcggtagactgcagttgaatatagcagtgtggacaaaaccaggaaaaggtgggagctgagaagaagaggtgatgrgaggactttccagccagattggagagaaagaataaatcacttaagaaaatgggaacacaatgcctgtgtggaaaaatggaaagcagaacttttaactggagtagaggacttatttggaaactagagattggaagcagaaaatgaaggaccttgtatgccaagctaaagcatctgaatggtttcctttaggcaattgcaagacagtggagcttgctgagaaggggaatgacatgacttagaaagattaatgcccctgcattgtgcaaagtgcaggtaggtgaattacaagatgggcaaccagtgtaagtctactgaaatagatcaggcacaagccaggttggcgagggagggaataaaggagttatatgtgagagat

SEQ ID NO: 613565 - DNA, 603 bp, Homo sapiens
agacttttttttaagtttaaaaattgtttctgcaaatcattgctgaatccctggtgaaacttgttggaaaaataggacagctgtgggaaaatgtatcggtggaatgcagcatactggatgaacagtctttctcctctgggagtcaggagagagcggtagactgcagttgaatatagcagtgtggacaaaaccaggaaaaggtgggagctgagaagaagaggtgatgggaggactttccagccagattggagagaaagaataaatcacttaagaaaatgggaacacaatgcctgtgtggaaaaatggaaagcagaacttttaactggagtagaggacttatttggaaactagagattggaagcagaaaatgaaggaccttgtatgccaarctaaagcatctgaatggtttcctttaggcaattgcaagacagtggagcttgctgagaaggggaatgacatgacttagaaagattaatgcccctgcattgtgcaaagtgcaggtaggtgaattacaagatgggcaaccagtgtaagtctactgaaatagatcaggcacaagccaggttggcgagggagggaataaaggagttatatgtgagagat

SEQ ID NO: 613566 - DNA, 370 bp, Homo sapiens
tcacaggttatggggattagggcatggacattcctgggggccctgaggaaaccrcaagtgcaaaggccttggcatagaatggaaataaggctagtgtggctagatgggagggcaaggaaagagccaggcagggccaagctgaagaggtggcaagggctggctgctccaaggaggccttgcaggttgtgacacaaagtgagcttttgtcctaagtgctatgggaagctgtgaaaagctggtacacaggagaaatattatccgattcacattttttaatgattagctgctgaggagataatagatggggcctggtgggggccaattaagtgggtcactgcagcggtccagatgcaaggtggtggtggcctga

SEQ ID NO: 613567 - DNA, 370 bp, Homo sapiens
tcacaggttatggggattagggcatggacattcctgggggccctgaggaaaccgcaagtgcaaaggccttggcatagaatggaaataaggctagtgtggctagatgggagrgcaaggaaagagccaggcagggccaagctgaagaggtggcaagggctggctgctccaaggaggccttgcaggttgtgacacaaagtgagcttttgtcctaagtgctatgggaagctgtgaaaagctggtacacaggagaaatattatccgattcacattttttaatgattagctgctgaggagataatagatggggcctggtgggggccaattaagtgggtcactgcagcggtccagatgcaaggtggtggtggcctga

SEQ ID NO: 613568 - DNA, 553 bp, Homo sapiens
tactaagcatagtacctgagaggtagttttttatcctctccctcctcccaccctccaccctcaagtaatccccagtgtctgtcrttcccctctttgtgtccatgtgttctcatggtttagctcttatttataagtgagaacgtgtgatatttgttttacacgcggtttccctaaataacaaacctgcacatgtacccctgaacctgaaataaaagtcaaaaatgaatacataaacactgtctcacttttctgtgcaagaaccctgcccaattaaggagaaaattcccccatgcctcagatgccgggttttctgtgagctccactgcctgtgtttctcccggaggcagtaagcagcttttacttggatgaataacttatcctagggagcattctgttccccagactgcctgggaggcaaagcagaaagcctcctcacaagtcctggacccattgggaagaacctttgatctgaccctactgactccatggagtctcattagtggttccaactctatgtcagatgtcctgttcctcccagtcctaaaggccgaga

SEQ ID NO: 613569 - DNA, 553 bp, Homo sapiens
tactaagcatagtacctgagaggtagttttttatcctctccctcctcccaccctccaccctcaagtaatccccagtgtctgtcgttcccctctttgtgtccatgtgttctcatggtttagctcttatttataagtgagaacgtgtgatatttgttttacacgcggtttccctaaataacaaacctgcacatgtacccctgaacctgaaataaaagtcaaaaatgaatacataaacactgtctcacttttctgtgcaagaaccctgcccaattaaggagaaaattcccccatgcctcagatgccgggttttctgtgagctccactgcctgtgtttctcccggaggcagtaagcagcttttacttggatgaataacttatcctagggagcattctgttccccagactgcctgggaggcaaagcagaaagcctcctcacaartcctggacccattgggaagaacctttgatctgaccctactgactccatggagtctcattagtggttccaactctatgtcagatgtcctgttcctcccagtcctaaaggccgaga

SEQ ID NO: 613570 - DNA, 622 bp, Homo sapiens
aactgcgatttgagagacagactccagagaaatgggatcagtgttccaaagtttaaagytaaattcttgcttatacaggcagaaaacaaataaatctgacagggtaacatttttctatacaaggctagtttatgaatgacaacaatttaattacttacagtctgttttcctttctgtacaacttgttttcatctcctctccaatttattttttaaaataatcccaacttttatttgagattcagtgggtatgtgcaggtttgttacctgagtatattgtgtgacactgaggtttagagtataaacattcccatcacccaggtagtgagcataatacccaacagtttttcagctcttgcccctcttcctctgtcaccctccaatagtctccagtgtctgttgttcccatctttatgtccatgtgtacccaatgtttacctctcacttctaaatgagaacatgccatatttgcttttctattcttgcattaatttgcttaggataatggcctccaactgcatccatgttgctgcaaaggacatgatttcattcttgttattgctgtgtagtattccatggtgtatatgtaccacattatctagtccaccactgatgggcatcta

SEQ ID NO: 613571 - DNA, 659 bp, Homo sapiens
tttgcttaggataatggcctccaactgcatccatgttgctgcaaaggacatgatttcattcttgttattgctgtgtagtattccatggtgtatatgtaccacattatctagtccaccactgatgggcatctaggttgatgccatgtctttgctcttctgaatartgctgtgatgaagagtatatttaataacccatcttcagacaacgtgatagccataaagtctttccataagaaaggcaaagggaaggtaatctaaaatgaagatcaatagcaaagaaggaaagggtcttccctgtcactctttagtcatttataacattttacaaaacagtgcagttagggaagaagactaatctataatcagagaaacaaaggttacagctgcctacattacagttgtctgtcacatgactcaggccccataatcacattcctttaaggttcaaaatacttcagagttccaacagcttagttttataattacttattttcacactggtttcttgcttgctctgctcccacttccctgggaagtactgggattatgcagtagaaaggaacaggtcatgatatgtaaaatcatgaccctcctatgttctccatcttccccaccctgccgtgtggttttcatagctgtcaggcctctgagcccaagct

SEQ ID NO: 613572 - DNA, 541 bp, Homo sapiens
tgaaataaacagccttgttgctcacacaaagcctgtttgctggtctcttcacacagacatgtgtgaaaatagctcttaccatcacccaacatgttaccagttcctttgtcccctgcctgtctttcccagcatgctgtaagctccagaagagcagaagctttcttgtattcacaggaaaatctccaactcctagaacagcatctgacacatcrtatagggcaccagcaaatatgtgccaaactactggatttatccttttattggttgagcactcaacaggcacctggggattttgctgagtgatgtgtacacaaatgatgaactggataaacagaatgtggtctatccatacaatggaatattccttggccataaaaagaatgaagtgctgatacatgttaccacatggatgaggcttgaaaacattatgctaagtgaaagcagtgaacataaaaggccacacattgtatgactccatttcagtgaattgtccagaataagcaaacccataaaaatggaaagcaggtaagtggttgccagg

SEQ ID NO: 613573 - DNA, 541 bp, Homo sapiens
tgaaataaacagccttgttgctcacacaaagcctgtttgctggtctcttcacacagacatgtgtgaaaatagctcttaccatcacccaacatgttaccagttcctttgtcccctgcctgtctttcccagcatgctgtaagctccagaagagcagaagctttcttgtattcacaggaaaatctccaactcctagaacagcatctgacacatcatatagggcaccagcaaatatgtgccaaactactggatttatccttttattggttgagcactcaacaggcacctggggattttgctgagtgatgtgtayacaaatgatgaactggataaacagaatgtggtctatccatacaatggaatattccttggccataaaaagaatgaagtgctgatacatgttaccacatggatgaggcttgaaaacattatgctaagtgaaagcagtgaacataaaaggccacacattgtatgactccatttcagtgaattgtccagaataagcaaacccataaaaatggaaagcaggtaagtggttgccagg

SEQ ID NO: 613574 - DNA, 497 bp, Homo sapiens
acacatttcttcaattattctccttttttctaaagaaatcctcataaagcatcagacaaccacaaatggggcccactgtctcaggggagtcattttcaacatcctccttctcttcatctgcagggcgggagmtggactaacctctcaaagagaaggatgatatattagtacctgactattgcagaagaaaatacagaatataagtgcaagtattatcactctgaggaatcaagatttccctggtcagggaaagagttatcatttttggcagcagaaattttgatttgatttccaacccacttggagaccaaccgataaaatgttgttaactgtcacattgccagctgttttcaaaagaagtaaaataaaaccaacacatctgttattttaaaagcaggcagagtgattcttaagtttaaacctctgctagattttgaaattctctgagttcttccattcccccatgacatttataaatgtgtggctgaggtgcaaac

SEQ ID NO: 613575 - DNA, 438 bp, Homo sapiens
gaattctttctaaacatcatgataacaaattcaaaattatatgtcaggcaagtgtgactaaaatggtttgtaaagatgacaagatgatatggtttggctgtgtccccacccaaatctcatcttgagttgtagctcccataattcccatgtgttgtgggagggacccagtgggagataattgaatcatgggggcagttttacctgtactgttattatggtagtgaataagtctcacgtgacctgatggttttataagggatttccccttttgcttggctgtcattctgtcttgtctgccgccatgtaagatgtgccttttgccttctgccatgattgtgaggcctccccagccacgtggaaatgcgagtccattaaacctctttttctttataaattacctggtcttgggtawgtctgtattagcagcatgaaaacaga

SEQ ID NO: 613576 - DNA, 521 bp, Homo sapiens
taagtaattatcttttttttcttttttttttttaagaccacagactcaagamggacataattggattttttttgccatggcctggaaagaaaggtacacacagttaaccacaaaacaggcctctctgaaaaagccattgccatggactgccagacagacaatgacaagacacaaataccttttggtgtgtgagccacgggacatgtgagcttccccgctgatgctcctcttatatcaaagatcactttcacaacatgagcgactatcttttatcaaaccaatgatcacctgcaagctatggtatatttttgcagctgtgtagagctatgtggcatgagaatgtgggacttataaattgctgatccaataaatagacattatgggcaacagtgtcttatcagctagtgtgtactaaggtttcaggaacagttgttctgaccttactatccaacgaggagtaactgattcacttctcagaggtatattaacctaatttggacatcacagaatgcctgaaaaat

SEQ ID NO: 613577 - DNA, 521 bp, Homo sapiens
taagtaattatcttttttttcttttttttttttaagaccacagactcaagaaggacataattggattttttttgccatggcctggaaagaaaggtacacacagttaaccacaaaacaggcctctctgaaaaagccattgccatggactgccagacagacaatgacaagacacaaataccttttggtgtgtgagccacgggacatgtgagcttccccgctgatgctcctcttatatcaaagatcactttcacaasatgagcgactatcttttatcaaaccaatgatcacctgcaagctatggtatatttttgcagctgtgtagagctatgtggcatgagaatgtgggacttataaattgctgatccaataaatagacattatgggcaacagtgtcttatcagctagtgtgtactaaggtttcaggaacagttgttctgaccttactatccaacgaggagtaactgattcacttctcagaggtatattaacctaatttggacatcacagaatgcctgaaaaat

SEQ ID NO: 613578 - DNA, 600 bp, Homo sapiens
gcagcaacatttattgaatagggagttcttttcccattgcttatttttgtcaactttgtcaaagatcacatggctgtagatgtgcagctttatttccgggctctccattctgtttcattggtctgtgttctgtttttgtgccagtaccatgctctttaggttactgttaccttgtagcacagtttgaagtcagataatgtgatgcgctggctttgttgtttttgcttggaattacctaggttatttgggctcttttgtgagcccatatgaattttagaatagtgttttctagttctgtggaaaatgatattcagagcttgacaggcatagtgtcgaatctgcagatagctttaggcagtatggccattttaacaatattgatacttctaacccatgagctatttttaccacatttacaattacttcatttaagtcttgaactcctccaaattacccaggagggctgaaakcaacttcttccaaattcatgttaatgttgacattttggcttcctctcagcaatcatgaatgttcttaatgacatctagaatggtgaatcatttccagaaagttatgaatgtattttgctcagaaccataa

SEQ ID NO: 613579 - DNA, 548 bp, Homo sapiens
tttgtgaattttttctatctttaaatacatgcaagtggtttcaggattataacactaatatcactrccaataacaaacctactgaacaaagttcaagattttttggcagttcttttggctcttaaaatatgtcccatgaagtgtatgtaatcagatggttgtgctaaaacattatgtgaattattttttgttttctgtgtggcactgatatcaagttgatatacaattatattaatttgtttctttttacattacattttaggattttctatctcgtttaattttgaaaatgaaaaacagctgcacgtttcaagtcaaaactacacaaaagatgtattcagagaagtctctctgccatcttttttctttctacctccatttctacccttcccatagataactttttattaggttctaggtaatctttatgtttatgataaatgaagtaaatatgggtctattcttccccttcattctcatgcaagaagtagcatgctaaataattctttggaactttgattttgaaaattaacaatacatcctggaag

SEQ ID NO: 613580 - DNA, 548 bp, Homo sapiens
tttgtgaattttttctatctttaaatacatgcaagtggtttcaggattataacactaatatcactaccaataacaaacctactgaacaaagttcaagattttttggcagttcttttggctcttaaaatatgtcccatgaagtgtatgtaatcagatggttgtgctaaaacattatgtgaattattttttgttttctgtgtggcactgatatcaagttgatatacaattatattaatttgtttctttttacattacattttaggattttctatctcgtttaattttgaaaatgaaaaacagytgcacgtttcaagtcaaaactacacaaaagatgtattcagagaagtctctctgccatcttttttctttctacctccatttctacccttcccatagataactttttattaggttctaggtaatctttatgtttatgataaatgaagtaaatatgggtctattcttccccttcattctcatgcaagaagtagcatgctaaataattctttggaactttgattttgaaaattaacaatacatcctggaag

SEQ ID NO: 613581 - DNA, 548 bp, Homo sapiens
tttgtgaattttttctatctttaaatacatgcaagtggtttcaggattataacactaatatcactaccaataacaaacctactgaacaaagttcaagattttttggcagttcttttggctcttaaaatatgtcccatgaagtgtatgtaatcagatggttgtgctaaaacattatgtgaattattttttgttttctgtgtggcactgatatcaagttgatatacaattatattaatttgtttctttttacattacattttaggattttctatctcgtttaattttgaaaatgaaaaacagctgcaygtttcaagtcaaaactacacaaaagatgtattcagagaagtctctctgccatcttttttctttctacctccatttctacccttcccatagataactttttattaggttctaggtaatctttatgtttatgataaatgaagtaaatatgggtctattcttccccttcattctcatgcaagaagtagcatgctaaataattctttggaactttgattttgaaaattaacaatacatcctggaag

SEQ ID NO: 613582 - DNA, 602 bp, Homo sapiens
caaattgtaccaatatttcccaagatagtggcagatagtgtggatatccttacagctagatgttgccaatagtttaaatctttgcaaatgcaataggagaacaataatttctagtttkaacttgcattttaaaattattcctgtgcaggagcacctttaatatatttattacatgctgtaggacaaagatgagtattacactggagttcttgttggaaataatacaaatcagatgagagtggaacactatgtgaaaaatgctaaaagaaaaactatcaactgagaattctacacctactgaaaccattcttcaaaaatggaggtgaaataaaggcttttgttgacataagaaagttgaaagaattcattatcctcagagctctactatcagaaatgctgcagaaagtcctatgggaagaaggaaaatgacagcagagggaaatctggatctacacaaaggaatgaagagccccccctaaaagtaactgcatagataggtataaaatactttgaaaaattaattattcatatctctttagaagatacttgtgggctttcctgatatctattattgtttctaaacaataaattgtttaaagcaa

SEQ ID NO: 613583 - DNA, 602 bp, Homo sapiens
caaattgtaccaatatttcccaagatagtggcagatagtgtggatatccttacagctagatgttgccaatagtttaaatctttgcaaatgcaataggagaacaataatttctagttttaacttgcattttaaaattattcctgtgcaggagcacctttaatatatttrttacatgctgtaggacaaagatgagtattacactggagttcttgttggaaataatacaaatcagatgagagtggaacactatgtgaaaaatgctaaaagaaaaactatcaactgagaattctacacctactgaaaccattcttcaaaaatggaggtgaaataaaggcttttgttgacataagaaagttgaaagaattcattatcctcagagctctactatcagaaatgctgcagaaagtcctatgggaagaaggaaaatgacagcagagggaaatctggatctacacaaaggaatgaagagccccccctaaaagtaactgcatagataggtataaaatactttgaaaaattaattattcatatctctttagaagatacttgtgggctttcctgatatctattattgtttctaaacaataaattgtttaaagcaa

SEQ ID NO: 613584 - DNA, 525 bp, Homo sapiens
ttagacttgatatagaggatttggtcataagtaaataaattggaatggaaaattgccaatctaaaagatctcctgcacatggcaggctatcttagaaaataaataagctagaaatgaaaataaacttctggatctctagatataaaaactgacccttgaataaaaaaggacaaaaacaagaaccaaaagtctatgaataaagatacttgtagatatttgcaagcatcggggccatgagagaaccaagkttccataacagcaaagtgtgcaataacattgtgtctaaaaaacaatgtgcatacactaatcaaaacatactttattgcttaaaaatgcagactcagagacacgaagtgagcatgtactcttggaaaaatggtgtggataaagttcctcaacacagtattgccacaaaccttcaatgtgtaaaaaccaccattgagtgaagtgtaataagacaaggcatgcctggatacatccagtacctggggagcggctggggtatgagtgcaaataatgtgtatc

SEQ ID NO: 613585 - DNA, 547 bp, Homo sapiens
gcggccacccctcccgctaggggctcaggcctagggagatccaaattttgtccttgagcctctggctggagttattggagttcctgcaaggaagccatccactgaggaaggatgagtcagggttgggcctgaagaggcactctggccgcagactgccacagctggtgtgttgggctaggggggcaagtcttgggaccaagctgtccagcctccctggctccagcaggggaaaaatgcagcccggagctacagaaataggtgccgcccttcccccgctcagggagcttagagtgttaggcagttgcgagtctcagtgctggctgctacccctccsccaaggagctcaaaaggcttagacagcaggcagctgtagcgggtgcttgttgcccctcccccggggagtttggtaggcttaagcagattccatctgagaggctgtaagaatctgcgtgttccggggttgggacgctaggccccagtggcatgggtttgtgagtgggatcttccgatcccgcgggttgcacggttccatggaaaaagcacagat

SEQ ID NO: 613586 - DNA, 547 bp, Homo sapiens
gcggccacccctcccgctaggggctcaggcctagggagatccaaattttgtccttgagcctctggctggagttattggagttcctgcaaggaagccatccactgaggaaggatgagtcagggttgggcctgaagaggcactctggccgcagactgccacagctggtgtgttgggctaggggggcaagtcttgggaccaagctgtccagcctccctggctccagcaggggaaaaatgcagcccggagctacagaaataggtgccgcccttcccccgctcagggagcttagagtgttaggcagttgcgagtctcagtgctggctgctacccctccgccaaggagctcaaaaggcttagacagcaggcagctgyagcgggtgcttgttgcccctcccccggggagtttggtaggcttaagcagattccatctgagaggctgtaagaatctgcgtgttccggggttgggacgctaggccccagtggcatgggtttgtgagtgggatcttccgatcccgcgggttgcacggttccatggaaaaagcacagat

SEQ ID NO: 613587 - DNA, 576 bp, Homo sapiens
gtcttgtagcatttggagtatatcaatctttttttctggaaaaaacaaatacaccagttttttttttttttttttttttaaagagatgtaataattaactctttcacttaaaaattttggatttattctattatttcccttacatttcattgtttacatcatattttttcttacacatattttatctcctctttcttagccagttatttcttgcaattaactttgcaatttggcctctttttacacacagaaatcaatattcttctatttttgtagttctaattttgkgggttttatttattatctttgctttataactcttgtcattgcctttggccaaaggcaatagcactttataaatctgaacaaataagacattaattactaaaatgatcaattgaatgtaatctcaggatattttttagaaagcaaaatcaaggtctataagagaagaagcaaggagcacattctttatattaaagaagccataacattttgttcccagatgtgccttatgaatataccatttatgaatagaaagtagaaaaataccaagggtggccatttttgtttgag

SEQ ID NO: 613588 - DNA, 552 bp, Homo sapiens
ctcttattctagagctcagctgcaggcttcctaatagttgctttttcagcactaggtccaggggacagctccaagcagttccccactgagatccattagcattagcttggtgttgaacacagacccagcwagaatcagatagatcttcaagggcctcttgaattgtaccaggaagtatcactctgtgtttcatctgaaacagctctttcagggtccagcctgcactacaatagtcaatttcacattttttggttgtaagaaacaaaagtcaagttacttaagcacaaaggacatacattagctcacatagcttgtgagtctgggagtgcatctgccttcaagtctgcttggctccagaggcttcaataatgctaccagaatttattcttctgcaccttggatgagctcttccacatgatgaatgaggtgactacctacaaccccggactcaggccctgttagcttagaaaatccccaaaagacacaatctttcctgataacaccagcagcagtcccagggaagtcttagaaaaatccaattgccccaactaa

SEQ ID NO: 613589 - DNA, 328 bp, Homo sapiens
atacttaagtacatagcccacagactctrtggaggaactacatgatagaaactacaaagcaaccagcaaaaaatgtcacaataggatcaaagcctcacacataaatattaacgtgaattagtattggatgtaatgaatgtaaatagtctatatgttccacataaaaggaacagaggggttaagttggatttttttaaaaagacccatccatctactgtcttcaaaagactcatcatgtaaaaacacccataggctcaaagtaaagggttgcagaaaaatctaccatgcaaatggaaaaaaacaaaaaaagcaagggtcttacatattc

SEQ ID NO: 613590 - DNA, 328 bp, Homo sapiens
atacttaagtacatagcccacagactctatggaggaactacatgatagaaactacaaagcaaccagcaaaaaatgtcacaataggatcaaagcctcacacataaatattaacgtgaattagtattggatgtaatgaatgtaaatagtctatatgttccacataaaaggaacrgaggggttaagttggatttttttaaaaagacccatccatctactgtcttcaaaagactcatcatgtaaaaacacccataggctcaaagtaaagggttgcagaaaaatctaccatgcaaatggaaaaaaacaaaaaaagcaagggtcttacatattc

SEQ ID NO: 613591 - DNA, 328 bp, Homo sapiens
atacttaagtacatagcccacagactctatggaggaactacatgatagaaactacaaagcaaccagcaaaaaatgtcacaataggatcaaagcctcacacataaatattaacgtgaattagtattggatgtaatgaatgtaaatagtctatatgttccacataaaaggaacagaggggttaagttggatttttttaaaaagacccatccatctactgtcttcaaaagactcatcatgtraaaacacccataggctcaaagtaaagggttgcagaaaaatctaccatgcaaatggaaaaaaacaaaaaaagcaagggtcttacatattc

SEQ ID NO: 613592 - DNA, 573 bp, Homo sapiens
agcaaaaaatgtcacaataggatcaaagcctcacacataaatattaacgtgaattagtattggatgtaatgaatgtaaatagtctatatgttccacataaaaggaacagaggggttaagttggatttttttaaaaagacccatccatctactgtcttcaaaagactcatcatgtaaaaacacccataggctcaaagtaaagggttgcagaaaaatctaccatgcaaatggaaaaaaacaaaaaaagcaagggtcttacatattcttaaattagataaaacraactttaaaccaacaccagtaaaaaaagtaaaaaacagttaaaaaaaaaaaggacaaagaagggtattacgtaacaataaaggattcaattcgacaagacttaactgtactaaatgtatacacacccaacattggagcacccagattcataaaataagtgtgtctacacctacaaaatgacttacacagccacacaataatagtggggaacttcaacaccccactgatagtatgagatcatcaaggcaggaaactaacaaagaaattctggacttaaattcaacatttgacc

SEQ ID NO: 613593 - DNA, 573 bp, Homo sapiens
agcaaaaaatgtcacaataggatcaaagcctcacacataaatattaacgtgaattagtattggatgtaatgaatgtaaatagtctatatgttccacataaaaggaacagaggggttaagttggatttttttaaaaagacccatccatctactgtcttcaaaagactcatcatgtaaaaacacccataggctcaaagtaaagggttgcagaaaaatctaccatgcaaatggaaaaaaacaaaaaaagcaagggtcttacatattcttaaattagataaaacgaactttaaaccaacamcagtaaaaaaagtaaaaaacagttaaaaaaaaaaaggacaaagaagggtattacgtaacaataaaggattcaattcgacaagacttaactgtactaaatgtatacacacccaacattggagcacccagattcataaaataagtgtgtctacacctacaaaatgacttacacagccacacaataatagtggggaacttcaacaccccactgatagtatgagatcatcaaggcaggaaactaacaaagaaattctggacttaaattcaacatttgacc

SEQ ID NO: 613594 - DNA, 573 bp, Homo sapiens
agcaaaaaatgtcacaataggatcaaagcctcacacataaatattaacgtgaattagtattggatgtaatgaatgtaaatagtctatatgttccacataaaaggaacagaggggttaagttggatttttttaaaaagacccatccatctactgtcttcaaaagactcatcatgtaaaaacacccataggctcaaagtaaagggttgcagaaaaatctaccatgcaaatggaaaaaaacaaaaaaagcaagggtcttacatattcttaaattagataaaacgaactttaaaccaacaccagtaaaaaaagtaaaaaacagttaaaaaaaaaaaggacaaagaagggtattacgtaacaataaaggattcaattcgacaagacttaactgtrctaaatgtatacacacccaacattggagcacccagattcataaaataagtgtgtctacacctacaaaatgacttacacagccacacaataatagtggggaacttcaacaccccactgatagtatgagatcatcaaggcaggaaactaacaaagaaattctggacttaaattcaacatttgacc

SEQ ID NO: 613595 - DNA, 475 bp, Homo sapiens
actagaaaaacaagaacaaactaaccccaaagcaggcagaaggaaaaaaaataactaaaatcagagctgaactgaatgaaattgagatccaaaaatccatacaaataatcaactataccaaaagttggttttttgaaaggatgaacaagattaataggcccttgtattagttcattctcatgctgctaataaagacacacccaagactgggtaatttataaaggaaaaaggtttaattgactcacagtttagcatggctgaggaggcctcaggaaacttacaatcatggtggaaggggaagaaactatgtccttcttcacggggcggcagaacagagaagtgcccagcaaaaggaggaaacctccttataaaaccgtcagatctcataagacttatttgctatcacgagaacagcgtgagggtaactgcrcccatgattaaattacctcccaccaggaacctcccacaacacatg

SEQ ID NO: 613596 - DNA, 509 bp, Homo sapiens
agtggacaaaaataagcaagtgggggaaaagactattcagtaaatggtgctgagatagttggctatccacatgcagaagaatgaaactggaaacctacctttcaccgtatataaaaattaactcaggattaaagatttaatgtaagacttcaaactgtaagaatcctagaagaaaacstaggaaacactattctgtacattggccttgggaaagaacttacaactaagtcctcaaaagcaattgcaacaatggcaaaaattgacaagtgggacctaatcaagctaaagaacttctgtagagaaaaagaaactatcaagagtaacagacaatctatagaatgggagaaaatatttgcatctgacaaaggtctaacatccagaatctatatggaacttaatttaacaagcaacaaccaaataaccccattaaaaaatgggcagaagacatgaacaggcacttctcaagacatagaagtggccaatgaacatacaacaaaatgccccacatc

SEQ ID NO: 613597 - DNA, 594 bp, Homo sapiens
tggatataaaataaaagttgaaattatctttacaaaaaaaaaaggagatataaaatccagaaatctgttgagcatgtaatctatttacaaattccatttttatgatggtactgacagctatctgagagggctttcttgaaaacaattaaatcaatttagagataaaggcctaggctgagcacagtggctcatgcctataatctcagcactttggaaggccaaggcaggtggatccctcaagcccaggaattcaagaccagcatgggcaacatggtgaaaccctgtctctacttaaaatacaaaaaagttggcaaggcatggtagcgtgcacctatagtcccagctacttggggrgctgagataggaagattacaggagcccagaaagtcgaggctgcagtgagccatgatcatgccactgcactccaggctggatgataagtgtgagacccccatctccaaaacaaaaaaagagaaaaggaatagcccaaaaatgttgtatatgttctgactgatccacaaaccattcattcccccatctctctccccttccctgggcctacctattccctgagacacaacaatattgaaatta

SEQ ID NO: 613598 - DNA, 594 bp, Homo sapiens
tggatataaaataaaagttgaaattatctttacaaaaaaaaaaggagatataaaatccagaaatctgttgagcatgtaatctatttacaaattccatttttatgatggtactgacagctatctgagagggctttcttgaaaacaattaaatcaatttagagataaaggcctaggctgagcacagtggctcatgcctataatctcagcactttggaaggccaaggcaggtggatccctcaagcccaggaattcaagaccagcatgggcaacatggtgaaaccctgtctctacttaaaatacaaaaaagttggcaaggcatggtagcgtgcacctatagtcccagctacttggggggctgagataggaagattacaggagcccagaaagtcgaggctgcagtgagccatgatcatgccactgcaytccaggctggatgataagtgtgagacccccatctccaaaacaaaaaaagagaaaaggaatagcccaaaaatgttgtatatgttctgactgatccacaaaccattcattcccccatctctctccccttccctgggcctacctattccctgagacacaacaatattgaaatta

SEQ ID NO: 613599 - DNA, 404 bp, Homo sapiens
ctctccccttccctgggcctacctattccctgagacacaacaatattgaaattaggtcaataaataaccytccaatggcctctaagtgttcaaatgaaaggaagagtcacacatctctcactttaaatcaaaagctagaaaagtccccactcaaaacaatcactgtgaggctagcacttaaagatggttgactggaggcaccaggcactgacttcctccacaaagaaaaacagaaacagtgagtagatcatcactctttgaatggagcatctaaaagaacactggaattcagcagagaagtgataggaaatacctgaggcacacaaggagagaaaagtgaggcagctggctcagctgggattggctggaagcccagagattttctccaatgtgggaaaatgatg

SEQ ID NO: 613600 - DNA, 630 bp, Homo sapiens
aaaggaagagtcacacatctctcactttaaatcaaaagctagaaaagtccccactcaaaacaatcactgtgaggctagcacttaaagatggttgactggaggcaccaggcactgacttcctccacaaagaaaaacagaaacagtgagtagatcatcactctttgaatggagcatctaaaagaacactggaattcagcagagaagtgataggaaatacctgaggcacacaaggagagaaaagtgaggcagctggctcagctgggattggctggaagcccagagattttctccaatgtgggaaaatgatgaatgagagatccccactggtccatattcccacagccaactcttgcaatcttcgtgacaggagagcccctcratcctcacaggccagccctgagactagcataggaaactacctggagtctacaggatggcattgctccaaagagggagctcaccctaggtcccacataactcccaagattaaagcagctgcagcatgatgtcattttgagagcccacctcccaccagactgtattctgccctcaggcccaatagcccctgcatctccactgatatacccccatgttcacccagagagctacaggacccagcagtgcagttgg

SEQ ID NO: 613601 - DNA, 645 bp, Homo sapiens
ggcatgctagcccatacaatgtcctacaccttggggaaagagtggtgcagtgtaccagggaggctgccatgaggacaaaggcagtcaaagcaagtgttctccagagcctgagaactaccagcctgcaggccactaccactaacagcaaccccrctgcctcagcagcagtgctgccatgtacttgcatgtgccctgagtacaggcttttcccacctgctgctgctgctgtcaccactacccaagcattccgcacagaggcctggggattgcctatccctacccaccacagcctgtgccaatgtatgcaatcagatagacctaaggacaggccttctctgcctaccaccacctcttccacagctcaagcatgccacctggggatcacctcatctcattccatcatcaccctgtgcacacacacacattatcaggtctgacaaaagactcagcccatctgcgattggctcctgagcatgctgtctgggggcctagggatcaccacagcctaggcccatgggcaccactgggggacctgaggacaggcctgtcccacccagccacctcccccattgcttgagcatatcatctggggactgggaatagcctcacccatcattcaccttggatgtgtgcacacacaatcag

SEQ ID NO: 613602 - DNA, 645 bp, Homo sapiens
ggcatgctagcccatacaatgtcctacaccttggggaaagagtggtgcagtgtaccagggaggctgccatgaggacaaaggcagtcaaagcaagtgttctccagagcctgagaactaccagcctgcaggccactaccactaacagcaaccccactgcctcagcagcagtgctgccatgtacttgcatgtgccctgagtacaggcttttcccacctgctgctgctgctgtcaccactacccaagcattccgcacagaggcctggggattgcctatccctacccaccacagcctgtgccaatgtatgcaatcagatagacctaaggacaggccttctctgcctaccaccacctcttccacagctcaagcatgccacctggggatcacctcatctcattccatcatcaccctgtgcacacacacacattatcaggtctgacaaaagactcagcccatctgcgattggctcctgagcatgctgtctgggggcctagggatcaccacagcctargcccatgggcaccactgggggacctgaggacaggcctgtcccacccagccacctcccccattgcttgagcatatcatctggggactgggaatagcctcacccatcattcaccttggatgtgtgcacacacaatcag

SEQ ID NO: 613603 - DNA, 492 bp, Homo sapiens
tttaacatagcaaacaccatccctcgatttccagagaggagcccctgagtgcccctcctgtttgatgagaagcaggtgcagaataggctgctttaatcagtgctaaacgcacacgtcttactgaaacctgaatgtgctgtgcttcacaataccgtggtttgatggcaaatgcagatgatgaagagaacactacgcactccattaacaagtgtgttgtagctcagtcataactaatgataatgaagcgctgactgaacgctcagtgctaatactcgattgaactggagagcctccagctgtcaatgtgatattctggatrcaataaaaaatagattagattctcaccaggccgtgctagggctccatcctaagaaccctctgttgagacgtatgcaagaatatccctaaaatggcatgaataacatcttggcttgaaatgttaatattgaaaatgtgcctgactgttaattttgataatgttttctgaggtct

SEQ ID NO: 613604 - DNA, 492 bp, Homo sapiens
tttaacatagcaaacaccatccctcgatttccagagaggagcccctgagtgcccctcctgtttgatgagaagcaggtgcagaataggctgctttaatcagtgctaaacgcacacgtcttactgaaacctgaatgtgctgtgcttcacaataccgtggtttgatggcaaatgcagatgatgaagagaacactacgcactccattaacaagtgtgttgtagctcagtcataactaatgataatgaagcgctgactgaacgctcagtgctaatactcgattgaactggagagcctccagctgtcaatgtgatattctggatgcaataaaaaatagattagattctcaccaggccgtgctagggctccatcctaagaaccctctgttgagacgtatgcaagaatatycctaaaatggcatgaataacatcttggcttgaaatgttaatattgaaaatgtgcctgactgttaattttgataatgttttctgaggtct

SEQ ID NO: 613605 - DNA, 612 bp, Homo sapiens
aaaaatagattagattctcaccaggccgtgctagggctccatcctaagaaccctctgttgagacgtatgcaagaatatccctaaaatggcatgaataacatcttggcttgaaatgttaatattgaaaatgtgcctgactgttaattttgataatgttttctgaggtctgaatgttatggggatttcccatttttcctataaaaccattccttggcgactttttgtgattattccgaaaatgattagagaagcagtagagatcagaggtcgagatcaaagttatagaaatcaggattacctggttttcaatmgaagtcctatcattttttttggttgtgtgatcttgggccttagtttccacttttgtaaaattgggaaaacaacagaactttcctcctccagctgttgtgaggatttgacaatgctctgttcctgtaatgacggaaattgccagatgaattgcacctccagagttggagtattctggtctatttaaatatggctttagaaaaataatccagaaacttctgcataggacatttaaatctgggatgagtttgcaaatggtgtcagtgtcccaaatgaagttaagtccaggtcaaggcaatcata

SEQ ID NO: 613606 - DNA, 639 bp, Homo sapiens
aatgctctgttcctgtaatgacggaaattgccagatgaattgcacctccagagttggagtattctggtctatttaaatatggctttagaaaaataatccagaaacttctgcataggacatttaaatctgggatgagtttgcaaatggtgtcagtgtcccaaatgargttaagtccaggtcaaggcaatcataatacttcaaattcaacaagttctctaggctgcagacaccactatttttttgtgcaagtttacattattaggacttaacacagtacttggcatatagtaggcataaaagaacaataaaaatgacccaacaactggtctccctgcctccagttttgccttcttcctagtcttgttttactgccaatgttttctttctaaatgcaaatctaaacctgtttccagcttgcttaccgcaatcaagaaagaggtgctctttgtttaccaggagcaccagctgtctgaatgatctaagtctagaacctccaggctctacccactggtggagctggtgtcaagggagggccattagccggctcccagtgggaagtggatggcatactcaatgtgggtcacttaagcatcataaatagattatttgccaagatataggaaaggatttagagacacc

SEQ ID NO: 613607 - DNA, 639 bp, Homo sapiens
aatgctctgttcctgtaatgacggaaattgccagatgaattgcacctccagagttggagtattctggtctatttaaatatggctttagaaaaataatccagaaacttctgcataggacatttaaatctgggatgagtttgcaaatggtgtcagtgtcccaaatgaagttaagtccaggtcaaggcaatcataatacttcaaattcaacaagttctctaggctgcagacrccactatttttttgtgcaagtttacattattaggacttaacacagtacttggcatatagtaggcataaaagaacaataaaaatgacccaacaactggtctccctgcctccagttttgccttcttcctagtcttgttttactgccaatgttttctttctaaatgcaaatctaaacctgtttccagcttgcttaccgcaatcaagaaagaggtgctctttgtttaccaggagcaccagctgtctgaatgatctaagtctagaacctccaggctctacccactggtggagctggtgtcaagggagggccattagccggctcccagtgggaagtggatggcatactcaatgtgggtcacttaagcatcataaatagattatttgccaagatataggaaaggatttagagacacc

SEQ ID NO: 613608 - DNA, 417 bp, Homo sapiens
atcccaataacaagctcaaaacattcttgttaaaccagacaaaccaataccaaaaaaccaaccatgtgcctggctgtggtaggcagcctccaagatgacccctagtgacccctgcctcctgggaatcacaccctgtgtagtcccctcccactgagtatgggctggacctaacgattcccttctaatgacctgatggtgtaagactcaaaagactaggtcacaaaaggatgtgtggcgtcactctcactgatggctccttctaggagaagccagctaccatatggtagaggccaggtggtgaggaactgaggcccctrctaacagccatgtgagtgaattatcgtggaagctgccctccagcccaggctaatcttcccatgcttgagtcctgctgacagcttgttgagatatcatgag

SEQ ID NO: 613609 - DNA, 533 bp, Homo sapiens
catgttagcctcagcgcaggaaattaagaaataaaagtcaatgtttgagtcccactccaattatttcagaatctctaagtgtggggtccaggcatcagtgttttaaaaacaacccaagtgattccaatgtggcataatcccaagggattattgtaaagggggttaattaaagaacccagttgcatggattgtcataaggattacatgaagtaataaatacagagttcctaaggagtattaataaagatgatgatggattctgtgggagggatcaggatggaaatgagactaagatagcccagagcctaccatcacagctgaattttcttgttctttccctgcatgccaggcaccgttctaagctcttcacttgtgtgaactcaggcagtctggctccattgaccaggctctttatccacatctctataccatgagaggatgacagtccttgactcagatattaaagctatayggcttactttgtgggagttggtgactcaggttatcagggagtgatgtgatcagaattgtgt

SEQ ID NO: 613610 - DNA, 533 bp, Homo sapiens
catgttagcctcagcgcaggaaattaagaaataaaagtcaatgtttgagtcccactccaattatttcagaatctctaagtgtggggtccaggcatcagtgttttaaaaacaacccaagtgattccaatgtggcataatcccaagggattattgtaaagggggttaattaaagaacccagttgcatggattgtcataaggattacatgaagtaataaatacagagttcctaaggagtattaataaagatgatgatggattctgtgggagggatcaggatggaaatgagactaagatagcccagagcctaccatcacagctgaattttcttgttctttccctgcatgccaggcaccgttctaagctcttcacttgtgtgaactcaggcagtctggctccattgaccaggctctttatccacatctctataccatgagaggatgacagtccttgactcagatattaaagctatatggcttactttgtgggagttggtgactcasgttatcagggagtgatgtgatcagaattgtgt

SEQ ID NO: 613611 - DNA, 563 bp, Homo sapiens
ggctgggcacagtgcctcacacctgtaatcccagcactttgggaggctgaggccagtggatcacaaggtcaggagtttgagaccagcttggccaacatggtgaaaccccgtctctactaaaaatacaaaaattagctgggcgtggtggcaggcacctgtaatcccagctamtctggaggctgaggcaagagaatcactggaaaccagaaggcagaggttgcagtgagccgagattgagcccctgcactccatcctcggtgaaaaaacaaaactctgtctaaagaaaaaaaaaacaaacaagaatttagattcttgttaacacttggtattggatgatttaacaattttgttaatctggcagacatgaaattttatcttattgtggttttaatttgtattagttttattactaatgaggttggtttttatttcatgtattttggaccatttgtatgcctttttatgacttttacttattttgctatttagttattttatctgttattgatttgtaggatttcttgatgtacttttgtcagtcagtagtctatatctagtaagga

SEQ ID NO: 613612 - DNA, 569 bp, Homo sapiens
tgtgcatgacaggggaaaaaaagagattcacatagtaaaaagaggcttagatgcacagccaggaaaacaagtcagacaggaagaaagacaaagacacaaaggtatactgactaagagacagcaagagaataagaatggagaggatagggaggaatagagacaatgacaaaaagaacagagaagaaggcatagacagagccagagaaaacagagccagagtagcagagaaagayagagatacagagagagacagagagaaagggagtgagaagtggaacaaatgatatcaagagatagaagaaggagagagagagagagaaagagagagagagaaaaaaaaaaaaagaaacccaaagatggaaagacagtcatggcatggggggatacagacagaaagagaatcgtgtgtttgtgtgtgtatatacgatatacataatatatgtatatgtatgtattttatggtgaatgtggagccaccttctgaatatattctgcataggaccttcctggtttttggtcagatttgttctaactatttttggagttgtatgaaggccagaggcaatgct

SEQ ID NO: 613613 - DNA, 569 bp, Homo sapiens
tgtgcatgacaggggaaaaaaagagattcacatagtaaaaagaggcttagatgcacagccaggaaaacaagtcagacaggaagaaagacaaagacacaaaggtatactgactaagagacagcaagagaataagaatggagaggatagggaggaatagagacaatgacaaaaagaacagagaagaaggcatagacagagccagagaaaacagagccagagtagcagagaaagacagagatacagagagagacagagagaaagggagtgagaagtggaacaaatgatatcaagagatagaagaaggagagagagagagagaaagagagagagagaraaaaaaaaaaagaaacccaaagatggaaagacagtcatggcatggggggatacagacagaaagagaatcgtgtgtttgtgtgtgtatatacgatatacataatatatgtatatgtatgtattttatggtgaatgtggagccaccttctgaatatattctgcataggaccttcctggtttttggtcagatttgttctaactatttttggagttgtatgaaggccagaggcaatgct

SEQ ID NO: 613614 - DNA, 595 bp, Homo sapiens
ctgctactacctacttatataaagtatacttttttaaaatctccacttattttcttctcttttcctttcctttcattttatttattttttgtcaaaagtttcttcagagttgttaacgctttagtaggccataacctgcagttctatttcactgatggtaaatacttgaaactgaaatttgatctatattctttagttaatattttttgtagggtccctgaagaaaaatacaggcataaggctatctgagcaatgtctttaatagttatttgttatataatgccagacactatttatctttgatactaccctgtccccaccttgaaatcctttgtgaggatctagactggcaaaatataatgtaaataggatctctctgtggttcacaaaagttttccaattataaattcaactttctctaaaggaaatacatttcactgccatattaattgccaattggaacattccctagctcgaccataacacaatgccatggttcattayctgcagatactcgactcaccgagccagtggttgcatgcagatattccaaatgacttcataaacacaggagcacatactgttaagcagtgat

SEQ ID NO: 613615 - DNA, 564 bp, Homo sapiens
ggatgtcttatattattttaaatttctatttggtgactgacttgtgtgcattttcctcaacctaatgcacatatctagaattcttgcttataaatttaagtgagatttgacctgtgttccattttccattgacctggctagttgatttaatttttccgctatgaccacctccctccctatgattgagtgtctaatggtgattggttcattgataatacaatcctttagggtctttttaaaaaacgcaggttcctggacctttctttgatgactgaagcagaaagtctggaagttaggtgcaatccacattattttaacaagcacccytggagtaaccatttccctaatcagagttcatctgtaatcatatatattgctttaggagaaaactcaacctctacttttcagtaccgctatctattccaattcgactatatgtgattacttgatagcttaattttccatgttagatccccttttcttcagcctctaatagaagttgtctgtctttcaggcctttactaacagtaagacactcataacttctgtctactgccagtcaac

SEQ ID NO: 613616 - DNA, 587 bp, Homo sapiens
caccacactactgaaccagactcttgggataattaagcttgccaaattctcagttcacatgatatcacatggattaaaaactttttttttttactccagcttttgaggcactggcagatactgcacaaaataaattgtgggctttacaacaaaatagtaatctgaactgcctggtagaaataatgatgaccatgaatcctgggttttccatgatggtctcggttacttataattttattttatttttaaataaaataaatttattcattatgcaactaaatgaaatttatttttcatgagcttgtagtgctttttatttaaatttataagtggtgaaacatcctttgttagaccacatgcttcaatattttatttggaaaatatggatkcttaatgctgttttttttttaaagcaaatctagatctagattatgctgacaaaaatacgaaaattattgtttcctggaaaaccagctttcctggcagctgtatctcttagaatgtgacagattttaaaggtaaaacatgctgcagctagagcaacagtttgccttaatgccagttttaacccacactgatgcagtcca

SEQ ID NO: 613617 - DNA, 582 bp, Homo sapiens
acaatttaatatttagttttctaattgattaataacaatactacttagcttcatgaaacacattttatgtatatatatatatattatatatatatatatatacacacacacacagtcctaagccactatatcctttgtgcttaaagtcaattagcaagatgactgggaaaaaaaaaaacaacaaaacatcatttgttgaataaatacatagaaaagacttatacatgattttaacctgttttagagagwgatagactgagtcccagacaggtgaatcactaaaatctaaactcaaattgcataactttagtattgggattaatctgtcatataattttatgtatttaaatgtgttttatgctctctttatatatttatgcaaatctgagtgaagttaacatcaattatcttaacagtggtggcactggaagaattactagtctgcatttaatgcctattataattagttaacttttatagacattaatccaaacccaaactttcttgtctaaattcctttagattatgaagctttttgtgtaacatcagtttttctatcttggattgaactagaaacatgta

SEQ ID NO: 613618 - DNA, 629 bp, Homo sapiens
cattttctctgtcttcactctctcatttgtcaccttcctcaatgaaatgacaggtaaagcaatctgactttgaactacaaaattccttagagccatttgcccttttcctacaagggctascttgctttactaaaccctatacagtcaacatgagtcttataagaaaactgcagaagattcagtgtgaggaatcctattactggaaactttaggttattaccatcagattaggtttattggcacaagactaattcataggtgcaagtcaaagccagagtagacataagtaattccacttagacattaatgcatgtcttaaatgaaaaatatcagatcataaaactgtgtttgtaagtgtgtttgtctctaagaaaaagagagaaatctgggtagtgggggagatgagaattctcagggagagagctgagaagtatcctggggctcaggtgcctgcaggaagaaacatgtttaatgcagtttcttgctgggtccaccctaattgtcccccttggttaaagataaagcttatttttttgtgctcgtcaccagttttcttcaggtaagccaaagtcgcagatgctaagtcagttctctctgcagtcactcagacagcttcttgtgcagcagtt

SEQ ID NO: 613619 - DNA, 629 bp, Homo sapiens
cattttctctgtcttcactctctcatttgtcaccttcctcaatgaaatgacaggtaaagcaatctgactttgaactacaaaattccttagagccatttgcccttttcctacaagggctagcttgctttactaaaccctatacagtcaacatgagtcttataagaaaactgcagaagattcagtgtgaggaatcctattactggaaactttaggttattaccatcagattaggtttattggcacaagactaattcataggtgcaagtcaaagccagagtagacataagtaattccacttagacrttaatgcatgtcttaaatgaaaaatatcagatcataaaactgtgtttgtaagtgtgtttgtctctaagaaaaagagagaaatctgggtagtgggggagatgagaattctcagggagagagctgagaagtatcctggggctcaggtgcctgcaggaagaaacatgtttaatgcagtttcttgctgggtccaccctaattgtcccccttggttaaagataaagcttatttttttgtgctcgtcaccagttttcttcaggtaagccaaagtcgcagatgctaagtcagttctctctgcagtcactcagacagcttcttgtgcagcagtt

SEQ ID NO: 613620 - DNA, 617 bp, Homo sapiens
gtcaccttcctcaatgaaatgacaggtaaagcaatctgactttgaactacaaaattccttagagccatttgcccttttcctacaagggctagcttgctttactaaaccctatacagtcaacatgagtcttataagaaaactgcagaagattcagtgtgaggaatcctattactggaaactttaggttattaccatcagattaggtttattggcacaagactaattcataggtgcaagtcaaagccagagtagacataagtaattccacttagacattaatgcatgtcttaaatgaaaaatatcagatcataaaactgtgtttgtaagtgtgtttgtctctaagaaaaagagagaaatctgggtagtgggggagmtgagaattctcagggagagagctgagaagtatcctggggctcaggtgcctgcaggaagaaacatgtttaatgcagtttcttgctgggtccaccctaattgtcccccttggttaaagataaagcttatttttttgtgctcgtcaccagttttcttcaggtaagccaaagtcgcagatgctaagtcagttctctctgcagtcactcagacagcttcttgtgcagcagtttcacaactggaattaa

SEQ ID NO: 613621 - DNA, 573 bp, Homo sapiens
aaaacaaatccacagatttgtggatatgtgcattcaatagcctgtgtccatttatcttcacacattttgggcatgggctagtgtctggctctacaatgcctgctgagccagacttttgagagacagataaagattagggtatcaaagagaacagtgcggtattaggggatgtgtttaagaattcagaacatttcatattttgactggataaaggatgggaaaataatyctcaaacacctctctctttcctttgcttttcctccagtgttatcagtttacactaaatatcaaatctatcagtgatatttagcattactcaggatgctgccataccactgtagaaggaaaaatgagagagaaccccttcttcaacgttgtcacagcccagagaaaagacacctaaagcgaatgtaacctttgtaacctgattcccaaccacaagactctgaactctattatgttcctttgtcttttggcttaggaaaattcatgttgttgacctaaggtgaacagtgatgaacacatcctcctggttagttcagaaattcatcagccttccccaggcaaactgtt

SEQ ID NO: 613622 - DNA, 519 bp, Homo sapiens
ctgaacacacaaaaattaaagaagcaaccaggggcgttaaagtatccctgacataggtagggttaatatcataatttcattgtccatgttcttttctggctttttctgttctgtttgtttagaggatagatcaggtccatcctggcttctttattatttatttgttaatttttacacagagcctcactctgccccctaggctgaagtacagtgatgtggcytttgttcattgcagccttgaactcctgagctcagaaatcctcttgcctcggtctcccaaagtgctgggattacaggcatgagccattgtgcctggtcattctggctactttttatgtgggacgtgggcaatccactgagcatccagacaccagggactgggctgcaaagaacctcaaaatcacagcctgggaatactagtgaagaaacacgagttagatttgcctgcatctgagtggctgggaagagagagagagagcagagcacgagaaaggtttttaaattccgaaaggactatac

SEQ ID NO: 613623 - DNA, 567 bp, Homo sapiens
ctgaacacacaaaaattaaagaagcaaccaggggcgttaaagtatccctgacataggtagggttaatatcataatttcattgtccatgttcttttctggctttttctgttctgtttgtttagaggatagatcaggtccatcctggcttctttattatttatttgttaatttttacacagagcctcactctgccccctaggctgaagtacagtgatgtggcctttgttcattgcagccttgaactcctgagctcagaaatcctcytgcctcggtctcccaaagtgctgggattacaggcatgagccattgtgcctggtcattctggctactttttatgtgggacgtgggcaatccactgagcatccagacaccagggactgggctgcaaagaacctcaaaatcacagcctgggaatactagtgaagaaacacgagttagatttgcctgcatctgagtggctgggaagagagagagagagcagagcacgagaaaggtttttaaattccgaaaggactatacatggaactccaaaactgtgggtctagaaggaaactctgagggcacttc

SEQ ID NO: 613624 - DNA, 589 bp, Homo sapiens
gagccacacagaataatggtataccaaaacattttttttgaagatagattttacaaagatgacaagcaatcgtatgagattatggaggttaactcttaacacggctgtacataaaactgaaaaaacatttgctttaaaaattatcaaaggaaaatgactccatttttttaaataattgtgcctaccttaaacaatgctgtctatgaaatattgacacctatatyatccagacaattctagaatcacctcttttaaggagtaagtaaacctccttaccaaaaaagagaaagtcgagtcaggattcttgttggcacatgctaaaccagctatctggcaatgttggtcctatcattcacatattctgtgtttttaggaaatatgatctgcaccatcacacaccatgtccaggaggagcttctgccatgtcagtgagggcaaagcagtgtgtagagttcattgtcaggttgcagaggcagaaggtagcagaaaagataaaccatttgcacatatttctccctgaggcaagggacctaaacaaaactcttgtattaggagtattatacatcaaggaattcaaagcaatatttac

SEQ ID NO: 613625 - DNA, 606 bp, Homo sapiens
gggaaagtctgtttcatggctggcctggaagtggtatacataattttccacttasgttgcttttggcagcatcaaattacacagtagcaagctaactgcaaaggaaactggaagatgtggtgtgtcctagcatccaggaaaaaaaaaaggaattggtgaacatctagctgggttctaccacattaccaaatagatgttaactgtttttggactgtttgaggcaagaaattgtgctcctatttatatctgcagccatgtggcatgttgcattgtaggagcgaagtaaatatatcttgatgatgcttatgccaacttcacattcattttaagtctgtaaagtcaccttctttttaagttattggctcatttgtgatgccaggctaatttcagccactgttacgtacactgaagcactatcttattttagtgacttgaaagggatcatcatactagctaatacctaccaacagaaaattccttaggagtgtttttaccccagaacctcaatctttattttagggtcatgtcattatcagagtggctagatttgtactggtttagccaagtgtctcctagatcccaatatgagattaaaattgtattaga

SEQ ID NO: 613626 - DNA, 474 bp, Homo sapiens
caggttgagttgggaagcagctgcctatttttagttattttaagacctatctttaatgaaggaaacttgtgtcagtggaggaagtcccgtgtacagaggtgtcttcctstctacgccaggaagacaggaataactaagtcactagaggctttgcaatagggaaggcaaaaagacctgagtctatgtaacaagccttgcctcagaccattttgttttagctgggctttctactttctttgtctcagcaggtaatggtatttaggtctgaaacctgaattcaatggatgacctaggtaacaataacttagggcaataatctggcaggtcattcaggaaatggtcacggatccgttaccccccttgctgaaataagtcaattggtcaatgggtaaagaaaatattctcatgctctgtgattgttttttgagaaaaatgaatgggcctttaagagaatagatgatgattagtagcaag

SEQ ID NO: 613627 - DNA, 417 bp, Homo sapiens
gattagctcagatatttttactagtaatcatccacttagagactacaacttaattagcattactttggaataattagttaagcaaatatttattgaatgcctactaagtgagtgagtgctaggagtgatggatgctaccagaccctargctaaacttcttttttttttttcaattatactttaagttctggggtacatgtgcagaaagtgcaagcttgttacataggtatacatgtgccatggtggtttgctgcaaccatcaccccgtcacctccattaggtatttctcccaatgctatccctccctccactcccccccgccggtgacaggcccaggtgtgtgatgttcccctccctgtgtctatgtgttctcattgttcaattcccactgatgaatgagaacatgccgtgtttggt

SEQ ID NO: 613628 - DNA, 474 bp, Homo sapiens
caggttgagttgggaagcagctgcctatttttagttattttaagacctatctttaatgaaggaaacttgtgtcagtggaggaagtcccgtgtacagaggtgtcttcctctctacgccaggaagacaggaataactaagtcactagaggctttgcaatagggaaggcaaaaagacctgagtctatgtaacaagccttgcctcagaccattttgttttagctgggctttctactttctttgtctcagcaggtaatggtatttaggtctgaaacctgaattcaatggatgacctaggtaacaataacttagggcaataatctggcaggtcattcaggaaatggtcacggatcygttaccccccttgctgaaataagtcaattggtcaatgggtaaagaaaatattctcatgctctgtgattgttttttgagaaaaatgaatgggcctttaagagaatagatgatgattagtagcaag

SEQ ID NO: 613629 - DNA, 474 bp, Homo sapiens
caggttgagttgggaagcagctgcctatttttagttattttaagacctatctttaatgaaggaaacttgtgtcagtggaggaagtcccgtgtacagaggtgtcttcctctctacgccaggaagacaggaataactaagtcactagaggctttgcaatagggaaggcaaaaagacctgagtctatgtaacaagccttgcctcagaccattttgttttagctgggctttctactttctttgtctcagcaggtaatggtatttaggtctgaaacctgaattcaatggatgacctaggtaacaataacttagggcaataatctggcaggtcattcaggaaatggtcacggatccgttaccccccttgctgaaataagtcaattggtcaatgggtaaagaaaatattctcatgctctgtgawtgttttttgagaaaaatgaatgggcctttaagagaatagatgatgattagtagcaag

SEQ ID NO: 613630 - DNA, 540 bp, Homo sapiens
aagctcttgggctcatattacaaggcattttcccatttccttttctatggtctagcttmggcagaaaaaatggacaacaggctggaggaggataaaaaataaacaagagagggaaaagagtctctctctgagcaatcttataaaacaaagcataaatctttaactgcctgacctttcagctcacatgattcttggtgcaggagggataaatcagagctcatctggaggctcaggggagggcagctttctgccttccaacaggaagcagcctatttgcggaaagcacataggtgtgtccttgtttttaatagaagctcaattgatttcctagaaattgaaatgttcccttggttgggaaatgaaatttctacttggccgttccacctctggccacctcttggtggcaggtcttattgcatattgctggaattaacagagaaaggccaagtaaaaggtcttgggggcagacttcctcataacagggagcccctctcctagatgcaaataaaactggcaaaggttgagggttttgcagatgca

SEQ ID NO: 613631 - DNA, 553 bp, Homo sapiens
cagtaaatatccaaactgtctgggatgaaaagtatgagagaaaaaaatttatacagagtcaaaggacatcatctctttccaattgtattatttttctctcactgcatagcaaattaccacaaacttagaggcacaaaacaacagtattttttatcttactttttttttggaggtcaagtgtccagtgtttgtgactggattctctgctcagggtctcawtaggatgaaattaacatgtcacctaggcctgaggttctcatctgggcttggagtcttcttctaaactcacttattgttgtcagaattcatttccttgtagttttaggactgtgagtgtccattatctttctaggtattagccagggacctctctcagtaactagaggattttggagttatttaccccaggagtggcccctgtgggcagttcacaacatggattttggccttcttctaggccagtgggaacatctgtctgacctccttttctgtgaccagttgcagaaagtgtcatattttaaagggcttaagtgattaggtcaggcccacccag

SEQ ID NO: 613632 - DNA, 593 bp, Homo sapiens
tttagaagggacaaatttattaaagtataagaaaagtttaaaataatgggccaagaaggagtgacaacattaatatcaagatatgattagatttagaattaaagggcctaaatatatgacatgagacattatgtaatcataagaaaaatgtaagggaaatatataataatagtgaacttgtatcttgcaaataactgcctggaagaaatactgaagttttagcaatgcaaagctaacttgataagcaacattttcatcgaaaattctaatatmcctcttataaactaaatattctggtgaaatgataaatataaaaaatatgttccattatttattttatttatgttaatatttatacagagatgacatgtgtgtgcatatttaatcatgtatccctcaaatggagaacatatatttggtgtttggagagtatttacaaatatttgtcatgtgcttggctacagagtaaattatttatagattaaaataattagatatgctcatgtcaccatctttagtcatatctaataaaagtagaaattaataatcaatttttaccaaaaatataaatgcagtttaaaaaccaaaaaaca

SEQ ID NO: 613633 - DNA, 504 bp, Homo sapiens
atttgcaattgcatagtcatatacttctatgataattcatgttataacacatttgattttcaggcgctggtaaatatatgagtagttattactttttgtcacagaaatcataatgttaggaatgcctgagaaataaagcaagacaattctaactttctgagaatttcattgttagaccacttctacaacttttctgttttaatagtatgaatctttgcaactttgttaagtactaaaaattttacatgaattcaagactgactggattgaatatagctttattcattttcgttcttgagtttctatgtttcatgaaagaaccaaaaattatcttttatttttctggtaattgtatttttatattctaatgtrcatcttcttacacagattgggtcaaataattcacaaaaatataaattaaaagctataataaatactattttcaatattaaaagttatattaacctaattttcagatttcaacccaagctggggtccgaggga

SEQ ID NO: 613634 - DNA, 524 bp, Homo sapiens
ttcttttgtgtagatctgaacttccatctggtttcactttccctctgcctgaaggatttcctttaatattccttgtagtgaggacttgcagttaatgcattcttcaagctttttaatgtctgaaagtsttcatttcactatcatttttgaaagatatttttgctgggtgtagaattctagactggcaatcgttttatccttaagtattttatagaagtcactccactatcctctggtttgcattgtttcttttcttttttttttttttaagagaaggtctcactctgtcacccaggctgcagtgcagtggcatgatttcagctcactgaaacatttatctcctgggttcaagcaatcctcccaccccagcttcccaagtagctgggactacaggcatgcaacatcacactcagctgatttttgcattttatgtagagtccacgttttgccatgttgcccaggctggtctagaactcctgggctcaactgatcatcctgccttgacctcacaaagtgctgggata

SEQ ID NO: 613635 - DNA, 580 bp, Homo sapiens
tattaagtacatacttcctattttaataattcacttgctgtgctcttaaaatctctatgagagaagcagatattttactcgtgtcttttggcaagagattcaaaagcaaaagtagcagggctgtaaaattycataaaatttgtgggatttttaaaagctaaattattcaatattttgtattgttattgcactcatatattgcccggaatatatatacagcaacccagcaacagtgatttcaacaaaagtaaggtaaataggtctacaaagcatttgatttccttattagataagtgaagttttcatagaggaagtgcaaattcagatcaggttacataagcttaacaattattcaaaccttatataaaattaaatctaaccctcaccactactaatctgtaaggaatcactgtcaggaatctacaggacttggctcatatttacattcgacgcacacttagaaatttcataaatgatgagatgcaggccaaggggattcctcaaagggctccacccaaaaggtaaagaaagagagttaaacagagaattaccacttatgtatttgtgggtaatcagctta

SEQ ID NO: 613636 - DNA, 580 bp, Homo sapiens
tattaagtacatacttcctattttaataattcacttgctgtgctcttaaaatctctatgagagaagcagatattttactcgtgtcttttggcaagagattcaaaagcaaaagtagcagggctgtaaaatttcataaaatttgtgggatttttaaaagctaaattattcaatattttgtattgttattgcactcatatattgcccggaatatatatacagcaacccagcaacagtgatttcaacaaaagtaaggtaaataggtctacaaagcatttgatttccttattagataagtgaagttttcatagaggaagtgcaaattcagatcaggttacataagcttaacaattattcaaaccttatataaaattaaatctaaccctcaccactactaatctgtaaggaatcactgtcaggaatctacaggacttggctcrtatttacattcgacgcacacttagaaatttcataaatgatgagatgcaggccaaggggattcctcaaagggctccacccaaaaggtaaagaaagagagttaaacagagaattaccacttatgtatttgtgggtaatcagctta

SEQ ID NO: 613637 - DNA, 580 bp, Homo sapiens
tattaagtacatacttcctattttaataattcacttgctgtgctcttaaaatctctatgagagaagcagatattttactcgtgtcttttggcaagagattcaaaagcaaaagtagcagggctgtaaaatttcataaaatttgtgggatttttaaaagctaaattattcaatattttgtattgttattgcactcatatattgcccggaatatatatacagcaacccagcaacagtgatttcaacaaaagtaaggtaaataggtctacaaagcatttgatttccttattagataagtgaagttttcatagaggaagtgcaaattcagatcaggttacataagcttaacaattattcaaaccttatataaaattaaatctaaccctcaccactactaatctgtaaggaatcactgtcaggaatctacaggacttggctcatatttacattcgacgcacacttagaaatttcataaatgatgagatgcaggccaaggggattcctcaaagggctccacccaaaaggtaaagaaagagagttaaacagagaattaccacttaygtatttgtgggtaatcagctta

SEQ ID NO: 613638 - DNA, 175 bp, Homo sapiens
tgtatatatatatatatatatytatatatatatatatatatatcccaaattagctttttgtctgtcatgtatgttgcagatctatttccccagtctgttgacttttgactttgaggcatttttctctcatacaaaattttaatttttatggagtcaaatacaaccttggcgccga

SEQ ID NO: 613639 - DNA, 175 bp, Homo sapiens
tgtatatatatatatatatatctatatrtatatatatatatatcccaaattagctttttgtctgtcatgtatgttgcagatctatttccccagtctgttgacttttgactttgaggcatttttctctcatacaaaattttaatttttatggagtcaaatacaaccttggcgccga

SEQ ID NO: 613640 - DNA, 175 bp, Homo sapiens
tgtatatatatatatatatatctatatatrtatatatatatatcccaaattagctttttgtctgtcatgtatgttgcagatctatttccccagtctgttgacttttgactttgaggcatttttctctcatacaaaattttaatttttatggagtcaaatacaaccttggcgccga

SEQ ID NO: 613641 - DNA, 435 bp, Homo sapiens
gttttggtgttttgaaaagatttacccctataaacaaatgagacattaacagaaaccaagaatcacttctagggtgaaaagaatcatgaaagtgctgaattatattcctatgactggtacttggcattagtaatttattaccatcattcagcagccagaggggccctggactgaaatgmaatccatggcccatttttgttcttctttagagtgttctggcccagttctatgtatgctgaccagcacgcccataagcttcattggccctttcagtgcaggggccttggctgtggcatctacaaggacatttccttttatatggtcagtctctcttttgatgtcctctgcaattaattttagtcactttttggcagcaaagcagcattctaacaagctcaaaatctcaatgatgttgtatggaaaagtccttgggga

SEQ ID NO: 613642 - DNA, 611 bp, Homo sapiens
ttctaggaccaccttcccttggtgtggggtcgaaaacctgtaggtgctgttctaatgttagtttattagctttgcctgctagaaaastggtagcagcaatagctctaagacatcaaggccaccctgaggccacctggtctatctgcttagaaaattaggctactggccttggaatgcgccccagtttttgggacaagattacccaaagcctatgccttgctttttggtcacataaagaaaaattgtttatccaacttggggactccacggctgcagcagagcccaatttctccttgagagtattgaaggttgcttgcagttctcattacattctaggagctctaaatctttccctctagagtatcatataaaggcttggctacatgcccaaacctgggcacccataagcagcagtacccagccatctcctaaaaaaagcacacagtcaatttttggacagggacccttgggtgactaaaataacttttttatcttctagggatgttgatcagttccagaggttaagacagattccaaatatttaagtctttcagtcaaaatctgagccctgtgtggtgatgccctatatctgttaccaacttaacagtatt

SEQ ID NO: 613643 - DNA, 611 bp, Homo sapiens
ttctaggaccaccttcccttggtgtggggtcgaaaacctgtaggtgctgttctaatgttagtttattagctttgcctgctagaaaagtggtagcagcaatagctctaagacatcaaggccaccctgaggccacctggtctatctgcttagaaaattaggctactggccttggaatgygccccagtttttgggacaagattacccaaagcctatgccttgctttttggtcacataaagaaaaattgtttatccaacttggggactccacggctgcagcagagcccaatttctccttgagagtattgaaggttgcttgcagttctcattacattctaggagctctaaatctttccctctagagtatcatataaaggcttggctacatgcccaaacctgggcacccataagcagcagtacccagccatctcctaaaaaaagcacacagtcaatttttggacagggacccttgggtgactaaaataacttttttatcttctagggatgttgatcagttccagaggttaagacagattccaaatatttaagtctttcagtcaaaatctgagccctgtgtggtgatgccctatatctgttaccaacttaacagtatt

SEQ ID NO: 613644 - DNA, 611 bp, Homo sapiens
ttctaggaccaccttcccttggtgtggggtcgaaaacctgtaggtgctgttctaatgttagtttattagctttgcctgctagaaaagtggtagcagcaatagctctaagacatcaaggccaccctgaggccacctggtctatctgcttagaaaattaggctactggccttggaatgcgccccagtttttgggacaagattacccaaagcctatgccttgctttttggtcacataaagaaaaattgtttatccaacttggggactccacggctgcagcagagcccaatttctccttgagagtattgaaggttgcttgcagttctcattacattctaggagctctaaatctttccctctagagtatcatataaaggcttggctacatgcccaaacctgggcacccataagcagcagtacccagccatctcctaaaaaaagcacacagtcaatttttggacagggacccttgggtgactaaaataactttyttatcttctagggatgttgatcagttccagaggttaagacagattccaaatatttaagtctttcagtcaaaatctgagccctgtgtggtgatgccctatatctgttaccaacttaacagtatt

SEQ ID NO: 613645 - DNA, 309 bp, Homo sapiens
gcattttttactttagaattccaactttttctggttaaaatttttccaaacagattccttgtatttgaagacaaataattttttagttgaacwgcttaagcagttaaataaggccatggaagtttctcgaacttatgggaatccatgagaaaatctgacattacgttctattctcttggaaggtagaaatatcgtttgacttctgttttgctgacaagaaatgtcctgagcaagactacctgggacaatgacctcacacatggaaaacgttggagcccatctgtttccaatctgcttttttccaaaaat

SEQ ID NO: 613646 - DNA, 309 bp, Homo sapiens
gcattttttactttagaattccaactttttctggttaaaatttttccaaacagattccttgtatttgaagacaaataattttttagttgaactgcttaagcagttaaataaggccatggaagtttctcgaacttatgggaatccatgagaaaatctgacattaygttctattctcttggaaggtagaaatatcgtttgacttctgttttgctgacaagaaatgtcctgagcaagactacctgggacaatgacctcacacatggaaaacgttggagcccatctgtttccaatctgcttttttccaaaaat

SEQ ID NO: 613647 - DNA, 639 bp, Homo sapiens
tgttgtactttaagttctgtgatacatgggcagagcatgcaggtttgttacatagttatatacgtgccatggtggtttgctgcacccatcgacccgtcatctacataggtatttctcctatctgctattcctcccctagcctcccactacatgacaggccccagtgtgttatgttcccctccctgtgtccatgtgtcctcattgttcaactcccacttatgagtgagaacatgcaatgtttggttttctactcttttttgtttttctttctctctctcttttttttttttttttttttggagacaaagtttcactcttgttgcccatagttagagtgcaatcgtgtgatctcggctcaacgcaacmtctgcctcctgggttcaagcaattctcctgcctcagcctcccaggtagctgggattacaggtatgtgccaagattcctggctaattgtttgtatttttagtagagacggggtttctccatgttggtcagactgatctcaaactccccacctcagcctcccaaagttctgagactacaggcatgagtcactgctcctggcctggttttcttttcttgtgttagtttgctgagaatgatggtttccagctgcatccatgtccctggaaaggatat

SEQ ID NO: 613648 - DNA, 557 bp, Homo sapiens
gtcatttaaaaaaaatatccttgacagttgtgaataatgctgcattgaatacaggagtgcagataatttttgagatgctgattttattttgtttatttacagaagtgaaatttcaggattgtacgatagtctattttttaaaataaactgcgtactaattttcatgactcttccagtctgcaactcattaaaactgtacagaaatattttgtcacatccttgttaaaacttggtatgttcctttctttgatattaaccattccactgctgtaaagtggtatcttttgatttgcaattttctcatgaatggtaatgtttagcatctttctacatatctgttggccatttgaatatgtttgtataaaatatttagtcttggtcagtggagccaagagggccgaataggaacagctccagtctacagctcccagcgtgagtgacacagaagatgggtgatttctgcattaccaactaaggtaccagtctcatctcactggggagtgctsgtcagtgggtgcaggacagtgggaacagcacaccacgcatgagccgaagca

SEQ ID NO: 613649 - DNA, 243 bp, Homo sapiens
tgcactcccacctagacaacaagtgcaaaactccgtctaaaaaaaaaatagtacttacaagtcagcaaggagaaaccaaagatccaacagacttatggaccaggagcaattcacagagaaggasacccaaagggctgggaaacacaaggcacacgttcagctgcactgcaaattccaggaacaatatcaaaaagtgcgataacaaatattgatgaaaatgagtgaagatgaatgtgagcactg

SEQ ID NO: 613650 - DNA, 581 bp, Homo sapiens
tcaaaaaataaatgtctgagactgggtaatttatgaagaaaagaggtttaattggctcacagttctgcaggctgtacaggaagcgtgattctgtcatctgctcggcttctggggaggcctcagggagcttacaatcatgacggaaggcaaaagggaagcaggcacttcttatgtgactggagcaggaggaagagagagggggaggtgccacacactattaaataaccagatcttgtgagaactcactcgctatatagtaccaagtggggatggtgttaaamcatgagaaaccggctccatggtccaatcacctccctccaggccccacttgtggcattggggattatatttccacatgagatttgggtagggacacagatccaaaccatatgatataacataaaccatagagcaatggttaaaactcaaaaccaaatgaagcaaaaatagttatatgaaaaaggccaacaaagaagattaaatgaaataaaaatactcaaccaattcaaaagaagtcaaagaggaacaggagaacaaactacagatgggacaaatagtaagctaacaggaagatgaccaag

SEQ ID NO: 613651 - DNA, 581 bp, Homo sapiens
tcaaaaaataaatgtctgagactgggtaatttatgaagaaaagaggtttaattggctcacagttctgcaggctgtacaggaagcgtgattctgtcatctgctcggcttctggggaggcctcagggagcttacaatcatgacggaaggcaaaagggaagcaggcacttcttatgtgactggagcaggaggaagagagagggggaggtgccacacactattaaataaccagatcttgtgagaactcactcgctatatagtaccaagtggggatggtgttaaaacatgagaaaccggctccatgrtccaatcacctccctccaggccccacttgtggcattggggattatatttccacatgagatttgggtagggacacagatccaaaccatatgatataacataaaccatagagcaatggttaaaactcaaaaccaaatgaagcaaaaatagttatatgaaaaaggccaacaaagaagattaaatgaaataaaaatactcaaccaattcaaaagaagtcaaagaggaacaggagaacaaactacagatgggacaaatagtaagctaacaggaagatgaccaag

SEQ ID NO: 613652 - DNA, 581 bp, Homo sapiens
tcaaaaaataaatgtctgagactgggtaatttatgaagaaaagaggtttaattggctcacagttctgcaggctgtacaggaagcgtgattctgtcatctgctcggcttctggggaggcctcagggagcttacaatcatgacggaaggcaaaagggaagcaggcacttcttatgtgactggagcaggaggaagagagagggggaggtgccacacactattaaataaccagatcttgtgagaactcactcgctatatagtaccaagtggggatggtgttaaaacatgagaaaccggctccatggtccaatcacctccctccaggccccacttgtggcattggggattatatttccacatgagatttgggtagggacacagatccaaaccatatgatatamcataaaccatagagcaatggttaaaactcaaaaccaaatgaagcaaaaatagttatatgaaaaaggccaacaaagaagattaaatgaaataaaaatactcaaccaattcaaaagaagtcaaagaggaacaggagaacaaactacagatgggacaaatagtaagctaacaggaagatgaccaag

SEQ ID NO: 613653 - DNA, 612 bp, Homo sapiens
taattttcagagagagtttatagatacagacttgtccttttaaaatattcattttaatatgtaatacatatataacragaatgaagtaatacatatataacgagaacttttaattctctgaaattatatgctgttccaaaaattatatgatggacaataacactctcactccagtttccttgttcactatcttctcacgagatgaatcacaattactgatttcttatatgttcttataggactgtttttatatctttttttgtttccatcttcatcttcgttacctaagagataacatactacatctattgttctacactgtaattttccctaattcacaagttaaatcaatctgtaacatcaagctgcctcattttttaaactgctgtatttatctccaattgcataccaaaaattaatcagtcctttttggaaagacagttatactctccaatattttgtatttactctccaatattttgtatttataagccatgctaaaatgaatgttcttttagatgtagctttgttaaacatgccagtatatttgtggaaataatcccaggacaagaattgctaatgtaaagaagaatgtatgcatttgtcattttg

SEQ ID NO: 613654 - DNA, 587 bp, Homo sapiens
  misc_feature 580, 581, 582, 583, 584, 585, 586, 587: n = A,T,C or G
tgtaatttttcaacaacatgaatgaacctagagaaccctgctaagtaaaataagccagaaataaaataacaattactgcataatctcacttatatatgaaatctacaaaagtcagacttatagaagcaaagagtagaatgaaaagagagggtcatgaggagttattggtcactgttacacaattcagttatgcaagatgaatgagttctgcaggttaaatgtacagcatggtgactacttaccatagttaataccatattgtacacttgaaatttattaagtagattttaaatgttctcaacacacattcatagaaattgtagaaattgttactatgtgaggtgatgaatgtgttaattaggttgagtgaggtaaacatttcacaatgtatatgtacatgaaaacatcacattttacactttaaacatatgcatttttttcaatcatacctcaaaaaagctggagaataaaaaggaagtatttgagagccacatgtgtttctgcacatattcartcttccccattagattgtaaaacatttcaagatatatttctattatattggctaatgttaatagcnnnnnnnn

SEQ ID NO: 613655 - DNA, 569 bp, Homo sapiens
  misc_feature 47: n = A,T,C or G
cattctttcatgcaaactcttactatgcttctattttagatgaaaanacagagacctcagaaaaagaggtagcttgacctacagtttataattgggcagagtaaggatctgagcttttatgttcaaaaatgctttaggctatggtcttagcctttattgcacagtaggaagtatcatgaatgtgatatctaagtactaaatttaagatcttttttaaatcacaaaataaatatattaaatgtattaatatacttaaaaatataattggaaaaatgtactaatggtctaagcagtgtataaagcatattttaatgtattttcacttgatccttgataagtctaagcaggaataagaattatgtcatttggatctctaaggatttatcttaagaatttgataaacatcaaatccatgattgccgttatcttaaaataacttactcaattagttttaagtgtgtgcagaggggcagggtacagaaatgggatcactctgcatgaatgatgcatagcttttggcwtgctaacaagagctataaagtaggaatggagggtgtcagcatgcacac

SEQ ID NO: 613656 - DNA, 532 bp, Homo sapiens
tccaatgcaaagtaaaataaggtaaaagcataaacaatgaggaaattcagaaaaggaagcaatctcatttacaatggcagatagaagaggacgtaatgaagaatggtgcaaagagaatggagaagaccacaaaaaacagagtggaaagaacatgttcatccttgtctgcccattgtagttkgacaggggtggtgatttgactcagccattgagaccaaaccactcctagaagttggaactctagtgttctcagcattcaaaatcctgcagcaggactagaatggaggagagaaagtaattcacttacggtttaatctgagaaagcttttggaaagtttgctagttggtattatactagtattcaataaaatcatagtatttgtttctcaagaaagggagtaggatttccttcccggttctataaaattattcccttttggagcactgtttccaatgatcacttttgaaaatgacttcaggtatttatgaactatcctagttaatgctatatctttaatctttgagagaagat

SEQ ID NO: 613657 - DNA, 488 bp, Homo sapiens
ggtcttgcctaccctttcattattgttaacaccaacagatgtagcactggagccagttttgtctgctgagtttcaatggccctactgcttttgtcttaactgagaatcygatttcctacctccatctcactggctttttgaaaggaaaaaaaaatgtgtattacccaatccgtggattaaatatagttaagttctgagtaatgaaaacttctttgagtggtgcagtaaagaagatgctgattttgggttctaatgtagacttcagattatgacttcaccactgattagatttgtcattgtggcaagtaacctaacttctttccaccttgatgtcctcatctgtcaaggggttattgtgatggttaagtatgatcatgcatgcaaggtgcctagcagcgcttagggttgcatggttttattttccagtgtcaataaatcttaggtccccttccctcatttcaggatatgaaaaaagaggggaagtgatg

SEQ ID NO: 613658 - DNA, 553 bp, Homo sapiens
gaatcatagagtacctgagagttgggagggttcttttacagcattttcagttccttacccaatttttacagcccctctttcttatctcagagaggtcatctttcaggtaaaatgctctcagttgttcccttcattggagagcagaccatttcactggtgaccatctcctatggtgggaagactcttccctaccctgaggcacggtgacgaagtgcgaaatgccggtccttcagcgttggagagacatgactatttatcttggttctatcccattctggcacgtaaacttgagcakgtatggcaaatttttaaggcttcaaatcattcttctacaaaaggaagatgaaatgcctacctcatgaaactgttggggctggttgattgaaataatgtacaccattgtctagtaagacaattggtaaggagtcaaaaccaacatgcttgtttcttctctcttcatttatccaatgtgtccctcatagtaacttttactaattagtttcctttctgtctttggagccacaaagaataggtttcttcctctctttctctc

SEQ ID NO: 613659 - DNA, 534 bp, Homo sapiens
tctgttgtttagattggatgaaatttattttttctgttttcaaattcagagctttgcttctgaaagctttagtaagcttttattaaatctgtcctctacttcaaacattgagatatatgtggaagtattataaaaacaaaaaggtaaataaaagatgactttctagctctcatcactcattctaagcagtttccaaaataatgagatagatgtgtaaactcactataatgtaagagattgtgaagtaatggcttttaaaaagggacagacagcactgtcaaagagaattggaaagaatgcttacacctgactaggaagattcgagaaaacaatctaagacatsttctaaacattgaataatagatgaatgattggagtagagcaaagacattctcagaatgagaaaatgaagaacatgacaacaaggaaaacttatttcagctgtttcctaattaacagaacatgaagccttgctctggttaccaaccccataggtctaatactgagtttatcatcttgctctcatcaaccctc

SEQ ID NO: 613660 - DNA, 556 bp, Homo sapiens
ggtatctgatgattttataaggggaaacccctttcgcttagttctcattctctcttgcccagtgccatgtaagaagtccctttgctcttccttcatcttccaccatgattgtgaggcctccccagcatgtggaactgtgagtcaattaaacctctttcctttctaaattacccagtctcaggtatgtctttattagcagcatgagaacagactaatacacccgggattctagcttcatgtccaaagtcatttctccacactgtggcttctttgaaactaaatgtttgattgcagggattctrtggggattcagcatggcacgtgaagacacaggggggctctggagccagctagtcttcacttaaatccaggacctgccccttgccaaaagtgagcctgtgcctcactttcctcatctgtaaaaaagggataatcaataataccaaagtcatatggatattgaaaaggttaaatgagctgatacatgtacagcacttagatatcaatataattatgtgttcagaaaattctaaatattatcacgagtcacgatttg

SEQ ID NO: 613661 - DNA, 556 bp, Homo sapiens
ggtatctgatgattttataaggggaaacccctttcgcttagttctcattctctcttgcccagtgccatgtaagaagtccctttgctcttccttcatcttccaccatgattgtgaggcctccccagcatgtggaactgtgagtcaattaaacctctttcctttctaaattacccagtctcaggtatgtctttattagcagcatgagaacagactaatacacccgggattctagcttcatgtccaaagtcatttctccacactgtggcttctttgaaactaaatgtttgattgcagggattctatggggattcagcatggcacgtgaagacacaggggggctctggagccagctagtcttcacttaaatccaggacctgccycttgccaaaagtgagcctgtgcctcactttcctcatctgtaaaaaagggataatcaataataccaaagtcatatggatattgaaaaggttaaatgagctgatacatgtacagcacttagatatcaatataattatgtgttcagaaaattctaaatattatcacgagtcacgatttg

SEQ ID NO: 613662 - DNA, 580 bp, Homo sapiens
cacagttaggtgctctgctctacctgttcctagccgcacctcataaactctccatcaagcagatcagatggagattttgatgttgtgtctttagtccaaatgactgtgatctccttgagggtrtgaactatgttttaatcattcttgaagaattagtatcttgttcttcattgtttcccaataaatgcttatttcaaaatgataaatcaaggctgcccaggacaccctttctaaattggtaacattgactgcacacctaaacacatgcacacacacacacacacacacacacacacacgtgcactgccccctccttgcctgaattttctgctcagcatttaacatattattatttattcatcttggttattacagtaacatatgttcaaacttagaactctaatggcaagcaacacttagtaaatttttctcgttgttattaatatcattagttgctctgtcattgcgaatgatgatagtatttgtattcactgtccttgttattgttattactaatactattatcataattattatcactgtgctcttgttattctatatggtcaaaagagagcagatc

SEQ ID NO: 613663 - DNA, 603 bp, Homo sapiens
ctaggaatgtgatacagggcaacatgttttctatgcaaaatttcactgcaacaaaataatgcaggtgggccatgaagttggtcttgtttgtgcttctttgatccttacgtttccctgtaattcatcaattcctgagtacaattgccctgttcccgagaccactgagataagtagatttgataccaaatgattatatcagacttccagaaatcaggttggtggggtgagctgcctcartattaatgtttgcgttaaaataaaactaccccatccctagtttagataatactaaatttgtattttttgttacataaaattaaaatgataggtaaatattatttataaaaatatttgatgtttttcacaatgaatgtctcaatggcccattttttttccttttctcatattgagatatcattaagttatccctaaagtgttctttagagactttcgatgggaaataactcttctgtgtagcatccatctttttgcagtttttttacacacttttcacttaatgttgaatattgtaagccaacgttatttgacaatgtctatcattctcttttcagatcctctttttgaagtaaaaatagtgaaata

SEQ ID NO: 613664 - DNA, 520 bp, Homo sapiens
actttttaataatagccattctgactggtgtgagatggtatctcattgtggttttgatttgcatctctctgatsattaaccatgttgagcattttttcacgtttgttggctgcttgcttgtatgtcttcttttgagaagtgtctgttcatgtccattgcctatgaggttatttgggttgttttcttatttgtctgaattccttatggattttggatactgtccattgttgaatgcatagtttgtaaaaattttctcccattccataaattgtttactctgttgatagtttctttgttgtgcagaggctcattatacaatactatgaaataaattcttaaaaaccatgattaatgtctccaagaaagaaaataagctggttgaaaaacaaagccacgaatatagaattacctatttttaaaggtattaatggctgctactgttggccagctgaaacatttagcagatggagacactaagatatcagtatgtaaatggttttgtcctgggtcaaggtgttgg

SEQ ID NO: 613665 - DNA, 571 bp, Homo sapiens
aatagaaaaaaaaaaaaggatgcaggtagtcaatttaggcagctattacatttggcaagttacatctccaagcaagagttgatgaggatgtgaaytggggtagttgcctgggggatgaataaagtggatggattaaaaagatttgtaaagacacaacttaaagaaattgggaactgaatggatattgaagaaagggaaagaaatccttagagacaacttccagaattatagcacaagcaactcattggaaaatagtttcaattgctaagttttaaaaccctagagaatgagaaggttgaactttagatattatgtattaagttagcaagcatgtggaatatctcaagggtgatgttaagtaatatagtatgtatttgtggatctcaaacttgggataatttcatagccaattgtgcaaatggccacaaattacagtcccatccatgatctttgatagcacctttagatattatgtatttagactttgatagcaactgtagatattatgtattaagttagcgagcatgtgagacatctcaaggatgatgttatgtaatatagtatgtctttg

SEQ ID NO: 613666 - DNA, 571 bp, Homo sapiens
aatagaaaaaaaaaaaaggatgcaggtagtcaatttaggcagctattacatttggcaagttacatctccaagcaagagttgatgaggatgtgaactggggtagttgcctgggggatgaataaagtggatggattaaaaagatttgtaaagacacaacttaaagaaattgggaactgaatggatattgaagaaagggaaagaaatccttagagacaacttccagaattatagcacaagcaactcattggaaaatagtttcaattgctaagttttaaaaccctagagaatgagaaggttgaactttagatattatgtattaagttagcaagcatgtggaatatctcaagggygatgttaagtaatatagtatgtatttgtggatctcaaacttgggataatttcatagccaattgtgcaaatggccacaaattacagtcccatccatgatctttgatagcacctttagatattatgtatttagactttgatagcaactgtagatattatgtattaagttagcgagcatgtgagacatctcaaggatgatgttatgtaatatagtatgtctttg

SEQ ID NO: 613667 - DNA, 615 bp, Homo sapiens
tgctagagggaaaattgtttgggttttctctttatacttcactaaactcagaaaaagatattgaagacacatttcactttttaatccttacctaaacatcctaaaaattaygagaaaaaatgcagcatcgcaaggaaaattgttgaatagtattatcttgaatattcgctgtttgcaaatttcaacaatttaagaaaaatgctaactttacatatacgaccatatgatttctgcgatttgtttcagcataactcagtggaggatgggaaggttacgtatgtgtagatatatatgaaaaaacatttggaaggcattgttgattgtggaaactgaagaggttcattttactattctctctactttaaaatttttatgctgaaatgttaacaataatatacataaattgagaaaaaaaattattaggtgatttgctggcttataaatccaatggtagaaaagaaatcataagagttaatatgaaatacatttcatccaagtacgtttcaagagcatttcatttaggaaagtttcaaaccttatgaaaactgataattcattcagattgtagcatggtcatgttatgatcatctgatgcttaatattgagtgtcaactt

SEQ ID NO: 613668 - DNA, 615 bp, Homo sapiens
tgctagagggaaaattgtttgggttttctctttatacttcactaaactcagaaaaagatattgaagacacatttcactttttaatccttacctaaacatcctaaaaattatgagaaaaaatgcagcatcgcaaggaaaattgttgaatagtattatcttgaatattcgctgtttgcaaatttcaacaatttaagaaaaatgctaaytttacatatacgaccatatgatttctgcgatttgtttcagcataactcagtggaggatgggaaggttacgtatgtgtagatatatatgaaaaaacatttggaaggcattgttgattgtggaaactgaagaggttcattttactattctctctactttaaaatttttatgctgaaatgttaacaataatatacataaattgagaaaaaaaattattaggtgatttgctggcttataaatccaatggtagaaaagaaatcataagagttaatatgaaatacatttcatccaagtacgtttcaagagcatttcatttaggaaagtttcaaaccttatgaaaactgataattcattcagattgtagcatggtcatgttatgatcatctgatgcttaatattgagtgtcaactt

SEQ ID NO: 613669 - DNA, 609 bp, Homo sapiens
aagataaaggagccccttctagcaataagctcagcttaaaacaagcactgatttcaagtgaaagtgtggaataatttgggaacatttattttgctgccttacatatgtgcagactgattacataatgacaaagaggtcaggctgcttaactcgacacaagagtactcactggggcaaaacctggagtctgttcctgtctgtaatacagktttatgtttagtacagtgttcacagatcttcctgaagtgaatccctcatgattgttttacatgccttattagttctaaaacttgtcctacacattagtattatctagacaaaatatacatacaatacctttgctgaccaccaaaatccagaacacatagaaaactaaaggaatattgtaatctggctctgctttttaatctgacataattcctttctatgttcaaacaaagcatttctcccaccttagggttttagcatttgcaattctctatcacatgtttgcttcttaatcatcaggtttcagctctatactgtcctcctctataagaggtatttttggaccattcaatgtaaaacagattcatccagtccttatccaatcaataattttttcctagt

SEQ ID NO: 613670 - DNA, 522 bp, Homo sapiens
gaatctatcatcaatctcctgactaggtagcagtaaaggcatattcttgtataaaagaaaaataacaaatgagatgcagatgggtagaaacaatgattataacaatgaaaaacatattattataatatgtatgttccatgatacctgaacacaaaaaaaattcaaaatttagactttagtcttaatttttaaaaattggaataaatacttctagatcagtccccagtcacttcactattgagaactacaggcagatctctatacaaataaataactttagacaaaaatttagtttaccaacattaactccattaagtctagaagaattaaagatrtacattttcatagctgcaatacagttgtaaatgaattactttagaaaaatagtatcataaatggcttcaccaactaattcttccaaacttttaaagacaagttagaatatgaaaaatgattaaaaatatttaagttcatttatgaagcaagaatgatattgttctataacctgttaaagatagttaa

SEQ ID NO: 613671 - DNA, 636 bp, Homo sapiens
tttcttttggggctgcagagagtagggccaccaaagagagacctgtgggcagagttcrctctcctagcaaaacaaaataaggccaccccacagagccatggggctgatgctgccaccccagtaggcctggagggcagaacattgaaccaaataaaattattcttaagacttaaaatctaatgcagttttccttgctaagctctgaacttatttgggaatcatcacctttccttccttcttatttagcccttttggcatgggaatgtttgccttagctctgtcctactttgtattttagaagtacacaacatgtctgctctcacaggttcacaactggagacaaattttgcctaaggatgaactgtactttcagtcttatccatatttagatgaatggtattcagataagaatttggactttagactttagagttgatgctggaatgagttaagtcttttgagagaggtggaatgaatgtattttgtatgcaataaatacataaatttgggggaggaagaaggggcaaaatattatggaatgtaggtttgtatcccccaaattcatatgttggagctctaatccccaatgtgactgtatttggagataggatctttataaaaatagagtttacaagc

SEQ ID NO: 613672 - DNA, 636 bp, Homo sapiens
tttcttttggggctgcagagagtagggccaccaaagagagacctgtgggcagagttcactctcctagcaaaacaaaataaggccaccccacagagccatggggctgatgctgccaccccagtaggcctggagggcagaacattgaaccaaataaaattattcttaagacttaaaatctaatgcagttttccttgctaagctctgaacttatttgggaatcatcacctttccttccttcttatttagcccttttggcatgggaatgtttgccttagctctgtcctactttgtattttagaagtacacaacatgtctgctctcacaggttcacaactggagacaaattttgcctaaggatgaactgtactttcagtcttatccatatttagatgaatggyattcagataagaatttggactttagactttagagttgatgctggaatgagttaagtcttttgagagaggtggaatgaatgtattttgtatgcaataaatacataaatttgggggaggaagaaggggcaaaatattatggaatgtaggtttgtatcccccaaattcatatgttggagctctaatccccaatgtgactgtatttggagataggatctttataaaaatagagtttacaagc

SEQ ID NO: 613673 - DNA, 539 bp, Homo sapiens
ttgtatgcaataaatacataaatktgggggaggaagaaggggcaaaatattatggaatgtaggtttgtatcccccaaattcatatgttggagctctaatccccaatgtgactgtatttggagataggatctttataaaaatagagtttacaagctcataagggtagaagtcatgatcccataggattagtatcctcataagaagagacactagagagatcattgtctcttcacatgtgcacaaacaagagaccaagtaagtacacaagaagagcatggctgcctacatgccaagagacgagacttcagaatgaaatctaccttgctggcaccttgatcttggacttctcagtccccagaactgtgagaaacatatttctgggttgtttaagccactcagtctatggtattttgttatggttgcctgcacagactaatacaaagttgggatgggatttataccagccatgtgaatgtggtttaatattaatcagaatatttaataacattcaagaaattaataggcataagaagaaaaaa

SEQ ID NO: 613674 - DNA, 609 bp, Homo sapiens
tgtaaatgcagcaaaatgttaaaatagaacgtcagaaaatgaagaaattttccatctgttggctttgttttcctttataaagtaggaggacaggtagcatgatgagtgtgaaggatgatgtgggaagtaggaacttggaacagagtggagaaggtttgaaatagtcgctgtgaagaaccagtcaagagatgactaagaagagctctaggcaacactaacacaataatttatggaaaccaaaatgaagtagcaacaatctgccttagtgtaggattttccacagacaccatgtgtgagacaagagaaaagggacaattagtttgacagaggattgagatgttttggggaaagtaagacagaaggacaatgaggcagttatcagtccttcttgcactgctgtaaagttattagtccttttattagtcctttcttgcactgataaaaagaaatacctataactgggtaatttagaaagaaaagaggtttaattggctaatggttctgcaggctgtatgggaagcatagtggcttctacttttgggcaggcctcaggaagcttccaattatggtggaaggsaaagcgggagagaggcctctcacatggtggga

SEQ ID NO: 613675 - DNA, 542 bp, Homo sapiens
gacacattggaagggccattattatgcctatcacagagagaaatggtaatttgccaaaaactctcagaaggagtcctagatatggcttgaaggaagagttagaaaatccacttatgtttgggaatgtgaagatgatgtgactctgtagtgggcatgtttgctaagctgccttccaaggagaaaggtttctgagtttttgaatgacctaagtaaattcagtgccagagttaaaatatcctgaatggagaagcagttttccatttccacagcattctttcacagaacttcccctaatcctacatcaacttcatcaatccttcacaaagaagttgaagaagagcatcaacttcttccctaaataagtgctcaacagatcttaagcttgggtttcagaacagggttgctatgctattttgtgcacaaatgtggactgaaatgctaagagttcaatttcaaggaacaaatttttgttttaggacatagatccaaaagaatcaagtactytctgtaccccaccccatccctgaaaacatacacacatg

SEQ ID NO: 613676 - DNA, 487 bp, Homo sapiens
tacagccggggactctgaggcatcttacccttggcttttccatcatgaaaatgcttgattcctctcattgtttggccacgtgcatactgaagcaatagcatttatttttctatttcctacaaaaatctctaaatgaaggactcatatttagtcaccctctatttaggtaaaagtacttgctaatgtgatgaatgcctcatcatttggtatctttaatagaattgccagaacacagactacaatgccttcatttttatcttcagtgattgatttggagaggaaaagtattgattctgttatcagacaggctgaggagtaatgggagtagttcatgagtggcttcacttgcttttcccctttgtgagcacataaaactcaaaattccatattttctgctttcytccaataacaagacagtcatactagagtagtaaccagttcttacagtggaaaatatagactgcaaaaaagatatttttttgatagc

SEQ ID NO: 613677 - DNA, 487 bp, Homo sapiens
tacagccggggactctgaggcatcttacccttggcttttccatcatgaaaatgcttgattcctctcattgtttggccacgtgcatactgaagcaatagcatttatttttctatttcctacaaaaatctctaaatgaaggactcatatttagtcaccctctatttaggtaaaagtacttgctaatgtgatgaatgcctcatcatttggtatctttaatagaattgccagaacacagactacaatgccttcatttttatcttcagtgattgatttggagaggaaaagtattgattctgttatcagacaggctgaggagtaatgggagtagttcatgagtggcttcacttgcttttcccctttgtgagcacataaaactcaaaattccatattttctgctttcttccaataacaagacagtcatactagagtagtaaccagttcttasagtggaaaatatagactgcaaaaaagatatttttttgatagc

SEQ ID NO: 613678 - DNA, 564 bp, Homo sapiens
accaactgcaccatggaacattcaaaaaccaactgccaagtcattctcaccactgctgtgaggggcccttttctctctctccatccagatactatgtgactcttaatgtcaacaggcaacaagcaaaaaaaaaaaaaaaaaaaatccccaagaagaatayaggggtattccctggacctctcggcctctggtagaaagaaaatagaagaaaactgcagtgtcactaaacagaagcttagagaatggcaagctcatcactatggcttaggccagtgattattaaggagagagattctatattaatggcctaaacaaacagtatcaacatcgcataggcactggttagaaatgcaaattcctgagtctgccccaaatctactgaatcagaaactctgagatcaggacccacctgtctgtgtactaacaaaccctgaaggtaattctcatacatgttccagtttgagaacagctaggctaggctgtagcagacaaatctgaccaccacaccagaacaatggcacaaaggaattacacatcaatgcatatcttggcctccatgcagca

SEQ ID NO: 613679 - DNA, 556 bp, Homo sapiens
tgtagcagacaaatctgaccaccacaccagaacaatggcacaaaggaattacacatcaatgcatatcttggcctccatgcagcagagtgtgtgcaggtaccgtataagaatgggcctgccacaaagctcgtatagaatcctctgtcctatatggtacagcctcatatcttttgcccaggtcacagtgacagagaccacagtacctaaaacgggccctgcacggggaagtagtgagcatcagcttccctctctctgcttcattagcagtttcaaaagggaaagaaaactgtaggttggaaaagagttatgtggtggaaacaggaaggatgtgaaactatcagctcacagctatgaagaaagsagctgacatagttgacacctgcctcagggacaatttctgatcccccccccccccccccccgccaagaactatgctgggaacaaaaattgtctcaggaaaggcaagggtttcatcaattgctctggttgaggttgagttatttacctaaggaaatagctttcaaatgtttccccaattgtcctatatactgagctc

SEQ ID NO: 613680 - DNA, 535 bp, Homo sapiens
ccttgaaaccacaagaatcacttcctatgagttaacaggagaacattgaatcgacttgcaagttgctttttagatatgctttctatcctgttagttgcatggcctattgcaatggcccagaattagcctgcatatatcataaaggtgcctccagttggccatatatatatagtatagaatacatttattgattatcttctgatgctctcattcccctactagactcttccaggaaatggtccaagtcttgcttatctttgaatctttaactcagttcctggcaracagtaaatctcgatttgaattcaattgaaattacaggtaatctaaggtgaactatgaaataaacttataagtagtatttttcaaagaaattcttagtaactaattgcttaaaggcaaatgatttggctttttcttcatttttttgccttttactctagagaggctgacacctaccctacccagcaagcataatgttaattttcacttcctgtctttccctcatattttcacccctatagaagagactctg

SEQ ID NO: 613681 - DNA, 550 bp, Homo sapiens
aaatatgcttaatgaagcaamgacagttcactatagttatcgcctcctctctgcgccaaaacaagacaaagtgaaaaattaaatctgttaaattaaactgaataacaggataaatgaagaccttccattcatgcagatcaggtaaatatttatagtgagcaggactcactataatgtttatatgagtagtggcagtcctattatcctacttaaaatgaaagtctctatttctgatttaatatggtatctgatgatcaatcaccaacacagactcttctatttttcattgaaaatacatatatagacaaaaatagcaataacatcagtatacagacacacactaaacccctattaggtaagattttcatgcaatgtattttcataatatggaaagaatttcaaatgacaagatcaacttaaatcaaatggtgactcatcttttatatgctgccagaaatatcatatgctgtccatgtaaaagtcaattgatcttgcatttcttactcactcaatactcaggttaattaatatattggccagcagtgtcaat

SEQ ID NO: 613682 - DNA, 550 bp, Homo sapiens
aaatatgcttaatgaagcaacgacagttcactatagttatcgcctcctctctgcgccaaaacaagacaaagtgaaaaattaaatctgttaaattaaactgaataacaggataaatgaagaccttccattcatgcagatcaggtaaatatttatagtgagcaggactcactataatgtttatatgagtagtggcagtcctrttatcctacttaaaatgaaagtctctatttctgatttaatatggtatctgatgatcaatcaccaacacagactcttctatttttcattgaaaatacatatatagacaaaaatagcaataacatcagtatacagacacacactaaacccctattaggtaagattttcatgcaatgtattttcataatatggaaagaatttcaaatgacaagatcaacttaaatcaaatggtgactcatcttttatatgctgccagaaatatcatatgctgtccatgtaaaagtcaattgatcttgcatttcttactcactcaatactcaggttaattaatatattggccagcagtgtcaat

SEQ ID NO: 613683 - DNA, 550 bp, Homo sapiens
aaatatgcttaatgaagcaacgacagttcactatagttatcgcctcctctctgcgccaaaacaagacaaagtgaaaaattaaatctgttaaattaaactgaataacaggataaatgaagaccttccattcatgcagatcaggtaaatatttatagtgagcaggactcactataatgtttatatgagtagtggcagtcctattatcctrcttaaaatgaaagtctctatttctgatttaatatggtatctgatgatcaatcaccaacacagactcttctatttttcattgaaaatacatatatagacaaaaatagcaataacatcagtatacagacacacactaaacccctattaggtaagattttcatgcaatgtattttcataatatggaaagaatttcaaatgacaagatcaacttaaatcaaatggtgactcatcttttatatgctgccagaaatatcatatgctgtccatgtaaaagtcaattgatcttgcatttcttactcactcaatactcaggttaattaatatattggccagcagtgtcaat

SEQ ID NO: 613684 - DNA, 638 bp, Homo sapiens
tagcactatcttttatggaattccaaagtcagaactgcctgagtggcagctcatttttatttatagttacttaactaacacaaattccagacactagacttagtgaaacatgtagacacaaataactttttcctaattggccaccacaaagtcacctcttaatcaattctcaatttcacattgaagactcaaaaatatcttcccacaaaatcttagtattttgctttcactattatgttcccatatcatctccaatttcagtaatatgagtgttttgggaaatcattgccctgttatttcataagtgttctaaattttcttgggtcaaatttcagaaaattgatactatgatattcagttacgagcttgcaatttaatgttccagaccatggtttcagaagcttccartcactgaccaattattataaaataacccatagtcatgcatgaggtttttcattatttcttatttttcatttctataattttcctcatttttttgagcctttgaggctattggaagccataagaaaaaagtgtactcaaatagttatacacacacacacacacacacacacacacacacacacacacacacacactaggtccaatgaaatttgattttaaaaaaaaatcta

SEQ ID NO: 613685 - DNA, 590 bp, Homo sapiens
tttgcgtggcaaccaatccagttatactctttcagttactataaaatgtacaattaagttattattgactatagtcaccttgttgtgccatcaaatactaggtcttattcattctttctattttttgtacttattaacaatccccaacttgccctaagcmcccccaactccagacacactacccttcccatcctctggtaaccatgattctactgtctatctccatgaattcaattgttttgatttttagatcccacaaataagtgagaacatgcaatgtttgtcattctgtgcctggcttatttcacttaacataatgatctctagttccatccatattgttgcaagtgacaggatctcattattttttctggctgaagaatactccatggtatatatgtaccacactttcttcatccactcatctgttgatggacaaataggttacttccaaatcttggctattgtgaacagtgctgcaaaaaacatgggagtgcagatcactctctttgatatactgagttcctttcttttgggtatacaaccagcagtgggattgctagatcatatggtagctcagtttttagttt

SEQ ID NO: 613686 - DNA, 629 bp, Homo sapiens
ttcttgtagtagtttcatattgtgaggtcttaaagtctttaatacattttgatttgatttttgtatatgggaacatataggggtctagtttcatttttctgcatatgaatatccagttttccaagcaccatttattgagactgtttttttttcccccagtgtatgttcttggcatctttgttgaaaatgarttcacaaaggtgtgtgggtgtgtggattcctttctgggttctcagttctgttccattggtctatgtgtctgtttttatgccagtacgatgctgttttggctactagagctctgtagtatataatctgaagttgggtaatgtgatcccaccaattttgtccttttggcttaggatagatattaagctattttgggtcttttgtggttccatataaattttaggatttttttttctatttctgtgaaaaatgtcattggtattttgataaggagtccattgaatctgtagattactttgggcagtatagacattttaacaatattgattcatccaatcaatgaacatgaaatatctttccattttttttgttgtcctcttcaacttctttcatcaatgttttatagttttcattatagagatatttcagttccttggtta

SEQ ID NO: 613687 - DNA, 671 bp, Homo sapiens
gcttttgtagttctttaaaatacattgtaagattatttattggaagttcttcttttttgatgtaggttttcatagttataaaattccctcttagtactgcttttgctgtatcccttaggttttggtgtgctatgtttccattatcattggtttcaagaaatgtttcaatttccttcttactttcttcattgacacactggttattcagaagcatattgtttaattcccatgtatttgtatagcttccaaaattccttgttattgctctctagttttactccactgtgatcagagaaggtattatttcaattktttggaatgtcttagacttattttgtgacctagcatatggtctatccttgagaatgatccaggtgctgcagtaaagaaagtgcattctgtagccactggatggaatgttctttaagtagctattatttccatttggtctatagtgcagataaagtccaatgtttccttcttgattttctgtctagatgatctgttcaatgctaaacgtggggtgttgaagtctccagttattttattgggacctctctctttagctctaataatatttgctttatgtatatctgggtgctccagtgttgggtgcatatatatttaaaattcttatcttactgaattgacccttttatcattatgtagtg

SEQ ID NO: 613688 - DNA, 575 bp, Homo sapiens
tgatggcagcactcttttggctgtcctggctggtgtctcagcatgccctccccccaacccctgtctactgtctctgtgcccagttcagcactaggactctcctaaaagttgcagtccttgtggcctactctgcctttcaagtttattggcagccccagagcactttagcccgtgrtggtgtggtttgtgggacgtcaagttcccacctctgtgattggtgattccactctggctagggctggtttaaatgctcccttcatgggtgggcatcagctaagtttgttctggttttccttcctgttataacagaacagcactgagtttaatgcctcccatttgctgcactctccctctccgagaccacagaaatactctgcaccatgccactgctgctatgggtgggggagggatggcatcagcgattcgagactgttttttctacctcttcagtgtctctctcagtgatatgaagttaaaaaccagatactgtgagtgcttacctgattttgaggtcttatgaaggcgctttttgtatgtaggtgttaaattgctgcccttgcaagagggaatgatca

SEQ ID NO: 613689 - DNA, 533 bp, Homo sapiens
gggtgggggagggatggcatcagcgattcgagactgttttttctacctcttcagtgtctctctcagtgatatgaagttaaaaaccagatactgtgagtgcttacctgattttgaggtcttatgaaggcgctttttgtatgtaggtgttaaattgctgcccttgcaagagggaatgatcagtgcagccttctattctaccatcttgctcagcctcctcctcaaatctaacattattgatgctcaaagaaaattaagtacaaaatctattcattatttaccatgtgctatgaatactattctatctttatcttatttacattctcaattttgtcattttatttttctttattaataagagtaaggccatataaaatggccttttattgagcagctatcatacmtgagacatttaatacattattttaaatttttacaaatatgccacaaggtaggcgtatttgttaattaaatacagccaaacatggatatctgcaattaaagtcagaggtggaaaagccatagtatggaaagac

SEQ ID NO: 613690 - DNA, 472 bp, Homo sapiens
tatgattaatataaattatgagaaaaatgggggaaacaggaaaatggaagtgagctcattgcctcatttttttctattttggagaaaacagagtgagttagatactttatatttcatacttgagggataatagattccaattaatatttataagtcaagaaatagatatttatgtgtactatttaaaatgagataattattcaaagccatgcatgttatgtaaaatagggaagaacacaagatgatggatatggtggattgatttgctcaaygtttatttttaaatgcctccctagattgcagagaaaaaaacagctaaaatcttcatttcccagacttccatgtacgagggcttcaggtgtgttttaggatctactaaacgtatgcattcactgagaaatgtggaagtgagtaagaagggggtggagtatgaggcatccattttcagatggagatcacagtggaagtaatg

SEQ ID NO: 613691 - DNA, 643 bp, Homo sapiens
tttcatacttgagggataatagattccaattaatatttataagtcaagaaatagatatttatgtgtactatttaaaatgagataattattcaaagccatgcatgttatgtaaaatagggaagaacacaagatgatggatatggtggattgatttgctcaacgtttatttttaaatgcctccctagattgcagagaaaaaaacagctaaaatcttcatttcccagacttccatgtacgagggcttcaggtgtgttttaggatctactaaacgtatgcattcactgagaaatgtggaagtgagtaagaaggrggtggagtatgaggcatccattttcagatggagatcacagtggaagtaatgtggcccaggaaaaaccactggccacagtgggaatggcagttttccagactgtgacaaagtgagtgccatggtcatatctttgtgtttcagtatttctctgcagaaatcatcacaggtttctcaatcacaatcacagatgagtgcaatcctaggagcaaagaactctgcccaaatcctgctctttcaaccctaccaacaatttcacaaaccattgacctagctggtagtaaatccacttctatttgaactatctagagtggtttctgcagtctgtagctgtag

SEQ ID NO: 613692 - DNA, 521 bp, Homo sapiens
ctgctctttcaaccctaccaacaatttcacaaaccattgacctagctggtagtaaatccacttctatttgaactatctagagtggtttctgcagtctgtagctgtagcctagcattctctctctctctgtcacacacagacacacacgcacacacatcttatagaggaaaagatagttacaaagaaaaacataaaataaaatgaagggcttaagattaagaagagtatttayagttaaatgggatataaattcaccttatatcacattaaattttaaaaagtatgtagaaaaagatgcaatcataacaagttggctctaaaagtacaagtgaagatatatcttgagagatgcaaacaaagaaatcaacagttgacaatacaggcatcaggcaaggttaaatattattgcaaaatataaataacttggataaatactgtcatttaaaaatgatggaaagtgaatgccacaatgaatttttgagcatgagataatatagaaccaaaatacaagtactaaaaat

SEQ ID NO: 613693 - DNA, 623 bp, Homo sapiens
caaacatttattaatcaccagttctgtagttaagaaatctgggcacagcttagctgggtgcctctggctcaggstttctctcgaggctgcagttgtgctgtctgtcaaggctgcagtcatctcaacgcttgactgagactgaagaatctgctgccaaactcacttgggtggtttctttctggcagcctcagtttcccatgacaagggcctctctgtgagttgcctgagcatgttcatagcatagcagctgatgacctaggagatagccatggagtatccaggttagaaggcacagcctaatcccagaaatgacaggctggcatcaataagaggggctggggatcactgagagtcatcatagaggctgcctaccacagcctctgacccccagatttcttgttgcacagcacaaagaaatgcctcttttattttaatcactattaactgagtgttctgctacttatagtcaaatgttatatagtctggtaaagtcataacaatatttgacttatagtcaaatgttatatagtctggtaaagtcataacagtagtttacatgtacagtatacagcctttactatgtaccaagcaatcttctaaatgccttttatatataaactcat

SEQ ID NO: 613694 - DNA, 539 bp, Homo sapiens
gcagccacgatcagaccactggatcacacatgtccacacctttcagcctcactaagcaaactcggtgaaacggatgagcctctgcaagggcgtggatgcctctgcactggagctgcttgctgcattctctgtcccccctgctgactgtcaggtcctcaaagatagggttgtgcagccttcactgctgtgtccccagtgcctagcctgtaggatctgccccgtgcatagctgtttaagaaatagatgaacatttgaatgaycagagagaacttgcctgccacacccaaccttacctgtcacataggattcccagctgggagctttggtgactccagccccatctgggagggatgcttctcatggtacctctcctcctccttcagacaatggctccctcaaccactaacaattctgactccatcttctccccttggtgattcaggtaaatggaaccttagaccactggagtctaaggtacctttagaggtcgtccctgcccccaccccccgacatacacacacacctctcacacagaagaa

SEQ ID NO: 613695 - DNA, 619 bp, Homo sapiens
ttctctctctctgtcttctcttcttataaagataatagctatatggggtggaagcccactctaatgaccacatcttaccttaattatatcttcaaagaccctgtttccaaaaagatcacattcacaggttagaacctcaacatctcttttggggggatgtaattcaaccccaacactgcctattaatcagatyatgacacatgaggatatagggctttcatagcaccaagaaaactgtaatcatccactactgagatacaaatccctggttctgctttctgagttgacatcgccatatgataaatccctagttctttaagatgtttaactcgtgtcattttgagacacatgaattgacagctggggatgaagacagagtgagcaagaagaaaggagtgactgatggcccctccgggctggatgagtgcagccggggcagagtcctggcttgggacagctgcttatcggagctaaccaggtgttttgtacagcattagccccacctgagcttcttgcccatcttgggttccacatttgagttgggtgatagtcacagcacaatctcccttcctctcccaccagggaaactgttttttccaaagtaagacttgttcactct

SEQ ID NO: 613696 - DNA, 619 bp, Homo sapiens
ttctctctctctgtcttctcttcttataaagataatagctatatggggtggaagcccactctaatgaccacatcttaccttaattatatcttcaaagaccctgtttccaaaaagatcacattcacaggttagaacctcaacatctcttttggggggatgtaattcaaccccaacactgcctattaatcagatcrtgacacatgaggatatagggctttcatagcaccaagaaaactgtaatcatccactactgagatacaaatccctggttctgctttctgagttgacatcgccatatgataaatccctagttctttaagatgtttaactcgtgtcattttgagacacatgaattgacagctggggatgaagacagagtgagcaagaagaaaggagtgactgatggcccctccgggctggatgagtgcagccggggcagagtcctggcttgggacagctgcttatcggagctaaccaggtgttttgtacagcattagccccacctgagcttcttgcccatcttgggttccacatttgagttgggtgatagtcacagcacaatctcccttcctctcccaccagggaaactgttttttccaaagtaagacttgttcactct

SEQ ID NO: 613697 - DNA, 618 bp, Homo sapiens
tgtacattgactagggaacagaaacagtgctgggatattttattaaataactacaaccctgttaggttattattattagctccatttcacaatgaggaaactgaggccagggaagttaaagtaccttgcctgccctcacatggctcataagtgggggctctttgtacattggggtgctgtgcctgggctcacagtgccagcctccacaggccagctcttgctatggcaccgctgttcatgtttacagtttctctgcttctgacattttgggtggactggttgagccactgttcagcaggaccgcaggaaatacctgttccccattcttccagtccaaccctgatttctgtctcacacagggtcactgaagccacagggctaccaccgtgcttcctccatcactttgtrtctcctttgctgcccccaacagggattctggggccaaagcacacactggcttgcttaggctctggtctcaggcataggaagaaagcaaggaagacggtgggagttacccagggcactggctcacatggacctcctccctgccacccctccttaaggctttacttaaccaggtagttgtgggtgcagtaagggaggctcagcttggatgac

SEQ ID NO: 613698 - DNA, 391 bp, Homo sapiens
tggggggacaaacatatataccatagcatctacttaaagcccaaacttctggcataaggcaagctctctgctcaccctgtgatgcatgctaatcaatgtctgaggcccagtgaacccttacagtcgaccggcttctagctatcacttctgctcttacctattgagttagacacaaaccatgagctcccaaacctgcctagcytaattctacctgttatagtagttgcatgatctaactgagtgtggcacggaccaatgaagtacaggggaaaaagagtgagagttgtttttatacaacctaaaagttgaatgcttcaggaagacacatggaaaagctgatgcatgaaggagtttgagcaagctcattttcatgagatgctattgtgtggtc

SEQ ID NO: 613699 - DNA, 391 bp, Homo sapiens
tggggggacaaacatatataccatagcatctacttaaagcccaaacttctggcataaggcaagctctctgctcaccctgtgatgcatgctaatcaatgtctgaggcccagtgaacccttacagtcgaccggcttctagctatcacttctgctcttacctattgagttagacacaaaccatgagctcccaaacctgcctagcctaattctacctgttatagtagttgcatgatctaactgagtgtggcacggaccaatgaagtacaggggaaaaagagtgagagttgtttttatacaacytaaaagttgaatgcttcaggaagacacatggaaaagctgatgcatgaaggagtttgagcaagctcattttcatgagatgctattgtgtggtc

SEQ ID NO: 613700 - DNA, 571 bp, Homo sapiens
ggaatagcctggagtcatttgagcagataggctttggaggtcagcgtaggatggcctaggcttagagctgaaactcaggagccagrtgcctggcctggcttccagtcccagctctgccaatttccagctctatgaccttgggcaagtcactgaacctctctgtgcctcactagggcagcccaggggccagatggatcattgcacaatggggatgagagcactactctcaggttattatgaggattccacaaggagatacttgcttgtaactgcccagcctatggcaaaggctccaaaggtgttaaacgcatgagacagacctgtctacaagaggaaaacagctcggccctagctgcatcacaggggggcgaggctgagcaggcttttaactctgcagggggcttcctttcacagagctgctgctgctgctgctgatgccagggaggagctggccttccagagctccagaaaagattcccaccttgggctgacaggtgagctgaggacactgtgaagagaacaaaacctggcttcccaagaatctggggtctgggagagaggaagagggagg

SEQ ID NO: 613701 - DNA, 599 bp, Homo sapiens
taaaatggtgatagcaggacagaatctcaagagaccaaaaacccctgggaaaataggcataggtggcctggtgtgtgaagggtgggtgtaggtgcaggaggccccattccctcctgggcccccactgtgcaatcatgagctcacaatcaatgatcactgacggttcctcctgctctgaactccacactgttactggggagctcagtggagtggggaaggaagctgagaatgtggattcagaaaaccagagctcaaacctggtcttggctcttacttcttgcaggacctttggggcaatccacactgtctgtctccctccrgggtgcaatgagaggcaaaagaaagaacgtatatgacagcgtcttatgcccgagagggccagttggatgttagtagttactgttgcatcgttattggaacagagaagcccccaaaggcctgcttcccatcgttctccttgcccaagggctgggaatcctgcaggagggccagatctgtgctcaatccaggcaggcagtcaccctatgatttgaaaactgtccaaactatgcccggcccagcaaagcttgcctccgcataatggacctgttgaagcatgg

SEQ ID NO: 613702 - DNA, 571 bp, Homo sapiens
ggaatagcctggagtcatttgagcagataggctttggaggtcagcgtaggatggcctaggcttagagctgaaactcaggagccaggtgcctggcctggcttccagtcccagctctgccaatttccagctctatgaccttgggcaagtcactgaacctctctgtgcctcactagggcagcccaggggccagatggatcattgcacaatggggatgagagcactactctcaggttattatgaggattccacaaggagatacttgcttgtaactgcccagcctatggcaaaggctccaaaggtgttaaacgcatgagacagacctgtctacaagaggaaaacagctcggccctagctgcatcacagkggggcgaggctgagcaggcttttaactctgcagggggcttcctttcacagagctgctgctgctgctgctgatgccagggaggagctggccttccagagctccagaaaagattcccaccttgggctgacaggtgagctgaggacactgtgaagagaacaaaacctggcttcccaagaatctggggtctgggagagaggaagagggagg

SEQ ID NO: 613703 - DNA, 571 bp, Homo sapiens
ggaatagcctggagtcatttgagcagataggctttggaggtcagcgtaggatggcctaggcttagagctgaaactcaggagccaggtgcctggcctggcttccagtcccagctctgccaatttccagctctatgaccttgggcaagtcactgaacctctctgtgcctcactagggcagcccaggggccagatggatcattgcacaatggggatgagagcactactctcaggttattatgaggattccacaaggagatacttgcttgtaactgcccagcctatggcaaaggctccaaaggtgttaaacgcatgagacagacctgtctacaagaggaaaacagctcggccctagctgcatcacaggggggcgaggctgagcaggctttwaactctgcagggggcttcctttcacagagctgctgctgctgctgctgatgccagggaggagctggccttccagagctccagaaaagattcccaccttgggctgacaggtgagctgaggacactgtgaagagaacaaaacctggcttcccaagaatctggggtctgggagagaggaagagggagg

SEQ ID NO: 613704 - DNA, 571 bp, Homo sapiens
ggaatagcctggagtcatttgagcagataggctttggaggtcagcgtaggatggcctaggcttagagctgaaactcaggagccaggtgcctggcctggcttccagtcccagctctgccaatttccagctctatgaccttgggcaagtcactgaacctctctgtgcctcactagggcagcccaggggccagatggatcattgcacaatggggatgagagcactactctcaggttattatgaggattccacaaggagatacttgcttgtaactgcccagcctatggcaaaggctccaaaggtgttaaacgcatgagacagacctgtctacaagaggaaaacagctcggccctagctgcatcacaggggggcgaggctgagcaggcttttaactctgcagggggcttcctttcacagagctgctgctgctgctgctgatgccagggaggagctggccttccagagctccagaaaagattcccaccttgggctgacaggtgagctgaggacactgtgargagaacaaaacctggcttcccaagaatctggggtctgggagagaggaagagggagg

SEQ ID NO: 613705 - DNA, 553 bp, Homo sapiens
tgcctggggccgctctcttcttgaatgattagaaccagagggcaatcaaaaagaaacgaacttaatgcagaggagagaggggagccagcagctttggggacatttctcttccctcaagggatgaggtagattttcctaaatctataattaacaagatgaaaaaagacacttcaagaattcataactctcggaaaatactccagtttgggaaacactggtctggaacttgtggtgagtcagctcttgattcgtgaagacagagatgcacagttaccacattgagaagatagtagatgatgtaaacccattggagaaatggaaactttcccatgggaaaggctgcatgggtggaggaagcagtcctctggtggaatagaatgataacataccattcatcacagccccaggtattgtgctaagtgcttcacatttaactcatacaaccacccatgaagtaggtccaattattagccccattttgcaggtgaagaaatagaaccatgcaaatctaygcagttttcctaagaccctacagccagttaaagccaccgaa

SEQ ID NO: 613706 - DNA, 595 bp, Homo sapiens
taaagccaccgaagcaacaaatgctgacatctagaagaatgtgtgaataggtggctggagtcaacaaaygcctaattaatcaattggtgtcatcttatacacccatccctccaaaagttgctattatttactttccctggccccagaaaaagggagaccccaggacagtgtcctggactggaattaggactgctccattctataaacaggtcagcccctcattctgtgtgtgaccttgagtgagtgagacccttcctgatcctaggtcttggtctctacatctgtcagaggaggtagtgagaccagctggcttcgaaagttcaacccagtcccaccgttccagtacatgccagtctacctgactccatgggggaggttttgggggtggggtggatcttcacgttgcagctgctgtttatgacttttccaaggcccctcctgcctgggctcctcgcccccgtgcttggcatgcttggctctgtcttgcagcgaagcgagctgtgtaggagtttctagctgcctgtctcttttgggttctcccttttgggatgtcttttcacacctccaagtgctgggtgggagtggacgaatgcca

SEQ ID NO: 613707 - DNA, 595 bp, Homo sapiens
taaagccaccgaagcaacaaatgctgacatctagaagaatgtgtgaataggtggctggagtcaacaaacgcctaattaatcaattggtgtcatcttatacacccatccctccaaaagttgctattatttactttccctggccccagaaaaagggagaccccaggacagtgtcctggactggaattaggactgctccattctataaacaggtcagcccctcattctgtgtgtgaccttgagtgagtgagacccttcctgatcctaggtcttggtctctacrtctgtcagaggaggtagtgagaccagctggcttcgaaagttcaacccagtcccaccgttccagtacatgccagtctacctgactccatgggggaggttttgggggtggggtggatcttcacgttgcagctgctgtttatgacttttccaaggcccctcctgcctgggctcctcgcccccgtgcttggcatgcttggctctgtcttgcagcgaagcgagctgtgtaggagtttctagctgcctgtctcttttgggttctcccttttgggatgtcttttcacacctccaagtgctgggtgggagtggacgaatgcca

SEQ ID NO: 613708 - DNA, 603 bp, Homo sapiens
cctctccctcgagttcatgtcccttttattccagtagggctggagatactggcaggacaggggaaaaaccggggtctgagagtgcaggcatttgtcagtgactttccctctactacccctctgggtttccttgtctgcagtctctctactgccttctgcagagtggaaagttttaatatctcttagctttttacaaattaacacagaaattctgctgacaagccttaccctttccaaggtttaaatcccagggctcttgagctgtgacaatttaaatgagcaagattttcaaaaactgatgagtgaggttttaaatgtcttgtagaagcatgttgccaaattctctttaaagaattctgtaggacaaagtagtcggtgagcagttgcctgcaggtgcttgcatgtgcgtgtgtagtagtggtgggaaagctgtctgtgaagagtaattacaaaccataagagctggaagaaacttyaggaactaatccaccaacaagcacattttaaggatgaataaaacagagctgaggaaggtcaagtcacttgctcaaggtcacagtgtcatctgtaacttaggtctcctgactccagtctagcaacctt

SEQ ID NO: 613709 - DNA, 454 bp, Homo sapiens
gggctctcaggcctttggtcacagactgaaggctgcactctcagttccctacttttgaggtttggggactcggactggcttccctgctcttcagtttgcagatggcctattgtaggacttcaccttgtgatcgtgtgagtcaatattccttaataaactccccttcatatayacatctatcctattagtcctgtccctgtagagaaccctgactaatacagattttggtactgggagtggggcattacctaaggatagcagttagaagaaaaatataaacctttctagataccaaaagatatacctaactcctcacatccctgcaaaggagagaacaaacaaaatgtagtcacatggaatattctctttctttctctacgctcaggtacacacacacctatttacagaaaatacaaaggacacaggaacttgctaaactatcccacagggagga

SEQ ID NO: 613710 - DNA, 564 bp, Homo sapiens
agggtcctctgcctaggaaaaccagagacctttgttcacatgtttatctgctgacattccctccactattgtcctatgaccctgccaaatccccctctccaagaaacacccaagaatgatcaataaacactaaaaaaaaattaaaaaaaaaaaagacatcaagaacatggggtgtgtacttcctactaacttttgagacttgcagaggcccaggccaactgtcaagggtcaaagcactgcatgaacttaacagtgggagtttagagaaggytgggcatccagggcaccagaaggaggagcaggccatgaggaggtgaatgtgaaggccagccggcaatgcacactgaaaaccacaaaggccatgccaaggcaagcctcaatggcttcggcagctggtactggtggtccaggctccttgccaaggggctgaggcattgatgtaactctggggatgtgggttatgtgggcaaattgggggccaggcagccatgccctctaagaagaatcaagtcaatgtgccaactactactgccaaggtttgaggctttagtgctgacccagtga

SEQ ID NO: 613711 - DNA, 499 bp, Homo sapiens
tgcttacctcctgatgagtggcagggttcctaccagtacaggaccatggctctgggattggggacacctgacctaaagcacaatccataaaaaggaaaaactgataaattggagctcaacaaaattaaaaacttttgctcttccaaagaccctcttaaagtcatgtaaacaccagctacagactggaagaaattgtttgcagaccacatatccaacaaagtttttgtatctagaatatataaataactcagcattcaacagcacaagacaaaaagcccaattagaaaatgggctgcttccggccgggcgcagtggctcaygcctgtaatcccagcacttcgggaggccgaggtgggcagatcacctgaggtcaggagatcgagaccatcctggctaacgcggtgaaaccccgtctctaataaaaatacaaaaaattagccaggcatggtgacgggtgcctgtagtcccagctactcaggaggctgaggcaggagaatgg

SEQ ID NO: 613712 - DNA, 499 bp, Homo sapiens
tgcttacctcctgatgagtggcagggttcctaccagtacaggaccatggctctgggattggggacacctgacctaaagcacaatccataaaaaggaaaaactgataaattggagctcaacaaaattaaaaacttttgctcttccaaagaccctcttaaagtcatgtaaacaccagctacagactggaagaaattgtttgcagaccacatatccaacaaagtttttgtatctagaatatataaataactcagcattcaacagcacaagacaaaaagcccaattagaaaatgggctgcttccggccgggcgcagtggctcacgcctgtaatcccarcacttcgggaggccgaggtgggcagatcacctgaggtcaggagatcgagaccatcctggctaacgcggtgaaaccccgtctctaataaaaatacaaaaaattagccaggcatggtgacgggtgcctgtagtcccagctactcaggaggctgaggcaggagaatgg

SEQ ID NO: 613713 - DNA, 499 bp, Homo sapiens
tgcttacctcctgatgagtggcagggttcctaccagtacaggaccatggctctgggattggggacacctgacctaaagcacaatccataaaaaggaaaaactgataaattggagctcaacaaaattaaaaacttttgctcttccaaagaccctcttaaagtcatgtaaacaccagctacagactggaagaaattgtttgcagaccacatatccaacaaagtttttgtatctagaatatataaataactcagcattcaacagcacaagacaaaaagcccaattagaaaatgggctgcttccggccgggcgcagtggctcacgcctgtaatcccagcacttcgggaggccgaggtgggcagatcacctgaggtcaggagatcgagaccatcctggctaacgcggtgaaaccccgtctctaataaaaatacaaaaaattagccaggcatggtgaygggtgcctgtagtcccagctactcaggaggctgaggcaggagaatgg

SEQ ID NO: 613714 - DNA, 592 bp, Homo sapiens
ctgaacagcataaggttatgatagtgaccatattgagaaggtaagatagttgttgtaggattggccataagtaaggttccagctttggggaaaatattagtaaactaccctctgaaatgagtattcttactcatttttgtgaaagtctcccccaggatgaattatcatgtgggatctgctttaagataatccaataagaaatagaagaaggaagattggatacagattaataactgatgaaaccagatgactggcacatgggatttcacattattctttctacttttgtgtagaattaagagtttttataataaaaatgttttacatctccccaggagacacccacctaggacatgttttgtaaatgtgttcctgataatatagcactgccaaaaccccaggactgtctctcagtcaaaggtattgatttaacatgtagcttttgaagggcacgctgtattcttgttgcctattgcctgtttgctccaaaggagtgtactcatgacagaaatttgggkaagttgataaaagaatattaaaacactgctgcatatgacttgggttaagagtatgctttcttgtatatgcatac

SEQ ID NO: 613715 - DNA, 577 bp, Homo sapiens
atcagaaaggaaggcaatagcagatataaaaatgcagagagaaaaaaaatggagataaaaggaaatagaaacaaaaagagacacacaggctctctgcagtgcggaggcctggtaggacaggaagtcgaggaggggaggtgtggaggtgtgagattctcagagggagagagtggaggaggcggccagccatgcaggaaagagaggcagccatgaagagattgtgttcaggctgcaatgtttaagatcctaaataatagtaatgacatagtgtgcacgtgcatgtgtgcatgcatgtgtgtgtgtgtgtgtacacctctgggtgtgtgctcatgagcattaatggcacagaaacagagcacaggcacaaaggcaggaagcagatggcctgggaaaaatccaaggggcttttgagggcgcttattatcccaggcagagccttgcctgcttctctgaaggcacataatcaatacttcctgaataatgttgaacgrtgcaatccagtcctttaccaagagggtggatcacaggtgggacagtaaatgcagacatggccctcctacccacttttcctacttta

SEQ ID NO: 613716 - DNA, 339 bp, Homo sapiens
ttccaaaatgatgcatgtaagagataattcatcatagcattgtttataacagcaaaagatttaaaccaaygccttctgtagaggaccggttaaataatggtacctccacacaatgacatagtataccatcatgaaagaatgaggcatctttaagtactttaaaatcttgaagataaatcaagaggaaaaggttagagcagtagttaaaagcagactttcatttgtaaaaaggaagaaggtggataagaaatatgtttttgtatttgtttacatctttcctgagattttgacctatacaaaagaaactgactactagcatcatccagggtgagaaactga

SEQ ID NO: 613717 - DNA, 615 bp, Homo sapiens
gtccatttcacctaagttgtcaaactgatgtgtgtagagttgttcatagtactctcatgttatccttttgatgtctrcagggtccgcagtgatatctgctgtttcattctttatactggtaatttgtcttctctctttcttttttgttagtcttgctagaagtttgccaattttattaatctttttaaaaagtttgtgtcttattggatttctctattgtttttctgctcttctcttttcatttctttcattccccttgttttatgtttattatgttcttctttgtctaagttcttgagaaaggagcttaggttactgatttgaaacttttcctcttttctactgtaaatgttaagtgctatacacttctctttcagcactgctttagcatagatttcttttttacttgccttgagacctcctctttgattatttagcagtgtgttatttgaacatttcattttctctttctttttatgtgtagtttaattccatttttgttagaaaacataatttgcataatttcagttatttcaaatttgttgaggttatttttgtggcccaggatgtggcctctcttggtatctgttccgtgggctctttagaatgtgttct

SEQ ID NO: 613718 - DNA, 245 bp, Homo sapiens
gggaaggtgagtttcctgtgttacgtytttctagccccacatgtccagccagcatgccctgtatctttcaaccatattgtacttgttaaaaattccttaactgcatcatgttctctctcattgccaagatgttgccatgctgttcgtgctgcctagaatattgttctctcaaccccatcatcccatcgccaattcttcagataattcctgctcgtcattcaggttccagcttagcttaaatgtca

SEQ ID NO: 613719 - DNA, 615 bp, Homo sapiens
gtccatttcacctaagttgtcaaactgatgtgtgtagagttgttcatagtactctcatgttatccttttgatgtctacagggtccgcagtgatatctgctgtttcattctttatactggtaatttgtcttctctctttcttttttgttagtcttgctagaagtttgccaattttattaatctttttaaaaagtttgtgtcttattggatttctctattgtttttctgctcttctcttttcatttctttcattccccttgttttatgtttattatgttcttctttgtctaagttcttgagaaaggagcttaggttactgatttgaaacttttcctcttttctactgtaaatgttaagtgctatacacttctctttcagcactgctttagcatagatttcttttttacttgccttgagacctcctctttgattatttmgcagtgtgttatttgaacatttcattttctctttctttttatgtgtagtttaattccatttttgttagaaaacataatttgcataatttcagttatttcaaatttgttgaggttatttttgtggcccaggatgtggcctctcttggtatctgttccgtgggctctttagaatgtgttct

SEQ ID NO: 613720 - DNA, 527 bp, Homo sapiens
tatttttagtattatattttaatataccttttaactttttagctatctctcttcatattatttttaatggtttctctataaagtgtaatatacatggacattttttcacagtccatttagaattaatagtttaccacytcaggcaaaatataaaagctaggaatgtccattttaaagtggcatccaagtgtaaaggcaaggtaaagtagagtgtgtactgtttgtttagtactgaagtggtgaatatgaatgcatacatgtttgaacatgcatatagtatttctggaagcccacgcaagaaatccttagtagtgactggctctggggaggtcaagggttggagggaggacagggatgggagcagagttgtttctcatggtaaatctccttgtatcttcatttttttttttaccaagtttacctattgccttctcagaaaataatttgcagaaagctttatccatttattattcaaatatatccctataaatgtcaatagtgacacaattgttgaagattttacaaaa

SEQ ID NO: 613721 - DNA, 527 bp, Homo sapiens
tatttttagtattatattttaatataccttttaactttttagctatctctcttcatattatttttaatggtttctctataaagtgtaatatacatggacattttttcacagtccatttagaattaatagtttaccacctcaggcaaaatataaaagctaggaatgtccattttaaagtggcatccaagtgtaaaggcaaggtaaagtagagtgtgtactgtttgtttagtactgaagtggtgaatatgaatgcatacatgtttgaacatgcatatagtatttctggaagcccacgcaagaaatcyttagtagtgactggctctggggaggtcaagggttggagggaggacagggatgggagcagagttgtttctcatggtaaatctccttgtatcttcatttttttttttaccaagtttacctattgccttctcagaaaataatttgcagaaagctttatccatttattattcaaatatatccctataaatgtcaatagtgacacaattgttgaagattttacaaaa

SEQ ID NO: 613722 - DNA, 527 bp, Homo sapiens
tatttttagtattatattttaatataccttttaactttttagctatctctcttcatattatttttaatggtttctctataaagtgtaatatacatggacattttttcacagtccatttagaattaatagtttaccacctcaggcaaaatataaaagctaggaatgtccattttaaagtggcatccaagtgtaaaggcaaggtaaagtagagtgtgtactgtttgtttagtactgaagtggtgaatatgaatgcatacatgtttgaacatgcatatagtatttctggaagcccacgcaagaaatccttagtagtgactggctctggggaggtcaagggttggagggaggacagggatgggagcagagttgtttctcatggtaaatctccttgtatcttcatttttttttttaccaagtttacytattgccttctcagaaaataatttgcagaaagctttatccatttattattcaaatatatccctataaatgtcaatagtgacacaattgttgaagattttacaaaa

SEQ ID NO: 613723 - DNA, 529 bp, Homo sapiens
catgcatgaatttattcaacacagatgtacctaaccctctccccattctgagccctgtctcagttctgtggaagggccatggcatggtccccaagactgtaagaccccatgccacaatgtggtgagtgcaaccgcagaggtggacacacagagccccagagcacagaggagagggtgattggtttagtctaaggggccccgagaatgtggtctatagaaggcattgtttgaagkgagacttaaggaagatgtaaaattgtgcttggtgaagaagaacattccagacagagagaacagcttgtgtggtctggggcttgagagaaggcacagtatgctctgagcagtatgagataataagatggccagagcagaggtcatggtgtcgggggtatacacccacatgcatctccctgagctccccacaactccctgtttgcgtgaggatatacagagcaaatcatcactggatggactttgaggttgggaagctttgatctgagattcccagctgtagagtggttctcttctc

SEQ ID NO: 613724 - DNA, 560 bp, Homo sapiens
caatgctgtagaacaatgttgacaagataatagccttctgaaaccacataaatgccaaagcaagtgtacagactgataggtggaaaaacagaaaaacaagtggcaaatggcccacaagctctttgcagtccatgttggtttatttgcctcttttcccagcttctgtcatgacattcaagttctggtctccatcatgccccagttcccaggcatgtgggtcaagactgagaacggcaggtttcatctacggtagctggtccccatcgtccctttacttgcagactcacagaaaatgagtcccatcggcccccacgtctggaggggctagaggtcatgtagttcagactctcctagtgcctgccattgccagataaagaagatgagaccagagtcaagaaggatttgctctggggaacttctgagctgatttatggaaaagagctggagccctggattccttcccartttgccacttctccttactctagccagaatgccttacttagatgcattttctcagtggagagaagggagctgcaggaggtggagaagggatggtt

SEQ ID NO: 613725 - DNA, 489 bp, Homo sapiens
gtcagcttctatccttcaggcgtgagggaaggaaaacatgaagcccccacctaagtctctgtccctaattcacactcctgcctccctcccagcacagaagccaaaagaaatattagattcaagcacctttattctgagagtgcatcccccttcttaaaaccatcagtaactaggggggttggaggataattatctgctctacttgaaaaaygaaatcttccttcattccctaccagttattaacatgaaatgtaaatacagcagcaaatgacccattacccatggcctgggaagttcttttaagcacagtgtctgcttttgcaggccatataatagagttcttcagtttttgatttataaaatcatgatttcaatgataccaaccattatttacttgtttattataaaaacaatagaacaacaataaaagaagttaaaggacgccattctttccctcatagggaaagaatgtttgctcataggcatgtg

SEQ ID NO: 613726 - DNA, 531 bp, Homo sapiens
acaaggcagaaatcgaggtgttggctgacctggaatcttccctgcaggctctggggaagaatccacctccaagatcatacaagctgttggcagaattcagttccttgcagttgtaggattgagatacccattttttatgccacctgccaggcaggtgttgcttcagtatctgagggcccctcctcgtcctttccatgtggccccctcatctccaaagccagtggtggcacctcaaatctttcttgggcttcacagcttcctaaagccccttctgtgaccagctggagaaaacactgatttagaagggctcatggaattgggttagaaccacccaggtgatctcacattctgaaaatcaaccaattggtaacctacattacacctgcaaactcctatttgccatgtcatgtaatatagtcacaggactaatgtcaggggcagctatgakgggaacagcatggaattctgcttaccacaccatctgagtagatggagagtggtgtgcaggcagaggtaccggggaaggagaga

SEQ ID NO: 613727 - DNA, 661 bp, Homo sapiens
ctcacatggtggatgtaaggacaaaataagatacggccttgaactgcctactcggtgctgaggtttgacaccaatagatttgtgtggtcagctaaataatgccccccaaagatgcccacatcctgatccttaggacctgcaaagagactttgcagatgtgattaaattaagggtcttgagatggggagatgatcctggattgtctgagtggcccaatgtgatcacaagcatctttataagaatgaggcaggaggatccattggagaaggagaygtgatgatggaagcagaggtcagagttgtgaagaagagtccaggagccacagcataatcttcctctagaaacttgaaaagccaaagaaagccagtttctttcagagactccagaaggaacaaaaccagcagacacctgaatttcagacatctaccttctagagctgtcaggtaataaactgtgctctttgaagtcaccaagtttgtggtgactgcaccagtaggaaactaacataatacagacatttggcttccctccttcatatcagtactactagactgtagggctcatgtgtcacagttctctgaaactctcacagttctaccgcaatgccccacacagaatatcctgctagagattgcctaaaaggcaggagagcaagttgcgt

SEQ ID NO: 613728 - DNA, 583 bp, Homo sapiens
gtgagggtaagaaaatatgagcaggcatcagcagcctcagtaccacgcttggaagtgtcttggcttagataaaaggttatatgtcatcctaagtataagacacagtccttcccttcaaaggatgaatttagaagggaggctaagaaaagtcttaaacataaaaaaaagtaaaaagaaaccataagagaagaaacaggatggcataggctaaatgccaagtgagtctagtcatcaaggagttaggggaggaggtgacttctgggacctgggatggaggagaaggygcctgaactgggtggaactgggtgagcaggcaagtagcagagggcatgagcagggacctgcttcaccgagatggctgtgttttgcctttgtatccaaagctgacacaatgacaggtggctgctgctaacttggagaccccaaggtgtggtagagaaagactgatgctcatccagagatgcctctggccacctgcgccctgcaggtgcaaggcagtcttgatttgcagctgaggctgctgtttgggaagctgtcatggttcagaggcttttcttcagggaagcataaaacaaagaaggag

SEQ ID NO: 613729 - DNA, 566 bp, Homo sapiens
tctgctccctgcttcccaccgtcttagctccttacatcccaagacagcctatctgcattagccaagtccctcaacttgctctccctgcaagacttgctmgttctgacttcccagatttctactttcacattctccctgccttcaagaggtccctccccttagcaaatccatttccattgcttgaagccagaagaggtgacaacagtgaactttcccaaagactaaacactcactgcacactgatcaccatgactaatcagtgtgcccttcaagtcaggacccacatacttgatgattgaatgaacaaataaagaagccttcctggctaggcctccctgttcagataatcccccttgatacggcgagtctcagcatgagtgggtagaatagttacagcttgagtcgtttccccttaccccacagccccctatatgtagcaatttgcaattttgctgaggcagattttagtgtcttgctgtgaggctgatgcttaaagtgacttagctagagagagaaccctacagagcattcagcctccaaatttaaactcggttctgttttactct

SEQ ID NO: 613730 - DNA, 566 bp, Homo sapiens
tctgctccctgcttcccaccgtcttagctccttacatcccaagacagcctatctgcattagccaagtccctcaacttgctctccctgcaagacttgctagttctgacttcccagatttctactttcacattctccctgccttcaagaggtccctccccttagcaaatccatttccattgcttgaagccagaagaggtgacaacagtgaactttcccaaagactaaacactcactgcacactgatcaccatgactaatcagtgtgcccttcaagtcaggacccacatacttgatgattgaatgaacaaataaagaagccttcctggctaggcctccctgttcagataatcccccttgatacggcgagtctcagcatgagtgggtagaatagttacagcttgagtcgtttccccttaccccacagccccctatatgtagcaatttgcaatttygctgaggcagattttagtgtcttgctgtgaggctgatgcttaaagtgacttagctagagagagaaccctacagagcattcagcctccaaatttaaactcggttctgttttactct

SEQ ID NO: 613731 - DNA, 603 bp, Homo sapiens
gttcaatgttcatttactctatgtgtaaatacatgagtggggactgtactgtgcaactgtgcttcagaaatgtagttctagacaggaatgcatttcagggaaaagccaggaagctgcacaaacattttagcattcaaaaacatgaggatttacaatgtttcccagataaatcactcatgcaagcccacagcttctcctgcacatggccatctgccccattggaatttcctgctgttctttcaggtgcacgtggttgtgtcctcaacttaaacagwttcttgagggcaggcacttggtgtcgtgtcttcatgtccctcacagagcttgaacagtgctggcaagatcacagaaggtggagagtaaatgtttgctgactaaccaatgggaaggttcccttgggaaaggatggatttgcaactctgcccatgggccctagagccacccatgtggtgcccctttctcagggagcaggtgcctacccctcccctcctggagtagccacatcagggcagctctaaggccaagactaccttcagcagtacaagaatcacagactgttaaaaatgtcagagcttacaggccacctcattcaacctccttgtt

SEQ ID NO: 613732 - DNA, 559 bp, Homo sapiens
gggcccaggttcacattaaccttgcacacaggaaatagttagtgaatatagctgtggaataaatgaatgacctctacaattagagtatcatatcctggtatttttgagatgagaaaccactctgcctctcacctgcagccctaagcttccctgaggcttctgggagttctggttggactgatgagctggaggtgaatgctaagggggaccttatctgcaacctacacgcaatcactcacccctcttcccatatcctgaattgcctacagacccacagacaggcaccagggctccatgattcaatkgttttaactcgaacagcatttgttattgtttttcatttttaatttttgtggtatataataggtatatatatttatggtatacatgagatgttttcatacaggcatgcaatgtgaaataagcacatcatggagaatggattatccatcccctcaagtatttctccattgagttgcaaacgatccatttacacaagttattttaaaatgtacaattaagttattgttgactacagtcaccttgttgtgctatcaag

SEQ ID NO: 613733 - DNA, 586 bp, Homo sapiens
aaaacactctggttccttaacaagagggtaatgtacctgttttctatttctaacgaacagcaccacaagatcaagcatttgtcatgaattaggaggcaagaggccagagttcttgatcaactcaagagttaagccattccacatacccagttgtgcccctccatgtgtgccaggcactgtgttgggcacggggggtatgcagatagtaagstatagtccctgccttcagtgtgcagcataatgcaatcgtctctttctctaacattcctgccaagtacaagggatataaacacaaggaaaacatgatccctgcctttgaagagcttataacctggttcattcatttaataaacattatttgtgaggtgctaggctaggctttgggaatcacagctaaattagacagttactaccttcaaggaagctacattctcttaatgctaactgaactgcccttgctgggttcctggatagaattttggcatctagcatttggaatgctagaatcatctggtccacccttccattcagtgtgggatgagggtggccacagaaatcttctggccaatgagataaaactggaagc

SEQ ID NO: 613734 - DNA, 586 bp, Homo sapiens
aaaacactctggttccttaacaagagggtaatgtacctgttttctatttctaacgaacagcaccacaagatcaagcatttgtcatgaattaggaggcaagaggccagagttcttgatcaactcaagagttaagccattccacatacccagttgtgcccctccatgtgtgccaggcactgtgttgggcacggggggtatgcagatagtaagctatagtccctgccttcagtgtgcagcataatgcaatcgtctctttctctaacattcctgccaagtacaagggatataaacacaaggaaaacatgatccctgcctttgaagagcttataacctggttcattcattyaataaacattatttgtgaggtgctaggctaggctttgggaatcacagctaaattagacagttactaccttcaaggaagctacattctcttaatgctaactgaactgcccttgctgggttcctggatagaattttggcatctagcatttggaatgctagaatcatctggtccacccttccattcagtgtgggatgagggtggccacagaaatcttctggccaatgagataaaactggaagc

SEQ ID NO: 613735 - DNA, 472 bp, Homo sapiens
taccccaccctcttctcaccctccagccccctgtccttcacccagcccacttcagtgccctccctgttccatcctcagcctctcccttggggcagctgtccccactcgacctcctcctccccacccacccactcgcctctgaggtcccagaagaagagcatcttccacctgttgcctgggctgggtcctggggtgaggggaggctcagaaatacttggatgagggtcaaggcatgcaggtggccttcaactcaactgcactcagcacctctcaccctctcaggctcagctgtctttggggtgaacaagagccagtccttgcaatggccaaggcccagccttgttagctttctggcctccccactccagccccctgctctccctcctccagccacactgagtttcttttcaggtttttttttttttccgagatggaatccagttctgtygcccaggctggagtgcaatggcat

SEQ ID NO: 613736 - DNA, 559 bp, Homo sapiens
cctcctgggctcaagagatcctcccacttcagcttctccagtagctgggactacagacatgtgctgtcgtgcctagctaatttttgtagtttttgtgagatgggttcttactgtgttgtccagactggtctggaactcctggattcaagtgttctgcctgcctcagcctaccaaagtgctgggattacaggagggagccactgcacctggctgtctttccatttttttggtatcctcttcaatttctttaatcagtgctttgtattcctcatagaggtcttttgcttccttggttaaatttatacttaggtattttatttcattttatagctgtcataaatgggattgccttcttgatttccttatcagctatttaattgttcatatataggagcaccaytgatttttgtatattagttttttatcttacaactgtactaaatttgtttaccagtgctaagttttttggtagcatctttaggtttttctatatgtaaaatcatgttgtctgcaaacaggaacaatttgactttctcctttcccatttggatgcccttta

SEQ ID NO: 613737 - DNA, 398 bp, Homo sapiens
gaattcccttagattttgattgtctgtgaaagattttatttctccatcatttttgaaggaaagctttgctgtgtacaatattcttggccaatagtttatctttcaggactttgaatatatcatcctgttctctcctggcctgaaagktttctgcaaacaaattcactgttagtctagtggagattcccttatagttgacttgatgcttttgtcttgttgcttttaaaattctttttttttgtttttgacttttgacaatttgagtataatgtgcatcagagagaacctgtctggattaaatatatttggggttgtttgagcttcttgaacctggatgtctatctcattctcaagacttgggaagttttctgatattatttcattaagtatgtttctct

SEQ ID NO: 613738 - DNA, 498 bp, Homo sapiens
atgatttttttgataaatttatcaaaaatattcctgagaaaataattcaaagtagaaaaaaatcactaaattgccagcagaaaaaaaaaggtaaaacaataaaacaatttaggtcactagaactaaatgattggtaattaaaacttgagaagaacttcttagcaccatctttcccttccccccccattttccttttttacttttatttattcttttttgtattgttgttattcacaagcaggattcatgatcattataactaatataacaatataaaaataagtaaggaacaagtcaatgatatcccccaacwctgtatgcagtaaatgaatgttaattctctaaaataaatgtttccacttctctccttctttctgtgaggggatgatagaagcatcacaaagcagggaacactaatacacacacacatatgcacacacacgtactccatatacatctacgtgggagttatttttggttgtttttgtaaaactaaaa

SEQ ID NO: 613739 - DNA, 498 bp, Homo sapiens
atgatttttttgataaatttatcaaaaatattcctgagaaaataattcaaagtagaaaaaaatcactaaattgccagcagaaaaaaaaaggtaaaacaataaaacaatttaggtcactagaactaaatgattggtaattaaaacttgagaagaacttcttagcaccatctttcccttccccccccattttccttttttacttttatttattcttttttgtattgttgttattcacaagcaggattcatgatcattataactaatataacaatataaaaataagtaaggaacaagtcaatgatatcccccaactctgtatgcagtaaatgaatgttaattctctaaaataaatgtttccacttctctccttctttctgtgaggggatgatagaagcatcacaaagcagggaacactaatacacacacacatatgcacacacacgtactccatatacatctacgtgggagtyatttttggttgtttttgtaaaactaaaa

SEQ ID NO: 613740 - DNA, 525 bp, Homo sapiens
tcagctccttaaccaggctgtaaacctcatcacagtgcatgccagttatcactgtagcacagatgtgtaaaaacactgcttatagaagacctctgatgccagaacttacagacaagagattgtgccaagatccctacttaataagctccctaactctaaccaggccacagataagaaatacctcattaattcctccatccccagcctcccagttatggtccaattgttaagcaccttgaaattccattgaaataaataaatgtgagcattcactaaaacacgataagatcggagaatttagttgttaaggtgcacagatatttaagtttctgacatgtaatcactggttttagtttaagactatccttactagattatattagggactagttatttgatcttctttgtttgtgtgttcgtttgtttgttttttgagatggagtctcactctttcayccaggctgtagtgcactggcacagtcttggctcactgcaacctccgtctcccatgttcaagcaattcta

SEQ ID NO: 613741 - DNA, 490 bp, Homo sapiens
tgtttaattttcttttgtgtaggaggtgttcaaagcaaaagttagatgacagacttcaaaatcatttcagattctgcagcactgtttgctacaattaggagaactggttctgtcaaaaccctaacttacggcttcgttcattctggacatttttatttttcataccctgctctcaaatacaatgggtatcttctttttaaatctgcacacatctgactcagttcctcccacagtcctccgcttatggtttggaattggaattttcatttcactaagaaagggagaaattcttgctggggaatggttcttcaggcattcagagccctcactatctttggaaaagcaaggttttttctccargagttttgaagactgcacgttcaatatctcattttgtttgcttccctctcttggctccctcctacccacagggtgccacagcacgctgtctttcccagtagcaaaggcgctgtgtctcaaaagctggcta

SEQ ID NO: 613742 - DNA, 575 bp, Homo sapiens
gatgatgtctgaatctctagctccaggccagatttcttgtcaggctctctgaccaatctacacaacttcctgctaacctctccacrtgatttccccctggcacctgcaactcatcgtcttcctcctgcccaatgtgctgtttctcctgtgtttctcatcccagggaggcatcactatccctccatccagcgctgtgagggcatcctagactgcaccctctcacttcctccctccacccctacgctcttctgctgttcctccaccccagtcctcctagccaactgggtgcctccacccactgactctgccttctacaaatctcaggaatctcttggttccttcccacccccactgccattgattttgcttagctttctgccactttttctcagtactatctcagtagccttcataccagtctcctctctcccaatccctcctacccacgtccccctagcaattcatatactgaagtcctaacacccagcaccataggatgtgactgtatttggagatagtttagaaaattcactcaggtcaaatgaggtcataagggtgggacttcaatcccatag

SEQ ID NO: 613743 - DNA, 618 bp, Homo sapiens
acctgtggccccacccaggatggctttgaatgtggcccaacacaaattcataaacttatttaaaacattatgagatatttttgcgatttcattttttaaagctcatcagctatcattagtgttagtgtattttatgtgtggcccaaagcaattcttcttccactgtggcccagggaagccaaaagattagacacccctgaataaatggtgtttcacaaggctgtaggaggcagataatacatcgttgtttttcttgtgtaacgttagcagttgttgatattcaatacctagaataataggagctgccatctggcatgtgaacactcattggctgagaacacrcaggacagtcagccacactagctctcattggttgagagccttcaatagtacttagaggaagggaaaattatatggtcgtgtgtttgtgaatgtataaatacagtataatattgtatacatacagtataatattgtaatcaactcttctacattaattttaaaatataaaggatgaccaagcatagtgtctcacggctgtaatcccagggctttggaaggccagggtgaaaggattgcttgaacccaggagtttgagaccagcctgggaaacagagt

SEQ ID NO: 613744 - DNA, 564 bp, Homo sapiens
gtttttgtagagacagggtatcactttgttgcctaagctggtctcaaactcctgacttcaagcaatcctcctgctttggcttcctgaagtgctgggattacaagcgtgagccaccctgcccagcttcaatcagtattctttttttttttttttggagacgatgtctcactctgttgcccaggctggagtgcaatggtgcaatctcaactcactgcaacctctgcttcccgggttcaagcrattctcctgcctcagcctcctgagtagctgggattacaggcacacgccaccacgcctggctaatttttatgtttttagtagagatggggtttcaccatgttggccaggctggtattgaactcctgacctcaggtgatccgcccacctcggcctcccaaagtgctgggattacaggtgtgagccactacgcccggcctcaatcactattcttacaaactgcacaccatttgtagactgtgaaataaataaagtggatagcaaccagcccttttttaaaaaactaaaatagactagataaaacataaaagaaatattcattcataa

SEQ ID NO: 613745 - DNA, 564 bp, Homo sapiens
gtttttgtagagacagggtatcactttgttgcctaagctggtctcaaactcctgacttcaagcaatcctcctgctttggcttcctgaagtgctgggattacaagcgtgagccaccctgcccagcttcaatcagtattctttttttttttttttggagacgatgtctcactctgttgcccaggctggagtgcaatggtgcaatctcaactcactgcaacctctgcttcccgggttcaagcaattctcctgcctcagcctcctgagtagctgggattacaggcacaygccaccacgcctggctaatttttatgtttttagtagagatggggtttcaccatgttggccaggctggtattgaactcctgacctcaggtgatccgcccacctcggcctcccaaagtgctgggattacaggtgtgagccactacgcccggcctcaatcactattcttacaaactgcacaccatttgtagactgtgaaataaataaagtggatagcaaccagcccttttttaaaaaactaaaatagactagataaaacataaaagaaatattcattcataa

SEQ ID NO: 613746 - DNA, 586 bp, Homo sapiens
cttttgatggggttgtgtttttttcttgtaaatatatttaagtgttctttagattgaaaaaaaggataagatttataaggaaagactagctttttggcatttaagtgaccaaggcctcactagggcaacacaagcaattctaaaaccccacccaggtggatacagttaatgtcatgcagcctgggatctcctcccttatctattttgtcattttatgagtacttatagccacacaactaaagaaaaaacaataacttaggataggcattatgaaacaaagaacaaattgtattttcttttatttgtatttcctctctcttttctttcccccctatttgttgaaaaaagtgttagtatgtgaaaagaggaatagtcgcagttaaaacttcatattatatataaatctaatgcagagtagaarataaaacattgaaaaaagtgagattagaaaataagaaatcatcatcaaggtgtcaaaaaacagcgaatgacaagtataacaaaaatcatcaatgattttacaactttttgccatgaagaatctttccagcagatccgtacactgcctcctatcttctctgcccca

SEQ ID NO: 613747 - DNA, 431 bp, Homo sapiens
ggtgcctacctctgaaggctgctagctgcaaaaacaaattcttaagacaagctagaacttatcctttttcctttaaatgtgatagcatatcattataaatcaggtattaggagagccttctaaacaaataaatgtatggatttttttttaacaggcatatgaaaacatgctaagattagttatttaaaaaccaggcaactccagagcaaagtgatatttaataaaccacatgctccttttttttaggatctatttcaaaatctatcaagttttctgagtggcaaaatgattttatccttggtttttctcttcaattcttataattgtaacaaaaaacacataacttacaatatactatcttaaccatttttaggtatacaattcagtggtatcatgtacattcayatagttgtacaatcatcaccaccatc

SEQ ID NO: 613748 - DNA, 602 bp, Homo sapiens
cctcatataagttgttgcataaaccataattaccttcctttttgtagccaaataatatccatcatatgtagatgccacatttkgcttatccattcatctgttggtggacacatgggttgttcaaacattttatctattgtaaatgatgctgctatgaacatgggtatacaaatattcttcaagatcttgcttctcattattttgtggtatgtacccagaagggatattgctggataactggtaaatctatctttaagtctttgaagaatcaccgcattgttttccacagtggctgtgccattttaaatcccattaacagtgtacaaagtttcaaatttcttcaagttcttgccaaaacttgttatttttttattaaaaatattgatttcaatagctttaggggtacaagtggattttggttacatggatgaattgtataatggtgaagtctgggattttagtgtacccattacctgagtagtgttatttgtacccaacaagtagtttttcatctctcagcccacttctccctcccctcttctgattctccagtgttcactacattatactactttgtctgcctttgcatactcatagcttag

SEQ ID NO: 613749 - DNA, 540 bp, Homo sapiens
tggataagtatattaatttctcaatttttttcttctgtaaaataaggatagtaatacctgccttataaagctatagtgaggaccaaataatataacatatttaatgtctcatgtacagtaggtcttaaacgggttatttttaaattttctaccacagtgcagggccctagtgtttttgattaatacataattaatacataattttcaacttctttaactcccatggtttcttttaagtgtctttacattctgcactttaacaatacaagtaaaactcttaatagagcttactatgtgaaagaaataattgcacataagtatatattacatattaaatatatgtattatatattatatattatatatgtgtgtatatgtatatatacatgtgtatacacagtatatatgtgtgtgtgtatatatatatatatamacacatacatatacacatatattggctcaattatccacacataagctctaagaggtagaaactattataatattcattttagaaaaggaagatgtctaagagaggat

SEQ ID NO: 613750 - DNA, 538 bp, Homo sapiens
tgtatatacaagctgctatggtttgaatgtttccccaaaaaagcatgtgttggaaacttaatcccaaatgtaacagttttgaagggtggggcgtaatgagagatatttatatcaagagaaatccaccctcatgaattgattcttgagacttacttcactttcttgccctctcacagtttttttctaccttcctgggacagtgcagcacaaaggccttcaccagttgctgaggcaccttgatattggacttcccagcctccagaattgtgagaaataaatttcacaaaatgaccttagtcacaagtatagcagtataaattcattggaggcttttttttttttttttttttttttttttttttttttttggkgaattagcccattctctcttcaggaagtttatatattaaactaactttcagttaaatacagaagctctttgtataaagagaagtatgaaatctaccactttgttcatctttgatagactttacctcatacttcctttgatagactttagcccatacttcatgttagt

SEQ ID NO: 613751 - DNA, 566 bp, Homo sapiens
atgaatcaaggcatcacgccacagcctgtctatgtgatgctgttgttggattttgcactagctgtctccactgtattccaaagtttacttacagggaagcactggctggattaacaaagcatctcaaagtcctatggcagacaaggtagactaatttcttacttcttgcatattctgccatagtatccacaaacagtttgttttcaagcaaagcacagaagtgcatttctttttttwaaaaaaagtgattatgagcaatgtttaaaataaatatccataaagccagaaaaggagtttaatatttaatagttggcctgttgccaatgctcttttgaatactgagtactgctacttaaagtaggaaaaacaaagtaaaatgctattttatataatactacctcaatacccaacaagttactcgtctactaaagagtaaaacaaacaaaccaaaatcccattttttttctccctttgaagaatcaattctttattaccatacgacgagtctggaaaatggagatcagctagaatgtttataaaaggcagacttggaatgtttcgactgc

SEQ ID NO: 613752 - DNA, 622 bp, Homo sapiens
caataaacatgaaaactgaaaaggctctgactattcctagaataaaaacacttgcttaattttattaaatacataattttccaattttgttgaccctagaatattctttatcccctacctcatgcaatacactgttagcattctacagggctagtgtccttggatcatggtttgtggataatagcaataaaagtataaattagggaaagtgattgcatacaagaagtgattacrtctgttggtcaaggaaggttttaaatatagaaatgcctgggctgggtctggaagaattagtagaaatttgctagatccaaaagaaagaagtacagtctagacaaaatgtaagcatatatgtacaaacatgggtaagagcccagaggtgtggaaaaagtgaaatgtactgagttgaaggagagcagtaagagttaacactgaaagaataggcacgagatagtcatagttcttgtatatcttgcttaaggaggagtttaaatgttagactttattgtgcaaaacttaaaaagtcatgcatatttgccaaatatataaaattgggaaaagtttagacttagcattaagatcaatgactctgatataaataaagataatagatttgagtaga

SEQ ID NO: 613753 - DNA, 516 bp, Homo sapiens
ttaatagtatgtagagagaaaagtgttgggaaattgacttgatgcagatttaggaattggtgggactactttaaagagatcaacaacaaattgctcttttaaccttagatcacaacatgagccacatgtcatatgtctcaggagcatgmaaacaatttgtcagaaatcattctctgaatgtttttaaaattatattttctttttacctaatgaaggatgatttctgcagctggattatatgtttcttaaaggcacaagctcctatatttttatacgtcccaggactaacatagtgacacttgttcacagctcaaaatctacttgctcattaactacattttctgtgattttcacttgtcttgttatttgtctcatgacaatttccacctctgctcacttctgccccattattcaccatgaaaaatatcctgcattttagttacattaactgagtcactgttaatatacttgcgtctctttttcttttcttttttgcatataaacatacactgccaa

SEQ ID NO: 613754 - DNA, 516 bp, Homo sapiens
ttaatagtatgtagagagaaaagtgttgggaaattgacttgatgcagatttaggaattggtgggactactttaaagagatcaacaacaaattgctcttttaaccttagatcacaacatgagccacatgtcatatgtctcaggagcatgcaaacaatttgtcagaaatcattctctgaatgtttttaaaattatattttctttttacytaatgaaggatgatttctgcagctggattatatgtttcttaaaggcacaagctcctatatttttatacgtcccaggactaacatagtgacacttgttcacagctcaaaatctacttgctcattaactacattttctgtgattttcacttgtcttgttatttgtctcatgacaatttccacctctgctcacttctgccccattattcaccatgaaaaatatcctgcattttagttacattaactgagtcactgttaatatacttgcgtctctttttcttttcttttttgcatataaacatacactgccaa

SEQ ID NO: 613755 - DNA, 526 bp, Homo sapiens
tagaaattttattgagtggtggaagtggctctcagtaggatggaaagctggcaaggggataaagtgggaaggcggcctaaccatccccggctgaactcctctctgaccgttgtctctgatgtccagctgcttcttctcctctcaacgttcagatgcttctttcttttgtgtgtgtgcgctgagtttgggatctggggttcttatgagcacaagatagggggcatggtaggccaaaaggcaacatttggttgrgaaaacagggaagtgaagttctcacttagggccacaaattcaggcttgagggtggagcccttgccagggactccgccctcttttacccaatatttccctgcttcctgttcatatcaatatcaagttaaaaagcttctgcatagcaaaggaaccaatcaagaaattgaagagacgatccacagaataggagaaaatatttgcaaactacccttctgaaaagggattaataaccagaatatataaggagctcaaacagcactataggaaaaaattg

SEQ ID NO: 613756 - DNA, 621 bp, Homo sapiens
attaccctcatgctgttcttgtgatactgagtgagctctcacaagatctgatgggtatataagaggcttttccctttttgctcattcttcttttctctgctgccctgtgaagaaggacgttcctgcttccccttccaccatgattgtaagtttcctgaggcctcctcagccaccctgaactgtgagtcaattaaacctctttcctttataaattacccagtctagggtaactttattagcagtgtgagaacaaatgaatacaccaccccctcawccactaacatacaaagcaaaattaacaaacaaacaaacaaacaaacgttaaaatgatgccagatgggagtaaactcattctccaagagaatgatactcccaagtattgtcttggagcacagcctgaagcatgctctctaagcatgaaatacctttgcagtctcttgttttatcttaaaatctaatgagattctatttactcttcagtcataacaaaatgtccttatatgtccttttgctaactttgttaacccctttttagaataggtaagttatattatcaatgatcttacaaataaaattaatggattatgtctttaatggaactaatattaatgactactacta

SEQ ID NO: 613757 - DNA, 567 bp, Homo sapiens
atgtccttttgctaactttgttaacccctttttagaataggtaagttatattatcaatgatcttacaaataaaattaatggattatgtctttaatggaactaatattaatgactactactaataataacagtaaacatttattgccttagaactaggctgtgctattttcagttcattatccattttaatttccamaaaactatttatagtaggttgtatttagaaagtgaaaattgaagcttagtttctatgtctaaaaatgggataataggacttaccatatagattgttgtaaggttaaacataattgtacattgaaaatgtttatttgaatgattagcaaaatagtaagctctcagtgagtgttcagagttgcctaagtccagtagtatggtggctgtgaatatttttgaatgaggatactttttaatgtcaacatattttctgaacctaacttaaattaggcccactaaatagtaatattaggatctatcgactgagaaaatacttaaatataaactctgagttcagtgatgcttttaaataaatttttactttaattatca

SEQ ID NO: 613758 - DNA, 567 bp, Homo sapiens
atgtccttttgctaactttgttaacccctttttagaataggtaagttatattatcaatgatcttacaaataaaattaatggattatgtctttaatggaactaatattaatgactactactaataataacagtaaacatttattgccttagaactaggctgtgctattttcagttcattatccattttaatttccaaaaaactatttatagtaggttgtatttagaaagtgaaaattgaagcttagtttctatgtctaaaaatgggataataggacttaccatatagattgttgtaaggttaaacataattgtacattgaaaatgtttatttgaatgattagcaaaatagtaagctctcagtgagtgttcagagttgcctaagtccagtagtatggtggctgtgaatatttttgaatgaggatactttttaatgtcaacatattttctgaacctaacttaaattaggcccactaaatagtaatattaggayctatcgactgagaaaatacttaaatataaactctgagttcagtgatgcttttaaataaatttttactttaattatca

SEQ ID NO: 613759 - DNA, 670 bp, Homo sapiens
acaatgtgcacatgtaccctaaaacttaaagttaattaaaaaaaaaatgctgttcacgtcatatgagttctgattaaaattgttaagacatatatgttttttaaattttggcttttaaggtgatacggtactcataccagtaggtttgggaaagatgaggatgtactatgttgcggttcattattaattttgctttattttatggtaattatgyaaattcatgttaacctattgcttcagaaatataaagcaaatatgacataagctaataaaaacttcacaaaatcctaccaatggctcccaaattacatatcaatatgatagtatgtaatagcgttaggtgttctagaacttcataattttttatgtgattttgcttctcaattctttcaattctcaaatgtagaaatcttcaaacagtaggagttaaggtgaaatttcaaaattcatgctcaagaaacatggggtgaaataagttttttaaacaatattgtcaaagctatttttgttactttaactatccccatccccttaaacacaacaaccctgtacacattttttctccttgtttgaccaatagaaaacaagttacacattttaaaacatttttatagctgttttttaccaatttgttctactgtatataagttcatacagaaaactcttttaa

SEQ ID NO: 613760 - DNA, 509 bp, Homo sapiens
gcagttttgctgcctgtttcctttacctaacccaaacttctacttacaaaaraatcgactgcaaagaggacatctgtacctctcacggttttggataggggatgaacaaaaggctcttcactttgcaatgtaggggagaactgaggagaaagtccccctgagttcctgtcagagctagtcacaactgcttcattttttcattttaaccctcactggatgcagacagtgaatagaatctgggactagatatccagagcatactagactctctacttctatacagcataatttctggatcaaattaacatcaatcttcttcattgccaaacacaaaacaaacaaaaagaaaacattggtcccagagtaataccatttcctgtccccacacacaccacacacatacctgccctaaccctggccctaaaattacaaaaacacatgaaacaatttgttttataactgtacaatccaaaatatatttttagcatgatattcttttcatctcaatc

SEQ ID NO: 613761 - DNA, 575 bp, Homo sapiens
tttcatctcaatcactatcatttgggtgacagaatgcaaatatatttatgaagcataccacaaaattaacatttaaaagagaaacaaataagcagctgttttttctaccaagtccctttagaatccactgagaaacaaaagacacagttacatacccaatgtgtatagtgaagttgttgagacactgagcatcttcagcagtggctgactgcttaatgcgtaacacttttgtttagccaaattgcttgactttgcaggcatgcttccctctcagaaacatattacatatgatggtgaccttccaaaatcagtccataagcaccagtttaccctaggggctgaggcagtgaggtacagctgcaagtaaatgactgtagagatctgggtgtgaattctgcttctagccctggctactcatgtrgattgaggttaattacttaatctctttgagcttcagtaagattatctatagagcatgtacactaaaacttttccattagagttctagaaggtaagagatcatggttgtaaagtacttagtacaattcttagtatatggtatgagctcacaaaat

SEQ ID NO: 613762 - DNA, 628 bp, Homo sapiens
agaaatgaaggacttggaacattacttagtttacttattcatcacttgcattacctctatattgtatttcatccctcttatgtgatctttaggctgtgtttgaaagactctaccatggaaaactcaccagttacctgtgccctggatagccatgttttacaataatgttccttttaatattgagctggatatgttttcttgaacctttcagctcatgtttttatcacttgaaaccaaagccaaattgcatctctcttccacataagactcattcaaatatctgaaagaagctaacacatttcttagctcctttaagagggaaatgaaaaagaatgctggaggactcactgcttcatgttagayattaaggtaggatcattcacttgcattagcttccttgtgaggaaaagcaaaagaaaatacaacaaatatacaaataaaccagttaaaaaaaaaaagagttactttcccaaggtaagtggtaaagcaggtatgtaaagttaaattataaatttttaatattaaatacatttaaattttgctttattttatgaaagtaatacagattaatattttaaaaagccaagtagttctataataatatattaatggtacactaataggaaaa

SEQ ID NO: 613763 - DNA, 539 bp, Homo sapiens
gtaaacacaccaatcagcaccctgtaaaaacacaccaatcagcactctgtgtcttgctaaaggtttgtaaacccaccaatcagcactctgtaaaaatgcaccaattggcactctgtgtctaaaggttttaaatgcaccaatcagcactataaaaacgcaccaattggcgctctgtgtctagctaaagatttgtaaacgcaccaatcagcactctgtaaaaatggaccaatcagtgctctataaaatggaccaatcagcaggaagtgggaagggccaaataagtgaataaaagctggccactggagccagcagcagcaacctcctgggggccccttccacgttgtagaagcctttttcttttgctgtttgcaataaatcttggtgctgctcactctttgggtccacacagyctttatgagctgtaacactcactacgaaggtctgcatcttcattcctgaagtctgccagaccacgaacccatcaggaggaatgaacaactgtggacgcgccacctttaagagctgtaacactcactgcg

SEQ ID NO: 613764 - DNA, 539 bp, Homo sapiens
gtaaacacaccaatcagcaccctgtaaaaacacaccaatcagcactctgtgtcttgctaaaggtttgtaaacccaccaatcagcactctgtaaaaatgcaccaattggcactctgtgtctaaaggttttaaatgcaccaatcagcactataaaaacgcaccaattggcgctctgtgtctagctaaagatttgtaaacgcaccaatcagcactctgtaaaaatggaccaatcagtgctctataaaatggaccaatcagcaggaagtgggaagggccaaataagtgaataaaagctggccactggagccagcagcagcaacctcctgggggccccttccacgttgtagaagcctttttcttttgctgtttgcaataaatcttggtgctgctcactctttgggtccacacagtctttatgagctgtaacactcactacgaaggtctgcatcttcattcctgaagtctgccagaccacgaacccatcaggaggaatgaacaactgtggaygcgccacctttaagagctgtaacactcactgcg

SEQ ID NO: 613765 - DNA, 373 bp, Homo sapiens
actctaataataaaaatattgaatggcaaaacatatgaactattcttttagcttatatttataaaattatatattttatatgccacttatcaatgtatctaggaagagctatgttataaagacaagataatgtcagagaaagataatgtttgtcttcaaatattattactttacaatttcagagatttctaaccacagattggaagctacatatcagagttttaaagttttatatcataaacattcttcaactctcctgacctggctgggttagatccccaccttcaacaatggtttaagaattatgtcttycataaatgttgacaaccatgcacagaggcatcattcccacctacccaagatctctagacgt

SEQ ID NO: 613766 - DNA, 414 bp, Homo sapiens
aagattcttcaatactttatcattcacattagattacagttttccacatgtataatacaagttataaacatacttgttattaattaatataaaaagggctgcgtttaaacagatactttcagtttatctactgttttagtggtctatttctaaagcatatccacagatacgaagtttcttgagttactatcacacatttttgtactactaagaatctgttttattttaatcttcccaaatgcaaaaatgatagcttctctgttatttmtgaatcactccctgacagttgtttggggagtgcatttattctttcagagcaatatttctaatctattaacaatctatgaaaacaatgtgctcagggattgttttcgtttcctaaaattgaaaaaagcaacgtattttaaaagtcat

SEQ ID NO: 613767 - DNA, 414 bp, Homo sapiens
aagattcttcaatactttatcattcacattagattacagttttccacatgtataatacaagttataaacatacttgttattaattaatataaaaagggctgcgtttaaacagatactttcagtttatctactgttttagtggtctatttctaaagcatatccacagatacgaagtttcttgagttactatcacacatttttgtactactaagaatctgttttattttaatcttcccaaatgcaaaaatgatagcttctctgttatttctgaatcactccctgacagttgtttggggagtgcatttrttctttcagagcaatatttctaatctattaacaatctatgaaaacaatgtgctcagggattgttttcgtttcctaaaattgaaaaaagcaacgtattttaaaagtcat

SEQ ID NO: 613768 - DNA, 419 bp, Homo sapiens
ttatccatcattgagaaaatttttaactaatacctttactcctctttttccctttccttgtatattttctgaagataagagaaaaaggccaattataaatccctcttccaaatggaagaraagggggagttttaactttaaacaaagattgaagcttcgactattacatgggacaggacatattaatgactaaattgtggctgacctgttagccttcaaatgacctgagaacatttgatagtgtgtaaaagtaatcagaaattaatggggcttgccggaatcttcattgtagggcaggggatttgctagcccaaaagatcatatgaaaggggcagaaagacaaaaataattttgctttctaaaaaaatctactttatggttttacctcatgtgttactacagttacatttgcttgtatg

SEQ ID NO: 613769 - DNA, 573 bp, Homo sapiens
tcctactgaaggtaactgatacaaaatacaagtaatgaaaacccatctcaacatttacaggtgtttctgaatgatgaatcaggacatctggaagagaagtggaaatcaatgtcatatttgaagaaaacacatcagacctcaggggaaaaaagacactcatatatttctgaagttcttaccctattattcagtaaaacaatttaaacattcaatttagaaaaattaattaaatatatgcaatgaaagacaaaaatagaaaacaataaagataaaagtaggagtgattacattagaaaataaaaagtagagttaattataaatatgtccttcggctaattttagaaaaacaaaatagaaaaaccttggcaaatcacgttaagcaaagaagagagaaaaataagtaaaaattagaaatacagttgtccttccttatccatgggggatacattccaagatctgcagtggatgcctgaaatgatggmtagtacagaagcatatatatatatatatatacacacacacacatatatattttaaatatatatttacctatgataaaatttaatttataaa

SEQ ID NO: 613770 - DNA, 539 bp, Homo sapiens
tggtttacatgaagaaaatacccaagtgatacatacaaaagattgaaagaaagacaacatttgtattcaatgaccaagggcatgtaactgagcacagtcttggctgctcactacttgcaaagccaataacaaggatgaagtggagtggaaggaatatgactttatttccaaagctgtggggaagcaaccaggctcacacttcaagaaacctgttcaaaagtttgggttgagggcaggggtttaaaaaagggaagcttgatatgggaggcatgcgggagttgtgcagggtgcargagctgtgtgtctgcctctgatacctatcttatgttatggctcatctggagcatgggctggcaccaacttgacagtggctaggttgtgaattatccatcctgaggcctctttaagtcggggagaattctgcagctgggccttcatgcctacttcatttcaaattagccgctggaatttcttaacaggcatataaatgttatttatatgaataacatttagataaacgtgcatggggtaagggggta

SEQ ID NO: 613771 - DNA, 561 bp, Homo sapiens
taatgattttcgctgaagttgattcatttccatgtcataaaatatctgaacttaaaatgtactccattttatttagaaatttgtttttatttttagtttttcctcttataagcatttctatgagcattcctggtgtgtgagaatgtatacatagatatgtctgatatacatatataataatttctctagaatatataaccaaatgtggaatgattgcatcagagagcaagtagcttttcagttttactagacagtgcaaaactctatccaagtactataacaaatttgtgattctatcagcaataagaattctaattcctggacatctacattagcagttgatatcgcaaaatctatgctaatttgggtgtaagatagtatgccactgtggctttagtttacatttgcccagttactaatatcattsagcatcctttaatgttatttgtgtagttgtgttcatcttaatttatctatgttttttttataccagatttctacttggtcatttaactttttaatttatttttttatttttactttctgggatacatgtgcagc

SEQ ID NO: 613772 - DNA, 561 bp, Homo sapiens
taatgattttcgctgaagttgattcatttccatgtcataaaatatctgaacttaaaatgtactccattttatttagaaatttgtttttatttttagtttttcctcttataagcatttctatgagcattcctggtgtgtgagaatgtatacatagatatgtctgatatacatatataataatttctctagaatatataaccaaatgtggaatgattgcatcagagagcaagtagcttttcagttttactagacagtgcaaaactctatccaagtactataacaaatttgtgattctatcagcaataagaattctaattcctggacatctacattagcagttgatatcgcaaaatctatgctaatttgggtgtaagatagtatgccactgtggctttagtttacatttgcccagttactaatatcattcagcatcctttaatgttatttgtgtagttgtgttcatcttaatttatctatgttttttttataccagatttctacttggtcatttaactttttaatttatttttttawttttactttctgggatacatgtgcagc

SEQ ID NO: 613773 - DNA, 582 bp, Homo sapiens
tgacatctattgggtcaagtctgccttacacctgtgtttcttaaggagctagcacaccttcataattttaccatcactccaaaaatgtcaaaggcatatcttttttaccrcccatcctatatacaatggtactattctgatgggtcatttcagcttccatgtgtcatctattacctgcttccaaacattctcatatggagctcacttactactaagaacttatcttagtgaatattcttctcactaacttgttggacactatcaactctaaacaaattttacagaccctctcattattattaaccttttgtccttttgaaagttttattttctttcaaatttatactcttttattttatagtttcttataataacttaaaataatccatcggggttatcagcagtaatgccaagaaatgttaagaagaatagttttgctctttttgactgaagtataaataatgttttacacagtgaaattacagatgtttattcacttaaaataatatttaatatcattttgttattaggtgaattctcatagcccttgcttcactcttatctctatgaaattgatgggat

SEQ ID NO: 613774 - DNA, 582 bp, Homo sapiens
tgacatctattgggtcaagtctgccttacacctgtgtttcttaaggagctagcacaccttcataattttaccatcactccaaaaatgtcaaaggcatatcttttttaccacccatcctatatacaatggtactattctgatgggtcatttcagcttccatgtgtcatctattacctgcttccaaacattctcatatggagctcacttactactaagaacttatcttagtgaatattcttctcactaacttgttggacactatcaactctaaacaaattttacagaccctctcattattaytaaccttttgtccttttgaaagttttattttctttcaaatttatactcttttattttatagtttcttataataacttaaaataatccatcggggttatcagcagtaatgccaagaaatgttaagaagaatagttttgctctttttgactgaagtataaataatgttttacacagtgaaattacagatgtttattcacttaaaataatatttaatatcattttgttattaggtgaattctcatagcccttgcttcactcttatctctatgaaattgatgggat

SEQ ID NO: 613775 - DNA, 541 bp, Homo sapiens
ataatcaaaatggaattatttttctgtgggctttagtgccttttgtactgagtgaataagctgaaagtcagttgctatatttgataagattccacatttactcttggtgtcttccgtcttatgttgggttaaaaaaaaagcttattacacttcccacttgttcaatggttcttctgaagataaaagccatgcatatctatttaacatagtacatctgtaagagtgcttttttcccttycttttttttttgttggattatttctgccttgtgtgatattaaatacaggcccttgatttatttttcctgtgatgagaaagttttcaacgttttagaatctcactgaatacagacttaaatattaaaataataacatagttcttctacattcatcagaaatctctgtttttagataaaatggaatcacatgcgctcaatagttctatcacagagtacggttaaaccttcatgaatgcggcagctcagatctcaggaagtagggtcatagaagcagttatatatttagtattccctgttcttttt

SEQ ID NO: 613776 - DNA, 601 bp, Homo sapiens
cagtgttatgatgacatcaggaaaacttagaactttgtgtgaaatagactagccagcrttagaggtgggttggccatcagaaggaagcctggacaggtcccttgtttcaaaggtatggcacaagggtaacctgtaaaccagggcacccagatcagttcccgtacatagacatttggttacagctagttttaaccccaccccaccaccctgtccaccagcaaacagtggttgagagaaaagcagcacaaggggctggcagaggcaaggaacgaccagcagagagagaaagagaaagagacagagagacagagaggaagtcaaggaaagagagagagagagagaggcagagagagagaaagagacacaggcaaaaggaaagtcaaagagaaaaagagatagaaaatcaaagagagaaagaaagagagagatatacaagtagttaagagaaaaaaatagtgtaccctattcctttaaaagccaaggtaaatttaaacccataattgataattaaaggtattctccataaccctataacactccaataccactttgttgtcagtgtaaacaagggcgtagcccgaaagcactgaggccactgaca

SEQ ID NO: 613777 - DNA, 616 bp, Homo sapiens
aaaggtttattaaaactaagtttaacattaatagcacactaatataaaggtgaagttgatcttatctggtataaaaatcatacaggaagcattgtcaaatataaaatggtgtttggcttctttggtctaaaaactaataaaaaatagatgctaaaggaaatttctcagtagaaaggcaccaaggactataaagtccactgctgatgtccccacatttaaaacaaaaggtcaatttcttaaaaattatatacttggtttatcttctactttcctttccctcacaactaaaagtcttttagcacatgtaccacccctagaatttctggtaaaccagcaccaacctgaagatcacattctcattaaaaggtgaaaaaaaaaaaaaaaaggaaactcgagccagcctaggaaggaccctaccttgtgctgmtaacccccgagactgctgttcatacagcaaaaaaaaggatggactcatcacacccgagtcaagaaagcaccacccactccagagtcatgggccatagtcccaggggaaaaccctaccaaactaaagctaagaaaaatttaacccttcatctattctattactttttcttctttcctcgctctattgctg

SEQ ID NO: 613778 - DNA, 647 bp, Homo sapiens
cccccactggattatactggatatgtgggcatagagcttacgccaaattatccgaccagtggataggtagttgtgttrttggcactattaaaccatctttcttcttactgcccataaagacaggcgaactcctgggcttccctgtctatgcttcccacggaaagagaagtatagctatagaaaatgggaaagataatgaatggcctcctgagagaatcgtacaatattttgggcctgctactagggcacaagacggcttgtggggatactggacccccatttacatgctcaaccaaatcatacggttacaagctcccttagaaataatcactaagaccggcagagccttgactattctggcctggcaagaaactcagaagagaaatgctatctatcaaaatagattggctctcaactacttgctagcagctgaaagagaagtctgtagcaaattgaaccttactaattgctgtctatacatagatgatcaagggcaagtagttaaagacatagttagaaatatgacaaaactggcacatgtgcccgtgcaagtatggcatggatttgatcctggggccatgtttggaaaatggttcccagtgctaaaaagatttgaaactcttataataggagttataatagtaata

SEQ ID NO: 613779 - DNA, 647 bp, Homo sapiens
cccccactggattatactggatatgtgggcatagagcttacgccaaattatccgaccagtggataggtagttgtgttgttggcactattaaaccatctttcttcttactgcccataaagacaggcgaactcctgggcttccctgtctatgcttcccacggaaagagaagtatagctatagaaaatgggaaagataatgaatggcctcctgagagaatcgtacaatattttgggcctgctactagggcacaagacggcttgtggggatacyggacccccatttacatgctcaaccaaatcatacggttacaagctcccttagaaataatcactaagaccggcagagccttgactattctggcctggcaagaaactcagaagagaaatgctatctatcaaaatagattggctctcaactacttgctagcagctgaaagagaagtctgtagcaaattgaaccttactaattgctgtctatacatagatgatcaagggcaagtagttaaagacatagttagaaatatgacaaaactggcacatgtgcccgtgcaagtatggcatggatttgatcctggggccatgtttggaaaatggttcccagtgctaaaaagatttgaaactcttataataggagttataatagtaata

SEQ ID NO: 613780 - DNA, 601 bp, Homo sapiens
tgggtcagtctaattaaaggtttgtcagttttgttgatctttttgataaactaacattaataagtttttaaattgaaaaataaaaattatatatatattcattgtggataatatgttttaaaatatgtgtacattaggaaatagttcaatcaagctaattcacgtgtgtattgcctcacatacttaccatttttgtgagattgctggattatatggtwgttcttaattttttggagaacctccatattgttttctaaaatggctatactaatttacattcccactaacagtatgcaagggttcccctcctccacatcttctgcaacacttattttttgtcttttttttgttgttgttttagagagtgtctcactctattgcccagtttggagtgcagtggtggaatcttggctcactgcaacctcaccctcttggcgtcaagtgatcctcctacctcagcctctggagtagctgagactgtaggaatccattttttattttttttatacagacaggaatctgactatattgccaaggttggtctcaaactcctggcctcaaggagtgtctttttgataatagtcattaacagtttttcata

SEQ ID NO: 613781 - DNA, 366 bp, Homo sapiens
tatggctatcctcacctaacattttttatatccttcaatatttcttttctaaaagcatccttccttttattctagggagaaaaggcagtgaaacatttttcccttcctctttcttcctgtattctttaagggtcttgaattctatcctctgggtatcccacagcaataggaaagtggtggctaaatatctatctagctgttatcactggggtttcaatatttaactcttaagacagggttatgtttattgtcatgttattatatagagcctggataattactttctaagtttgtagtagaggcaatgtttaaacttgacagggaaccaaaccataatggctttyaagatttctgcaatatctatga

SEQ ID NO: 613782 - DNA, 625 bp, Homo sapiens
acatgtcttcatataatgtctacttttattgcctgagwcccggcctattggtgagcagttgcgaggacctccagctgacagagtccttgaaatagtccataaacataaatagtaagtatcacttgcaggctgtagtatacttagctgttttctgggaggcactgttataattgctatatgacatccacagttcatatcaaaggaaaggtcatgtattaccatcttaataaggactggatcagatgttaacatggttttaatctgtgaagcctcatggacaccatgctgccttttctgctttggtttttcaccagttgatttgcaggaaagattgaagaattcagggagatacctgttaagcttctaacagtgaggaaggtcgttagctatttatagcacttcctttgtgctagcttcagtctcttaccaaattaactatatgtatccagagctaagtgtctacctatgagatcataaagtcttaccataattttaaggtggataacaatggaaataaataagtttgtatttttacatttttgctctacttcaatggaaaccatttaactatgtattaagtatgtgtttttatttaattttgaaaagtacacaggatgaattgaca

SEQ ID NO: 613783 - DNA, 625 bp, Homo sapiens
acatgtcttcatataatgtctacttttattgcctgagtcccggcctattggtgagcagttgcgaggacctccagctgacagagtccttgaaatagtccataaacataaatagtaagtatcacttgcaggctrtagtatacttagctgttttctgggaggcactgttataattgctatatgacatccacagttcatatcaaaggaaaggtcatgtattaccatcttaataaggactggatcagatgttaacatggttttaatctgtgaagcctcatggacaccatgctgccttttctgctttggtttttcaccagttgatttgcaggaaagattgaagaattcagggagatacctgttaagcttctaacagtgaggaaggtcgttagctatttatagcacttcctttgtgctagcttcagtctcttaccaaattaactatatgtatccagagctaagtgtctacctatgagatcataaagtcttaccataattttaaggtggataacaatggaaataaataagtttgtatttttacatttttgctctacttcaatggaaaccatttaactatgtattaagtatgtgtttttatttaattttgaaaagtacacaggatgaattgaca

SEQ ID NO: 613784 - DNA, 625 bp, Homo sapiens
acatgtcttcatataatgtctacttttattgcctgagtcccggcctattggtgagcagttgcgaggacctccagctgacagagtccttgaaatagtccataaacataaatagtaagtatcacttgcaggctgtagtatacttagctgttttctgggaggcactgttataattgctatatgacatccacagttcatatcaaaggaaaggtcatgtattaccatcttaataaggactggatcagatgttaacatggttttaatctgtgaagcctcatggasaccatgctgccttttctgctttggtttttcaccagttgatttgcaggaaagattgaagaattcagggagatacctgttaagcttctaacagtgaggaaggtcgttagctatttatagcacttcctttgtgctagcttcagtctcttaccaaattaactatatgtatccagagctaagtgtctacctatgagatcataaagtcttaccataattttaaggtggataacaatggaaataaataagtttgtatttttacatttttgctctacttcaatggaaaccatttaactatgtattaagtatgtgtttttatttaattttgaaaagtacacaggatgaattgaca

SEQ ID NO: 613785 - DNA, 569 bp, Homo sapiens
gtgcccttccacgccctggccagtgtgaccaggacatcctttccctctggggctgcactggctctttgggggaaktgttaccattcagggtcttcaaccctcattctagggacttccagtaacttctcccaccttccctcttctcagtaagacatgggtattgtcttattctgtttctgctgctagaagaaaattctcgagactgagtaatttatacacaatagaaatttacttctcacagttctggaggctgggaaatccaaaatcaaggtgttggcaggtttggtgtctggtgagggctgctctctgcttctaagatggtgccttgttgctgcatccttaggaggggacaaacgccatttcctcaactggcagaagggactgaagcctctccctcaagcccttttataggggtcctcattgtcaggcctctaagcccaagccaagccatcgcatcccctgtgacttgcacatatacgcccagatggcctgaagtaactgaagaatcacaaaagaagtgaaaaggccctgcctcgccttaactgatgacgttccaccattgtgatttg

SEQ ID NO: 613786 - DNA, 569 bp, Homo sapiens
gtgcccttccacgccctggccagtgtgaccaggacatcctttccctctggggctgcactggctctttgggggaattgttaccattcagggtcttcaaccctcattctagggacttccagtaacttctcccaccttccctcttctcagtaagacatgggtattgtcttattctgtttstgctgctagaagaaaattctcgagactgagtaatttatacacaatagaaatttacttctcacagttctggaggctgggaaatccaaaatcaaggtgttggcaggtttggtgtctggtgagggctgctctctgcttctaagatggtgccttgttgctgcatccttaggaggggacaaacgccatttcctcaactggcagaagggactgaagcctctccctcaagcccttttataggggtcctcattgtcaggcctctaagcccaagccaagccatcgcatcccctgtgacttgcacatatacgcccagatggcctgaagtaactgaagaatcacaaaagaagtgaaaaggccctgcctcgccttaactgatgacgttccaccattgtgatttg

SEQ ID NO: 613787 - DNA, 516 bp, Homo sapiens
aagtgaaccacattccagtcaactgtctgttcttctctctgatggatgggacagaggcctaggcaatcaacatataagagagaacacagaagcaatttctctctggctaggggctatgtttctgtatttacatgtgaatggagtagcgtctgatgcttggaaaatttgcagtgcttgctgccaataaagaaacaccactctgtggtggactttggagaatttgttcagttcaacaaatgtttacaaaggaggtacgtgtaaagccacaaagattcattcattcattcacttattgagtgcctactacgtgctcagtattgtgctaggcacggaagaaacagcagtgataaaagcagaatcccccaaatctctgmctttatgaaagggaaataaacagttaatattataaataagtaaaatgcatactatgttaggtaatattaagtactaaggggactaagaagaaagtggggaaagaacatattgggaggtgggaagggtttaccaggaaaagcc

SEQ ID NO: 613788 - DNA, 559 bp, Homo sapiens
tctgtcagctctgccccccgagtctattggtttctgatcatctgataatgctttgcctgcactcaggacctgtctttgtccctcctcttaacatacttgcagctaaaactaaatattgctgcttggggacctccttctagccttaaatttcagctcatcaccttcacctgccttggtcatggctctgctattctccttgatccttggtgagtatctctgcacctgttggtttaggcttcagagttttctggcactttgattaggagaactttctccctgccaacctggaacagatttagatgtttttcaaggatgagcttcttcctcctttttacatttggtaactattctaatccttaaaaagccgcttaatccatacacatttgtaattcactttaacagatttttttctattttcttatatttgtaatgacagagtcatgatagtttatcccatttctctttttacataagtgttcctaaatgtactattartaagaagacaaatgaatgggcaccgggcagcagcaagtagagccaggaaaggaagtagaactgc

SEQ ID NO: 613789 - DNA, 587 bp, Homo sapiens
ggagaatcctataccctgatagatgcaaccttcctgggttctcatcttgacattcagattagcccttctgtttcctcaagctraatttcttgtttttaaaaaagtaatttttttttatttatttcttctttccctgaatttcttgtttacttattttttgttttttattttttatttatttcttctttcccatggctattttagtcttctaccccatagaaaatgaaaattgattaaaaattgagaattttgcaatcagcaaggaaagaaaatatcctgttaatcctgatagctagtatttcttggagtatgcaataatgccaatccaaactctaatgtcagatacaatgacccccaaattatttacggttcatgctactcatgaagataaaaacgtttctggataactgctcttacattatatttttacccagatctataagccttaaactcagttgtgtgaaaatgaaaacttttcttagttttttacggtttatataaaagccctattttttatggttaacttttaattgctatctctagcctccatttttatattttttcccaaaaaaatttaagcaaaggaa

SEQ ID NO: 613790 - DNA, 547 bp, Homo sapiens
tgcttgacctggcccccctggccccgcctgccctctgcttgttctcctgagccctgattatcctcatactcattctggggctcaggcttgagccactactccctcatcccctcaggagtctgaacactgggcttatgccttactctcagggacaagcagcccccwttgctgcctgtagatgtgagctgttgagttccctcttgctggggaagatgagcttccatgtatcctgtgctcaaccctgaccctttgacactggttctggcctttcctgccttttctcaagctgcctggaatcctcaaacctgtcactttggtcagatgtgcagaccattactaaggtctatgtctgcaaacattactaatctaggtcctattactaatctatgtctgcaaacattaaaggaatgaaacaatgaaaggaacatttgaaagaaaatgtgggtagacaatttcttgcaacttgggggaaagtttagaattcttttgattggactactttttttttttttcctcaagcttcaggtgaccacaatagcaacacctc

SEQ ID NO: 613791 - DNA, 599 bp, Homo sapiens
atctcatatgccattgattgagagttgctcctgttggtgttaaaccttgtgtatgggctgagtgaactcctgagtaccagtgaaaattacaggtagaaaagctaagacatgcgggcacttgaggggacataggacctgtccatcacaggtgtagaagacagtgaagtagaagtaagcatgagactgatatctttaaaaccaaatgaagaaagtgtttcaagaaggaggtatgtattgactgtgttgatggaccaagtaagatgaattgactactgggtttgacaccatggcttctacattttctagatgcaccctagaggttctcycttctgaggtcccactgtcctcctagggcattgcaaggatatgagactcaagttgttgctccacatagaacccagaaccactcaattccctggtcttgtggaatttatcactccttctcctccacttactcctcatttctttccttcctccatcaaaggttaatttgagttatactgtgaaatggttgaggcagaacccaaatataaaccttcttctgggttctggaagaaaatggaacatgaggaagagctaataaaattgcaatgataata

SEQ ID NO: 613792 - DNA, 601 bp, Homo sapiens
cagctgcatttagctgcaggatcaactgggatgaaagtgaggcctcacttggatgtctgatggttggtactggctgtgagctggaatgccttggttctccttcacttgtgctctcattttctagtgagttagacaggcttccttacatggcaaatgcagggcwgcattcaaagggtgtgaaggtagaaggtgcatgtcctcttatttccagacttcaacattcacacagcattacttctacggcatatgttagtcaaggaaagacacaaggccagtccagattcagggtttggagaaatgtactccacctgtggaatgaagggactgcaaagaattcgtttcacagtctaccccctagccaccctcttgtatagtccttgcacgtgcaaaatgtgctcacctcctctcaagcccccaataagtgtcattcattcagagcatctggctcagattccaatatctagaatttgtagccacatttaatttatcacccactcatgcaccataaaatcagcacctgctacaagtaagctgtaagagttcctgccccatttataaataacctcctggactcaatcacttccctcctcctttgcaccac

SEQ ID NO: 613793 - DNA, 480 bp, Homo sapiens
aaatatatttaaaaagctattcttttctattgagtattagaatataccttttactagagtatgtaaggattggtttgtggccttttattaaatgttgaaattcctagtcacctatccattaatttatctgaagtgtatagatacatattattcatatattgaatgttatatgtagagtgcagagttgtgcatatattttctgatcaaacataaataatcaaggccaaagttgtcattctttcttcactgttatttagtcaygtgtttagcgttcactatactctgacattgtgaacagtctacacattattatgcatagcactgaacctcagcgcacctgctgcatgttcatggctgagaaataccttgagtttttcctgagggctataagaacagttttccttttctttacacaagagtcaaacgggacctcttccagcagtaaccactatacagacatattgagtaaattttaaaaag

SEQ ID NO: 613794 - DNA, 532 bp, Homo sapiens
gtttcataataaaagacaacctcrtgttcttatttgttcccatctacctatcttcaccgcactgagtggtctcaagatgctttgatggctgcaaggccagggagagagtcatggcagcagtatgccaaaactgcaagccgcaacatggggagaatatgcttttcactcttcccttaatctgggatttcactttatgcagtagccatccatagaacaagttatgtaaattcacaaatgtctaggttatttcctttaaagcctaagaccatgtcagtctgacctacgatgtgtccgtggtacccaagtagttctgtcagagagaattaaatcacgatgtacaacttgagaccgtctgttgaggaagccttctttatccaatgcacaaacccctttcaggcaccttcttaggccttttcttaaggtagctatagctgaaacatgggtaactgtctctgattactctctactcactttgcttgtggcttttctcgttatgacattcttacagctaacttccaactgtgttcttggg

SEQ ID NO: 613795 - DNA, 519 bp, Homo sapiens
ccaagcataatgtttttgatgttcatttgtgttgttgcacatgtcagtattttgttttaaaagattactgatttgtattccattatatgatatacaacattttgcttatccattttttcctgttgatagcttatgtgatgtttttcasttttggctatcattaatatagctgctgtgaacatgtttgtataagtctttgtgtggacacaaagaaatgttttcatttctttttgttaaatacctagtaatggaattgttaggccataggttaagtatatgtttaatttaagacactgccaaacagttttccaatgtggttgtaccattctacatttctgctatgagttcatgaaaaccttttaaaatgttaacattgcagtgagtgtgaagtggtactttattctgatttttgcagttctcttatgactaatgatgttgaagatcctttttttttgtgcttattggccactctatcttcctggcaaagtgtgtattcaaaactttcccattttaaaaatg

SEQ ID NO: 613796 - DNA, 607 bp, Homo sapiens
atctgaagatgcatgaaatgtttgcttccaccctggttcctgagcaaacgctgctcctgggatacccctgctctggccctctgaaatcagtacctctggccttggcttataaaccaaatcagagagatccagggcctcatttgggaagagccagtccttttcatgaactcttaccggataggaaggagttggaaaactgtgcagccagaaagaatcttggaaattaaccttctcattttatgataagaaaataggcccaggtcactgagtaaggtctctccagtagaggcacaaatgkggctaaaatccacatctagacctgcaatccagtgctctttccatactgcctcctgaatatagatgttcctattgtaatgcccaggaaaccagaagctgagtcagaagttgcaagccatgtgatatgtttaacccttttatgtttaactcgctatgtttaaccctttggcacacaggcttgaggtgggcaatctgaggtctggcaggcggcagaggcaagatcagccttgcttggagctgggtgccaatgagctttcagccagaagcagccccagcttgaacaggcaatttatttgtggaaagaagaatt

SEQ ID NO: 613797 - DNA, 446 bp, Homo sapiens
acactggggaagatgggaacccatgtccccccattatagttagctagctggtaacagaaaccaagtctcctgcctcaagttcaagtttacagttgagtttgcacttatacggttcagtatcccaggaaaatgcccacactccttcatcagactaggagatccccaaaggcaggcaccccatcccacagaccccatcccctcctctctctgcttacactgctatctcttgggatccaccctggcaaggcgggacaaggacacttctgagtgattccaagaggaaaacattcctgctcctaagctaaaactggccctggctgtgaggcaggcccacctctgccatcacccccatgcccactttcctacatgctggcttcagcagcagatgtcagcactgctctcagcctggctcccrtggagagaggaggagggtccctcaggccatc

SEQ ID NO: 613798 - DNA, 517 bp, Homo sapiens
acataaggtttagctcaaaggagtgattctccaataatggaatgttaagcatcagtcagaaagatctttgatgaggtggcagagaatcccccagggactttcaagtggcctcacctagggttctccttcctggacttgcctcccagagttcatatgagagctgcctatagacccctttcatctgttctggccccagacctctgaccactcaggctgcttcttgaccagtctcctacctctggctgctttatctaggctgccattacccagttcttcagacctttggggatatcctgagctctggcttggaaggttccagatacgcatctgtgtcttccagaccctgaaagtctctagcaggagtcctctcctaggccccctgtgtgtmcatggtctttcctcagtggggttttccacactgcccttccattgaacaccctctgctgccctaggtcctccaggaaacctgaagcatcctcagacgggtgggaggcagggagacgaggtcagggaatgc

SEQ ID NO: 613799 - DNA, 548 bp, Homo sapiens
atccatttgggagccagctgacatattcatgcacattctccactctaccactgcccccactttcaccatagtccttgtcctactttacaaaagaaaggaatgtctctcccctacactgaatcttgatgcatggtccagggtgtaaaaacctgaggagctkggagggagcaattattttccacttcatatcaaaatattcccattgcaatcagtcttcctattttatcttatataaaatgtttattattttctacctcctagtaaaaagtgaaattgctagctgctcaattcattatttcttagcaaatacagctttcctttctaaaaaatacagaagaaaaaaatttgtgtaacaagattattagttatttctgatttttagacatgattctcatttaattgttcccaaaagctgaacaacaagagtttgatgaaagcaggcacacacatttaccaagggaatatatgccttctatatgacttctcaaaactgatggatttaactatacattatacagcattattcctaattatataatgaaaaacag

SEQ ID NO: 613800 - DNA, 640 bp, Homo sapiens
ctccagcacagtgctggacacctattatacacaatkttttggttgtttaaaggaaagggtgatcattcgttgggatgagtatcaatagctagctagttatacatcattcagaacagctctgtgctctgctcatgagcacccaggtctgtggggaagacaggaggcctgggacaaggagagtcagtcccctcgtgttgaattcaacctcagtagaattctcccagttccctaggtccccagttgccccctgtagtttttcttttctagacatccaggggtacagagcattcacacccctttcttctcttttagaaggaatgaattgcatgaacaagaaccacggctgtgcccacatttgccgggagacacccaaggggggtattgcctgtgaatgccgtcctggctttgagcttaccaagaaccaacgggactgtaaatgtgagataattgggatggcaggtggggcagtggggtcgggggtgaaaacatagaggaagggtatagggcttcaggagcaagaggacagggctgggaggaaaagggagtatgggggaggcaactaggcaagggggccagtacccacattgtggaaaactgtggatgcagggaggagcaagctgacagggccctgtcctctctg

SEQ ID NO: 613801 - DNA, 599 bp, Homo sapiens
atctccatctagaactaaaaggagggtttgggaggagttgaaggtagattaacccagtatgtgctacctcctctgaggatgagcagtcagtcgatcctggaagtgggatctttcttaagacagctaggcagcggggaaggggaagataaattgatgggtatccttcagttgccttaggaatggcccggctcattctttccaatccacttacaataagattgtcccaccacaatccccacccacccaccaaagacatagtggaaagaggaagaaactcctatctgtcccttctggttccctggcagccagaaccaccctcacttagctcccatccctccctactgccccccgccccacctcctccaccccctcggcacattcctgcctgacagctctggcttgtacctgcctcactgctgtccaccttgtttcaatcaagtagggggcagggaagtggactgcttggctgtacttgtgaggggatgggggttgggagtgatgggaggaaaggggctgggagcctccctyggcttaatgctccttctaaagcacagagaggcagctgaggccttccctcgggcctctgtggtctccactac

SEQ ID NO: 613802 - DNA, 551 bp, Homo sapiens
accagatgccatggggaggcctggcttgtccccactctcaccctctgcccactccccttaccctcaagttgctgctgctcatagagggcctgctcgctctcctccgtggcctccagctcgccrtgggcactgcgcttgtgcatggccaaggtggaggtctgccggtaggtcttgccgcaggtgctgcaggtgtagggcttgcagtgtgtgtgcaccacgtggtgcttatacaagctcgagtactcggtgaagcgtttcccgcagcctggcaccgtgcaaacgtatggcttctcccctggggacactgggctgtgaggggggtgggaactggggctggcaagggggaaactaaggggacaggggtgagggacagggttggtgaagggagagccagagggagggagagggactgagacctgagactctgaatggacagggttggggaagatggccagtggaacacagagaggacacaggtgttgaaccactgaatccagagacaaggcggaaaggaaacgggggacagggcaaggctggggctagtgaagggg

SEQ ID NO: 613803 - DNA, 551 bp, Homo sapiens
accagatgccatggggaggcctggcttgtccccactctcaccctctgcccactccccttaccctcaagttgctgctgctcatagagggcctgctcgctctcctccgtggcctccagctcgccgtgggcactgcgcttgtgcatggccaaggtggaggtctgccggtaggtcttgccgcaggtgctgcaggtgtagggcttgcagtgtgtgtgcaccacgtggtgcttatacaagctcgagtactcggtgaagcgtttcccgcagcctggcaccgtgcaaacgtatggcttctcccctggggacactgggctgtgaggggggtgggaactggggctggcaagggggaaamtaaggggacaggggtgagggacagggttggtgaagggagagccagagggagggagagggactgagacctgagactctgaatggacagggttggggaagatggccagtggaacacagagaggacacaggtgttgaaccactgaatccagagacaaggcggaaaggaaacgggggacagggcaaggctggggctagtgaagggg

SEQ ID NO: 613804 - DNA, 551 bp, Homo sapiens
accagatgccatggggaggcctggcttgtccccactctcaccctctgcccactccccttaccctcaagttgctgctgctcatagagggcctgctcgctctcctccgtggcctccagctcgccgtgggcactgcgcttgtgcatggccaaggtggaggtctgccggtaggtcttgccgcaggtgctgcaggtgtagggcttgcagtgtgtgtgcaccacgtggtgcttatacaagctcgagtactcggtgaagcgtttcccgcagcctggcaccgtgcaaacgtatggcttctcccctggggacactgggctgtgaggggggtgggaactggggctggcaagggggaaactaaggggacaggggtgagggacagggttggtgaagggagagccagagggagggagagggamtgagacctgagactctgaatggacagggttggggaagatggccagtggaacacagagaggacacaggtgttgaaccactgaatccagagacaaggcggaaaggaaacgggggacagggcaaggctggggctagtgaagggg

SEQ ID NO: 613805 - DNA, 554 bp, Homo sapiens
ggagatagaaagtgccaggagtaggccaggtgcagtggcacacacctgtaatcccagcactttgggaggctagggtaggtggatcacatgaggccaggcgttcgagaccagcctggccaacatggcgaaaccctgtctgtactaaaaatacaaaaacattagccgggcctggtggcgcgcacctgtaatcccagctactctggaggctggggcaggagaatcgcttsaacccaggaagtggaggttgcagtgagctgagctcacgctgctgcactccagcctgggcgacagagcgagactctgtctcaaaaaaaaaaaaaaaagaagaagaagaagaagaaaatgccaggattctgggtgttaaaattttaaatagggtagttgaagaggttcccactaaaaaggtaacatttgagcaaagacctgaaggaagttagggggtaagtcaagcatacatctaggggaaatttattccagtcaggaagaacagcaaacacaaaggccctgaggcaggaatgtgccctatatattcaagaaacatgaggaagccagcc

SEQ ID NO: 613806 - DNA, 435 bp, Homo sapiens
taatctggtataatcatgatacaagataacagtacagtatctttagcttctaagttttttttgcaggccttccatttcttaaaatactcacaaatacaggacttttggtcttagaaagaaacatccataggtagcagatgaattccaactttgactctgaaggtggtaacattttcttagaaagtaataataatcagatttcaatgaagctgtgttaaatgctggtatgggacatttgttagagttagggaacagaggaatgtaacagaaaacacagtagaacacaacagatcagtaataaaactgtgcttttcagagtaacttatttatcacakctgacaaatgagataaaaaccattattagtagccacctggaattcataccaacttggccacatactcacaatcatccacaaaaaaacgtttaaaagagca

SEQ ID NO: 613807 - DNA, 616 bp, Homo sapiens
ctttttaatccctgactacactttagtctaaaaaatttttttttaacatatgcagtccttttctttgtttctctccaatctgtttttaaaatgttctattgagtcttttagttatttaattttttgctcctggaaattctatttgacagttttgtatagattccagttgtttgctgaaatccttcatatgtctacttycttgaacaaatcacacgattaaagtccattcataaaaatttcatactgcgaactcctgcgggtctgtttctactgactgcctggtttttattttcccttttttgattttgtttttgctgttgaatttttctcttggttttcaatgatttggttgtgtttgctgatatgcctggtaattttttactgcatgccacatatcgtgtatacaaactttagataattttaagactctggataatatcttcctccacagagtatttacttttacttttggtaggcaatcagagtaaagatagatcaaagattgaaatacttggagactgggtttcagtcactgaggactcatgtttcttactcacccttactcctaaaatgtaggctttcaatgggttcaactgaaagtttgaattatttacta

SEQ ID NO: 613808 - DNA, 616 bp, Homo sapiens
ctttttaatccctgactacactttagtctaaaaaatttttttttaacatatgcagtccttttctttgtttctctccaatctgtttttaaaatgttctattgagtcttttagttatttaattttttgctcctggaaattctatttgacagttttgtatagattccagttgtttgctgaaatccttcatatgtctactttcttgaacaaatcacacgattaaagtccattcataaaaatttcatactgcgaactcctgcgggtctgtttctactgactgcctggtttttattttcccttttttgattttgtttttgctgttgaatttttctcttggttttcaatgatttggttgtgyttgctgatatgcctggtaattttttactgcatgccacatatcgtgtatacaaactttagataattttaagactctggataatatcttcctccacagagtatttacttttacttttggtaggcaatcagagtaaagatagatcaaagattgaaatacttggagactgggtttcagtcactgaggactcatgtttcttactcacccttactcctaaaatgtaggctttcaatgggttcaactgaaagtttgaattatttacta

SEQ ID NO: 613809 - DNA, 435 bp, Homo sapiens
gtattttcattttcattcacgtattttctaatttccctggtgatttattctttgacctatggttgcttaagagtgtgttcattratttccacatatttttgagcattccaggttttttttttccctgtaattgatttctagctccattccattgtggttggagatgatacctcatacgacttcaatcttcttccatttactaaaatgttttttggcctaacatgtggtctatcctggagaatctgccatgtgtactttaaaagaatgtatattttgctgttgttgggtgaaaagttctatatatggttgtctctcagtatccatagggcactgattccaggaccctacttgaatacctaaaatccacggatgctcaagtctcatatatacaatggtacagtgtttgcatacaacctacacacatcctcccatata

SEQ ID NO: 613810 - DNA, 516 bp, Homo sapiens
gtctcttctgctgttagaatgggaagggaccttaaaggaaatgtagcccatccccatcagatgcatgtgtttcctttataatagacttgtagttagcctgtatctgagtactttgagtaagagggaaattaataacatcttaaggcagtgcattctgtttggttagttctcacagctaaagtgaaagatccagattgcagtattttaactaatccattagatatgtgtgtttaaagccaaataaaatgttcagggttaagaaarcagagatttaagagctaggagtgtattaagttataaacatgaatgacatccaggaagtacatgtagattgagaagagagcaagtacatgagtctcttacatagttaagggaaggcaacaggaaaagatagccaagttaacctgagaaggaatcgcctgtattgttgactaggaaggtgtgactgaaggcaaagaaggagaaaatttgtagttttcaagctttgtttcattttggaacttagccagtaatggt

SEQ ID NO: 613811 - DNA, 545 bp, Homo sapiens
agatttaaggggaggggaaatagactccacctcttgatgagaagaatggaattccttaggaggacttgttggtaggcgtctttggaggcccttgccacgatgcaatcttgagtkggtaaattaagacaatagaggttaaaaaaaaaaactactgcccaattgttatgcctatctccctatatttgtctatgaatcttgtatctaaggaaggtcaggcaaagattatacttagtctcttagttcccagactgacaactatttattttcctcccagccaccaagggagcctacagaggcccacttatctataactgattttcatagtgtgagtttattgtcactgctacttaataaggaattctttacttatgataaggaattcatataggtaaaatttaaaactgctctgatagtgttgtttgtataatgataaaccttcatttaaatattaatttaaatggtcaaatcttaatgataatgcgagttattgttgtgaagtaacagagaatatatttctgagcacttctgaccttaaaacaagtcac

SEQ ID NO: 613812 - DNA, 539 bp, Homo sapiens
atagtgttctggcacttttacagaaggaaaatgaaaatgatactaacatttcaaatggtgtctgccacctttgctttgtcatgtattctagtgctaaaggtagttattctgattaggaatagctgaactccagtaatggtatcatttaatgaatgctyattttattggtgagtgctaagcaaactaacataatcatgaaactagcataaagggtgtctgttttctaatatcatgaatattgattaaattgttctaggtcacagcttcccagctctcagcatctaataacaaatgttcaatcctgatgctagcagacactgagaatgagaagaataagtgggtgggagtgctgagtgaattgcacaagattttgaagaaaaacaaattcagagaccgctcagtctatgttcccaaagaggcttatgacagcactctacccctcattaaaacaacccaggcagccgcaatcataggtatgaatttataacatttatcatattattatcattgtttactaatctaccttgagaacagggatt

SEQ ID NO: 613813 - DNA, 630 bp, Homo sapiens
tcccaaagaggcttatgacagcactctacccctcattaaaacaacccaggcagccgcaatcataggtatgaatttataacatttatcatattattatcattgtttactaatctaccttgagaacagggattggctttcatctaggaatccccagtgtccaacatactgtgcatcatatcataaatgctcagtacatgtttactgaatgaatgagacctatatcagatctttgtttttcagtaaacaggagtataaatacactttcaaagtgccttttttttcctgaaaaaacaacagtgctaagcattagcctactaatctattttctgcttgtgtgatttagaacaagttagtttcttagagtttaatatataaaatacagatggtaattaccttgctraggttattgggaagtttaaataagatggaatacataacacagagtgccctgcataagaaagaaatccccttaacaaatggcagtttctgtgtctggaggtttaaatttttgctgtattcctgtgtatgcatctaactcttttgttactttccataaatactgaaaagttcaatgagtatggttcaaatgccattcacaatttttacctcccaaaacaataagtgtagaac

SEQ ID NO: 613814 - DNA, 589 bp, Homo sapiens
tggataatctttttttcctgtgacttctgatgtcttattcttccgtatgtgcatctgtaagttgacttacatccttttgagtataattgggatatgattaatcaataaaactatattttgatttattattctttctgtgtttagaaattattagagttggtgacaataagaagattcatcagattgaactcattccaaatgatcagcttgttgctgtgatctcaggacgaaatcgtcatgtacgactttttcctatgtcagcattggatgggcgagagaccgatttttacaagctgtcagaaactaaagggtgtcaaaccrtaacttctggaaaggtgcgccatggagctctcacatgcctgtgtgtggctatgaaaaggcaggtcctctgttatgaactatttcagagcaagacccgtcacagaaaatttaaagaaattcaagtcccatataatgtccagtggatggcaatcttcagtgaacaactctgtgtgggattccagtcaggatttctaagataccccttgaatggagaaggaaatccatacagtatgctccattcaaatgaccatacactatcatttattgc

SEQ ID NO: 613815 - DNA, 589 bp, Homo sapiens
tggataatctttttttcctgtgacttctgatgtcttattcttccgtatgtgcatctgtaagttgacttacatccttttgagtataattgggatatgattaatcaataaaactatattttgatttattattctttctgtgtttagaaattattagagttggtgacaataagaagattcatcagattgaactcattccaaatgatcagcttgttgctgtgatctcaggacgaaatcgtcatgtacgactttttcctatgtcagcattggatgggcgagagaccgatttttacaagctgtcagaaactaaagggtgtcaaaccgtaacttctggaaaggtgcgccatggagctctcacatgcctgtgtgtggctatgaaaaggcaggtcctctgttatgaactatttcagagcaagacccgtcacagaaaatttaargaaattcaagtcccatataatgtccagtggatggcaatcttcagtgaacaactctgtgtgggattccagtcaggatttctaagataccccttgaatggagaaggaaatccatacagtatgctccattcaaatgaccatacactatcatttattgc

SEQ ID NO: 613816 - DNA, 622 bp, Homo sapiens
atattcattttcttgaatttttaaaataatttaccgttttaatacatggttgctatttgtgataaagaacaaatttttctctaatttggatgcaagaataatactttacctctagaagacttatttttagcacattacatttctcctagctttttatccattactaaaattgttaataaaagtatattttcgagcttagtgacatcctggagctttaagatgtaattttgcttcttaaagtcaaagtttcatgtacgtcagtacaacctcagagggtactgattttattcatatatctagaataaaaacaagaccttacagaagagcctttcttytaaggctaggtaatttatgcaatctttttacaaagcaggttcatctcagctcatgggaacgtgaattccatgctggattcagttagcactctctccaacacgccattcaccctctgcctctaatgaagggatcatgttttctggaaacataactgttcttcaagaactgaatcttgaaaattcccattagagaaggtgactggctactgagtgatagttcctgcgtaatcggaagtagttcttttatctctaaaaatagtccttggattcaaaagcttttttctata

SEQ ID NO: 613817 - DNA, 637 bp, Homo sapiens
aatctattcattttccatttatttattcagcaaatatctttcagcacctaactattttaggtgctggagagtttagtgttgttgtaataacagtcagtataagaaattataagatgactaaagaactgaggctagggaaccatatgcctrcttataaccaggacaaactgaactgtcagcccaaaagctgaggaccctgaggtggtgagtgtggaggagggtgtgcctaccaacagtgttcccctgggtttctatgtttaaagggcaagtatgaggacgtttagtaaaatatgtaaaatgtagtttaagcatttaggccttttctcttgctgaaacttgtaaaaccatttaggtaagatagatttctattaacgttaaatagcataagtcatgaataaacataagtcataccacaaagtttatcaatgtatggcaggtatgtggataaatttccctattgtattctctatgttaagctactagaagaaagagtaatattttctgagcccgaaatgatgagaaaagattgtgtttttgaaacagcaaaattaggcagacagttgtaacatttttttaaaaatacactagttagcttggtgttctgttgcatttgaaaatagcatgatacagtatcatc

SEQ ID NO: 613818 - DNA, 637 bp, Homo sapiens
aatctattcattttccatttatttattcagcaaatatctttcagcacctaactattttaggtgctggagagtttagtgttgttgtaataacagtcagtataagaaattataagatgactaaagaactgaggctagggaaccatatgcctgcttataaccaggacaaactgaactgtcagcccaaaagctgaggaccctgaggtggtgagtgtggaggagggtgtgcctaccaacagtgttcccctgggtttctatgtttaaagggcaagtatgaggacgtttagtaaaatatgtaaaatgtagtttaagcatttaggccttttctcttgctgaaacttgtaaaaccatttaggtaagatagatttctattaacgttamatagcataagtcatgaataaacataagtcataccacaaagtttatcaatgtatggcaggtatgtggataaatttccctattgtattctctatgttaagctactagaagaaagagtaatattttctgagcccgaaatgatgagaaaagattgtgtttttgaaacagcaaaattaggcagacagttgtaacatttttttaaaaatacactagttagcttggtgttctgttgcatttgaaaatagcatgatacagtatcatc

SEQ ID NO: 613819 - DNA, 555 bp, Homo sapiens
aaagttttttttttttttatgttaaacattttagcactttttacatgggtggtaatatactgggcataatggatacaaagacaaagcagaygtggaaatggacttcaaagtacttattttataattagaaaaataattatatagttacacactatgcaatgtggaaagcaataaatgccatgagaaatacctaggctaagtactatggacattcagaaggattcattcaatatttattgagaatatttaagtttgaagtcttatgctaagcaaaatacaatacttcctgcccttaagcgtaatatttcctgcccttaagcataatacaatatttcctgccctgacagtctaattggaaagacaaatatataaccagataactataacaccatgtgggaaatatagtaataaaagataaagatcgtatatcatgggaatacaaagaagagagatttctgattgaaccaggaggatccagaaaagcttattaaaggaaataatgcctgagctgggtcttcacagatgagtatgttcagcaaaatcataaaacaacta

SEQ ID NO: 613820 - DNA, 446 bp, Homo sapiens
aaaatatttcagaaacagttgaaacatcctcgtgtataccgttccccactcttctttcccagacatatctaaatatcctgaagctgatgtgcatcttccctttcttggttttagatgttcatttcatttgtatccayaaatgatacatagtagtgcttattatgtgtttataatttacataaatattacctgtatccttctgtaatttttttcattcagaagtctgcttttcaggtttattcctacagatatgtgttcatttagttcattcattataactgtggcatataccacaactacttatccattctcctgcagttggatatttaggttgtttccaatttttcattattatcagtgctgaaattaatatcctaatatctgtttttgcaaatgtacagagtttgtttggcatgtatacttagtggaattactgagttgtatgt

SEQ ID NO: 613821 - DNA, 446 bp, Homo sapiens
aaaatatttcagaaacagttgaaacatcctcgtgtataccgttccccactcttctttcccagacatatctaaatatcctgaagctgatgtgcatcttccctttcttggttttagatgttcatttcatttgtatccacaaatgatacatagtagtgcttattatgtgtttataatttacataaatattacctgtatccttctgtaatttttttcattcagaagtctgcttttcaggtttattcctacagatatgtgttcatttagttcattcattataactgtggcatataccacaactacttatccattctcctgcagttggatatttaggttgtttccaatttttcattattatcagtgctgaaattaatatcctaatatctrtttttgcaaatgtacagagtttgtttggcatgtatacttagtggaattactgagttgtatgt

SEQ ID NO: 613822 - DNA, 633 bp, Homo sapiens
aaagtaaatattaatttacttttgttatttctcataattaagagtaaaaatgtagcctgtaaggcagctgacttctgtcacttcctggttcattttaatctaatcttatggttaaggaaaatcaatttagagtagcaatatrgtacatttagtaatccattctgagcacactttctttcttctacttctgaagtgttcttctctaacatgttgttttttcagaaattattgttactgacttatttcaacagctctgagaaacaaaaaattcagtatttcataaaatttctctaccatataaagtttgtaacagatgatatcacaggggatagcttctaaaagctttaaggatatttttactgatttgtttcaatatagtgttaatttcagttctcaccacagccatttcattctggctgctttgcaatggagttgttagagaatatatgtcaaatttccctgttttatacttcagtcacttttcaaaagtgaaaaaagctcaaaacattcatttaaacaacagtatgtgaattatgagaagtaaaaaataatgtactagattaagaagtgttggaaaagataacccctcccctaatatttaataaaatcctccattatggagagaaacacagc

SEQ ID NO: 613823 - DNA, 633 bp, Homo sapiens
aaagtaaatattaatttacttttgttatttctcataattaagagtaaaaatgtagcctgtaaggcagctgacttctgtcacttcctggttcattttaatctaatcttatggttaaggaaaatcaatttagagtagcaatatagtacatttagtaatccattctgagcacactttctttcttctacttctgaagtgttcttctctaacatgttgttttttcagaaattattgttactgacttatttcaacagctctgagaaacaaaaaattcagtatttcataaaatttctctaccatataaagtttrtaacagatgatatcacaggggatagcttctaaaagctttaaggatatttttactgatttgtttcaatatagtgttaatttcagttctcaccacagccatttcattctggctgctttgcaatggagttgttagagaatatatgtcaaatttccctgttttatacttcagtcacttttcaaaagtgaaaaaagctcaaaacattcatttaaacaacagtatgtgaattatgagaagtaaaaaataatgtactagattaagaagtgttggaaaagataacccctcccctaatatttaataaaatcctccattatggagagaaacacagc

SEQ ID NO: 613824 - DNA, 633 bp, Homo sapiens
aaagtaaatattaatttacttttgttatttctcataattaagagtaaaaatgtagcctgtaaggcagctgacttctgtcacttcctggttcattttaatctaatcttatggttaaggaaaatcaatttagagtagcaatatagtacatttagtaatccattctgagcacactttctttcttctacttctgaagtgttcttctctaacatgttgttttttcagaaattattgttactgacttatttcaacagctctgagaaacaaaaaattcagtatttcataaaatttctctaccatataaagtttgtaacagatgatatcacaggggatagcttctaaaagctttaaggatatttttactgatttgtttcaatatagtgttaatttyagttctcaccacagccatttcattctggctgctttgcaatggagttgttagagaatatatgtcaaatttccctgttttatacttcagtcacttttcaaaagtgaaaaaagctcaaaacattcatttaaacaacagtatgtgaattatgagaagtaaaaaataatgtactagattaagaagtgttggaaaagataacccctcccctaatatttaataaaatcctccattatggagagaaacacagc

SEQ ID NO: 613825 - DNA, 633 bp, Homo sapiens
aaagtaaatattaatttacttttgttatttctcataattaagagtaaaaatgtagcctgtaaggcagctgacttctgtcacttcctggttcattttaatctaatcttatggttaaggaaaatcaatttagagtagcaatatagtacatttagtaatccattctgagcacactttctttcttctacttctgaagtgttcttctctaacatgttgttttttcagaaattattgttactgacttatttcaacagctctgagaaacaaaaaattcagtatttcataaaatttctctaccatataaagtttgtaacagatgatatcacaggggatagcttctaaaagctttaaggatatttttactgatttgtttcaatatagtgttaatttcagttctcaccacagccatttcattctggctgctttgcaatggagttgttagagaatatatgtcaaatttccctgttttatacttcagtcacttttcaaawgtgaaaaaagctcaaaacattcatttaaacaacagtatgtgaattatgagaagtaaaaaataatgtactagattaagaagtgttggaaaagataacccctcccctaatatttaataaaatcctccattatggagagaaacacagc

SEQ ID NO: 613826 - DNA, 612 bp, Homo sapiens
ctgggaagaggtttatggaactgttcttttatgtacatggtagagcaggtgatgtttacaaaagtccaagttactcatagctgatacattattaaaacttcacccttgaaacacagaattaacactctttaaatctaacaattaacacagatgcacaaatgtgtgaggttttctaaataataagatttctcaattggattctgccattttatatcataaaaacaacataccattcttaaaactgaagtgtatattaaatttagaaagtttaatgtaggatattctgcaaaaatcagggttatattgtaattaagctcttctgttttctgaaatgatcaataaaataacaaagagggaagattaaagtctaccaaaacctaatttctacttactgtcttaaggctatctagstaacgatacaattataattttagacagaaagttttcaaattatatttagtaagacaaattccacattttagaatttctcaagaaaacgtctgcatttcttacacttccctcaagtggggagaaggtgaggggaggagtccagcatatctacaagaatctaaaaaagaaggtcctattctcaggaagaatgaaaaccactgg

SEQ ID NO: 613827 - DNA, 612 bp, Homo sapiens
ctgggaagaggtttatggaactgttcttttatgtacatggtagagcaggtgatgtttacaaaagtccaagttactcatagctgatacattattaaaacttcacccttgaaacacagaattaacactctttaaatctaacaattaacacagatgcacaaatgtgtgaggttttctaaataataagatttctcaattggattctgccattttatatcataaaaacaacataccattcttaaaactgaagtgtatattaaatttagaaagtttaatgtaggatattctgcaaaaatcagggttatattgtaattaagctcttctgttttctgaaatgatcaataaaataacaaagagggaagattaaagtctaccaaaacctaatttctacttactgtcttaaggctatctagctaacgatacaattataattttagacagaaagttttcaaattatatttagtaagacaaattccacattttagaatttctcaagaaaacrtctgcatttcttacacttccctcaagtggggagaaggtgaggggaggagtccagcatatctacaagaatctaaaaaagaaggtcctattctcaggaagaatgaaaaccactgg

SEQ ID NO: 613828 - DNA, 471 bp, Homo sapiens
ttgcaatgctcacaagtgtattctaaacacactttggggaagacaatttgtctttgtgcaggctggttgtcttcagataaaatccaggtcactgaagctatgaggaaagtatatttcaggtaaatcagcatgtatccgatgcatacagcagacatgtttaactcctgagctctgctttagtatctcttagaatgtaaactcctgaggagtsaaatttatatatatcttaaagaggccctttaaaagaggcttgttgctctctcctcttagatgggagattgtctttggagtataagcaaaagaaaatatggagatgcaataaaaccatggtaagggacagttacacattcctaggctctatctacatgtacacatttttattgcctgttaaagaaaaatggttttggaaattattttaagaatgtttgtgtagcaagggttgtgtccttctaaaattctttgactacaagt

SEQ ID NO: 613829 - DNA, 558 bp, Homo sapiens
ttactatatagtccattaaagaaaaactttgccataccctgctctaagatattctctatcccttctaaaacagaaataagataattcactcctttgcctgaaatggctcccaaatgcttacaaagcaaaattcaagattcttagcacatcagctagggtgattcagtatctgatgtacacttgtcttttcggacacatcccttgctccccgtcaaaccttattctctacccttattgagtgtgtcatgctaatttaaggctcagacttgtacatgacatctttctcccttgaaatcyagcctcacctccctctccctttacctggccacttcttactttctctttaggattcaaattagatgtcactttctcatggaaacccttcctagttgccacattttaatcaagtgtccctcttcctgactcccaaaactccctgtgcttccctctcgaacctcactctagaataattggccctttatttctttgtctttgtcccttaactataacgttctgaagacaggaattataacttgttgaccactgtacctgcagcaa

SEQ ID NO: 613830 - DNA, 600 bp, Homo sapiens
taaatctttagtaaatattagtttttttaaatatttccttattcaaagacttggcctctgtatctatcatggattagatttcccgcatgcctcttttatctcaacaaacaataaatgtagctattttaattacaataatagtaatagtatctatgcataaagtgtgaaaatatatacacccaaatattaaaaatagccttcaattagaaattgaatcatagatggtttaaatatataatttcatttttgcttatctttgctttaagcatcctgcacttaaaagtatgttattcatgaataacaaatgttttaagattttctctttctcccccacagattacaaagttgtctattacaaatgtttcattataatttgtgaagttgttaatatttgtcttcccatgttttcttttcctctgttttaagcaggtagccaggcacttagtatttccttgcttcagggatatgtgtagctacaaagcagaaactacttgaagacaaaagttcyttttttcttttctaaaatagaaacttttttcagagatatttatcttttggagagggcagagagaaagaagagcgtcttggaggaatactgaa

SEQ ID NO: 613831 - DNA, 527 bp, Homo sapiens
tttttctcagctcctgttttttgggccatcaatctgcatgcatgacaggggtcaaacaagtactcggtattgaaaggccttgtgtattgcaaaaactgtacagatgtattctattttacgtcaaaccatttctctgattcatacattgtttctatgggatctgttgagtagaaatcagtgtagaaatgtttctgttattccatagagcagagacaagasaaagggtttctcagtacccagcactttgggaggccaaggcgggtggatcacttgaggtcaggagttcaagacaagtctggcgaacatggtgaaaccttgtctctactgaaaaaaaaatacaaaaattagctgggcatggtggcaggtgctacagggaggctgaggaaggagaatcgcttgaaccccggtggcagagtttgcagtgagctgagattgtgccaccgcactccagcctggcaacacaggaagactccacctcaaaaaaaaaaaaaaaaagaagaagaagaagaagagaaagggtttcaatt

SEQ ID NO: 613832 - DNA, 591 bp, Homo sapiens
atcaatatgttttgtttcatactctggctgagatgtaagaaatgtttctaaaagacacaaagaccaggcctgctgagttgatacccctgagggagcaaagaagttggctggaggctggagaccaaggagactgcccctctctgacagagcatctgcttcagatcttgctggtggtagacagttgagccctttccctattatactttcaatcggaactcatattcttcgtgttggcgtcctccatccttccatcagtaacatcatcagcccattctgccaacctcactgtaccactacatgcatgaccaggattccaaagtaaaactgaaaaggaagtagctaaacgtagctggagattagggaagcccggtatatttcaaggtaagaattgagggagagaaggtgggagagttaagccaggccagaaccacagcttctctaccctgggagaggagctaaactttattactaaaactacagggagccactgaaagataatctaatctgtttcacgcytgtgtcatctagtactgacaataatgtatttggaagagccactgtggtcagagatgggctaatggtcaccaaaaa

SEQ ID NO: 613833 - DNA, 634 bp, Homo sapiens
attaactaaatgttacatatttggaaataactgttaacttgcttaggtttgatattatcactacagttatgttaaagagtatccttattcttagaaattgcatgttgcatgatttagggatgatatgttatgacatctgcaatttactctccaaaggtttactcagtggtgtgcctagcacattgtgtttttttataatcatggaataattagcaataacaattttcttgaattgctctttactttaaagactattagcaatttcaaaaagaataaaattcagttttaaagacaaattccataaaatttcatttctaaactgaaatttgcacttaaccagaaaaaattctatagcattcagattgtatagttttacaaaytgaaactctaagtggtcagattgaataacagaagtaaagtaacatgctctgtttttttggtctttataaatactgtgctctcattgctaattctgaatcttccacttaaacataaagatatgtagttccatgggggctgcagacatgaactgctcctaaggcaagcttgagtgattttaagctatcatgaacttactactattgaaacacatacatatagccagctatatgtatgtgtgtggggggtgactata

SEQ ID NO: 613834 - DNA, 634 bp, Homo sapiens
attaactaaatgttacatatttggaaataactgttaacttgcttaggtttgatattatcactacagttatgttaaagagtatccttattcttagaaattgcatgttgcatgatttagggatgatatgttatgacatctgcaatttactctccaaaggtttactcagtggtgtgcctagcacattgtgtttttttataatcatggaataattagcaataacaattttcttgaattgctctttactttaaagactattagcaatttcaaaaagaataaaattcagttttaaagacaaattccataaaatttcatttctaaactgaaatttgcacttaaccagaaaaaattctatagcattcagattgtatagttttacaaattgaaactctaagtggtcagattraataacagaagtaaagtaacatgctctgtttttttggtctttataaatactgtgctctcattgctaattctgaatcttccacttaaacataaagatatgtagttccatgggggctgcagacatgaactgctcctaaggcaagcttgagtgattttaagctatcatgaacttactactattgaaacacatacatatagccagctatatgtatgtgtgtggggggtgactata

SEQ ID NO: 613835 - DNA, 593 bp, Homo sapiens
agtgctgatacacgctacaacatgggtgagccttgaaaacattgctaagagaagccagacacaaaaggccacagattgtatgattccatttataggacatatycagagtaggccaatctagagagactgaaaacagatgagtggttgccagtgggtggaggttgtggggtgtggagtccaactacttactgggtctggggtttccttttggagtgataaaaaagttctggaactagatagtggtgacggttgtggaacattgcttgttaatatacttaatgctactgaaaagtgtattttaaaatgattgcaatggtaaatttttatgtgtattttactacaaattttttaaaaaatacttagcttacaagctgtacaaaaacatggcaaactagatttggttcctaagctaaatttactgactcatggatagatcactgaccaaaatgtggtcattttgagctaaagctaagtctagtgtactgtgattattcttcgatatccacacccatttctcttgtcaactactccacttttattatccatactgctttcacgtgaggtggaagaagttcaatctgcctatggcatta

SEQ ID NO: 613836 - DNA, 601 bp, Homo sapiens
taaggaatacatatttcaagcacatttggaaacattataaaaccggaagctatactaggccacgaaagaagtatcatgaaatactaaagaaatcagtaaagattaaaataaatggaataaaaataaaagtctataaacaactgtaagccactatataaaatggacattaagtaagaagggaggatttaacacaattgaaggaatagaaaatatgaatagacttatagctactaaatatattaaattggcagtaaaatatcttctttccccagtcaaaggaatctatcaggtatagagatgttttttagatgagttaatctagtagacaagtaacaggtaattcaagtctagtttaaattactctggagcataggaagaaaaagagctctctgttctattagatcagtaatayatcgagatattcaacacaaagacaatacataaaagaaagatttttgacctatttttctgttgaagagatcctcaaaaaccctaagcaaaatatttagctaacttaatccagcaatgtttcaaagattctgtcaagcacataagacaaggcaaggccaaagccaagccctgacggttatgatcagtaaag

SEQ ID NO: 613837 - DNA, 572 bp, Homo sapiens
tacataatatacgattccacttaggaaattctagaacaggaaaaactaccgtaggtgagatagcaagctgaacagtgatgagacgacctgtttcataggggcatgaataaactttctaggatgatggagatatttatttatttatttatttattttatttatttatttttttttttgagacggagtgttgctctgttgcccaggctggagtgcaacggcgtgatctcggctcactgcaagctccgccttccygggttcacgccactctcctgcctcagggaccacaggtgcccgccaccacgcccggctaattttttgtatttttagtagagacggggtttcaccatgttagccaggatggtctcgatctcctgacctcgtgatccgccccacttcagcctcccaaagtgctgggattacaggtgtgagccactgcacccagccgagatatttattttgacaagggtaagagtttcataaatgtatacatttgtcaaaacttattgaactgcacaataagatctacgcatttcacttcatataaataatactgcaaattttaaaggatattt

SEQ ID NO: 613838 - DNA, 558 bp, Homo sapiens
tgggtggacaccatccgatcagttgaagggctgatcagaacaaaaaggtkgacccctccataggtaggggggaaatttcctctggcctgactaccttgagctggaacactagttttttccttcctttggacttgaactgaaacattagttcttcctgggcattcagaccggaattatactatcagctctcctggttcgcaggcctttggattcagattggaattacaacatggatgctcctgagccctcaacttgccaactgcagatttgggtcttgccagcctctgtaactgcttgagtcaaaaaaaaatctctttctatatgtatacacatatacatccaatgggttctgtttctctgtaaaaccctggctaatacaagccccattgcttttagaattaaagtcggtgagggacacagctagacagcttaaatcaataaagaagaattgaagaagcagatgtgataatctaattttacataagaataaagcttatattcaaaaagcaactctccacaaagttgtaaagctacttaatgttactaaattgatggaaa

SEQ ID NO: 613839 - DNA, 556 bp, Homo sapiens
acccttgtcaagtaagtctaaatgggtttcacaatacagttaatctttaatccaacagaaattagattttgtatttgatataggttgggaaacaaggttttggtctgccagatggggttctatatgtttcaagtaaggattcttggattggaagggacctacagtaattaaaactcaataatagcctgaagctaaactagccaagcaaaacactgaatttggaaatgggtcagaaaggaaagagagtgaagaagcaaaaggcttttttttttttcttgagatggagtcttgctcttttgcccaggctggagtgcagtggtgcaatctcggctcactgcaacctccacctcccgggttcaagcagttctctgcctcagcctcctgggtagctgggactacaggcgcctgccaccacacggctaatttttyatatttttagcagagatgggagtttcaccatcttggccaggctgatattgaactcctgacctcgtgatccacctgccttggcctcgcaaagtgctgggattacaggcatgagccaccatgccaggcc

SEQ ID NO: 613840 - DNA, 556 bp, Homo sapiens
acccttgtcaagtaagtctaaatgggtttcacaatacagttaatctttaatccaacagaaattagattttgtatttgatataggttgggaaacaaggttttggtctgccagatggggttctatatgtttcaagtaaggattcttggattggaagggacctacagtaattaaaactcaataatagcctgaagctaaactagccaagcaaaacactgaatttggaaatgggtcagaaaggaaagagagtgaagaagcaaaaggcttttttttttttcttgagatggagtcttgctcttttgcccaggctggagtgcagtggtgcaatctcggctcactgcaacctccacctcccgggttcaagcagttctctgcctcagcctcctgggtagctgggactacaggcgcctgccaccacacggctaattttttatatttttagcagagatgggagtttcaccatcttggccaggctgatmttgaactcctgacctcgtgatccacctgccttggcctcgcaaagtgctgggattacaggcatgagccaccatgccaggcc

SEQ ID NO: 613841 - DNA, 526 bp, Homo sapiens
agtgatgttgagcattttttcatgtatctgtatgtaagtcgyctttggagaaatgtctattcagatactttgcccattttttaattgagttatttggcttttttctctttgcctttcttatgtattctggatatgaagcccttgttggatgaatagttttcaaatatttttcccattttacatattgtctctatgctctgttgtttcctttgctgtgcagaagttctttagctgaatataatcccatatgtctatttcagtttttgttgcctgcgcctttgaagtattatgcataaaatcagtgcctagaccagtatactgaacaattaccctatattttcttccagtagttttgtagtgttgggtcctatatttaagtattgaatccatcttgaatttattgttgtgtatggtgagagataggggcctagtttcattcttcctcatacagatatccagttttcctagcaccagttactgaagaggatgtcctttcttcagtgtatgttcttggttgaaaatctgt

SEQ ID NO: 613842 - DNA, 591 bp, Homo sapiens
ttggtagaattcagcagtaaagccacctgagcttttcttttttgagacattttattactgatttaatatttttgcttattactggtctgttcaggttttctatttcttcctggttcaatctcagtattcattccctccaggttttccaatttttgggaaattgcatagttgttcataatagtctctaatgaacctttgtatttctgtggtactcattgtaatgtctccttcatttctggttttaattggatagtctctttttcttagtctaatagtttgccaattttgtttacctctttttaaaaaacagctacatttaatcttttgtagtttcttatctgtattttgttcagttctgctctytatttctttccatctactaactttgaatttggtttgctcttgcttttctagttccttttagtgttctgttgggtttttcacttaaaatctttctacttttttgatgtaggcatttattgctttaaacatccctcttgatactgttttgactaaatggcacagattttggtatactgtgtatatattttcatttgttacaagtttttatatttcctttttgacgaaatg

SEQ ID NO: 613843 - DNA, 591 bp, Homo sapiens
ttggtagaattcagcagtaaagccacctgagcttttcttttttgagacattttattactgatttaatatttttgcttattactggtctgttcaggttttctatttcttcctggttcaatctcagtattcattccctccaggttttccaatttttgggaaattgcatagttgttcataatagtctctaatgaacctttgtatttctgtggtactcattgtaatgtctccttcatttctggttttaattggatagtctctttttcttagtctaatagtttgccaattttgtttacctctttttaaaaaacagctacatttaatcttttgtagtttcttatctgtattttgttcagttctgctctctatttctttccatctactaactttgaatttggtttgctcttgcttttctagttccttttagtgttctgttgggtttttcacttaaaatctttctacttttttgatgtaggcatttaytgctttaaacatccctcttgatactgttttgactaaatggcacagattttggtatactgtgtatatattttcatttgttacaagtttttatatttcctttttgacgaaatg

SEQ ID NO: 613844 - DNA, 521 bp, Homo sapiens
gtgagttttcccattacttaattcttcggtaaggttttawtaaacactacagcgtggattagggagaagaaaatggcacaacaggagagagaagagataagcaaatcattcaccacattctgtatagcatagaataaatgccctcgttcttcaggcagactgtctgggttcaaatcgcagctctacaaattacttgttttattcccttggaaaaattacttgaaccctttgtgactctgttgccccatctgtaaaattagagttggtactgactcacttatgtctcctatccccatcagcaagggagaagaaaccctccccatcctcctcctcagcactcacagccttgcctccactatcttccatgagtcttagctcgaggggaatgaggagaagggtctagaaacctggagagtgactaaaacatgagtagataacaagcactttaggcagagggggcagcatgagaaaacacctgtgggtgagagagagcaatgtgtctttggagaaccacaagcaga

SEQ ID NO: 613845 - DNA, 622 bp, Homo sapiens
aaatattcttctatccttctgtctttcttgtttcttgacacaaatacttttataatatcctagaagaccagcttcaaaagtagaattcttggacttctgtgccagaatatggctatgtaaggagaacagcccccataccttgctaactcctgttcacttcccactctgctttgtcctgctctgcaaggggctttgcgtacacatgtgtggatactccagcctgcatgttcaagctctctctacatccccagaaaacaactatttcctctttatatcttgggcctaaggtgtgcctattggcatggtctgtacttagaaagatcgttgagggaaggtttggagcagttggaaggtgtttgggcaggagactccctctgttagatcaaaaggggctcagttagtttctgctagtgtggagataaatcatattatggctaggggccatgatggtaggagcagtcatagtaattcttgctccagtaagagtaagtaatcccagggctccggatgctgagttcatggtcttgaatgggggcaggrcagaggctctgggtgggcatgagccctttgccttgcagacttctcccttgtgtaggcaccagccattggaggcgtagagtgg

SEQ ID NO: 613846 - DNA, 611 bp, Homo sapiens
tcttatgtcactaatttttattaccctattctccccatgactgaaagtacagcttcttttgtggtcatagttttgggaatagtgagacatttaaaaaatactctaaatgggctgggtgcattggcttatgctatataatcccagcactttgggaggccaaggtgggcggatcacttgaggtcaggagttcgagatcagcctggccaacatggtgaaaccctgtcgctactaaagatacaaaaattagctgggtgtggtgacacacacctgtagtcccagctacttgggatggtgagacaggagaatcgcttgaacccaggaggcggaggttgcagtgagccgagatcgcaccattgcactttagcctgggcatcacagggagattctgtctcaaaaaaaaaaaattactctaaatgtcacacataatgctaaaatataaacttgatagaactagtttttggagcttggactccagtaattaccttccagcatagyaggcagaaaagatagtagctactctgaccaaaaggaaatggaaggatagcacaccaccaagattttgtacaaatgacaagagcttataatatttgctcttgtttcatttgtacaca

SEQ ID NO: 613847 - DNA, 454 bp, Homo sapiens
tagttccctataccccaaattaggaaaaactaaaatcaaacacattaaaaacaaaagagagaaaaactttctgggtgaaaacactttagaggactgtattatttactaactaaatacatttccttaattaaagtgcttactttccaataaagaacataaatgaagaacatgttttcagagagaagaggaaaaacacaattttctgatcayagtactccacggctaatgacaaaggaaaaaaaagcatttttctttccttgttgtccccccatgtcttgaaaacaccaaccattatttaaaattctcttcccatcactcaaagaaacagagacaggtgttcattctgagttaggtgtttgcttatctgaccagcagggtcaggataagaaatcacacaacccctagggagcaataaaatgtttaatggatttctgcagttaccaggggaaaaaaa

SEQ ID NO: 613848 - DNA, 454 bp, Homo sapiens
tagttccctataccccaaattaggaaaaactaaaatcaaacacattaaaaacaaaagagagaaaaactttctgggtgaaaacactttagaggactgtattatttactaactaaatacatttccttaattaaagtgcttactttccaataaagaacataaatgaagaacatgttttcagagagaagaggaaaaacacaattttctgatcatagtactccayggctaatgacaaaggaaaaaaaagcatttttctttccttgttgtccccccatgtcttgaaaacaccaaccattatttaaaattctcttcccatcactcaaagaaacagagacaggtgttcattctgagttaggtgtttgcttatctgaccagcagggtcaggataagaaatcacacaacccctagggagcaataaaatgtttaatggatttctgcagttaccaggggaaaaaaa

SEQ ID NO: 613849 - DNA, 454 bp, Homo sapiens
tagttccctataccccaaattaggaaaaactaaaatcaaacacattaaaaacaaaagagagaaaaactttctgggtgaaaacactttagaggactgtattatttactaactaaatacatttccttaattaaagtgcttactttccaataaagaacataaatgaagaacatgttttcagagagaagaggaaaaacacaattttctgatcatagtactccacggctaatgacaaaggaaaaaaaagcatttttctttccttgttktccccccatgtcttgaaaacaccaaccattatttaaaattctcttcccatcactcaaagaaacagagacaggtgttcattctgagttaggtgtttgcttatctgaccagcagggtcaggataagaaatcacacaacccctagggagcaataaaatgtttaatggatttctgcagttaccaggggaaaaaaa

SEQ ID NO: 613850 - DNA, 618 bp, Homo sapiens
ttttaaacagcgctgcactgttttacattcagcctaaaggattttaccgtgctacagtcatttattttgttagatttggacactgtcatttttgttactcttaatttcaaagggctgatgtgtatgattgtatcacaagtgtatgaaaggaatacaactatctagaagcattttgctgaagagtcacacctggtagattcagaccaaactgcagtgcatagaagatgaagcaggagtaagaaggaaagggttttccagttggctggggctgatgaatcctgttacaatctaaaggtcagagaaggtcaagcatggcccctgggacttagtggctaagactgggaaaaatgaaaccagtgtatagatgtaaatagagaaagaaatctgagrgacgtggacaaaaaagagcaaattagcaattttataaggcatgatttttaaattaataaaaaggaaacccaattaagggccagaagtatagctgatataggaaagtagctttggtacagtggaaagcattccagatttggggcagaagccgtggactctgttcgttcctttagtgcgtatcaacaacatgaccttgggaaagtcacttgaccccatctgtgctcattt

SEQ ID NO: 613851 - DNA, 468 bp, Homo sapiens
tacagatgggtccaaaggctaygtttcatagaattattggttgaagttttctccctgcctgggcatggccttggggtgggctctgaggctaagctgagctgctgattggactcctaagtgaggcaggtccaacccctttactccacagaaatgcattgtggttcttttacctgggcagggaattggggtgggttctgaggctgatctgagccattgtttagactctcaggttgggcatgtctagccgatgcactctgctgatatgcttccaggtggaaatatcccttcctgggtggggccttgaggtaggctgttggttggatgtggaggctggatgtctaaggactcaagccaggttgaacttcctatcatgtttcttggagtaaccagctcagttttgtgggtaaggtatgctcttggccagcatcatgatcaggtgccactgctaggaggaacacaggactacca

SEQ ID NO: 613852 - DNA, 536 bp, Homo sapiens
tttaagtgtccaagaataatgaaaaaatagtttggggcctgattattgttcctttaaattggttagtccaagaaacttggactttattcacaacgcwgttgaagaattgaatggttttgacaagcttcgacatggttggagttgtattttgagatcagtctcgcagtaagattcatgttgctctgtgaaatctgaactcaaagatgctctggcagattctgctgatcccctgcccagtagatctcctccccttctttacaggacactggttttgttggggatggtgatgcaacaacgtaaaaaggaaacagaaaacaatttttagaaagtgaccacttttgcatttctcctttgaagaaaggaatggcagtatctagttttggccaatgtcatataagctgaagtcttagagtgggtcttccaaaaatgctcttcaaaagtggaagtagcattaagtgataaagctgcttaagaccttaaggatataagcatggaaaggcaacagtatcttgaattccttatattgtggaaccatt

SEQ ID NO: 613853 - DNA, 581 bp, Homo sapiens
gcatggacacaggaaggggaatatcacactctggggactgttgtggggtggggggaggggggagggatagcattgggagatatacctaatgctagatgccragttagtgggtgcagcgcaccagcatggcacatgtatacatatgtaactaacctgcacaatgtgcacatgtaccctaaaacttaaagtataataaaaaaaaaattaagtctaaaaaacaaaaaaacgaacaaaaaaaaaaaaaaagaattccacagcaatggtcctctgagaggaaggctgcgctgcttcacagtctgttggcaatgtttgacaaaaggcataaaacacagagaaaaactaaacagagatgtattctctcaggaagtgtggggatgcgtggggaggtaagtcctgagcaaaggaagcaaaataaccctattgcttgcttgaacccatgtctgatctctcgggaccagcccccttgggggaaactgatgcacagagacatcagcaaaatattttcatggaaagggataatattgcacacagcaatggtgctggtgttggggctgagggggcacgctgatagacaaggggga

SEQ ID NO: 613854 - DNA, 517 bp, Homo sapiens
  misc_feature 283: n = A,T,C or G
ggaggtggtgcttcagctgaaccctgaacaccatgtggtcttcacagagtagtatgggacaggaaagcagaggaagatactggaaacacaggcagggaggaggaacagcacagctctggcaggtgagaaatgaggctgcggagccgggctgggactagcagctggagccccatggaggatagcacagggtgtaccaacagccacagctcagctctactttctgcccgggagtagatattttttttcttctttcttttttttttctttttgtgagtcactggcntgctcccctcattgaagaagcctaatactggcattcagaactatttcttgagttgaacaaaaagatctaaaggagtgagagattgagttaccactctcgccctttggagatctgcaraaagaaacttttacaagtaggaaaagtggataggatgataataagaatcccccaaagctggaggtaaaggcttcctgcctccttccaaatagatgatgaacaacattctattctaga

SEQ ID NO: 613855 - DNA, 486 bp, Homo sapiens
  misc_feature 481, 482, 483, 484, 485, 486: n = A,T,C or G
ccacgtgagcctgtttgataatcagggatgagggagccttcacgccagcctctgagaaaccaggcgtgtacctgttggtctcaaagtcaccctctcttggctcctcctccttgctggggccttggcacggttcagcagccaagaggaaaatggctttgcatttgtaatttgtgatttgtgtgtcccctcttcctgctctgcattctaccctcagcccctggcccacagcctggtaccctggagctccataaatacctgttgagtgaatgagaggatgaaggcttctgcrgagagagagtggaagaaaagtggcgtcttttgacttcggacttggctttccttgcagaggcctcagggaggaacaacacggaaacaaagatggccttgtcctgggcccttccctccctgccccactgtcctcctctgcatcctacagcagcctggggggaggtggaaatgggcccctttgttctgcttccannnnnn

SEQ ID NO: 613856 - DNA, 609 bp, Homo sapiens
gctcgctctggctcctgcacccattcacctgygtgcacaccctctgatatgatttggctccgtgtccttacccaaatctcgtcgtgtaactcccataattctcttgtgttgtgggagggaccgggtgagagacgactgaatcataggggcaggtctttcctctgatgttcttgccatagtgaatgggtctcatgagatctgatacctttaaaaacaagagtttctctgcacaaactctcttttttgcctgccaccatccacgtaagatgtgacttgctcctccttgccttctgccaggatgtgaggcctccccaagccatgtggaactgtaagtccgattaaacctccttcttttgtaaattgcccggtcttgggtatgtctttacctgcagtgtgaaaatggaccaaaacaccctccctcgagcagttgagaactgcaggataagtgaggcacttcaacctcaaggctcatgcagcctaagtgaggcaattcaacctcaaggcccatgcaggctaagtgaggcacctcaatctcaaggcccatgcaggctaagtgaggcacctcaatctcaaggcttatgcaggctaagtgaggcacctcaatctcga

SEQ ID NO: 613857 - DNA, 599 bp, Homo sapiens
atcctttaaccaaaacacaagtaaaatccaatgggagcacagagaactgagtgatcctgtctgattggaagaattcaaagaagcatcacagaagtgaagggcaggatttctacaggcagaaatgtggcagatttctaggatgagagaatagctttggttagcaatgacacataaacatatgaaaaaggcagggcatgtttgtggaatcattctgtgtagctggagaaggtcagtaaagaagaaaagtgggagaaaaccggataagcaggacaaacctgcataatggagacactgaacacagcaatgagaaactgaagcactattaatggtttttgcagtggacattagcacattccaacctgtgtttaagggtgatgtccaagtcagcagtgtgatgaatggacaagatgagtagtaagtaaccaggaccctggggccacactgagctgccctagcttggtgataaaacctgtgatctcatttgaggatgaaaggatagtaagccactttcatgtcactattcttgtttaaacaatattcagccattacctggaggctaaataacagttttmtcattgatgttctttaatttcataaag

SEQ ID NO: 613858 - DNA, 562 bp, Homo sapiens
tctgcatctaaagtgagtttcttatagacagcatatagttgagtcactttttttaatctattcttccctctgctacaataagatattattctacacacacactaggatggcaatagttttccttataaaagaaagaaaataacaagggttggcaaggatatgaagagattgaaacccttatatattcttggtagaaatgtaaaatgggacagccaccatggaaaataatttgctagtatctccaaaagttacacatagaattaccatataacccagcaatttcacttcgaagaatatacccaaaataattgaaaacaggtatacaaacaaatacatggacataaatgttcatagcagtaccatttacaatagccaagaggtaaaaacaacccaaatgtccatcaatagatgaataaatagataaggccaggtgcagtggctcatgtctataatcccagcactctgggaggccaatgtgggtggatcacttgagcccaggaaattcaagatcaactgaggcaacatggtgaaaacccactrcaaaaaaatacaaaaattaggc

SEQ ID NO: 613859 - DNA, 526 bp, Homo sapiens
ctctactgacagcaccagacaggtcaagaagacagaaagtcaacaaagaaacaatggatttaaactatgccctacaacaatggacttaatagacatttacagaacattctatccagcaaccatagaatattcattctattcatcagtgcatggaactttctccaagatagatgatatgataagccataaaataagtctcattaaatttaagaaaattgaaattacatcaagtactctcttagaccacagtggaataaaattggaaatcaactccaaaggaaccttcaaraccatgaaaatacatggaaattaaataacctgctcctgaaagatcattggatcaacaatgaaatgaagaggcaaatacaaaaattctttgaattgaatgataatattgacacacctatcacaacctctgggaagcagcaaaagaagtgataagaggaaagttcatagccttaaatccctacataaaaaaatctgaaagagcacaaatggataatctgaggtcacacttcaagaaatt

SEQ ID NO: 613860 - DNA, 596 bp, Homo sapiens
acataatctattccctgtaagggtgaattcaacaatgttcgaattggaaaagattagtttttaacttttaaatacagataatatgaaattaatagcttggcatcccctaaggaaacagcaaytggagagcagatttgcaaaccagaaaagcaactcatgaatacaaattgcctggaaagcatttattacaacagaagctctgcaagatataccggaaattgacagtggcatcgaattcccagcaaggaaggttagtatgaaaggacttgctattacttagggtcaccagaacatgctattctgttacgtttttagacactaaaaaagatagcaaataatgaaaataaggttaataccagcacagatcatgcctacatttgcctaaaatgtttgaaagagagtatgacttcacaggagtggtgtaaataatgaagagttataagaagggcccagtattagcaagctgatatctctcaaatgatctttcagttcatagcaatgcaattggtcttaatttggaagcaagattacttaaaacgcaaagaaacatttataccataaagaaaattatttttaaaaaaactcttaagcacttt

SEQ ID NO: 613861 - DNA, 596 bp, Homo sapiens
acataatctattccctgtaagggtgaattcaacaatgttcgaattggaaaagattagtttttaacttttaaatacagataatatgaaattaatagcttggcatcccctaaggaaacagcaactggagagcagatttgcaaaccagaaaagcaactcatgaatacaaattgcctggaaagcatttattacaacagaagctctgcaagatataccggaaattgacagtggcatcgaattcccagcaaggaaggttagtatgaaaggacttgctattacttagggtcaccagaacatgctattctgttacgttwttagacactaaaaaagatagcaaataatgaaaataaggttaataccagcacagatcatgcctacatttgcctaaaatgtttgaaagagagtatgacttcacaggagtggtgtaaataatgaagagttataagaagggcccagtattagcaagctgatatctctcaaatgatctttcagttcatagcaatgcaattggtcttaatttggaagcaagattacttaaaacgcaaagaaacatttataccataaagaaaattatttttaaaaaaactcttaagcacttt

SEQ ID NO: 613862 - DNA, 586 bp, Homo sapiens
cttctcttgggattaccttctgatatacagccccaacccctgaggccccggaagatttttcatactccagcctcattccccactacccccagccttgctcctgagccctggccacactggtctccctgttcccctgaacaagacttgtttttgctcaggcctctacctggaaagcacccgctctttttttggcatccctgcttctgcaaaccctactcactgcttcctgtgtgaagctcttggcagaattaatctctctgtcctctgggctaccatggcacttagttctcacacagtggggcacttatcacattacattaaggttgctgatgtgtctgtcttaccaaccagattataggctcctttagggcaggaaccaagtctcaaatctctcttcattgraagtacctagcagaggggctggcaaatgggaggtggtcaaacaatccttattaagttaaatgctattacttcatgctccccagccagaaattacctggtgacgacttactcaaattgaggctcatacggaggaaagagactcataagtagacacacaaaatctgagacccataataaaaaatgt

SEQ ID NO: 613863 - DNA, 456 bp, Homo sapiens
ataactaaaacttaaaacctataytatttattgctgctataacaaattgccacaaagtcagcagcttaaaacaagacatatttattattttacagttctgtaggtgctaaatatgacacaggtctcactgggctaaaatcaacacatcagcaaggctgggttcctttccataggatgtaggagaggatccatttccttgcttatttgggttgttggcagaattaacttcctcgagattgcaggactgaggtacccaatttcttgctggctgtcagctgaaggtccttctcagctactagaggccacctgcacttcttggcttgtggcccactttctatatttgcaaagccagtaatggcaagccaaatccctcccgcccttggactctacatgtagatacatcacagtaaaaccgtagaaaaccaaaaacaaaatgaacatcttaaaaggagccag

SEQ ID NO: 613864 - DNA, 467 bp, Homo sapiens
agggacacaaacactgcggaaggccgcagggtcctctgcctaggaaaaccagagacctttgttcacttgtttatctgctgaccttccctccactattgtcccatgaccctgccaaatccccctctgtgagaaacacccaagaattatcaataaaaaaataaatttaaaaaaaaaaaaaaaaaaaaagaatggactttcccaggccagctgtggtggctcacgactgtaatcccagcactgtggcaggccaaggygggcagatcacctgagttcaggagttcaagaccagcctgaccaacacggagaaaccccgtctctactaaaaataaaaaaaattagctgggcgtggtggtgcatgcctgtaatcccagctacttgggaggctgaggcaggagaattgcttgaacccaggaggcagaggttgttgtgagctgagattgcaccattgcactccagcctgggcaaca

SEQ ID NO: 613865 - DNA, 467 bp, Homo sapiens
agggacacaaacactgcggaaggccgcagggtcctctgcctaggaaaaccagagacctttgttcacttgtttatctgctgaccttccctccactattgtcccatgaccctgccaaatccccctctgtgagaaacacccaagaattatcaataaaaaaataaatttaaaaaaaaaaaaaaaaaaaaagaatggactttcccaggccagctgtggtggctcacgactgtaatcccagcactgtggcaggccaaggcgggcagatcacctgagwtcaggagttcaagaccagcctgaccaacacggagaaaccccgtctctactaaaaataaaaaaaattagctgggcgtggtggtgcatgcctgtaatcccagctacttgggaggctgaggcaggagaattgcttgaacccaggaggcagaggttgttgtgagctgagattgcaccattgcactccagcctgggcaaca

SEQ ID NO: 613866 - DNA, 452 bp, Homo sapiens
agatgcaggagagacagccacgtgaagtttgaggcagcagtggctgaagggatgccaaggaacacctggggccaccaggagctggaggaggtcggagaccctcccctagagcccgcagagggagcgtggccctgccaacaccttgatttcagacttccggcttccagagctaggaaaggatccatttttgttactttttttttttttaaacagagttttgcttttgttgcccaggctggagtgcagtggcatgatcttggctcactgcaacctctgcctcccaggttcaagtgattctcctgcctcagcctcccaagaagctgagatgacaggtgtgtgccaccacacccagctaatttttgtatctttggtagagacgggatttcaccatattggtcaggctggtgtcgaactcctgacctygtgatccgcccgcctcagcctcccacagt

SEQ ID NO: 613867 - DNA, 549 bp, Homo sapiens
ttggcacatttgacgacggcttccacccattgctgggaacttacccacagcaaatgcaaacattttttatttctatgcagttcaatcactgataccaaaattagaagaaaaaattcagtgactttgtcacacacagcatctgtttggttgaggacttctttgacttcagagtacagatgattaacaacctgtgctatgtaagccacacccaaatccttaagatccatgagggactggacaaaagggatgaaccatagaaatgtgctgttatgaacacgcatgtcttgaccaatatctgactgaagtacactggctaatgtttccatttcttcatacatgttaggacaataatctgggcaaatggctgttctccatccagaatcctaaaatgaaagaaatgctgatgttcagataaataagcaccacttatgacaggttcaacacccaagtcgttaagaaaaatacgtttctcaactctcttattttggtttaccacatcattattatgctatacaatggtataaytgtggcatataattatatcacaat

SEQ ID NO: 613868 - DNA, 576 bp, Homo sapiens
tttgtgctaatgaccagcttgtgtagtgaggtagaaagggctgggaagtcctactgcctgcctgatgtccattcccctcctggaacacaaccctggtctgtacgtcttttccaccatcggcccacgtagattgcagggactgatttcacccctgactccagggaagggcgcatcatcagaccaggccagccaggcttcagattcccctggcctcagccattggctctgaggcagacacatgacccaggcctggcgtctcagccctgaccacagtggctgagtagaagatagtcatgtaaccgggcgcagtggctcacacctgtcatcctagcactttgggargccaaggcgggtggatcacctgaggccaggagttcaagaccagcctggccaacatggtgaaaccccgtctctactataaatacaaaaattggccaggcgtgttggtgcacgcctgtagtcccagctactcgggaggctgaggcaggagaatcactggaacctggaagggagacagaggttgcagtgagctgagactgcgccactgcactccagcctgggggacagacagagaca

SEQ ID NO: 613869 - DNA, 617 bp, Homo sapiens
actcacatacagggtgtgtgcacttggaattaaaatacagaaatataaatgcactttccaaaagagatgattaaaaatataattttgcaaacatgtcttattgttctctttgctctgtattgcttctgggtttcatttttttagatttatctttggctaaatracacatttacgtcgtacaaaaataaaaatgatcttcatatttcctctccttttttacacagaaggttaacatctatatattgtgatctgcatttgctattttcacctaacaacatagatcctggagctctctctatatcagcggtctttaaagtctcaatgctaagcacattttctacagaagctacctaatttatccggggtagtaaatatcagctgtattagacaaggaatatgttactcccccaagtctaacacacctacttgcactgccacatcctctctctctctgtctcgctgcaacaaaggaagtgtcccttctgtcaaaggctatttccttccgttataggaaggaaaatgtgtgctggctcccaaccctctcctgccttctcagagagatggtggtctctccgtatcttctctctcatctctctcctgtatcttcagcctgcgtt

SEQ ID NO: 613870 - DNA, 617 bp, Homo sapiens
actcacatacagggtgtgtgcacttggaattaaaatacagaaatataaatgcactttccaaaagagatgattaaaaatataattttgcaaacatgtcttattgttctctttgctctgtattgcttctgggtttcatttttttagatttatctttggctaaatgacacatttacgtcgtacaaaaataaaaatgatcttcatatttcctctccttttttacacagaaggttaacatctatatattgtgatctgcatttgctattttcacctaacaacatagatcctggagctctctctatatcagcggtctttaaagtctcaatgctaagcacattttctacagaagctacctaatttatccggggtagtaaatatcagctgtattagacaaggaatatgttactcccccaagtctaacacacctacttgcactgccacatcctctctctctctstctcgctgcaacaaaggaagtgtcccttctgtcaaaggctatttccttccgttataggaaggaaaatgtgtgctggctcccaaccctctcctgccttctcagagagatggtggtctctccgtatcttctctctcatctctctcctgtatcttcagcctgcgtt

SEQ ID NO: 613871 - DNA, 599 bp, Homo sapiens
acaacatgtaaaaactcaaaaacatattgaatggaaaagacatttgcagcatgagacaaattatatcaatcatcagatatgcaatagaaactattcatgaatataaatacatatggagcatttttgggtgttagaatatttgtgattcttaatgattatctctgagggcaagggagacagaagcagggatgatacaaaggcagcttcatttgttttatttcatttatattttaaaagatggagtgaatctgacatcatgtcatcagtcgccagttgtgggtgggaggctcccaggtcttagctccactatttttattgctcttttttttcaatctgtcaaaacaatttataacaaaatttctgtttccaatccctgtccttctatggcaggctatcatgttttgaagtagttatctaccaaataagatatattcatttagtgattgttttcttatttaataaaaacatatgtaactgtgagtcacagcttcatttagcctgcattccatcccaaagtaggaaaaaagttttagttatatttcacttacttttgtgcccaatcaatgcataatttmtctaatattttgaaatattaaaaa

SEQ ID NO: 613872 - DNA, 586 bp, Homo sapiens
ctccatctttcttgcacaatggattagttgtcagtctaaaaacgtctctcaaactaatgtttttaaataaataaatgtacagaatgaaaaaactagtatattcaaatgtaatcaaaatgtttttaaaatatgtcaatacattaaataatacactttaatgtaaacaatatgttaataaactgtaaggtgatataaaaatatctgatttatattaatgactaggtgcttctaatattactgcggttaragctacagtcatgattaaagaaaatgctaaatcttcaagatgtaaaaaaataaagatgtaaattttcccttagaaattcacagattcttgaacaggtgctgttcccttgctaaatgatttctatggaaaggaacttgcacttggtcattctatttgcaaggtaaattatcattggtaatgctggaggaaaaacaaatttcctgtgccattggccatatcatggctgcagtttcctcggtgagatagtttggatatttttctcctccaaatctcaagttgaaatgtaatcctcagtgttggaggttggggaggcctggtgggaggtgtttagatcaaggg

SEQ ID NO: 613873 - DNA, 586 bp, Homo sapiens
ctccatctttcttgcacaatggattagttgtcagtctaaaaacgtctctcaaactaatgtttttaaataaataaatgtacagaatgaaaaaactagtatattcaaatgtaatcaaaatgtttttaaaatatgtcaatacattaaataatacactttaatgtaaacaatatgttaataaactgtaaggtgatataaaaatatctgatttatattaatgactaggtgcttctaatattactgcggttagrgctacagtcatgattaaagaaaatgctaaatcttcaagatgtaaaaaaataaagatgtaaattttcccttagaaattcacagattcttgaacaggtgctgttcccttgctaaatgatttctatggaaaggaacttgcacttggtcattctatttgcaaggtaaattatcattggtaatgctggaggaaaaacaaatttcctgtgccattggccatatcatggctgcagtttcctcggtgagatagtttggatatttttctcctccaaatctcaagttgaaatgtaatcctcagtgttggaggttggggaggcctggtgggaggtgtttagatcaaggg

SEQ ID NO: 613874 - DNA, 586 bp, Homo sapiens
ctccatctttcttgcacaatggattagttgtcagtctaaaaacgtctctcaaactaatgtttttaaataaataaatgtacagaatgaaaaaactagtatattcaaatgtaatcaaaatgtttttaaaatatgtcaatacattaaataatacactttaatgtaaacaatatgttaataaactgtaaggtgatataaaaatatctgatttatattaatgactaggtgcttctaatattactgcggttagagctacagtcmtgattaaagaaaatgctaaatcttcaagatgtaaaaaaataaagatgtaaattttcccttagaaattcacagattcttgaacaggtgctgttcccttgctaaatgatttctatggaaaggaacttgcacttggtcattctatttgcaaggtaaattatcattggtaatgctggaggaaaaacaaatttcctgtgccattggccatatcatggctgcagtttcctcggtgagatagtttggatatttttctcctccaaatctcaagttgaaatgtaatcctcagtgttggaggttggggaggcctggtgggaggtgtttagatcaaggg

SEQ ID NO: 613875 - DNA, 495 bp, Homo sapiens
tctttatagaaacacaagaatgacctaacatactcagtttacacaacttttttttattcttycaatgaacccttttctggggtgctcaagttcagagtagctgtaccttttctgtctctaaaaagagtcttgttgctaacaagataaactctacgtatttttcacttaatcgaggtatcgtgacttctcctacagttaacttccaccatggaggcaacagtattaatgtaattcaatgtcaaaatttagatgtcaggtgtgaacaaacaataaaaccagggctttgctaccctatatgtctattactgatttgaaaacattaataagtagtgtgtacatttttagctcctgtttttgtttttttgttttgagatggagttttgctcttgtacaatggcacaatctcagctcaccacaaactctgcctcctgggttcaagcgattctcctgcctcagcctcccgagtagctgcgattacaggcatgcaccaccatg

SEQ ID NO: 613876 - DNA, 495 bp, Homo sapiens
tctttatagaaacacaagaatgacctaacatactcagtttacacaacttttttttattcttccaatgaacccttttctggggtgctcaagttcagagtagctrtaccttttctgtctctaaaaagagtcttgttgctaacaagataaactctacgtatttttcacttaatcgaggtatcgtgacttctcctacagttaacttccaccatggaggcaacagtattaatgtaattcaatgtcaaaatttagatgtcaggtgtgaacaaacaataaaaccagggctttgctaccctatatgtctattactgatttgaaaacattaataagtagtgtgtacatttttagctcctgtttttgtttttttgttttgagatggagttttgctcttgtacaatggcacaatctcagctcaccacaaactctgcctcctgggttcaagcgattctcctgcctcagcctcccgagtagctgcgattacaggcatgcaccaccatg

SEQ ID NO: 613877 - DNA, 495 bp, Homo sapiens
tctttatagaaacacaagaatgacctaacatactcagtttacacaacttttttttattcttccaatgaacccttttctggggtgctcaagttcagagtagctgtaccttttctgtctctaaaaagagtcttgttgctaacaagataaactctacgtatttttcacttaatcgaggtatcgtgacttctcctacagttaacttccaccatggaggcaacagtattaatgtaattcaatgtcaaaatttagatgtcaggtgtgaacaaacaatwaaaccagggctttgctaccctatatgtctattactgatttgaaaacattaataagtagtgtgtacatttttagctcctgtttttgtttttttgttttgagatggagttttgctcttgtacaatggcacaatctcagctcaccacaaactctgcctcctgggttcaagcgattctcctgcctcagcctcccgagtagctgcgattacaggcatgcaccaccatg

SEQ ID NO: 613878 - DNA, 554 bp, Homo sapiens
gtgctgtgacagggctttggctctgttagccatgtggggtacagayccaagtgcccctgtggccaaagcctgctacatttatccagctcctgtaaacacactttcttgtagaatcacaaagatgtaggaagtcctgcatcttccatctgcttctttcccatcctgtagccactcctgggtctcctgttttagtccctgtgtggttccagtgtctaagaaatgaacgcatgggagttataacccctttttaagtatcttctgcctacgtatcttgcgtagctcagtctttttcttcccttttacaacgaggtagcaggtgcttgagtttctgagaggaatgagaagggcaaatgcaaaccccttcccttgagcctttgcagctggttgactcaataatagttgctgagtgcccatgggtcaggctcttccagggctggctttgctctgtaatgaacaccttgcactccaggattgtttgattatccttcaaaactggacacaccctttcctgtcagatggtttctgtggtcatgcattgaggtggaggtggatgt

SEQ ID NO: 613879 - DNA, 587 bp, Homo sapiens
tatctgctgtgatcattgagccctgaaggatgccttgttagtggagagcggccttcagcacatcctgcgtgtcttaggacaggacatgccatgccttcctgctctggaacagggacttggctccctttgagcctctctgggggctttcaacaggcaaagggcctgctrtgctccaactgctgagcaattttctccccacaaggtcaagggcagaaggctagagtgaaaaacagtggcagctggcacaggttcgttcatattgtatgaattttttttgtttttgttttttatttttttgagatggagtctcactctgtcgcccaggctggagtgcagtagtgtgatctcggctcactgcctcctaaagtcctgggattacaggcatgagccaccgagcccggcctccaaagatttttcatcactccaagcagaaactctggaaccattcatgtttgaattatttttaacagatatgttcaatttttgtatgtcagcaaggcctggaagtaggttcatcttgtcgggaggatggggctcagtaaatctgtaggtaggcaggatgatgaggggtcatcccttctctttcc

SEQ ID NO: 613880 - DNA, 610 bp, Homo sapiens
ggttcaaattctagctataccacttctccaaccttgtgaccataagcaaatcatttcacctttccaataaatttctttatctgtgaaagaggactgatggtaatatatcatagagtttgataagaattaaacaagacaaaatatatgaaagtattgaggttattagaggttatacaagtgtttgtcatatatgtgttatatagaatacatatgttataaccatttatatatataatraaaattagaatatatacacatttaatacatgatcagtgtatgttagaatgtttttcaattcctgcttaataatacatgtaatcacatatatttccaaaaccagctaccacttcattattactcttatttctgcctgacagtttttcagctgctttttcccctttataatattttgtgggctttctgttaatgcagtaggatttgtaaccaaatgctcacagattctcattcctttttcaacaggtgggtgcactcagtcctgggattccaggagtgtttttagtagtcagtgagtctcactaaaacctgagggtcttcttccaggctgggcacccagctgcctttttctgtttttggaaggaccacagaaaat

SEQ ID NO: 613881 - DNA, 579 bp, Homo sapiens
aagcaaatcatttcacctttccaataaatttctttatctgtgaaagaggactgatggtaatatatcatagagtttgataagaattaaacaagacaaaatatatgaaagtattgaggttattagaggttatacaagtgtttgtcatatatgtgttatatagaatacatatgttataaccatttatatatataatgaaaattagaatatatacacatttaatacatgatcagtgtatgttagaatgtttttcaattcctgcttaataatacatgtaatcacatatatttccaaaaccagctaccacttcattattactcttatttctgcctgacagtttttcagctgctttttcccctttataatattttgtgggctttctgttaatgcartaggatttgtaaccaaatgctcacagattctcattcctttttcaacaggtgggtgcactcagtcctgggattccaggagtgtttttagtagtcagtgagtctcactaaaacctgagggtcttcttccaggctgggcacccagctgcctttttctgtttttggaaggaccacagaaaatctcctgtcaaaa

SEQ ID NO: 613882 - DNA, 397 bp, Homo sapiens
atcttttccctggagtgatgccttgactttcatagatagcaatacactgttacctagcaataaagcagaacccatctgttttcatatttaccaasaagagattgtaagtaaagtcaatgaggtaaagggccctgttttaattttactagactctgtttaattagagtttcttctgttccaagctatggcttttcacaatggtcaggttaacttcatatttagaagagtgagattctgagccactgatgagcccaaatttcaagtttctctttttctgtgtggtagacaaacattgtttccttactggtattttatctgtcactccaaatggctgaatactcaaagaactttaaggtacattctacatgattttttatgtgttttgtgttttaggtat

SEQ ID NO: 613883 - DNA, 610 bp, Homo sapiens
ttgctttgaaggtattttttaaacgagattaacatttaaataagtaaactttaagtaaagtaaattaccctccataatgtgggtggggctcatccaatcagtttcttaagtaaaaacacactgaggaaacagaagagaggattctgccagcagattgcctttggacttgagctgcaacatcaacttccatgggtctctgacttgctggtctaccctgcagacgtcagacttgccagcctctgtaatcatgtgataacttctccggagaaccctgactaagacagctgggaactggaataatctggagtccttaatccatcacatgtctggtggttaacactggaaagacttaaacaattgsgattaggaatacctggggcttcttgggcatctccatctcatagtcttccaggatggcagcttcaggtgaacttttttcatgtcagatcaggattccaaaagcatttgtccctagaaagagaaaacagagcagaatctgaattttttatgacttaacttctgaggtcacattgtaccatttatgatgtcttctattggttgaggccattacaaatgcccacccagactcaagaagagggaactcagaccc

SEQ ID NO: 613884 - DNA, 583 bp, Homo sapiens
ccaacatggtgaaaccccttctctactaaaaatacaaaaattagccaagcgcagtggcatgcgcctgtaatcccagctactcatgaagctaaggcagaagaatcacttgaacctcgggaggtggaggttgcagtgagccgagatcacaccaccatggtccagtctgggtgacagagcaatactccgtctccaaaaaaawaaaaataaaaataataataatagtgaagttaggagaaggaaagaacaatgataaaatcaagtgtagtgttataaaagctaaggacgacactgggtagcaaggaagagaccaactccattctttggaaataactgttgaagataatggtgttactttgggaaagttagactttaattctggtatgtatgtcaatacgaatatcactgaaaaaatgtaaacatatacatttgtcaatcaccatgaagcaaatacaaaaatataatgggatgaggagatttgtgaaagactgagtacaaaaaataatagtagaaaaataagatgcattgggtgatttttttgtgctgatgctgttaccatatcattaaggtacaggtagcaaggtat

SEQ ID NO: 613885 - DNA, 522 bp, Homo sapiens
ggtgaaaaggcaagcttacacagtgttggtgggagtgtaaatcaatcattgcgtaaagcagtgcggtgattcctcaaagacctaaagacaggaataccactggaaccagaaaacacattactgggtatatatccaaagtaatataattcattctactataaagacacatgcacacatatgttcattgcaacactatttataatagcaaagacatagaatcaacccaaatgcccattaatggcagattgggtaaagaaaacayggtgcatatataccatggaatactatgcagccataaaaaagaatgagatcatcttctttgcaggaacagggatggagcttgaggccattatccttagcaaactaacacaggaacagaaaaccaaataccacatgtgttcacttacaaatgggagctaaatggtaagaacacatagacacgtagaagggaacaacacacactggggcttattggagggtgcagggtgttaggagggagaagactagaaaaaataactattg

SEQ ID NO: 613886 - DNA, 586 bp, Homo sapiens
ggagctgttggtccaattaaacctctttttcttcccagtcttgggtaagtcttcattaacagcatgaaaatggactaatacagtgctggtggttgtacagcttcgtaaatataccaatgtgaaattactatataatatagttgtgaaaaatcaatgaaccacacactttaaatgaattgtagggtatgtgaattacatctcaaagctactttaaaaaaaataaaactaaamactctcagataaaaaccacattgttaatgctgtttctttttgtgtagtgtagttgctgatcatttttgtattattctttaatgccctatgtttcactggaatgtggttttctattgaacatgtattatcttaacaattaaaaaaaaaacctttttcctgaaaccacaaaaggatatatgaaactatagtgctctttacaaaagactaagattgtgacctaatgtctaagaacacagtgaagtttttcatatatgataaaaaaagataaattaatacttactttattgcttgtgctcctggtctttgcacaattaaggtgctaaattcttctattacaatatctaccagctcaggt

SEQ ID NO: 613887 - DNA, 557 bp, Homo sapiens
cacagtggctcatgcctgtaaycccaacactctgggaggctgaggcaggcgaatcacttgaactcaggagttccagaccagcctgggcaacactgcaaaacctctacaaaacatatacaaattagctaggcatggtggcacatgcctgtagtccgagctacttaagaggctgagatgagaggacagcttaagtctgaggggtcatggtgccactgcactccaacctgagtgacaaagcaagactctgtctcaaaaaaaatctatacaaagatatataatcgtaaatccttcatattatgtgtacagcctgtatgttatcattaagatacaggcatacctcagagatactgcagattcagttccagatcaccacagtatggcaagtgtcagacaaatgttttggttttccagtgcatataaaagttatgttcctactacattatagtctattaagggtgcaatggcattgtcttaagaaaacaacataaataccttaattttaaaatacttcattgctaaaaaatgctaacaatcatctgagccatcaacgagttgta

SEQ ID NO: 613888 - DNA, 497 bp, Homo sapiens
tggcaaaaccccatctctactaaaaatacaaaaataaccaggagtggtggcacatgcctataatcctagctacttgggaggctgaggcaggagaatcgtttgaacctcggaggcgggggttgtggtgagctgagattgcgccattgcactccagcctsggcaacaaaagtgaaactctgtctcaaaaaaaaaaaaaaaattaaatatcgtgttatttgcatctcagatttgtgaatcaaatttatttttacacagattactccatgtaatatctgcaaatgttttaactatttattgtaggtaagtagttatcatcttttttagaagggaaactgaggcacagtgaaatacacaccccccacacacactgagtacactaactcagaggtaggtatgatagacagaagacctgtttgtatttcaaggaattatttgagtgcgagtaacaaaaaaaaaatctaactggtttaaaccaaaaggaaataattgactgatgt

SEQ ID NO: 613889 - DNA, 497 bp, Homo sapiens
tggcaaaaccccatctctactaaaaatacaaaaataaccaggagtggtggcacatgcctataatcctagctacttgggaggctgaggcaggagaatcgtttgaacctcggaggcgggggttgtggtgagctgagattgcgccattgcactccagcctgggcaacaaaagtgaaactctgtctcaaaaaaaaaaaaaaaattaaatatcgtgttatttgcatctcagatttgtgaatcaaatttatttttacacagattactccatgtartatctgcaaatgttttaactatttattgtaggtaagtagttatcatcttttttagaagggaaactgaggcacagtgaaatacacaccccccacacacactgagtacactaactcagaggtaggtatgatagacagaagacctgtttgtatttcaaggaattatttgagtgcgagtaacaaaaaaaaaatctaactggtttaaaccaaaaggaaataattgactgatgt

SEQ ID NO: 613890 - DNA, 547 bp, Homo sapiens
aaaaatgcaattgcatcctgaataaggcatcagaggctcttaatagcagaattgatcaagtgcaagaaagaaytagtaagcttaaagacagggcatttgaaaatacacagaggagacaaaagaaaaaaggataaataaggatgaagcttgcctacaagatctagaaaatagcatcaaaggggcaaatataatagttattggccataaagaagagacagagaaagagatatggatagaaagtttattcaaagggataataacagaaattcccaaacctagaaaaagatatcaacattcaagtacaggaaggttatagaacaacaagcagatttaacccaaagaagactacctcaaggcatttaataatcatattcccaaaggtcatggataaaaaatgattttaaaagtggaaagagaaaagaaacaatatacattggcgctccaatacatctgggatcagacttttcagtggaaaccttacaggccagaagagagtggaatgacatatttaaagtgctaagggaaagtacttttaccctagaagagt

SEQ ID NO: 613891 - DNA, 547 bp, Homo sapiens
aaaaatgcaattgcatcctgaataaggcatcagaggctcttaatagcagaattgatcaagtgcaagaaagaactagtaagcttaaagacagggcatttgaaaatacacagaggagacaaaagaaaaaaggataaataaggatgaagcttgcctacaagatctagaaaatagcatcaaaggggcaaatataatagttattggccataaagaagagacagagaaagagatatggatagaaagtttattcaaagggataataacagaaattcccaaacctagaaaaagatatcaacattcaagtacaggaaggttatagaacaacaagcagatttaacccaaagaagactacctcaaggcatttaataatcatattcccaaaggtcatggataaaaaatgattttaaaagtggaaagagaaaagaaacaatatacattggcgcyccaatacatctgggatcagacttttcagtggaaaccttacaggccagaagagagtggaatgacatatttaaagtgctaagggaaagtacttttaccctagaagagt

SEQ ID NO: 613892 - DNA, 547 bp, Homo sapiens
aaaaatgcaattgcatcctgaataaggcatcagaggctcttaatagcagaattgatcaagtgcaagaaagaactagtaagcttaaagacagggcatttgaaaatacacagaggagacaaaagaaaaaaggataaataaggatgaagcttgcctacaagatctagaaaatagcatcaaaggggcaaatataatagttattggccataaagaagagacagagaaagagatatggatagaaagtttattcaaagggataataacagaaattcccaaacctagaaaaagatatcaacattcaagtacaggaaggttatagaacaacaagcagatttaacccaaagaagactacctcaaggcatttaataatcatattcccaaaggtcatggataaaaaatgattttaaaagtggaaagagaaaagaaacaatatacattggcgctccaatacatctgggatcagacttttcagtggaaaccttacaggccagaagagagtggaatgacatatttaaagtgytaagggaaagtacttttaccctagaagagt

SEQ ID NO: 613893 - DNA, 621 bp, Homo sapiens
aacaacatttttaccaatagagggtataagagaatgcgtcaccagctttagaagctagagttactaggagactctgaatgttgacaagaagcccttgcatttcattaggaagaggttggcagaaatctcaataccatttcagtgacaacytgacccaatcaactattcctctctgcctgcctagctcttccatcattcctagtggaatttatgcagcatcaccagcagtattccctataacctaaatcttttccctgaatttaacttcaccttcttgttctaactaaatagtagtttattttctcctatattatcttttgacatggactttttctttggcaggggaaagagtggtagaagagcaacaatatttatttttttctccacagtgtatttggtgataaagatcttaaacggtatctttctttcccagagattaggatgcagttttgtacttcataattagaaatattagaaaatttccagctgagttgacttcaatgcaacacatagctttctctttatttttgccatatttataatattagttaatttttgaaaagaacgatttcaatagctaatttggtttatcatacacaatatcttaatgtgctaattaac

SEQ ID NO: 613894 - DNA, 622 bp, Homo sapiens
aatgttcaaaacactacactacatcctatgctgtatatagattgaaaatagaaggtatcacaattaatatagattctaygatattcccaggccttaattattatagatcctgctataaaacattttatagtatagggggaaggagacataaacaaagaaatcatatgcattgagaggtaaataaattttgaaatttttctttttaaaaaagaatctcaagttttattttagaatcagggaacacatgtacaagtttgttacatgggtatattgtgtgatgctgaggtttgaagtatgattcatcccattgcccgagtggtcagcataagacccaacagttagttttcaacccttgcccctcttcctcccttctccttctagtagtccctagcatctattgttcccatctttatgtccatgagtacccaatgtttagctcccatttataagtgagaatatgcaatatttgattttccgttcttgccttaattagtttaggataatgtcttacagctgcaaccatgttgctgcaaaggacatgatgtcattcttttttatggctgcatagtattccatggtgcatatgtgccacattttcttatccagtccactgttgatgaac

SEQ ID NO: 613895 - DNA, 622 bp, Homo sapiens
aatgttcaaaacactacactacatcctatgctgtatatagattgaaaatagaaggtatcacaattaatatagattctatgatattcccaggccttaattattatagatcctgctataaaacattttatagtatagggggaaggagacataaacaaagaaatcatatgcattgagaggtaaataaattttgaaatttttctttttaaaaaagaatctcaagttttattttagaatcagggaacacatgtacaagtttgttacatgggtatattgtgtgatgctgaggtttgaagtatgattcatcccattgcccgagtggtcagcataagacccaacagttagttttcaacccttgcccctcttcctcccttctccttctagtagtccctagcatctattgttcccatctttatgtccrtgagtacccaatgtttagctcccatttataagtgagaatatgcaatatttgattttccgttcttgccttaattagtttaggataatgtcttacagctgcaaccatgttgctgcaaaggacatgatgtcattcttttttatggctgcatagtattccatggtgcatatgtgccacattttcttatccagtccactgttgatgaac

SEQ ID NO: 613896 - DNA, 622 bp, Homo sapiens
aatgttcaaaacactacactacatcctatgctgtatatagattgaaaatagaaggtatcacaattaatatagattctatgatattcccaggccttaattattatagatcctgctataaaacattttatagtatagggggaaggagacataaacaaagaaatcatatgcattgagaggtaaataaattttgaaatttttctttttaaaaaagaatctcaagttttattttagaatcagggaacacatgtacaagtttgttacatgggtatattgtgtgatgctgaggtttgaagtatgattcatcccattgcccgagtggtcagcataagacccaacagttagttttcaacccttgcccctcttcctcccttctccttctagtagtccctagcatctattgttcccatctttatgtccatgagtacccaatgtttagctyccatttataagtgagaatatgcaatatttgattttccgttcttgccttaattagtttaggataatgtcttacagctgcaaccatgttgctgcaaaggacatgatgtcattcttttttatggctgcatagtattccatggtgcatatgtgccacattttcttatccagtccactgttgatgaac

SEQ ID NO: 613897 - DNA, 622 bp, Homo sapiens
aatgttcaaaacactacactacatcctatgctgtatatagattgaaaatagaaggtatcacaattaatatagattctatgatattcccaggccttaattattatagatcctgctataaaacattttatagtatagggggaaggagacataaacaaagaaatcatatgcattgagaggtaaataaattttgaaatttttctttttaaaaaagaatctcaagttttattttagaatcagggaacacatgtacaagtttgttacatgggtatattgtgtgatgctgaggtttgaagtatgattcatcccattgcccgagtggtcagcataagacccaacagttagttttcaacccttgcccctcttcctcccttctccttctagtagtccctagcatctattgttcccatctttatgtccatgagtacccaatgtttagctcccatttataagtgagaatakgcaatatttgattttccgttcttgccttaattagtttaggataatgtcttacagctgcaaccatgttgctgcaaaggacatgatgtcattcttttttatggctgcatagtattccatggtgcatatgtgccacattttcttatccagtccactgttgatgaac

SEQ ID NO: 613898 - DNA, 396 bp, Homo sapiens
ggcaccatcacccccctcccccgtygcccctccctcatggggagccccttccccctggaaagacagcaggtactgtagcctcgcctgctggccaggggcgccggctcagaggacctgccctgacctgcacgtgctgaccagacagcccagcgtaaggacccgtgatcccacgccaccgccctgggtttaccacggtcaccgccacctctctcacagggcccccgggggacccagccgcgcccggcctggtgtctgcaccgagggaccgcgtctcacgcccggcggctcctgcaggggaagccgtggtcagcgactcaccacgaggacagggcagggcggctgagtgcggaagagaagcatgaagctgggggcgggggtgggggaggaggaacaaaa

SEQ ID NO: 613899 - DNA, 396 bp, Homo sapiens
ggcaccatcacccccctcccccgtcgcccctccctcatggggagccccttccycctggaaagacagcaggtactgtagcctcgcctgctggccaggggcgccggctcagaggacctgccctgacctgcacgtgctgaccagacagcccagcgtaaggacccgtgatcccacgccaccgccctgggtttaccacggtcaccgccacctctctcacagggcccccgggggacccagccgcgcccggcctggtgtctgcaccgagggaccgcgtctcacgcccggcggctcctgcaggggaagccgtggtcagcgactcaccacgaggacagggcagggcggctgagtgcggaagagaagcatgaagctgggggcgggggtgggggaggaggaacaaaa

SEQ ID NO: 613900 - DNA, 602 bp, Homo sapiens
gctcatgcctgtaatcctaacactttgggaggctgaggcaggagggtcgcttgagcccaggagtttgagaccagcctgggcaacatggtcagatcccatttctacaaaaaatacaaaaattagctgggcatggtggcatgtgcctgtggtcccagctacttgggaggctggggtgggaggatcacttgagtctgggaggttgagtctgtagtgagccatgatcaagccactgcactccagcctgggcgacagagcaagaccctgtctcaaaaataaaaaaataataataaaaataagggccrggctcagtggctcatgcctgtaatcccagcactttgggaggccaagatagaaggatcacaatgtcaggagttcaagaccagcctggccaagagaccagcctggtcaatatggtgaaaccccatctctactaaaaatacaagaattagccaggtgtggtggcgggtgcctgtaatcccagctactcgggaggctgaggcaggagaattgcttgaatccaggaagcagaggttgcagtgagctgagattgcaccattgcactccagcctgggtgacagagaaagactctgactcaaaataaa

SEQ ID NO: 613901 - DNA, 468 bp, Homo sapiens
aaaagtaatatctcctttataggcttaatgtatgtcataattggctaattttttccatatgawtatgatgcctgagagacaagcctatggtatgctgatgagccatggttaatacaattttatctcactaaatgtcgtcaggatttaagggaagaccttcacacagatttttctgtatctacgtgatgatcattttcctgcttttcctttctgtcccatcttcactcctccacagtcatgttacactagtatagtcatgtgagtgtgcccatgagtgactccaagttgagttctaaaaagcagatttcacttagccagctgcccttgtcagtttcagccttgggagtcaccttttggtatcttttcccactgcttcttcctcctttctcaaccatcatttctcctctccactggattctactcacagggtttgtaatctcccagatcattcagcatctgaatgaattc

SEQ ID NO: 613902 - DNA, 512 bp, Homo sapiens
ggtagccaaaatgaagaaaggggrcaaaagccaatgtccaactgacgtctcatagaaaattagtgtgtctggtgggaaggacttagaggagaacctgaatcccctcaacatccactctctcggaggaactttagagcagtggatctaagggcctaagaaggtaggagggctgggggcccagggcataagcttcaaaccagagcagcagcagtggaagcaggaggcacatcttcccagtgcagcaaggctcagccccgagacagcaacagcaatgtccagaagaggctgggcaggacacagggcatttccttccctgaaaaagctggcaggagcgtgaggaaaaagcccggcggcagcaagtctgactcccagcacagtcatttcctcaaacgaagacggttgtgccatatgtcccaccaggcctgaccaaggcttaacagcctacacatttctctcaggctgtgccatcgctgagcaaggaaccagcctccagctccagttaggagggagat

SEQ ID NO: 613903 - DNA, 542 bp, Homo sapiens
ccagcctgggtgacaagagtgagaccccrtctcaacaacaacaacaacaaaagtatgttattattatttatattttgcaatcattacctaccatctgaaattggcctttttgtggttccactgggctgcttctttgactgtcctttaggcttcttcccttctttatctgaagggtaacctgctggatactgatggggggggaggagggagagtacaatgcagatttaagcttcacagagaaggggggtttagatcctggtgagaaattaaaagggaggggaagactacacgttccccaaactgaaaaactttacataaaagaaacagacatttaaaggaaaagaattcaaagcacagacaactattaaaatcccaatttatgtagctgtgactgctaagagattccattttataatacactgatcttaagtttcagatctaagaaaggtaagtcttcaggagttgtgattagatttccttaaagtttaaggaaagtagaatacagaaatgaaggtaaatgagaaccaatcatagagcacaac

SEQ ID NO: 613904 - DNA, 627 bp, Homo sapiens
catgctcaaatcagctcttggaaatggatggtatagctgggaatctcaggaactggagaagacatcattgccaggaacgacatcrtgatgaagatctcttaccctctgcaagattgggatagggtgtggagtctcactgtccatcatatgaatgagaaaaattaggacaaagaaagaacaccaggtatgtagggaaaaacagcggagaaatgtctaagacactggttctcaaccttggctgcagttggaatcatgtagggaactttaaagaaatactcacgcctgggtcccttccctcaccccagtcattctccattgagattatgattcaatctgggattgtgatgtgggcatcagggatgttataaagtcaccatgggatctaattcctagccaaggctgtaaaccactgctttaagaagacaaatttcctgattcttaggtcagtcttctgggatcctggctgggatcacaatttactgcaagagctaataaccagaattaaaatagtcttgaaaaatcactctccaatatgacagtgaaaatgtgattatattccgtcactagagggcgaaatttcttaattttcaacatttaataactatcatagactcaaggttcagaatt

SEQ ID NO: 613905 - DNA, 627 bp, Homo sapiens
catgctcaaatcagctcttggaaatggatggtatagctgggaatctcaggaactggagaagacatcattgccaggaacgacatcatgatgaagatctcttaccctctgcaagattgggatagggtgtggagtctcactgtccatcatatgaatgagaaaaattaggacaaagaaagaacaccaggtatgtagggaaaaacagcggagaaatgtctaagacactggttctcaaccttggctgcagttggaatcatgtagggaactttaaagaaatactcacgcctgggtcccttccctcaccccagtcattctccattgagattatgattcaatctgggattgtgatgtgggcatcaggratgttataaagtcaccatgggatctaattcctagccaaggctgtaaaccactgctttaagaagacaaatttcctgattcttaggtcagtcttctgggatcctggctgggatcacaatttactgcaagagctaataaccagaattaaaatagtcttgaaaaatcactctccaatatgacagtgaaaatgtgattatattccgtcactagagggcgaaatttcttaattttcaacatttaataactatcatagactcaaggttcagaatt

SEQ ID NO: 613906 - DNA, 592 bp, Homo sapiens
agttgtagatatttaaggagtatatgtgatattttgatacaggcatacagtgtgtaaatgatcaaatctgggaaactgggatattcatcacctcaaacattctatcattttttgtgtgtgttgggaacattctaaatctattcttttagcgattttgaaacatacagtaaatgttaactgtagtcccccatcgtgcttctgaatactagattttattccttctgtctaactgtatctttgcaccctatagccaacccttctttatcccctgtcccacttcccttcccagactctgataaccatcatcattctattctccacctgcacaagatcaattttttttggctcccacatatggaagagaacatgtcacatttgtccttctgtacttggcttctttcacttaacataatgttctccagtttcatccatgttgtaaatgaaaggattctattattttttatggcagaataatattttattgtatatgtatataccatattgtctttttatctgttgatgcgtttctygctgtttcttctgttatagattctgtccaaagaaaaagcctgtttctgtaattttgttagcc

SEQ ID NO: 613907 - DNA, 580 bp, Homo sapiens
cagggcgacagattcccacctaccacaaaggcaagggccaaaagcaaaagtcaagagcttggaagcaccctccagtgtgaaggccatggctggccggtgctgccttctcccctcagaggaaaagcaggcagagccacatccatggtgttcacagaaatgtcctctatactggcccagttccgtagtcacaaactggcatccgataggcagagtgcttgtggttgctatggaaatagcaactgaccatttagtccaatttagatttaaaaatatggatttgaatacacagtctcttcctaattatccacacaccacaragggagagaagtgtctctaacacaagaaagggcagaacctccatgttgttgaaataggcaactcttccctgagcagcgctaccttcccctgcgtggtcggctttagtatgatgcacgttaccgaacggccccgttgggcacagtgatggaaggggctgcgggggcaccagggaggaggctgaactgagagagggaaggcaaggctcgcagtcttcccgagatgacccagataccaggcatgccatcccactagccttcccacc

SEQ ID NO: 613908 - DNA, 416 bp, Homo sapiens
tatatgttcagttatattttttgctatacggtaggttttatctgtgaggaatatattccactttctctgtaggttgtaaacagaagtagttctcaataaataatattgaagtgagggtctaaagggaaaaaatatcaatttatttttaatgagaatatctaaggtcaaacagttttcacaagtgagaggttaattaagagttgtgaatatgaaagagggtgagaaagatgaagttcttcattcctcaatttgtgctttgtattgttactccagtttttctataaaacaaatgaattttaaaagtgccacattcaggctagatgtagtggctcatgcctataatcccartgctttgggaggttgaggcaggaggattgtttgagaccagcctgggcaacacagcgagactccatttc

SEQ ID NO: 613909 - DNA, 613 bp, Homo sapiens
tttcatttatattcattgctactgtgccctgtctaacagaaataaccyggcactgatggggacagagtgaagatcttggaacgaggtgacccagtggtttaaatttcattatggtgttgaacatccaggcaacacacacaactcagtagaaatgcaaacagataatgcacccaggacctcacttcagtcacacccagagcagcaggaaggacagaaagttccagaaagagccatgtgcctggctgaggcattttcactgcaggaacaatgtgatgtgactgagcacaaggctgcctttgggcttttacaccacagttcacctggtcacatcccactgcaggtccatcttgggcactgactgatccatccatccacccaccaagggtttgccagactggagattccagaagcggctgaagctgtggtcctgccacagggtgtcggggctggcagggcaacagtcatcacattagtggatgtgaagttggctcagcacccagggtgggaagggcctgggagaaggtcctcccagggaaagcaatgtccaccctggccttggattcaggaagagcaagctcccagagaaacctgagggtcctgggcatggtggact

SEQ ID NO: 613910 - DNA, 578 bp, Homo sapiens
aataactctttcaaccaattgccaatgagaacatttttaaatctacttgtaacttagaagcccccatgcttcaagttgtcctgcctttctggaccgaaccaacaaacatcttaaatgtatttgattgatgtctcacgtctccttaaaatgtataaaaccaagctgtacccagaccatcttggacacatattctcaggatctcctgagggctgtgtcaagggccatggtcactcatatttggctcaaaataaatctccagatattttacagagttttactcttttcatcaacagaatgaacactttttgcccttgatttttctgtatctttgtgaaaaaaattgactttgsaaatgctatcactaaccccaagtgaatcagaacacactgaggggaaacagtttttaaaatatggctgttatggatggaatgtttgtgtcccccacagattcatatattggagcctcaactctccatgtgatggtatttggagatgggacctgtgggaggtgattggggttagatgtggccacaacggtggggtcctcatgacaagattattgtccttataagagacat

SEQ ID NO: 613911 - DNA, 610 bp, Homo sapiens
cagcctacaagctcactctaggatcctcatcaccctcatgagggcaccgcctttggggtcattttctccagtcgtaggtcacctttgtgaatggcccacagcatcaggcggccgacttggctggtagctatattacgtatagacaattgatattaaaagcataattttcaaatcccatagcccttcgaggtgctattcacctgtcagctgatctgatttcagcttatttctagatatcaacatttacatttatttgaatatatttattattttttttaaatagtaggatctgtgggcttattcattctacgatattttgcaaggtaaccatgttgtcagtgttgtaaacaaatgccaagtatttcctagttggctccacagagtgcaaatctcctcacgtgactctggacttaatcattcctcacggctcacattgactattgtaggcataattaatataattaatttcactcacataatgtctctatattttttcttcttggacsagcaacttcacaattattgaataatttaaggcataaaattatgtacatatttaattatttaattaaaagacgacaaagatgtgcaactttaaaaagaattgtag

SEQ ID NO: 613912 - DNA, 594 bp, Homo sapiens
gagtaatacagaaggaagttaggaagagaaatataaatagtcatttctttattcactctgtgaatactcttatcctgtcaatatctccaaacaacctaattaattgtaattaatttgtagagaggctatatctcccaaagacgtattttcagttggaattaatcactgccttaaagtaataatattaacttcatggtcataataccataagagatagctttaaaatgtattatcttttaaaaattactgaggataaagactaaaaagagtaaatataaatatagccagtcattaacaactttcaaaactttcaacataaaaaatccttcatttttatgattccagagaacacagtttaaatgtggataatgtttcttaaaaaaacggtcagtagaataatgtattacttttaaatgggaaaccaaaatcatatacctgcccaagtagcactgccaaagtggcttgttttgagaagccaattctgaatcctttgccccaaacatttttgccagtagtttaacaacttgtaggcgctcctcattatcattgctytaaaataaaacacaatcacagctttaaaaccatgcagtagat

SEQ ID NO: 613913 - DNA, 588 bp, Homo sapiens
atacaaatatgggtaaaacaatccaagtccttcctaagaggtgaaaatttagtggaggtagatttagatttgattaaaatatttccttccaaaaattctttcatttacaaaagcgtagctaattacatactacaaattaatttttttgtacagcaaatgtctcctaatgaaagatgtcaccagtcagtaataaattctaccttacatttacatggctaattttaattacaaaatatttcacattaaataacacattctccaccaccacccaagcattgcaggtgcaaaaacagaggctcagtggaattaagcaatttaaccaaattttacctattccaacaaggattggatgtacttttttcagtccaacaaaataattttttgccatatcctaaaatttgtgataaaaaaagaactggtgaaaaataacatcattaagaagtgatgcgtgtaggaaatttttagaattatcaccatgtactttttgttcttgatattccatcttaccttttaaacaaatatataygtactgtttagcttcctggattgttgtgttacaacaaattctatttaaaaaaaaataaccta

SEQ ID NO: 613914 - DNA, 621 bp, Homo sapiens
tacctaataactacatacgtaacagcttctttgaaaaaatattaatttgcttttttgctttaggtgatgttaagtaaaatggtatttcatttaacagtaaatgcaaaaggattatgtggaacatctcctttgttcagtggaaaagtagggaaaagttgctgtttttgcaggtcatttgcttttcctcccacctcagaggtcactgtgtatagcaaatggatagagggataatcagaaacacctggaggaatacttctgctgaacttccacttggtgataatgaagagatcttaagatggatctgagatgctaaatattccaagatgtgtatgaaagtaatgttaagacactgaagataacagtaaacctaactcactggtttttggattaagtaatgggaatattagaatgagtagaactttaagaccaaaatgttcttctgtcytgggaaaactactttccagtcccctgggtaacttgctaaagcaagttgttttgtgctagtccttttacaaaaaaattaatttgatgtttagaggtgagatcttgctcttttgcccagggctggagtgcagtggcacaatcataactcaaagctatcttgacctcctgggctcaagc

SEQ ID NO: 613915 - DNA, 598 bp, Homo sapiens
ttgccaaggtgttttaattgtctatggctagtagtggaatggaaaggagacaacgtayttgaaggaaattttaaaacaacaacctaaaaaattgccagcttactgggtatggggaataaaggcaaggaagaaccagaaatattaggattcaagtccaaatgatgtggagaatagtagtaccttgaaaagaatgaaaggaactgtttttgaaggaggtgagagaggttgtgcttcctacttgtacatgacaaacaattaaaaaaaaatcaaggcctatcaagtttaatgtgaaactatgagaatggattaatctgctcagattgtatagaaagaagtaaaaagatcatagacagaactttggaaattttttttacagtagagaaattgtagaaatgtaagaagactaggttattgtaatgttttgagttaagatggaggaggttttcagaagtaaagtatattgtggacaaagagactgaaaaccaggaatagatcttggctttaggaatcagaaggtcatagtgatctagaaggtatgtcaaaacataaacaataagaacaagtagcagttagtgctttataatgtgcctggtgttat

SEQ ID NO: 613916 - DNA, 485 bp, Homo sapiens
acagacattaataagtaaggatataaaatacacagtatttggaaacatttttttcaaccaacaatgtgtgtagaacctcatttgtcaaatattgctaagcactattctttttaacagtcacatagctctcagtgtatgtatagtgtatggctataccaaaactaatctcatactgataagcattttagatttaaaaatttttaaaaacaccttaacaacaataccatgaatatccctgtgctggctgtttacatactctctctgagctttaaacctatcctttcataatctgctcagagatcctgaagctgtaaatctgcaaagagctggtttcctattaatttcttccactrcaagacactagagcttcttaaggcgttctgagcagtagtttcactgctccccagcaacagccaggccatgccatactttggcagtctgttgggtgatactgacagggctcctccacctcttaacattacttc

SEQ ID NO: 613917 - DNA, 553 bp, Homo sapiens
accaaaccagcacataccaatattaaccgtgaatgtaaacacattaaatgcctcaattaaaaggtgcagtgtggtcagttggttaaagaagcaaggcccaactgtatgctgtctacaagagactcgtttcatatgcaacgmcactgatagggtcaaagtaaagggatggagaaaaatctaccaagcaaacagaaaacagaagaaagcaggggttgctattctaatttcagacaaaacaggctttaaaccaacaatgacaaagaagagcattacatactgataaagggttcaattcaacaagaaaacctaactatcctaaaaatatatgcatccaacaaaggaacacacagattcataaagcaagttcttagagacttatgaagagacatagataatgacacaataatagtgggaggctttaacactccactgacagaattagattattggggcagacaactaacaaagatattcagacctaaactcagcatttgaccaaatgggcctaacagacatctacagaactctccattcaaaacaacagaatatacat

SEQ ID NO: 613918 - DNA, 594 bp, Homo sapiens
agaaactactaacaatggctctgcctctgggaaaggaaactaagtggctggggatacatgggtgggggaacttttcaccgtatattcttttttgcatccttctgatgttgaaacaagtgaatttattttctattagacattttaatgccacattttaatgaaaaactggtgctctattctcccacactgaacaccaagaattgtaggcttgaaaggccaatacaaaactgttctttcccaacaaattagggcaatatgaggcttcatttaatcaaaaatayatttaaatgagtttactttttgctattcttgaagacttccctcagtacttccattgcacatcttgccagcctattgttcatattataaacaaaaatatcatagtgtagttttttcaattagattataagtttggtaattttccataacaaaatcatttctaaaaagcaaaattaatggccaggccctagattagtggaacctcaaaaatgccagatatttctaagaaaccttttctcaggaagccagccaaccaaatgctacataggaggaggactacagaggttcttgtaaagataaaacagcagatacaat

SEQ ID NO: 613919 - DNA, 565 bp, Homo sapiens
ttaaggacaattctaaacttattttagacatttggatttgaacaggtcttgactttgactagattataagactaatgttcttcaatattttaagaacttaggtgagtcatggtaaactaatttaaccaaggcagaaggacagcttgagttcaggagttctaagcaagcttgggcaacatagcgagaccttgtctctattttaaaaaaaaaaaaaaaaatctagcttcaragaacaacttccatgaccttaaactaaaacaagacttcacctaccacccccgaaaaaaggggttttttttccccctatgaaacttatttttttccactgaagagcacgtaagaatatttgctgttacatatatatagtacctgttaagtcttttgctaaatcaggatggttcatgagacaatggctagcaaatttcacacattccaggcggattggtacatggatatcattaaacctgataaaatataaaagcacagagtgagcttcaaaataagagaaacagacatgtgttaaatctgtacccaatttacatttatctaattaaagaaaaaacag

SEQ ID NO: 613920 - DNA, 604 bp, Homo sapiens
tatatgatatagttcagattaatttttgtgtatggtgtgaggtcaaggtcatggtgaataatatttatctgaaaatggttatccacgggagctaagctatgaggaggtaaagacataagaatgacacaatagactttggggactcagggggaatggttgggaagtgggtgagggatgaaagactacatatcacgttcagtgtatactgctcgtgtaatgggtgcacaaaatctcacaaaccaccactaaagaacttactcatgtaaccaaataccatctgttccccaaaaacctatggaaataaataagttatggaacaaatttctaaccattaaagtgatctgaaaatggaatggaaaaaaaaatggatatccagttgctcagcaccattagttgacaagacttttttttttttttttttttttttttgkgatagagtcttcctctgtcacccaaactggaatgcagtggcatgatctcagctcactgcaacctctgtctcctgggttcaagtgattcatatgccttagcctcccgagtagctgggattacaggtgtgcaccaccatgcttggctgttttttgtgtttttagtagagacaggg

SEQ ID NO: 613921 - DNA, 604 bp, Homo sapiens
  misc_feature 562, 598: n = A,T,C or G
ctgcctccaaaaaaagaagtaaagactaaaaggcagaaatgaaatccacaggcagacagcctggtgctgcgtggtgggcctggttaaagatcgacccctggcctaaccggttatgttacctatagattccagacattgtatagaaaagcactgtgaaaatccctgtcctgttctgttccgttctgattaccagagcatgcatcccccagtcacataccccctgcttgctcaattgatcaggatcctctcacgcggacccccttagagttgtaagcccttaaaacggacagcaattgctcacttggggagcttggtttttggagttgtgagtcttgccaaagctcycagctgaaaaaagcccttccttctttaactcggtgtgtgaggggttttgtgtgcggcttgtcctgctacatcctgtcatcttaataagttttggggaaggagccagcatagatgaaggtgctcaattcaccatctttaactggaagtcactgcatttagttccataatccatctagaatctctttttgtgtgtgtatggtgtagaaagaaatagatnatatacaagggaggggaagatttttatttgttcctngcctat

SEQ ID NO: 613922 - DNA, 511 bp, Homo sapiens
tttttttgtcagcatttttgcaacattcagtatgtagattctgtacatgttcttttagaattayacctattttcattggggagggtacaattgtaaagagcattgtgtttttaattttagtttccacatgtttgttgctagtatataaaaatgtagttgatttttgtgtgttgatcttgtattgtgcaaatgtgctgaactctcttgtttaagaggtttgttgaggaaaattcttctagattctatgtatagatgatcaagtcatctgtcaatagggacagttttatttctttctttccagtctgtatgccttttaattctttttcttgccatgttgtacttgctagaacttccggtattacgttgaatatgagtagtaagtttggacatctttgccttgctcctgatcttagggaagggcatttggttcttcactattaactacgatgttagctgtaattctttgggtgaacgctttttgtcaagttcagaaatttcctttctagtatta

SEQ ID NO: 613923 - DNA, 511 bp, Homo sapiens
tttttttgtcagcatttttgcaacattcagtatgtagattctgtacatgttcttttagaattatacctattttcattggggagggtacaattgtaaagagcattgtgtttttaattttagtttccacatgtttgttgctagtatataaaaatgtagttgatttttgtgtgttgatcttgtattgtgcaaatgtgctgaactctcttgtttaagaggtttgttgaggaaaattcttctagattctatgtrtagatgatcaagtcatctgtcaatagggacagttttatttctttctttccagtctgtatgccttttaattctttttcttgccatgttgtacttgctagaacttccggtattacgttgaatatgagtagtaagtttggacatctttgccttgctcctgatcttagggaagggcatttggttcttcactattaactacgatgttagctgtaattctttgggtgaacgctttttgtcaagttcagaaatttcctttctagtatta

SEQ ID NO: 613924 - DNA, 511 bp, Homo sapiens
tttttttgtcagcatttttgcaacattcagtatgtagattctgtacatgttcttttagaattatacctattttcattggggagggtacaattgtaaagagcattgtgtttttaattttagtttccacatgtttgttgctagtatataaaaatgtagttgatttttgtgtgttgatcttgtattgtgcaaatgtgctgaactctcttgtttaagaggtttgttgaggaaaattcttctagattctatgtayagatgatcaagtcatctgtcaatagggacagttttatttctttctttccagtctgtatgccttttaattctttttcttgccatgttgtacttgctagaacttccggtattacgttgaatatgagtagtaagtttggacatctttgccttgctcctgatcttagggaagggcatttggttcttcactattaactacgatgttagctgtaattctttgggtgaacgctttttgtcaagttcagaaatttcctttctagtatta

SEQ ID NO: 613925 - DNA, 511 bp, Homo sapiens
tttttttgtcagcatttttgcaacattcagtatgtagattctgtacatgttcttttagaattatacctattttcattggggagggtacaattgtaaagagcattgtgtttttaattttagtttccacatgtttgttgctagtatataaaaatgtagttgatttttgtgtgttgatcttgtattgtgcaaatgtgctgaactctcttgtttaagaggtttgttgaggaaaattcttctagattctatgtatagatgatcaagtcatctgtcaatagggacagttttatttctttctttccagtctgtatgccttttaattctttttcttgccatgttgtacttgctagaacttccggtattaygttgaatatgagtagtaagtttggacatctttgccttgctcctgatcttagggaagggcatttggttcttcactattaactacgatgttagctgtaattctttgggtgaacgctttttgtcaagttcagaaatttcctttctagtatta

SEQ ID NO: 613926 - DNA, 527 bp, Homo sapiens
cgtttctcctacaggttccatcctgcacagaatttccccagccccagctccctccagcccctgctcctctttgcttctgtgtgtgacctattgtgggctggcacatgggccatgttcccaggcattttctacctcagcctctagtgcatatgattacggaagtctttgccctgccatggggacctgcacagataccttccttgccaactggtatcctcagctctgctgttgctcgtctctctcctgactttctcccatgccctgacagaactttctgccraataactcacatccaagaagcaaaccctagccactcttcccataatcttgtgtctccctaaacattattctgcctcctttgcaaacacctcagattcactttatttcctttctactcttccaaattgttcttatatcttctccctcccgtctctctccctccctccctcaatgactagacattgtcaggtaaaggtcaggcctggtagaccagttggagtcactgccacattgcctcaaaagctgca

SEQ ID NO: 613927 - DNA, 527 bp, Homo sapiens
cgtttctcctacaggttccatcctgcacagaatttccccagccccagctccctccagcccctgctcctctttgcttctgtgtgtgacctattgtgggctggcacatgggccatgttcccaggcattttctacctcagcctctagtgcatatgattacggaagtctttgccctgccatggggacctgcacagataccttccttgccaactggtatcctcagctctgctgttgctcgtctctctcctgactttctcccatgccctgacagaactttctgccgaataactcacatccaagaagcaaaccctagccactcttcccataatcttgtgtctscctaaacattattctgcctcctttgcaaacacctcagattcactttatttcctttctactcttccaaattgttcttatatcttctccctcccgtctctctccctccctccctcaatgactagacattgtcaggtaaaggtcaggcctggtagaccagttggagtcactgccacattgcctcaaaagctgca

SEQ ID NO: 613928 - DNA, 623 bp, Homo sapiens
atcacagttcttgaattctcaaaagacttaaatcaatgtcatattacttcctctaaagttttctcaccagctcctcccgtgatctcccatgccatgctggatctgcacactgtagggagtgccttctcacttgtgccttttccctgctccccagctgtgtacaaggtctggtcctgttgtgtgctcaggtttacgagtktcccctgcccttggcagccctgcttcgagcatattgaagttgggcattagagatgttctcttattaacaccaagattgccatttctgttcttagtctccttgtcattttcttatggtttaagagaaaagaggggtctgagaagtccttactttgccatatttaagtcctgctcacctgaggcagctctgaggctttgaaacaggccccactatcctcccactgcctctgaagcctccctgaggccactcccacaggcagtgaggcctgtatatgccacatcctcaatgtcttccctgccttcttggatggtggccacttcaggatagggagctcagctgggaatgggcacaaccttgactgccctaccaagactcctatttcttctgcaatttggctacattttgtgtcagagatgtttattgc

SEQ ID NO: 613929 - DNA, 623 bp, Homo sapiens
atcacagttcttgaattctcaaaagacttaaatcaatgtcatattacttcctctaaagttttctcaccagctcctcccgtgatctcccatgccatgctggatctgcacactgtagggagtgccttctcacttgtgccttttccctgctccccagctgtgtacaaggtctggtcctgttgtgtgctcaggtttacgagtttcccctgcccttggcagccctgcttcragcatattgaagttgggcattagagatgttctcttattaacaccaagattgccatttctgttcttagtctccttgtcattttcttatggtttaagagaaaagaggggtctgagaagtccttactttgccatatttaagtcctgctcacctgaggcagctctgaggctttgaaacaggccccactatcctcccactgcctctgaagcctccctgaggccactcccacaggcagtgaggcctgtatatgccacatcctcaatgtcttccctgccttcttggatggtggccacttcaggatagggagctcagctgggaatgggcacaaccttgactgccctaccaagactcctatttcttctgcaatttggctacattttgtgtcagagatgtttattgc

SEQ ID NO: 613930 - DNA, 623 bp, Homo sapiens
atcacagttcttgaattctcaaaagacttaaatcaatgtcatattacttcctctaaagttttctcaccagctcctcccgtgatctcccatgccatgctggatctgcacactgtagggagtgccttctcacttgtgccttttccctgctccccagctgtgtacaaggtctggtcctgttgtgtgctcaggtttacgagtttcccctgcccttggcagccctgcttcgagcatattgaagttgggcattagagatgttctcttattaacaccaagattgccatttctgttcttagtctccttgtcattttcttatggtttaagagaaaagaggggtctgagaagtccttactttgccatatttaagtcctgctcacctgaggcagctctgaggctttgaaacaggccccactatcctcccactgcctctgaagcctccctgaggccactcccacaggcagtgaggcctgtatatgscacatcctcaatgtcttccctgccttcttggatggtggccacttcaggatagggagctcagctgggaatgggcacaaccttgactgccctaccaagactcctatttcttctgcaatttggctacattttgtgtcagagatgtttattgc

SEQ ID NO: 613931 - DNA, 573 bp, Homo sapiens
gcagaggccggcggggccagcgcatccctcctaccttcctcccttctgtggacacttgggggaagtcgtaggtgactagtgagttaaaaaatgaattaccaatgagtaattagttactgatgaggttttaaggttgtaattattaattaattcatgagttattagaggagggttagctattaatgagatgctctctaactccagttcctatgtttctgtgttccagcttctaaaaagaataaacttggaattaactttcaaatgttattatgctttaaaattgtatctgtcaaacctcacagttacctcaaagtagacattttttaaaacaagtagaatattcactgttggaaacaaatgctcagtgctacaaagtgaaaccagcactcagacaaaagttttctcagcaaggcaatttacttctgcagaagggtgctgcctgcatcaatcatgatcacaggagcacactgaacaaaggaaggaaaaggtttttatccctaacacagtccctacctmtgtgtcactcccccaggggctggggttggaccgctcattctaagttgacccgattgg

SEQ ID NO: 613932 - DNA, 589 bp, Homo sapiens
cacctctttcctctctctgtcttgctcctactcctgccacatgaatcatctcattgccccttgacattctgatatgactgggtggcttcctgagtcctcccagattcagaagccactatgtttccttacagcctgcagaatcatgagattctttatgatcatagagaaaattagtactggaaagtggatgtatgaaatgtcttcaaggccttttccctgttgtcttggcaatcagcactcagcttcttttcattcaagtatctgaagccttgaattttccccctgaaaatggacttgccttcctttaccacattgccaggctgtgacaaagataggtgataaagtagaagcaggttcagaagggggtagcagacagaggttgggagagtttgaagggctttgaagacaggaaaatgaggaaaagtttggatctttgtagagaattgttaaatacttgygatcagaaggctgacaggaaaatggtcagtgaaagccagacttagaaggtctcagataaaaatgaggaacttattgggaacagaagccaaggttacctttgttttgctgtagcaaggaatgtggtggcacg

SEQ ID NO: 613933 - DNA, 395 bp, Homo sapiens
gttgatgaagaccagggctaaccttggggaaaatatctatactaatcatcacaaaaacatgaatttttaaaaggcartgattcctgttattcttatgtcttcttgacagaagcacaaccctcttgaacttttctttcctagtgcatatatgtattcttcagagctttcaagctggaaccacacgaaaagcttagcaaatggttttaaaataccattattgaacaagtactttgtggcaagaactatgctaaatattaggcatgaatctaacccttccttcaaactgcttagtgtccctcagaggataagcctgtaacatagcaaagcacacaaaagaaggaatgggtgcagcttctgcctaggctggccagagcagcttaacaaggaagtggtac

SEQ ID NO: 613934 - DNA, 543 bp, Homo sapiens
tatcaggtgattcatatgagcgttcaacactattctaattcttagtcacctgtatgctggttggagctatggcacagtatactgatatccttagctatttgggtatactgatatccttagctattaagtatgcacaaagcctgaagcagctggagcttcatgttccataatccaggtaacaaactccagacatagtctttagttccttggatgacaggtgagcagaacagggtctgaccatttctctacattaccaactagtagtgaacatgctgtgccatacctactgctcaccattctccatgaatcaatgtgtcgtcaaaggttagratcccctgcacaactatttcaagaacagtgttgatgaccatagtgtgtgatagaggccaggagaaatttttggtgaattcataattggacagtgacccagaaatcctgtcttcacatatagcacatacttctgtctatttgaggtcaatatggtaatttaatgagatctagaccagcacagaatggtatttccacaatgcttgcaagtgtaaa

SEQ ID NO: 613935 - DNA, 485 bp, Homo sapiens
cctgacctcgtgatccgcccgcctcggcctcccgaagtgttgggattacaggcatgagccaccgtgcccggccaataggaggaattcttgtgctgatggaaatactgggtatcttgactgtatggatgtcaagattccggctgtgatattgcactatacttctacaagatgtcaccttggggtgggggaactgcttaacggctactcgggttctctctgttacttctcacaagtgtatgtaaatctacaattatctcaaawttttttttaaattatcttttcaaaagaggagaaatagggaaattctcactgatgggagtagaatattccatttcttgtgttattttagcccctagcccagtagtttccaaaagatcacctggggattttttttttaaacaattccaaagccaaggctacacttcattcaacagcaatgaactaacaaataattaagttttgtaatgccaactttaaaaaactgg

SEQ ID NO: 613936 - DNA, 556 bp, Homo sapiens
ctaacaatagcaaaatgggacagtagaactgataaaatgtggtatattcatgtaacaatatatacattcttttgaaaaattagcaatatttttaactgtacatatatgatctatttcacagtaaaaatgaataaaattatgatatgcataaaaataacacaaaaacatttctcacattagcatgtatatatttatggaaatgggctcttgaataacaggacgttataaaatctcacctgtagaatttaaaccctaaaggtgatactatatttatactttgacaaatcattttctgtaatcaactttatttagtatcacttaaaaaaatgaatagtactttcattcttatcccttttagtgcttcctaaatattttacttttgaaatgataggtcttggatatattggcttgttttttgttataaaatctgtcatctayagcaaatgttttaatacaatttgaggcacatatgcacacctcggaatatgaggaaagaaaacaatcagaaactttgcagattgacattgtctgttttcacagttgctctgtggaaagt

SEQ ID NO: 613937 - DNA, 288 bp, Homo sapiens
ttctcaccacacacacacacacacacgcacaccacacacacaaatggtgacyatttgaggtgatgcatatgttcattagcttggtagtggtatcatttcacaatgtatatgtgtatcaaaacatcagattgtataccttttttgatgtttgttttgttttgaaacagagtctcacttttgttgcccaggctggagtgcagtggtgagatcttggctcactgcaacctccccctcctgggttcaagcaattctgcctcagcctcctgagtagctgggattacagacacc

SEQ ID NO: 613938 - DNA, 634 bp, Homo sapiens
tcctgctgctctcacagccaggtgacaaccccatttgctggaaccaacatgcaaataagtcgttttattcartctaccaactctgccacagaaaataaaaagtttatactgtgttctttcagaatatgattttctaaattaatttaacaggaaataaataacagaaatagtttaccacaagtaataccctatagtgacatttgttgttgtacagtctctattatctcttagaaccaaaaataaccagatattgtgacctaaaatctaatctttcaagatgcttcaataaaagaattagcaatggtcaagtaaatgtagtaactgctgcatttctacattatttttggagattttaaatgtttaccaggttaagggttcaaagaagacttctgtttcaaattagcgtttaccagatgtaattgactgtggacacgtttttacataaaatttattagcacacacatggtagaattagttcagaagaaaagcacatctgtcagtaaatgttcagtacaagcaggccaaatatgaaatatctcattttatatccaaacctctagaatcagttaaaatctggaacttgctcatttagttgctttaataacctttctaaagatctacatttttttttaga

SEQ ID NO: 613939 - DNA, 634 bp, Homo sapiens
tcctgctgctctcacagccaggtgacaaccccatttgctggaaccaacatgcaaataagtcgttttattcaatctaccaactctgccacagaaaataaaaagtttatactgtgttctttcagaatatgattttctaaattaattyaacaggaaataaataacagaaatagtttaccacaagtaataccctatagtgacatttgttgttgtacagtctctattatctcttagaaccaaaaataaccagatattgtgacctaaaatctaatctttcaagatgcttcaataaaagaattagcaatggtcaagtaaatgtagtaactgctgcatttctacattatttttggagattttaaatgtttaccaggttaagggttcaaagaagacttctgtttcaaattagcgtttaccagatgtaattgactgtggacacgtttttacataaaatttattagcacacacatggtagaattagttcagaagaaaagcacatctgtcagtaaatgttcagtacaagcaggccaaatatgaaatatctcattttatatccaaacctctagaatcagttaaaatctggaacttgctcatttagttgctttaataacctttctaaagatctacatttttttttaga

SEQ ID NO: 613940 - DNA, 634 bp, Homo sapiens
tcctgctgctctcacagccaggtgacaaccccatttgctggaaccaacatgcaaataagtcgttttattcaatctaccaactctgccacagaaaataaaaagtttatactgtgttctttcagaatatgattttctaaattaatttaacaggaaataaataacagaaatagtttaccacaagtaataccctatagtgacatttgttgttgtacagtctctattatctcttagaaccaaaaatamccagatattgtgacctaaaatctaatctttcaagatgcttcaataaaagaattagcaatggtcaagtaaatgtagtaactgctgcatttctacattatttttggagattttaaatgtttaccaggttaagggttcaaagaagacttctgtttcaaattagcgtttaccagatgtaattgactgtggacacgtttttacataaaatttattagcacacacatggtagaattagttcagaagaaaagcacatctgtcagtaaatgttcagtacaagcaggccaaatatgaaatatctcattttatatccaaacctctagaatcagttaaaatctggaacttgctcatttagttgctttaataacctttctaaagatctacatttttttttaga

SEQ ID NO: 613941 - DNA, 634 bp, Homo sapiens
tcctgctgctctcacagccaggtgacaaccccatttgctggaaccaacatgcaaataagtcgttttattcaatctaccaactctgccacagaaaataaaaagtttatactgtgttctttcagaatatgattttctaaattaatttaacaggaaataaataacagaaatagtttaccacaagtaataccctatagtgacatttgttgttgtacagtctctattatctcttagaaccaaaaataaccagatattgtgacctaaaatctaatctttcaagatgcttcaataaaagaattagcaatggtcaagtaaatgtagtaactgctgcatttctacattatttttggagattttaaatgtttaccaggttaagggttcaaagaagacttctgtttcaaattagcgtttaccagatgtaattgactgtggacaygtttttacataaaatttattagcacacacatggtagaattagttcagaagaaaagcacatctgtcagtaaatgttcagtacaagcaggccaaatatgaaatatctcattttatatccaaacctctagaatcagttaaaatctggaacttgctcatttagttgctttaataacctttctaaagatctacatttttttttaga

SEQ ID NO: 613942 - DNA, 328 bp, Homo sapiens
atgtgacatctaccccaagtttgcacatcacagtwgagagagagataccttttgcatagggaaaggaaagtgaagtgagtgcctgactctcacatggattttggcaccagactcctaccagtgaatcttggcacaaagccggtcccattgttccaggctacagacccaccttcatggtctcaggcaccagacctgttcccatggaatcaggtaccagtgtgccctaataccagtgtgcctaatgccagactgatccctgtggtctcaatatgtggctcattttcatagacttagcttccaggctcaccccagcaccagttcagcttcc

SEQ ID NO: 613943 - DNA, 546 bp, Homo sapiens
attcaatgaaatatttatctaacttccaacagcatttttcacagaaatacaaataacaatgttaaaacttayatggaggccgggcgcagtggctcacgcctgtaatctcagcactttgggaggccgaggcaggcgggtcacctaaggtcgggagttcgagaccagcctgcccaacatgaagaaaccctgtctctactaaaaaaaaatacaaaatcagccaggcatagtggcgcatgcctgtgatcccagctactcaggaggctgagccagaagatttgcttgaacccagggggctgaggttgcagtgagcagaggttgcaccattgcactccagcctgggcaacaagagcgaaactccacctcaaaaaaaaaaaaaaaaaaaacttatacggaaccacaaaagatcccaaataaccaaagcaattttaagcaagaagaacaaaactgaatgaattatattacctaatttgataatatattacagagttatagccatcaaacacgatggtattggcatgcatcaaaggtatagaccatttaacagaa

SEQ ID NO: 613944 - DNA, 546 bp, Homo sapiens
attcaatgaaatatttatctaacttccaacagcatttttcacagaaatacaaataacaatgttaaaacttatatggaggccgggcgcagtggctcacgcctgtaatctcagcactttgggaggccraggcaggcgggtcacctaaggtcgggagttcgagaccagcctgcccaacatgaagaaaccctgtctctactaaaaaaaaatacaaaatcagccaggcatagtggcgcatgcctgtgatcccagctactcaggaggctgagccagaagatttgcttgaacccagggggctgaggttgcagtgagcagaggttgcaccattgcactccagcctgggcaacaagagcgaaactccacctcaaaaaaaaaaaaaaaaaaaacttatacggaaccacaaaagatcccaaataaccaaagcaattttaagcaagaagaacaaaactgaatgaattatattacctaatttgataatatattacagagttatagccatcaaacacgatggtattggcatgcatcaaaggtatagaccatttaacagaa

SEQ ID NO: 613945 - DNA, 546 bp, Homo sapiens
attcaatgaaatatttatctaacttccaacagcatttttcacagaaatacaaataacaatgttaaaacttatatggaggccgggcgcagtggctcacgcctgtaatctcagcactttgggaggccgaggcaggcgggtcacctaaggtcgggagttcgagaccagcctgcccaacatgaagaaaccctgtctctactaaaaaaaaatacaaaatcagccaggcatagtggcgcatgcctgtgatcccagctactcaggaggctgagccagaagatttgcttgaacccagggggctgaggttgcagtgagcagaggttgcaccattgcactccagcctgggcaacaagagcgaaactccacctcaaaaaaaaaaaaaaaaaaaacttatacggaaccacaaaagatcccaaataaccaaagcaattttaagcaagaagaacaaaactgaatgaattatattacctaatttkataatatattacagagttatagccatcaaacacgatggtattggcatgcatcaaaggtatagaccatttaacagaa

SEQ ID NO: 613946 - DNA, 245 bp, Homo sapiens
ttgaccaaatggacctaacagacatttccagaatgctccactcaacagcagactatatatattttttcatctgcacatggcccttactaaaaaactgcccrcatgattaaccataaaacaattctcaacaaattaaaaaaaaaccaaaatcataccaaccacactcttggaccacagtgcaataaaagtaaaaatcaatatgaagacaatatcttaaaaccataaaattacatgaaaattaaaca

SEQ ID NO: 613947 - DNA, 444 bp, Homo sapiens
tcatactgaacaagcaaaaggtggaggcatttcccttgagaactgaaagaaaacaaggtggcccactcacatcacacctattctgcacagtcctggaagtcktagccaaagcaattaagcaagagaaagaaataaaaggcattcaaacaagaagacaggaagtcaaactatctctctttgcagatgatatgattttacacctagaaaaccccatagtctctgcccaatagctcattgatctgatatacaacttcagcaaaatttcaggatacaaaatcattccacaaaaatctgtagcatttctacataccaacaacatccaaggtgagaggcaaatcaagattgcaatcacatttacaatactcacaccaaaaattacctaggaatacagctaaccagggaggtgaaagatctctataacaagaattaaaaacgctgctgaaa

SEQ ID NO: 613948 - DNA, 444 bp, Homo sapiens
tcatactgaacaagcaaaaggtggaggcatttcccttgagaactgaaagaaaacaaggtggcccactcacatcacacctattctgcacagtcctggaagtcgtagccaaagcaattaagcaagagaaagaaataaaaggcattcaaacaagaagacaggaagtcaaactatctctctttgcagatgatatgatttyacacctagaaaaccccatagtctctgcccaatagctcattgatctgatatacaacttcagcaaaatttcaggatacaaaatcattccacaaaaatctgtagcatttctacataccaacaacatccaaggtgagaggcaaatcaagattgcaatcacatttacaatactcacaccaaaaattacctaggaatacagctaaccagggaggtgaaagatctctataacaagaattaaaaacgctgctgaaa

SEQ ID NO: 613949 - DNA, 444 bp, Homo sapiens
tcatactgaacaagcaaaaggtggaggcatttcccttgagaactgaaagaaaacaaggtggcccactcacatcacacctattctgcacagtcctggaagtcgtagccaaagcaattaagcaagagaaagaaataaaaggcattcaaacaagaagacaggaagtcaaactatctctctttgcagatgatatgattttacacctagaaaaccccatagtctctgcccaatagctcattgatctgatayacaacttcagcaaaatttcaggatacaaaatcattccacaaaaatctgtagcatttctacataccaacaacatccaaggtgagaggcaaatcaagattgcaatcacatttacaatactcacaccaaaaattacctaggaatacagctaaccagggaggtgaaagatctctataacaagaattaaaaacgctgctgaaa

SEQ ID NO: 613950 - DNA, 448 bp, Homo sapiens
gaagaatcacctttgttagaatggccatactgcccaaggcaatttacagattaattactatttctatcaagcttccaaaggcattcttcagggaactaggaaaaactattctaaaattcatatggaaccaaaaaagagcccaaggcaatcctaagcagaaagaaaaaagcygggggcatcacatttcccaacttcaaatgatactatcaagctaaagtaaccaaaacaacttggcactggtacagaaacagacacatatagcagaccaatgtagcagaacagaaaacccagaaataaagccacacatgtaaaactatctgatcttcaacaaagttgacaaaagcaagcaatgtggaaaagactccctattcaataaattgtgctgggataattggctacccatatgcagaagattgaaactggactccttccttatcctatataaaaa

SEQ ID NO: 613951 - DNA, 448 bp, Homo sapiens
gaagaatcacctttgttagaatggccatactgcccaaggcaatttacagattaattactatttctatcaagcttccaaaggcattcttcagggaactaggaaaaactattctaaaattcatatggaaccaaaaaagagcccaaggcaatcctaagcagaaagaaaaaagctgggggcatcacatttcccaacttcaaatgatactatcaagctaaagtaaccaaaacaacttggcactggtacagaaacagacacatatagcagaccaatgtagcagaayagaaaacccagaaataaagccacacatgtaaaactatctgatcttcaacaaagttgacaaaagcaagcaatgtggaaaagactccctattcaataaattgtgctgggataattggctacccatatgcagaagattgaaactggactccttccttatcctatataaaaa

SEQ ID NO: 613952 - DNA, 448 bp, Homo sapiens
gaagaatcacctttgttagaatggccatactgcccaaggcaatttacagattaattactatttctatcaagcttccaaaggcattcttcagggaactaggaaaaactattctaaaattcatatggaaccaaaaaagagcccaaggcaatcctaagcagaaagaaaaaagctgggggcatcacatttcccaacttcaaatgatactatcaagctaaagtaaccaaaacaacttggcactggtacagaaacagacacatatagcagaccaatgtagcagaacagaaaacccagaaataaagccacacatgtaaaactatctgatcttcaacaaagttgacaaaagcaagmaatgtggaaaagactccctattcaataaattgtgctgggataattggctacccatatgcagaagattgaaactggactccttccttatcctatataaaaa

SEQ ID NO: 613953 - DNA, 596 bp, Homo sapiens
aagaccaaaatttcgaaatgatttttataagctgttaatcttgatataattatatatatacatatacrtgtgtgtgtgttaaacatactcaaataggtgataaatttaaactttttaactctaattttgaaataattacctttactaacaaataatgggtaaatatattatctttaatttaccaacttaataacctgcacactttttaaatcagacaacatatattcattatcaagtgtacatattctcttttccctgtacatattcctcttgagggatgatatatccgaaatagtgcctcactgtggaaatagtttctgccttctgaaacacaacttgaggatataacagaatttccagcagggaggtatagtttgaaaagattccagaaacgattctgataccacactcactgttgcgaatcaatgacaatatgtcacttccatttgagaaattaaatagtaaatgatgtttattactccctagattttaatgtaaagtttaatagttcagtttagttttatacatattttgtcctaagcagttacagatcaatatttttaaaagtttctactttttattaatttcattaaagt

SEQ ID NO: 613954 - DNA, 585 bp, Homo sapiens
aaataggtgataaatttaaactttttaactctaattttgaaataattacctttactaacaaataatgggtaaatatattatctttaatttaccaacttaataacctgcacactttttaaatcagacaacatatattcattatcaagtgtacatattctcttttccctgtacatattcctcttgagggatgatatatccgaaatagtgcctcactgtggaaatagtttctgccttctgaaacacaacttgaggatataacagaatttccagcagggaggtatagtttgaaaagattccagaaacgattctgataccacactcactgttgcgaatcaatgacaatatgtcacttccatttgagaaattaaatagtaaatgatgtttattactccctagattttaatgtaaagtttaatagttcagtttagttttatacatattttgtcctaagcagttacagatcaatatttttaaaagtttctactttttattaatttcattaaagtcctttwgataaagttagacttcctggaatccttatgtttggcaatgaatttccagattgattcaggtttataaggacaa

SEQ ID NO: 613955 - DNA, 585 bp, Homo sapiens
aaataggtgataaatttaaactttttaactctaattttgaaataattacctttactaacaaataatgggtaaatatattatctttaatttaccaacttaataacctgcacactttttaaatcagacaacatatattcattatcaagtgtacatattctcttttccctgtacatattcctcttgagggatgatatatccgaaatagtgcctcactgtggaaatagtttctgccttctgaaacacaacttgaggatataacagaatttccagcagggaggtatagtttgaaaagattccagaaacgattctgataccacactcactgttgcgaatcaatgacaatatgtcacttccatttgagaaattaaatagtaaatgatgtttattactccctagattttaatgtaaagtttaatagttcagtttagttttatacatattttgtcctaagcagttacagatcaatatttttaaaagtttctactttttattaatttcattaaagtcctttagataaagttagacttcctggaayccttatgtttggcaatgaatttccagattgattcaggtttataaggacaa

SEQ ID NO: 613956 - DNA, 458 bp, Homo sapiens
aattttgtagttagtgtcatcctaggaattcgtccattttatctaagttaygtaatttttttcaacatacagttgtttatattctcttgcaatccatgttatttctgtaaggttggtagtaatatcactctttcatatgtcattctagtaatttgaatcatctcttttattcttggtcagttgtactaaaggtttgccaattttgttaacaattttaaaggactgacttttggtttggttaattttttctgtcacttttatattatccatttgagaaatttctcctgttttatttattatttcctgtttctccttacattagatttagtttgctcttcttttttcagtgtcttagggtggcaggtcaggttttttatttgggaaccatttttctttttgaatattgatgtttacagctttaaaattccctctaaaccctgctttagctgtgttactat

SEQ ID NO: 613957 - DNA, 543 bp, Homo sapiens
ataaatgtttcttcatttgatgtatttccttaggacatcttctaaagactttcaatagttgttttttaaaataataatttttactagttatgcytgtttcgtatgagagagggtttacagagctccttatgtggccagcctggaaatgccagagtaccaggttttttatttgaatgttacctcctctttaaaaatcgatttgctttgtaggaagcatgaaacagagctcctgaagtaactagagaaaaggtgatttgaagaccaaccctccttcaaggtcagaatttagaaatgttcttttatgccaaagatgtttctcaaatttactgtctggatagaaaggctaatccaaagtggtatctacagtattctgagagagaaaagttgaagggctttcagattctcttaaaacactttatgaaaggttgatattttaattttatatcaagttaattccaaaaatgtgtttagtacacacatacacatacacacaccccccaaatatatctgtaaataaaaagacaatgttgggtgatgatcatt

SEQ ID NO: 613958 - DNA, 543 bp, Homo sapiens
ataaatgtttcttcatttgatgtatttccttaggacatcttctaaagactttcaatagttgttttttaaaataataatttttactagttatgcttgtttcgtatgagagagggtttacagagctccttatgtggccagcctggaaatgccagagtaccaggttttttatttgaatgttacctcctctttaaaaatcgatttgctttgtaggaagcatgaaacagagctcctgaagtaactagagaaaaggtgatttgaagaccaaccctccttcaaggtcagaatttagaaatgttcttttatgccaaagatgtttctcaaatttactgtctggatagaaaggctaatccaaagtggtatctacagtattctgagagagaaaagttgaagggctttcagmttctcttaaaacactttatgaaaggttgatattttaattttatatcaagttaattccaaaaatgtgtttagtacacacatacacatacacacaccccccaaatatatctgtaaataaaaagacaatgttgggtgatgatcatt

SEQ ID NO: 613959 - DNA, 543 bp, Homo sapiens
ataaatgtttcttcatttgatgtatttccttaggacatcttctaaagactttcaatagttgttttttaaaataataatttttactagttatgcttgtttcgtatgagagagggtttacagagctccttatgtggccagcctggaaatgccagagtaccaggttttttatttgaatgttacctcctctttaaaaatcgatttgctttgtaggaagcatgaaacagagctcctgaagtaactagagaaaaggtgatttgaagaccaaccctccttcaaggtcagaatttagaaatgttcttttatgccaaagatgtttctcaaatttactgtctggatagaaaggctaatccaaagtggtatctacagtattctgagagagaaaagttgaagggctttcagattctcttaaaacactttatgaaaggttgatattttaattttatatcaagttaattccaaaaatgtgtttagtacacacatacacatacacacacmccccaaatatatctgtaaataaaaagacaatgttgggtgatgatcatt

SEQ ID NO: 613960 - DNA, 543 bp, Homo sapiens
ataaatgtttcttcatttgatgtatttccttaggacatcttctaaagactttcaatagttgttttttaaaataataatttttactagttatgcttgtttcgtatgagagagggtttacagagctccttatgtggccagcctggaaatgccagagtaccaggttttttatttgaatgttacctcctctttaaaaatcgatttgctttgtaggaagcatgaaacagagctcctgaagtaactagagaaaaggtgatttgaagaccaaccctccttcaaggtcagaatttagaaatgttcttttatgccaaagatgtttctcaaatttactgtctggatagaaaggctaatccaaagtggtatctacagtattctgagagagaaaagttgaagggctttcagattctcttaaaacactttatgaaaggttgatattttaattttatatcaagttaattccaaaaatgtgtttagtacacacatacacatacacacaccccccaaatatatctgtaaataaaaagamaatgttgggtgatgatcatt

SEQ ID NO: 613961 - DNA, 565 bp, Homo sapiens
ctggccgcgggggaggtgcgcagtgctgcttccaatcagcgggtatcctgcgatctggttttgagtggaccctggaggacttctgtcccaattacaagctctctaactccaccgagaagtgaaactgaaggaatggataaaaatgtctaatgatctcactaatagtgttgataaaatatagctgtcacatatgccaatcctctgcaatgtgaatggttcaagtttgggggtcggctatcctgggatccctctcattagctggttactccacttctctgaggcttggctatctcatctgtaaacagatgacaatacctaaacattgatacctaaacactgagatactgcagggcccggtgggctcgcgcctgtaatcccagcactttgagaggctgaggtgggtggatcatcaggtcaagagatcacgaccatcctggccaacatggtaaaaccgtgtctctatkaaaaatacaaaaattagccaggcgtggtggcacctgcgcctgtaatcccagctactcaggaggctgaggcaggagaatcgcttgaacccggcaggtggagg

SEQ ID NO: 613962 - DNA, 565 bp, Homo sapiens
ctggccgcgggggaggtgcgcagtgctgcttccaatcagcgggtatcctgcgatctggttttgagtggaccctggaggacttctgtcccaattacaagctctctaactccaccgagaagtgaaactgaaggaatggataaaaatgtctaatgatctcactaatagtgttgataaaatatagctgtcacatatgccaatcctctgcaatgtgaatggttcaagtttgggggtcggctatcctgggatccctctcattagctggttactccacttctctgaggcttggctatctcatctgtaaacagatgacaatacctaaacattgatacctaaacactgagatactgcagggcccggtgggctcgcgcctgtaatcccagcactttgagaggctgaggtgggtggatcatcaggtcaagagatcacgaccatcctggccaacatggtaaaaccgtgtctctatgaaaaatacaaaaattagccaggcgtggtggcacctgcrcctgtaatcccagctactcaggaggctgaggcaggagaatcgcttgaacccggcaggtggagg

SEQ ID NO: 613963 - DNA, 533 bp, Homo sapiens
ataaactttaagatccctgttaaatgcagaaaacattcaatctctagaccatctgtagcaaatttacagcaaacactwctgcatccctggaaacagttttatgccacaaaccaggaatttctccaaagttacaattacgtgatgcaaaacaggtaattttcaccccaatctcgtgttttcattccaggtcttagttaatgctgtcttgatggttgctgtttgatgaatcagctttcctgttaactagaggtgcagggccatcatctaatgaaaacactctgtattttattactccctgggctgcagttctgcatattaaaatagaatttcaatctcactgttagaaacaaaatcaaacgtagcatctgtggtttgaacagaactgagaaaaatgctgctcatttaatcttaacaatatttttcatgctagacagtataaaaaaagaggccctggatataattttaaaatgcctataaattagaaataaattggtagaaatcagcacaatagttcagagcacgggttagctcat

SEQ ID NO: 613964 - DNA, 533 bp, Homo sapiens
ataaactttaagatccctgttaaatgcagaaaacattcaatctctagaccatctgtagcaaatttacagcaaacacttmtgcatccctggaaacagttttatgccacaaaccaggaatttctccaaagttacaattacgtgatgcaaaacaggtaattttcaccccaatctcgtgttttcattccaggtcttagttaatgctgtcttgatggttgctgtttgatgaatcagctttcctgttaactagaggtgcagggccatcatctaatgaaaacactctgtattttattactccctgggctgcagttctgcatattaaaatagaatttcaatctcactgttagaaacaaaatcaaacgtagcatctgtggtttgaacagaactgagaaaaatgctgctcatttaatcttaacaatatttttcatgctagacagtataaaaaaagaggccctggatataattttaaaatgcctataaattagaaataaattggtagaaatcagcacaatagttcagagcacgggttagctcat

SEQ ID NO: 613965 - DNA, 533 bp, Homo sapiens
ataaactttaagatccctgttaaatgcagaaaacattcaatctctagaccatctgtagcaaatttacagcaaacacttctgcatccctggaaacagttttatgccacaaaccaggaatttctccaaagttacaattacgtgatgcaaaacaggtaattttcaccccaatctcgtgttttcattccaggtcttagttaatgctgtcttgatggttgctgtttgatgaatcagctttcctgttaactagaggtgcagggccatcatctaatgaaaacactctgtattttattactccctgggctgcagttctgcatattaaaatagaatttcaatctcactgttagaaayaaaatcaaacgtagcatctgtggtttgaacagaactgagaaaaatgctgctcatttaatcttaacaatatttttcatgctagacagtataaaaaaagaggccctggatataattttaaaatgcctataaattagaaataaattggtagaaatcagcacaatagttcagagcacgggttagctcat

SEQ ID NO: 613966 - DNA, 364 bp, Homo sapiens
ttgctattacatgcactgaaattggaaagtgctgaccaagggaaaaataaattaaaaggaaattaaattctctctcacagatggagagagtcaatcagttatgaacttcagtgaagtgaaaatgtaatatgcagtggctcargattttgtttttgtctgtgtgtattgtgcaagaatgtatatgtgtgcgtgtgcatatctgcattagaaacacagaaaattctcaggcctcctaagaatgttgacattgaaatgaacaacaggcattgggtgtaacaagagttctttcaagtgaacactagagcatagtgtccatggcttcatgtttaggtgaaggtagaaataggtgtgtccacactttgat

SEQ ID NO: 613967 - DNA, 364 bp, Homo sapiens
ttgctattacatgcactgaaattggaaagtgctgaccaagggaaaaataaattaaaaggaaattaaattctctctcacagatggagagagtcaatcagttatgaacttcagtgaagtgaaaatgtaatatgcagtggctcaggattttgtttttgtctgtgtgtattgtgcaagaatgtatatgtgtgcgtgtgcatatctgcattagaaacacagaaaattctcargcctcctaagaatgttgacattgaaatgaacaacaggcattgggtgtaacaagagttctttcaagtgaacactagagcatagtgtccatggcttcatgtttaggtgaaggtagaaataggtgtgtccacactttgat

SEQ ID NO: 613968 - DNA, 364 bp, Homo sapiens
ttgctattacatgcactgaaattggaaagtgctgaccaagggaaaaataaattaaaaggaaattaaattctctctcacagatggagagagtcaatcagttatgaacttcagtgaagtgaaaatgtaatatgcagtggctcaggattttgtttttgtctgtgtgtattgtgcaagaatgtatatgtgtgcgtgtgcatatctgcattagaaacacagaaaattctcaggcctcctaagaatgttgacattgaaatgaacaacaggcattgggtgtaacaagagttctttcaagtgaacactagagcatagtgtccatggcttcatgtttargtgaaggtagaaataggtgtgtccacactttgat

SEQ ID NO: 613969 - DNA, 428 bp, Homo sapiens
acataccaatgaccaacaagcttatgaaaaggcrtcaatatcattatcatcagggaaatgtatatcaaaacaacaatgagataccacctcatatctgttaggatggccagtataagagaaaataaatggctgggtgtggtgcctcatgcctgtaatcccagtactttgggaagcgcaggtgggtagattacctgaggtcaggagttcaagacaagcctggccaacacggtgaaacctcatctctactaaaaatgcaaaaaaattagctgggcacggtggtgggcgcctattatcccagctactcgggaggctgaggcagggaatcatttgaacccaggaggcagaggttgcaatgagccgagttcaagccactgcactccagcctgggcaacacgagcgacactccctctcaacaacaacaacaacaa

SEQ ID NO: 613970 - DNA, 428 bp, Homo sapiens
acataccaatgaccaacaagcttatgaaaaggcatcaatatcattatcatcagggaaatgtatatcaaaacaacaatgagataccacctcatatctgttaggatggccagtataagagaaaataaatggctgggtgtgktgcctcatgcctgtaatcccagtactttgggaagcgcaggtgggtagattacctgaggtcaggagttcaagacaagcctggccaacacggtgaaacctcatctctactaaaaatgcaaaaaaattagctgggcacggtggtgggcgcctattatcccagctactcgggaggctgaggcagggaatcatttgaacccaggaggcagaggttgcaatgagccgagttcaagccactgcactccagcctgggcaacacgagcgacactccctctcaacaacaacaacaacaa

SEQ ID NO: 613971 - DNA, 428 bp, Homo sapiens
acataccaatgaccaacaagcttatgaaaaggcatcaatatcattatcatcagggaaatgtatatcaaaacaacaatgagataccacctcatatctgttaggatggccagtataagagaaaataaatggctgggtgtggtgcctcatgcctgtaatcccagtactttgggaagcgcaggygggtagattacctgaggtcaggagttcaagacaagcctggccaacacggtgaaacctcatctctactaaaaatgcaaaaaaattagctgggcacggtggtgggcgcctattatcccagctactcgggaggctgaggcagggaatcatttgaacccaggaggcagaggttgcaatgagccgagttcaagccactgcactccagcctgggcaacacgagcgacactccctctcaacaacaacaacaacaa

SEQ ID NO: 613972 - DNA, 416 bp, Homo sapiens
atttttgtttttaaaaaaaggaaacagtatttttgtttctggtaacaattgtattttaaatgatcaaataaattggcatataaattggctacacatatctaaattctgtgaatgtgtgtaacagattagcatgctataaatttttgccttctcggcacacttaaaaagttatgttccttgtgcctattcacttaatctgattaattatattatttaagttatttatatcttttttgacatttattttttttctrtgaaaggctgtaaagtacgttcagtgttatcactctaattttacttatgttcaattattttccttgttctaatcacttttctccaagtattttgctacaatacttggcgtgtacatttataaactatcatatactcattataatttatctcttatttatgat

SEQ ID NO: 613973 - DNA, 383 bp, Homo sapiens
ttctggtaacaattgtattttaaatgatcaaataaattggcatataaattggctacacatatctaaattctgtgaatgtgtgtaacagattagcatgctataaatttttgccttctcggcacacttaaaaagttatgttccttgtgcctattcacttaatctgattaattatattatttaagttatttatatcttttttgacatttattttttttctatgaaaggctgtaaagyacgttcagtgttatcactctaattttacttatgttcaattattttccttgttctaatcacttttctccaagtattttgctacaatacttggcgtgtacatttataaactatcatatactcattataatttatctcttatttatgatgcc

SEQ ID NO: 613974 - DNA, 421 bp, Homo sapiens
tttatattttcagtagacacaggttttcaccatgttagccaggctggtctcaaactcccggcctcaagtgatcctcccacctcagcctcccaaagtgctgggattatgggcatgagccactgtgcccagctgattccrttaacttttatgaaaacaacaaggactctgttattcatctgtatatctcttgatatgctctggctgtgtccgcacccaaatcttactttgaattgtaataacccccacctgtaaagggcaggaccaggtggagatcgttgaatcatggggccgttttcccccatactgttctcgtggtagtgaacaagtctcacgaaatctgatggttttataaatgggagttcccctgcagaagcgtctcctgcctgctgccatacaagaggtgactttgctcctcattcac

SEQ ID NO: 613975 - DNA, 421 bp, Homo sapiens
tttatattttcagtagacacaggttttcaccatgttagccaggctggtctcaaactcccggcctcaagtgatcctcccacctcagcctcccaaagtgctgggattatgggcatgagccactgtgcccagctgattccattaacttttatgaaaacaacaaggactctgttattcatctgtatatctcttgatatgctctggctgtgtccgcacccaaatcttactttgaattgtaatwacccccacctgtaaagggcaggaccaggtggagatcgttgaatcatggggccgttttcccccatactgttctcgtggtagtgaacaagtctcacgaaatctgatggttttataaatgggagttcccctgcagaagcgtctcctgcctgctgccatacaagaggtgactttgctcctcattcac

SEQ ID NO: 613976 - DNA, 620 bp, Homo sapiens
tgaatacatttagcaacaattggagcagagctttcccagcaagacagatactagtaatgtgggtatttggtgatcacaactgctaatagcagcaaagacctttattaaaatttatttaactcaattgaaaatagatcattggtggctcaattcttttttttttcccagtgggtgccttctacacttggttggcacatttaaagtgcctactttccacttcctgaggattaggttccaaagaacatgtttggtaaaataataatgcttttatcattttatcarttagtgctgattttaatgatatgtttatttcaatactacaattttattttatgatttttaataagatgagtttataaattaaataaaaaccaccatattaggtaggtgggctgagtttggcattaacgccaaactcattggtaagctgccctttaaaagcattcactgcctcagtgcaggaaatggaaaatatttttccatcttggtcatacaaaacatctggtggcatgatgcctccagctgttctttttgctcaggatcattttttctattcgaagtcttttatggttccatacaaattttagtatattgtttacaatttctatgaagaatcattg

SEQ ID NO: 613977 - DNA, 620 bp, Homo sapiens
tgaatacatttagcaacaattggagcagagctttcccagcaagacagatactagtaatgtgggtatttggtgatcacaactgctaatagcagcaaagacctttattaaaatttatttaactcaattgaaaatagatcattggtggctcaattcttttttttttcccagtgggtgccttctacacttggttggcacatttaaagtgcctactttccacttcctgaggattaggttccaaagaacatgtttggtaaaataataatgcttttatcattttatcaattagtgctgattttaatgatatgtttatttcaatactacaattttattttatgatttttaataagatgagtttataaattaaataaaaaccaccatattaggtaggtgggctgagtttggcattaacgccaaactcattggtaagctgccctttaaaagcattcactgcctcagtgcaggaaatggaaaatatttttccatcttggtcatacaaaacatctggtggcatgatgcctccagctgttctttttgctcaggatcattttttctattcgaagtcttttrtggttccatacaaattttagtatattgtttacaatttctatgaagaatcattg

SEQ ID NO: 613978 - DNA, 510 bp, Homo sapiens
tggttatcttttttcttagactgcaagtcatagaaaggtacggactatgtatggtacatgggaggtgctgaataaatactgaatgatgaataaataactgaaaaaatctaggtcatggcacaggaagtcaggaaaaggctttctgtgcttctaataaaactgctagaacttttatattcaattcaggtaatgatgcagagaagagttatctaattcaaaataattataagcaccatgtaataactttgaatgtgttacatttagggaaatatgcatctatagactctaatatttcaattttaatatatgggctttctcttattattggatttgtgaccttaccgccaattatatttgcttcctttgttttttttacctctttttcattctcaagtaccgattgttttttcaagtacactagacctggatctccttcccaagatwacctctgtctctccaagatcctgcaatagctcaacacaattttttatgacaagtctccaaagtcca

SEQ ID NO: 613979 - DNA, 608 bp, Homo sapiens
ccaatcctccctgaagcactgcaaggtaagcatcttcattctcattttattctctttatatagaatgtacagaaatgatactttgtaacccaaatctgatacagattttgattcataacccaaatctgattcatgaaagggaattctctgttgttcaaaaacaaaataataccaagttttttcatttgtacctgctccagttgtgctcccctttcagtaaatgtatctccaaagtcccacctagagataaaatatcaatacatgttaaacaagaattaaagtaaaagtgtgcatttttagatagttcctctaaacagctaagctgctctggaaatacctcttaaagtttataaatcatttccctaaaaacacccaygagcagctcaaataactcaagaaacaggagagaggaaacaagaagactgaaagaagacttgaaaacctaaaagccccaagtccaacttcagcgaagagaagtaaagtccaaacaacaatgtgaattggcagggtgttgacggggctgccctctgggccacagtagcaatctcatactcaaattgtcatcactagccttttatgttaatctttctaccagcatttggtaatct

SEQ ID NO: 613980 - DNA, 667 bp, Homo sapiens
tagaagatatgtctctttttaattatctactttttctataattataatttgttcaccttggaattatgccatatctatatttaaattgtacaagtttactataactagcttattcttcagagatgatggttttcacatgcctatcacagtgaagcatcttgccagtgttgacttgctaaatctatcagccctgataccccctttatcattggaatgctagttatatgaagtaacatatcctgaggtctgtagagtttgatgcaattatccagaaaaagaataaaagaagtgttgggtcagtgaggtggtaaggaagatgattctttgagcagtcagaagcatacaactgtagcacattaaacaagraaagaagcagcgaaacatttataaagggctcaattatacaggactacagaaactaactgaataaattcagatttcatccaaaaaggaacccaaaacttctaaaagattgtcagcaaggaaacaaaaccaagctgcattaattcacttctctgtagtgaacaaatctggaaatcaagacatatacagtaggagtcatgtcttgtacaagaagaagatattaggtcagagaaaaaaataaaaataaataaatataaaaatactaggttagagaaattggaagccatggtgatttaaaatgcat

SEQ ID NO: 613981 - DNA, 667 bp, Homo sapiens
tagaagatatgtctctttttaattatctactttttctataattataatttgttcaccttggaattatgccatatctatatttaaattgtacaagtttactataactagcttattcttcagagatgatggttttcacatgcctatcacagtgaagcatcttgccagtgttgacttgctaaatctatcagccctgataccccctttatcattggaatgctagttatatgaagtaacatatcctgaggtctgtagagtttgatgcaattatccagaaaaagaataaaagaagtgttgggtcagtgaggtggtaaggaagatgattctttgagcagtcagaagcatacaactgtagcacattaaacaagamaagaagcagcgaaacatttataaagggctcaattatacaggactacagaaactaactgaataaattcagatttcatccaaaaaggaacccaaaacttctaaaagattgtcagcaaggaaacaaaaccaagctgcattaattcacttctctgtagtgaacaaatctggaaatcaagacatatacagtaggagtcatgtcttgtacaagaagaagatattaggtcagagaaaaaaataaaaataaataaatataaaaatactaggttagagaaattggaagccatggtgatttaaaatgcat

SEQ ID NO: 613982 - DNA, 584 bp, Homo sapiens
gctgagggaagggatgtgttactttgataggtgtgaatgcatctatgggaacatttccttgagatattggtttgttactgttattgtttcatttgttgcctgcctctctaggactaaaaaaaatctttcctgatgatcttgcaatgtattttccttaatacaaaagaaaaatcaggtaatatttcactggrgtggagttgattatagacttttgggagcttttattcaaattaaatattttctcaccctgggtgaagcttttgtcatttggcagcactgaataagaagacaggtcatgtgatggaagaattccaggaagaactccaggaatttactgtttagccagccttatctagccaaagtgctttttcttacactagcaatctgagagaatggatgagagtgccatttggcctttctcaagtaaacgtccaacataacgtaactcctataaatataaaaagtaaagtttgggcccttgtcaataacctcatggtagtacaaattaacactaaagcaaaagctttcactgagttatcaagtttattttacctattctcttgtctccagagactttcttttct

SEQ ID NO: 613983 - DNA, 584 bp, Homo sapiens
gctgagggaagggatgtgttactttgataggtgtgaatgcatctatgggaacatttccttgagatattggtttgttactgttattgtttcatttgttgcctgcctctctaggactaaaaaaaatctttcctgatgatcttgcaatgtattttccttaatacaaaagaaaaatcaggtaatatttcactggggtggagttgattatagacttttgggagcttttattcaaattaaatattttctcaccctgggtgaagcttttgtcatttggcagcactgaataagaagacaggtcatgtgatggaagaattccaggaagaactccaggaatttactgtttagccagccttatctagccaaagtgctttttcttacactagcaatctgagagaatggatgagagtgccatttggcctttctcaagtaaacgtccaacataacgtaactcctataaatataaaaagtaaagtttgggcccttgtcaataacctcatggtagtacaaattaacactaaagcaaaagctttcactgagttatcaagtttattttayctattctcttgtctccagagactttcttttct

SEQ ID NO: 613984 - DNA, 606 bp, Homo sapiens
agtgggctgggaaaggcagacccacccttaatctgggtgggcaccatctaatcagctaccagaatggccagtatataaagtaggcagaaaaacaccaaaaggctagactggcctagcttyccagcctacatctttctcgtgtgcagtatgcttcctgccctgaaacatcggactccaagttcttcagttttgagactcggactcactttccttgctcttcagcttgtggatggtctattatgggaccttgtgatagtgtgagttaataataaactcccatgtatataagtatatgtatctcctattagttctgtccctctagagaaccctaatacagtgctccatgctgagctcacatggaactcatcttcctcctgtgtttggcagagcaccttcctttattgactcactctcaaaagagaaattaggcatcgcttatgtttgtgaaacatacgcattcaattacttcctcaatgacattggtccagggagacacctaagaacagaactcttgggatagagtagaacagaatctcaaagaataggttgggcagggaagatactagagtaaggactattaattagatgtgaaactcatggaccacc

SEQ ID NO: 613985 - DNA, 598 bp, Homo sapiens
cactgacagatattctgcctgtcagcatggctaaggggctccgctgcctaaatttgcagcataggcctcagtaagccagcgaagttcacatttatttagtacagattaaatgacaaaggctttgagtcaacacatctgtgggtaattaaactcgttgtcctcccccaagagatagccatcctgccagtgaatgatcaaaggttggtcttaggaccacatgagtaaataagctatttagataaactcccttacattcctttgtgcctactgtaacctattaactcaaggtaagaggataaggctgccttcagccaaatcttttactgacgctatgcaaacgtcccrgccttcaaggtaggtttgtgtctatttcatataactatctttatagtttttcttctataatttttcccacaacgctgactgaactcccatagttttccctaaaatataaaataaataaaaagaataatgagctgaaaaaatgacattaatttcaaaagatcaaaagtaaggctgacatccatctgaaattttttttgttttatttttatttcaagttccggagtacatgtgcaggatgtgcagttttgttaca

SEQ ID NO: 613986 - DNA, 567 bp, Homo sapiens
aaaaaactgtctgtaaatgatttaattgtctacgtcaagatcaagacaatcaattaaaaatttaaaaagacaataacttagagcgttagataaaaaataagtatgtatataaattgatctctatcctcaatgagcttacactttgtccagaaagacttatgcatagtgagtgaagaaaataagaataagaggggaaaaatcaytgaaaatgcataaattatttaataattccactagtcttatctcaagggtagtaataatgattggagaaaaaatacatttcctttgcttctgaattttgtattttcatagagaattgtattaatccatatgctactggataatacaattagacacaactctgcccatagttagccatgtgacttttgacaaggtagctctcctgggtcaaaaattttatagaatctcaggatttttttaaaaattggagtcacctaatatagaccacaaagccttacgaatatgaacacttatgtccacatcagagattttatcataagagatcaaaatatgcacaatggtgttcataccacattttagagtgaa

SEQ ID NO: 613987 - DNA, 607 bp, Homo sapiens
cactgtgttgcccagggtggagtgcagtggcacaatcacagctcactgcagccttggccttccaggctcaagtaatcctcccatctcagcctcccaagtagctgggactataggcatataccaataaacctggataatttttgtatatttttttatagagatggggtttcaccatgttgcccaggctggtctgtaactcctacgttgaagccatatgcccaccttggcctcccaaaatamtgagattataggcatgagccactgtgcccagcctccacgattaatcttgatggcaaattccaataaagcttttctaggcaattttatcaaaactatgaaatcaacttccagaactcctcttgatttttatggaacttttgtctcaacctcagtgacacagagtccctgtttctctgattgtaattacagtgtgcccatcttctgagagaagtgtcttgcctgtaaccctgaatgaaggtgactggcaagcacacacctgtcatggcatgttatcttcttgtagacaggctgacatcagctctgcctctatttaacacaaaaaggacatctaaaatcctatcaagatttccagcatgcatgctacaaa

SEQ ID NO: 613988 - DNA, 480 bp, Homo sapiens
aaagaaggaaagcaaaaaggagaaagttcaagagatagttgagatgaactcttcggctttcttcagactttaaagggaaacatgagctgtgaaagtagaggccaatttttgaatattatagcaattgtaataatagtgcttctgcagattgttaaaaacaagcaaacaacatgcctgttaaattattggcttttcraattctaacaactcactggaaaaagaaaatttgatcttccttgaatttcccctaagtggatatttttctttagttaaaaaaaaaaacagatcagtcatcagacatcatcacaacaaaaagtgtctagaggataggctagcttaggaacacttaggcttgatgatcattccaagatatttttcaaatatctgtggctccaccaaacccaaaacacattttgtgttttaccaaacaccaaataagttttgccaaccactttttacatttaatttttttaaatcatg

SEQ ID NO: 613989 - DNA, 601 bp, Homo sapiens
atagttgagatgaactcttcggctttcttcagactttaaagggaaacatgagctgtgaaagtagaggccaatttttgaatattatagcaattgtaataatagtgcttctgcagattgttaaaaacaagcaaacaacatgcctgttaaattattggcttttcaaattctaacaactcactggaaaaagaaaatttgatcttccttgaatttcccctaagtggatatttttctttagttaaaaaaaaaaacagatcagtcatcagacatcatcacaacaaaaagtgtctagaggatrggctagcttaggaacacttaggcttgatgatcattccaagatatttttcaaatatctgtggctccaccaaacccaaaacacattttgtgttttaccaaacaccaaataagttttgccaaccactttttacatttaatttttttaaatcatgtgtattttaagtgaaatttaattcacatctttctgatttagatatatacaaataatcaaaattttgttttgtaagaactattggtgtccacagaagcatttcaaaaactttctgaattatttcaataatcttttaaagtcttttttcctagaaat

SEQ ID NO: 613990 - DNA, 430 bp, Homo sapiens
ttttgtggagaatgtcattggtattttgataataattacattgaaactgtagatcactttgggtagtatggacatttaaaatattaattctttcattctgtgaacatgggatgtatttccattttttgtgtcttctttttgcagaggtttctggcaactaaagtctagaggattaaagcatagattgaataactgttctggtttgacaaatatccaccmcctactcactacctccttttctggtaatatctccctggttttctactgctaacagcccatctctcactctcaaatcatgttgaaatagagagataagacagttagatgttgccccatcatcagcttcaagaattgacatatgatgcaggaatagccaatcagagcatcacatctgattggcggaggagcagacatgtgacccaagtcaaga

SEQ ID NO: 613991 - DNA, 532 bp, Homo sapiens
aaacttaaatgtaaatgggctaaatgctccaacaaaaagacacagactggcaaactggataaagagtcaagacccatcaggtgctgtattcaggagacccatctcatgtgcagagacacaaataggctcaaaataaagggatggaggaagatctaccaagcaaatggaaaacaaaataaggcaggggttgcaatcctagtctctgataaaacagactttaaaccaacaaatatcaagagacaaaaaaggccattacataatggtaaagggatcaattcaacaagaagagctagctctcctaaatatatatgcacccaatacaggagcatccagattcataaagcaagtccttagagacctacaaagagacttagactcccacacaataggagactttaacaccccactgtcaacattagacatatcaatgagacagaaagttaacaaggatatccaggaattgaactcagctctgcaccaagyggacctaatagacatctacagaactctgcaccccaaatcaacagaatat

SEQ ID NO: 613992 - DNA, 456 bp, Homo sapiens
ggcagctgggggagggctaatcgcgaaatgaaactgtaagccggacggaagacccgaggttgtaggtggatctttctcacggagcaaagaacaggaggacaggggattgatctcccaagggaggtccctcaatctgagtcacggcaccgaatgtcacatgggtccatgtgaagagaccaccaaaccggctttgtgtgagcaacaaggctgtttatttcacctgggtgcaggcagctgagtctgaaaagagagtcagcaaaggggaatgggattatcattasttcttataggtttggaataggtgtacaaagtacattttcaagggcggggagaatgttacaaagtaccttcttaagggtgggggagaatattacaaagtaccttcttaaggatgggggataatatatcctatcagttagggtggggcaggaacaaatcacaatggtggaatgtcat

SEQ ID NO: 613993 - DNA, 265 bp, Homo sapiens
ttacttgtttctttgatgctatgcttttatgtcacaactaagaatccagtgccaaagccaacctgtwtaattggaatgtttatttacttattagtaagttttaagcatttttatttattttgaatacaagtcctctattagatgtctattttgaaaatatttatttcagactgtgtattgtcttttgattttttaacaatgcattcagcagagcttatttaaattaagtctaattcatcaatttttttcatgtattgtgcttttg

SEQ ID NO: 613994 - DNA, 594 bp, Homo sapiens
ttacatacttctctaaagtattctaccttgcaaattacagttaccttaacatctctgaagtctgctatgtttcttccatgaagtgaaaattcagctctctgttgttactctagttttctacacatttgagaaatatccctaggaaacctgagttgaatgtggaactcagtcrtatacaatatagccaaattatatatgctgtggtctgagaatcagtgttttttggtaaactccccagtaattctaatggcagcaaaagtgagcaaccggtgccataaaagacattgctacttgttgagaagtagacataaactctggctttctatcgttggaaatgtacatagctgaacgagcatattgaatatcttaacataattccattttaaggaaataaaagatactatcttaataccataagctatgcatagtttgtttacattgataatagagaatggggacttgaaggagaaagttggaaggctcagaccaaagagagaataaagagggttttgaggatgtattagtctgtttccacactgctataaagaaccccctgagactgggtaatctataaaggaaagagaggtttaatta

SEQ ID NO: 613995 - DNA, 578 bp, Homo sapiens
atcctctctcttcccattctstgggcagtaatggcaatgttcaagtctcagagaaataggagcctgaccttcgcagaggtgacaacctttctaaaaagcagttacacttgctaaagtcacagtgggaggccttgagaagagccagcaatccgtttcgaagtcgtgactctcacctctaatggagcaatatgttctagatgaacaggctgggatccagggacagagcaacagctccttagagtaactaggccaggtattaatttttccctgtcagctccaaaccagtttttctttttcctgctttgtgatagcagagctgaattctgcagaatgcattttcatttatttttaaacaaacaacacctgtataacccttcaaccagcttccctaaatagttatcatcttatataaccagatcataattacaaaggctgagagagattaacatctatacaatgctactaaattctccacctatcttatttatattttgaattaaggcagaggctctccctaacctctctgcatcccataagataaagtaaacatagagtcaaatagaggaagaagttaactc

SEQ ID NO: 613996 - DNA, 550 bp, Homo sapiens
aatgaaaagagagattacatagaaataaatgaaataaggcagattatgtattttttccagttttttatgatgataaaatatacataacatttatcaccttaccctttgttttttttttttttttgagacagagtctcactctgttgcccaggctgggagtgcagtggcatgatctcggctcactgcaacctccacctcccaggttcaagtaattctcctgcctcagcctcccaagtagctgggattacaggcaggtgccaccatgcctggcttatttttttgtatttttagtacagatggggtttcaccatgttggccaggctggtctggaacttctgacctcaggtgatttgcccgcctcagtctcccaaagtgctgggattacaggcatcagctaccrcaccaggcctcatcttaccatttttaagtatacagttcagtggtattaaatacattcataattttgtgcagtgatcaccaccatccatctccataactcttttcatcttgtaaaataaaaactctatacccattaaacaaacaataactc

SEQ ID NO: 613997 - DNA, 574 bp, Homo sapiens
tttgaaataaaaagatttaaaaggagaaataatcaaattttggatataaaatggtgaattatatgtaatttacctacttaaaagtgtctgagtatttggaatttccagtaggaataataaattgtcttaacattttcagtcaagagtgctatgtgctattggatgtgattagaagtcaagggagggatattataaaaccrgagaaagtatagtaatcatagcctttaggagtttacaacctaatttaaaaaaataatatagtggaaaagccatgggttttagaaatatgggggcctaggtttaaatcactgtttacccgcttactaggtctttgaccttaggcaagtctgtctttcaagtctttgtttcctcaactatacaatagagcttatatcttctttatagaactattagaattaagtaaaacagtacaaataaagcttcaagcatagtgcctaataaattctcaaagctttcatatatctgaagatgtttatttcatctttaaaaaaacttttttacagaacatgaaatctaccatcattaaatgcatttacagtgttgtgcaattatc

SEQ ID NO: 613998 - DNA, 467 bp, Homo sapiens
gcagaaagggagcgtattctctttggctygtgctctcttgccctcttgcttgcatgctctaatgaagccagctggcatgcttggagaaattctatggaaaggtccacatggaaataaacttttaaaattatagtaatcatgtaacataggatttatctgattccagtgtttgcaggcacaaacttataagaaacttagaaacagcaaatgcatcttttctagctggtatatgaaagaaacttgatgtgtgggggttccccacatttttctacaaaaatatagaagaaaatgtattatcgaggcatttaaggcaattaattataaaagttttctggaaatcaaagaaaaaaatgaatagggaaatagcaacaattttcctagcattatgaggattatagatgaattttttctttaaaaatttgcttttataccatcataattttaaaacagaaacaaaataaaaacta

SEQ ID NO: 613999 - DNA, 467 bp, Homo sapiens
gcagaaagggagcgtattctctttggctcgtgctctcttgccctcttgcttgcatgctctaatgaagccagctggcatgcttggagaaattctatggaaaggtccacatggaaataaacttttaaaattatagtaatcatgtaacataggatttatctgattccagtgtttgcaggcacaaacttataagaaacttagaaacagcaaatgcatcttttctagctggtatatgaaagaaacttgatgtgtgggggttccccacatttttctacaaaaatatagaagaaaatgtattatcgaggcatttaaggcaattaattataaaagttttctggaaatcaaagaaaaaaatgaatagggaaatagcaacaattttcctagcattatgaggattatagatgaattttttctttaaaaatttgcttttataccatyataattttaaaacagaaacaaaataaaaacta

SEQ ID NO: 614000 - DNA, 513 bp, Homo sapiens
ggaaaccccttttacttggctctcattctttcatgtgtgctgccakgtaagacgtgcctttcaccttctgccataattgtgaggcctccccagccaggtggaaccgtgagtccattaaacctctttttctttataaattacccagtcttgggtatgtttatatcagcaacgtgaaaactgactaatacagattgcatgaaaactttttctccatctattgagatgatcatatggtttctacggtttttatttttttttctgtttatgtggtgagtcacatttattgatttctgtttgtttaaccaaccttgcattgcaggaagaaagcctagttgatcgtggtcaattaactttttgatgtgctgttggattccatttgccagtattttgttgaggacttttgtgtctacattcatcacagatattggcctgaagttttttttccactgtgtctctgccagattttggtatcaggatcatgcttgttttgtaacacaagcaagggagaagccc

SEQ ID NO: 614001 - DNA, 554 bp, Homo sapiens
cttttctttcatggtcaaaatrttgaaatttggggggaaaatgtgtttttttcccaaaagataacatattttcaccaaaactaatgaccatgggattccaatccattgcaagtatttcaaaataatgatggagtgctaactagagaatgcatgtacattattagaacagctaccttgcacctactttggatactattagatgggtacatcagctgcaaatgggcagaagtttctggtacacattaaagacacagacttgggactgctacctggagtagcactttccggggtcctgtgtcatacctccctcctcactcccacatcacccctgtaaccagtcatacctgtgatacttgaatcatgaagtgctctagtatatttctggacccctgatataccaaaggcaaagcactccacagtagactgctgttgacaggcagcgagtaccagatgtcttttgtgctttctacctgcagaccggatgggattagggatagaccatcaatccccactctgcacaaatgcccctttgaggattcccagttaaggctgct

SEQ ID NO: 614002 - DNA, 571 bp, Homo sapiens
attttcttttattctcaatgtatgacttttgctactgaacgtaaatgacatttattaaagcctattggagtacatgtgtaatagcacaataaagagaggtacaaagatcacagaatttggggagatgttggccaaataatacatatttgcagttagatgggaggaatgaatttaagacatctattggccaggcacggtggctcacaccttaatcccagcactttgggaggccaaggcgggtggattacaaggtcaggagatcaagaccatcctgsccaacatagtgaaaccccgtctctactaaaaatacaaaaaattagctgggcgtggtggcgggcacctgtagtcccagctactcgggaggctgaggcaggagaatggtgtgaacccgggaggtggagcttgcagtgagctgagatcgcaccactgcactccaccctgggcgacagactgagactccgtctcaaaaaaaaaaaaaaaaaaaaaagacatctattgtacagcatggtattgatagttaacaataaaatgtcttcttgtaaaatccaaaatgtggctgttaaatattctc

SEQ ID NO: 614003 - DNA, 536 bp, Homo sapiens
aaccccgtctctactaaaaatacaaaattagccaaatgcggtgatgcatgcctgtaatcccagctactcaggaggatgaagctggagaatcgcttgaacctgggaggcggaggttgcggtgagctgagatcacgccattgcactccagcctgggcaaaaagagtgaaactcagtctcaaaaaaagaaaaaaaaaaaaggaaagccaaataacttctcttctaggctaagttcctcttttcttttgattcttctgttactcaatctttgttcttggtttatctataattgtataattttatttgtatttgacttctgggttctctcaaatccttttgaagcaaaacagtgaaatctttaagctttcagaagttctctctctctctctcaaacacgcacacatgcacacacacacgtgcacacacatgcgcaygcgcacacacacacacacatacacacacaatttacaccattaaagggaaatgataaacctagtttggcttatattggttccctgtggacctttatgaaattgcat

SEQ ID NO: 614004 - DNA, 644 bp, Homo sapiens
ggctaatttgggtatggcacatttctcaaacacataaaacrttaataagatattaattccagattttacagttatatagttagagccagtgaaagtgtgcctaagttctattcccactacatagatatgccactagatgctactggaattggttctgggagccttcatctgaaggcagctttaggaaatagcaaggaataacaagaggagtttctgaaaggatgaattaagtgcttatataaatagggaaagaaggactttagtctctaaaatttaggaccaagagaaggggttggcctaggacttctgggaacatttttctccttgaaataaggggcatgtgaggagtaagcgcttcttggcttctactcctttggctcctctgagtatctgatgctcagagctgggttaaccattttttcccatgaagagagatcatagatgctctgaggatggtagagtagaagggtgggaagaccctgagtccttgatgatatccttgatttttgacaccaactctgaaactgcccgacgaaacttctgattaagcgagcaaaaagtgtccttaagttttaagccttgttcagttctgtgttccccagttgcagctaaaagtatatcaagtgatataaattatctttatt

SEQ ID NO: 614005 - DNA, 619 bp, Homo sapiens
ttgtgtctggcttctttcacttagcataatgtttttattcatgttgtagcaagtrtcagtaccttattcctttttatgtctcaacaatattctgttatgtcaatataccacattctatttatttattcataagttggtgaacattttaattgattccaccatctggctattgtgaatggcattactgtaaacatttaggtacaagttttcatttaaatacctgatttcaattcttcgagtatatactttgggatggaattgctgggccatatggtaataccatgtgtaactttttgaggaaccgccaaactgttttatgtagtggctgcaccattttacactcccaacagaatatatgagggttgctgtttcaaacaaaccatgttctctggtcacaaggcaattaagctagtccttacaataaaaagattatgataaaacaccattaatttgaaaaatccaggtcaggaaagaagtctagtattttaggaccattacaccagggtgattatttcataagaagtcaggtcacaatcgagatgataaagatctatgttcttcacatagaccagaccagctagtaggaagaaaagagacattctttcattaataagttgtg

SEQ ID NO: 614006 - DNA, 598 bp, Homo sapiens
gatctgtcacccaaagatatggaaattgttcctgagcagaaaacacacaaacaaaaccagctacccctgcagtccctgttaccaggtactgttctctactttcctccctccaccctatagaatatagcctattctatattcctctgggataatggcttccattcttccttcctgggaattgcagcctaactcttgtcgctagtctggtggcctggagcttggtgacccaccctggacagtccttctgagcctcagacctgstatctatatatttattgaattatctagttactttagcttgcaacttttgagagtaattattaagagcaggttttgctcaaatgtaaacagaagttttaatgaactttcaactctcttcttcaatcagataaatatttcttggcatcctctgcaccctggacagctccccaagtgaccttctgttactcacaatctcttctaatttccatgaaaagtgaattaaagccatgacattatcttcccatttggtctatatctttctttaccttctttcttcctcccaaagtctggcccacttcataataaatatcactgtggctaccacttattgagcact

SEQ ID NO: 614007 - DNA, 546 bp, Homo sapiens
gaaattttgtcaccaccaggcctgccctaaaagagctcctgaaggaagtgctaaacatagaaaggaacaaccagtaccagccgctgcaaaatcatgccaaattgtaaagaccatcragactaggaagaaactgcatcaactaacgagcaaaataaccagctaacatcataatgacaggaccaaattcacacataacaatattaactttaaatgtaaatcgactaaatgctccaattaaaagacacagactggcaaattggataaagagtcaagacccatcagtgtgctgtattcaggaaacccatctcatatgcagagacacatataggctcaaaataaagggatggaggaaaatctaccaagcaaatggaaaacaaaaaaaggcagaggttgcaatcctagtctctgataaaacagactttaaaccaacaaagatcaaaagagacaaagaaggccattacataatggtaaagggatcaattcaacaagaagagctaactatcctaaatatatatgcacccaatacaggagcacccagattcataa

SEQ ID NO: 614008 - DNA, 548 bp, Homo sapiens
gtaggtcatttggcatttgtagtctatagtatgagatctttcctataagtgaaacacaaaggaataatcctgagcaacccatgtctctctgtatcttgagaatactttgtatatattcttcaatgctatatactgtattttaaagattaattataatgctgactaatttattcaataaacttctgtgtgctaggtcttcatgctgagtgctaaatgctaaaagaaacaaagcttaataaaccacagatccatccaccaaagaacatacagcctgttgaggaaagacagacaagtaaacaggcagttacatttgagtttgttcattcaacaaccatttgaatgcgaacaatgagcctggcactgtagtgacataccaatgagtaaaacagacccggtctctgcttttaaggggctcacaaagtaaagaggaatataatgactctggtwaaaatatagagggtactgtgggagtatggaggaagggcacctaacttttaggggtaaggtaagtgagaacacatggtatttggtattctggttcctgcact

SEQ ID NO: 614009 - DNA, 576 bp, Homo sapiens
ggaccttgcaagtgattcccctacccaacaacaaaaaaaagtgatattttaaaagtctaattttatcctattactctaagtgcttttaaaggggttattagattggcactcttaaaatagccaatcactggaaaatgctcccctcaaacaaaggtcaaaattaatttaacaatactgttgtgcctcacagacaaatacttctttcagaatcyacacagctccttctcttctggacaactcttctatcttcacttacggaaaacagtattcaaaaatgaaaccaaaagaacgcatggaaaacatcctagctcttaaacacaacacagacacaccccaacaaatgtgccctcttccccatcttcccagttcagaacacctggagaactgtggtgctgccgccaaaggtctgcatcccctccaatccaaatcctaccacaggaagaaacccagagccgtctccactccctctgccagggcaatattcctaatctgaataccacaatgtatatacttattctttatacatggtagttaggtatagctgaattaaggctctaggaaaaatatttaatatat

SEQ ID NO: 614010 - DNA, 576 bp, Homo sapiens
ggaccttgcaagtgattcccctacccaacaacaaaaaaaagtgatattttaaaagtctaattttatcctattactctaagtgcttttaaaggggttattagattggcactcttaaaatagccaatcactggaaaatgctcccctcaaacaaaggtcaaaattaatttaacaatactgttgtgcctcacagacaaatacttctttcagaatctacacagctccttctcttctggacaactcttctatcttcacttacrgaaaacagtattcaaaaatgaaaccaaaagaacgcatggaaaacatcctagctcttaaacacaacacagacacaccccaacaaatgtgccctcttccccatcttcccagttcagaacacctggagaactgtggtgctgccgccaaaggtctgcatcccctccaatccaaatcctaccacaggaagaaacccagagccgtctccactccctctgccagggcaatattcctaatctgaataccacaatgtatatacttattctttatacatggtagttaggtatagctgaattaaggctctaggaaaaatatttaatatat

SEQ ID NO: 614011 - DNA, 596 bp, Homo sapiens
ggaatattaaccttggcttgaaaatcgtgataagagcagagcctcacttgagaggtacactaagaagaaccaaccatgtggaagaaaggtgcatagaagctcatgtgagtaagtagaactctaccagttgtaggaggctcatcattccctcaaaccccagtccagaatagccgcaaaataggtatcatgcrccatactatattttcaccacaaatctgtaaataacgttttttgttatgggatcccacatgaaatagaaacctaaatgtttcttgatattaatggaactctaccctactgcaaacataatttgttaattctcatctctgtgccttattcaaagatgttctgtctaaaacggacttctttcttgtatctgccagtgcatatcatgtttttcataatctagctcaagattctgatctactgaggctgccttgatgaatcttccccccaaatgatcacttcattgctttgaataaataatgtaagaggtatagctgtaatacgttatccacaacttgattttcagtgtccttcagagcttacagttttcttatatttctatctgttttcccaaatagagtattaatttc

SEQ ID NO: 614012 - DNA, 596 bp, Homo sapiens
ggaatattaaccttggcttgaaaatcgtgataagagcagagcctcacttgagaggtacactaagaagaaccaaccatgtggaagaaaggtgcatagaagctcatgtgagtaagtagaactctaccagttgtaggaggctcatcattccctcaaaccccagtccagaatagccgcaaaataggtatcatgcaccatactatattttcaccacaaatctgtaaataacgttttttgttatgggatcccacatgaaatagaaacctaaatgtttcttgatattaatggaactctaccctactgcaaacataatttgttaattctcatctctgtgccttmttcaaagatgttctgtctaaaacggacttctttcttgtatctgccagtgcatatcatgtttttcataatctagctcaagattctgatctactgaggctgccttgatgaatcttccccccaaatgatcacttcattgctttgaataaataatgtaagaggtatagctgtaatacgttatccacaacttgattttcagtgtccttcagagcttacagttttcttatatttctatctgttttcccaaatagagtattaatttc

SEQ ID NO: 614013 - DNA, 596 bp, Homo sapiens
ggaatattaaccttggcttgaaaatcgtgataagagcagagcctcacttgagaggtacactaagaagaaccaaccatgtggaagaaaggtgcatagaagctcatgtgagtaagtagaactctaccagttgtaggaggctcatcattccctcaaaccccagtccagaatagccgcaaaataggtatcatgcaccatactatattttcaccacaaatctgtaaataacgttttttgttatgggatcccacatgaaatagaaacctaaatgtttcttgatattaatggaactctaccctactgcaaacataatttgttaattctcatctctgtgccttattcaaagatgttctgtctaaaacggacttctttcttgtatctgccagtgcatatcatgtttttcataatctagctcaagattctgatctactgaggctgccttgatgaatcttccccccaaatgatcacttcattgctttgaataaataatgtaagaggtatagctgtaatacgttatccacaacttgattttcartgtccttcagagcttacagttttcttatatttctatctgttttcccaaatagagtattaatttc

SEQ ID NO: 614014 - DNA, 402 bp, Homo sapiens
tggattcctgtgtatcaaaaataaaaagcaaattttaattactgattccttgtatcccaataaactaaccaccttctaaagcaaagtcaattagaacaggttttgttycaatacaacatagttgaaatgagtaaacctgtcttgtaaaatacatcgtaaatttgtagacaaactagtatgtcttgggtttgcttcaaaataatctaggtgtggggtccatgagttgataaatgatgaagctaggtgataagtacatgggattccattgggcctttatttctacagtaataatgtttcccagttcattaatctaaatattaaataaccagggagttagaaagttaaggcaaggagataagtaaggaactgtacacactttttttgtttgttttttgagatgga

SEQ ID NO: 614015 - DNA, 402 bp, Homo sapiens
tggattcctgtgtatcaaaaataaaaagcaaattttaattactgattccttgtatcccaataaactaaccaccttctaaagcaaagtcaattagaacaggttttgtttcaatacaacayagttgaaatgagtaaacctgtcttgtaaaatacatcgtaaatttgtagacaaactagtatgtcttgggtttgcttcaaaataatctaggtgtggggtccatgagttgataaatgatgaagctaggtgataagtacatgggattccattgggcctttatttctacagtaataatgtttcccagttcattaatctaaatattaaataaccagggagttagaaagttaaggcaaggagataagtaaggaactgtacacactttttttgtttgttttttgagatgga

SEQ ID NO: 614016 - DNA, 402 bp, Homo sapiens
tggattcctgtgtatcaaaaataaaaagcaaattttaattactgattccttgtatcccaataaactaaccaccttctaaagcaaagtcaattagaacaggttttgtttcaatacaacatagttgaaatgagtaarcctgtcttgtaaaatacatcgtaaatttgtagacaaactagtatgtcttgggtttgcttcaaaataatctaggtgtggggtccatgagttgataaatgatgaagctaggtgataagtacatgggattccattgggcctttatttctacagtaataatgtttcccagttcattaatctaaatattaaataaccagggagttagaaagttaaggcaaggagataagtaaggaactgtacacactttttttgtttgttttttgagatgga

SEQ ID NO: 614017 - DNA, 402 bp, Homo sapiens
tggattcctgtgtatcaaaaataaaaagcaaattttaattactgattccttgtatcccaataaactaaccaccttctaaagcaaagtcaattagaacaggttttgtttcaatacaacatagttgaaatgagtaaacctgtcttgtaaaatacatcgtaaatttgtagacaaactagtatgtcttgggtttgcttcaaaataatctaggtgtggggtccatgagttgataaatgatgaagctaggtgataagtacatgggattccattgggcctttatttctacagtaataatgtttcccagttcattaatctaaatattaaataaccagggagttagaaarttaaggcaaggagataagtaaggaactgtacacactttttttgtttgttttttgagatgga

SEQ ID NO: 614018 - DNA, 551 bp, Homo sapiens
gtcttccacaatggttgaactagtttgcagtcccaccaacagtgtaaaagcattcctrtttctccacatcctctccagcacctgttgtttcctgactttttaatgattgccattctaactggcatgagatggtatctcattgtggttttgatttgcatttctctgatggccagtgatgatgagcattttttcatgtgtctattggcttctaaggtagtatttttaagcagatgggccaagaaacattaatgtaacaggaatggcttatgggtaggctgccagtcatctggatgcccctgtctgacatcggtgtctgtgctcattctgattggtaggtgcctgtgcagtaaaagttgttagtaatgtatttgctctggctatagatatgcagaagtattgagccctcagccctcagggcagctggaggtcctgagcctgccatttctaatcacaaaccaccctattcatttttcatgatatgaagacaaatattaacttttatgagaaacaataacatctctttcagagctaacattctgttaatctgtaag

SEQ ID NO: 614019 - DNA, 551 bp, Homo sapiens
gtcttccacaatggttgaactagtttgcagtcccaccaacagtgtaaaagcattcctatttctccacatcctctccagcacctgttgtttcctgactttttaatgattgccattctaactggcatgagatggtatctcattgtggttttgatttgcatttctctgatggccagtgatgatgagcattttttcatgtgtctattggcttctaaggtagtatttttaagcagatgggccaagaaacattaatgtaacaggaatggcttatgggtaggctgccagtcatctggatgcccctgtctgrcatcggtgtctgtgctcattctgattggtaggtgcctgtgcagtaaaagttgttagtaatgtatttgctctggctatagatatgcagaagtattgagccctcagccctcagggcagctggaggtcctgagcctgccatttctaatcacaaaccaccctattcatttttcatgatatgaagacaaatattaacttttatgagaaacaataacatctctttcagagctaacattctgttaatctgtaag

SEQ ID NO: 614020 - DNA, 619 bp, Homo sapiens
  misc_feature 133, 328: n = A,T,C or G
attcacgacgttatttatatgtgtgtttgcatatgtggcatgaaatctgtcatatatataaaggatatatgtttaaccaaaaggaagaaaaacaccataccctttgttattttagaaaagcaacttacaattngcataatcaaaccctaatccgttgttttgatataaattttctgctttattagtgagttggctttgaggaaatgtgtatttccacaggtaaaacaaggtatgtgttaatttcttgagcaagtaggattccagtatcagaattcattctcaaatgaattatcttaaataacgcatagcacattacttaatcttatanggaacttattattaggatcttcattaataaatatttatttataaatattgctgtgctgttaagggcactgacctttgtccattatatatatctatatctatgtatatatacaagtgtatctatatatacattatagctatataatgatatatcatgatataaaatcatattaaataatataaagtgaaataatgtawaatgtataccctatatctatatctatatacaagtatataatactatatatatacaagtgtttatatacaagtgtatatattataatggtaaaag

SEQ ID NO: 614021 - DNA, 619 bp, Homo sapiens
  misc_feature 133, 328: n = A,T,C or G
attcacgacgttatttatatgtgtgtttgcatatgtggcatgaaatctgtcatatatataaaggatatatgtttaaccaaaaggaagaaaaacaccataccctttgttattttagaaaagcaacttacaattngcataatcaaaccctaatccgttgttttgatataaattttctgctttattagtgagttggctttgaggaaatgtgtatttccacaggtaaaacaaggtatgtgttaatttcttgagcaagtaggattccagtatcagaattcattctcaaatgaattatcttaaataacgcatagcacattacttaatcttatanggaacttattattaggatcttcattaataaatatttatttataaatattgctgtgctgttaagggcactgacctttgtccattatatatatctatatctatgtatatatacaagtgtatctatatatacattatagctatataatgatatatcatgatataaaatcatattaaataatataaagtgaaataatgtataatgtatamcctatatctatatctatatacaagtatataatactatatatatacaagtgtttatatacaagtgtatatattataatggtaaaag

SEQ ID NO: 614022 - DNA, 471 bp, Homo sapiens
ctttgtcacttacatgattgcaaataatttttctgtggcttgctttttactctcagtggtatctttgatgaagagttattgtaatcaaattcatcaatcttttcctttatggttaatggtatttgttctctatttaataagtttttcctttccycaattgtttcctctgaggatactttctatattatcttccagaagctttattgttttgccttccacatttagctgtatagtcctccaggaattgatttctgtgtatggagtaaagtaaagatcaaatttcattttttaaacatatagatattcatttgttctagcatcatttattggaaaccatcttttcacaattgttttgagtgctatctttatcataaatctatctttatcataaatcaaggtccatttgtgcatgactctcttgtctatttcttggccttctattctgttggttgatttgtatctccttgagcc

SEQ ID NO: 614023 - DNA, 471 bp, Homo sapiens
ctttgtcacttacatgattgcaaataatttttctgtggcttgctttttactctcagtggtatctttgatgaagagttattgtaatcaaattcatcaatcttttcctttatggttaatggtatttgttctctatttaataagtttttcctttcctcarttgtttcctctgaggatactttctatattatcttccagaagctttattgttttgccttccacatttagctgtatagtcctccaggaattgatttctgtgtatggagtaaagtaaagatcaaatttcattttttaaacatatagatattcatttgttctagcatcatttattggaaaccatcttttcacaattgttttgagtgctatctttatcataaatctatctttatcataaatcaaggtccatttgtgcatgactctcttgtctatttcttggccttctattctgttggttgatttgtatctccttgagcc

SEQ ID NO: 614024 - DNA, 471 bp, Homo sapiens
ctttgtcacttacatgattgcaaataatttttctgtggcttgctttttactctcagtggtatctttgatgaagagttattgtaatcaaattcatcaatcttttcctttatggttaatggtatttgttctctatttaataagtttttcctttcctcaattgtttcctctgaggatactttctatattatcttccagaagctttattgttttgccttccacatttagctgtatagtcctccaggaattgatttctgtgtatggagtaaagtaaagatcaaatttcattttttaaacatatagatattcatttgttctagcatcatttattggaaaccatcttytcacaattgttttgagtgctatctttatcataaatctatctttatcataaatcaaggtccatttgtgcatgactctcttgtctatttcttggccttctattctgttggttgatttgtatctccttgagcc

SEQ ID NO: 614025 - DNA, 471 bp, Homo sapiens
ctttgtcacttacatgattgcaaataatttttctgtggcttgctttttactctcagtggtatctttgatgaagagttattgtaatcaaattcatcaatcttttcctttatggttaatggtatttgttctctatttaataagtttttcctttcctcaattgtttcctctgaggatactttctatattatcttccagaagctttattgttttgccttccacatttagctgtatagtcctccaggaattgatttctgtgtatggagtaaagtaaagatcaaatttcattttttaaacatatagatattcatttgttctagcatcatttattggaaaccatcttttcacaaytgttttgagtgctatctttatcataaatctatctttatcataaatcaaggtccatttgtgcatgactctcttgtctatttcttggccttctattctgttggttgatttgtatctccttgagcc

SEQ ID NO: 614026 - DNA, 586 bp, Homo sapiens
tgttgcgatatactgttgtattgggggttccccaaaaccaccctcagattggatgaygtactaggagaactcaatatatattcattctcctggctaggatttattacagtgaaaggatgcagagcaagatcagcaaggaaaaagacacatggaacaaagtctggaggaaaccaggcacaagcttccaagacttgtctctcagcagagtcacagaggatgtgcttaatcccccagcaatgagttgtgacaacacctataaaatgttatctggcaggggaactaagtagactcagtgcctatgggttatattgaggatgcgtgggtcatgaaggcaccctttgcctagcccagactaccagagtcccagactacaaggaaagcaggtgtacaccataaaccacattgattgtgcaaatagttgagcacagtgagtcagtattatcagagtgtttaagaacactcccaaaatccaagctctcagacatctgacaacctcatagcagatcttctaaaagatagcagtcaggtctgctatgttaactcttctgcacaattgacctagatttggtttgctagtgtgatgttt

SEQ ID NO: 614027 - DNA, 586 bp, Homo sapiens
tgttgcgatatactgttgtattgggggttccccaaaaccaccctcagattggatgacgtactakgagaactcaatatatattcattctcctggctaggatttattacagtgaaaggatgcagagcaagatcagcaaggaaaaagacacatggaacaaagtctggaggaaaccaggcacaagcttccaagacttgtctctcagcagagtcacagaggatgtgcttaatcccccagcaatgagttgtgacaacacctataaaatgttatctggcaggggaactaagtagactcagtgcctatgggttatattgaggatgcgtgggtcatgaaggcaccctttgcctagcccagactaccagagtcccagactacaaggaaagcaggtgtacaccataaaccacattgattgtgcaaatagttgagcacagtgagtcagtattatcagagtgtttaagaacactcccaaaatccaagctctcagacatctgacaacctcatagcagatcttctaaaagatagcagtcaggtctgctatgttaactcttctgcacaattgacctagatttggtttgctagtgtgatgttt

SEQ ID NO: 614028 - DNA, 586 bp, Homo sapiens
tgttgcgatatactgttgtattgggggttccccaaaaccaccctcagattggatgacgtactaggagaactcaatatatattcattctcctggctaggatttattacagtgaaaggatgcagagcaagatcagcaaggaaaaagacacatggaacaaagtctggaggaaaccaggcacaagcttccaagacttgtctctcagcagagtcacagaggatgtgcttaatcccccagcaatgagttgtgacaacacctataaaatgttatctggcrggggaactaagtagactcagtgcctatgggttatattgaggatgcgtgggtcatgaaggcaccctttgcctagcccagactaccagagtcccagactacaaggaaagcaggtgtacaccataaaccacattgattgtgcaaatagttgagcacagtgagtcagtattatcagagtgtttaagaacactcccaaaatccaagctctcagacatctgacaacctcatagcagatcttctaaaagatagcagtcaggtctgctatgttaactcttctgcacaattgacctagatttggtttgctagtgtgatgttt

SEQ ID NO: 614029 - DNA, 586 bp, Homo sapiens
tgttgcgatatactgttgtattgggggttccccaaaaccaccctcagattggatgacgtactaggagaactcaatatatattcattctcctggctaggatttattacagtgaaaggatgcagagcaagatcagcaaggaaaaagacacatggaacaaagtctggaggaaaccaggcacaagcttccaagacttgtctctcagcagagtcacagaggatgtgcttaatcccccagcaatgagttgtgacaacacctataaaatgttatctggcagggraactaagtagactcagtgcctatgggttatattgaggatgcgtgggtcatgaaggcaccctttgcctagcccagactaccagagtcccagactacaaggaaagcaggtgtacaccataaaccacattgattgtgcaaatagttgagcacagtgagtcagtattatcagagtgtttaagaacactcccaaaatccaagctctcagacatctgacaacctcatagcagatcttctaaaagatagcagtcaggtctgctatgttaactcttctgcacaattgacctagatttggtttgctagtgtgatgttt

SEQ ID NO: 614030 - DNA, 563 bp, Homo sapiens
ctcccccagtacatttcaaaagttgaccaatctccaaattgcccatatagctgacaagttcctgtggaagtcctcataccttgctactctcagataattaagcatttgtttatcaactgtaagcaatcttaccatctaattcagtattattcaatgtattatccatggaatggtagtcttctaagatactctgggggaagagagtcatgtggttgaataagattggaaaatactatgtactagtttccttgcctgagatttatgatactcaaaattcttcagaaaagagtcatgtataggyacaattttccaggtttctttcatcctagaactcccttttctacaaaaaaaaaaaaaaaaaatctattagtgtcaagtagtattttgaaaaaggctgatctagttaaggtgaccaaccattcagtttgtgtgggacttagggggtttccaggatgttggactctcagtgttaaaaccatgaaagccctgggtaaacaaggaaaaattagtcagcacagatttctatctaaacttcctctccttgaactacaaaacactgctca

SEQ ID NO: 614031 - DNA, 563 bp, Homo sapiens
ctcccccagtacatttcaaaagttgaccaatctccaaattgcccatatagctgacaagttcctgtggaagtcctcataccttgctactctcagataattaagcatttgtttatcaactgtaagcaatcttaccatctaattcagtattattcaatgtattatccatggaatggtagtcttctaagatactctgggggaagagagtcatgtggttgaataagattggaaaatactatgtactagtttccttgcctgagatttatgatactcaaaattcttcagaaaagagtcatgtataggtacaattttccaggtttctttcatcctagaactcccttttytacaaaaaaaaaaaaaaaaaatctattagtgtcaagtagtattttgaaaaaggctgatctagttaaggtgaccaaccattcagtttgtgtgggacttagggggtttccaggatgttggactctcagtgttaaaaccatgaaagccctgggtaaacaaggaaaaattagtcagcacagatttctatctaaacttcctctccttgaactacaaaacactgctca

SEQ ID NO: 614032 - DNA, 580 bp, Homo sapiens
tgctattgtcattgttttatagataggcaattgattttcagagtccttaagacatgtgcccaatgtcgcagtctagtaataagtctggttccatcatctctacttttgcccactataccatacggcctaatatttctaaatagggactattcagaaatctcactttcatttaagaaattaagttttaggaaggtgattaagstttaagaaagcacaaaataaatgttacatccttcatattttccagttgagtagatgccaggctgggagtcagcctcactggaaaagaataatttgtgtgataatacacaatgaactggaccactctcgtggtattttgcagaactttctgtgtatttttttttaaatctaagtttgtttctaaatacataaatctctgagaaagcccgtgagaagattccactaaggcagcaacaaagacttctgttccactggactttttttaggtaaatggaaaaaaaaaagaagtggaagcaaacaactgaacattcgtaagatgctatctctcaataattacgtaatattatggaaatagactctaggcaacattctaaaattt

SEQ ID NO: 614033 - DNA, 563 bp, Homo sapiens
aaggaaggatcctgcttagccagaagaagcaaaataatgtatagtaatgaagccagtcttaaacacagttcaagaaagacacagctttagctataaggcactcaaacgtgcaggatgctaagtgcctttctatgccatttattcattcaattccctggcaataaactactaagaaaattttaaactaataatgcattttacaggttgaatctgaggccctgattttccagaaaaactttccagaaaaacatggtaaggcacagcaatyggaggaaaactgtccaagcttctggccatcaagtattacacatttatttatttacttagtgcttccaagttcaggaggcagaatatattgctattgcctttaaagggaatatcttcaatgttttgaccgctgctaacaagatgattagcatgtctttaaaccatctttattaagcagatgtttgccctggcatttttccagcccttcttgggtcatcaagcctaatattctcttttcatttgttggtatgctgttcatttctggtcctcagtgaggggactgcttcttgaccttg

SEQ ID NO: 614034 - DNA, 563 bp, Homo sapiens
aaggaaggatcctgcttagccagaagaagcaaaataatgtatagtaatgaagccagtcttaaacacagttcaagaaagacacagctttagctataaggcactcaaacgtgcaggatgctaagtgcctttctatgccatttattcattcaattccctggcaataaactactaagaaaattttaaactaataatgcattttacaggttgaatctgaggccctgattttccagaaaaactttccagaaaaacatggtaaggcacagcaattggagraaaactgtccaagcttctggccatcaagtattacacatttatttatttacttagtgcttccaagttcaggaggcagaatatattgctattgcctttaaagggaatatcttcaatgttttgaccgctgctaacaagatgattagcatgtctttaaaccatctttattaagcagatgtttgccctggcatttttccagcccttcttgggtcatcaagcctaatattctcttttcatttgttggtatgctgttcatttctggtcctcagtgaggggactgcttcttgaccttg

SEQ ID NO: 614035 - DNA, 563 bp, Homo sapiens
aaggaaggatcctgcttagccagaagaagcaaaataatgtatagtaatgaagccagtcttaaacacagttcaagaaagacacagctttagctataaggcactcaaacgtgcaggatgctaagtgcctttctatgccatttattcattcaattccctggcaataaactactaagaaaattttaaactaataatgcattttacaggttgaatctgaggccctgattttccagaaaaactttccagaaaaacatggtaaggcacagcaattggaggaaaactgtccaagcttctggccatcaagtattacacatttatttatttacttagtgcttccaagttcaggaggcagaatatattgctattgcctttaaagggaatatcttcaatgttttgaccgctgctaacaagatrattagcatgtctttaaaccatctttattaagcagatgtttgccctggcatttttccagcccttcttgggtcatcaagcctaatattctcttttcatttgttggtatgctgttcatttctggtcctcagtgaggggactgcttcttgaccttg

SEQ ID NO: 614036 - DNA, 622 bp, Homo sapiens
gtttaatcaataaaattgaccaggaaagaattcaaaagccacaccgtctgattctatacttcatatatggggcagacaccacgctcttgtcttgtgtttaatctacagagtctctgtgaaaactgacttttccttccctcatgaaattttaaattacagcctgccttatatttagtgggctgcagggttactatggcaatcagctcctgaagtrtagggattttatctgagcattttagtgaagagtacattagaggtcagaggtttgtctctgttcctcttctacacattgggaccctttccccaaatggatggtcagatgcatgctctcaattgcctcataaatacaccacacataatttataaatcagccggacactaggaatgggctcttttgtataaaggaaatgaagtatacttcagaagtaaatctgtgagatttccaaaaatgggagaaacagttcagtgtcaacacatatagacatacatataaacacatacacatgcatgcatgtgcatacagataaacacacagcaactaatatttattaagtgtttcctacatatcaggttctaagaacttcacatgcattaactcaattcccttaataaccatatatgg

SEQ ID NO: 614037 - DNA, 561 bp, Homo sapiens
ggacgaaaagaagaaagagaaaacaagggctgtggagttttcatgggttgagaaaggcagcttatactgtgtggggcagtggactgggaagaacaaacagaaaaacaagattttaagattaccagagatttgtggtccctttcataatattgaggaatgctagcttgagtagttttgaagttattcttggttgcctgggttgtagtcatttaagcacaattgctctgaaattgatctatgagggtaacaggtttatgagccttacaacaaccattggcttcatcttcttagcagtggaagactgcatgtggaccttcccaatgcatctcatatgtgagactcaaccaggttttaataggtgagcagtgagctgtgtagctcaactggttgaaatctagtgatgaaatggtatcagcaaatggaattgggtcttctgaacactgtcttgttaagtaaatacctatgtcaaaacttccttcaaagctctgagttagaagggaaaacacacctcctgtcattyataagcctgagctctgggctctggattgtggtctgagggaa

SEQ ID NO: 614038 - DNA, 592 bp, Homo sapiens
ctccctgcacatcagttcctcaactcagtcagcaagacctgctccttgggctatttcctatggagataaggtggggaatagtaattcccactttttcactccatctcacttatggtcgacttttttttgtgtgtgtgtgagtttcagcaaaattgttaacttttctacatgtcagtcaactactcaataaatgaagctaaaaaaccaaccttcaaggggtayttatgaggatgaaagtagatgtcttctaaaatgaataaaatttctcccatagcaaatattcttaataagtagctattagttttgagtcttccttgtcaacatttgcaatgtggctaaatatgtctgtagtcaggatatttccctccctcccgtctttccttcctctcttccttgcttctttcctcccttccctcctttcctgagacaggttctcactatgttacctaggctgggctcaaacgatccctccaggctcagccttttgagtagctgagaatataggtatgtgtcactgtgcctggctgactttaaaagctagttgctttaagtatagattagactttcaattctagctttgtaagtactgtac

SEQ ID NO: 614039 - DNA, 573 bp, Homo sapiens
gggaatagtaattcccactttttcactccatctcacttatggtcgacttttttttgtgtgtgtgtgagtttcagcaaaattgttaacttttctacatgtcagtcaactactcaataaatgaagctaaaaaaccaaccttcaaggggtacttatgaggatgaaagtagatgtcttctaaaatgaataaaatttctcccatagcaaatattcttaataagtagctattagttttgagtcttccttgtcaacatttgcaatgtggctaaatatgtctgtagtcaggatatttccctccctcccgtctttccttcctctcttccttgcttctttcctcccttccctcctttccygagacaggttctcactatgttacctaggctgggctcaaacgatccctccaggctcagccttttgagtagctgagaatataggtatgtgtcactgtgcctggctgactttaaaagctagttgctttaagtatagattagactttcaattctagctttgtaagtactgtaccccccaaacagctaagacaatagctctagatcactgttagattaaataaacaag

SEQ ID NO: 614040 - DNA, 580 bp, Homo sapiens
ctaggaacctcaatcaagccacaagtctgcacagatcattccctattgctatagtgcatactaagcaatcattcctttgaatgaattgttagtattaaaatcactctccttcagcaaatagcactgcttacttcattttaactgatctttttacacatacattgtccaactgttaggctgagtcttatgaaattgccaatattctaccatttttgacctacraaaacagcatttcaacaagattcaacataatagaatgagcattccctgaaggcaggtatcacatctaatgtagctttgccactagtttctgactgattaaatatctgttcatgatttctgtatatattatcatcactcttatttaaacagatagaggatagacacaatggcttatgttcctcagcacattggatatattttagaaatgttgctgagcttcagtatctgcaaaaagcatcacttcagtggtctcaataccccccccccttttatttttaacttcagtagtgaactttacccatcgaagcttccagccaatggaatataatatatgaagtagtcaattttaaaaatttgg

SEQ ID NO: 614041 - DNA, 524 bp, Homo sapiens
caggtactcacactactacataaggactctggttgaatacaatgaacggcaacaacaacaacaacaaaggatttttttccatactgaggtgagttattgagggtgtctacagccttctctgaagagcttagagagtaatttttctctcccggatgatttgcttgtggctttggtctttttacctcagtgcaagcaagtggataggtgacctttcaaggttattccataagccctsgcaatctgtgttcagatgataaatcaaaacaaagacagttcagaggttcgccagggctctttaggggcagccacaattagcatagctctctcaagacccggcagatgctaggcgtcaaggcatccttatttttagaacactggaggtggttgcccccaaaaaggatatagacagaaagaggagctgaccatgtcaagggcaacttcaaacacataggaacacaagtaaaacattgatcatgcaaacatagggaccgtataactttacatttggcagccattgccactag

SEQ ID NO: 614042 - DNA, 524 bp, Homo sapiens
caggtactcacactactacataaggactctggttgaatacaatgaacggcaacaacaacaacaacaaaggatttttttccatactgaggtgagttattgagggtgtctacagccttctctgaagagcttagagagtaatttttctctcccggatgatttgcttgtggctttggtctttttacctcagtgcaagcaagtggataggtgacctttcaaggttattccataagccctgrcaatctgtgttcagatgataaatcaaaacaaagacagttcagaggttcgccagggctctttaggggcagccacaattagcatagctctctcaagacccggcagatgctaggcgtcaaggcatccttatttttagaacactggaggtggttgcccccaaaaaggatatagacagaaagaggagctgaccatgtcaagggcaacttcaaacacataggaacacaagtaaaacattgatcatgcaaacatagggaccgtataactttacatttggcagccattgccactag

SEQ ID NO: 614043 - DNA, 630 bp, Homo sapiens
ccccctctttttctttgccttttcacatgcatccaaagttaagaaatagcttttctttctttgttgaggtaatattttgaacttggattgtggataatttcagtattattgttggtttctcatgaacaatatccatatgaattctcctacgtgttgaaatcctatctatcaataaaagcccaggctgggcatggtgtctcatgcctgtaatcccaacatattgggaggctgaggtggaggattgcttgagcccaggaggttgaggctacagtgattcatgatcataccactgcactccagccttccagcctgggtaacatagtgagaccctgtcacatacacaaaaaagttcatatctagccacaactttcttatgaaatctttcctgtcgaaaacaaatcytaaatggatatattttcctctttttagaatgcctgcctctttaaatataggttaataattggtaatttattagtgtctaaatatttgtgtgctagtcttcactactttaattataattgctgaaagaaaggtaatcttacattttaacatttacccctagtacctagtaaatggctgcaaacataaaagcaattgaatcaaaccgacacagaacattttatccaactg

SEQ ID NO: 614044 - DNA, 589 bp, Homo sapiens
aatatcacatctccataaatatgtagaattagtatgtatcaataaagaataaaaattaaaacacttaaagagcccaataaatgcttttaaaaatttgtattttcacatacacacatgacatacctattattttcagctttagctgacacaggtttcaaaaattctcttatgtcaaattgaatttttaaactccaaaagaggaatttaatattcatatacacatattcagcaagattccttacaataccatcagttacttctgacatataatgactcttgctggctttatactgaatttaatcaaagcccagtacaactttctgcaacattggtaactgggtcaaatgcataggccactcaaggtctggrctaattacctacatttgtaccacctggcagatgtgaaagacttaagatgtgcacgtgctcattaattgagggtcaagctgttctttgtagaattcagcaaaacttcagctgaaatataatgccattcattttgcggtaaaattcccaggttattaagcactttgagatgtgctcccccctccccccgtcataagtgagaaatctgagtccagatgaactt

SEQ ID NO: 614045 - DNA, 589 bp, Homo sapiens
aatatcacatctccataaatatgtagaattagtatgtatcaataaagaataaaaattaaaacacttaaagagcccaataaatgcttttaaaaatttgtattttcacatacacacatgacatacctattattttcagctttagctgacacaggtttcaaaaattctcttatgtcaaattgaatttttaaactccaaaagaggaatttaatattcatatacacatattcagcaagattccttacaataccatcagttacttctgacatataatgactcttgctggctttatactgaatttaatcaaagcccagtacaactttctgcaacattggtaactgggtcaaatgcataggccactcaaggtctgggctaattacctacatttgtaccacctggcagatgtgaaagacttaagatgtgcacgtgctcattaattgagggtcaagctgttctttgtagaattcagcaaaacttcagctgaaatataatgycattcattttgcggtaaaattcccaggttattaagcactttgagatgtgctcccccctccccccgtcataagtgagaaatctgagtccagatgaactt

SEQ ID NO: 614046 - DNA, 596 bp, Homo sapiens
attataatttgtacgatatctgtcttggaacatcttgaattggccccttattaatctagcttttcttgatacagtggtttgtattaaaaatgaagtatcgacctaatcctatataataacarttaatcatttcccatgataagtttttgatctttgtttttcttatatactttaaaataccaggcaagataaattatattatttaaatttaatgtatatttaaatagacagtagcctgttagttcattaaaaggtagagatttttatccgattcatttttttctctcacagcttaaagcacagtattgtacaaatagtatatgctcaataaaagttaattgaattgcattgatcttagtttcaaaataatcaattactagaagacgtaccttcttgataaatgtaagccagtttgtcacataggttctgacacttatgagtcatttagtgtatttatcaattaactgcgttgatggtaaggagtgtgatatattagttgatgacatatcaactaatagttgataaatagtgtgataagtagttttttttccccagagtttgaaacattctctggcttatagtggatactcaacaaa

SEQ ID NO: 614047 - DNA, 593 bp, Homo sapiens
tcatttttttctctcacagcttaaagcacagtattgtacaaatagtatatgctcaataaaagttaattgaattgcattgatcttagtttcaaaataatcaattactagaagacgtaccttcttgataaatgtaagccagtttgtcacataggttctgacacttatgagtcatttagtgtatttatcaattaactgcgttgatggtaaggagtgtgatatattagttgatgacatatcaactaatagttgataaatagtgtgataagtagttttttttycccagagtttgaaacattctctggcttatagtggatactcaacaaaggcacctgaacaaattaatggagttcaagagaaagcaaaattgggctgggttttgaagacaggtaagagagctgatgtagcagaatgagaaagagacaccaaaatagggtgatggtttgaaatggaggtatgggtagagatagaaatgttggagaatgcggcagggatctctgttttggtagcaggtatgtatataagaggagttccttccagaaatgggtttgtgtttttatcgatatgatttttaaaaccatcaaccagcccagtaa

SEQ ID NO: 614048 - DNA, 584 bp, Homo sapiens
tgtctggaaaaatgtcaataaatattacttgtgatattttcaattttcaaagcaattattacattargaacacaggttttggaaagaatcacaactaatgtccctgaaagggtaatgatgccaaggatagttgtttttaataaaaagttagaatgtacatcgtgacaaactaacaatcacaattagagctatctttgtcccttttctaccctcaaaacaacctgagactcaggtgataatcccagtttaccttaatgttaataatttttagttattaatttgttcattttacaaatatatattggatataactatgcaccctgaactgtgctgaatgtttcagatgcaatggagagcaaagcacttgaactctgatttacaagaggagaccaaataatcacacaaatatttaatgagaaactgtgctaactaaccgttatgaaggaaaagtaaaagggacaaaaaaaaaaaaaaaagatacctcagggatatattaaggaaatgtacctattctgaagtttaatggaggcttccttggagaagtggcatttgatcctgattttgtgaccaatgacctgcatttc

SEQ ID NO: 614049 - DNA, 526 bp, Homo sapiens
cataattcactaataaagtccaatttcaaataccactatattgcttgatatgtggtgcaggtattttaacagaatatccttgaaatttctccctccyattcttcgtgacattgctatcattcatttcactcgtcctatcttctataatcactcaatacatcattgctactattaaacagttcttttatatcaattaagattagaagtaagaaaaataaaattttatccttccttattccttctgttacactcttcttaatataggtatgagtttctgacctatataatttccttttccctgaaggatttattttaacatctgcagagtggtcttctggtcatgaaatccctcagcttttgctggtctgaaaaactaattctcttttgaggttgagtttcactggatattctatatttgtggactttttccctttcaacagtttaaatattttttatttcattctgttcttgcttgcataactctcttctttttctctctccttccttcctttccttcattttgata

SEQ ID NO: 614050 - DNA, 526 bp, Homo sapiens
cataattcactaataaagtccaatttcaaataccactatattgcttgatatgtggtgcaggtattttaacagaatatccttgaaatttctccctcctattcttcgtgacattgctatcattcatttcactcgtcctatcttctataatcactcaatacatcattgctactattaaacagttcttttatatcaattaagattagaagtaagaaaaataaaattttatccttccttattccttctgttacactcttcttaatataggtatgagtttctgacctatataatttccttttccctgaaggatttattttaayatctgcagagtggtcttctggtcatgaaatccctcagcttttgctggtctgaaaaactaattctcttttgaggttgagtttcactggatattctatatttgtggactttttccctttcaacagtttaaatattttttatttcattctgttcttgcttgcataactctcttctttttctctctccttccttcctttccttcattttgata

SEQ ID NO: 614051 - DNA, 408 bp, Homo sapiens
gttatttgtctgggacttggttaagaagatgaggtattaggcattatacacacaatatataggattaggatatgtatttargaatcatttggaggcatttgtggtattgtaaaaaaaaaaaaaaaaaaaacaaaaaacaaaacaaaaaaaccactagatttaaatagtagggttaaatttacagactttgccactttccagctttgaggccctgggcaggtcactgcccctgtctgagtctcagtttcctcttctctgaaatcacaataggttgttgcgagtattaaaggaaaggctatgtacattttataagtgtctagacaaatacaaggtacaattacacaggaaaggtgatggtgaatatgtgagaggagagcaaatgagattgccaagggagtgagcgcaagg

SEQ ID NO: 614052 - DNA, 592 bp, Homo sapiens
tgaacagaattagaaggcttcaggttggtagacttttaacatagcttttccacaactaggcaggtgcaatgccatcatataaaatctttatttcatcgattctcatctttcactttagcagcttttcaagctgctctacctgtcatagcaacagtgttacatcatgatgagctggtaggatattacggacatctacagtataaaaggtggaagtaggatttaggtttctatagatgctatacttgctcatatacaaatgtatatacacgtaacacccagagaagattataacaatatacataatataatcattgaaattaatgaatggtagattgatgtatccagggggttgtttccaggacccccatagataccaaaaccagawgatgctcaagtactgtataaaaaatggcatagtatttgcatgtaacctatgcatatccttccatgtcactagattacttgtaacattaaaacaatataaatgccatgcaaattgttatattgtatttgtgttttttgtattttttttctttttgaatatttttgatgagcagttggttgaatccatggatgagaatccacagatatg

SEQ ID NO: 614053 - DNA, 451 bp, Homo sapiens
cacattaaatatttgaaatgtggctactgccaattaagatatgctatatgtgtatttcactttgcagatacattgtgtttgttttctatttagtggacatttgggttgtttatagcttttttgttgttattcctagtagtgctactatgaacattcttgaacatatttcttcatgtgtttaaaagtttttctcggatggatattttcaatttttattttttatcacaactcagtgcaaaacacatcttacaatatatagaacrcgtgcacacacacagatatgtcatgaactctcctctcctctctcctgtcctctattttatcgtgaggcaaattgcataccatcttcttcaagagtccgatagtaattcttgatcctttactgttgcatataaatttcataataggcttgtcaacttccacgaagggccctgtcagcattttgattaga

SEQ ID NO: 614054 - DNA, 440 bp, Homo sapiens
taatgactagctcagcctcaacaaaaggtctgaaagtaaaattggactggaaaaatagaaggttctcagaccatacaaatgagaagttgggtgtttaagtgagacaagtgtaacatttactgcacttagytacacattaagggctctgcacacatcttgatgtatctgtgtattattcatccatgctgctgcttggcttattgtggatgaattcctatttctaaggatccgagttcaagcagtcaattcaagtgatgttaaagtaggaaaacggaagtatgggtggaataaaataaccacataatcacaacctgtgtctactccaggtacggagacaactctgaattgaacgcctagttatacaaacagtagttatgcaacaaacagcagctgtctgacttggatctatcatcttaccagggcgcactaagttgctctag

SEQ ID NO: 614055 - DNA, 440 bp, Homo sapiens
taatgactagctcagcctcaacaaaaggtctgaaagtaaaattggactggaaaaatagaaggttctcagaccatacaaatgagaagttgggtgtttaagtgagacaagtgtaacatttactgcacttagttacacattaagggctctgcacacatcttgatgtatctgtgtattattcatccatgctgctgcttggcttattgtggatgaattcctatttytaaggatccgagttcaagcagtcaattcaagtgatgttaaagtaggaaaacggaagtatgggtggaataaaataaccacataatcacaacctgtgtctactccaggtacggagacaactctgaattgaacgcctagttatacaaacagtagttatgcaacaaacagcagctgtctgacttggatctatcatcttaccagggcgcactaagttgctctag

SEQ ID NO: 614056 - DNA, 440 bp, Homo sapiens
taatgactagctcagcctcaacaaaaggtctgaaagtaaaattggactggaaaaatagaaggttctcagaccatacaaatgagaagttgggtgtttaagtgagacaagtgtaacatttactgcacttagttacacattaagggctctgcacacatcttgatgtatctgtgtattattcatccatgctgctgcttggcttattgtggatgaattcctatttctaaggatccgagttcaagcagtcaattcaagtgatgttaaagtaggaaaacggaagtatgggtggaataaaataaccacrtaatcacaacctgtgtctactccaggtacggagacaactctgaattgaacgcctagttatacaaacagtagttatgcaacaaacagcagctgtctgacttggatctatcatcttaccagggcgcactaagttgctctag

SEQ ID NO: 614057 - DNA, 408 bp, Homo sapiens
gttatttgtctgggacttggttaagaagatgaggtattaggcattatacacacaatatataggattaggatatgtatttaggaatcatttggaggcatttgtggtattgtaaaaaaaaaaaaaaaaaaaacaaaaaacaaaacaaaaaaaccactagatttaaatagtagggttaaatttacagactttgccactttccarctttgaggccctgggcaggtcactgcccctgtctgagtctcagtttcctcttctctgaaatcacaataggttgttgcgagtattaaaggaaaggctatgtacattttataagtgtctagacaaatacaaggtacaattacacaggaaaggtgatggtgaatatgtgagaggagagcaaatgagattgccaagggagtgagcgcaagg

SEQ ID NO: 614058 - DNA, 608 bp, Homo sapiens
gctatagaggtagaggaattgacctatagtatatattctacccaggaagttatcaatttggcaggaaagacagtcacatattgacagtatctatagcagagaggacttcatccaactgtgtcttgtcctctaggtagaataccacagcactactgttagcatttcctttgtaaaactgaaggtctaaaactttccaaaaaagctaccactattgttgactgaaaaatgttccctcaaaagagatccaagaccatctttgtgtctgaatctagcatctattctgtctattgcacctcataaactsttttctcagagttatgaggtggaagaggtcagcacaggttcatacaatgtggcaagaattctggaccagggtccagatcaacgtaacttagttcacaaaaattgtcagagaacagtgcagtagatagactggctgttgtcttaatgttcatactgtacggagtgagtgagctgcttggaactctttacctgtgtgcttctgtgtataaaacctgctctgaattgtccttccttgaataaaaataatgctaggtatgtagaatatagaggggtgctgggtatgtgtgcgtgtgtagttaagagct

SEQ ID NO: 614059 - DNA, 618 bp, Homo sapiens
gactgaaaaatgttccctcaaaagagatccaagaccatctttgtgtctgaatctagcatctattctgtctattgcacctcataaactgttttctcagagttatgaggtggaagaggtcagcacaggttcatacaatgtggcaagaattctggaccagggtccagatcaacgtaacttagttcacaaaaattgtcagagaacagtgcagtagatagactggctgttgtcttaatgttcatactgtacggagtgagtgagctgcttggaactctttacctgtgtgcttctgtgtataaaacctgctctgaattgtccttccttgaataaaaataatgctaggtatgtagaatatagaggggtgctgggtatgtgtgcgtgtgtagttaagagctacttagaggaaaattggctgacatggaaggctgatataatttaagtccagcccaactgagcattcagatgttttaaagtctcagttctgacttgagatgtaaaatccatcaacaagaaaaagtaaatcayggaagaaaaatatgatttatatatttgatctaatcaaatcactttatatttggcagagatgtgagcccagagaattatcagttcaggaccacacat

SEQ ID NO: 614060 - DNA, 575 bp, Homo sapiens
gtgtgcgtgtgtagttaagagctacttagaggaaaattggctgacatggaaggctgatataatttaagtccagcccaactgagcattcagatgttttaaagtctcagttctgacttgagatgtaaaatccatcaacaagaaaaagtaaatcatggaagaaaaatatgatttatatatttgatctaatcaaatcactttatatttggcagagatgtgagcccagagaattatcagttcaggaccacacatattgttagcgacatattataatttacatatattttccttttccatgacaccttaccctacaacatacaaatttatagttataattattgtaactcaaaaagtttataaactccgtagtacctggaataatattttcaaaacccatgaactactttagcatgatctttgcagtgagtcaatgaggtgcagtagaaataaaacaggtgttagattcagacagagctggttttaaagcttagctctgtgacttcctaagctgtatggytttgggcaagtaactgaacttctagattttcagtttcatcatctgtaaaatggggagaata

SEQ ID NO: 614061 - DNA, 628 bp, Homo sapiens
tgcctgggctaagcccctggtgttaatgagacactctgcagggcatcctggctgcaccaacgagacaggtagaagatgtcagtgtgtgcctcctsggcatttgaagctagcactaattttcaaatttccgtcctgcctggcaggggaaacacttcctcagacacatgataaaactgcggtaagaagtggaataacaaggctctggcaaggcctgtttcagacagccattgtgttcactagctgtgttgactgcatgccctcaacactcacacatgaataactcaagtgaactgactacctctctttactgtacacattgaggaagatttttcatctgacaagtgtagtatgtagaaggagagtatggcagtctctgcagtggttgaaggtgaggggttgagagactggaaacaaattacgtaaatgcatgtttgcttaatattagaaaaacaacactcccttgatcagaactcaaagcataaggaatgctgttctagttattaccccatttttgagaacttttctttatggaaagtttcaaacatatacaaaactatgaaagaattaaccctcatgtacccatcacccagtttcaacaatgatcaaattttgctcaatgatcaatttt

SEQ ID NO: 614062 - DNA, 628 bp, Homo sapiens
tgcctgggctaagcccctggtgttaatgagacactctgcagggcatcctggctgcaccaacgagacaggtagaagatgtcagtgtgtgcctcctcggcatttgaagctagcactaattttcaaatttccgtcctgcctggcaggggaaacacttcctcagacacatgataaaactgcrgtaagaagtggaataacaaggctctggcaaggcctgtttcagacagccattgtgttcactagctgtgttgactgcatgccctcaacactcacacatgaataactcaagtgaactgactacctctctttactgtacacattgaggaagatttttcatctgacaagtgtagtatgtagaaggagagtatggcagtctctgcagtggttgaaggtgaggggttgagagactggaaacaaattacgtaaatgcatgtttgcttaatattagaaaaacaacactcccttgatcagaactcaaagcataaggaatgctgttctagttattaccccatttttgagaacttttctttatggaaagtttcaaacatatacaaaactatgaaagaattaaccctcatgtacccatcacccagtttcaacaatgatcaaattttgctcaatgatcaatttt

SEQ ID NO: 614063 - DNA, 628 bp, Homo sapiens
tgcctgggctaagcccctggtgttaatgagacactctgcagggcatcctggctgcaccaacgagacaggtagaagatgtcagtgtgtgcctcctcggcatttgaagctagcactaattttcaaatttccgtcctgcctggcaggggaaacacttcctcagacacatgataaaactgcggtaagaagtggaataacaaggctctggcaaggcctgtttcagmcagccattgtgttcactagctgtgttgactgcatgccctcaacactcacacatgaataactcaagtgaactgactacctctctttactgtacacattgaggaagatttttcatctgacaagtgtagtatgtagaaggagagtatggcagtctctgcagtggttgaaggtgaggggttgagagactggaaacaaattacgtaaatgcatgtttgcttaatattagaaaaacaacactcccttgatcagaactcaaagcataaggaatgctgttctagttattaccccatttttgagaacttttctttatggaaagtttcaaacatatacaaaactatgaaagaattaaccctcatgtacccatcacccagtttcaacaatgatcaaattttgctcaatgatcaatttt

SEQ ID NO: 614064 - DNA, 448 bp, Homo sapiens
tagctatgagaaactacaatgttcttcccatctactacaacccacctcctgaggatttcaattcagtttgatgatgatgaaaagcaaagagttaaactatgataactcaggtttctcttcatttcctcatgtgtccctttggcaaaaagtttagacctataatgaggatgatccatgcctccactagtggacatagcttggtatgatgtgaggcatccatccgtttttgggatacctgaagttcagctaaatgttatttcatagttcacattatgaagccatttattggctaaaaccactttttaaatgagatccttttgctatttcaatagctaacttcccttagatgcagtatacgattgatattgyattgaatgctataaaagcatactgtgtgacaagaagaagagtttaacagtttaactctgtacaggaccattaagaattt

SEQ ID NO: 614065 - DNA, 656 bp, Homo sapiens
gaggtttgaggacagtagagtgtttttgagaaatctacaggaatgtggggccgctcttagagagatgagtctggaaactcagcttggattcttaccagtgttcagcactcatgggctgacattggatcccacagttagaatctcaaaaaggagatatatatgtacagctactttccttaataaaatcttcagttggcagcaaagagaatttctacaagtgagaggcttagccagactctaaaaccagactatgtttccttttttctagagtttttcttgcaaattttcattaccaccatcttggagatgatggcatgagtatacggcattgctccttttgaagtttttctttgtctgagaggcagtccatttttctattaacagttaggccaaaattgagatatttacattatttgcataagacttatctgaaagttggagaataaygaaagagaagtaactggagaatgacgtgcaactatggtttacaatggatgactggcttctatgagaatatgtcagatcacctaaatttcagaagagatgaagacatagaagaaaaaggcccttgtctcctccccagatgatcaatgacaatttctaggagtgaccatatctatgcacaatactagaaaaccacacagtgtccatcattt

SEQ ID NO: 614066 - DNA, 522 bp, Homo sapiens
cctgtgtagaagttctctcctcttcatattcctyctgtatgtatctctctgtatgtccaaatttctccttttaataaacacattagatacaggcgtaccttaatgaccacaccttaacttgaacacccttgtcatctatggagcccctatttctaaataaggtcatagttacaggtccttggggttaagaggtcaacatttttgcagagtacacaattcaacccataacagtgatatatcattaagtaagagataggcagatattagggacataaaaatacccatggcttttcctagagagtagccgtaagtgactttccttcaaaagtcttaatcttagttttcttatctctgcagtgggagtaaagcttcacagttttgtctgaagtattataataaaggaggacatataggtaatagtgatttgtaaactgtgttacaaagatactgtatataattatagttgttattaatgcatttattttatgccctatgtttcctagatttttccagaaattgaat

SEQ ID NO: 614067 - DNA, 522 bp, Homo sapiens
cctgtgtagaagttctctcctcttcatattccttctgtatgtatctctctgtatgtccaaatttctccttttaataaacacattagatacaggcgtaccttaatgaccacaccttaacttgaacacccttgtcatctatggagcccctatttctaaataaggtcatagttacaggtccttggggttaagaggtcaacatttttgcagagtacacaattcaacccataacagtgatatatcattaagtaagagataggcagatattagggacataaaaayacccatggcttttcctagagagtagccgtaagtgactttccttcaaaagtcttaatcttagttttcttatctctgcagtgggagtaaagcttcacagttttgtctgaagtattataataaaggaggacatataggtaatagtgatttgtaaactgtgttacaaagatactgtatataattatagttgttattaatgcatttattttatgccctatgtttcctagatttttccagaaattgaat

SEQ ID NO: 614068 - DNA, 581 bp, Homo sapiens
caagcctcccgagtagctgggattacaggcgccagccaccgcgcccggctaatttttttttgtatttttagtagagacggggtttcactgtggtctcgatctcctgaccttgcaatagcacccttcttacagtgttgttatgagaatcaaacaagataatacataaagtgggcttagttcatggtaaataccaaataaatagtggtcaggatttcagttattaycaatgttttcttttttccacaactattttgagaagcagtgaaatcttacatatttggccttcactgttacataattactcagacagaaatcaagctgaagttaccttgctgaacaacctttcctgtgaagttagcattactcaattagtatgattaattaacacagttaatagactagacaaaactgaaatagatttatttgttgagaaatactgactcaacaaatgtctcttttgcttacttagcttaggctaagattcaattattaggtgcatctgaaaattaaaatacttctcccaaactgaatttcttttaagaaatctacattttatactattcaatgagttagactttcct

SEQ ID NO: 614069 - DNA, 634 bp, Homo sapiens
tactcaattagtatgattaattaacacagttaatagactagacaaaactgaaatagatttatttgttgagaaatactgactcaacaaatgtctcttttgcttacttagcttaggctaagattcaattattaggtgcatctgaaaattaaaatacttctcccaaactgaatttcttttaagaaatctacattttatactattcaatgagttagactttcctctccaattaattgaaaagaataaagttttagagtctaatgcaatttccttgtctaaaatttaaaaatataataaaatccccgggcagctctcttttcaggacagggtcacrctacaccatggataatcgaattccgttgaatttgaacaatgatctcttagcctcattcatgatcttaagcagtctgtgagtgattacctaaagactgcttgaagactcttaaaccctaatgaggaatgagaattttactgaaaatgtaacaacttccttaatacatccttcataaagtcctttgcactctcagtagtctatgtaaaaatactaactagaactcaactggacttcaattatggcggtatgtcatcgaaatacatcctccttcataaagtatgtaaaaatactaactagaactta

SEQ ID NO: 614070 - DNA, 667 bp, Homo sapiens
gacaattgtattttttaatcatttttaaatactagtcttgtgaagttggccagataacagcaacctcactccatgaaccagggacaacctattagcagtcctaaaattggagccatgcagataatcacacaargaaccaaatattgttataaatgaagtatttgtgaaaggagaaaatgacaaatagggaaattttcttgtgctcccagaataaaggaaatgaggcaaggtcttaagagctacataaattaaaattcccatactgatcaaaaccatttccatcatgaataatgagaatggtgcatacactattaggccagagattggggactgggagtctgaggaggcagctagctggaacagtcttacagtgcaatcctttaagtcagggataagatcctagatttcagtccaagaagttcccataatgcgtttctacaatgtttgaaaacatattggacattaaattagttaattttatgatttgtacaccaagaagggaaggaatggcatgcttcatgtatgcctgagtaaggggtgctcgttcacatagaagcaacgtgatattcaatgttgtcaggtaggaggtgttattaaccttctctcctctcctgatgcaaaagaatattacttagctcaggaattcagatgcatttccttaatattg

SEQ ID NO: 614071 - DNA, 667 bp, Homo sapiens
gacaattgtattttttaatcatttttaaatactagtcttgtgaagttggccagataacagcaacctcactccatgaaccagggacaacctattagcagtcctaaaattggagccatgcagataatcacacaaagaaccaaatattgttataaatgaagtatttgtgaaaggagaaaatgacaaatagggaaattttcttgtgctcccagaataaaggaaatgaggcaaggtcttaagagctacataaattaaaattcccatactgatcaaaaccatttccatcatgaataatgagaatggtgcatacactattaggccagagattggggactgggagtctgaggaggcagctagctggaacagtcttacagtgcaatcctttaagtcagggataagatcctagatttcagtccaagaagttcccataatgcgtttctacaatgyttgaaaacatattggacattaaattagttaattttatgatttgtacaccaagaagggaaggaatggcatgcttcatgtatgcctgagtaaggggtgctcgttcacatagaagcaacgtgatattcaatgttgtcaggtaggaggtgttattaaccttctctcctctcctgatgcaaaagaatattacttagctcaggaattcagatgcatttccttaatattg

SEQ ID NO: 614072 - DNA, 566 bp, Homo sapiens
ttccattttatttttggttgtttatcacgaatcaaatgaaacacccactgggcatacaactgacttttattggtgacctcatgtttttataggaggagccctatggataaaaatttgagaaattcaaccaaattattgttgttgtcttattatcatacaatccacaactgcaccattttggtaacaatattgcgtttatctaattattttatttagaataatatatgtaacttatyacattaggaagttaaaactggtttgggtgaataatgaagttgaacttctattattttaaaaatatatttttttaagagaaattttaggtgcatcacaaaattgagtggaagatactaatatttccaatatagcctctgcctctgcacatacatagcctccccattatcactaacctcccatcagagagggtggtcattttttataactgatgaagccacattgacacatcattatccttcagagtccatagttaacattaagattcatttttgtcatggattttatgggttaggacaaatatataatgacatatacccagaattgtagtg

SEQ ID NO: 614073 - DNA, 566 bp, Homo sapiens
ttccattttatttttggttgtttatcacgaatcaaatgaaacacccactgggcatacaactgacttttattggtgacctcatgtttttataggaggagccctatggataaaaatttgagaaattcaaccaaattattgttgttgtcttattatcatacaatccacaactgcaccattttggtaacaatattgcgtttatctaattattttatttagaataatatatgtaacttatcacattaggaagttaaaactggtttgggtgaataatgaagttgaacttctattattttaaaaatatatwtttttaagagaaattttaggtgcatcacaaaattgagtggaagatactaatatttccaatatagcctctgcctctgcacatacatagcctccccattatcactaacctcccatcagagagggtggtcattttttataactgatgaagccacattgacacatcattatccttcagagtccatagttaacattaagattcatttttgtcatggattttatgggttaggacaaatatataatgacatatacccagaattgtagtg

SEQ ID NO: 614074 - DNA, 631 bp, Homo sapiens
ctggatttgggccattctaataggtgtgtagtggtatctccttgttgctttaatttgcatttctgtggtggcatatgatgtggagcatactttcaaatgcttttcagccatctgtatattttctgtgacgaggtgcctgttcaggtctttggctcattttttaaattgggttctttggttcttgttcttgacttctaagagttctttatatatttcgtataatagtcctatctgatatatgtgtcctgcaaacattttctcccaatctgtgcttaccttttcattatcttggtggtgtcctttcagagaagatagttttaattttaatgaagtccagctcatcagttctttcataatttatgcctttggtattgcacctaaaatgtcatcattaaacccaaggttgtctagattttcccctatgttatcttctaaaagcttttatagttttgcattttacatytaggcctccgactcattttgagttaatttttgtgaagattcacaaaatcttcataaaagattcatcttttttttgcatgaagatgttcggtaattccagccccatttttggaaaagactttattttctccattgtatttcctttattgcttcgtcaaagatcagttga

SEQ ID NO: 614075 - DNA, 631 bp, Homo sapiens
ctggatttgggccattctaataggtgtgtagtggtatctccttgttgctttaatttgcatttctgtggtggcatatgatgtggagcatactttcaaatgcttttcagccatctgtatattttctgtgacgaggtgcctgttcaggtctttggctcattttttaaattgggttctttggttcttgttcttgacttctaagagttctttatatatttcgtataatagtcctatctgatatatgtgtcctgcaaacattttctcccaatctgtgcttaccttttcattatcttggtggtgtcctttcagagaagatagttttaattttaatgaagtccagctcatcagttctttcataatttatgcctttggtattgcacctaaaatgtcatcattaaacccaaggttgtctagattttcccctatgttatcttctaaaagcttttatagttttgcattttacatctaggcctccgactcattttgagttaatttttgtgaagaktcacaaaatcttcataaaagattcatcttttttttgcatgaagatgttcggtaattccagccccatttttggaaaagactttattttctccattgtatttcctttattgcttcgtcaaagatcagttga

SEQ ID NO: 614076 - DNA, 631 bp, Homo sapiens
ctggatttgggccattctaataggtgtgtagtggtatctccttgttgctttaatttgcatttctgtggtggcatatgatgtggagcatactttcaaatgcttttcagccatctgtatattttctgtgacgaggtgcctgttcaggtctttggctcattttttaaattgggttctttggttcttgttcttgacttctaagagttctttatatatttcgtataatagtcctatctgatatatgtgtcctgcaaacattttctcccaatctgtgcttaccttttcattatcttggtggtgtcctttcagagaagatagttttaattttaatgaagtccagctcatcagttctttcataatttatgcctttggtattgcacctaaaatgtcatcattaaacccaaggttgtctagattttcccctatgttatcttctaaaagcttttatagttttgcattttacatctaggcctccgactcattttgagttaatttttgtgaagattcacaaaatcttcataaaagattcatcttttttttgcatgaagatgttcggtaattccagccccatttttggaaaagactttattytctccattgtatttcctttattgcttcgtcaaagatcagttga

SEQ ID NO: 614077 - DNA, 601 bp, Homo sapiens
ggcattgtctggttttctaaatcacaagttaatggaagtgagtttaattttttyccctaatttagtatttttttttcccaaatgaatctgacacagaacactattattagaagagatcaagtctgacctgctctgtaaaagaaggtagatggcttagaagccacttcttttcctcggtgacagccttgaacagagtctaaaaatatagcaaagattcttcattgacaaggtttggaaagaaatccagttaaatctacattgagctatgtttatttagctgatgagccaacataaaaacaagcattctatcactaaagcaaaacagaaaagactgataaagtcacctacatagaagtttcaaattgtgtgatggtaacaaaaaaagctaaaagactacaacactctagtagaacagattttcaacatataagacaatggactaactgccttaattcactaagtggtcatacaaatcagtaatgaaaagatgagcaaccttaaaaaacaaacaggaaaaagcagagaaaaggtaattaacagaaaaaaggaattcaaatacttaaacaaacatgaaatgaagctcaacttcactcataattaa

SEQ ID NO: 614078 - DNA, 601 bp, Homo sapiens
ggcattgtctggttttctaaatcacaagttaatggaagtgagtttaatttttttccctaatttagtatttttttttcccaaatgaatctgacacasaacactattattagaagagatcaagtctgacctgctctgtaaaagaaggtagatggcttagaagccacttcttttcctcggtgacagccttgaacagagtctaaaaatatagcaaagattcttcattgacaaggtttggaaagaaatccagttaaatctacattgagctatgtttatttagctgatgagccaacataaaaacaagcattctatcactaaagcaaaacagaaaagactgataaagtcacctacatagaagtttcaaattgtgtgatggtaacaaaaaaagctaaaagactacaacactctagtagaacagattttcaacatataagacaatggactaactgccttaattcactaagtggtcatacaaatcagtaatgaaaagatgagcaaccttaaaaaacaaacaggaaaaagcagagaaaaggtaattaacagaaaaaaggaattcaaatacttaaacaaacatgaaatgaagctcaacttcactcataattaa

SEQ ID NO: 614079 - DNA, 579 bp, Homo sapiens
ctgtaaaagaaggtagatggcttagaagccacttcttttcctcggtgacagccttgaacagagtctaaaaatatagcaaagattcttcattgacaaggtttggaaagaaatccagttaaatctacattgagctatgtttatttagctgatgagccaacataaaaacaagcattctatcactaaagcaaaacagaaaagactgataaagtcacctacatagaagtttcaaattgtgtgatggtaacaaaaaaagctaaaagactacaacamtctagtagaacagattttcaacatataagacaatggactaactgccttaattcactaagtggtcatacaaatcagtaatgaaaagatgagcaaccttaaaaaacaaacaggaaaaagcagagaaaaggtaattaacagaaaaaaggaattcaaatacttaaacaaacatgaaatgaagctcaacttcactcataattaaggatatgcacaaagtaacaatgagataatcgttcttcctcttccccatcagatgggaaaatattaaacggtctaatgacatccagagctggtggtaaaagagttaataat

SEQ ID NO: 614080 - DNA, 579 bp, Homo sapiens
ctgtaaaagaaggtagatggcttagaagccacttcttttcctcggtgacagccttgaacagagtctaaaaatatagcaaagattcttcattgacaaggtttggaaagaaatccagttaaatctacattgagctatgtttatttagctgatgagccaacataaaaacaagcattctatcactaaagcaaaacagaaaagactgataaagtcacctacatagaagtttcaaattgtgtgatggtaacaaaaaaagctaaaagactacaacactctagtagaacagattttcaacatataagacaatggactaactgccttaattcactaagtggtcatacaaatcagtaatgaaaagatgagcaaccttaaaaaacaaacaggaaaaagcagagaaaaggtaattaacagaaaaaagraattcaaatacttaaacaaacatgaaatgaagctcaacttcactcataattaaggatatgcacaaagtaacaatgagataatcgttcttcctcttccccatcagatgggaaaatattaaacggtctaatgacatccagagctggtggtaaaagagttaataat

SEQ ID NO: 614081 - DNA, 570 bp, Homo sapiens
tatccaggatctttgggtaatgtctctttcccgttttgttctgtcctaaatttacctcagtagtctacaccatacagactaaaagtggaaagttcaccagcatcaacatatctaatataaatagagagggaaaataataggtaagagaagtagtaaggacacacaggcatatgcactagcatgttcctacagtaagtcaggaggccacaactagcatttactattttcatgccctgttattagcctctccacctcctccttttctctatccagcatctcagatggtcaagattctttgcctagtatggtaacataaatatttatttctgagaaggcaaagttcatagtagtcctacctacrtgtagtttgagagagtctgctcttaaggtaagaagagtgaagcaggaggtagtttagggtatcttctgggttcaaattcctcgtgcccaacagcaacattttctgctattgtcggtgtcaatcatacaaagccaatcccatgccccccttttttatgtaaggcataaggttctgaaatacccatagtgcacgtcaactatcatttagtg

SEQ ID NO: 614082 - DNA, 570 bp, Homo sapiens
tatccaggatctttgggtaatgtctctttcccgttttgttctgtcctaaatttacctcagtagtctacaccatacagactaaaagtggaaagttcaccagcatcaacatatctaatataaatagagagggaaaataataggtaagagaagtagtaaggacacacaggcatatgcactagcatgttcctacagtaagtcaggaggccacaactagcatttactattttcatgccctgttattagcctctccacctcctccttttctctatccagcatctcagatggtcaagattctttgcctagtatggtaacataaatatttatttctgagaaggcaaagttcatagtagtcctacctacgtgtagtttgagagagtctgctcttaaggtaagaagagtgaagcaggaggtagtttagggtatcttctgggttcaaattcctcgtgcccaacagcaacattttctgctattgtcggtgtcaatcatacaaagccaatcccatgycccccttttttatgtaaggcataaggttctgaaatacccatagtgcacgtcaactatcatttagtg

SEQ ID NO: 614083 - DNA, 609 bp, Homo sapiens
cccttctttcctcaagtcctttgcacaggttattcctttagcctggaacatctttttcccatccacttttcctatgattgtctctggatagaaatcatttatgccagaaatgcttcctcgcatggctcaagctttgagtcaggtttctatatttatctgttctcctattctgwgctcaaaacacctgaactccctgtttgcttaccctctaccccactacaacttgaagcatggaaatatgtcttcttcagacctgtctaaagtagatacaagtatccaaagaggagcatagtgtaaggaccaaagaagggctaagttagagccttgaggaacttaaacacatttaatagaggaatggaagaggataaacctgcagaggaggctgataaggatatcacagaaaggtggaaggaaacgaggagacatgtcatagaagtcagttacctagcacggggttgacacatagtacacactttgtatgtggctagagaatgtggctgaggaatgaatggtgaatgcctcttccttttacctgggtgggggtggagggaaggaggtgattgctagagatgctgaattagatgaagatgaccctggacaaacttactt

SEQ ID NO: 614084 - DNA, 374 bp, Homo sapiens
aataaatgtctccaataaaatgcatccccttgaagatatccattcaaactcttgtttcatattgaaataaataactgttycgccacacccagcacctggaagtgaatcatttttgttctcctttgttaaaattaatttaataatttttccaatccagcatctctctgagaaagaggtgtcgttacgaattttgtaaaagtcaatgacattaaagataacctaagccaatcgatggccaacaccattttagattctagccgtaaagagattagacatattctggcaaacctggggctcccagggaaagcagggttcatactcaatgatatctagttactctaatcctgtagcacctttctactaggtccccaatt

SEQ ID NO: 614085 - DNA, 598 bp, Homo sapiens
acccttgtgaggtaggtagtgttatggttattttgagagatggggatgcagagatgttaagtagcttgcccataaagaaacatgaatccagtgacatagccctagggactctcactccagatccttgtctttttagtacttaactgttctgactccctgagagtggatcattaaagcaggtaggtccttaacrccagacttgtgcctggccaggtggacactaaggcctatctctaaaccacatgatttagatgacagaatgagacacaagttgcaatcaatatggaagccaaaggagttaatgtggagaaacacagagctaaggtttaaaccacagtttgataatgacttcagtgacgggcagctcgattactatgataatggatactcagtagatgttgcataattaaatgagtaaatgaatgaaaggagattgtgcttggataattggaaaattaaattttctgtatcttttaaaacaaagctagagaaatctgatttttaacttctaatcaaggatgagaaggaaaggaccgagtagattcctgaatattttgagggcatgtatttaagctaattattggcaatatttaaaaga

SEQ ID NO: 614086 - DNA, 598 bp, Homo sapiens
acccttgtgaggtaggtagtgttatggttattttgagagatggggatgcagagatgttaagtagcttgcccataaagaaacatgaatccagtgacatagccctagggactctcactccagatccttgtctttttagtacttaactgttctgactccctgagagtggatcattaaagcaggtaggtccttaacgccagacttgtgcctggccaggtggacactaaggcctatctctaaaccacatgatttagatgacagaatgagacacaagttgcaatcaatatggaagccaaaggagttaatgtggagaaacacagagctaaggtttaaaccacagtttgataatgacttcagtgaygggcagctcgattactatgataatggatactcagtagatgttgcataattaaatgagtaaatgaatgaaaggagattgtgcttggataattggaaaattaaattttctgtatcttttaaaacaaagctagagaaatctgatttttaacttctaatcaaggatgagaaggaaaggaccgagtagattcctgaatattttgagggcatgtatttaagctaattattggcaatatttaaaaga

SEQ ID NO: 614087 - DNA, 559 bp, Homo sapiens
agggcaccttcactctcagcccaagaggagtttaaaaattttcaattcatttcctctttaacactagacaattttctctttcccttttttcaatttgcttgaagactaaagttgtttmtctttttattttttttgtggcttcctacttgacacaatgttttgaatcatttggctgagtgaaggctaactcagaaagaaaaactagagggtggtgttgtatgtatggcttgctgaacccttcagttcttgctcaaatagatcttacgccttaagttatgcccattacttgcttatgttattaagtcacatgaatttgggatacttttgcaagtgatacaggatttaactccacaaaagtagaatatctttagagtgtggttgatattacataaatttggatgcccatcaggttgaactatgacccctttgtaactttatgtaactggatagcctgtcttttgattcctctgtgagttatctccactcaccttagcatttgaatgagattccactggacctgcttcatctctgacagtattggggattactaattaataca

SEQ ID NO: 614088 - DNA, 632 bp, Homo sapiens
tgttaggttcttggttattaactttcaatcatgggatattctcaaaataggattttgataaaagacattaaaggaaaacacagatacacattctgtctctttttctcctgctcaggcttatcaacttttaaaacggttataatttaaacacaaaaaaatctaaccacccttccccacatatttatatatgtatatataaacaatagaaattaattatgatttggggtattctataccacayggaaaaaacctgaaaacaactgtcttgttatgaagcaactcaggtttttatgatatacctgattttgtaactggggagaaaaacagcatgttttcttccaaacagcctctatgcaaagtttgttcatgccaattccaatctcttgttatcacacagatatgtatatacatcattttgctgctggacatacattgtaaagaatgaaaaattttttttgcaagtctgaattaatctcctgtttattatttatcttatattgttgattttactcaatatattgcagtgtaaagatattaaagcaatttagaataggaggtgtgcaacaacataaagttaacatggcaaccaaatttctgcttttttttggtccttttagaacaggcataaagtc

SEQ ID NO: 614089 - DNA, 441 bp, Homo sapiens
aagtttgttcatgccaattccaatctcttgttatcacacagatawgtatatacatcattttgctgctggacatacattgtaaagaatgaaaaattttttttgcaagtctgaattaatctcctgtttattatttatcttatattgttgattttactcaatatattgcagtgtaaagatattaaagcaatttagaataggaggtgtgcaacaacataaagttaacatggcaaccaaatttctgcttttttttggtccttttagaacaggcataaagtctttggctgacccatcttcagtatggacagttatcttttgaactttattggaatatagttaagcaatttagtaaaacataaatttgcatttttgttgtcttctaatgactattttgcatattaaaggtaaagtcttctttaaaatgtgaagtactctcttgattat

SEQ ID NO: 614090 - DNA, 441 bp, Homo sapiens
aagtttgttcatgccaattccaatctcttgttatcacacagatatgtatatacatcattttgctgctggacatacattgtaaagaatgaaaaattttttttgcaagtctgaattaatctcctgtttattatttatcttatattgttgattttactcaatatattgcagtgtaaagatattaaagcaatttagaataggaggtgtgcaacaacataaagttaacatggcaaccaaatttctgcttttttttggtccttttasaacaggcataaagtctttggctgacccatcttcagtatggacagttatcttttgaactttattggaatatagttaagcaatttagtaaaacataaatttgcatttttgttgtcttctaatgactattttgcatattaaaggtaaagtcttctttaaaatgtgaagtactctcttgattat

SEQ ID NO: 614091 - DNA, 441 bp, Homo sapiens
aagtttgttcatgccaattccaatctcttgttatcacacagatatgtatatacatcattttgctgctggacatacattgtaaagaatgaaaaattttttttgcaagtctgaattaatctcctgtttattatttatcttatattgttgattttactcaatatattgcagtgtaaagatattaaagcaatttagaataggaggtgtgcaacaacataaagttaacatggcaaccaaatttctgcttttttttggtccttttagaacaggcataaagtctttggctgacccatcttcagtatggacagttatcttttgaactttattggaatatagttaagcaattyagtaaaacataaatttgcatttttgttgtcttctaatgactattttgcatattaaaggtaaagtcttctttaaaatgtgaagtactctcttgattat

SEQ ID NO: 614092 - DNA, 506 bp, Homo sapiens
agcaacattttggaaacctgggatataagaaagctagactttctgcaagtttatttaacaagggagagtttccccttcttatcctaatcttcgtttctctgtcctcctaaaagccctcctaaaaatcctccaacaacctcagtccgtcatgaacaagtcacagatccacagtgcagagtctggactagtgctgaccttgacagtgatggacaccctgtgatctggacttggctctccatcacaacaatcccaggtctatttactgtaagaccaatttacagactaaagggcttaacttttctgtccacgcargtagaaatttctgagtattccaggcaggctggtattgaggcttaccacaggagtcagaagttatttttccacctggaatgcacttcaatttttccacatggactactccctgatttcctcaccactgccacaaaggacattgatagttacattcaaactgacatacaaaattaaacatctaagagatgccagga

SEQ ID NO: 614093 - DNA, 477 bp, Homo sapiens
ccccgtctgtactaaaaatacaaaaattagctgggtatagttccaggtgtctgtaatcccagctacttgggaagctgaggcaggagaatcgcttgagcctgggaggtggaggctgcagtgagccgagatcacaccactgcactccaacctggcaacagagcaagactccgtctcaagaaggaaaaaaaaaaaaggcctattggattagttaaattagggccgagcccgatkacctaattgaaacttaattacctcaattacctctttaaacatcctaattccaaatacagtcacattctgtagtacttcaacatatgaactggggtgggaggatcataattcagtccatacaacatcctagaaatctgatcttccctcataagctattatgttcatattcatatacaatggatttctctctgaaagcgtacaaccttcaatagccctaaatatttgcttaaacattatttagatcat

SEQ ID NO: 614094 - DNA, 506 bp, Homo sapiens
ggatttcatacaaggtgatgaaacaatcgagctgcctgatcttagagagggtacatggaaatacttagggactgggaagcagtagatgagaagctaagcagcagaagaatgagaaagagatmcatattagacagtacaacaaggtgggcatttgaaaagtataggcagaattttccccctcttttttgagggacagggtcagtcagttggtgactctagaatccacccttgagccatagtcttgataaatttataaaatcagctcaaaatttattgatagtgcccatcagcttttctataagccatccacaacaagtaagaaaaaagataaaaattgtcaaaatatttgtttaaaagtatggttttaggctgatggttccatagcttaatttgtgggaggaagaaactaagtaaattccataactgataattggaatagttaataaaatgttagaaaaagaaaagtcctggattttgtgtctctaaaacatagagcccattaatgt

SEQ ID NO: 614095 - DNA, 460 bp, Homo sapiens
catattatatcactctatattccatttataaagcccaatgtaagaaatttccttcagagtttaaggtcacaaaaatgtttgttttctttgataaaggatattttcttaccttttagattataaaagaggtatcatttattttgtttrtttaccctagctgcctgggagcacagggccaaatttgaatgttaattgtaggaattatgtcaagaaattttgtaaattaatttaaaaatagttttatgtactgggagttagcaaactatgggccacccacttctttttgtaaataaagtttgatcagaacacagctatagtcatttatttatgtattgcctattgctttcatgctacaatggcagacttgagtagttgctctctggccctttacagaaaaaagatttctagtcctgatacaaatagttacatgtgcctcagaccaaaatgcagtaacactgaa

SEQ ID NO: 614096 - DNA, 557 bp, Homo sapiens
ataggccttctttttgcagagtagaaaggaggcaattatgaaaggatagctgggaaaggagaaacagtttaatctaaggcagataaatgtcagggaagagtacatagtgaagttgaagatctggacatgtagttactaaaactaacatggctgcctatcccttagaaagtcttcaaataccccatgtacacgagtttgtaaaccatgacgttaatgatttttttcactgcaaattaaagatgctaacyctttggacccaaatctcttgagagtacagcaaaaccaaagctgtcctaagcaaataataaagagttcaaaattaaaactatatgtaaaaactccacaagtgtaagtgagctattaatgttggttaagttattcctagaagtcaacattaaggttgactgactatattagaataccccagaaaaacatctataatataacaatagtttaaaaaacagaaaaaaaaaaccagaaaaagtttcaagaagcagacagtaactgttgggggaaaggagaggatagatggttgatttccaaaagagtccacatgc

SEQ ID NO: 614097 - DNA, 260 bp, Homo sapiens
gaattcttctgggttttgtgttagtaaccaagttcagatttaacttaaaaacattgaaatgggattatttttagacgaaagcactaactgtgttgaggtttgcaaggcaaaraaaaataattttcttttaaagaagtaaggacaagagtcatctaattttttgttcaaaggccagattcatttgaggatatgctaaaatctctgaggctttgtttttttaaggaagtgtatttaatgaaatgttttgagcattaaataga

SEQ ID NO: 614098 - DNA, 407 bp, Homo sapiens
aaattttaaacattctccatcgagagaaggtggggagctgagtcctggtcccatgtgctggccaacatctccccttccagcctctgtcctggcctggctgccacatatcaccctccttytcctctctcaattatccttgccccagggccctctttggtttcaaaccattcctgcctttctctggacactctcccctgaggagtagactaggcagtcccatgttttccgtgttaactacagaggcacagattggaacaagtgccaaggaattaggccacctaccgagccttcctcttgcctctctctgactctccatcctgagggaagacgattgcagtcgtttttgttggaaatgacctgacctgtgggagcagcccgttcctggcctttcaaagtcaagtcacctt

SEQ ID NO: 614099 - DNA, 449 bp, Homo sapiens
agaattccctggagaaaatccttccacagctgaaatgccatttcacctggaacttattcaaggaagacagtgtctcaagggatctagaagatagagtgtgtaaccagattgaatttttaaacactgagttcaaagctacaatgtacaacttgttggcctacataaaacacctagatggtaacaacgaggcagccctggaatgcttacggcaagctgaagagttaatccagcaagaacatgctgaccaagcagaaatcagaagtctagtcacttggggaaactacgcctgggtctactatcacttgggcagactctcagatgctcagatttatgtagataaggtgaaacaaacctgcaagaaattttcaaatccatacagtattgagtattctgaacttgactgtgaggaagggtggacacaactgaartgtggaagaaatgaaagggcg

SEQ ID NO: 614100 - DNA, 421 bp, Homo sapiens
tatctacattttttcacctgccaaatcacctcagtgtggttgagcaaaaagatcacaggacttagaaataagaggcccaagttctggcattataaacctcataataagttatttaataaaatcatttgaaagagtaaaatatacattatgacaatgatgagattctccatcttttgaaagttgtgctcaagtttcatttaccttatgaatctcccatcagtaagcaaaggaatgtccagctgtgttgctgcccacaacagcctttcctgagagctggtggcygtgaacatcaccgagtctctgtttgctaaagggaatgtcaataaagtccttgccaagagtaatagttctttgcagaacctgtagtaattacaaaggactcatgctgcctaaagataccaggtgtcttacaccaacacac

SEQ ID NO: 614101 - DNA, 630 bp, Homo sapiens
aaacctgataagtctgacatatgtgtacatcagtgaaacccttaccacagtcaaataataagctcattcatctaaaaaaatctttgtatcccttgataacccctccctcctgcacctctccaattttcccttctcccatccccatttccaggcaaccactgatctgctttctgtaattatgaattagatagcattttctagaattctatataaatgaaatcacagagtaggtactctatattcggctagcttatttcatgtaacagttgtktatatcaatagcttactcctttttcactagtataattagattctattgtgtggctccatcagtttgtttatccactcatatattgatggatactttagttgtttccagtttggagctattacaaataaaactactatgaacatttgtgtgcaagtgtttgtatagacatataattttatttatcttgagtaaataagaactcaacagttgaatcatacaatatgtatatttttaacttttgaaaaaattgccaaaatgttttccaaaatggccgtatcattgtacacttccaacagaagtgtatgagagttccagctatttcacatcctcatcaataattagtgtggtcaattttaaac

SEQ ID NO: 614102 - DNA, 530 bp, Homo sapiens
tggggaaaagacagtatcttcaataaatagtgctgggaaaactggatatccatatgcagaagagtgaaactagacccctatccctcaccatatacaaaaaatcaaatcaagtcttagatttaagtcttcaatccattagttccttcaaactaaaagacacaacygaaagaaaacatttgggaaactctccaggacattggagacttcttggataatacttcacaagcacaggcaaccaaagcaaaaatggacatatgggatcacatcaagttaaaaagctcccacacaacaaaggaaataatcaacaaggtgaagagacaacccacagaatgggaaaaaatatttgcaaactatgtatctgacaagggactaataactaaaatatatgaggagctcaaacaattcttaggaataaaatctaataatcaaatttttaaaaggggcaaaagatctgaatagacatttttcaaaagaagacatgcaaatgtcaaacaggtatattaaaaggtgctcagccgggcgtggtggct

SEQ ID NO: 614103 - DNA, 530 bp, Homo sapiens
tggggaaaagacagtatcttcaataaatagtgctgggaaaactggatatccatatgcagaagagtgaaactagacccctatccctcaccatatacaaaaaatcaaatcaagtcttagatttaagtcttcaatccattagttccttcaaactaaaagacacaaccgaaagaaaacatttgggaaactctccaggacattggagacttcttggataatacttcacaagcacaggcaaccaaagcaaaaatggacatatgggatcacatcaagttaaaaagctcccacacaacaaaggaaataatcaacaaggtgaagagacaacccacagaatgggaaaaaatatttgcaaactatgtatctgacaagggactaataactaraatatatgaggagctcaaacaattcttaggaataaaatctaataatcaaatttttaaaaggggcaaaagatctgaatagacatttttcaaaagaagacatgcaaatgtcaaacaggtatattaaaaggtgctcagccgggcgtggtggct

SEQ ID NO: 614104 - DNA, 530 bp, Homo sapiens
tggggaaaagacagtatcttcaataaatagtgctgggaaaactggatatccatatgcagaagagtgaaactagacccctatccctcaccatatacaaaaaatcaaatcaagtcttagatttaagtcttcaatccattagttccttcaaactaaaagacacaaccgaaagaaaacatttgggaaactctccaggacattggagacttcttggataatacttcacaagcacaggcaaccaaagcaaaaatggacatatgggatcacatcaagttaaaaagctcccacacaacaaaggaaataatcaacaaggtgaagagacaacccacagaatgggaaaaaatatttgcaaactatgtatctgacaagggactaataactaaaatatatgaggagctcaaacaattcttaggaataaaatctaataatcaaatttttaaaaggggcraaagatctgaatagacatttttcaaaagaagacatgcaaatgtcaaacaggtatattaaaaggtgctcagccgggcgtggtggct

SEQ ID NO: 614105 - DNA, 580 bp, Homo sapiens
ctgccttcatcattgtaattgtgagggttcttggattacaagcaaccaaaaccagatcaaactaatttaagtaaaaatagattctattggctcatagaatgggaagcaagtctccagaaacagatcttatgagggagtaagagctaaatgttagtctctctggggtaatacccttgaatgaatgagcactaattgcttttaatctcggcctaacactcaacttccacagggagagtgtgactgaacttgggtcacgtgtttacctcatggtaggtaaatgggaaatgccttggacaccagtccccatcagcattatccccaatagaagttttgttttccaaagggaaattgaggtgcaattttgsagggagagaggatggatcattgacactcaaaaacaatggagcaccatgtgtaattgcagcatcactggaattacgatgcccatattacctttggaagatggtaagatttttgagtgttttatcaattgtagtaatgctgtgtttaaatgctgcctagacatcatccagctctgtgaccattaccctgagctaacttatagtattgtaggctataa

SEQ ID NO: 614106 - DNA, 476 bp, Homo sapiens
gctactgaattttgacccactgaatacgttgggggatttcttacttctggataaaatgtttgaaagaaactgtgcaccttcctcactcagctttccctatagccagaatgcatagtcttgggaaagaaggggagaggtacaaacagctcctttcaattttataccagattacttgataggggagatttatttttccacccaaatcttgggaccaaaatgtttggaagtcctaacactcaaaggaaaaaattattctgccagggaaacaaagtttgggttctattacattacaagctgagactatcacatggccattccaggcttttcacacgagtracccaaaaggcagtgggggaggtctctgtactgacaaggagacagcgagacactgggatgctccagctcaatagatgtgaggaccactaagtctggaccccaggaggttggctgggctcactcttaagactttctgatcc

SEQ ID NO: 614107 - DNA, 433 bp, Homo sapiens
ctaatgaggaaaccagtgagatgttgcaagcagtccaaaggagaaaccaaagagcagacacaagtgtaagtcccaagaaacgatcaaatgaaattgyttactagatgcaaaatttgtttttccatgagggtgtgagagagtcaattgcctctccacaagacaaaatgtatttgcatgcctatggacaagaatcatttgcattgctatcagttgtctacaattacagagttgtaaaatagctcaaaaacaatgaaggtatagagataatctggaaaagtatgctggacaagacatccagtaatctgctttgcctatttcaaaggcattttcagttttcccacatacatatttaacagcttcagttccagctttactttgaaactggcacgggtccccttcccatgttctgatagtttgtgactactcacaattc

SEQ ID NO: 614108 - DNA, 635 bp, Homo sapiens
cataaacaaacacattgctaacatgtgcaacaacatgaatgaatctcatgctaagtgaaagaaggccactcaaaacgctacgtcctataggattccattcatgtgacagtctccaaaaagcaaacctccagggaaggagaatggatcattggttgccagakactaggtagaggaaaaggcacaatgaccccttgggatgatgagaatgtctatgacttgattttgggggtggttacatgagcatatgtgttttccaaaattcacagaacgatgtgcctaaaaagggtattttttttttaccatgttagttatacctcaatttggacattaaaatataaaagaagggaggaaggaagaaaggactggctgggtatggtagctggcacctgtaatcccagcactttgggaagtcgaggtaggaggatcatttgagcccaggagacagagaccagcctggacaacatagtgacaacctgcctctacaaagaatagaaaaaattaaccaggtatggtagtgcatgcctatagtcccagctacctgggaggctggaaaggagaatcgcttgagcctgggagacataggctgcagtgagccatgactgcaccactgcactccagtctgggtgatggagcaa

SEQ ID NO: 614109 - DNA, 635 bp, Homo sapiens
cataaacaaacacattgctaacatgtgcaacaacatgaatgaatctcatgctaagtgaaagaaggccactcaaaacgctacgtcctataggattccattcatgtgacagtctccaaaaagcaaacctccagggaaggagaatggatcattggttgccagatactaggtagaggaaaaggcacaatgaccccttgggatgatgagaatgtctatgacttgattttgggggtggttacatgagcatatgtgttttccaaaattcacagaacgatgtgcctaaaaagggtattttttttttaccatgttagttatacctcaatttggacattaaaatataaaagaagggaggaaggaagaaaggactggctgggtatggtagctggcacctgtaatcccagcactttgggaagtcgaggtaggaggatcatttgagcccaggagacagagaccagcctggacaacatagtgacaacctgcctctacaaagaatagaaaaaattaaccaggtatggtagtgcatgcctatagtcccagctacctgggaggctggaaaggagaatcgcttgagcctgggagacayaggctgcagtgagccatgactgcaccactgcactccagtctgggtgatggagcaa

SEQ ID NO: 614110 - DNA, 635 bp, Homo sapiens
cataaacaaacacattgctaacatgtgcaacaacatgaatgaatctcatgctaagtgaaagaaggccactcaaaacgctacgtcctataggattccattcatgtgacagtctccaaaaagcaaacctccagggaaggagaatggatcattggttgccagatactaggtagaggaaaaggcacaatgaccccttgggatgatgagaatgtctatgacttgattttgggggtggttacatgagcatatgtgttttccaaaattcacagaacgatgtgcctaaaaagggtattttttttttaccatgttagttatacctcaatttggacattaaaatataaaagaagggaggaaggaagaaaggactggctgggtatggtagctggcacctgtaatcccagcactttgggaagtcgaggtaggaggatcatttgagcccaggagacagagaccagcctggacaacatagtgacaacctgcctctacaaagaatagaaaaaattaaccaggtatggtagtgcatgcctatagtcccagctacctgggaggctggaaaggagaatcgcttgagcctgggagacataggctgcagtgagccatgaytgcaccactgcactccagtctgggtgatggagcaa

SEQ ID NO: 614111 - DNA, 533 bp, Homo sapiens
cctccctcctctgctgatcaytgttatccattcatcatattaagataccgtgttttctatttttctggacccttgttctactctttctcctaatctctgcaacctccttttctttctatagctgcttctaagctcttttctatttttttctttctgcccagcttactttggtcctttcttttcccattcttttgttcaatggatctattccttgttcgcatcattgagatcaggtggacttgacttcacctcaaatgcatgtaaacccatatatattcatacataccttatcacactttatctccctattatgggctaaattgtatccctgtccccaaatttatatgttgaagttctaaccccaatatctcagaacatgactgtgctgtcagtgacatgttttgagaaatgtgtcattaggcaatttcatcattgtgcaaacatcacagagtgtacttatagaaacctagacggtataccctactatatacccaggctatatggaatatagcctattgttcctagactataaa

SEQ ID NO: 614112 - DNA, 533 bp, Homo sapiens
cctccctcctctgctgatcactgttatccattcatcatattaagataccgtgttttctatttttctggacccttgttctactctttctcctaatctctgcaacctccttttctttctatagctgcttctaagctcttttctatttttttctttctgcccagcttactttggtcctttcttttcccattcttttgttcaatkgatctattccttgttcgcatcattgagatcaggtggacttgacttcacctcaaatgcatgtaaacccatatatattcatacataccttatcacactttatctccctattatgggctaaattgtatccctgtccccaaatttatatgttgaagttctaaccccaatatctcagaacatgactgtgctgtcagtgacatgttttgagaaatgtgtcattaggcaatttcatcattgtgcaaacatcacagagtgtacttatagaaacctagacggtataccctactatatacccaggctatatggaatatagcctattgttcctagactataaa

SEQ ID NO: 614113 - DNA, 424 bp, Homo sapiens
cactcaaactccaggagacctgcagaagatgggcctgactgttagaaggaaaacaaacaaacagaaatcaataacatcaacatcaacaaaaaagacagccacagaaaaaccccatccaaaggccataagcatgaaagatcaaaggtagataaatccacaaagatgagggaaaaccagcaggaaaatgctgaaaattccaaaaaccagaacgcctcttctccraatgatcacaactccactccagcaaaggcaaaaaactggacagagaatgagtttgataaattgacagaagtaggcttcagaaggtgggtaataataaactcctcctagctaaaagagcatgctctaacccaatgcaaggaagctaagaacctggaaaaaaggttacaggaaatgctaactagaataaccagtttagaaaaga

SEQ ID NO: 614114 - DNA, 568 bp, Homo sapiens
aggagattattttggagctttaaagtttaatgactgcccttctgggttttggacttgcatgggrcctgtagcccctttctcttggcttatttctcccttttggaataggagtatttacccaatgtctatacccccactgtacttggaagtaactaacttgtttttcattttacaggctcatatgtggaagggacttgccttgtgtcagatgagattttggacttttgagttaattctggaatgagttgagattttgggagactattgggaaggcacggttgtattttgcaatgtgagaagaacatcagatttgggaggggctaagcgcagattgatatggtttggatgtgtcctcacctaaatctcatgttgaaatgtaacccccaatgctgcaggtggggtctactgggaggtgattggatcatgggggcagtttctcatggtttaacaacatccctccctggtgctgtcatggcaatagtgtgagttcttatgagatctggttgtttacaagtctacagcacctcccaactctctcttggtccttctcctgccatagaagacaact

SEQ ID NO: 614115 - DNA, 565 bp, Homo sapiens
tatctgggcaaatgagagtcatgcataacaaggataaatcaatttcacagttaatctcaaacccccatttcagccccgttttattagtgtcctagccttccttaataaactgactaaacagaatccgtaggttaagagtgacagcatcttgtaaaattgtggagacctctcaaggtcctatagtgccattttttttccagctgctactgcgctcgcagacttgaagcctggttctgacctttatgacaggggaagcggaatgcagcgcagtttaattagaccattttgactgttcatttgcttgggtatttatgaaccraatccaatggatccagaaaatttactcaggtgtaagaaatggggagaaagatcattacctttgatgcggcagataacagcaaactctaagaaaaaaatctcaaaggaaagtcaatttttaaataacctggagaccacagtttaatgtgtttttgacagcatgtaagatcatttttgagcctttaatgacgttatatgattctttctatgaaccagaaacaaaaaaaccatggcatcatcatattaa

SEQ ID NO: 614116 - DNA, 549 bp, Homo sapiens
aaatttgataaaaatatctcagaaagtatatcaaaaaaatcaaaagatggaaaatagcaactaaaagataaaacaatttgaaggctttcctaggaaatcctacatccaagtaatagcagtttcaggagaaaacaggagtgaaatcattgaagaaagttttccagaacagaaagacaggagtttccacattccaagtgcccatcacaatggatgaaaaagtctaccaagacacatcataaaatgtcagaaccctgtgataaatgggaatagctgataaacttccagttaatacaggtttcctacaaaagataaagaaaggaattgtatcagaattctatgytacatcaccagcaacttgaaggcatttgagcaatgccttcaaaatctgagaaaaaagtatttccaacctaaaattctatacccagtcaaatagaatcaggtatgagagtaaataacagctttggacatgcaaagtgtcagcatacttacctaccatgtaccctttctcaggaaaacttcttaaagagagaaattataaataaattatgg

SEQ ID NO: 614117 - DNA, 626 bp, Homo sapiens
agtgtcatgctcatgcactcactcatatttactctcaacataacaccctgtgttggtttcaagttggcttcaaattctctgaaacacttcccatgaaaaggtgaaatayagcctcttctcttgaatggagacagtctctgtaactgcttgaacaataaaatacagcaaaagtgacgctgtgcttgtttccaggcctaggctctaaaatactggcagtttctacttcctattttttgaacacttgctcatggaatccagctgccatgccatgaagaggaccaaacagccctacagagagtctcacatggaaaggaatcgaggttcctggccaacatcccatttgagctcccagcctggaccctaaaacacttcctgcaggatcctccacatactctattgtctgccagtcagacgcagaggatccagtggaatgctcttgggtgttgaggaatggcaaagccactacatgaaagagcctgagtccctgaggaactgaataaagcagatatacctctccaacctgcacccccactcacaccaccaacctccaaggacatcagcctgcattggacttgatgtaagtgagaaccttgattaagccattgggattttaggcattgttacat

SEQ ID NO: 614118 - DNA, 587 bp, Homo sapiens
ttctgcaaggaaaagaactattaacagagtaaacagacaacctacagaatgggataaaatatttgcaaactatgcatctgacaaaggtctaatatccataatctataaggaacttaaatcaacaagcaaaaaccaaataagcccatcaaaaaatgggcagaggacatgagcagatacttcccaaaggragacatacaagtggccaacaaataattaaaaaaagtttttcactaatcatcagagaaatgcaaatcaaagccacaatgagatatcattgtacaccaatcagaatggctataattaaaaagtaaaaactaacagatgctggtgaggctgcggagaaaagggaatgtttatacagtgttggtgggaatgcaaattagttcagccactgtggaaagcagtttggaggtttctcaaagaacttaaaacagagctatcatttgatccaccaatcccattactggctatatacccaaaagaaatcaaatcattctaccataaagacacatgcatgcatatattcattgcagcactagtcagaacagcaaagacatggaatcaacctaggtgcccatcaataatgg

SEQ ID NO: 614119 - DNA, 602 bp, Homo sapiens
ctgtgggttgtctcttcactgttgactgtttcctttgctgtgcagaagcgttttaacttgttgtaatcctatttgcccatttttgtttgggttgcctgtgcttgtgcaatattgctcaagaaagttttgcccagaccaatatcttggagattttccccratgttttcttgtaatactttcgtagcttgaggtcttagatttaagtctttaattgatttttatttgatttgtatatatggtgagagataggaatctagtttcattcttttgcacatgaacatccagttttcccagcattgtttattaaagagattgtcctttctccaatatatatttttggcaccttggtcaaaaataagttccctctggatgtatggatttatctctgggttcgctattctgttccactgattatgtgtctgtttttattccagtaccatgctgttttggttactgtagctctatagtatagtttgaagtcagataatgtgattcctccatttttgttttttggcttaggatagctttagccattctgggtcttttgtggttccatgtaaattttaggattctttttctatttctgtgaaggatgtcattgg

SEQ ID NO: 614120 - DNA, 602 bp, Homo sapiens
ctgtgggttgtctcttcactgttgactgtttcctttgctgtgcagaagcgttttaacttgttgtaatcctatttgcccatttttgtttgggttgcctgtgcttgtgcaatattgctcaagaaagttttgcccagaccaatatcttggagattttccccgatgttttcttgtaatactttcgtagcttgaggtcttagatttaagtmtttaattgatttttatttgatttgtatatatggtgagagataggaatctagtttcattcttttgcacatgaacatccagttttcccagcattgtttattaaagagattgtcctttctccaatatatatttttggcaccttggtcaaaaataagttccctctggatgtatggatttatctctgggttcgctattctgttccactgattatgtgtctgtttttattccagtaccatgctgttttggttactgtagctctatagtatagtttgaagtcagataatgtgattcctccatttttgttttttggcttaggatagctttagccattctgggtcttttgtggttccatgtaaattttaggattctttttctatttctgtgaaggatgtcattgg

SEQ ID NO: 614121 - DNA, 602 bp, Homo sapiens
ctgtgggttgtctcttcactgttgactgtttcctttgctgtgcagaagcgttttaacttgttgtaatcctatttgcccatttttgtttgggttgcctgtgcttgtgcaatattgctcaagaaagttttgcccagaccaatatcttggagattttccccgatgttttcttgtaatactttcgtagcttgaggtcttagatttaagtctttaattgatttttatttgatttgtatatatgrtgagagataggaatctagtttcattcttttgcacatgaacatccagttttcccagcattgtttattaaagagattgtcctttctccaatatatatttttggcaccttggtcaaaaataagttccctctggatgtatggatttatctctgggttcgctattctgttccactgattatgtgtctgtttttattccagtaccatgctgttttggttactgtagctctatagtatagtttgaagtcagataatgtgattcctccatttttgttttttggcttaggatagctttagccattctgggtcttttgtggttccatgtaaattttaggattctttttctatttctgtgaaggatgtcattgg

SEQ ID NO: 614122 - DNA, 455 bp, Homo sapiens
ggccacttacagctacaaacttccctcttaatactgcttttgctgtatcccrtaggttttggtatgttgtttttccattaccatttgtttcaaggaatttttttaattttctcttaatttcttcattgacccactggtcattcaggagcatattgtttaagttccatgtgttagtatagtttccaaaattcctcttgttattaatttctcgttttattcccttgtggtcagagaagatgcttgatattatttcaattttttgaatgttttaagatttgtttgtgacctaacatatggtccatccttgagaatgatccatgtgctggggaaaagaatgtgtattctgcagcttttggatgaaatgttctgtaaatagctattagatccatctggtctatagtgcagattagatcttatgtttctttgttgattttctgtctagaagattcgtccag

SEQ ID NO: 614123 - DNA, 455 bp, Homo sapiens
ggccacttacagctacaaacttccctcttaatactgcttttgctgtatcccataggttttggtatgttgtttttccattaccatttgtttcaaggaatttttttaattttctcttaatttcttcattgacccactggtcattcaggagcatattgtttaagttccatgtgttagtatagtttccaaaattcctcttgttattaatttctcgttttattcccttgtggtcagagaagatgcttgatattatttcaattttttgaatgttttaagatttgtttgtgacctaacatatggtccatccttgagaatgatccatgtgctggggaaaagaatgtgtatkctgcagcttttggatgaaatgttctgtaaatagctattagatccatctggtctatagtgcagattagatcttatgtttctttgttgattttctgtctagaagattcgtccag

SEQ ID NO: 614124 - DNA, 406 bp, Homo sapiens
gaattcaatgtgaacaactggaaagaaagaacatgggctctgaagctggacagatctgcttctaaatttttactctattatgtcctcagtgggactctgggtgaattacctagcctcagtaaattacctctcacacctcagtttcctcatgtgaaaaatgagatgattacctctcakaattaatgtgctcacacacgtcggcctgttcctctctgatcagagtgctctgcacactagcccttggcctctgaggcccacacagcactggctcctgctgagcagcatgctgtgagaggcctcatgctaccctctgctggggtctccgctggccaaagccaaggcgcctatttccatttcctgattaataccattgaatgccatcaccccccactcccggggctcattt

SEQ ID NO: 614125 - DNA, 277 bp, Homo sapiens
tggtgatcttcttgctggtcttgccattcctggacccaaagcgctccatggcctccacaatattcatgccttctttcacyttgccaaagaccacatgcttgccatccaaccactcagtcttggcagtgcagatgaaaaactggaaccatttgtgttgggtccagcatttgccatggacaagatttcaggacctgtatgctttaggatgaagttctcatcttcaaatttctcccagtggtgacttgccaccagtgccattatggcgtgtgaagtcacc

SEQ ID NO: 614126 - DNA, 550 bp, Homo sapiens
agaaggaagggagagcaaggaaaggaagggaagggaaaggaaaggaaaggaaaggaaagggaaggaaaaaatgaagggagagcgaggaaaggaaaggaaagggaaggaaggaagggagaaagaaagaaagaggaaagaaagagagagagaagaaagaaagaaaaagaaagaaagaaagaaagaaagaaagggaaagaaagagagaaagaggaatagtgttcatgatgtttaggaatcaccaattctgggggtgctgaattgtgtccccccagattcctatgttgaagagctgatccccactgcctcagagggactgatttagagaaggcattcaaagargtaagtgaggtccaatgaagccatatgggtggaccctaaaccaatatggcaggtgtccatgtaaaaagagattgagacacaggcaacacagcctgaggacacagcaggaagggaggcatctgcaaggcagcagttctcagaagaaggcaaacctgctgacattccatcctggatttccagtcttcagagctgtgagaagataaaccactca

SEQ ID NO: 614127 - DNA, 550 bp, Homo sapiens
agaaggaagggagagcaaggaaaggaagggaagggaaaggaaaggaaaggaaaggaaagggaaggaaaaaatgaagggagagcgaggaaaggaaaggaaagggaaggaaggaagggagaaagaaagaaagaggaaagaaagagagagagaagaaagaaagaaaaagaaagaaagaaagaaagaaagaaagggaaagaaagagagaaagaggaatagtgttcatgatgtttaggaatcaccaattctgggggtgctgaattgtgtccccccagattcctatgttgaagagctgatccccactgcctcagagggactgatttagagaaggcattcaaagaggtaagtgaggtcmaatgaagccatatgggtggaccctaaaccaatatggcaggtgtccatgtaaaaagagattgagacacaggcaacacagcctgaggacacagcaggaagggaggcatctgcaaggcagcagttctcagaagaaggcaaacctgctgacattccatcctggatttccagtcttcagagctgtgagaagataaaccactca

SEQ ID NO: 614128 - DNA, 550 bp, Homo sapiens
agaaggaagggagagcaaggaaaggaagggaagggaaaggaaaggaaaggaaaggaaagggaaggaaaaaatgaagggagagcgaggaaaggaaaggaaagggaaggaaggaagggagaaagaaagaaagaggaaagaaagagagagagaagaaagaaagaaaaagaaagaaagaaagaaagaaagaaagggaaagaaagagagaaagaggaatagtgttcatgatgtttaggaatcaccaattctgggggtgctgaattgtgtccccccagattcctatgttgaagagctgatccccactgcctcagagggactgatttagagaaggcattcaaagaggtaagtgaggtccaatgaagccatatgggtggaccctaaaccaatatggcaggtgtccatgtaaaaagagwttgagacacaggcaacacagcctgaggacacagcaggaagggaggcatctgcaaggcagcagttctcagaagaaggcaaacctgctgacattccatcctggatttccagtcttcagagctgtgagaagataaaccactca

SEQ ID NO: 614129 - DNA, 529 bp, Homo sapiens
tttggggttttttttgtttgtttgttttttacttttcatggagattttccttaatttaacccaaaagatatacccayatgacatttgaatatgaaagaggtagtaggacaaagaatttgaagacagtctttcagagccccacaaagtacttgaaatttatcaataaacccctcctggtgcttcccaccatgttccacattccatctccattttaagccatgaaccttcaagtggcatctcctcctgtgaaacctacagtttggagataaattattgatgactaatgactcagaagaaccaaagaaaggatcctctagtggagacacagcatagaaatggtggtccagggtgagaaggaactgcttccagtcccagtgccgcctgtgtggttccagctgtgtacttctcttcctctaatattgtttactcgtctctaatacgggactaataacatatacatcagactattgtgagggttgaatgtaacgatattccaaattgttgcatgtgtccagtacttaacatagtg

SEQ ID NO: 614130 - DNA, 529 bp, Homo sapiens
tttggggttttttttgtttgtttgttttttacttttcatggagattttccttaatttaacccaaaagatatacccatatgacatttgaatatgaaagaggtagtaggacaaagaatttgaagacagtctttcagagccccacaaagtacttgaaatttatcaataaacccctcctggtgcttcccaccatgttccacattccatctccattttaagccatgaaccttcaagtggcatctcctcctgtgaaacctacagtttggagataaattattgatgactaatgactcagaagaaccaaagaaaggatcctctagtggagacacagcatagaaatggtggtccagggtgagaaggaactgcttccagtcccagtgccgcctgtgtggttccagctgtgtacttctcttcctctaatattgtttactcgtytctaatacgggactaataacatatacatcagactattgtgagggttgaatgtaacgatattccaaattgttgcatgtgtccagtacttaacatagtg

SEQ ID NO: 614131 - DNA, 529 bp, Homo sapiens
tttggggttttttttgtttgtttgttttttacttttcatggagattttccttaatttaacccaaaagatatacccatatgacatttgaatatgaaagaggtagtaggacaaagaatttgaagacagtctttcagagccccacaaagtacttgaaatttatcaataaacccctcctggtgcttcccaccatgttccacattccatctccattttaagccatgaaccttcaagtggcatctcctcctgtgaaacctacagtttggagataaattattgatgactaatgactcagaagaaccaaagaaaggatcctctagtggagacacagcatagaaatggtggtccagggtgagaaggaactgcttccagtcccagtgccgcctgtgtggttccagctgtgtacttctcttcctctaatattgtttactcgtctctaatacgggactmataacatatacatcagactattgtgagggttgaatgtaacgatattccaaattgttgcatgtgtccagtacttaacatagtg

SEQ ID NO: 614132 - DNA, 421 bp, Homo sapiens
aagaattctgtaaatatacacaatagggtaggaatgagaaaatctttagaggaaatattcaagtatgtttgatttctagcaaatccagatagatagttttggcaacaaccaagtcataatttkaagtcttgttataggagctaaaattttattcaagggacaactgacttgattagataagatgctgtgcactgcatgtttgcatcaacaaatgcacatgttgaaactctaacaatagaatggcattagaaggaggacctttgggaagtaatttggttttgatgaggatggagttcccacaatggggttagcatcctaataagaagagtaggagactagagccctcttctctcagccatgtgaacatacaacaagaacacctgcaaaccagtaagagggccttcaccagacactggttctg

SEQ ID NO: 614133 - DNA, 422 bp, Homo sapiens
taagaattctgtaaatatacacaatagggtaggaatgagaaaatctttagaggaaatattcaagtatgtttgatttctagcaaatccagatagatagttttggcaacaaccaagtcataatttgaagtcttgttataggagctaaaattttattcaagggacaactgayttgattagataagatgctgtgcactgcatgtttgcatcaacaaatgcacatgttgaaactctaacaatagaatggcattagaaggaggacctttgggaagtaatttggttttgatgaggatggagttcccacaatggggttagcatcctaataagaagagtaggagactagagccctcttctctcagccatgtgaacatacaacaagaacacctgcaaaccagtaagagggccttcaccagacactggttctg

SEQ ID NO: 614134 - DNA, 412 bp, Homo sapiens
agaaaatctttagaggaaatattcaagtatgtttgatttctagcaaatccagatagatagttttggcaacaaccaagtcataatttgaagtcttgttataggagctaaaattttattcaagggacaactgacttgattagatwagatgctgtgcactgcatgtttgcatcaacaaatgcacatgttgaaactctaacaatagaatggcattagaaggaggacctttgggaagtaatttggttttgatgaggatggagttcccacaatggggttagcatcctaataagaagagtaggagactagagccctcttctctcagccatgtgaacatacaacaagaacacctgcaaaccagtaagagggccttcaccagacactggttctgctggcccagattttaatctttgaattc

SEQ ID NO: 614135 - DNA, 422 bp, Homo sapiens
taagaattctgtaaatatacacaatagggtaggaatgagaaaatctttagaggaaatattcaagtatgtttgatttctagcaaatccagatagatagttttggcaacaaccaagtcataatttgaagtcttgttataggagctaaaattttattcaagggacaactgacttgattagataagatgctgtgcactgcatgtttgcatcaacaaatgcacawgttgaaactctaacaatagaatggcattagaaggaggacctttgggaagtaatttggttttgatgaggatggagttcccacaatggggttagcatcctaataagaagagtaggagactagagccctcttctctcagccatgtgaacatacaacaagaacacctgcaaaccagtaagagggccttcaccagacactggttctg

SEQ ID NO: 614136 - DNA, 423 bp, Homo sapiens
ttaagaattctgtaaatatacacaatagggtaggaatgagaaaatctttagaggaaatattcaagtatgtttgatttctagcaaatccagatagatagttttggcaacaaccaagtcataatttgaagtcttgttataggagctaaaattttattcaagggacaactgacttgattagataagatgctgtgcactgcatgtttgcatcaacaaatgcacatgttgaaactctaacaatagaatggcattagaaggaggacctttgggaagtaatttggttttgatgaggatggagttcccacaatggggttagcatcctaataagaagagtaggagactagagccctcttctctcagccatgtgaasatacaacaagaacacctgcaaaccagtaagagggccttcaccagacactggttctg

SEQ ID NO: 614137 - DNA, 422 bp, Homo sapiens
taagaattctgtaaatatacacaatagggtaggaatgagaaaatctttagaggaaatattcaagtatgtttgatttctagcaaatccagatagatagttttggcaacaaccaagtcataatttgaagtcttgttataggagctaaaattttattcaagggacaactgacttgattagataagatgctgtgcactgcatgtttgcatcaacaaatgcacatgttgaaactctaacaatagaatggcattagaaggaggacctttgggaagtaatttggttttgatgaggatggagttcccacaatggggttagcatcctaataagaagagtaggagactagagccctcttctctcagccatgtgaacatacaamaagaacacctgcaaaccagtaagagggccttcaccagacactggttctg

SEQ ID NO: 614138 - DNA, 419 bp, Homo sapiens
gtaaactcagagcgagaacacayttatcgtcaagggcatggtgctagaccattcatgagggactcgcccccatgatccaaacacctctcactgggccccaccgctaacactgaggattacatttcaatatgagatttggaggagacaaacatctaaaccatatcagccacttggctcatgagcccattggacaatgacaggaatggctgggggaaagccactcattgacatccacagaactggtcatcctattattaaaatcctcctctgcctaggtcaccattttgtgagtgtccataagggacacacatatcttcacaattttccatgtcttaccttagaagccccatcaccctctctttcacatctcctccagtacttatcccccagatgataggaccatgtccagcaatacctct

SEQ ID NO: 614139 - DNA, 419 bp, Homo sapiens
gtaaactcagagcgagaacacacttatcgtcaagggcatggtgctagaccattcatgagggactcgcccccatgatccaaacacctctcactgggccccaccgctaacactgargattacatttcaatatgagatttggaggagacaaacatctaaaccatatcagccacttggctcatgagcccattggacaatgacaggaatggctgggggaaagccactcattgacatccacagaactggtcatcctattattaaaatcctcctctgcctaggtcaccattttgtgagtgtccataagggacacacatatcttcacaattttccatgtcttaccttagaagccccatcaccctctctttcacatctcctccagtacttatcccccagatgataggaccatgtccagcaatacctct

SEQ ID NO: 614140 - DNA, 417 bp, Homo sapiens
gctattcaggggaaagaaaattcttttttaaaaatgggattggaaaaactggataagggaaataagtgaacctcgacccctaccttataccgtgctcaaaaattaattcaaaatcattctagacataartgtaaaagttgaaactgcaatgactctagaagaaaatatagagaaaatatctctctgaccttggaggaagcaaaaatttcttgtagttgacaaagacatatataataatcatataatccattaattataagaaaaataaactagacttcatcaaaatttaaaacttctgctcatcaaaagatactaataagattaaaagtagccaggttcagtggctcatgcccataatcccagcactttgggaggctgaagcagggggatcacttgaggccaggagtttgagaccag

SEQ ID NO: 614141 - DNA, 417 bp, Homo sapiens
gctattcaggggaaagaaaattcttttttaaaaatgggattggaaaaactggataagggaaataagtgaacctcgacccctaccttataccgtgctcaaaaattaattcaaaatcattctagacataaatgtaaaagttgaaactgcaatgactctagaagaaaatatagagaaaatatctctctgaccttggaggaagcaaaaatttcttgtagttgacaaagacatatataataatcatataatccattaattataagaaaaataaactagacttcatcaaaatttaaaacttctgcycatcaaaagatactaataagattaaaagtagccaggttcagtggctcatgcccataatcccagcactttgggaggctgaagcagggggatcacttgaggccaggagtttgagaccag

SEQ ID NO: 614142 - DNA, 417 bp, Homo sapiens
gctattcaggggaaagaaaattcttttttaaaaatgggattggaaaaactggataagggaaataagtgaacctcgacccctaccttataccgtgctcaaaaattaattcaaaatcattctagacataaatgtaaaagttgaaactgcaatgactctagaagaaaatatagagaaaatatctctctgaccttggaggaagcaaaaatttcttgtagttgacaaagacatatataataatcatataatccattaattataagaaaaataaactagacttcatcaaaatttaaaacttctgctcatyaaaagatactaataagattaaaagtagccaggttcagtggctcatgcccataatcccagcactttgggaggctgaagcagggggatcacttgaggccaggagtttgagaccag

SEQ ID NO: 614143 - DNA, 417 bp, Homo sapiens
gctattcaggggaaagaaaattcttttttaaaaatgggattggaaaaactggataagggaaataagtgaacctcgacccctaccttataccgtgctcaaaaattaattcaaaatcattctagacataaatgtaaaagttgaaactgcaatgactctagaagaaaatatagagaaaatatctctctgaccttggaggaagcaaaaatttcttgtagttgacaaagacatatataataatcatataatccattaattataagaaaaataaactagacttcatcaaaatttaaaacttctgctcatcaaaagatactaataagattaaaagtagccaggttcagtggctcatrcccataatcccagcactttgggaggctgaagcagggggatcacttgaggccaggagtttgagaccag

SEQ ID NO: 614144 - DNA, 325 bp, Homo sapiens
tttgtcgctcacataggattccagaacactgctacgattgtctgaaagtttgtccctcacataggattccagaacgctgctatgagggtctgaaygtttgtccctcatgcagagtaccagaacactgcttcgagggtctgaatgattgtccctcacataggattccagaacacggctgctggggtctcaatgtttgtgccacacataggattccagaatacggctgctggggtccacttgtaagtccgtcacaatggattccagaacacagctgctgggttctgagtgtttctccctcacttggaatttcagaacactgatatga

SEQ ID NO: 614145 - DNA, 164 bp, Homo sapiens
ttgtccctcacatgggattccagaacactyctgctgtgttctgaatgtttggccctcagaaaggattcctgaactctgctacgacagtatgaatgtttgtccctcacatcagattccaaaacactcctactgtgttctgagtgtttgtccctcacatagaattc

SEQ ID NO: 614146 - DNA, 164 bp, Homo sapiens
ttgtccctcacatgggattccagaacacttctgctgtgttctgaatgtttggccctcagaaaggattcctgaactctgctacgamagtatgaatgtttgtccctcacatcagattccaaaacactcctactgtgttctgagtgtttgtccctcacatagaattc

SEQ ID NO: 614147 - DNA, 164 bp, Homo sapiens
ttgtccctcacatgggattccagaacacttctgctgtgttctgaatgtttggccctcagaaaggattcctgaactctgctacgacrgtatgaatgtttgtccctcacatcagattccaaaacactcctactgtgttctgagtgtttgtccctcacatagaattc

SEQ ID NO: 614148 - DNA, 515 bp, Homo sapiens
gaattccagaacactgcgatgagggtatgaatgttgttcataacataggactccagaaaactcacgctcttctttgaatgtttgtccctcacgttggattccagaacactgctgctggggtctcaaagtttgtccctaacataggattccagaacactgctacgattgtctgaatattttgccttcacataatattccagaacactgctacgagggtctgaatgtttgtccctcaaataggattccagaatgctgctgctgggttctaaatgtttgtcggtcacataggattccagaacactgctgctggggtctgaatgtttgtccctcacatattattccagaacactgctgggttctaaatgtttgttggtcacatcagattccagaacactgctgctggggtgtgaatgtttatccctcacataggattccagaacacagttgctggggtctacatgtatgccagtcacatgggattccagaacrctgctgctgggttcacagtgtttctc

SEQ ID NO: 614149 - DNA, 450 bp, Homo sapiens
gaattccagaacactgctaygagggtctgaatgctggtccctcacataggacaccagaacactgctacggttgtctgaatgtttgtcccttccataggattcctgaacactgcttcgagggtctgaatgtttgtccctcacattgcattccaaaacactcctgttgtgttctgtgagtttgaccctcacataggattccagaacaatcctgctgtggtgtgaatgcttgtccctcacatatggttccagaacactgttgctgggttctgagtgtttgtccctcacaagggattccagaacactgctacgagggtgtgaatgtttgtcccacacaaaggattccagaacactgctactggggtctaaatgtttgtccgtcacatagcattcctgaacaatgttacaagaatctgaatgtttgtacctcacataggattcctgaaccactgc

SEQ ID NO: 614150 - DNA, 450 bp, Homo sapiens
gaattccagaacactgctacgagggtctgaatgctggtccctcacataggacaccagaacactgctacrgttgtctgaatgtttgtcccttccataggattcctgaacactgcttcgagggtctgaatgtttgtccctcacattgcattccaaaacactcctgttgtgttctgtgagtttgaccctcacataggattccagaacaatcctgctgtggtgtgaatgcttgtccctcacatatggttccagaacactgttgctgggttctgagtgtttgtccctcacaagggattccagaacactgctacgagggtgtgaatgtttgtcccacacaaaggattccagaacactgctactggggtctaaatgtttgtccgtcacatagcattcctgaacaatgttacaagaatctgaatgtttgtacctcacataggattcctgaaccactgc

SEQ ID NO: 614151 - DNA, 450 bp, Homo sapiens
gaattccagaacactgctacgagggtctgaatgctggtccctcacataggacaccagaacactgctacggttgtctgaatgtttgtcccttccataggattcctgaacactgcttcgagggtctgaatgtttgtccctcacattgcattccaaaacactcctgttgtgttctgtgagtttgaccctcacataggattccagaacaatcctgctgtggtgtgaatgcttgtccctcacatayggttccagaacactgttgctgggttctgagtgtttgtccctcacaagggattccagaacactgctacgagggtgtgaatgtttgtcccacacaaaggattccagaacactgctactggggtctaaatgtttgtccgtcacatagcattcctgaacaatgttacaagaatctgaatgtttgtacctcacataggattcctgaaccactgc

SEQ ID NO: 614152 - DNA, 450 bp, Homo sapiens
gaattccagaacactgctacgagggtctgaatgctggtccctcacataggacaccagaacactgctacggttgtctgaatgtttgtcccttccataggattcctgaacactgcttcgagggtctgaatgtttgtccctcacattgcattccaaaacactcctgttgtgttctgtgagtttgaccctcacataggattccagaacaatcctgctgtggtgtgaatgcttgtccctcacatatggttccagaacactgttgctgggttctgagtgtttgtccctcacaarggattccagaacactgctacgagggtgtgaatgtttgtcccacacaaaggattccagaacactgctactggggtctaaatgtttgtccgtcacatagcattcctgaacaatgttacaagaatctgaatgtttgtacctcacataggattcctgaaccactgc

SEQ ID NO: 614153 - DNA, 550 bp, Homo sapiens
gaattccagaacactgcgacgagtttctgaacgtttgtccataacattggattccaaaacactcttgctgttgtttgaatgtttgtccgtcacacaggattccagaatactgctgctggggtctgaatgtttgtcccttacgaaagattctagaacactgctatgattgtctgaatgtttgtctctaatacagggtcccagaacactgtgacgagtgtctgaatgtttgtccataatataggtttccagaacacagctgctgttgtttgtttttccctcacaggattccagaacaatactgcaattgtatgagcgtttgtccctcacattggattccagaacactgcttcgaggttctgaatgtttgtccctcacactsaattacagaacacagctggtggggtggaaatgtttgtccgtcacataggattccaggacagtgccacgagggtctgaaagtttgttcctcacaggggattccagatcactcccgatgtgtctgaatgtttgtccctcacacaggattgcataacactgctatgatggtctg

SEQ ID NO: 614154 - DNA, 414 bp, Homo sapiens
tgctcattaacccatcaataccagagagaagaggtattgctggacatggtcctatcatctgggggataagtactggaggagatgtgaaagagagggtgatggggcttctaaggtaagacatggaaaattgtgaagatatttgtgtcccttatggacactcaccaaatggtgacctaggcagaggaggattttaataataggatgaccagttctgtggatgtcartgagtggctttcccccagccattcctgtcattgtccaatgggctcatgagccaagtggctgatatggtttagatgtttgtctcctccaaatctcatattgaaatgtaatcctcagtgttagcggtggggcccagtgagaggtgtttggatcatgggggcgagtccctcatgaatggtctagcaccatgcc

SEQ ID NO: 614155 - DNA, 599 bp, Homo sapiens
agagtgaaaagttaaatgacaccataaaaagcaaccagaaaattccagaaggggaaatattctgcaggacaactgactagtttttcaacaatcaatttcattaaataaatacataaacaaagagtgagggtattttccaggttaaaaaaagtcttgagctaaataatcaaatgcaatgtgtgtcccttgattagaagaaactaatttgaacaaaccagccacaaaagatatttcagggagaccaagctggaaggatcacttgaggccaggtgtttgagaccagcctgggcaacgtagtaagacctccayctctacaaaaacaataaattagctgggcatggtggtgtgcacctatagtcctagctactcaggaagctgaggcaggaagatcacttgagcccaggaatttgaggctgcaatgagctatgattgtttcactgcacttcaggctgtgtgaaagagcaagactttgtctcaaaaaataaaaggacatttcataataattgaggaaatctgaatgtggactgggtaataaatgatataaaaaaaccattttttattttgtttgaaaagatgatttcgtaactatacaggaaaat

SEQ ID NO: 614156 - DNA, 500 bp, Homo sapiens
tgcctccatgattcaattacctctccctgggtccccatcatgatatgtgaggattatgagaactacaattcaagatgagatttggttggagacacagccaaaccatatcatggggtctcactttattgccccggctgatttcaaactcctgggctcaagtgatcctcctgatttggcctcccaaagtgctgggaatacaggcatgagccaccatgsccagtcctaaagtctaaattcttaacatctaaaatccagaaaatcacaatcacaggagagttgtaccacgttagttgcatcatgttaggtacaactgttgctttgttttctttttatttggaaattatgtatggtttaaggaggtccatatgggtgccacatctacaaggggtggacttgcagacttaatttcaggtgtcaacttgactggattaaggaatccctggaaagctgggaaagcattattttgggtatgactgtgatggttttctcagaagagatca

SEQ ID NO: 614157 - DNA, 518 bp, Homo sapiens
tgcctccatgattcaattacctctccctgggtccccatcatgatatgtgaggattatgagaactacaattcaagatgagatttggttggagacacagccaaaccatatcatggggtctcactttattgccccggctgatttcaaactcctgggctcaagtgatcctcctgatttggcctcccaaagtgctgggaatacaggcatgagccaccatgcccagtcctaaagtctaaattcttaacatctaaaatccagaaaatcacaatcacaggagagttgtaccamgttagttgcatcatgttaggtacaactgttgctttgttttctttttatttggaaattatgtatggtttaaggaggtccatatgggtgccacatctacaaggggtggacttgcagacttaatttcaggtgtcaacttgactggattaaggaatccctggaaagctgggaaagcattattttgggtatgactgtgatggttttctcagaagagatcagtgtgtgggtctgagcag

SEQ ID NO: 614158 - DNA, 518 bp, Homo sapiens
tgcctccatgattcaattacctctccctgggtccccatcatgatatgtgaggattatgagaactacaattcaagatgagatttggttggagacacagccaaaccatatcatggggtctcactttattgccccggctgatttcaaactcctgggctcaagtgatcctcctgatttggcctcccaaagtgctgggaatacaggcatgagccaccatgcccagtcctaaagtctaaattcttaacatctaaaatccagaaaatcacaatcacaggagagttgtaccacgttagttgcatcrtgttaggtacaactgttgctttgttttctttttatttggaaattatgtatggtttaaggaggtccatatgggtgccacatctacaaggggtggacttgcagacttaatttcaggtgtcaacttgactggattaaggaatccctggaaagctgggaaagcattattttgggtatgactgtgatggttttctcagaagagatcagtgtgtgggtctgagcag

SEQ ID NO: 614159 - DNA, 518 bp, Homo sapiens
tgcctccatgattcaattacctctccctgggtccccatcatgatatgtgaggattatgagaactacaattcaagatgagatttggttggagacacagccaaaccatatcatggggtctcactttattgccccggctgatttcaaactcctgggctcaagtgatcctcctgatttggcctcccaaagtgctgggaatacaggcatgagccaccatgcccagtcctaaagtctaaattcttaacatctaaaatccagaaaatcacaatcacaggagagttgtaccacgttagttgcatcatgttaggtacaactgttgctttgytttctttttatttggaaattatgtatggtttaaggaggtccatatgggtgccacatctacaaggggtggacttgcagacttaatttcaggtgtcaacttgactggattaaggaatccctggaaagctgggaaagcattattttgggtatgactgtgatggttttctcagaagagatcagtgtgtgggtctgagcag

SEQ ID NO: 614160 - DNA, 518 bp, Homo sapiens
tgcctccatgattcaattacctctccctgggtccccatcatgatatgtgaggattatgagaactacaattcaagatgagatttggttggagacacagccaaaccatatcatggggtctcactttattgccccggctgatttcaaactcctgggctcaagtgatcctcctgatttggcctcccaaagtgctgggaatacaggcatgagccaccatgcccagtcctaaagtctaaattcttaacatctaaaatccagaaaatcacaatcacaggagagttgtaccacgttagttgcatcatgttaggtacaactgttgctttgttttctttttatttggaaattatgtatggtttaaggaggtccatatgggtgccamatctacaaggggtggacttgcagacttaatttcaggtgtcaacttgactggattaaggaatccctggaaagctgggaaagcattattttgggtatgactgtgatggttttctcagaagagatcagtgtgtgggtctgagcag

SEQ ID NO: 614161 - DNA, 333 bp, Homo sapiens
ccccaaattataatgacaagtttttaattaggtgtgatcaargcttctaaaagtgaattgcaagttgttaccagtaaaatttatatcttccattcagcccagctcatttgccagaaaattcaggtgagtggattggccaggccatatggcaatgatgaaaattttagtttaaaaatgtgtcatttgtctgtattggcattccttccacctgataaaattccaggagcttttgataaattaaaaccacaattgcctgaagaagccagaaatattacatactggtttgaaaataatgatgtgcaaggtaggataagagtcatttaggcaatggtg

SEQ ID NO: 614162 - DNA, 333 bp, Homo sapiens
ccccaaattataatgacaagtttttaattaggtgtgatcaaagcttctaaaagtgaattgcaagttgttaccagtaaaatttatatcttccattcagcccagctcatttgccagaaaattcaggtgagtggattggccaggccatatggcaatgatgaaaattttagtttaaaaatgtgtcatttgtctgtattggcattccttccacctgataaaattccaggagcttttgataaattaaaaccacaattgcctgaagaagccagaaatattacatrctggtttgaaaataatgatgtgcaaggtaggataagagtcatttaggcaatggtg

SEQ ID NO: 614163 - DNA, 333 bp, Homo sapiens
ccccaaattataatgacaagtttttaattaggtgtgatcaaagcttctaaaagtgaattgcaagttgttaccagtaaaatttatatcttccattcagcccagctcatttgccagaaaattcaggtgagtggattggccaggccatatggcaatgatgaaaattttagtttaaaaatgtgtcatttgtctgtattggcattccttccacctgataaaattccaggagcttttgataaattaaaaccacaattgcctgaagaagccagaaatattacatactgrtttgaaaataatgatgtgcaaggtaggataagagtcatttaggcaatggtg

SEQ ID NO: 614164 - DNA, 582 bp, Homo sapiens
gtcatgatttaatgataaagaggtcatcttatcaagaggacataacaattgtaaacatatatgcatccaacattgaagcacttaaatatgtaaagcaaatattagtggacatgaaggaagaaatatacagcaatataacactaataggggacttcagtactccacttgcaacaatggagagatcaaccagacaaaaaattaacaagacaacactaaatttgaactatacttcagaccaaatggacctaccaaacctacattcatccaacaacagcagaatatacattcttctctagcatacatagaacattctccaggatagaccatatgttaggccacaaaataaaccttaacaaattcaaaaagattgaaatcatgtctagtattgtttccaaccacaatggtgtgaagctaaaaatcaataacaagaggaatcttggaaaatttacaaatatgtggaaattaaacaacatgcttatgatgaactaatgggtcaaagaagaaatcaasagggaaattaaaaaatattttgagattaatgacaatggaaacacaatgtatcaaaacctacagtatgcagca

SEQ ID NO: 614165 - DNA, 582 bp, Homo sapiens
gtcatgatttaatgataaagaggtcatcttatcaagaggacataacaattgtaaacatatatgcatccaacattgaagcacttaaatatgtaaagcaaatattagtggacatgaaggaagaaatatacagcaatataacactaataggggacttcagtactccacttgcaacaatggagagatcaaccagacaaaaaattaacaagacaacactaaatttgaactatacttcagaccaaatggacctaccaaacctacattcatccaacaacagcagaatatacattcttctctagcatacatagaacattctccaggatagaccatatgttaggccacaaaataaaccttaacaaattcaaaaagattgaaatcatgtctagtattgtttccaaccacaatggtgtgaagctaaaaatcaataacaagaggaatcttggaaaatttacaaatatgtggaaattaaacaacatgcttatgatgaactaatgggtcaaagaagaaatcaagagggaaattaaaaaataytttgagattaatgacaatggaaacacaatgtatcaaaacctacagtatgcagca

SEQ ID NO: 614166 - DNA, 517 bp, Homo sapiens
tgtggagaaaagggaacatttacacataattggtgcgaatgtaaattagttcaaccactgttgaaagcagtttggaaatttctcagagaatttaaaatagaaattcctttcaagccaacaactccattactggtatatgacccaaagaaagtcagttattctaccaaaaagagatatgcacttgcatgttcatcgcaacactattcacaatagcaaagacatggagtcagcctaggtgcccatcaacagtggaytggatcaataaaatgtggtacatccacacagtattattaggccattcttgcattgctatgaagaaatacctgagactgggtaatttgtaaggaaaagagatttaattggctcatagctctgcaggctgtacgggaagcatggtgacggcatctgcctggcgcctgtggagtctccagggagcttttactcatgatggaaggccaagagggagtaggtacttcacatggccagagcaggagcaagagagaatgggagtaggggt

SEQ ID NO: 614167 - DNA, 517 bp, Homo sapiens
tgtggagaaaagggaacatttacacataattggtgcgaatgtaaattagttcaaccactgttgaaagcagtttggaaatttctcagagaatttaaaatagaaattcctttcaagccaacaactccattactggtatatgacccaaagaaagtcagttattctaccaaaaagagatatgcacttgcatgttcatcgcaacactattcacaatagcaaagacatggagtcagcctaggtgcccatcaacagtggattggatcaataaaatgtggtacatccacacagtattattaggccattcttgcattgctatgaagaaatacctgagactgggtaatttgtaaggaaaagagatttaattggctcatagctctgcaggctgtacrggaagcatggtgacggcatctgcctggcgcctgtggagtctccagggagcttttactcatgatggaaggccaagagggagtaggtacttcacatggccagagcaggagcaagagagaatgggagtaggggt

SEQ ID NO: 614168 - DNA, 517 bp, Homo sapiens
tgtggagaaaagggaacatttacacataattggtgcgaatgtaaattagttcaaccactgttgaaagcagtttggaaatttctcagagaatttaaaatagaaattcctttcaagccaacaactccattactggtatatgacccaaagaaagtcagttattctaccaaaaagagatatgcacttgcatgttcatcgcaacactattcacaatagcaaagacatggagtcagcctaggtgcccatcaacagtggattggatcaataaaatgtggtacatccacacagtattattaggccattcttgcattgctatgaagaaatacctgagactgggtaatttgtaaggaaaagagatttaattggctcatagctctgcaggctgtacgggaagcatggtgacggcatctgcctggygcctgtggagtctccagggagcttttactcatgatggaaggccaagagggagtaggtacttcacatggccagagcaggagcaagagagaatgggagtaggggt

SEQ ID NO: 614169 - DNA, 365 bp, Homo sapiens
  misc_feature 244, 245, 246, 247, 248, 249, 250, 251, 252, 253, 254, 255,256, 257, 258, 259, 260, 261, 262, 263, 264, 265, 266, 267,268, 269, 270, 271, 272, 273, 274, 275, 276, 277, 278, 279,280, 281, 282, 283, 284, 285, 286, 287, 288, 289, 290: n = A,T,C or G
  misc_feature 291, 292, 293, 294, 295, 296, 297, 298, 299, 300, 301, 302,303, 304, 305, 306, 307, 308, 309, 310, 311, 312, 313, 314,315, 316, 317, 318, 319, 320, 321, 322, 323, 324, 325, 326,327, 328, 329, 330, 331, 332, 333, 334, 335, 336, 337: n = A,T,C or G
  misc_feature 338, 339, 340, 341, 342, 343: n = A,T,C or G
tcactatcacaaggacggcatcaggccatgagagatccacccccatgacccaaacacctcctaccaggccycacctccaacactgaggattacatttcaccatgagatttataggggccaccttccaaaccatttcacacaccatggaatactatgcagccataaaaattaacaaaatcatgtcctttgaagcaacttggatgcagctgaaggccattatcctaagtaaattaatgcaggaatnnnnnnnnnnnnnnnnnnnnnnnnnnnnnnnnnnnnnnnnnnnnnnnnnnnnnnnnnnnnnnnnnnnnnnnnnnnnnnnnnnnnnnnnnnnnnnnnnnnnccgggactactagaggggagaa

SEQ ID NO: 614170 - DNA, 604 bp, Homo sapiens
  misc_feature 244, 245, 246, 247, 248, 249, 250, 251, 252, 253, 254, 255,256, 257, 258, 259, 260, 261, 262, 263, 264, 265, 266, 267,268, 269, 270, 271, 272, 273, 274, 275, 276, 277, 278, 279,280, 281, 282, 283, 284, 285, 286, 287, 288, 289, 290: n = A,T,C or G
  misc_feature 291, 292, 293, 294, 295, 296, 297, 298, 299, 300, 301, 302,303, 304, 305, 306, 307, 308, 309, 310, 311, 312, 313, 314,315, 316, 317, 318, 319, 320, 321, 322, 323, 324, 325, 326,327, 328, 329, 330, 331, 332, 333, 334, 335, 336, 337: n = A,T,C or G
  misc_feature 338, 339, 340, 341, 342, 343: n = A,T,C or G
tcactatcacaaggacggcatcaggccatgagagatccacccccatgacccaaacacctcctaccaggcctcacctccaacactgaggattacatttcrccatgagatttataggggccaccttccaaaccatttcacacaccatggaatactatgcagccataaaaattaacaaaatcatgtcctttgaagcaacttggatgcagctgaaggccattatcctaagtaaattaatgcaggaatnnnnnnnnnnnnnnnnnnnnnnnnnnnnnnnnnnnnnnnnnnnnnnnnnnnnnnnnnnnnnnnnnnnnnnnnnnnnnnnnnnnnnnnnnnnnnnnnnnnnccgggactactagaggggagaaggaggaaggcaaggtttgacaaactattgggtactatgctcatgtattaatctgttctcacactgctatatagaactacctgaggctgggtaatttataaagaaaagaggtttaactgactcacagttccacaggctgtacaggaaacatggctgggaggcttcaggaaacttataatcatggcagaaggtgaagggggaagcaaggcacgttctaccatggtggcaggagagcaagtg

SEQ ID NO: 614171 - DNA, 365 bp, Homo sapiens
  misc_feature 244, 245, 246, 247, 248, 249, 250, 251, 252, 253, 254, 255,256, 257, 258, 259, 260, 261, 262, 263, 264, 265, 266, 267,268, 269, 270, 271, 272, 273, 274, 275, 276, 277, 278, 279,280, 281, 282, 283, 284, 285, 286, 287, 288, 289, 290: n = A,T,C or G
  misc_feature 291, 292, 293, 294, 295, 296, 297, 298, 299, 300, 301, 302,303, 304, 305, 306, 307, 308, 309, 310, 311, 312, 313, 314,315, 316, 317, 318, 319, 320, 321, 322, 323, 324, 325, 326,327, 328, 329, 330, 331, 332, 333, 334, 335, 336, 337: n = A,T,C or G
  misc_feature 338, 339, 340, 341, 342, 343: n = A,T,C or G
tcactatcacaaggacggcatcaggccatgagagatccacccccatgacccaaacacctcctaccaggcctcacctccaacactgaggattacatttcaccatgaratttataggggccaccttccaaaccatttcacacaccatggaatactatgcagccataaaaattaacaaaatcatgtcctttgaagcaacttggatgcagctgaaggccattatcctaagtaaattaatgcaggaatnnnnnnnnnnnnnnnnnnnnnnnnnnnnnnnnnnnnnnnnnnnnnnnnnnnnnnnnnnnnnnnnnnnnnnnnnnnnnnnnnnnnnnnnnnnnnnnnnnnnccgggactactagaggggagaa

SEQ ID NO: 614172 - DNA, 566 bp, Homo sapiens
  misc_feature 189, 190, 191, 192, 193, 194, 195, 196, 197, 198, 199, 200,201, 202, 203, 204, 205, 206, 207, 208, 209, 210, 211, 212,213, 214, 215, 216, 217, 218, 219, 220, 221, 222, 223, 224,225, 226, 227, 228, 229, 230, 231, 232, 233, 234, 235: n = A,T,C or G
  misc_feature 236, 237, 238, 239, 240, 241, 242, 243, 244, 245, 246, 247,248, 249, 250, 251, 252, 253, 254, 255, 256, 257, 258, 259,260, 261, 262, 263, 264, 265, 266, 267, 268, 269, 270, 271,272, 273, 274, 275, 276, 277, 278, 279, 280, 281, 282: n = A,T,C or G
  misc_feature 283, 284, 285, 286, 287, 288: n = A,T,C or G
acctcctaccaggcctcacctccaacactgaggattacatttcaccatgagatttataggggccaccttccaaaccatttcacacaccatggaatactatgcagccataaaaattaacaaaatcatgtcctttgaagcaacwtggatgcagctgaaggccattatcctaagtaaattaatgcaggaatnnnnnnnnnnnnnnnnnnnnnnnnnnnnnnnnnnnnnnnnnnnnnnnnnnnnnnnnnnnnnnnnnnnnnnnnnnnnnnnnnnnnnnnnnnnnnnnnnnnnccgggactactagaggggagaaggaggaaggcaaggtttgacaaactattgggtactatgctcatgtattaatctgttctcacactgctatatagaactacctgaggctgggtaatttataaagaaaagaggtttaactgactcacagttccacaggctgtacaggaaacatggctgggaggcttcaggaaacttataatcatggcagaaggtgaagggggaagcaaggcacgttctaccatggtggcaggagagcaagtgagccaggggggatgtgc

SEQ ID NO: 614173 - DNA, 365 bp, Homo sapiens
  misc_feature 244, 245, 246, 247, 248, 249, 250, 251, 252, 253, 254, 255,256, 257, 258, 259, 260, 261, 262, 263, 264, 265, 266, 267,268, 269, 270, 271, 272, 273, 274, 275, 276, 277, 278, 279,280, 281, 282, 283, 284, 285, 286, 287, 288, 289, 290: n = A,T,C or G
  misc_feature 291, 292, 293, 294, 295, 296, 297, 298, 299, 300, 301, 302,303, 304, 305, 306, 307, 308, 309, 310, 311, 312, 313, 314,315, 316, 317, 318, 319, 320, 321, 322, 323, 324, 325, 326,327, 328, 329, 330, 331, 332, 333, 334, 335, 336, 337: n = A,T,C or G
  misc_feature 338, 339, 340, 341, 342, 343: n = A,T,C or G
tcactatcacaaggacggcatcaggccatgagagatccacccccatgacccaaacacctcctaccaggcctcacctccaacactgaggattacatttcaccatgagatttataggggccaccttccaaaccatttcacacaccatggaatactatgcagccataaaaattaacaaaatcatgtcctttgaagcaacttggatgcagctgaaggccattatcctaagyaaattaatgcaggaatnnnnnnnnnnnnnnnnnnnnnnnnnnnnnnnnnnnnnnnnnnnnnnnnnnnnnnnnnnnnnnnnnnnnnnnnnnnnnnnnnnnnnnnnnnnnnnnnnnnnccgggactactagaggggagaa

SEQ ID NO: 614174 - DNA, 587 bp, Homo sapiens
  misc_feature 213, 214, 215, 216, 217, 218, 219, 220, 221, 222, 223, 224,225, 226, 227, 228, 229, 230, 231, 232, 233, 234, 235, 236,237, 238, 239, 240, 241, 242, 243, 244, 245, 246, 247, 248,249, 250, 251, 252, 253, 254, 255, 256, 257, 258, 259: n = A,T,C or G
  misc_feature 260, 261, 262, 263, 264, 265, 266, 267, 268, 269, 270, 271,272, 273, 274, 275, 276, 277, 278, 279, 280, 281, 282, 283,284, 285, 286, 287, 288, 289, 290, 291, 292, 293, 294, 295,296, 297, 298, 299, 300, 301, 302, 303, 304, 305, 306: n = A,T,C or G
  misc_feature 307, 308, 309, 310, 311, 312: n = A,T,C or G
gagatccacccccatgacccaaacacctcctaccaggcctcacctccaacactgaggattacatttcaccatgagatttataggggccaccttccaaaccatttcacacaccatggaatactatgcagccataaaaattaacaaaatcatgtcctttgaagcaacttggatgcagctgaaggccattatcctaagtaaattaatgcaggaatnnnnnnnnnnnnnnnnnnnnnnnnnnnnnnnnnnnnnnnnnnnnnnnnnnnnnnnnnnnnnnnnnnnnnnnnnnnnnnnnnnnnnnnnnnnnnnnnnnnnccgggactactagaggggagaaggaggaaggcaaggtttgacaaactattgggtactatgctcatgtattaatctgttctcacactgctatatagaactacctgaggctgggtaatttataaagaaaagaggtttaactgactcacagttccacaggctgtacaggaarcatggctgggaggcttcaggaaacttataatcatggcagaaggtgaagggggaagcaaggcacgttctaccatggtggcaggagagcaagtgagccaggggggatg

SEQ ID NO: 614175 - DNA, 587 bp, Homo sapiens
  misc_feature 213, 214, 215, 216, 217, 218, 219, 220, 221, 222, 223, 224,225, 226, 227, 228, 229, 230, 231, 232, 233, 234, 235, 236,237, 238, 239, 240, 241, 242, 243, 244, 245, 246, 247, 248,249, 250, 251, 252, 253, 254, 255, 256, 257, 258, 259: n = A,T,C or G
  misc_feature 260, 261, 262, 263, 264, 265, 266, 267, 268, 269, 270, 271,272, 273, 274, 275, 276, 277, 278, 279, 280, 281, 282, 283,284, 285, 286, 287, 288, 289, 290, 291, 292, 293, 294, 295,296, 297, 298, 299, 300, 301, 302, 303, 304, 305, 306: n = A,T,C or G
  misc_feature 307, 308, 309, 310, 311, 312: n = A,T,C or G
gagatccacccccatgacccaaacacctcctaccaggcctcacctccaacactgaggattacatttcaccatgagatttataggggccaccttccaaaccatttcacacaccatggaatactatgcagccataaaaattaacaaaatcatgtcctttgaagcaacttggatgcagctgaaggccattatcctaagtaaattaatgcaggaatnnnnnnnnnnnnnnnnnnnnnnnnnnnnnnnnnnnnnnnnnnnnnnnnnnnnnnnnnnnnnnnnnnnnnnnnnnnnnnnnnnnnnnnnnnnnnnnnnnnnccgggactactagaggggagaaggaggaaggcaaggtttgacaaactattgggtactatgctcatgtattaatctgttctcacactgctatatagaactacctgaggctgggtaatttataaagaaaagaggtttaactgactcacagttccacaggctgtacaggaaacatggctgggaggcttcaggaaacttataatcatggcagaakgtgaagggggaagcaaggcacgttctaccatggtggcaggagagcaagtgagccaggggggatg

SEQ ID NO: 614176 - DNA, 631 bp, Homo sapiens
  misc_feature 237, 238, 239, 240, 241, 242, 243, 244, 245, 246, 247, 248,249, 250, 251, 252, 253, 254, 255, 256, 257, 258, 259, 260,261, 262, 263, 264, 265, 266, 267, 268, 269, 270, 271, 272,273, 274, 275, 276, 277, 278, 279, 280, 281, 282, 283: n = A,T,C or G
  misc_feature 284, 285, 286, 287, 288, 289, 290, 291, 292, 293, 294, 295,296, 297, 298, 299, 300, 301, 302, 303, 304, 305, 306, 307,308, 309, 310, 311, 312, 313, 314, 315, 316, 317, 318, 319,320, 321, 322, 323, 324, 325, 326, 327, 328, 329, 330: n = A,T,C or G
  misc_feature 331, 332, 333, 334, 335, 336: n = A,T,C or G
cacaaggacggcatcaggccatgagagatccacccccatgacccaaacacctcctaccaggcctcacctccaacactgaggattacatttcaccatgagatttataggggccaccttccaaaccatttcacacaccatggaatactatgcagccataaaaattaacaaaatcatgtcctttgaagcaacttggatgcagctgaaggccattatcctaagtaaattaatgcaggaatnnnnnnnnnnnnnnnnnnnnnnnnnnnnnnnnnnnnnnnnnnnnnnnnnnnnnnnnnnnnnnnnnnnnnnnnnnnnnnnnnnnnnnnnnnnnnnnnnnnnccgggactactagaggggagaaggaggaaggcaaggtttgacaaactattgggtactatgctcatgtattaatctgttctcacactgctatatagaactacctgaggctgggtaatttataaagaaaagaggtttaactgactcacagttccacaggctgtacaggaaacatggctgggaggcttcaggaaacttataatcatggcagaaggtgaagkgggaagcaaggcacgttctaccatggtggcaggagagcaagtgagccaggggggatgtgccatatgtttaaaccatc

SEQ ID NO: 614177 - DNA, 587 bp, Homo sapiens
  misc_feature 213, 214, 215, 216, 217, 218, 219, 220, 221, 222, 223, 224,225, 226, 227, 228, 229, 230, 231, 232, 233, 234, 235, 236,237, 238, 239, 240, 241, 242, 243, 244, 245, 246, 247, 248,249, 250, 251, 252, 253, 254, 255, 256, 257, 258, 259: n = A,T,C or G
  misc_feature 260, 261, 262, 263, 264, 265, 266, 267, 268, 269, 270, 271,272, 273, 274, 275, 276, 277, 278, 279, 280, 281, 282, 283,284, 285, 286, 287, 288, 289, 290, 291, 292, 293, 294, 295,296, 297, 298, 299, 300, 301, 302, 303, 304, 305, 306: n = A,T,C or G
  misc_feature 307, 308, 309, 310, 311, 312: n = A,T,C or G
gagatccacccccatgacccaaacacctcctaccaggcctcacctccaacactgaggattacatttcaccatgagatttataggggccaccttccaaaccatttcacacaccatggaatactatgcagccataaaaattaacaaaatcatgtcctttgaagcaacttggatgcagctgaaggccattatcctaagtaaattaatgcaggaatnnnnnnnnnnnnnnnnnnnnnnnnnnnnnnnnnnnnnnnnnnnnnnnnnnnnnnnnnnnnnnnnnnnnnnnnnnnnnnnnnnnnnnnnnnnnnnnnnnnnccgggactactagaggggagaaggaggaaggcaaggtttgacaaactattgggtactatgctcatgtattaatctgttctcacactgctatatagaactacctgaggctgggtaatttataaagaaaagaggtttaactgactcacagttccacaggctgtacaggaaacatggctgggaggcttcaggaaacttataatcatggcagaaggtgaagggggaagcaaggcaygttctaccatggtggcaggagagcaagtgagccaggggggatg

SEQ ID NO: 614178 - DNA, 616 bp, Homo sapiens
  misc_feature 237, 238, 239, 240, 241, 242, 243, 244, 245, 246, 247, 248,249, 250, 251, 252, 253, 254, 255, 256, 257, 258, 259, 260,261, 262, 263, 264, 265, 266, 267, 268, 269, 270, 271, 272,273, 274, 275, 276, 277, 278, 279, 280, 281, 282, 283: n = A,T,C or G
  misc_feature 284, 285, 286, 287, 288, 289, 290, 291, 292, 293, 294, 295,296, 297, 298, 299, 300, 301, 302, 303, 304, 305, 306, 307,308, 309, 310, 311, 312, 313, 314, 315, 316, 317, 318, 319,320, 321, 322, 323, 324, 325, 326, 327, 328, 329, 330: n = A,T,C or G
  misc_feature 331, 332, 333, 334, 335, 336: n = A,T,C or G
cacaaggacggcatcaggccatgagagatccacccccatgacccaaacacctcctaccaggcctcacctccaacactgaggattacatttcaccatgagatttataggggccaccttccaaaccatttcacacaccatggaatactatgcagccataaaaattaacaaaatcatgtcctttgaagcaacttggatgcagctgaaggccattatcctaagtaaattaatgcaggaatnnnnnnnnnnnnnnnnnnnnnnnnnnnnnnnnnnnnnnnnnnnnnnnnnnnnnnnnnnnnnnnnnnnnnnnnnnnnnnnnnnnnnnnnnnnnnnnnnnnnccgggactactagaggggagaaggaggaaggcaaggtttgacaaactattgggtactatgctcatgtattaatctgttctcacactgctatatagaactacctgaggctgggtaatttataaagaaaagaggtttaactgactcacagttccacaggctgtacaggaaacatggctgggaggcttcaggaaacttataatcatggcagaaggtgaagggggaagcaaggcacgttctaccatggtggcaggagagsaagtgagccaggggggatgtgcca

SEQ ID NO: 614179 - DNA, 587 bp, Homo sapiens
  misc_feature 213, 214, 215, 216, 217, 218, 219, 220, 221, 222, 223, 224,225, 226, 227, 228, 229, 230, 231, 232, 233, 234, 235, 236,237, 238, 239, 240, 241, 242, 243, 244, 245, 246, 247, 248,249, 250, 251, 252, 253, 254, 255, 256, 257, 258, 259: n = A,T,C or G
  misc_feature 260, 261, 262, 263, 264, 265, 266, 267, 268, 269, 270, 271,272, 273, 274, 275, 276, 277, 278, 279, 280, 281, 282, 283,284, 285, 286, 287, 288, 289, 290, 291, 292, 293, 294, 295,296, 297, 298, 299, 300, 301, 302, 303, 304, 305, 306: n = A,T,C or G
  misc_feature 307, 308, 309, 310, 311, 312: n = A,T,C or G
gagatccacccccatgacccaaacacctcctaccaggcctcacctccaacactgaggattacatttcaccatgagatttataggggccaccttccaaaccatttcacacaccatggaatactatgcagccataaaaattaacaaaatcatgtcctttgaagcaacttggatgcagctgaaggccattatcctaagtaaattaatgcaggaatnnnnnnnnnnnnnnnnnnnnnnnnnnnnnnnnnnnnnnnnnnnnnnnnnnnnnnnnnnnnnnnnnnnnnnnnnnnnnnnnnnnnnnnnnnnnnnnnnnnnccgggactactagaggggagaaggaggaaggcaaggtttgacaaactattgggtactatgctcatgtattaatctgttctcacactgctatatagaactacctgaggctgggtaatttataaagaaaagaggtttaactgactcacagttccacaggctgtacaggaaacatggctgggaggcttcaggaaacttataatcatggcagaaggtgaagggggaagcaaggcacgttctaccatggtggcaggagagcaagtgagccagggggkatg

SEQ ID NO: 614180 - DNA, 240 bp, Homo sapiens
tcttgaatgtcatcatagggagccaggtgtgaggattcctaaaaattgtacttaatactkgaaaaatctcaaaaagttatatatttacaccagaaaaatctatacaggttttaagttatatgtatatagttgaatactttttatttctatccagtactaagtcattagagttaataatgttgattatttcatactgacctaatgggtagcctttatatatcattgattacttattagtaa

SEQ ID NO: 614181 - DNA, 240 bp, Homo sapiens
tcttgaatgtcatcatagggagccaggtgtgaggattcctaaaaattgtacttaatacttgaaaaatctcaaaaagttatatatttacaccagaaaaatctatacaggttttaagttatatrtatatagttgaatactttttatttctatccagtactaagtcattagagttaataatgttgattatttcatactgacctaatgggtagcctttatatatcattgattacttattagtaa

SEQ ID NO: 614182 - DNA, 540 bp, Homo sapiens
ttcaaatacaatgaatgtggtcagtgggtcacacctggagaaatcattttctaacctgtaatcaagactgaattactcccttcactggaaagaataaaatattaccacataaattcgtattatgataatggcccactatgaatgctttggtgttcttaattttcttaagatttattaatatttctgaagtaactactaaatgccaagcaatatattttctaatttaatctttcattgacttttactttcacttcaattgagctactcactttcatggctataaacttaacttttcaatcacttaaaaattgatttctaatgttataaactttaatgttccactctgtgacctgctctttcagactcttccttactgtcaattcaccttctcttctatctcttccagtgcctcagtatcttgactcttccattttcttttttctttgcttttattaagtagatacatgataatttcacatgttgatggggtacaatgtggtattttratacatgacgcattgttaaaacctctcctcccta

SEQ ID NO: 614183 - DNA, 592 bp, Homo sapiens
ttcagttgctgacaccttgttttctccatttggtgaggcrgtttttcctaggctattcttattttttgtagatgtacatctctttctacacattgatgaattaaatatttatttcaatcttctcagtctgggtttgtttttgactgtttctcagtgggcttgtttagaaattctatgtggatttccattatattccattttagcattaggaggtgcccaaagcaaaggttagacataagtcttgcaatagggcttcaccactgatacaatgtaaatggatgggcccatgggtgatccacagaaaggctgctgtctgttgggggagaacaagtcaggccatcaaatctggacagtctgtgtatcatgtttcccacaatgtggtgcccataaacaacctgtctggtataatgtttcctctggtaggaatggctagccactgctaagtttcatatagtaagtatcgctaacccaatcccttctctatgtccctagcatgcctctggtggttcagctctgttgacactcatggtgctgcttgtgggctgatgcaggagtgagtctactgtgaaggcactcagtatggtggaaaaaa

SEQ ID NO: 614184 - DNA, 592 bp, Homo sapiens
ttcagttgctgacaccttgttttctccatttggtgaggcggtttttcctaggctattcttattttttgtagatgtacatctctttctacacattgatgaattaaatatttatttcaatcttctcagtctgggtttgtttttgactgtttctcagtgggcttgtttagaaattctrtgtggatttccattatattccattttagcattaggaggtgcccaaagcaaaggttagacataagtcttgcaatagggcttcaccactgatacaatgtaaatggatgggcccatgggtgatccacagaaaggctgctgtctgttgggggagaacaagtcaggccatcaaatctggacagtctgtgtatcatgtttcccacaatgtggtgcccataaacaacctgtctggtataatgtttcctctggtaggaatggctagccactgctaagtttcatatagtaagtatcgctaacccaatcccttctctatgtccctagcatgcctctggtggttcagctctgttgacactcatggtgctgcttgtgggctgatgcaggagtgagtctactgtgaaggcactcagtatggtggaaaaaa

SEQ ID NO: 614185 - DNA, 592 bp, Homo sapiens
ttcagttgctgacaccttgttttctccatttggtgaggcggtttttcctaggctattcttattttttgtagatgtacatctctttctacacattgatgaattaaatatttatttcaatcttctcagtctgggtttgtttttgactgtttctcagtgggcttgtttagaaattctatgtggatttccattatattccattttagcattaggaggtgcccaaagcaaaggttagacataagtcttgcaatagggcttcaccactgatacaatgtaaatggaygggcccatgggtgatccacagaaaggctgctgtctgttgggggagaacaagtcaggccatcaaatctggacagtctgtgtatcatgtttcccacaatgtggtgcccataaacaacctgtctggtataatgtttcctctggtaggaatggctagccactgctaagtttcatatagtaagtatcgctaacccaatcccttctctatgtccctagcatgcctctggtggttcagctctgttgacactcatggtgctgcttgtgggctgatgcaggagtgagtctactgtgaaggcactcagtatggtggaaaaaa

SEQ ID NO: 614186 - DNA, 592 bp, Homo sapiens
ttcagttgctgacaccttgttttctccatttggtgaggcggtttttcctaggctattcttattttttgtagatgtacatctctttctacacattgatgaattaaatatttatttcaatcttctcagtctgggtttgtttttgactgtttctcagtgggcttgtttagaaattctatgtggatttccattatattccattttagcattaggaggtgcccaaagcaaaggttagacataagtcttgcaatagggcttcaccactgatacaatgtaaatggatgggcccatgggtgatccacagaaaggctgctgtctgttgggggagaacaagtcaggccatcaaatctggacagtctgtgtatcatgtttcccacaaygtggtgcccataaacaacctgtctggtataatgtttcctctggtaggaatggctagccactgctaagtttcatatagtaagtatcgctaacccaatcccttctctatgtccctagcatgcctctggtggttcagctctgttgacactcatggtgctgcttgtgggctgatgcaggagtgagtctactgtgaaggcactcagtatggtggaaaaaa

SEQ ID NO: 614187 - DNA, 381 bp, Homo sapiens
gagatctacatatatatggtcaacagatttttaataatggtgccaaggctattcaggggaaagaaaattcttttttaaaaatgggattggaaaaactggataagggaaataagtgaacctcgacccctaccttataccgtgctcaaaaattaattcaaaatcattctagacataartgtaaaagttgaaactgcaatgactctagaagaaaatatggagaaaatatctctctgaccttggaggaagcaaaaatttcttgtagttgacaaagacatatataataatcatataatccattaattataagaaaaataaactggacttcatcaaaatttaaaacttctgcccattaaaagatactaataagaagattaaaagtag

SEQ ID NO: 614188 - DNA, 381 bp, Homo sapiens
gagatctacatatatatggtcaacagatttttaataatggtgccaaggctattcaggggaaagaaaattcttttttaaaaatgggattggaaaaactggataagggaaataagtgaacctcgacccctaccttataccgtgctcaaaaattaattcaaaatcattctagacataagtgtaaaagttgaaactgcaatgactctagaagaaaatatggagaaaatatctctctgaccttggaggaagcaaaaatttcttgtagttgacaaagacatatataataatcatataatccattaattataagaaaaataaactggacttcatcaaaatttaaaacttctgcccatyaaaagatactaataagaagattaaaagtag

SEQ ID NO: 614189 - DNA, 522 bp, Homo sapiens
gacacaaacaggatatgcatttgacagaagtgagggattccagatttccatgcagcttccccagtgcatctagaagaggaaactatgctttctattcccagctctgctacctaattgatgtgtgagcttagcagggtaagttaattattttccccaactcacaatctctaatcacttcyaaaatgaagctcaactaaaaatatatgatgcatttcctcggaaggccaaattgacaagtagtattagactttaaataaattgaacatgaaatcaataattgttcaccttttggggttttgctttttttttttttttttttaccttgtatatcttaatgcaagccatttcagattttttttttttgcaacaaggttgagaaacaaataagtagattgaaagatctaaagtataaatgattgctagatgtatagatagttttctgtatgaatcttacttgtcaactatactgtaactttctactgaacaaaaattgtttcttgatttttaaaatatctcaatcct

SEQ ID NO: 614190 - DNA, 522 bp, Homo sapiens
gacacaaacaggatatgcatttgacagaagtgagggattccagatttccatgcagcttccccagtgcatctagaagaggaaactatgctttctattcccagctctgctacctaattgatgtgtgagcttagcagggtaagttaattattttccccaactcacaatctctaatcacttctaaaatgaagctcaactaaaaatatrtgatgcatttcctcggaaggccaaattgacaagtagtattagactttaaataaattgaacatgaaatcaataattgttcaccttttggggttttgctttttttttttttttttttaccttgtatatcttaatgcaagccatttcagattttttttttttgcaacaaggttgagaaacaaataagtagattgaaagatctaaagtataaatgattgctagatgtatagatagttttctgtatgaatcttacttgtcaactatactgtaactttctactgaacaaaaattgtttcttgatttttaaaatatctcaatcct

SEQ ID NO: 614191 - DNA, 522 bp, Homo sapiens
gacacaaacaggatatgcatttgacagaagtgagggattccagatttccatgcagcttccccagtgcatctagaagaggaaactatgctttctattcccagctctgctacctaattgatgtgtgagcttagcagggtaagttaattattttccccaactcacaatctctaatcacttctaaaatgaagctcaactaaaaatatatgatgcatttcctcggaagrccaaattgacaagtagtattagactttaaataaattgaacatgaaatcaataattgttcaccttttggggttttgctttttttttttttttttttaccttgtatatcttaatgcaagccatttcagattttttttttttgcaacaaggttgagaaacaaataagtagattgaaagatctaaagtataaatgattgctagatgtatagatagttttctgtatgaatcttacttgtcaactatactgtaactttctactgaacaaaaattgtttcttgatttttaaaatatctcaatcct

SEQ ID NO: 614192 - DNA, 522 bp, Homo sapiens
gacacaaacaggatatgcatttgacagaagtgagggattccagatttccatgcagcttccccagtgcatctagaagaggaaactatgctttctattcccagctctgctacctaattgatgtgtgagcttagcagggtaagttaattattttccccaactcacaatctctaatcacttctaaaatgaagctcaactaaaaatatatgatgcatttcctcggaaggccaaattgacaagtagtattagactttaaataaattgaacatgaaatcaatamttgttcaccttttggggttttgctttttttttttttttttttaccttgtatatcttaatgcaagccatttcagattttttttttttgcaacaaggttgagaaacaaataagtagattgaaagatctaaagtataaatgattgctagatgtatagatagttttctgtatgaatcttacttgtcaactatactgtaactttctactgaacaaaaattgtttcttgatttttaaaatatctcaatcct

SEQ ID NO: 614193 - DNA, 622 bp, Homo sapiens
attaacatacctgccctctactgtcttttgggtttctgtttcaatgtaagctaatgagagatagcacccttgacagccctatataatactatagccagaagtccctaacttttctattgtttcctatttccttcaccctgctataattttctggatcacatatgttgcctttaacattttccatattatttattttcccactgtatgtaaagcccaaggactttttttcactgctatatcccaagaacctaaaataaatctggcatgtggtaagcgtacaataaatatttgttgaattaatgaatggagaataatgaatgcatgatgaatggcttctctgggagaaataccttgaaggggggcaagagcagaaagaggaatatcagacgggacaytcttcaagtcgagtgttgatagagtcttggactaggctagagccaacagaaatgaaaattagtcatttggtttgagatacatttttggaaggaggatgaacagaatatgcaggtggactggaatattgaagagaggggctgtggtaaatagcctccaaaatggccccaatggtccttgccttttggcatttgtgcctttttgtggtcccctcccacactgaacgatg

SEQ ID NO: 614194 - DNA, 419 bp, Homo sapiens
agagaagaggtattgctggacatggtcctatcatctgggggataagtactggaggagatgtgaaagagagggtgatggggcttctaaggtaagacatggaaaattgtgaagatatttgtgtcccttatggacactcaccaaatggtgacctaggcagaggaggattttaataataggatgaccagttctgtggatgtcaatgagtggctttcccccagccattcctgtcattgtccaatgggctcatgagccaagtggctgatatggtttagatgtttgtctcctccaaatctcatattgaaatgtaatcytcagtgttagcggtggggcccagtgagaggtgtttggatcatgggggcgagtccctcatgaatggtttagcaccatgcccttgatgataaatgtgttctcgctctgag

SEQ ID NO: 614195 - DNA, 419 bp, Homo sapiens
agagaagaggtattgctggacatggtcctatcatctgggggataagtactggaggagatgtgaaagagagggtgatggggcttctaaggtaagacatggaaaattgtgaagatatttgtgtcccttatggacactcaccaaatggtgacctaggcagaggaggattttaataataggatgaccagttctgtggatgtcaatgagtggctttcccccagccattcctgtcattgtccaatgggctcatgagccaagtggctgatatggtttagatgtttgtctcctccaaatctcatattgaaatgtaatcttcagtgttagcggtggggcccagtgagaggtgtttggatcatgggggcgagtccctcatgaatggtytagcaccatgcccttgatgataaatgtgttctcgctctgag

SEQ ID NO: 614196 - DNA, 419 bp, Homo sapiens
agagaagaggtattgctggacatggtcctatcatctgggggataagtactggaggagatgtgaaagagagggtgatggggcttctaaggtaagacatggaaaattgtgaagatatttgtgtcccttatggacactcaccaaatggtgacctaggcagaggaggattttaataataggatgaccagttctgtggatgtcaatgagtggctttcccccagccattcctgtcattgtccaatgggctcatgagccaagtggctgatatggtttagatgtttgtctcctccaaatctcatattgaaatgtaatcttcagtgttagcggtggggcccagtgagaggtgtttggatcatgggggcgagtccctcatgaatggtttagcaccatgcccttgaygataaatgtgttctcgctctgag

SEQ ID NO: 614197 - DNA, 535 bp, Homo sapiens
gtataccaatggtaatgctgctggaagagtagccaggggactggggaaaagaaggcaccatgttatgtgctgggacctcattcattcttcatgtcataaggagccaattcttctctggacttttccacattccatgcaaagtctgtctggcttcctgtccatttactttctggtcattcaaggcctaccactgtccggtgtccagttgctcctcacatgcagatggaaaacctgggccaggtcaaagtctgaagacctagagaactgggcagagctctgggcagtgtgggatctgcccacacctctcagagagaggaactgaggtgrttgttctgagaggcagtgagcagggagaccccgaagccaaaggctggcaggatccagcagggcagaggccagcaggggaattcagggaagagcctcagggctgacaatggggacacctgactacagtcaaggggattcaaagcacagcctggaacctggaggaatcccctggaacatggacacagaaatgcggacagctgaagccatg

SEQ ID NO: 614198 - DNA, 394 bp, Homo sapiens
gaattccttccacaaatgctctgyttatctgattattggttagccagtgatttcctgtcatccacaaaaaaagatgaaatagtaagagaaaagtaaatactaggtgaagtgctttgagccaaagggagtccatataagaagtgatggatggctctgttgggatcccagcagtagtgcatgatgatgttgttgtataaatacgtcagctcctttaaccctcgggggaccctgaagcatgtgtttttcacgggcccctagcgtgctcatgcgggattaagtttcagttgcctactgtggtaattggcttgagaagcctatctttattaattttctcctcttccttgtcttatttctcttctcccctacctgtgttctcttcattcccttcctccct

SEQ ID NO: 614199 - DNA, 402 bp, Homo sapiens
ctgcttatctgattattggttagccagtgatttcctgtcatccacaaaaaaagakgaaatagtaagagaaaagtaaatactaggtgaagtgctttgagccaaagggagtccatataagaagtgatggatggctctgttgggatcccagcagtagtgcatgatgatgttgttgtataaatacgtcagctcctttaaccctcgggggaccctgaagcatgtgtttttcacgggcccctagcgtgctcatgcgggattaagtttcagttgcctactgtggtaattggcttgagaagcctatctttattaattttctcctcttccttgtcttatttctcttctcccctacctgtgttctcttcattcccttcctccctacaaaataaactctgtgagtttgaattc

SEQ ID NO: 614200 - DNA, 377 bp, Homo sapiens
agtgatttcctgtcatccacaaaaaaagatgaaatagtaagagaaaagtaaatactaggtgaagtgctttgagccaaagrgagtccatataagaagtgatggatggctctgttgggatcccagcagtagtgcatgatgatgttgttgtataaatacgtcagctcctttaaccctcgggggaccctgaagcatgtgtttttcacgggcccctagcgtgctcatgcgggattaagtttcagttgcctactgtggtaattggcttgagaagcctatctttattaattttctcctcttccttgtcttatttctcttctcccctacctgtgttctcttcattcccttcctccctacaaaataaactctgtgagtttgaattc

SEQ ID NO: 614201 - DNA, 394 bp, Homo sapiens
gaattccttccacaaatgctctgcttatctgattattggttagccagtgatttcctgtcatccacaaaaaaagatgaaatagtaagagaaaagtaaatactaggtgaagtgctttgagccaaagggagtccatataagaagtgatggatggctctgttgggatcccrgcagtagtgcatgatgatgttgttgtataaatacgtcagctcctttaaccctcgggggaccctgaagcatgtgtttttcacgggcccctagcgtgctcatgcgggattaagtttcagttgcctactgtggtaattggcttgagaagcctatctttattaattttctcctcttccttgtcttatttctcttctcccctacctgtgttctcttcattcccttcctccct

SEQ ID NO: 614202 - DNA, 377 bp, Homo sapiens
agtgatttcctgtcatccacaaaaaaagatgaaatagtaagagaaaagtaaatactaggtgaagtgctttgagccaaagggagtccatataagaagtgatggatggctctgttgggatcccagcagtagtgcatgatgatgttgttgtataaatacrtcagctcctttaaccctcgggggaccctgaagcatgtgtttttcacgggcccctagcgtgctcatgcgggattaagtttcagttgcctactgtggtaattggcttgagaagcctatctttattaattttctcctcttccttgtcttatttctcttctcccctacctgtgttctcttcattcccttcctccctacaaaataaactctgtgagtttgaattc

SEQ ID NO: 614203 - DNA, 365 bp, Homo sapiens
tgattattggttagccagtgatttcctgtcatccacaaaaaaagatgaaatagtaagagaaaagtaaatactaggtgaagtgctttgagccaaagggagtccatataagaagtgatggatggctctgttgggatcccagcagtagtgcatgatgatgttgttgtataaatacgtcagctcctttaaccctcgggggaccctgaagcatgtgtttttcaygggcccctagcgtgctcatgcgggattaagtttcagttgcctactgtggtaattggcttgagaagcctatctttattaattttctcctcttccttgtcttatttctcttctcccctacctgtgttctcttcattcccttcctccct

SEQ ID NO: 614204 - DNA, 377 bp, Homo sapiens
agtgatttcctgtcatccacaaaaaaagatgaaatagtaagagaaaagtaaatactaggtgaagtgctttgagccaaagggagtccatataagaagtgatggatggctctgttgggatcccagcagtagtgcatgatgatgttgttgtataaatacgtcagctcctttaaccctcgggggaccctgaagcatgtgtttttcacgggcccctagcgtgctcatgcrggattaagtttcagttgcctactgtggtaattggcttgagaagcctatctttattaattttctcctcttccttgtcttatttctcttctcccctacctgtgttctcttcattcccttcctccctacaaaataaactctgtgagtttgaattc

SEQ ID NO: 614205 - DNA, 419 bp, Homo sapiens
gagacaaggaagttcactttcaccctgctgtgcaacattgtatagttaagttttagccagagcaattagacaataaaaaaaaataacgaaaaggagcaggtaaaatatatttatttgcaaatggcattgtcttacttatagaaaattccaaagaatacacaagaaagctaataaattaattccacaaagtttcaaggtgcaatgtcaataccaaaaatcagttgtgtttctatataccagcaatgaataactagaaaaggaaattaagaaagcaatttcatttacaatagcatctaaggtaataacatacctaggaataaattaactaagaaggtgaaagacttgtataytgaaaattataaaacgttgctgaaagaaattaggaccaaaattaatggaaagacatcccattaaaaaga

SEQ ID NO: 614206 - DNA, 590 bp, Homo sapiens
tgtagcacctccatgttcgctatcttttttccttctctggccatggaagatgtgcctccttcctcttcaccttcctccatgattgtaagtttcttaaggcctccctggccttgcttcctgtaaagcctactgaaccatgagccaattaaacctcttttctttataaattaccctgtctcargtagttctttatagcaatgtgagaatggactaatacaacacagtacagaagcagcattatgcttgggtactggaccaactgaatccactctcttctcattgatcagtggatcaatgtgtgagtgagccagagagcgggctttgaggctctgctaatggggcttgctgggaacacacatatttttgtgtttttgccattgtggggagttttcttttctttgctctatacgatacattttagcattatttcaatatagattgggcatggaagaattcaggtttcagttttttctcttcacataaaagcttggattctctttggataacatatagaatgacagctttcaattagctaaagtccactgtgaggaccacttagtggaaacagtgtgtcagtaaagtgccatgat

SEQ ID NO: 614207 - DNA, 590 bp, Homo sapiens
tgtagcacctccatgttcgctatcttttttccttctctggccatggaagatgtgcctccttcctcttcaccttcctccatgattgtaagtttcttaaggcctccctggccttgcttcctgtaaagcctactgaaccatgagccaattaaacctcttttctttataaattaccctgtctcaggtagttctttatagcaatgtgagaatggactaatacaacacagtacagaagcagcattatgcttgggtactggaccaactgaatccactctcttctcattgatcagtggatcaatgtgtgagtgagccagagagcgggctttgaggctctgctaatggggcttgctgggaacacacatatttttgtgtttttgccattgtggggagttttcttttctttgctctatacgatacattttagcattatttcaatatagattgggcatggaagaattcargtttcagttttttctcttcacataaaagcttggattctctttggataacatatagaatgacagctttcaattagctaaagtccactgtgaggaccacttagtggaaacagtgtgtcagtaaagtgccatgat

SEQ ID NO: 614208 - DNA, 630 bp, Homo sapiens
ctggtattacaatcctttactaaatagatcttaataaattagttctctcataacttccacatgatatataatcattaaaaaaatcaagcttgttgatacacatcaggcaccttggtagagattgggacctagagccaggtatgatgcatctccaacttttgttctcatggccttagtgggggagactcgtaattgtaatatagaagtgatgagtgaacaatagagttatatacctatgtgctataggggcattagtgaaatagtaactaatccaccctggagttgaataagggagagttggaacttcaagatggacatttacaaagtgtctccrtttgtatcctcagccagcactctacttccttgagggtggaaatgtgattctcttttagttttggagtcctaagtcctagcacaggtacttagtatgtgctcgataaatgcaaatggaaataaaatagaagcgtagagagtttgacaagggcttctggatcgtcaactgtgctgtaaagaaaagagtttagcttgagaggcagcaaactgtagcctgtggattaaatctgtccgtttttgtaaattagaatttattggaacacaactacatctatttgtttatatattgttgatggc

SEQ ID NO: 614209 - DNA, 625 bp, Homo sapiens
tgcttaaattctctgagacccagtttttaaaattctaagtggggtaattcaatatcaagttgaagatcaaatgatctgctatcacatatttggatgtatctttttagttataaattcccctaaaacatgcaacataattgaataggaactatcaagttttgtgatttctctcctttttttgttggtggatttaccttctctgttgtggattaatacctattggggcatagtaaggtgaaatctgtgtttttttttcttgcacaattaacattcactcaaagggcatcattggcacctcctataacactcctgtaacacctcctataacactgtgagctcctcccagagctcacagtgtggtggaggaggtcaacatggtcttgtttaaagtgtggaatgcaggagaatgatattttggtgtcggtctggcttcttctgcagccygcataagaaaaaggtttcttttgcttacccctgtggcatgaagaaactgtaaggcaaactcttttccctttccgggagaaaccattagaaatttgagattcctcttggtgggtcgggtctcacaggacatgactttattgactgtgagtggttttgaattgtgatccatggaacatggttc

SEQ ID NO: 614210 - DNA, 587 bp, Homo sapiens
tttcttttgcttacccctgtggcatgaagaaactgtaaggcaaactcttttccctttccgggagaaaccattagaaatttgagattcctcttggtgggtcgggtctcacaggacatgactttattgactgtgagtggttttgaattgtgatccatggaacatggttcattgcagacccttcattttgaggtttctacaaaggaggaaattcttcaggctgattctctgaatgtgctaaatgttacctgaaggcctataatagaatgtaaatatgccacactcttagcaccattcttctctcttgtatttagagcagacactgttaatcaatccctgtaactcttcagctcagcctrgaggtaattaccttagaatcttccgcaacacagtatttcaagcatcatttactatcaattgactgtaaaaagagagattaaattcatttgtcctttgccatccagggcctatggcataatgatgatcagtagcctgggatagaacagagatagccttatccacaatgtactgtttacattagataatcagtgttggtgatttacctgagttaaagacttcagtcttagaga

SEQ ID NO: 614211 - DNA, 561 bp, Homo sapiens
ttttcttgaagaatgtctgttcattaaattgctgcctgaggatttacasggcatacagatccatctctttagcccctgttatatgatggctattggggttaaggcaaattcttgcaatgacttagacaactttggaaatgaagtaccaaaatttcagggagatttccagcctaattttctactttgctccttcttcactcttgttctccatttggctgtctctctctctggtaactaccttgacctgctgccagtatccactaggaatctatatttgtcatattgaatatgcaataaacatgaatttgatctgtgtattacatacccatatagcagctcaaatttatacaaagtgacattttcaccacagctctactgaggcaataagcagaaatttataatagcctcaaaagcagagccttaaaaaaaaaaaaggggaaatttgggtcaggatttcacagaagaaatagcccttccttgtgttattgccttgtgtcccccttctccatctttacattttcttccttttttctaccctttcttctccatacaagtgcagtg

SEQ ID NO: 614212 - DNA, 569 bp, Homo sapiens
agtgacattttcaccacagctctactgaggcaataagcagaaatttataatagcctcaaaagcagagccttaaaaaaaaaaaaggggaaatttgggtcaggatttcacagaagaaatagcccttccttgtgttattgccttgtgtcccccttctccatctttacattttcttccttttttctaccctttcttctccatacaagtgcagtgcagaggataatgcttgggctctggagtctcattcatttattcaaccagtgcatattaaatacctatgatatgtcagatgctgttctgggcaatggaaaaagacccgcaaatgaaaagtggcaatgtcattgttcctgcaaatttttcattttgttagtaggggataaatgttaaacaagaccaacaaatgttasagggtgataaatacttagaagaaaaataaaacttggtaagagacagagtgatggggtattattttcagtaaacttagcagggaggctctctctgatgttcgagcagagccctgaatgaatctaagtgaatgtcagggtgaagatcatgccctggagagggaaaga

SEQ ID NO: 614213 - DNA, 421 bp, Homo sapiens
gtcgcatgaaagtgcacctctcctagcatctgcctatagtaagtgactgctggttgttattctcgttccaactatttaaaataaaggtgaaaggtggggtgggaggaaaggcagaggtattagcagcagtaacacctggatggatcaccccactccaggaactgggcacaaaaagcaaggactgaatggttagagagagggcgaaggcactgagctgggtgaacagatggaggccagggggcattttcagattagggctacgtggttmctacctggacacttgaaaagctgaatcatctgtctttttcatgccaatcttaaaggttaaacaatgtcactctgttcagagatctatcagggatgatgaaatgactcaaaatcatgcctcatgattgaaggttgaatgaatggttgaaggagt

SEQ ID NO: 614214 - DNA, 502 bp, Homo sapiens
tgaattcgttcctaggttcctcctttttgcctcctgtagtcagtccatcaccaggaactgtggattgggtcctgtctacatttctgctcctcttcctctctcctctctccccggggcctctcctgttgtcttcttaacacagtgacacacatcattttcttcagggccctaggactttatagagggggctcaggcatgatcgtgctgttgaaaggaggcccagtagcccccttcctggccctagatcctaccttccaccaagcggctgtgctttcatctgtgtcacaccatgagggcccacttaagatttggcttggaacaaagggtgctgatatatttaaaaaacaagcaggaaaatcacccttttgctggctttccagcctgtaggcacctttctcttccaaggcatattccaagcacaccagagagatttttttaaagtgaaagtttaatcatgtcatagtcacctttagaacatttycttggatccctattacctaca

SEQ ID NO: 614215 - DNA, 597 bp, Homo sapiens
ctgtgctttcatctgtgtcacaccatgagggcccacttaagatttggcttggaacaaagggtgctgatatatttaaaaaacaagcaggaaaatcacccttttgctggctttccagcctgtaggcacctttctcttccaaggcatattccaagcacaccagagagatttttttaaagtgaaagtttaatcatgtcatagtcacctttagaacatttccttggatccctattacctacagggtaaaggtcagcttgcctattaagactgcagtgatctgatccttgtctctcccttcacctttctctaagagtgccccttccctcccatggtcagataatttttgattccctgaatagtaggattgtatcaggcatttgatctcttagcttcatgggaattcctccgagytaccatctgcctggtaaaagtcagcctatcttttaagacttggttcaagagtcatctcctctctgaagctgtttttaaaaaaatgtttatttttaaaaaattttatgggcacatagtaggtatatgtattttgaagcttccttgtttgcacaagcagaaatagctgttcctgacttttgttcccattct

SEQ ID NO: 614216 - DNA, 578 bp, Homo sapiens
gagaggcgctgctcgcacggcctgctcagaagttaccttaggtgtttaagatttggttcttctgctcaacagtacccgagagtgtcatttttggagggtgtgtgtgtgactttattaagacagcaaaaaggtcatttgtaaattggaatttcagtaggaaataaagcacttctgtttcttcataggtaatgtatatgtgataaatcataaattgtccataggtgtgactagagtttatctcaattacaatgttaattgccactcagtcttcaaaaggtcactggtaaaactcttaacctggagaggtaaagggagttagtgtctggatatgatcagtatcctctccttccaccaccatctgcttcatgaatgcattcactggttattggataagygcctgccctgtgccatccctctgaacaggatgcctgagggtccatagtgaggaatgagatacagttcatgttcttaagaagctccaaagagagagagacagatctaggaacagatcattgtaatacaccgggctaagtgaagaatctgaaatacccacaagatgctttgaatgtagagaggaa

SEQ ID NO: 614217 - DNA, 611 bp, Homo sapiens
ttccttagaagatcactctggcttcttctgggttttcctcctttatgtcccaagttggttcgcgtcgcctattttggtctggataatttagattcttaatcattttatcttgttagccttgcatgttctcatgatgtttgcttgtgtcttcttgctgtcaattatttttttcttcggtggctggattatctctgtgttatgatcccatggaggctyaaaatgtctttggttggaaattactcttgctggcgttggaactaaatatgaattcccccatttttaccataccttggcatttcttccataatattttaagcatctcctagacaatatgatcttgggattgttatttttgtattatgtcaccccaaatctagggtggaatacacttttgttcatgtttagtatgatctagaggtctcattgtgttaggtaaattattttcttgaattgggcatgatggcactttccacccaactcccagatgcagcattgctggaactagttctacttcacctgcctcacctgtgtgggaactttgggtcctgccatcttcatcttggtcaatgaaatgtgatgttcaagcgtgtaaaggaagccaaagggcaaac

SEQ ID NO: 614218 - DNA, 598 bp, Homo sapiens
tatatttcatgctttggtcttgttttcccatcttgactctgcccatcttaaaacttagagagtttgttttcttaatttgtaaaatctgtattttatggataattaatctgatgtcatgtatattgcacatatattatcccaggtgccaatgtttaaaatttttgaggatcagtttcatccttcgtgattgcacctttgagcgcagtgcttaggaatgccctcccctcctgtctaagattatatccatattaacatgtgttttattcacatttgtatctttaatcgctccaatacttgtttgtatgctttcccccaaagtagtccccaaacaatgccatttattaatttttttccmttttcagttttaagggctacttgctctaaaataaacttgaatttgtttttgaactatctattgctttctattgatctacctacttatttcagcttcattgccatctatttattgtcctagtagggaacattttaacatctcattgggcaagcttctctctcagttcttttctggatgtggatccaatagataaaattataacgggtgtgaaagttataggaagatagctttggttcattgaaa

SEQ ID NO: 614219 - DNA, 598 bp, Homo sapiens
tatatttcatgctttggtcttgttttcccatcttgactctgcccatcttaaaacttagagagtttgttttcttaatttgtaaaatctgtattttatggataattaatctgatgtcatgtatattgcacatatattatcccaggtgccaatgtttaaaatttttgaggatcagtttcatccttcgtgattgcacctttgagcgcagtgcttaggaatgccctcccctcctgtctaagattatatccatattaacatgtgttttattcacatttgtatctttaatcgctccaatacttgtttgtatgctttcccccaaagtagtccccaaacaatgccatttattaatttttttcccttttcagttttaagggctacttgctctraaataaacttgaatttgtttttgaactatctattgctttctattgatctacctacttatttcagcttcattgccatctatttattgtcctagtagggaacattttaacatctcattgggcaagcttctctctcagttcttttctggatgtggatccaatagataaaattataacgggtgtgaaagttataggaagatagctttggttcattgaaa

SEQ ID NO: 614220 - DNA, 550 bp, Homo sapiens
gatatcaagtgttcttattgaacagcatagcatgccttctgcttgctttctctttttctgagtagcatttaaacattttttgtatgtagatcatgtaggtctgttttcctyatgttgaccttgtctattgctaggtcttttatcttgtttttgtatcatacatggggttttccttttattagattttctaattggctcttgtttgcatatatgaaagtcattggtttcagtatattaattttgtattcatccacctgaagaattttcacatcgtttctaaacatttgtcaattgcttttcttgaattttcttttctttttgtggggaggggtatttctttggtgcttacatgaaacgtcatggtggtgttgagactgaaatttctgtttcaatgctattcgctttggcatgattagtgcatttaatatcaacagggagagttcacgatgttttccaggggaaatatttttgattattttcatttctctgatgccaccgccaaaaactcaagaatttataaatcctgaggtttaagcttattgtttacctt

SEQ ID NO: 614221 - DNA, 605 bp, Homo sapiens
gctttcagtcctagcactgggcaccaaagggagattcagtgaggctgatatgccagtccttggtttgtttgttcttagatctaccccycgcccctccctgctttacttcatagcacagggaggatgacctgcagtctgtgtttcctaggcccccatgctagttggcttctgtctggatttgtttggccaatgggaagtactggcaagaaattggaaggtggacagaaaggaaaagccaggggatttctctctgcctctcgcagccttggacaacatctccaggagtggtaacatttcctctatggttcatggtggatccaggttttatgactcatagcttatataagtttggggaccgctttaaataaaaatgatacaaaattgtgagtatgaaattagatccagggtcttagaagggaccctggatggcaagctcaagcctcattagcttcatggtaaatctgccactgccagacttccagcttccactgagtgactggcctaggctctcccttgtctgtctagcctgtcttctctgtctatctagcagcttcctgcttcttaggttacctcaccattatctgcctaaacatctcagcttctcc

SEQ ID NO: 614222 - DNA, 605 bp, Homo sapiens
gctttcagtcctagcactgggcaccaaagggagattcagtgaggctgatatgccagtccttggtttgtttgttcttagatctacccctcgcccctccctgctttacttcatagcacagggaggatgacctgcagtctgtgtttcctaggcccccatgctagttggcttctgtctggatttgtttggccaatgggaagtactggcaagaaattggaaggtggacagaaaggaaaagccaggggatttctctctgcctctcgcagccttggacaacatctccaggagtggtaacatttcctctatggttcatggtggatccaggttttatgactcatagcttatataagtttggggaccgctttaaataaaaatgatacaaaattgtgagtatgaaattagatccagggtcttagaagggaccctggatggcaagctcaagcctcattagcttcatggtaaatctgccactgccagacttccagcttccactgagtgactggcctaggctctcccttgtctgtytagcctgtcttctctgtctatctagcagcttcctgcttcttaggttacctcaccattatctgcctaaacatctcagcttctcc

SEQ ID NO: 614223 - DNA, 548 bp, Homo sapiens
tatatgagccagggaatactatttctcagtttaggaataagataactgaagttcaattcagttttcaaagatcttattgtttgtggacaaatcgtccttcatttttctgcttgtaacagtggactttcctatggccagaggtccataaagtgaacattttcaggctggatggatgtcaccctcactacagtgtcagttctaagggcagatgtccttctcattctttaccatcgtctaatctttactttagggcctgggtatttatctgtctaatttcctagatattagctgtgtgaggtcaggggtggtattgacccctcttggtttycatttatttgtgttagtgtttggcatatacaaagggctcaatgctgtgtctctctcttccagaggtgtcctcctgtcctcttttcaaggtttttgattaaaaatttagaaaagttagatttttcaaaatctaggattttatgtctgctcctgactggacatagaaaaaaaattctttaattcaagcattctgattagcattttgaacaaggagaagaaag

SEQ ID NO: 614224 - DNA, 621 bp, Homo sapiens
cgctgttcagagttttgtcagtttacctcctggagctcacacactctggaattcttgtgcatgtcaatctccctcaacatctcagcattgtctttgattcaaagacaacatctcagtgttgtctttgattctgcagaaaataaaaagtgatattctttaggggtggggattaggggagagaaggatgtcaggagatgttagtccactctgcaatattgaaaggggactaaactgcagatactcagtttgattgggagacattgcagaatcttgatgctaattgccatgtggrttcgtggatttggatccatgcacacttcttgcacactgctgtgttggtaccaatatcaaagcatgtgacactgacaaacaaaaatgcttgttttctctcagctccagcaagacctatgtgcatgtaatatatctttccaaaaaacatgacttgtgaattagtcacaagagtcactggtcttaataagacattacctggaaaaggaggtcttgggtttctaaaatgtgaccagcatggggtaagtggaagcctattgaattagagcatgggaaaaggtttcagaactaaaacttgatatcccaggctttgacttaaagtcaaacagattt

SEQ ID NO: 614225 - DNA, 441 bp, Homo sapiens
attagtcaactattatttgtacagtacctgttaggtgccaggcactgtgcagggtgccagacatccttgaatttgttgttaacgtggcctacatcacataccagtgagcatgacttttttttgcattctctgtcaagtaccactttccttttaggtcataaaatagtctcttaaaactgccaatattcagattcagtattactttagaatctcttamggacagctaggattcctagttagtcaattatgctccctgtgttcacttcccaagaattctacaatactgtcctgatctctacatgcaagtactatataagaaactcaagtggtaggtgtctatattatccacctcctctaaggttcaaagccaggtggaggtgaaggttagtcaaagcggtagcaaaagtaaactccatagtgctaagagaattgtcatataat

SEQ ID NO: 614226 - DNA, 614 bp, Homo sapiens
tctctttctcttcctcctcttctcctcctccccctatcctctttccttcttatctcctcctcctyctcctcctttcctccttctccatttccttcccctcctcctccttttccttcttccttttattgtagaactgtgctgcatggtagccatcagccatatgtagctattggtggctcacgcctgtaatcccaacactttgggaggctgaggtgggcagatcaccaggttgaccaacatggagaaacctgtctctactaaaaatacaaaattagccaggtgtggtggtgtatgcctgtaatcccagctactagggaggctgaggcaggagaattacttgaacccaggaggcggaggttgtggtgagccgagattgcaccactgcactccagcctgggcattaagagcggaactccatctaaaaaaatatagtaaataaataaatatataaatattaactaacattaaagattcagtttctcagccacattcccaatgttcaatagccagccatggccggtgactatcatgttggaaaaagcagacacaagatatttctgttattccacagagttccagtgaatgaagccatgctagagtataaacctcttgaa

SEQ ID NO: 614227 - DNA, 473 bp, Homo sapiens
ccaaggacatttttcctattagattcatcaaaaaagacattctcttttgctaaacaaaagaagttcccttctgttctctcaaaagaaaaataagcaaacactaactatcctctaacttgyctgtccaattctcctgccttggaatatcgccctagacatagttctatctcctctctgatgacaagttatactttcactgtctcactgtattctggcctgagaaagacctggggtttgcctggtcagcccaggctacagctgacaatttgcaatgttgccgtggattaaatacagactcccagaagacaaattctcttctcccaagggtgtctgcctcagcaatttcatctcaaatggagagtaagactgaaccaaactcagagaatccccagaggaggctaaggccaggagtcaacaccagcagctgaaatccccagaagagattgcagacaggagctgggtcttctccatcc

SEQ ID NO: 614228 - DNA, 636 bp, Homo sapiens
ggccagttttattattttttaacttcaacttttattttagatacaggggtacatgtgcatgttcattacatgggcattacacccaggtagtgagcattacatatggtttcctttgtatttatcctccttgggtttcaatgagctctttggatctctgggaaaagtcttaaccatcatcttttcaaatatttcttctgccacattttctttcctttctcattcttgactttcaattttagatgttataccattttctattgtmctccatttaccaaatgcattatttcccccatcttgtgtttcagtctgtgtaatttctgttgacatggctacaaattcattggttctttcttctgctgtgttcgatctgctgaggagcccattgaaaaatttttttttctgtttcaaaattagttattctcttttttgatatatatttaaggcatatgacatgatgttttgatgcacaaacacatagtaaaaaatctttctatctgatattgtattttttatttctaacatttccatttggcttgtagatattacatagtataaaaatatagtatagtaaatatatagagagtatagtacagtaataaaatatgttatatatagtatagtacatgtaatatatac

SEQ ID NO: 614229 - DNA, 470 bp, Homo sapiens
ggctgtaataagctcttgcatataacaaagctctagagggctatgtgcgcgctcaggaataaacacgtgcctagaaagattggaagagatcctatgcttttagctctggctaatctctaggatccatgtaagcagtaagtgaagggataaggcagagctgtaaattacctagctaactatggaaggagtgccctaacacagagacaatctgccaagacaggggaacagtttttctctttttcttattktatcttatcttattctttaattttcttttcttttctttttggatccaggaagctaggagaatcatggttaaatcactagctgaccattaagctaacagaacctttagggaacacacacacgaaagaatacagtctttataaaagtagtttagaaaagtcactaatccaacatcagtgatcattagagaaatgcaaatcaaaaccacaatgagataccatctc

SEQ ID NO: 614230 - DNA, 470 bp, Homo sapiens
ggctgtaataagctcttgcatataacaaagctctagagggctatgtgcgcgctcaggaataaacacgtgcctagaaagattggaagagatcctatgcttttagctctggctaatctctaggatccatgtaagcagtaagtgaagggataaggcagagctgtaaattacctagctaactatggaaggagtgccctaacacagagacaatctgccaagacaggggaacagtttttctctttttcttattgtatcttatyttattctttaattttcttttcttttctttttggatccaggaagctaggagaatcatggttaaatcactagctgaccattaagctaacagaacctttagggaacacacacacgaaagaatacagtctttataaaagtagtttagaaaagtcactaatccaacatcagtgatcattagagaaatgcaaatcaaaaccacaatgagataccatctc

SEQ ID NO: 614231 - DNA, 571 bp, Homo sapiens
ggtgcgatctcgcctcactgcaacctccgcctcccaggttcaagcgattctcttgcctcagcctcctgagtagctgagattacaggcacccaccaccacgcccagctaattttttgtatttttggtagagatggggtttcactatgttggccgggctggtcttgaactcccracctcaggtgatccacctacctcagccacccaaagtgctgggattacaggcatgagccaccacgcctggcctagtcagacatttttatacccctatatcaaaaacttctacaacaagaagacaaaaattcagtaagagtgtaaaagatttgaccaacattaccacttgacctaattgacatgtatagaaaatttcaaataccaactgtcagatacacattttttttaaatgtacacagaatatttacctagaaaaaaacatatgctggggcataaaattaatctcagtgatgtcagaaaaatggcagactagaaaactttagaactttgtcccccatggaaacattaaagaaaaaactacaaattggttaaactgacatttaggaactatggaaaacag

SEQ ID NO: 614232 - DNA, 483 bp, Homo sapiens
atcagtacatgtaagacatacactggttaggtctgggaaggtggggtgtattagggttctctagtgggacaggactaataggataaatttatatgtgaaagggagtttattaaggagtatayactgtcacaaggtgaagtcccaaaataggccatctgcaagctgaggagcaaggaagccagtctgagttcccaaatctcaaaaatagggaagccaacagtgcagccttcagtctgtggctgaaggcccaagagcccctggcaaaccactggtgtaagtccaaaagtccaaaagccgaagaacttggagtccaatgttcaaagccaggaagcatacagcatgggagaaagatgaaggccagaacactcagccagtctagtccttccacattctcctgcctgctttattttagctgtgctggcagctgattagatggtgcccacccagatagagggtgggtctgcctcttctagtccactgatt

SEQ ID NO: 614233 - DNA, 483 bp, Homo sapiens
atcagtacatgtaagacatacactggttaggtctgggaaggtggggtgtattagggttctctagtgggacaggactaataggataaatttatatgtgaaagggagtttattaaggagtatacactgtcacaaggtgaagtcccaaaataggccatctgcaagctgaggagcaaggaagccagtctgagttcccaaatctcaaaaatagggaagccracagtgcagccttcagtctgtggctgaaggcccaagagcccctggcaaaccactggtgtaagtccaaaagtccaaaagccgaagaacttggagtccaatgttcaaagccaggaagcatacagcatgggagaaagatgaaggccagaacactcagccagtctagtccttccacattctcctgcctgctttattttagctgtgctggcagctgattagatggtgcccacccagatagagggtgggtctgcctcttctagtccactgatt

SEQ ID NO: 614234 - DNA, 483 bp, Homo sapiens
atcagtacatgtaagacatacactggttaggtctgggaaggtggggtgtattagggttctctagtgggacaggactaataggataaatttatatgtgaaagggagtttattaaggagtatacactgtcacaaggtgaagtcccaaaataggccatctgcaagctgaggagcaaggaagccagtctgagttcccaaatctcaaaaatagggaagccaacagtgcagccttcagtctgtggctgaaggcccaagagcccctggcaaaccactggtgtaagtccaaaagtccaaaagccgaagaacttggagtccartgttcaaagccaggaagcatacagcatgggagaaagatgaaggccagaacactcagccagtctagtccttccacattctcctgcctgctttattttagctgtgctggcagctgattagatggtgcccacccagatagagggtgggtctgcctcttctagtccactgatt

SEQ ID NO: 614235 - DNA, 601 bp, Homo sapiens
gaattctgcccagcgcaaaccacccagtctccctagcactggtgggggaaaaccaccggctagacccgcagtaatggtggtcacccttccccccaggaacttggtcttcttaggcagactccaagtgctgtgctagccagtggggattccatgccagtgggtcttagcttgtggggttctgtgggagtgggtctgcttggctccctggcttcagccctcttctcatgggagttgatggatctcctgcttcactggattactgcgagccaccagagtacgcagaaactcctacagctcagtacctgcccaagtggctgccagctggagcccctgctatgggtctgcacagctttgtgcttgggacccaaggccctggtggtgtggactcacaaagggattacctgttctggggtttgcaaaaatctgtgggtaaagcacagttcyccgggtgggtagcacaatccctcactgcctcccttggctggaggagggaggtctctttgccctgtgtagctcttgggtgaactgtcgcccaactctgcttttccttgctctccatgggtcacaccaactgcctagtcagtcccaatgagggaatctg

SEQ ID NO: 614236 - DNA, 534 bp, Homo sapiens
gcccagctaattttatatttttagtagagatggggtttcaccatgttggccaggctggtctcaaactcctgacctcaggtcatccacctgcctcggtctcccaaagtcctgggattacagggatgagccaccacacccagcctttactgtcttcttctgaaccctccaaactattccaacctctgcctgttgcccagttccaaagtcacttccacattttagtgtatccttataacagcaccctatgtctgtggtaccaatttactgtattagtctgttttcatgctgttatgaagaactcctcaagactgggtaatttataaagaaaagaagtttaattgactcatagtttcacatggctggggatgcctcaggaaacttacaatcatggccaaaggcacctcttcacagggtggcagcagaaacaatgwgatctgagtgaaggaagaagccccttataaaaccgtcagatcttgtgagaactcactatcacaagaacagcctggagaaaaccacccctgtgattcaattatg

SEQ ID NO: 614237 - DNA, 396 bp, Homo sapiens
tctgtaaccacaggctgcttttaatcctaaaagtcagcgtgataatgaaatccagtgattaatttctgtcttctaatcaataagtagacatatcaatttatagtatgttagaaagcctcaactccactgaaacaaaaagcaagaggctctgcaaatgttggagtgtgctaaaggaaaagcatggactgatgtttggggaaaggttggtcaatgtgatgaggccatctgtgtttgctaatagtgcttatcaaagttaggttcctacrcagagacagagaccaggagacaatcctgtatccttcttgatccttatagtccaaagggatagctcctaagtctttgagaaagacattctgtgttataggagatttaaagggacagagaaaaggtttataa

SEQ ID NO: 614238 - DNA, 553 bp, Homo sapiens
aaatatctctccagcacacacacagtcattcttgctgcatgtcagcctccacttctccctccattatttgatgccgtgaagctgaggcagccagcttgagcgaaagttttcagatctcactccaacaaagagctttgattgattcacttagtataaggcgctttatctagctaaagaaatcctagctgagttttattaattactaggaaaaatatctgtgcaatagattaatctttgatcaaaactatgtgtgaagtagaaacatattacacayatggagagcaatattatggaataaaaacaacctatgtgtggcataattgacattgtctttatattttggggggggctgaatacgcagtctcgctctgtcgccaggctggagtgcagtggcacgatcttggctcactgcaatctccgcctcctgggttcaagcgattctcctgcctcagcctcctgagtagctgggattacaggtgcatgctgccacacccagctgatttttgtatttttagtagagacagagtttcaccatgttgtccaggatggcctc

SEQ ID NO: 614239 - DNA, 553 bp, Homo sapiens
aaatatctctccagcacacacacagtcattcttgctgcatgtcagcctccacttctccctccattatttgatgccgtgaagctgaggcagccagcttgagcgaaagttttcagatctcactccaacaaagagctttgattgattcacttagtataaggcgctttatctagctaaagaaatcctagctgagttttattaattactaggaaaaatatctgtgcaatagattaatctttgatcaaaactatgtgtgaagtagaaacatattacacatatggagagcaatattatggaataaaaacaacctatgtgtggcataattgacattgtctttatattttkgggggggctgaatacgcagtctcgctctgtcgccaggctggagtgcagtggcacgatcttggctcactgcaatctccgcctcctgggttcaagcgattctcctgcctcagcctcctgagtagctgggattacaggtgcatgctgccacacccagctgatttttgtatttttagtagagacagagtttcaccatgttgtccaggatggcctc

SEQ ID NO: 614240 - DNA, 553 bp, Homo sapiens
agaattggatacttaaaaaacatgatgtatgattctcattcttccagagtatttaactctcattcttctgagcaaattaaggggaaatttacacaggcaaaattagtaaaatttcactcagtaataagcaaaggaattacatgtgtaataaaaagacaaattgtttttagaagcaaacctacctggattcaaatccaaggtttaccatttactctccatattcccctgagaaatttatttactgcttatgaatctgtcttcttacttaaaattttttaagtattaatattaatgamggtaggttattgtgcatttaaaaatcacttttatatcacgatattacatagcagcaactataaatatgatatatttggaaaccaatgttctctcaatttagcatttaactgctgcagagtagctattaagacacaaatgcagccaggtatgatggcttacacttgtaatcccagcacattgggaagccgaggcaggtggatcacctgagctcaggagtttgagactagcctggccaacatgaggaaatcccatctct

SEQ ID NO: 614241 - DNA, 486 bp, Homo sapiens
tagataaaatagacttcaagtcaaaaattatttcaagagagaaagacggtcattgtataacaataaaagcatcagttcatcaagaggacatagcaaatataaatatacatatgcacccaacattggagcacttaaatatataaagtaaatattaatgaacctgaaggaataaataaatatctatacaataacagtagaggactttaayaccctgttttcaacaatgaatagatcaagcagacagaaaaataaccaaaatatactgaacatgaactgcactttagaccaaatggacctaacagacatatataaaacatttcattcaacatcagcagactatacattcatttctagagcacatggtacattctccaggacagatcacatgttaggcctcaaaacaagttttagtaaattcaataatattacaattatatctagtattatttccaaccacaatggtatgaaactagaaatcagtaacaa

SEQ ID NO: 614242 - DNA, 626 bp, Homo sapiens
agctgggcatggtggcaggtgcctgtagtcccagctagtcgggaggctgaggcaggagaatcactggaacctgggaggcgaagcttgcagtgagccgagatcacatcactgaccccaatctgggcaacagagtgagactctgtctcaagaaaaaaaaaaaaagtaaaaaatgtcaaaattagcacatacaaacgacattggtgaggctttccaataaaactctcagctgaagaaaaataaatcaagtagaagaaaaaaattagatgcaaagatattatgtaaatagcataactaataaggcacatattattaattttataccagagaacagcatattctttacaaatgcccatggaacatttacatatcccaatcttgtgttgatttacttcaaacttgaaaacttcaaagttaaaaaaaagaaattgtataactaaatttctgctcacaatgaaatcaaaatgggattgccaaggcaagatcagaaactccatttatcccacactccaaatgattcttagaacaaaaagaaaattacaaccaaarttattgaatatctagaaaataatgataacaaaaataccatagatcaggctatatgtcatagagttataattatgcttaga

SEQ ID NO: 614243 - DNA, 550 bp, Homo sapiens
cttcattggattgaaggatgcaaagtattgttcctgggtgtgtctgtgagggtgttgccaaaggagattaacatttgagtcagtggactgggaaaggcagacccacccatcatctgtgtgggtacaatctaatcagctgccaccgtggctagaacgaaagcaggcagaatgtgaaaagactagactggcttagcctcccaggctacatctttttcccctgctggatgtttcctctccttgaacatcggactccaagttcttcagctttgggactcggacttgcttccttgctcctcagcttgcagatgacctattatgggaccttgtgatcrtgtgagtcaatattcctgaataaaatcccctttatatatacatctatcctattagttccgtcactgtagagaaccctgactaatacagtaacactaagctggtgaacagccggaggcaggactagaagccaggtgatcaaactctagagcctgctctttcattccctacaacttcccacctcccttctctcatactgcagaggaggctcttaaaaaac

SEQ ID NO: 614244 - DNA, 515 bp, Homo sapiens
atagaatgatatggtattgctctgcccccacccaaatctcatcttgaattctagttcccgtaatccccacgtgtcatgggagggacctcgtgggaggtgaatagattatggggggtggttcccccatgctgtttttgtgatagtgagtcctcatgagttctgatgggtttataaggggcttttccccactttgctctgaacttctctctcccgccaccatgggatgaaggacatgttttcttccccktctgccatgattgtaagtttcctgaggcctccccagccatgcagaactgtgagtcaattaaacctctttgctctataaattacccagtctcaggcagttcttcatagcagtacgagagtggaataatacaggggatgtgctgatttaaaggacttgacaatttttatgctgtaaatactttcacagtggcctgtttcaaactaccaatgtgatttcactgaacgcaaagttgagagggatatacaaaattcactcttgcaggctggtg

SEQ ID NO: 614245 - DNA, 470 bp, Homo sapiens
aaagttaatgtactgggcttttcttgacatgaatatccctgctgttttartatctagtttaacacacacacttaggtacatacacacacacatgcacacacacatacacacacaatgcaattaaatgaacccaaagccataattgcttgttaagtatttgtcttcttctataaatcgatcttttttcagatgtggaaatacctgcttaataatagtcatgtcattagcccacaaaacagccctgaacatttattagaaaaacaaagtagagtcagctcatccccagcttgagatgctgagcatccagttgaacccagaagagattttacaaccaacctgatacagccctgaaaatgcagttttccactggtaatgctgagaaacccttgagtatagaaccaggcactgcggtgataaacatctgacattttcatttgcaagtattcatgtttcattttagataatgttcc

SEQ ID NO: 614246 - DNA, 470 bp, Homo sapiens
aaagttaatgtactgggcttttcttgacatgaatatccctgctgttttagtatctagtttaacacacacacttaggtacatacacacacacaygcacacacacatacacacacaatgcaattaaatgaacccaaagccataattgcttgttaagtatttgtcttcttctataaatcgatcttttttcagatgtggaaatacctgcttaataatagtcatgtcattagcccacaaaacagccctgaacatttattagaaaaacaaagtagagtcagctcatccccagcttgagatgctgagcatccagttgaacccagaagagattttacaaccaacctgatacagccctgaaaatgcagttttccactggtaatgctgagaaacccttgagtatagaaccaggcactgcggtgataaacatctgacattttcatttgcaagtattcatgtttcattttagataatgttcc

SEQ ID NO: 614247 - DNA, 527 bp, Homo sapiens
caactccaaccacagtgaactgtgatggtggtgcagcaacaatggaaccagatctttgcccaacagtggacctggggtgcagaagaaatggtctaatgggaaaacgtgggcaaggagtaaaaaggcaattcacagatgaaatacaaatgccctgtaaacattgaaaagccatatactttactccagaaatattttttataaaaaaccagtttttaaaatctggtgtattgatacaattaaaatgatcattttaattgctggcaaargtactctagaacaatactgatacaagtgtaaattggtacaaattattaaaattttttgaaaaagtacccgaggtagctgtcctatagaaataatgagatgcaatggtcaaaatgcacatgcaagggtgtttaattaaagttctatctatagtaccatgaagctaaaaatgacatgaatatccattaataggggaatggttactaaagatgggttacctcttcaattacagctattttcccatggaggaaaaataaaacctg

SEQ ID NO: 614248 - DNA, 542 bp, Homo sapiens
taactggaaagtccatatcaacataaaaatggtagtgggcattaaatatayatttatctgtaaaaacctgaatgagggttctaagtgacactttatactacataatgactatatgttccaacattgtagctagagcacaactatccataaactgaagtatgaagagataaaaactggaaaaaaaactggctgattacctgatatcaactgaaagaaaaagatattactttaaatcaaatgcttgggaagaaaaagaagttactaggtaatttcaatagtattcaaagtaagaaaccaacagaaaataaccaaaaaattgggggggcactaagtctattacataaggattttaatataaaggcaacatctaaaacaaaatacaaacttcataaatttttttaaatacccacaacaattagtcaggcatgctgacacatgcctgtggtcccagctacacagaaggaccgcttaaacccaggaggttgaggctgcagtgaaccatgtcagcacaactgcattccagcctgggtgacagtgagacc

SEQ ID NO: 614249 - DNA, 432 bp, Homo sapiens
aaaatctgtataataaaaagttgggggaaacgctttaaaggctgccccgtgacaacatggattacctctttctctatttccctaatattgtgcattatcaacaacttaatcacatttcattgtaattatgtgctaagaaactttctcccataggctgtgtaaaagtacagtagctgcacacagtaggcactcaataactgcttgcatgcctgaatatcctctcctatgaggctgtccttgagaattaataagccaccggagtgggaagacgccagagttaaccatacactaccctttgatgcttcattcttcataacacagaagctcatgagcgagcacaggaaaggcgccgtgsctgggaggaaagacaataaatggctatggactgaatgacagctcagtttaaaactcaggagatccagcctctgtggt

SEQ ID NO: 614250 - DNA, 485 bp, Homo sapiens
cttggtacatctttttaaacataaatgagtgcccaaaacacccaacggaacagggatggcaaagatgtcctgtagattgagaatggggagggggggaaataatcatctgtgttttctgaaatagaaatcttaagggggacagctgcctacatgtagagaattaccagggagtgggttctagactcmtgaacattttttttggagcccagtcattcagggattcttcactctttgcttcttaggacatgttattgtcttaattgcaagctccacaaacctctgatcaacactgcccctcctaagagacgagcacacgtgcaatccctttggaaaagcttaatcagccctaattgagtcacaataccaactcaaattaattagactttcagaaagttgtcaacatccttcaagataacctgggctgactgctccatagccttcacaggggagtacgtgttcaaattctaaaagcttgaaattctacc

SEQ ID NO: 614251 - DNA, 549 bp, Homo sapiens
gtccctggggagtcagagcagatgagatgctgaagctggatgtgtcttttatagggcccaggcttggctctggaaagagcaggaggtggctcttgcacaaccaggcacacgctgggtcattcctgacattctcctgcctcttagtccctgcaatccaaagaggcctcaggagcttccaggactcctctctggggctgcrgtctagagaggctgtagccagtcagagcctccaccaggtgggaaccctaaagagttaacttagggtacccaagggacccacacctggacaagattctgttccctgcatttttttaatgcatgtcctctgaggaaacatcagttctgagccacagctttccctgaccttgtggaaatgttccattatgactccctccaccctgagcagtttctcttccatgtcctgctgtggatccagccatcccagagggcttctacagccttggctttttctaggcatccctcccttgcctaggctctcagcccttcctcctggcctctgtgtttctgcttttcctccgactcaccatg

SEQ ID NO: 614252 - DNA, 520 bp, Homo sapiens
taatgtaaatgtctcagagtgagaattccaatgatgatggcttaagtcatacacaaagtaaagatgatgctaatagtaatcaattcatttttaaattgcttacctatggagtccacctctgttktagaaactgttgaggggtacataaatataagaacaaagctgcagaatcaaggatagtttactgtagtcatatttgaaaattaagactcataaagaagttacagttgaatggcactgttttagaaatgcataggtcacggaataaagcctggatgttgaagaaggagcgttatccaaatgaatataaattgttctatcataatgacatatgaatgtgtatgttcactccagcactattcacaatagcaaagacatggaatcaacccaaatacccatcaatggtagactagataaagaaaatgtggtacacatataccatggaatagtatgcagccataaaaaagaataagcatcatgtccttttgaaaaacatggatggagctggaggctattatct

SEQ ID NO: 614253 - DNA, 398 bp, Homo sapiens
ctagttagcagctcttgagagacagcagactgtgtattagcaatagcacgacaatagaatttattgatcaaacagaaatagttytgagagagaaagggggtattaataatgattcaataattttaataactagttaatacttaatgataatcatcctgaaatacagagagtaaaaggggcacagtgaataattatgctgggattacaggcaaacctggaagtctggtcacctgatcatcacattcttcctggaggggttatttgatagattacaatcccctggagttgtgtaagcatagctgttactttcacagataacaactagacttcacaaatacaactagaatgtcttccctaaagcactatcacctaaaaaaaaaaaaaaaaagggattttct

SEQ ID NO: 614254 - DNA, 493 bp, Homo sapiens
ccgccttgtgagcaagaggagggagcagaaaaagataaacttgaagaagtaaacagaggaaccatcccaggccttgcaggtaccataaaatatttgagttcatcttaagtgcaacggaaagataccccagggttttaagtaacaaaatggcatgatctgatttacatgtttaaagattactgtggatgctgcatgcaaaatggattccagcagtggtcctcaaaggaggttcccagaccagcagcatcacctagaaacctgttagaaatgcacattcttaggccccacyctcaatatcctgactcagaaactctgggggtagagttcagcaatctgttttcacaggctctccaggatattctgatgcacactcatgtttcaggaccactgcattacaggaggatgagattggatcacaagaaaccagttaggaggctacagtgcagggatggtgctcttcctgatgttgttcctatgttgtagggctagatgg

SEQ ID NO: 614255 - DNA, 563 bp, Homo sapiens
agacataaagaagaaatgtaaatgaatgattaaaaatgtattcaactttcattgtaatcaaagaaatgcaaattttaaaatgagacaattttttaaacttttacattagtaaagatttttaatgataaaaattctaggcatggaagagagtaatgagacattaataggagaataagaaattgagacaactttctgttaagcaatttgcaatatgtatcaagaggacttaaacttcctaagaatctaaaattctttgaccttcaaaaattcaaacctaaggaaataatccaaatggaaaacataggtacacataaatgttaatcacaatgttacttatagtcaggtaaaattggggggaaatttaaatttttttttttttttttgagacagagtctcactctgttgcccaggctggagtgyagtggtgcaatcttgactcactgcaacctccgcctcctgggttcaagtgattcacctgcctcagcctccagagtagcttggactacaggtgcctgtcaccatgcccagctaattttttgtatttttagtagagaccaggtttc

SEQ ID NO: 614256 - DNA, 476 bp, Homo sapiens
gctgggcgacaggaatgagactccaggagcgatggctcacgcctgtaatcccagcactttgggaggccgaggcgggtggatcacgaggtcaggagatcgagaccacggtgaaaccccgtctctactaaaaatacaaaaaaaaaaaaaaattagctgggcgcggtggcgggcacctgtagtcccagctactcgggaggctgaggcaggagaatggygtgaacctgggaggcggagcttgcagtgagccgagatcgcaccactgcactccagcgtgggtgacagagcaagactccatctcaaaaaaaaaaaaaatcaagagtgaagtaatattgttttcaggcgtgtgtgtttgtgtgtgtgtgtgtgtgtgtgtgtgtgttaaaacatacataacataaagtttaccatattaatcattttttttcctttttgttgagacggagtttccctctgtcgcccaggctggagtgcaaggg

SEQ ID NO: 614257 - DNA, 614 bp, Homo sapiens
gatctcactgggctaaaatccagttgtcagcagggcagcattcctyctacagccactaaggaagaacccattctctcgcatttcctaccttctagaggccacctgtaatccttggctcatggccccttcctccattttcaaagccagcagtgcagcaccttctaatctctctttgacccgtcttctgttgtcacagctccttctctgcctctgacccatctgcctcccttctaagatccctgtgttactttcagacccacctggataatccaggatagtctcccatctctagatccttaacttaatcccatctgtcctatgtagaaagtaagatagccgcaggttctgccatgagaacatggacatctctgggggccatttttctgcctaccacagtcttcttcatatccatttttcagatggggaacctgaggcacagggcagctcggtaacttctcaggtctcacatggggcaagtggctgagctgggattcaaaggcacagtcaaactgcagagcccaagccctccgtctgtcctgtgaggtcacctggcaggtgcagagatgtttgagcctctccatttggctggagagccaaggacagtaaggagggca

SEQ ID NO: 614258 - DNA, 615 bp, Homo sapiens
accagcacagaagttacaaggaagtgatttctaagacaccattgacatcatcctgcttcaggaataagtgagaacatgaaatgcctaggtttgaaactgcctttcttgagtgaggactgcaaggagaaccttggatgcttttcagatgctgcctgtgtttcatggtctctgagatttgcttcctaaacaagatgaggcacctgagccataagggtgtgggatcagcttcacggaggycagcctcagccactggtgggccgatttgggacagtgacccccaatgtcagatgtccacatgatactcacagcccacccggactctgggactttctctgtgaataagctagtgagaccggaggccaagcagatggcaagctgtggccctctccatcatcttcctcggaggccaaattcctcctgagaaagggtgcctggaccaccagaagcttggtagggagaataggagccatggacccaggaaacaggctacagcttcaagggttgaggcactgtgtatgagatggagagagttgagacaagctattccccagcctcttgttcattcttccggctaatgcaggaatcatcgggacatcatgtgaaagactgcattcc

SEQ ID NO: 614259 - DNA, 512 bp, Homo sapiens
ctgctcctctgctctgttctctgtgcactgtttcatcaccatagtttcccacacgagtccctcctcctgcactgtctccctcgcctctctctacctgccacctccatctatccacatcataagcattcttccaggctgtcttagctgatctctcccagaagcagactctgagataaagatgtgtatttgggaagtgatcccaaaaggcatgggtaatgaagtggaaaagtgaagcaaaagggactggaaccaatccagggggcactgttgagcaggaccctgccatgggcaactgcagttcccactgggcactcggaggggagagggagctgagatattcacccaccaaccctgccagccactgctgtgagatcctagcagagggaaattgcyagggcagcatgcaacggcatagagagtgcccgagagcgatggatggggcagcgacaggggtggctacacaggttctagacaaaagtcatttcctccatggaatctgcttttctctctgc

SEQ ID NO: 614260 - DNA, 377 bp, Homo sapiens
atagacacagtgtggtagagagacagctgagtctcagcagtgctggtggtgccaggtggaaagtgctcagggccctgcaggaggtggaggtaaagagctggggtcatgcagaagacagaggcaccaactccttggagagacactggggaaggcttcacagagaaggcagagttttatctgggccctgaaaagtgggtggagtttaaagttggtgggtaaagctttccaaggggagagttttgtgtgtacaaagaagcacaaargtcatgacatttgggcgggcagcagggagtgagaagtggccagtaccaaagtgatcagaaatcacaatgaggggtgatcaccttgcttttcatcttgaatacaccttccaaacc

SEQ ID NO: 614261 - DNA, 415 bp, Homo sapiens
tgccaggccttggaccggaggggaggcaaaggatagacacagtgtggtagagagacagctgagtctcagcagtgctggtggtgccaggtggaaagtgctcagggccctgcaggaggtggaggtaaagagctggggtcatgcagaagacagaggcaccaactccttggagagacactggggaaggcttcacagagaaggcagagttttatctgggccctgaaaagtgggtggagtttaaagttggtgggtaaagctttccaaggggagagttttgtgtgtacaaagaagcacaaaggtcatgacatttgggcgggcagsagggagtgagaagtggccagtaccaaagtgatcagaaatcacaatgaggggtgatcaccttgcttttcatcttgaatacaccttccaaaccacacct

SEQ ID NO: 614262 - DNA, 573 bp, Homo sapiens
aatgaggggtgatcaccttgcttttcatcttgaatacaccttccaaaccacacctatgaaaagatcttttaaaattaaagcaagcccgaatgacgctctggttatgtgaattagggaagaatgaacccaaaatgagtgagatttctttcaaagtagttcacattatcatcatgggttgggagaccctaaatgcctaaaaatagatacagaacattaatttttcattgatcataatattattttcataaacattaaaaatgtaaacttttggcaagaaaggtttcacaaaagggaaaagagaggtatgtggaagggtgtggcatctcttttctcatcccttttgatctgctgccagtcttttggagggggcctgttggggcctcagagtcagggtgggacggtatagcwtgtagggtagagggctctggagactttcaaaccagtcagaaccccagctttgcctcttcctagctgtaaagtgctaagcatggagtccagcacatggtaaatgctcaagatggtttttgttgctaaaattgctcacatgatcactcatcccattttaaaaagaac

SEQ ID NO: 614263 - DNA, 507 bp, Homo sapiens
ttagctactctatcttaggctccttttgtgttccaggcaccatcctgggcagtggagtggagaactgccaagggaagtttataaaaaccccctgttccctctctagatgatgatggagacagaaatgaccacacagcctgaactgtgcaaggctggaggagggagtctctaactgttaagcaaagtttataaaccatttctccttccctagaggattgatgtggggtatgtggacaggatttgcagtgactgatgggcctcaaacgaggctttgcccttaaaaaaaaccattatcatttatctcstcctcaacagggctcctcatgaccttcagaggcagcagctgaagtgttagcagtgagcgtaggtcagacaagggcttgtgtgtcgaacagtgctttataggaaaaccacagtgatagtggcaattatgcaaggctttccatgctctgttatgccccgtttattcaggatctttagggcatcaattgtactcgggtgcttatt

SEQ ID NO: 614264 - DNA, 525 bp, Homo sapiens
gtgctctgtgggcacagaagtctcttgtgatgcaactgaaagaattccagattgggacctgggacctcagatggccatccactcaagctatgccctcagcctcaacttcccctgccttacwggcccataaaacaacagtggtagcactaaagatgaaataatcttttcacatagccaagaagactactgcactatttggagcccaactgcactaccgttgcccaagtcttaccatctgcagcagttattttcagctcaagaagataggtctgggccacttgcacgcctccagacccaggctcttgaccaaagggaggtgtctggcaaactgcacactggccagcccccagacagctgaaggcttgatccagacagcaatcaagtcaaaagcgaagagccctggtcattggcttttcacatattaataactggaggatacctgagacaggtttacaacatcttataggcattcaagcagttttgctgatttttcagaattttttttctggtcctcatggtggttat

SEQ ID NO: 614265 - DNA, 516 bp, Homo sapiens
ctcattctgtctccagtccagcctctacatgctcaccagccttgataggatcacacccatgttcaaagacatcgcacggctccttgcagctccagattaaagtccsaccttccggacacagcattcaaggccgtccacgcccagcaccagctaccttttccctctacaaaccctgcatttccaaacacactgcacacttttttgcttcatctttgatctggagacccttcctggtatccaatgtccatttcccagagcctctgcctctctctgtcaactttatattcactcttccaggcttatcttctccaggaggtctctctggtcctatatgatcttccctttctcttaatgcccctggcttctattgtttctttcttcaatttagcactcctcaactgcctgcctttgtggctatttgtgatcagacccactggcataccaacccttaatggcctctgatttccttggaggaatcacctctccccaactctgtgttcaggtggttgggtgaag

SEQ ID NO: 614266 - DNA, 594 bp, Homo sapiens
acttactacacctggccctattctaggctctgggatacagagctggatgaaacacagatcctgcccttgaggagctcactgtccaacaggtgatcaagatagacaaaaacaattacacgtggtatagcccagccacaggaggggttagcagaggatgtgggggaagggaaggcattccccttctccaggcacctggttggtcatcctccatgttgtttgggagtaaaatgtaagtgacttcttatctctaacttttttgttacttattttggttttaggaaggtgaggaaattaaatggcatagtttgcccagtragcagctgcattctattactttcttttcttcttcttctctagcgttatgtaacagtgcacagtgaggctggtgaaatgccttcctgtctgtacctggctttctagggatgcacagaggagccaggctgaaaccgtgagtgtatgagccccagatagggtcagcatctgggtttggtgctgggttagttgctgagaccacagggaagtctttgctgttctctgtgaattgcagcactaatcgaggatccccactccactgttagcaccaaaagggcaggc

SEQ ID NO: 614267 - DNA, 489 bp, Homo sapiens
ggattccagctctccagttctaagaggattaatgggcagagttttaacaaatggagtaagtgctttgtatgccaagccatgtgagggtgagctttctgcttgctctttattcattctttcgggttcttattatttagtgctttygggggctctgtagttgtggtgtaaaaggggaaagggtgcttgggtgttccaatagaagatttggtgcaaagctgatgtcattttcttcgtctctgacaaatatatgcaccatcctccaaggtacatcaaaacctaggaaataaatactttccggcttctgagaagcattatggttttaggaggtcagtttattggagcaatacgctaaccagtggacggaggacttaggaaacatgttctgatatctcactctcgcctccagagagcacgagagccaaaggaggctagattgggctctggtcctggcagaaattgtgggaatgaagccagttcatcagccttggt

SEQ ID NO: 614268 - DNA, 586 bp, Homo sapiens
gactcattttggatttctgatttccagaacgataaaatagtacatttgtgttgttttaagctgataactttgtggtgatttgttatagtagcaataggaaactaactcagactccgtaggaaactcaccaaagaatatatacaattggccaataaaggcagttaaaaatgtggaacttagtcacaaatatgtgtgctagctatcaattgaattaaaattaatgcagtaggatacgcttttactctcaggttggtacaagcaaaaaatggtaattcccattattgatgaagattaaggaaatacgtattttcatactggtggaagtgttgtgtaaattgatataacttttctggagggtgatctgagaatatttatcaaacaactttaaaacctgtatcttctctgatctagaaaattcatttctaggactttatcctaaggtaatggtggaagtattatctattatagtgaaaagtggaaacatcctaaatgttygaggagaaagaattgattgaataaatattgatatagctgtgcaatatttatacagtgttttctgtatccagttttgacatagaaaaatatg

SEQ ID NO: 614269 - DNA, 595 bp, Homo sapiens
ctgccaggctattgatcaggggtctcagggcagaaacttgggagcatgaaagttagtgagggctgtcttctgtaagcatcaatttgggatcctggccatcagcggggcctagacctcaaatcatggggggttgctagttgggtggctgggggagagcctagcccaccagcttaaaatatgaaatacccagactgggccagtccactgcagcccaggagtgggcggctggaatgcctgtgtgctgggcgttttcattttctccagaaagagctttgacttctccaaggagatatacaagtatttggtggagatctcagggttctgggccaggcagtgtggaaatgatgaatctggcttgagagtttgggggcaacagttgctagctggctacctcctcctcaaaaggagagcagccaggctcctktggacactgggtttttaaccatcagatgggctttgacctggctgctcagaattctctgcatgctgtggcctggaaggccctaattccaaccttgtgtccacaatggagaaaacaaaatgacagggacaggtccttattgaatccctactatgtgctgggcactgcatggct

SEQ ID NO: 614270 - DNA, 535 bp, Homo sapiens
aatggggcctggaaatctggatgtttagcaagaccccttccccagaggactcagtctggtgtccagccacagaccagctggactagaatactaytaagtttcttccagtattgatattctacctttgggatgacctcactgaactaatacctggtgataattccccaatttctaggcatctgagttactttccattttcctaaatatgattctttttaaatgggtcatgctggctatcatttttcttcattcacaggcatcaacagaaaacacagagcccaaaggaaagtccgcaacctaaaggtccattaaaaagtgatggatgtctccaaatccaggtcagtttcaaaggcagatttctcctgattcatctctcagtgatgaaagggcagagctgggtgaatttgatttaaatctaactgatttaactcaccagtcaggaagactcaatttgaccaatttttctcctgcaaaagatgtattcttttttcagaaagataaccttagagcctcctttacagctcagaggcaaatg

SEQ ID NO: 614271 - DNA, 417 bp, Homo sapiens
tcaggaattcaagatcagcctgaccaacatggtgaaaccctgtcgctactaaaaaaaaaaaaattagccgggcatggtggcatgggcctgtaatcccagctactcaggaggctgaggcaggacaattgcttgaacccaggaggcggaggttgcagtgacccgagatcgggccactgcactccagcctgggtgacagagygagactccatctcaaagaaaaaaaaaaagagtcaacggcaaggctagggcaggccagcagagcccagagcctcctcctttacccatactcttcatgtggtttgagaactgtggaagattgattcaggtcagtgggacaggtcctgaatgaacacagaaaggacatttagcttgtaattgggtggtctccagaacaacacagactggcaacagggatta

SEQ ID NO: 614272 - DNA, 509 bp, Homo sapiens
aaggtttttaaggttcatgattggtaccatcaaactgctctctaatgtggtggtgctgccatgcccctgggggctggtggataagactgcccagctcatcccatactggccagctctgggcactgaatggggtttttgcccaccgccctgcttgccccagtctgtagccaggctaaacctggatcaccagcattctctttgttttgagcagttgcccagggagtcttgagcacatcctggcccacagaagatccttaaatagcatctcattctttcactcccaccccaggaastgacctgagtgcttctgataatgatggcatccaggtactacccaatctacgaccagaccacagggcctgatggctcccctgaactatccatggccacctggccagaggagtggcaaaatcctccagaatcttggtgtcaaggaccaagttcacaaagaattaagcactatgagtggttgccttgaagccagcatatgggcaaggtgaagcagcttt

SEQ ID NO: 614273 - DNA, 641 bp, Homo sapiens
ttgcttagagattggcagagagcgggaagtggggcgggggggtggcagtggttgctaaaggtatgggattattttcctgttgtcttttaatgaaagcaagatgatgtctgtttattggtgtcttttaaaaaataggtctgggtatatttaggttgcattttccatttttttaatcatggtaaaatacacataacatcaarcttaccttcttagccattttaagtgtatgtacagttcagtggtattaaatacattcataatgttgtacagtcatcaccaccacccatgtccataactctttccatattgtaaaactgaactctgtatccattaaaccataactcaccattcttcccaccctctagtcttggcaaccaccattctactttctgtctctacaatattgactactccaggtacctcagatgagtagaatcatacactgtttgtctttttgtgactgacttctttcatttaatacaacgtcctccagtttcatccatgttgtagcatatgtcagaatttctttcctttttaagctgaataatattctcttgtatgtatacactccattttgctattcactcatctgttgacaggcatgtgagctgcttccacatttcagctattctgaataatgc

SEQ ID NO: 614274 - DNA, 417 bp, Homo sapiens
gaattcatacccagtttacactggcacaaatgtgacaatgtggccaaggttattccaagagattggaaataatccaaatgtccatcagtagaggactggctgtacaaactacagtacatccatacaaagcagggctgtgcatctgtgaaaaaaaaaataaggaatgcctttctacagtgataatacagtgaaatctgggaaaattaagtaaaaaaaaaagcaaggtgcagaagagtgtagactgtatgctccctttgcataaaaagaagaaatgaggaacaaacacacacacacacacacactcacacacacacacttgctcatattttcaataagaaaaactggaaggataaattaaaaactaataacaatggtcacattatataaggatggcrtggaacagaatggagagagctt

SEQ ID NO: 614275 - DNA, 545 bp, Homo sapiens
ccttccctccctccctcttctctctggtatttgatattaccttcctttgactcctcctctactgtagctcatggtcaccacctcacatctcctgtctgctgttccactgccaagggcttctccttccctrtaaggacttgtcacagagaaatcaccattggcacatataggctcttaaaattcagcacttaaacatgggaacagatccaaaagccatgaaaatcaattttcaaatgaaaaagtgaggctccagatgaaatccattttcatttaaatctcatttttaaagaattaaaatacttttttgatttaaaaatttcaaagaaaatgttgctgagagttaaaatgtaaaaatgccaagaaaatgtcagagttaataacaacccatctgaaactgggaattactccatgcagaatttcagaatggaaagagaatttaaaagctaatgtgtccaacctgcccccgttagaaagtcccctctgggtctcccacgcaggagcactcagtatctgctcacgtctgtccgtccagtgccaggggtctc

SEQ ID NO: 614276 - DNA, 532 bp, Homo sapiens
ctggggaggggacataaatgtgggtaacgcagctcacttggccgagggtggcttctggtcagcagccagcactccctgcagctggggkagcggtgcccagctcctgaaggggaagggaggacctggacagtggatggcagccccaccccacccagtgctcctgctgctggcattcactttctctgtttagtaagttcacccctctggcatgtcttccctagaattctatggtttgttttcctaggaagcttacaagaggaagttagagggacaaactacaacccccactgctacagtgggctttgggaaacagctgagacccatcatctctcctttgctctctgttctatattccccagcatctctgctgatttaaatggcttactgggtgggctgagccagaccctcattcctgaggaccctgagcccctggtcctgtgttcttgtgttcttgtcagaccatgactgctgcactgtctatttacttgtcaaaattgggcaaaggaccacggagcactatcccagtggatca

SEQ ID NO: 614277 - DNA, 532 bp, Homo sapiens
ctggggaggggacataaatgtgggtaacgcagctcacttggccgagggtggcttctggtcagcagccagcactccctgcagctggggtagcggtgcccagctcctgaaggggaagggaggacctggacagtggatggcagccccaccccacccagtgctcctgctgctggcattcactttctctgtttagtaarttcacccctctggcatgtcttccctagaattctatggtttgttttcctaggaagcttacaagaggaagttagagggacaaactacaacccccactgctacagtgggctttgggaaacagctgagacccatcatctctcctttgctctctgttctatattccccagcatctctgctgatttaaatggcttactgggtgggctgagccagaccctcattcctgaggaccctgagcccctggtcctgtgttcttgtgttcttgtcagaccatgactgctgcactgtctatttacttgtcaaaattgggcaaaggaccacggagcactatcccagtggatca

SEQ ID NO: 614278 - DNA, 517 bp, Homo sapiens
aagggtaaatacatacaaactgcttgtaataatgcctggcacatcagaagcactgtggtgtctattatcttttttttttctttyttttttttttttgagatggagtctcactctgttgctcaggctggactgcaatggcacagtcttggctcaccgcaacctccacctcccaggttcaagcgattctcctgcctcagcctcccgagtagctgggattacaggcatgtgccaacatgcccggtcgattttgtatttttagtagagacaggatttctccatgttggtcaggctggtctcaaactcctgacctcaagtgatccgcccgcctcggccccccaaagtgctgggattacaggcatgagccaccgtgcctgacctattatcatttttttatgataactttccttttttaaaaaaaaagtacaaacagtgcgagagccactgctgctgaggagagaagcgtccacagcagcaccatgggaggtctgattgatccacatgaattcctaggcattca

SEQ ID NO: 614279 - DNA, 534 bp, Homo sapiens
tataacccatctgggtgggctgagccctaagccctaagcaatgagtggcaaaactggttgaagggcagggctccaaggtgggtttttagcagtgagcaaggcatggttcaggggagatggtgctcagggcctccagctttcrgccccctcagaagggtggggctgctgggagtggcctggggcagagctgggctccaggctccttgggtgccagtggcacagcccttacatcctcaaagtctttgtgatgccccgtctgctaccctactcagtttgtgtggacgctgagagctccaaacccaggctcagggccaggacactgggcagtggcactagtggttctgaagagggcttgccatcgaagcactgggaggctgtttccacaagccaaaagggcagaggggccatggccaagatcagaaacccagacacggaggctgcacttggcaatgaaggggacacagaagcacgtggatgtcaggggctgtggctcaccatgccccaaaccaaactcctgtcctccctgcgcccctc

SEQ ID NO: 614280 - DNA, 467 bp, Homo sapiens
tgataaattgaggagaaatagccagttgtttcatctgtaaggctgttaacttattcagaggcttattctgtttttattccatgactttttcaaaatgttcagttaggaattggagttctgtttgtcaatgaagtcattytccgatgtactttttccattttacattccctaattttggtttagggctctttgcaaaaatgatgagagggtttaggtcctgtctgtctcaagatctactcctgaatattttctaaaggtgttggaggtcctgttcctaaagtttcaaattgattcattctttctctttttataatgagatggaagtccaacctattttcaggaaagtcttggggtagcctccaaaatattttctccactgtgtatagctttcctaaatacttctggttttctctaatattcagggtctttcattcaccttagattatcctaagtcttcattttttaat

SEQ ID NO: 614281 - DNA, 617 bp, Homo sapiens
tttttccttttcctcctccttctcctcccctttcctctcttcctcctctgtctttatcttctttgatcagaccactcccttcttctggctaacaagtgtggaatgagaatgcttaaattcaaacatttggtcaagcagatatgttgcctagagcaagataacatttcctcacttgtaaaatgaggataagcataggccctacatttgaggttttggtattagaatatatattcatatacaaaaatgtttaatataatgcttggcacataaagagactataatcagtgtaagcagttattaactaccctgcttatctttccagccattctatttatatttttcacttgtttcgcagtgtttcagttataacagccttttctctcttccttaaataggcsaaactttctcttgccttagggcttttgcactggttgtttcacccttaggtattttactatgaacttacttacgcatctttttctgcttctttttgccctctaaagtactatatataagttctataaaagttggaatctggtttgttgtgttctacactgtgtctctacagcctaatatcatgcatgacacagagtttatggtttaacatgtacttgttg

SEQ ID NO: 614282 - DNA, 620 bp, Homo sapiens
cttattgaacacaaaacaaatttttgtcatcattgtagacatgacaatgcaagcaaaaacatacttgaaattaaaaagaatcacactatgtatttttatacatgcaaggtgaattttgattaaagattaattatgttaaaaaatcttaatcatattaatactccaaactatcctaaataggcaggtaagtctcatttaagtctgatgcagctgttatttgtgaaactcatgttaatgttaatggttcactttctcaaaaaacagyatttgaaatgcctactatgtacctggagaaattcttggattacagcaatgaatcaaaaaagatagtctttgccctcacagaaattgcatgtaatataatgatccaaatattctctattctgagataaaaggtgctgacagttgtttgcagaaaaatattagccacaggcttgcatgtttaccttccatctgtcttctccctagagcatggcttcgtattcacaggcttacaaaattctgtctttttatatagggaattcttcttgttttctaaccactttgttaacatgaaaacaattatgtgctttactcatgtaataagatttacagaggatatttcttttacatattgttaa

SEQ ID NO: 614283 - DNA, 520 bp, Homo sapiens
caacattagtatactatatcatgtcattttcttctaaaacacaaatattgaacttttaccacctgctactgtacagcagtgctatggcaacatcttcgtagagttcctaagctcctttgaaaagtaggatctaatcagcacaaaaggaaataaactatcatcattgctgttgctataattacctagttggcaaaataagctctatctatacagaatcacacattaaaacaaatttgcttaggaaaactaaatgttttatttcrgcccagcttacattttcaaatgaattggttaacaattagaaaagaaattgttgataaaccttgcattatgtttattgaatttttatttctggttaaaaaggttaactgttttcactgtggaatatttagaaaatatagatttctttctttaaaaatagttagccataaggaagccataattcatcactgtaacagagaatcttttttcatatatcttttactttatagtattttaatattttttctctactgtagac

SEQ ID NO: 614284 - DNA, 568 bp, Homo sapiens
gtattttaatattttttctctactgtagacacatttgggatttatttccaacttacataaatgcatcataataactgtaactccatatgattttattatgaataaggatagattttaaaaacataatcaaaatgttcacatttttgtaattacttaatgtggcaaatattttattaatacttaaatttgtttaatcagaggccagcagtactgtagatatttctgagtgatttcacagaatgtgtgggaatatacatctgygtcaattctttaaatgagtaaaaggagcatctgtaatgcagcaaaatcaatcatgaagaagtaactgatgcaggaattgcctatacaggtttccaaagtacatgtacgcgtgtagattgagttacaagaaaaaggtcactttctaataaggcaactgacaattattttgtaaaaaatatgaaagtgcaagcacatactttagaacaaatattaggtacaagcttaatggaagagtctatcatgtaattagcagacaaaatgagccacagaccacatttacatacttagtttaaaatagaaacagagt

SEQ ID NO: 614285 - DNA, 568 bp, Homo sapiens
gtattttaatattttttctctactgtagacacatttgggatttatttccaacttacataaatgcatcataataactgtaactccatatgattttattatgaataaggatagattttaaaaacataatcaaaatgttcacatttttgtaattacttaatgtggcaaatattttattaatacttaaatttgtttaatcagaggccagcagtactgtagatatttctgagtgatttcacagaatgtgtgggaatatacatctgcgtcaattctttaaatgagtaaaaggagcatctgtaatgcagcaaaatcaatcatgaagaagtaactgatgcaggaattgcctatacaggtttccaaagtacatgtacgcgtgtagattgagttacaagaaaaaggtcactttctaataaggcaactgacaattattttgtaaaaaatatraaagtgcaagcacatactttagaacaaatattaggtacaagcttaatggaagagtctatcatgtaattagcagacaaaatgagccacagaccacatttacatacttagtttaaaatagaaacagagt

SEQ ID NO: 614286 - DNA, 553 bp, Homo sapiens
taaagaaaaacttgtcatatccactcactgctttcaatctgcagtggtaccaggctaatcttgtctcttacctaatcaataggttttcctaactgctttccttacaatcaatcttgcccttactctgagttaattttctgtctttaagcagagtgatctttataattaaaaccttgcttattttaaaagaatttaccattattttaggttataagctaaaatattttggccakctacaactcatcacaaatatgattctagaatgtaaactaacatattttatataacctacaaagtcctccacaatatgccttctccttccctctccagtctcatctatttccatgtccctcttttcccaaagcaaaatagtttttgatcccttgactaggtaaggtttcccaatatatactctcataactctgcctcataatatcaatttatgattacttgattcttcacagaaagaaaactcagtgataacattgaccttgtttctattcctcacggttgtgtccacagggcagattttcctggcacatttttgattcca

SEQ ID NO: 614287 - DNA, 511 bp, Homo sapiens
tgtgtgtgttgtttttactttatttggtgaatactaggcaactctacaccacccctgcccctagtaatttatggatatcaagactgaaaggaaatgaaacaaatttattacttacatggtattattacctactaaagggcaaaataatccacaacaaaaagggctcaggttcrgtgggaagtgaaacctaaggaagagtcagtggagttctggtatttaatggggttaagggttgggcccaagtgagtcccttaccctcagccccaatagttcaggatttaaatggtttgaacttccctgccgtagccaaggaatagagactctgagttttcttactgcttgcctagatatggggaaaaagaaaaaagtggaggaggaggccttcaaagtggttggcagttaacagtaccaatagagtgaaactttttatcacaatttgagagaaactttgagaagtaaaaataggagatgtagtctacagacccttaagaaattcacattgtgcccgaaa

SEQ ID NO: 614288 - DNA, 437 bp, Homo sapiens
tttgattaaatgacactatgagtgctacatgtaagacattttctagcctttcagagaaggaagttaagagtacatgaaaagattattactgttcctgtttgcctttgaagattatagaggattacagtcagcatgcagagacaatattgttgtaacttacagctttaacaatgaattctattgctagaatttcctttttttaatgttttccataagagaattcctccagttctgattatggtttccarcaagagccttagaaccttatgtttccattagattcttcttaatgatgtacattaggaggagatggagggaatttcattattctattctaaaacataccccctcccaatttaaaaatggaacatttgaatactgatatatgtaaatgattcatgatattgtcagcctcagcttacttgggaaaataataa

SEQ ID NO: 614289 - DNA, 622 bp, Homo sapiens
aatcttttcttaagaagaaagattttgttttcagttaaatattataacatatgggatatctgtagaaaaaaaattgagtaatatactttctcaaggttttatttaaggatatttatttccacattaggtagttcacagataatagtggttttgttttcacagtctttcttgtcaaatcaaaattcatacagaaatacatgtgaaatattgattggttatccttttacaatttacttgataaaatctaagtagccaagaattcaagcctagaagactctgaccaatattatcttygtcttttatgctaagaaataatattccaaacctatttcttaggctattactaccatttgaccctttataagctgttatgtttcaatttactcaaataacataattgtccagtaagctttgattacctcagtaacagatctacaaaaggttaatgggccttaaaaaggaaagaaatcctgtcatgtgcaacaacacgtatgaacctgggagactttatgtcaagtgaaataagccagggcacttaaaaacaaacatgacataatctcacttatatgtagagtttaaataagtaaaactcatagaaacagagagttaattggtcatcatc

SEQ ID NO: 614290 - DNA, 557 bp, Homo sapiens
tttcttgtcaaatcaaaattcatacagaaatacatgtgaaatattgattggttatccttttacaatttacttgataaaatctaagtagccaagaattcaagcctagaagactctgaccaatattatctttgtcttttatgctaagaaataatattccaaacctatttcttaggctattactaccatttgaccctttataagctgttatgtttcaatttactcaaataacataattgtccagtaagytttgattacctcagtaacagatctacaaaaggttaatgggccttaaaaaggaaagaaatcctgtcatgtgcaacaacacgtatgaacctgggagactttatgtcaagtgaaataagccagggcacttaaaaacaaacatgacataatctcacttatatgtagagtttaaataagtaaaactcatagaaacagagagttaattggtcatcatcagaagctagggcatgggggaaattgcggagatgttggtcaaaagacacaaaattccagttagccaggaggaataagttcaaaaaattgattgcacatca

SEQ ID NO: 614291 - DNA, 541 bp, Homo sapiens
ccagtcccaccctcttgctctgaggtgctgaagtacgagacaatagacaaaatttgaaaaaaaaaaaaaaaaaaaaaaaaagctgcaaagaaatggtttcctggaggaaagcatgaatgtcttaaatataatgggctttctgttcagtatttcagtatctggtaaatctcatcattagaagcaatgcagaaaattaatatattaccttcacaataccctcattagaacacaattataacaaccgaaaaggcaatgtactaacccatgaggactcacttaactcattacaatggtttagtgagctatattgagcttaaaacatatgcwggaatggaaataaaaaaatgaaaaccctgaaaaataagctcttcagaggtttagaaatgaaatgggagtgatgaatagctaggagcaaggacatgggagtatacatggtgccaagagagaaggtatcattttactaaacacatacttcacctttttcacatttcatctaattttagcagcttaaaaaaagcttttgtttttagcttagacagaa

SEQ ID NO: 614292 - DNA, 541 bp, Homo sapiens
ccagtcccaccctcttgctctgaggtgctgaagtacgagacaatagacaaaatttgaaaaaaaaaaaaaaaaaaaaaaaaagctgcaaagaaatggtttcctggaggaaagcatgaatgtcttaaatataatgggctttctgttcagtatttcagtatctggtaaatctcatcattagaagcaatgcagaaaattaatatattaccttcacaataccctcattagaacacaattataacaaccgaaaaggcaatgtactaacccatgaggactcacttaactcattacaatggtttagtgagctatattgagcttaaaacatatgctggaatggaaataaaaaaatgaamaccctgaaaaataagctcttcagaggtttagaaatgaaatgggagtgatgaatagctaggagcaaggacatgggagtatacatggtgccaagagagaaggtatcattttactaaacacatacttcacctttttcacatttcatctaattttagcagcttaaaaaaagcttttgtttttagcttagacagaa

SEQ ID NO: 614293 - DNA, 541 bp, Homo sapiens
ccagtcccaccctcttgctctgaggtgctgaagtacgagacaatagacaaaatttgaaaaaaaaaaaaaaaaaaaaaaaaagctgcaaagaaatggtttcctggaggaaagcatgaatgtcttaaatataatgggctttctgttcagtatttcagtatctggtaaatctcatcattagaagcaatgcagaaaattaatatattaccttcacaataccctcattagaacacaattataacaaccgaaaaggcaatgtactaacccatgaggactcacttaactcattacaatggtttagtgagctatattgagcttaaaacatatgctggaatggaaataaaaaaatgaaaaccctgaaaaataagctcttcagaggtttagaaatgaaatgggagtgatgaatagctaggagcaaggacatgggagtatacatggtgccaagagagaaggtatcattttactaaacacatacttcacctttttcacatttcatctawttttagcagcttaaaaaaagcttttgtttttagcttagacagaa

SEQ ID NO: 614294 - DNA, 580 bp, Homo sapiens
aggatgtctttgacccaaattcttgccaaatctccttccaagagaagtattgcctattatactccaaatgtacaataccatagcattagtttagtaaaaaacaatatgtcttgtttctcctttatttttcttgatgttttcataattttaataaaaaacacttaaccaaagtgctgaggctgtgtttacaataaggtatttttaaattttatctctcctctaccaacacatacacataaatttaggaggaaaataagattaggtagcatcaatttggtgctaatgaaaatgaaaccagcattgatattttctaaatctaataatgcatgcattttgaatagttttctttgactcatttcccctgaaggtgaattcagattctttaggcattttcccaaaaatartttttaactctctgccttgtagtgaaattttccaaattgaaaagccatgtagaatacactgcgaacaattttacagccttcattaatatataagtcaatgtctaggtcacagcttctattaggtagccttatctttatcgatagttttccccaacttcagattctggtaattgcat

SEQ ID NO: 614295 - DNA, 589 bp, Homo sapiens
ttgtaagttagatacatatcttttaccttgttattaaacaaacaaacaaacaaacaaacaagctctattcttctaagtgagttggttacatttaaattatcatttatctatgtatgtaygtatgtatccatctatctatctatctacctacctatctatctatatcttttgctgatgtagaactgctgcttttccagttgtatccaagtaaagttccatatcaatgcaatgatcccttttgtacagttattaagtataagttttctataaaaattagcattggatatgtagactactcatgtagttagcgatttaagttaagaccagacttggagaaataaatattaagtcagaatgaaaatcactgatcagctgacatcctcctttaaaagtgagaatatttcccacagaatactaatcatttaaagacaacttgctgtaaatgaaagacaaagatgaataaagccaaacactggtatgctgcagggcaagatctttgtatatattctatccggtatttgtttttgaaaattatctttattcatgtcatgaaattatcaaagaaaagagtgataaaggatctctgggt

SEQ ID NO: 614296 - DNA, 589 bp, Homo sapiens
ttgtaagttagatacatatcttttaccttgttattaaacaaacaaacaaacaaacaaacaagctctattcttctaagtgagttggttacatttaaattatcatttatctatgtatgtacgtatgtatccatctatctatctatctacctacctatctatctatatcttttgctgatgtagaactgctgcttttccagttgtatccaagtaaagttccatatcaatgcaatgatcccttttgtacagttattaagkataagttttctataaaaattagcattggatatgtagactactcatgtagttagcgatttaagttaagaccagacttggagaaataaatattaagtcagaatgaaaatcactgatcagctgacatcctcctttaaaagtgagaatatttcccacagaatactaatcatttaaagacaacttgctgtaaatgaaagacaaagatgaataaagccaaacactggtatgctgcagggcaagatctttgtatatattctatccggtatttgtttttgaaaattatctttattcatgtcatgaaattatcaaagaaaagagtgataaaggatctctgggt

SEQ ID NO: 614297 - DNA, 589 bp, Homo sapiens
ttgtaagttagatacatatcttttaccttgttattaaacaaacaaacaaacaaacaaacaagctctattcttctaagtgagttggttacatttaaattatcatttatctatgtatgtacgtatgtatccatctatctatctatctacctacctatctatctatatcttttgctgatgtagaactgctgcttttccagttgtatccaagtaaagttccatatcaatgcaatgatcccttttgtacagttattaagtataagttttctataaaaattagcattggatatgtagactactcatgtagttagcgatttaagttaagaccagacttggagaaataaatattaagtcagaatgaaaatcactgatcagctgacatcctyctttaaaagtgagaatatttcccacagaatactaatcatttaaagacaacttgctgtaaatgaaagacaaagatgaataaagccaaacactggtatgctgcagggcaagatctttgtatatattctatccggtatttgtttttgaaaattatctttattcatgtcatgaaattatcaaagaaaagagtgataaaggatctctgggt

SEQ ID NO: 614298 - DNA, 589 bp, Homo sapiens
ttgtaagttagatacatatcttttaccttgttattaaacaaacaaacaaacaaacaaacaagctctattcttctaagtgagttggttacatttaaattatcatttatctatgtatgtacgtatgtatccatctatctatctatctacctacctatctatctatatcttttgctgatgtagaactgctgcttttccagttgtatccaagtaaagttccatatcaatgcaatgatcccttttgtacagttattaagtataagttttctataaaaattagcattggatatgtagactactcatgtagttagcgatttaagttaagaccagacttggagaaataaatattaagtcagaatgaaaatcactgatcagctgacatcctcctttaaaagtgagaatatttcccacagaatactaatcatttaaagacaacttgctgtaaatgaaagacaaagatgaataaagccaaacactggtatgctgcagggcaagatctttgtatatattctatccggyatttgtttttgaaaattatctttattcatgtcatgaaattatcaaagaaaagagtgataaaggatctctgggt

SEQ ID NO: 614299 - DNA, 512 bp, Homo sapiens
cagtgtgcccactaatagtccctttataaaaccatctcctggaggcactagtcctccctcagaagaacagtaggtraaggagttctctggtttctggccttgaggccagttcctgtttaagcctaaataaatgaataaataaataaataaataaataaataaataaataaataaatattcctcttccaagaggcatctggcagttccccttatccctgatgagtccttcttaagaccatgtcgaattaagttaaatgaatcgaaagtaaattaggattaaattgtataacattgattcatacattgccttggatgatttatatacatttggaaagtttaatactttatcacaatggttaagttttaatgcaaaataaaattatctatgtagtgttttaaaatgttgattagcctactccttagcctttttgaagtactttttaaatttctggtgtaaattctggcatgtagttctttaaaaaaatcctgcaggaagtttttgtgctttcaaa

SEQ ID NO: 614300 - DNA, 512 bp, Homo sapiens
cagtgtgcccactaatagtccctttataaaaccatctcctggaggcactagtcctccctcagaagaacagtaggtgaaggagttctctggtttctggccttgaggccagttcctgtttaagcctaaataaatgaataaataaataaataaataaataaataaataaataaataaatattcctcttccaagaggcatctggcagttccccttatccctgatgagtccttcttaagaccatgtcgaattaagttaaatgaatcgaaagtaaattargattaaattgtataacattgattcatacattgccttggatgatttatatacatttggaaagtttaatactttatcacaatggttaagttttaatgcaaaataaaattatctatgtagtgttttaaaatgttgattagcctactccttagcctttttgaagtactttttaaatttctggtgtaaattctggcatgtagttctttaaaaaaatcctgcaggaagtttttgtgctttcaaa

SEQ ID NO: 614301 - DNA, 577 bp, Homo sapiens
caatttcacaatgggatcaaaacctcacatataaatattaaccttgaatttacatggtccaaacaccccacttagaaggcacagacttgcaagttgtataaaacmcaaagactcatccatctgctgtcttcaagagacagaactcccatgtaacaacacccatagttcaaggtaaagggttggagaaagatgtatcatgcaaatgaaaaacaaaaaagaacaacagtcacttgtgttagataagacagaatttaaaccaataattatagaaaaggataaagaatgtcattaaataatgacaaagggttcaactcaacaagtagacttaactatcttaaatatgcacacactcaatattggagcacccaattcataaaacaaatacttcaaaacctataaaaagacttaggcacaaaacaataatgggagacctcaacacatcaatgacagcattagagagatcatcaatgcaaaataacaaaataatcctggacttaaatttgacacttcaccagttggacctagtagacgttacagagcactctacccatcaaccacagaatatacattcctctca

SEQ ID NO: 614302 - DNA, 553 bp, Homo sapiens
aaaatttaaaagaatctcttgcataccttttcttacactatcctgaattttgcgttattacttgccatagttgatagacagactataatgtatgcacccctaaacagtatatagtttttccttttttaactttatgaaaataaaattatacccttgaatttatacccaaaaattctcataygaaatattttatccatgcaattaacaaatttaatccaatggctataaaatatagactattataccaaacaattgaggaattagaatgattctataatgtcttttatttacttgtgctacttggataattgttattttcctccattttattttactaagtggagggctggtttatgttaccttttcatggagaggacaaaattaaaggtatctcaaggcaagactaggtgtgggcctgtagacaacactaaaatgaatataaggagagagatatgctagtaagggataccacaatgggcaaatgcttttatttttgacctatggatgggaagggatacacagacctgtagggttaatggtatccaaacacata

SEQ ID NO: 614303 - DNA, 553 bp, Homo sapiens
aaaatttaaaagaatctcttgcataccttttcttacactatcctgaattttgcgttattacttgccatagttgatagacagactataatgtatgcacccctaaacagtatatagtttttccttttttaactttatgaaaataaaattatacccttgaatttatacccaaaaattctcatatgaaatattttatccatgcaattaacaaatttaatccaatggctataaaatatagactattataccaaacaattgaggaattagaatgattctataatgtcttttatttacttgtgctacttggataattgttattttcctccattttattttactaagtggagggctggtttatgttaccttttcatkgagaggacaaaattaaaggtatctcaaggcaagactaggtgtgggcctgtagacaacactaaaatgaatataaggagagagatatgctagtaagggataccacaatgggcaaatgcttttatttttgacctatggatgggaagggatacacagacctgtagggttaatggtatccaaacacata

SEQ ID NO: 614304 - DNA, 524 bp, Homo sapiens
tatctctctgctgtgtaggaagcataactgtgctgagttcttggctggaccactgaaatcaagtaatgactgaatataaatcagaatcatggctgtaaataaaaagaatgtgaccaaatgtccattagcaatgatagtctagtcatataaaaatgtggctattttcaattaataaaacaaaacaaggaagaaaaagtaaagacaatgtcaggaacgatgataagaataagcatgtaacaagcaaatggtaggtttgcttcaaccaaatggtaggtttgctttcattacatgaaaattttaccaaattgtacatataaagtcttctaagaacaatatacaaataacattttagtatataaattggctcaagaaagtcatttttcagggactctagatttataggctctttaagtctctttaaaactgtaaatgacccacagaagttgrctgccctaaaggtttagattaaataaaccatccagtgcacaattcaaatataagctgaacaaccttaattggaatat

SEQ ID NO: 614305 - DNA, 529 bp, Homo sapiens
aataaggcaatgaaaaatacttctaaatttccagttacctgtataaactcaaatatataaactttctctgccagccagtgatacgaagtactttttcctgctatgtctaacaactttccygcttcacacataagtgaaaaatagttatatcctagatgatgaaacagaaaggtaaatattagcacagtcttctgaagttccagaaatataagcctatattacttcacttaagtaggaaaattgcttcaacatcccgtaccttgtaaatgtggcacatctatttcatgctaacatctgtcacaactggacagctaaggacatatttacatggatatgttctttaataagtaattaaatgcttataatttttgtttcaaaaattaatccatacagtttgctttttttaatgcagcttaagtacacataactgtcttgtggcaaagaattttatttagtagtcaaagtactctgcaaacaaagacttattaagaatctctctgttggaagagtgtaattttaaacagtgaca

SEQ ID NO: 614306 - DNA, 529 bp, Homo sapiens
aataaggcaatgaaaaatacttctaaatttccagttacctgtataaactcaaatatataaactttctctgccagccagtgatacgaagtactttttcctgctatgtctaacaactttcctgcttcacacataagtgaaaaatagttatatcctagatgatgaaacagaaaggtaaatattagcacagtcttctgaagttccagaaatataagcctatattacttcayttaagtaggaaaattgcttcaacatcccgtaccttgtaaatgtggcacatctatttcatgctaacatctgtcacaactggacagctaaggacatatttacatggatatgttctttaataagtaattaaatgcttataatttttgtttcaaaaattaatccatacagtttgctttttttaatgcagcttaagtacacataactgtcttgtggcaaagaattttatttagtagtcaaagtactctgcaaacaaagacttattaagaatctctctgttggaagagtgtaattttaaacagtgaca

SEQ ID NO: 614307 - DNA, 601 bp, Homo sapiens
tccttatttgatctactaataaaatgtggttttcctttgaatgttaaaaatggaagaaacttctactgaaatattaaaaaaaaaaatgacagycattgctttttaaaaaacagacatattttaagtgatttgctcacttggttagaataaaaatttacctcacaataacatagaaagcatttccatatgccagacactactctaaaacaacatctattttacaaataatgcaactgagctacagaaaatttaattaactttcaaaggtcctaagagtgagcaaggtgttaaatgtgactagtatttaacctaggcagtctgtctcaaaggctatgttcttaaccacaacattatatggcctcttttgatgtcagtggtaatattacaccttggaccaagaattgttctgttcatcttaaattcctcaaattgaatcatggttgcttgctggaagcttagacaagaaaagaagagttgtaacccacaatggaaggaaaacctaaacagtttctaactcatgtggtatgaattatatgtaagagaattatgtatgaatacaaagattaacatgttttgacaatgtatttacataaaactataa

SEQ ID NO: 614308 - DNA, 601 bp, Homo sapiens
tccttatttgatctactaataaaatgtggttttcctttgaatgttaaaaatggaagaaacttctactgaaatattaaaaaaaaaaatgacagtcattgctttttaaaaaacagacatattttaagtgatttgctcacttggttagaataaaaatttacctcacaataacatagaaagcatttccatatgccagacactactctaaaacaacatctattttacaaataatgcaactgagctacagaaaatttaattaactttcaaaggtcctaagagtragcaaggtgttaaatgtgactagtatttaacctaggcagtctgtctcaaaggctatgttcttaaccacaacattatatggcctcttttgatgtcagtggtaatattacaccttggaccaagaattgttctgttcatcttaaattcctcaaattgaatcatggttgcttgctggaagcttagacaagaaaagaagagttgtaacccacaatggaaggaaaacctaaacagtttctaactcatgtggtatgaattatatgtaagagaattatgtatgaatacaaagattaacatgttttgacaatgtatttacataaaactataa

SEQ ID NO: 614309 - DNA, 601 bp, Homo sapiens
tccttatttgatctactaataaaatgtggttttcctttgaatgttaaaaatggaagaaacttctactgaaatattaaaaaaaaaaatgacagtcattgctttttaaaaaacagacatattttaagtgatttgctcacttggttagaataaaaatttacctcacaataacatagaaagcatttccatatgccagacactactctaaaacaacatctattttacaaataatgcaactgagctacagaaaatttaattaactttcaaaggtcctaagagtgagcaaggtgttaaatgtgactagtatttaacctaggcagtctgtctcaaaggctatgttcttaaccacaacattatatggcctcttttgatgtcagtggtaatattacaccttggaccaagaattgttctrttcatcttaaattcctcaaattgaatcatggttgcttgctggaagcttagacaagaaaagaagagttgtaacccacaatggaaggaaaacctaaacagtttctaactcatgtggtatgaattatatgtaagagaattatgtatgaatacaaagattaacatgttttgacaatgtatttacataaaactataa

SEQ ID NO: 614310 - DNA, 480 bp, Homo sapiens
gggcgccttcaaaatggctgatggaaagcatccggtactcacctccttcacaaaataaggagtagataatgacactttgaatagatcacctaagaaaaaatgctggaattcaacagagatgtgacagaaaacacctaaggcaagaaaggagaccaaagcgaggcagcccgcttggctacaattggcaaggagtatgmagaggctccttagtctggagaaagagtaagcaaatgctccccagtggtccacatttccacagcagattcctgaaatcttagccatggtagagtccttcaacccatatgggcactgaaactatcataggaagctgcatggggatggcaagagcattgctctgggaagggagttaagaatgggtgccatacccacactgaagcctaagcagccacagcagagtgctattttgagagcccagtccccaccagtttgcatcctgccctagagtccaacttctgcctc

SEQ ID NO: 614311 - DNA, 551 bp, Homo sapiens
actacatagaaaaatcagccaagatcaattaaagacatagtgttaggacccaaaattataaaactactggaagaaaactttggggaaacacttcaggacattgatctaggcaaagattttatggctgagacctaaaaaaacacaagcaacaaaaacagaaaaatttctgcacagctaaggaaacaatcaacagagtaaagaaacaatctgtagaactgggagaaaatatatgcagactactctttcatcaagggactaatatccagattatacaaggatctcaacacattgttaaaatgggcactagacattctcaaaataagacatacagagaacctacatatatatgaaaaaatgttcaatatcastaatcatcatggaagtgtaaatcaaaatcatgagataccatcttgccccagttagaatggctattatcaaaatgacaaaaaatatatataaatgctggggaggatgtggagaaaaaagaactcttatacactgttggtggcaatgtcaatcagtgcagtcagtgtggaaaacagtatgaggat

SEQ ID NO: 614312 - DNA, 522 bp, Homo sapiens
acaaatagagactctatggaataaacaacaaaagttagttgtctaaaagtaaagtagaacagaatcttcaactttaataaaagaaaagcatatggaaagaaatcctttaaataagggagatacataaaacatacataagaaatacacaccctattgtaaaatagagtctcatttggcagtagccattacaagcatgccttcatgagaayagaatgtgagttttattgttattcagtggccactgatgtatggaaacaacatcccatatacagcccaaacttctccacttgaaacaggaatattgtattatgtttgggcataaaacagtgctgaatgcagagtagaaactcaatacacagattttatagatattgtagactgtttgagaacttttggattatatttttccctgtagcacatagttttgtgttcctaattttcattttgatattactttattttatgggcttatgactatgatttatcattaaattttaagtattttaaaaaatattgtttagc

SEQ ID NO: 614313 - DNA, 613 bp, Homo sapiens
atgaaatgacatcatttatcatttaataaattacatatgaaaattcttttccttatgatttcatcaatcaacaaataaattctagaggattctagatacatttatttggcataytttttaatgcggtatcaaattttgtggatattcttttagagaatcaatttcttaaaatggcattgaacatttaatttaaaatgcccttcttgaaccatacatgtttattagaaaattattttatataggttgtccattaaaaaacaattttctatgtatgtaaacatttatgataactgctcaatattttggtccatatttatttatctacctatttattacacaatacaaatattacactttgtaaaattaaaggcctagtctaatattactctatgtcggaagtaaaataattcacagaagtctaaattaaaagacaagataaaacacaaaatgatgagaatcacaaaaccattgccaaattttcagctatgacatttattctccatgtggccttaggtatcttactctcttattttaacctttgatgactataaaaataatttgttactaagaagccctctcgctttagtagctgtgactataaaattaagaacat

SEQ ID NO: 614314 - DNA, 613 bp, Homo sapiens
atgaaatgacatcatttatcatttaataaattacatatgaaaattcttttccttatgatttcatcaatcaacaaataaattctagaggattctagatacatttatttggcatattttttaatgcggtatcaaattttgtggatattcttttagagaatcaatttcttaaaatggcattgaacatttaatttaaaatgcccttcttgaaccatacatgtttattagaaaattattttatataggttgtccattaaaaaacaattttctatgtatgtaaacatttatgataactgctcawtattttggtccatatttatttatctacctatttattacacaatacaaatattacactttgtaaaattaaaggcctagtctaatattactctatgtcggaagtaaaataattcacagaagtctaaattaaaagacaagataaaacacaaaatgatgagaatcacaaaaccattgccaaattttcagctatgacatttattctccatgtggccttaggtatcttactctcttattttaacctttgatgactataaaaataatttgttactaagaagccctctcgctttagtagctgtgactataaaattaagaacat

SEQ ID NO: 614315 - DNA, 613 bp, Homo sapiens
atgaaatgacatcatttatcatttaataaattacatatgaaaattcttttccttatgatttcatcaatcaacaaataaattctagaggattctagatacatttatttggcatattttttaatgcggtatcaaattttgtggatattcttttagagaatcaatttcttaaaatggcattgaacatttaatttaaaatgcccttcttgaaccatacatgtttattagaaaattattttatataggttgtccattaaaaaacaattttctatgtatgtaaacatttatgataactgctcaatattttggtccatatttatttatctrcctatttattacacaatacaaatattacactttgtaaaattaaaggcctagtctaatattactctatgtcggaagtaaaataattcacagaagtctaaattaaaagacaagataaaacacaaaatgatgagaatcacaaaaccattgccaaattttcagctatgacatttattctccatgtggccttaggtatcttactctcttattttaacctttgatgactataaaaataatttgttactaagaagccctctcgctttagtagctgtgactataaaattaagaacat

SEQ ID NO: 614316 - DNA, 574 bp, Homo sapiens
ccccacccatgcataacttgtattatcagcatcccccaccaacgtggtacacttgttacagttgatgaaacttcatttacacatcattatyactcaaatactagtttatattagggtttattctttgtgttttacactctgtggctttgactaaatgtataatgagatgtttctatcattatagtatcatacagacttattttcactgaccaaaaaatcctctgttctctgccgattcatttttccctgaccacaaccccctgacaatcactggtgttttcactttctctatagttctgcctttcacagaatgtcaaataggtgaaatcatagcgtatacagccttgtcatattgcctttttccatttggtattttgaatttacagtttgttcatgtcttttcaaggcttgatagtacacttacttttagcactgaataatagtccattgtctgaaggtaccacagtttatttatccattcacttactgtagaccctcttggttgttccctcccaagttttgaaaattgtgaataaagatgctgtaaacatctatgtgcagatggatgttttca

SEQ ID NO: 614317 - DNA, 574 bp, Homo sapiens
ccccacccatgcataacttgtattatcagcatcccccaccaacgtggtacacttgttacagttgatgaaacttcatttacacatcattatcactcaaatactagtttatattagggtttattctttgtgttttacactctgtggctttgactaaatgtataatgagatgtttctatcattatagtatcatacagacttattttcactgaccaaaaaatcctctgttctctgccgattcatttttccctgaccacaaccccctgacaatcactggtgttttcactttctctatagttctgcctttcacagaatgtcaaataggtgaaatcatagmgtatacagccttgtcatattgcctttttccatttggtattttgaatttacagtttgttcatgtcttttcaaggcttgatagtacacttacttttagcactgaataatagtccattgtctgaaggtaccacagtttatttatccattcacttactgtagaccctcttggttgttccctcccaagttttgaaaattgtgaataaagatgctgtaaacatctatgtgcagatggatgttttca

SEQ ID NO: 614318 - DNA, 574 bp, Homo sapiens
ccccacccatgcataacttgtattatcagcatcccccaccaacgtggtacacttgttacagttgatgaaacttcatttacacatcattatcactcaaatactagtttatattagggtttattctttgtgttttacactctgtggctttgactaaatgtataatgagatgtttctatcattatagtatcatacagacttattttcactgaccaaaaaatcctctgttctctgccgattcatttttccctgaccacaaccccctgacaatcactggtgttttcactttctctatagttctgcctttcacagaatgtcaaataggtgaaatcatagcgtatacagccttgtcatattgcctttttccatttggtattttsaatttacagtttgttcatgtcttttcaaggcttgatagtacacttacttttagcactgaataatagtccattgtctgaaggtaccacagtttatttatccattcacttactgtagaccctcttggttgttccctcccaagttttgaaaattgtgaataaagatgctgtaaacatctatgtgcagatggatgttttca

SEQ ID NO: 614319 - DNA, 566 bp, Homo sapiens
ccttattagctttatgaggtttatttaagtactcatgagtggtgtctttcagtcaaaataactacaaaggaaattttctatctagatttatataactgatataaaatatctctatagatctatccgtacatcaatatctatcaattacttctaaaggttattaactatacagttttctaaaaggatccacacattaatcaagtccccttctcctcttaaagtcatagtcaaaagttgttagaagttgctataaatataagtaaataatatggttttgtaggctaaacccagatagtaaaggaactaaactaatattgtaatgtcctagcctttcattttaaamaaacaataaaaatgcatatatacacaaaactgttttcttatgcaaaatgctgataagcattttttctaaaataaatcaaggtcacgtgatcaaagtgaagcttttgacaaattagactagtttgataacctgggttttaaagaaactgtatcctttttccttgattttagaagagaacagcaaaagataattataaattttattttaaaatataatgtgtatt

SEQ ID NO: 614320 - DNA, 452 bp, Homo sapiens
aacttagaatcccactaggtacagaaagtaccatctggacccctatgagtagaccaccagataatccaaatccactgaaaatgtcaaacaaattttatttgttgttgaaagctatcaataatttaaattgactaatctttcaagtaaattaactaattttttcagttacgccaatactttttttttgttttatacatgtcaagcamatagaaacaaaaatagttggttcagagaactgctttgagccaagatcaaaggcttatcaaaatgaagtaatataaatgattctaagggctttggtataaaataagcactcgaatacaaatcaaattctattaatactttaataatattagaagtttatttaaatcttcgtagaacattttgtatgccagtaatatttcttgtcaagttttaattaataatcttggtctattgagggaatatgatga

SEQ ID NO: 614321 - DNA, 554 bp, Homo sapiens
ccctttatcactatataatgaacttattaatctttttattgtttttgacttaaagtatgttttatctgatataagtatagctattcctgctcaatatttttaawttttaaaattttattttttgtgggtatatagtagttatatatatttatggggaacataagattttttgatacaggcatgcaatgcataataataacatggaaaactgtgtgtctatttcctcaaacatttatcttttgtgttacaaataatccaattacatatttttgaatatttttgaatttacaattaatagtgtcctttttgtgctatcaaatagtaggtctcattcattctttctattttttttctacccattaagcatcctctcctccccctcatcttcatactctccattctggtatggtaacaattcctctactctctatgtccaagagttcaatcattctgatttttagatcccaaaatataagtgagaacatgtgatgtttgtctttctgtgcctggcttatttcacttaatataatgatctccaattctatccatgctgt

SEQ ID NO: 614322 - DNA, 568 bp, Homo sapiens
gaaaactgtgtgtctatttcctcaaacatttatcttttgtgttacaaataatccaattacatatttttgaatatttttgaatttacaattaatagtgtcctttttgtgctatcaaatagtaggtctcattcattctttctattttttttctacccattaagcatcctctcctccccctcatcttcatactctccattctggtatggtaacaattcctctactctctatgtccaagagttcaatcattytgatttttagatcccaaaatataagtgagaacatgtgatgtttgtctttctgtgcctggcttatttcacttaatataatgatctccaattctatccatgctgttgcaaataacaggatctcattctttgtatggctgaatagtactccattctttatatgtaccatattttatctattcatctgttcatggacacttagattacttcaaaatcttagttattgttaacagagctgcaataaacatgggagtgcagatatctctgatatactcattgcgatccttttgagtgtttacccaacagtgaaattgctggaatat

SEQ ID NO: 614323 - DNA, 589 bp, Homo sapiens
tggcactagtgttagtgggtgcaggtaaaccaaatttggggcctcccagtggcttgcttggatgctagtagtgatagccctggcccagggaggtactcaggttctcaggctcccgggcagttgatacgtcatgaacaatggcactggtcctggcaggatagcactctgggtcccaagaagtgcatgctagtgttggcaaggactgtgatgggctgagtgtgccagtccccaggtcygcaggtgacatacacaggtgccagctgtggtggtagcagctgggtgattatgcaaaacctcaggcccctgggagaagtgtttagttgccaatgttggtggacagagctggacaatgttcttgctcctggactacatgttctggcatggggagaggggtaaagttaggctgagttggcttgcactcaggccccccagtggtgtgtatagttgctggccttggtagggaggggtggttctttccccaggccaccagcacaatgctcaaattgggtgtggcaggggctgtgctgctgccttgccactggggtgagggtggtggtggtaacacttttactgatggcagctttggcca

SEQ ID NO: 614324 - DNA, 428 bp, Homo sapiens
agacccttaggcttcattacatatrttttcaagtcattaactcaactcctactagttcctcaggactcaacagcttttctcttagccttcctaactcccaaggctgggctaagtttcctgtatatctcacttcattttctgtatattcctaggagagcaattccaataatgcatcgtaattgcctgtttttttcctcaactataaatttttacatcttatgcaagactgcacctcaatgcccagcacagtgccaagcacagagaaatacatacttgctcgatgtgtggactagtaagattattttatcaaggctgtttgtatctctgcataaactctaactctgcttctctcatttaaaaactgacagtctgtgtaccaggcaaatttatccaatctacttttttgtataatcctgcctgatgtggtc

SEQ ID NO: 614325 - DNA, 520 bp, Homo sapiens
gtctgtaatttttcggtattattgtaccaatgttaattttctgattttaatggtctttgtccttcagaacaagggctgtggtccttttcttktaggaaatacttattgaagcataaagtgtaatgggtaaaatagcaactttcagttggttcagaaaaataaattacaagtatatttacatatacatatgcacacatacagagggagagagaataaggcaaatgtggtaaaatattaatatttttaccaaggtgaattctttgttctattcttgtgccttatctagaagtctaaaattatttcacaatgaaagtttttacaaatattaagtggaattcaaggtaaatcttgagaaaatgcagaaaattctttctctgtaaaaggagagaagctattgatggacaggcaacattgaatggcatacaaatattctgaaaggtacaagagccactgatttcctttgcttaacctcccacagtgccctcagctactttcttgtctgatcatacacaaacgtgaa

SEQ ID NO: 614326 - DNA, 548 bp, Homo sapiens
aaaaaaccaatgtcatttttcacagaaatacagcaaacaattctaacatttgtatggtcaaaaaattaaaatataaaggaaccccagtcaaagtaatcctgagcaaaaaatcaaaactgaaggcatcacattagctgacttcaaaatgtattaaaaggctatagtaagcaaaatagcrtggtgctgatataaaagtaaacacataggacaatcaaacagaatagagaacccagaaataaatccacatgtttacagccaacagatttgaacaaggttgccaataacttatagtgggaaaggacacccttttcaataaatatttcagaaaaattggatatctatatgcggaagaatgaaacaggacctctatatctcaccatatacaaaagattaacagaagatggaataaagccttaaaactatataaaatcttaaactctaaaccactacaaaaaaacatagggaaaacacttcagggctttggtctaggtaaagattttacagctaagatctcaaaaggacagataactgaagcaaaaatagactac

SEQ ID NO: 614327 - DNA, 564 bp, Homo sapiens
taagctatccatgatagatcaaaacctagatgaaaatccttcaacctttctataaaggctgacagagactatggcaaaacatgcttccctatattctaattcaattgagggacaggtaatcttgaaagacaggtttactcaagcagctcctgatatttgaaggaagctacagaaacaggctataggactagaaggcaccttagaaaaccttctaagagtagccacctcwgtctttcataagacatactaggaggaggctcaggaaaaggagagaaaatagaagaaaaagtcagacagagggtaccttggaatggaatccaggcctgagactccttgagctcactgttcaagacaccctcataaactggtcagtaacaaactttgctgcatgtctccgacttgttttatgtccttaagcataacctgtaaccatgtggtagtaccacttttcagccgttgcctttttacaatggtgacccaggttcaatcccagcctgggtgatgaatactttccagttaacaactgtgtgacgtttaatcatctcgtgctccgccatgaaaaac

SEQ ID NO: 614328 - DNA, 564 bp, Homo sapiens
taagctatccatgatagatcaaaacctagatgaaaatccttcaacctttctataaaggctgacagagactatggcaaaacatgcttccctatattctaattcaattgagggacaggtaatcttgaaagacaggtttactcaagcagctcctgatatttgaaggaagctacagaaacaggctataggactagaaggcaccttagaaaaccttctaagagtagccacctctgtctttcataagacrtactaggaggaggctcaggaaaaggagagaaaatagaagaaaaagtcagacagagggtaccttggaatggaatccaggcctgagactccttgagctcactgttcaagacaccctcataaactggtcagtaacaaactttgctgcatgtctccgacttgttttatgtccttaagcataacctgtaaccatgtggtagtaccacttttcagccgttgcctttttacaatggtgacccaggttcaatcccagcctgggtgatgaatactttccagttaacaactgtgtgacgtttaatcatctcgtgctccgccatgaaaaac

SEQ ID NO: 614329 - DNA, 572 bp, Homo sapiens
agctgcagcttctgcatcagcagttgctgcatcaaattgcatttttataaaactagaaacaagctatctgtgaaaatgttttgtgatgtgacacttyatctcacagaatggaatctgtgttttgattccccaggttgtaaacactctttcagtagtatctacaaaaggacatttcagagccattgaggcccatagtgagaaaccaaatatcctgcaataaaaattagaaacaagccatctgtgaaaatactttgtgatatgtgcattcatctcacagaatggaacctgtgttttgattcaccaggttggaaacactctttgtagaatcttcgaagggacatttctgagcccattgatgcccatagtgaaaaacttaatatcctgccatgtaaactagaatcaaactatctgtcaaaatgttttgtgatgtgtggatttacttcacagaatggagcctgcattttgattcagcaggttggacaattctttttgtagaatctacgaagggatatttcagagcctattgacacctatagtgaagaaccgaatatcctgtgataaaaactagaaac

SEQ ID NO: 614330 - DNA, 572 bp, Homo sapiens
agctgcagcttctgcatcagcagttgctgcatcaaattgcatttttataaaactagaaacaagctatctgtgaaaatgttttgtgatgtgacactttatctcacagaatggaatctgtgttttgattccccaggttgtaaacactctttcagtagtatctacaaaaggacatttcagagccattgaggcccatagtgagaaaccaaatatcctgcaataaaaattagaaacaasccatctgtgaaaatactttgtgatatgtgcattcatctcacagaatggaacctgtgttttgattcaccaggttggaaacactctttgtagaatcttcgaagggacatttctgagcccattgatgcccatagtgaaaaacttaatatcctgccatgtaaactagaatcaaactatctgtcaaaatgttttgtgatgtgtggatttacttcacagaatggagcctgcattttgattcagcaggttggacaattctttttgtagaatctacgaagggatatttcagagcctattgacacctatagtgaagaaccgaatatcctgtgataaaaactagaaac

SEQ ID NO: 614331 - DNA, 633 bp, Homo sapiens
aacctgtgttttgagtcaccatgtcagaaacactctttttgtagaacctacgaagggacatttctgagcccattgaagcctatagaaaaaaatcaaatatccccctgtaaaaactagaagcaatctatctgtaaaaatgctttgtgatgtgtggattcatctcacagaatgaaacctgtgttttgatttagcaggttggaaacactctttttgcagaatctatgaccggacatttctgagcccattgatgcctactgtgaaaacctaatatcccgcattaaaactagaaacaagcratatgtgaaaatgctttgtgatgtgtggattcatctcacagaatggtacctgtgttttgattcaccaagttggaaatgctctttttgtagaatatacaaagggacatttttgagctcattgaagcctatagtgaaaagttgaaaatccagcaataaaaactagaaacaaactatctgtgaaaatgtttgtgatttgtggattcacctcacagaatggaacctgtgttttgattcagcaggttagaaacaccttttaaacaatgtatgaatggacatttctgagcccattgatgactacagttaaaactttaatatccaacattaaaagtagaaacaa

SEQ ID NO: 614332 - DNA, 555 bp, Homo sapiens
aatcaaatatccccctgtaaaaactagaagcaatctatctgtaaaaatgctttgtgatgtgtggattcatctcacagaatgaaacctgtgttttgatttagcaggttggaaacactctttttgcagaatctatgaccggacatttctgagcccattgatgcctactgtgaaaacctaatatcccgcattaaaactagaaacaagcaatatgtgaaaatgctttgtgatgtgtggattcatctcacagaatggtacctgtgttttgattcaccaagttggaaatgctctttttgtagaatatacaaagggayatttttgagctcattgaagcctatagtgaaaagttgaaaatccagcaataaaaactagaaacaaactatctgtgaaaatgtttgtgatttgtggattcacctcacagaatggaacctgtgttttgattcagcaggttagaaacaccttttaaacaatgtatgaatggacatttctgagcccattgatgactacagttaaaactttaatatccaacattaaaagtagaaacaagctatatgtgaa

SEQ ID NO: 614333 - DNA, 555 bp, Homo sapiens
aatcaaatatccccctgtaaaaactagaagcaatctatctgtaaaaatgctttgtgatgtgtggattcatctcacagaatgaaacctgtgttttgatttagcaggttggaaacactctttttgcagaatctatgaccggacatttctgagcccattgatgcctactgtgaaaacctaatatcccgcattaaaactagaaacaagcaatatgtgaaaatgctttgtgatgtgtggattcatctcacagaatggtacctgtgttttgattcaccaagttggaaatgctctttttgtagaatatacaaagggacatttttgagctcattgaagcctatagtgaaaagttgaaaatccagcaataaaaactagaaacaaactatctgtgaaaatgtttgtgatttgtggattcacctcacagaatggaacctgtgttttgattcagcargttagaaacaccttttaaacaatgtatgaatggacatttctgagcccattgatgactacagttaaaactttaatatccaacattaaaagtagaaacaagctatatgtgaa

SEQ ID NO: 614334 - DNA, 580 bp, Homo sapiens
tggattcatctcacagaatggaatctgtgtttttattcaccaggttggaaacactctttttgtagaatatatgaagagacatttctgagttcattgaggcctatagtgaaaaaccaaatatttcacaacaaaaactagaaacaagacagctgtgaaaatgctttgtgattcatctcacagaatggaacctgtgttttatttagcaggtttgaaactctctttttgctaaatttatgaatggacatttctgagaccattgatgcctctggtgaaaaactgaatatcctgcctaaaaaactagaaacaagctatacgcgaaaatgcattgtgatgtgtggatccattttacagaatgaaacttgtgttttgatttagcagattggaaacactttttttgtagagtctatgaatggacatttctcacatttctratgcctatagtaaaaagaaaatacatactgcataaaaactagaaacaagctatatttgaaaatactttgtaatgagtgaattaatctcacagaataaaactttttgattcaccagcttggaagcactctttttgtagaatctgtgacca

SEQ ID NO: 614335 - DNA, 566 bp, Homo sapiens
aacaagttatatgtgaaaatacttctagatttgtggattcatataataaaatggaacctgtgttttggtttaccaagttgaaagcactctttttgtagaagcaacgactggacatttctgagcccattgatgcctatagtgaaaaacygaataccctgcattaagactagaaacaacatatctgtgaaaatgctttcttacatgtagattgttttcacagaatggaacccgtgttttgattcaccaggttgggaacactctttttgtttgtacaaaggtacatttctgagcccattgacatctatagtaaaaaattgaatatcccacaataaaaactaaaaacaagctatatgagaaaatgttttgtgttgtgtggattcatctcacagaatggaacctctgttttgattcaccaggttggaaacactctttttttagaatgtacgaaccaatatttctgagcccattgatgactacagtgaaaaatggagtattctgcatagaaactagtaacaagctatatgtgaaaatactttgtgatgtgtggattcaattcacagaatgga

SEQ ID NO: 614336 - DNA, 566 bp, Homo sapiens
aacaagttatatgtgaaaatacttctagatttgtggattcatataataaaatggaacctgtgttttggtttaccaagttgaaagcactctttttgtagaagcaacgactggacatttctgagcccattgatgcctatagtgaaaaacckaataccctgcattaagactagaaacaacatatctgtgaaaatgctttcttacatgtagattgttttcacagaatggaacccgtgttttgattcaccaggttgggaacactctttttgtttgtacaaaggtacatttctgagcccattgacatctatagtaaaaaattgaatatcccacaataaaaactaaaaacaagctatatgagaaaatgttttgtgttgtgtggattcatctcacagaatggaacctctgttttgattcaccaggttggaaacactctttttttagaatgtacgaaccaatatttctgagcccattgatgactacagtgaaaaatggagtattctgcatagaaactagtaacaagctatatgtgaaaatactttgtgatgtgtggattcaattcacagaatgga

SEQ ID NO: 614337 - DNA, 458 bp, Homo sapiens
tggaaacactctttttgtagtatatacgaaaagacatttctgagcccattgatgcctgtagtgaaaaaccaaatataccacgataaaaactggaaacaacccgtctgtgaaaatgttttgtcatgmgtggattcatctcactaaataaatccttgttgggttcaccaggttgtaaacagtctttttttagaattacgactgggacaactctgcaccttttgatgcctatagtgaaacaccaaatatcttgcaatagaaactagacaaaaactatctgtgaaaatgctttgtcatctgtggattcatctcaccaaatagagccagatttttgtttcaccaacttggaaacacttttttctttccttttttttttttttttttttttttttttttttttttttggggaatctataaccatacaattctgagccctttgatgtctatagtgaaaaactgaa

SEQ ID NO: 614338 - DNA, 458 bp, Homo sapiens
tggaaacactctttttgtagtatatacgaaaagacatttctgagcccattgatgcctgtagtgaaaaaccaaatataccacgataaaaactggaaacaacccgtctgtgaaaatgttttgtcatgagtggattcatctcactaaataaatccttgttgggttcaccaggttgtaaacagtctttttttagaattacgactgggacaactctgcaccttttgatgcctatagtgaaacaccaaatatcttgcratagaaactagacaaaaactatctgtgaaaatgctttgtcatctgtggattcatctcaccaaatagagccagatttttgtttcaccaacttggaaacacttttttctttccttttttttttttttttttttttttttttttttttttttggggaatctataaccatacaattctgagccctttgatgtctatagtgaaaaactgaa

SEQ ID NO: 614339 - DNA, 426 bp, Homo sapiens
tgtctatagtgaaaaactgaatatcccatgataaaaactggacacaacctatctgtgaaaatgttttgtcatgtatgggttcatctcaccaaatggggcctggttttggatcaccaagttggaaacagactggacaatgctacaccctttgacgcctacagtgaaaaaccaaatatcccgcgattaaagctagaaaaaagctatctaagaaaacgctttgtgatgtgagtattcatattgcagaatgtaacttgtgtttagattaaccacgttggaaatactctttttgtaggatctacaaagtgatatttctgagcttattggtgcctgtactgaaaaacctaatatgctgagataaaatctagaaayaatctattggttaaaaggctttgtgatgtgcagattcatctcacagaatggaaactg

SEQ ID NO: 614340 - DNA, 627 bp, Homo sapiens
tatctcactgaatggaatctgtgttttgataaaccaggttgaaaacattcttttcgtagagtataagaagggacttttctgagtgcattcatgcctatagtgaaaaaccgaatatcccttgataaaaactagaaacaagctatatatgaaaatgctttgtgatgggtggattcagctcacagaattgaacctgtgtwatgattcactaggtcggaaacactctttttgtagaatctatgaaaggatatttttgagcccattgatgcctatagtgaaaaatcaaatatcctgtgataaaaactagacacaacctatttgtgaaactggctttgcgatgtgtggatttgtctctcttaatggaaactgtgttttaataaaccaagtgaaaacactctttttgtagaatctacaaatgaacattttttatcacattgatgcctatggtaaaaaactgattatcccacaataaaaactagaaacaagctatctgtgaaagtgttttgtgatgtgtggatttgcctcacagaatggaacctgtgttttgattcaccaggttggagatgctctatttgtagaatatacgaagggacatttctgagcccattgacctctatagtgaaaaactga

SEQ ID NO: 614341 - DNA, 552 bp, Homo sapiens
tgactcactgcaagctccgcctcccaggttcacaccattctcctgcctcagcctcctgagtagctgggactacaggcacccaccaccatgcccggctaattttttgtatttttagtagagatagartttcactgtgttagccaggatggtatcgatctcctgaccttgtgatccgcccacctcagcctcccaaagtgctgggattacaggcctgagccaccgcacccagctgctaatttgttcttctatctagatcactaaaactttctccatatcaaaaataacttttttttcttttatgtcattcatgtgttcactggattagcacctttaatttccttcaagaacttttccttcttattcacaatttggctaacctgttggtaaaagaagcctagttttcagccctatcttgtctttcaacttgttttcttcactttgcttactcatgtctagcttttcatttaaaatgagagatatgtgactctttctttcactcaaacactttaaggccattgtgtggttattttttgccctaatttcaaagttgtt

SEQ ID NO: 614342 - DNA, 510 bp, Homo sapiens
atttttatacatcagtaacattcaagctgagagccaaatcaagaatgcaataccatttacaatagccacaaaaaaataaaattacctagaaatacatctaagcaaggagacgaaagctctttacactgagaactactaaacgctactcaaagaaatcatagatgacacacacaaatggaaaaacattgcatgctcatgaataggaagaatcaatgtctttaaaatggctgtactgcccaaagcaatccacagatttgatactattcctatcaaactacaaaggtcatttgtcaacaaaattagaataaactattctaaaattcatatgaaactaccaaaaacctctaataggcaaggaaatcytaatcaaaaagaataaagccagaggcatgacattaccagacttcaaactatactttaagactacattaacccaaacagaatggtactggtacaaaaacacacatatagaccaatgaaacagtagagagcccagaaataaagccacac

SEQ ID NO: 614343 - DNA, 538 bp, Homo sapiens
gttgtgtttttattattgagttgtaagtgttctctatatattctggatacaattccatgaccagacatgatttgcaagtattttctcttattctgtgggtcatcttttcacttttgtcatggctttgaaactttgaagcacaaagttttttattattttctttagttgtttgtgtctttgatgttatatctaggaaactattgtctaatccaagttcacaaagattgatgcttttattatgttttaagagtttcatggttttatctctttcatttagttcttagaaccattgtcagtgaaattttttgtatgataygaagtagaagtaaaaacttgttattttgcatgtggatgtaatttgccctaaccgttttttttggtaagtgtttaattttgacaaattacattatatcatttaagaaaactatagagcttttcacagcaaaagaaattatcaacggagtaaatagacaacctatagagtgagaggaaatatttacaaattgtgcatacgacaaaggtctaatatttagaatct

SEQ ID NO: 614344 - DNA, 449 bp, Homo sapiens
gtcaaccaacatatctgctgttgtattgattatcatctttattatcatacaataatcatatattacttagtcaattaaaataaaattttgaaaagtattgataattttttaaatgtttgacaattatccaatagatcataactgtggaagtctgcttayaaaattttagttaaacctagcaaaaaattctaaaatttcttagcttattataaaagtaccaatgcagcaggcagagatatctatcatcatttatgatgaaagtaaagatcttatatcatttgctttgtataagacaattttactttggtaccttctcttgctttaaaaaatagtaaaatgtcaccagtatactacaggttgagcattcttaaaatccaaaagtccaaaatccgaactcttctggtcccaagcatttcagataagggctctttcacctttataatctataa

SEQ ID NO: 614345 - DNA, 484 bp, Homo sapiens
atattatgttgctatttcactaaaacttatgactactttttgaaactgttataaarattgtgttggatatcatgcctcattgaaatggcttccatctctcaccctttcagactcagaccaaaaatcaccacctctctgaagcctgcccagactccctgaggaaaatcaatagcttttttctttgtttctaactcctctcttgcagcattatcacactattttgtaagcatcccttctggcttttgaatgtagtataaggacctgacacatattttactgagtaaatgtgaagaccatatcaagtaagcagcagagcatatgaacaacatctgccatagaggttaatagtggcactgggcctttattaaatatggttttactttcaaagtcaaggtttaacgtggaggaaaaccatgcaaagaaaagccatgtgtttaagttgtgtaacttaaaacacaaagattgtgcttaattgacacatcca

SEQ ID NO: 614346 - DNA, 484 bp, Homo sapiens
atattatgttgctatttcactaaaacttatgactactttttgaaactgttataaagattgtgttggatatcatgcctcattgaaatggcttccatctctcaccctttcagactcagaycaaaaatcaccacctctctgaagcctgcccagactccctgaggaaaatcaatagcttttttctttgtttctaactcctctcttgcagcattatcacactattttgtaagcatcccttctggcttttgaatgtagtataaggacctgacacatattttactgagtaaatgtgaagaccatatcaagtaagcagcagagcatatgaacaacatctgccatagaggttaatagtggcactgggcctttattaaatatggttttactttcaaagtcaaggtttaacgtggaggaaaaccatgcaaagaaaagccatgtgtttaagttgtgtaacttaaaacacaaagattgtgcttaattgacacatcca

SEQ ID NO: 614347 - DNA, 467 bp, Homo sapiens
cactcaatgttatatttctctaccagacctcttctgggctccagactcctatatccaattgcttattcaacatttccgctctgtctacgaggaatgtggatgccaatagggccacaacagaattaataattccaattttctctcaatcggttcctgctcaaattcagtcttcctaaaccctttttattccaggtatgggcattgttatctatccttatactcagaaaaaaaaatcataagtcttatttcctcacacttcacacctgttttttctggatagcctgtcacatctcttctgctagaatatattccaaattcaaacatttctcattatttttactgcatttccaaaacattcttacttgggatcttgaaatgggctctaaactagaatcctttatttcattatgcttaamtatagtatgttttccacacagaaactagagatatgtttgtaaaaggtaaat

SEQ ID NO: 614348 - DNA, 372 bp, Homo sapiens
ccagctacagcaaatttccctctcccctctcctccacaccatattctacataacattaattcattttytcccaggaaaaaatgtagcacctgattttactgatgtttctttatttaaaaagtctttccccttccattagaatataaagttgctccctcgatctgtcatgtcatatctaaatgagtctggcacaaagcacatgcctaaaacaatgctttgtttactgaataactgaaattaatgttttaaattctacctcatgcaaggagaattcaaatgtcctttgaatagcttgaaaaagtgtataattctcccaatctatctcctttcaatcctcctgaaatattctggactcacaatttcaaaccactt

SEQ ID NO: 614349 - DNA, 372 bp, Homo sapiens
ccagctacagcaaatttccctctcccctctcctccacaccatattctacataacattaattcattttctcccaggaaaaaaygtagcacctgattttactgatgtttctttatttaaaaagtctttccccttccattagaatataaagttgctccctcgatctgtcatgtcatatctaaatgagtctggcacaaagcacatgcctaaaacaatgctttgtttactgaataactgaaattaatgttttaaattctacctcatgcaaggagaattcaaatgtcctttgaatagcttgaaaaagtgtataattctcccaatctatctcctttcaatcctcctgaaatattctggactcacaatttcaaaccactt

SEQ ID NO: 614350 - DNA, 372 bp, Homo sapiens
ccagctacagcaaatttccctctcccctctcctccacaccatattctacataacattaattcattttctcccaggaaaaaatgtagcacctgattttactgatgtttctttatttaaaaagtctttccccttccattagaatataaagttgctccctcgatctgtcatgtcatatctaaatgagtctggcacaaagcacatgcctaaaacaatgctttgtttactgaataactgaaattaatgttttaaattctacctcatgcaaggagaattcaaawgtcctttgaatagcttgaaaaagtgtataattctcccaatctatctcctttcaatcctcctgaaatattctggactcacaatttcaaaccactt

SEQ ID NO: 614351 - DNA, 490 bp, Homo sapiens
gtgtataattctcccaatctatctcctttcaatcctcctgaaatattctggactcacaatttcaaaccacttgtgagccactgatgtaatatgttgatttatacctccctacatttgtatattgctattattctttttactgaggattctccaacttgcatccaccaaaggtatttcctcctggaatactatatgatgcttcctccttttctacaccatcactggacttataaggcctgactctcctccgcacctagaacgctttctgtatccacagtgtccaacactttttccattgttttgtcactcttcgttttatcactttcttgattgtgaggtattagaggatggagatttttcatcttgtgtccatttgtatacctagtacttaaaacagagtaagatgtaatattaggtaatwcgcatatacctgaaactttctagggtacatctgttttcatacagtctataccaatgttaatcagaattc

SEQ ID NO: 614352 - DNA, 502 bp, Homo sapiens
tagcttgaaaaagtgtataattctcccaatctatctcctttcaatcctcctgaaatattctggactcacaatttcaaaccacttgtgagccactgatgtaatatgttgatttatacctccctacatttgtatattgctattattctttttactgaggattctccaacttgcatccaccaaaggtatttcctcctggaatactatatgatgcttcctccttttctacaccatcactggacttataaggcctgactctcctccgcacctagaacgctttctgtatccacagtgtccaacactttttccattgttttgtcactcttcgttttatcactttcttgattgtgaggtattagaggatggagatttttcatcttgtgtccatttgtatacctagtacttaaaacagagtaagatgtaatattaggtaatacgcatatacctgaaactttytagggtacatctgttttcatacagtctataccaatgttaatcagaattc

SEQ ID NO: 614353 - DNA, 592 bp, Homo sapiens
tatctatttgtgtccatgtttgtttactactgtatcctgagtgattaaaatagtacatggagcatcatagaaaatcaataaatatttctatygtaaattaatgactgaatttatgaactactggtaatattatatttgaaaacattaaatatgagaatgtgcatagacaagccacattataaaaaaatcgatatatgtcaacttagataaaacatggaatttgaagcaggttgttatctcacagtcttaaatttttttttacctatatagataaatttgatactctctagctaaaagaacacatacacatttctttcatttagttttaaatgaaacaaggaaaaatagaactttgactttttcctaaatatatgttagatttttttagtatctgttgttgttcaaagagaagtaattagtaaagaatttctattgttgagagttaattagtgcaatagtgtgacaggacatatcagaaatcataaattttacataaaattgttaaaactgagtaattaataaaatatgttttataacttatcttttccaaatgcaaaacagaatagatggatgaaagtttatttaaaggctg

SEQ ID NO: 614354 - DNA, 587 bp, Homo sapiens
cacatgcactatcagtattaaacaaaagaaaaaagctctctttgaatttggaagcaaaatttgtagagtgtaaaaggtagacatgtacaatggcttatttttttgcataacaaattagaaagcaattcataaastacaaaagatctgagaagatctgttatttctagagattaatatagtccgtgtgatcagaggaatgtcattgctcagcagtgcatttctagcacctgtgggtaatgctaggcactggtgaaaactcatcaaataatttaattcagcaaaaatgttataaaaatatcaaatacaaattttggaattcaaaagacctatattgagaactttatgttagaataacatcaaagttgttagtttatagccagagcaaagaaaacaatgaaaaaagtatacatatataatatatatatatatatattaccctttaagttctagggttctagagtacatgtgcacaatatgcaggtttgttacatatgtatacatgtgccatgttggtgtgctgcacccattaactcgtcatttacattaggtctatctcctaatgctatacctcccccctccccccaccc

SEQ ID NO: 614355 - DNA, 587 bp, Homo sapiens
cacatgcactatcagtattaaacaaaagaaaaaagctctctttgaatttggaagcaaaatttgtagagtgtaaaaggtagacatgtacaatggcttatttttttgcataacaaattagaaagcaattcataaactacaaaagatctgagaagatctgttatttctaragattaatatagtccgtgtgatcagaggaatgtcattgctcagcagtgcatttctagcacctgtgggtaatgctaggcactggtgaaaactcatcaaataatttaattcagcaaaaatgttataaaaatatcaaatacaaattttggaattcaaaagacctatattgagaactttatgttagaataacatcaaagttgttagtttatagccagagcaaagaaaacaatgaaaaaagtatacatatataatatatatatatatatattaccctttaagttctagggttctagagtacatgtgcacaatatgcaggtttgttacatatgtatacatgtgccatgttggtgtgctgcacccattaactcgtcatttacattaggtctatctcctaatgctatacctcccccctccccccaccc

SEQ ID NO: 614356 - DNA, 565 bp, Homo sapiens
attttcacaaaaagttgtttttggagtcagtttattgactgggcaaaaatctgaaattgtaaaccctttcagattggttacttaattagggtattcccagctaagacatactgatggccagtggatgctgatttcagctgttatccaaagctactggaacattctgtggcttgaccttcagcaggtgtcagtgcaattttcttyggaccccactttaaggccattgtcataatgacttcattttctttcacactgggctcctttcccatcatgtggagaaagcctgtttacgtcattttgtcatcttctgacacctctcaaatctatattctcgtcctaaactctctcatgagagattctatctccaccgagtttcagactgatatatacaacttcctgttgtacatatttgcttaaacaacacatagacactgcttaactcaaaatatccaaacaaaaattatcttctctcttaaactaatttattattcctcatcatttttcatctctacagttgatacaaccatccattcagacatcagggggtctttccttcctctcctcc

SEQ ID NO: 614357 - DNA, 568 bp, Homo sapiens
tcccttttagttagataggcgtggtgatccactcctgtaatcccagctacttgagaggctaaggcaggagaattgcttgatgtgaggaattcaaggctgaagtgagccttgatagcagcatggcactccagcctaggtgacagagagtgaccctgtctttatatatatatgtgtgtgtgtgtatttatatatataaataaaaataagaatattttcaaaattttgaaaaagattctagacatttaacttaaacacgtcttaagttaaaataatttttaaacattttcaggaaggcaatgtgtaagaagcagatttacactggawaatttcagtttgaaattatggtcagtctgtggatagtctagggacacaagtttcttcttgacaaaaaacaaaaatgctctaaaacatttttaaataaaaaatcaacactatagaaaaacagtcccgcaaaaaaatatatcacagtgactggaagtatttaagaagatctgtgcatgacatatttaaagtgctaaaggtaaaataacaaaaagtttaaaaagcagggggatgaagttaaagtgta

SEQ ID NO: 614358 - DNA, 596 bp, Homo sapiens
taaaaaactagaaagcaagagcaaaccaaactcaaagttagtggaagaaaagaaataatgaagatcacagcagaaataaatgaaattgaaggaaatcataactcacaaaacagattaatgaaatgaaaagttgctttcttgaaaatataaacaaaatagacaaacctttagccagactaagaaaaaaagagagaataccaacaaataaaattagagatgaaaaaggagacattacaactgataccacagaaattcagaggatcattagagacttctatgagcaactatatgccaataacttggtaaacctggaaaaaatggataaattgctatacacaataaatctacaaagattgaaccagaaagaaattaagaacctgaacagaagaataacaagttatgagattaaaaccataaaaaaaactctcccagaaaaataataataataataataaagcctgggaacmatttgctttactgttgaattctataaaacatttaaagaagaactaatgccaaccttactcaaactattttgaaaaacagaataattagcagggggaatactcccaaacacatcgtatgagtctcgtatt

SEQ ID NO: 614359 - DNA, 610 bp, Homo sapiens
aattatttctctgataaaaaggtgttactgcattccaatggaggaaaaaaaatgccccttgtgttaaatggtgttggayttacataagagaaatacatatttatggttacaaaaaatgtataagcatatttactgcaacagtatttgtaatcctctcaactggaaacagcccaaatggccactaagaataaaatggataaataaattgtaacatattttcataataaaatacacaataaagatgaatgaatatcaaaacatatcaaatgaaaaaggcgagcacaaaagattacatactgtcttatttcatctgcatgtgtataattcaaaaacaaatgaataaatctgtggttatagaagtactagagaggcaatttcttttagtggaacagtcatgaatcacacaggacaagaggaaagctattggagtgctaataatactctatttctggccatgagcagtattgacatggatgagttcaatttataaagcagaattttcattcatctacttatttatgtaggcttctcagtatggtatatctttgttatatttcaatgtaaaaacatttattttttaaaaagtgtgacctaccttagagaccaatca

SEQ ID NO: 614360 - DNA, 656 bp, Homo sapiens
catagcaggttatggtttacttttttctttttctgtatctacatagatacataaacagatcatagatagatagtagttagatagataatagatagaatcattattcctgttgattataaaattatatttttccaaactcattttacattccttgaatctatgctttttaataactatgcaatgggccactgtaaaggtagatttcaatttatttaattaattttctctaattctttgaaattttagttagcttccaattctattagcctttagtgataaatagatcaattttaagtgataacttgtaaatatctttataaatatactaatttattcttggataatcattacctttttttyaatttgatgataaggaatagtgatatatgtgcaatgctgtatgagggagtgaatttcataagctctaacacctatttctaataaagtataatacatatcttttctgaattttacaacctgagatatttaaaatcttataaaatacaatgattctagaacaggaactggcagttatagtggtccctaacatgttaccctgttgctaatggagtttattctgttacagccttgcaatttttttcatagtatttgagttttgtcttttcttccatcttatttcccatctacccttatgg

SEQ ID NO: 614361 - DNA, 656 bp, Homo sapiens
catagcaggttatggtttacttttttctttttctgtatctacatagatacataaacagatcatagatagatagtagttagatagataatagatagaatcattattcctgttgattataaaattatatttttccaaactcattttacattccttgaatctatgctttttaataactatgcaatgggccactgtaaaggtagatttcaatttatttaattaattttctctaattctttgaaattttagttagcttccaattctattagcctttagtgataaatagatcaattttaagtgataacttgtaaatatctttataaatatactaatttattcttggataatcattaccttttttttaatttgatgataaggaatagtgatatatgtgcaatgctgtatgagggagtgaatttcataagctctaacacctatttctaataaagtataatacatatyttttctgaattttacaacctgagatatttaaaatcttataaaatacaatgattctagaacaggaactggcagttatagtggtccctaacatgttaccctgttgctaatggagtttattctgttacagccttgcaatttttttcatagtatttgagttttgtcttttcttccatcttatttcccatctacccttatgg

SEQ ID NO: 614362 - DNA, 501 bp, Homo sapiens
gaagaacactgcttttccacttacgtggcaacagagggccctggccactcttaccttttgttgctctgaatctttatcttccttatgtscattttaatcattattaaaggatgggagaaactagagtcaaaaataggagacgagaaattcaagacagtaagcttaatttaccacatagttcaaagaaaagtacagaacagatacttagcaaatagttttttttccctaacataccttattcctaaagattaagcccaccatcaagtctgcccttctctaggagcacctatttcttcaaagtgccatagtacagatatataacacttattagtaaaattaagctctgcccatagtgttggtcatgctgtagaatacatgtttctccaaatccccaaggtgcagtgagagacagctcctcattttccaaaatctattaataccatggagtgactacagcaggactgcccagggtttgacctaacatagatttgcaataggcaa

SEQ ID NO: 614363 - DNA, 496 bp, Homo sapiens
tcttgatttggctctcagcttgaatatcattggtgtatagaaatgctactgattttkgcacattgattttgtgtcctaaaactttactggaatcgtttattagttcaagaagccttttggcagcatctttagggttttctaattatagaatcatatcatcaggaaagagataatttgactactacttttccaatttggatgtgttttatttctttctcttacctaattactctggctaggactccagtagtatgttgaataagagtggtgatagtgggcatccttatgctgttccagttcaaaagaggaatgcttccagcttttgctcattcagtatgatgttggctgtggacttgtaatagatggctcttattattttgaggtatgttcttttgatgcctaatttgttgagggtttttttttttaatcatgaaggattgctagattttattgaaggtttttgctacatctgttgagatgatcataaggtttttgt

SEQ ID NO: 614364 - DNA, 496 bp, Homo sapiens
tcttgatttggctctcagcttgaatatcattggtgtatagaaatgctactgatttttgcacattgattttgtgtcctaaaactttactggaatcgtttattagttcaagaagccttttggcagcatctttagggttttctaattatagaatcatatcatcaggaaagagataatttgactactacttttccaatttggatgtgttttatttctttctcttrcctaattactctggctaggactccagtagtatgttgaataagagtggtgatagtgggcatccttatgctgttccagttcaaaagaggaatgcttccagcttttgctcattcagtatgatgttggctgtggacttgtaatagatggctcttattattttgaggtatgttcttttgatgcctaatttgttgagggtttttttttttaatcatgaaggattgctagattttattgaaggtttttgctacatctgttgagatgatcataaggtttttgt

SEQ ID NO: 614365 - DNA, 496 bp, Homo sapiens
tcttgatttggctctcagcttgaatatcattggtgtatagaaatgctactgatttttgcacattgattttgtgtcctaaaactttactggaatcgtttattagttcaagaagccttttggcagcatctttagggttttctaattatagaatcatatcatcaggaaagagataatttgactactacttttccaatttggatgtgttttatttctttctcttacctaattactctggctaggactccagtagtatgttgaataagagtggtgatagtgggcatccttaygctgttccagttcaaaagaggaatgcttccagcttttgctcattcagtatgatgttggctgtggacttgtaatagatggctcttattattttgaggtatgttcttttgatgcctaatttgttgagggtttttttttttaatcatgaaggattgctagattttattgaaggtttttgctacatctgttgagatgatcataaggtttttgt

SEQ ID NO: 614366 - DNA, 358 bp, Homo sapiens
tggcaatgtgattttgtttaaaaataaattcatatcctgaaatatttatggatgaaattaaatgatrtataggatttgcttcaaaataatatgtaaagtatagacaaaacgagattttccaattgataatgattaaagctgcgtgataggcacataggggttcattataccattctgtctaattttatatatattggaaaattttgtaataaaaaagagaggagaatatcatatgagttgataagaataacatttattcatatagagcttgttggaccaggtgaatcaggatttccaattccctgtctccaatagtagcctgaatgcttttgtagaatttattgaatgtaagatgtat

SEQ ID NO: 614367 - DNA, 609 bp, Homo sapiens
ccttatacccttatacccaggccttgggttcatgaagatagctcctgaatgcgggacagtaggcttttcaggggtagcctaagactcccctcagctatggagcttattttgtggacaaacccattctaaatccaaatagctgacttataratggccctttggaacacaacccatttcaaatgttggggaagcttgtaattttcagtcacatacaagtgctttctctctctgtctttctctttttctctcaatgctacattttcatgtaacttaaagagacaatcaggttagaatttttaaaatttatctttcaggtaatgacccagtattttccttcaggctcatacaagctctgaggactattgcaatcatttataagatattttcattggccaagaaacatttttgtctatattctgccatgcaatctaataataggagtaattgatttaataatcacaatagcaggaacctcagggggccatttaaatgtggcctgtgttgacattgctgaggccttgttggaggcagggccataagagattgggtttttcatttccataaacaaaagtacacttttctcccttggtcttatatgcaagaggctcc

SEQ ID NO: 614368 - DNA, 610 bp, Homo sapiens
ctctcaaaatgatactggtttggatgataaaatatgctgcaattctcaccatggacaaccaagggttggttgtaactcttaatacatccaggagagaattatctctgcagatgaccatgcacagctcatctaaagatctctaaatttaccacctttgccttacgactcttcatctaaaattcagctctactactaaatcattctaatcagagaaaatctaacaaataaaaaatacttattaactatgcaacaacttgtgcaaagccctgtaaaggcatgaaaaagtggtctctgctctccaggcatgtactaccagctggctgagaagaggctgaagctgccttcctgatccctaccacacagccagaactatactaaaccctgtaagcacatgayttaatcttcacaacaaccctgtagataggaatcaatatcctctttaaagaaaaagagtaaaactgaggcttgaaggttactgtagcactgatcaagtaaattaataaatcggacactgttgaaataaaatggaacgtgtagttcccaccctcgccacacttttgagatgatggaatgtttcaatacatgtgacaaggtactcacatttcataca

SEQ ID NO: 614369 - DNA, 514 bp, Homo sapiens
tcctttcacattaccagactctgggaactttggaagtaacacaatggctacaatgtgtcctgtgccatctctgcggcaggcagtttatagatttttttttccaattaaggaatgtattattatgacctttgtgtagataataaattgcataacttgctctaagtcataaaacaatgaattacagaataaagataggagtcccaggctctgtttgaccccaaagtgtctctccactactcattcccttgtttgttcatttgcttgttcctttttatttatttatatattccattcattcattcattcattcattcattcattcatggttcaactagtaattgagaccctataacgttcttgtcactgttctaggagctaggctataatgygaacaggctcagttcttaacttcaagagtttacagtctagtgaagagacaggcaaggaattctactgggataagatcattgctttaaagaaagtatgagacagcatagtaggaatgtagcagaag

SEQ ID NO: 614370 - DNA, 497 bp, Homo sapiens
acaattaaaatgatacattgaaagtcaattactctctgatggtttaatgtattatctgttcctccatttatattataagatctttgaggatgaagtccgtaacctgggctgctcattgttcactcattgttctgcctccatgagggctgacacagtgttggaaattcagcaggaattatattactacttgatggttaaaataaaacaggtataatacctgaagaacacaaaattacattaacatttcaataaatttgttcttaaaagrtattgaaaatgtgattgccaaaactcatgagttaattgataagttgtagttcctctaaaatactgctcaaatcatttataaaaccttgaataaggttagataacccattacttatatcattgtagttattttttaagaaaacatggttaaaattatagctgattcattttattcacacctgattaattataagacttgatcaaaattaagcagttgatgcgaaacttca

SEQ ID NO: 614371 - DNA, 576 bp, Homo sapiens
catcaaacacggtgtctcatgcctataatcccatcactttgggaggccgaggcaggaggattgtttaagtccaggagtttgagaccagcatgggaaacataatgagacaccatctctataaaaaaagaaaatttttaattagctgggcatggtgttacgtgcctgtagtcccagctacttgtgaggctcaggtgggaggatcacttgagccaggagtttgaggctacagtgagccatgatcacataactgcacctagcctgggtgagagggcaagaccctgtctggaaaaaaaaaagtgtgtgcatattaattaaattaagattgcttaaagaaagtcaatttcaattcaaaatttccaagaaagagtaattccttttttctttgcagggtaacatcaatagcactttgcagaggtatgaagaatggagtggaagtaagttggactctaagaccccaatttcctacccagtaccacaatgtcattctatatttatataatgtctttgggttgkgaatttgatacacaggggttattagctagggaactgctcagcgaatggtagaaaatgtcaatt

SEQ ID NO: 614372 - DNA, 526 bp, Homo sapiens
aggtgtttagtccaaattgagatgtactacatgtgtaaattcacactggattttgaagacagcgcaaaataaacagaacatcaagtatctcaatttgtttgtatcgatcacatgttaaagtggcaatattttggatgtactgagttaaaaatatattaaagtcaatttcaactstttctttttttgtaaataagaaaaattaaaattacatacatggtatgtgtataccacattttctttatctatttatctgtggatggtcattcaggttctttccatctcttggctactgtgaaaaatactgcaatgaatatgggagtgccgatatcttttggagatagtgatttcaatttttttagaattgaaaagaagcaatccagaggtgagactgttggattctatggtaattctatttctaaatcttttaggaatcactatactgctttccattgtagctgtatcattttaccttcccaccaacagggaacaagagttccaatttctccagaacctcaccaacactcgt

SEQ ID NO: 614373 - DNA, 575 bp, Homo sapiens
caaaaacctagcatgagcagtagatttcatgggaaaaaatatgctgcctcttagcctgttttccattcctaccaagagactactatagtttgtatggggtgtctagtttccctagacaagcccagagggtacctaatggataaagaaatggctctaaaggcagtctggaccctgcagaccttagcatcggaaaaaggataacttgacatcagtaatctgtagggagcaaccaatagggtctagaaagaggaccagagtgaaccctcaggtctcaacatctataaggtccctggaaattagctggaaccaatgagaaagtagacaccatgaatgggccgaggaaactctgaattgacagctattaccttaaattgtcaaaagacttgagatggaaaaaataattaagttacatccattgaagacggtaagatagtgatcttaatgctataccccttgtactcttctgtaactcacttttggtgactrtaagattgcagtcttaatgctctaccccttgtactcttctgtaagtcaattctctgaattttgtgtacattgtaagtttcaaactcaat

SEQ ID NO: 614374 - DNA, 497 bp, Homo sapiens
aaaaaaaaaaaaaaaaattcaatttaaaaatgggcaaatgatgtgaacagacgtttcccaaaagacatacaaatgtccaataaatatatgaaaacaatgctcatcatcactaatcatgagggaaatgcaaatctaaaccacaaggggatatcatctcaccccagttagaatggctatcactggccaggtcaggtgtggtggctcatgcctgtaatcccaacactttgggaggctgaggtggatggatcacatgaggccaggagtttgagtggccaacactgcgaaaccctgtctctactaaagatacaaaaattagcctggtgtggtggcacacgcctgtaatcccagctactcaggaggctgaggcactagaatcacttgracctgggaggcagaggttgcagtgaacaagatcctgccactgcactccagcctgggtgacagagcaagactctgtaacagaacaaatgttggtaaggatgcatagaaaagggaat

SEQ ID NO: 614375 - DNA, 478 bp, Homo sapiens
aatgctcttgctcaatgatccaggaatcccacttataggtgcaaatcctgaagaaactggcattcaatgagattcatccgcattgtttatattagtgaataaatagaaacaacctaaatgtccacccacaggagaacagataaataaattgtggcatagttatctaatgcaacattacayaacagaaaaaaatgaatacattgaatctgtaagtatggcatgagtaaatctaaaaaatataatgttgggaagaggattaaaaagcaagttgcagaatatataaatttatcaaatttacataaaatttaaaatgttccacctaatttctatgcactgcttacatatataaaaatatgtttatcaatataaaaccatggataagaatgataaacatgaggtcctcttactggttaactgaggaataagtgaataacatggattcaaaaaggatggtgtggccgggtgtggtggatcacat

SEQ ID NO: 614376 - DNA, 478 bp, Homo sapiens
aatgctcttgctcaatgatccaggaatcccacttataggtgcaaatcctgaagaaactggcattcaatgagattcatccgcattgtttatattagtgaataaatagaaacaacctaaatgtccacccacaggagaacagataaataaattgtggcatagttatctaatgcaacattacataacagaaaaaaatgaatacattgaatctgtaagtatggcatgagtaaatctaaaaaatataatgttgggaagaggattaaaaagcaagttgcagaatatataaatttatcaaatttacataaaatttaaaatgttccacctaatttctatgcactgcttacatatatwaaaatatgtttatcaatataaaaccatggataagaatgataaacatgaggtcctcttactggttaactgaggaataagtgaataacatggattcaaaaaggatggtgtggccgggtgtggtggatcacat

SEQ ID NO: 614377 - DNA, 572 bp, Homo sapiens
tgtgaggattaaatgagttaaacatgcaaagccctcagaagactgcctggtatattgttaatagcccaataattgctagataattttatcattattatcaactacatgggaagttgtgcacccccatgcccacctacttttttttttttaatttttgtagagatgggatctcactatgttgcccaggctggtctcaaactcctggcctcaactgatcctctcgcctcagcttcactaagtgctgggattgcagatgtgagccaccgtgcccggccagcaaatcacagagttttaaagcccaagggaaccttaacttcttcttgaatcccatcccccaacactttaagaccaaagcccttgcaactatacaactcgtscaactatacaactcgcatcaactacatgggaagcaaaacatgaatcacatgatcagaaatgttaaattttatgccttctaattagagatgctggttcaccaaggataagctttttattattatcatttggctttacttgagaattttaagaagcctggaagaatttattcacaggaatttaaaaaaaaactatgc

SEQ ID NO: 614378 - DNA, 651 bp, Homo sapiens
attatttcgaataaagaggtaatttttccaatcgtgtaaatgaaatccacaggaaaggagagctcttctgtataaatagcacaaattcagaggaatgcctttgcaaactctatgcttcaccaacacagatcttccctaggaagagaattcaagattgaccccaaaactcatctcctgaactcagttgatacatcttttcagtaactgccaaagcctcatttgcaatttcaaatacctttgacaaaaagccaaaatgttctgaaatgtcaaattcacttgtactttacttcttccactctaatgttttcaataaatatattgtcagctacagcaacaatttccaatttcccttgtaaataagtgaaatagcttgggaggatcttctgagattgcattgaggtgtgctcacagggctatttcatttataaggtgtcaagtcaggtaggtgggctgatctgtttcttcaagtagcatctgtgtaataggrtgttgttcagttaagagcctgagtcctgcatctcagtgtcttactatgggatgctgaacaagctaaacttttttattttattttatttttaagttctgggatacatgtgcagaatgtgcaggtttgttacataggtatacatgtgccatggtggtttgctgaac

SEQ ID NO: 614379 - DNA, 417 bp, Homo sapiens
ggagtgaagcactggtgagcacaggactgtgtgagttctccttgcacattcacgtgggtggtagtagcygctcagaacaggggtgggtcctctgttctcggtgcctattgtcacactggtggtagtgtcggtgcaggggcagggcgttggcaggggcggggctggcgggcttcatgcccactcatcaatgctccaacagtaatggcagtatggtggggggtcgagagggtgaagtgcactcaggatggcagcagtagcatggcacacacactgtggcaggaaaggggaggcaaggtccacccacacacacatgcactggcaaaacgatgtgggggatggccgtgggctagtgcatgcaggcaaagtggcacggggagactgcagtgggggcagggcacagttaggctgatgtgtgta

SEQ ID NO: 614380 - DNA, 417 bp, Homo sapiens
ggagtgaagcactggtgagcacaggactgtgtgagttctccttgcacattcacgtgggtggtagtagccgctcagaacaggggtgggtcctctgttctcrgtgcctattgtcacactggtggtagtgtcggtgcaggggcagggcgttggcaggggcggggctggcgggcttcatgcccactcatcaatgctccaacagtaatggcagtatggtggggggtcgagagggtgaagtgcactcaggatggcagcagtagcatggcacacacactgtggcaggaaaggggaggcaaggtccacccacacacacatgcactggcaaaacgatgtgggggatggccgtgggctagtgcatgcaggcaaagtggcacggggagactgcagtgggggcagggcacagttaggctgatgtgtgta

SEQ ID NO: 614381 - DNA, 340 bp, Homo sapiens
cagcacaggaactatgatgcaggtcctcaggaggtagcctccactgcaccccgctgtgaagctgcactgcaagcaggtgtggccaggctggggccccaggaggggcgagcagactgaaggatgctyaggtcagactggccctgtctcaggggcaagactgccctgcagagttcaggtctgacagttgccctagggctgaagtctcctatgagaacaagtctagcctagggcaatgggtgtccctgcccattctccactacagatgctccaacaaaaaaccttctgggctttgcacagtctggagttctaccattaacactttataagcaggtcttcctga

SEQ ID NO: 614382 - DNA, 522 bp, Homo sapiens
acagtcagccagcacaggaactatgatgcaggtcctcaggaggtagcctccactgcaccccgctgtgaagctgcactgcaagcaggtgtggccaggctggggccccaggaggggcgagcagactgaaggatgcttaggtcagactggccctgtctcaggggcaagactgccctgcagagttcaggtctgacagttgccctagggctgaagtctcctatgagaacaagtctagcctagggcartgggtgtccctgcccattctccactacagatgctccaacaaaaaaccttctgggctttgcacagtctggagttctaccattaacactttataagcaggtcttcctgacaactcaagtgtccctggtggttgtagggtctcctcctttcaggaattcagggacctgcgacaagaggaggttgccccttgcctgttcaactcacctctcctccaggagattttggggacctggaatgagtcctggtgcacggttgccccttgcagggttcccggcttcctcc

SEQ ID NO: 614383 - DNA, 521 bp, Homo sapiens
cacaggaactatgatgcaggtcctcaggaggtagcctccactgcaccccgctgtgaagctgcactgcaagcaggtgtggccaggctggggccccaggaggggcgagcagactgaaggatgcttaggtcagactggccctgtctcaggggcaagactgccctgcagagttcaggtctgacagttgccctagggctgaagtctcctatgagaacaagtctagcctagggcaatgggtgtccctgcccattctccactacagatgctccaacaaaaaaccttctgggctttgcacagtctggagttctaccattaacactttataagcaggtcttcctgacaactcaagtgtccctggtggttgtagggtctcctcctktcaggaattcagggacctgcgacaagaggaggttgccccttgcctgttcaactcacctctcctccaggagattttggggacctggaatgagtcctggtgcacggttgccccttgcagggttcccggcttcctcccccttcagccc

SEQ ID NO: 614384 - DNA, 522 bp, Homo sapiens
acagtcagccagcacaggaactatgatgcaggtcctcaggaggtagcctccactgcaccccgctgtgaagctgcactgcaagcaggtgtggccaggctggggccccaggaggggcgagcagactgaaggatgcttaggtcagactggccctgtctcaggggcaagactgccctgcagagttcaggtctgacagttgccctagggctgaagtctcctatgagaacaagtctagcctagggcaatgggtgtccctgcccattctccactacagatgctccaacaaaaaaccttctgggctttgcacagtctggagttctaccattaacactttataagcaggtcttcctgacaactcaagtgtccctggtggttgtagggtctcctcctttcaggaattcagggacctgcgacaagaggaggttgccccttgyctgttcaactcacctctcctccaggagattttggggacctggaatgagtcctggtgcacggttgccccttgcagggttcccggcttcctcc

SEQ ID NO: 614385 - DNA, 430 bp, Homo sapiens
gctaattgttcgtatttttagtagagacggggtttcactgtgttagccaggatggtctcgatctcctgacctcgtaatctgcccgcctcagcctcccaaagtgctgggattagtgagcaaccgcacctggccttgtggtgtgtttttattcaacccagaaagaattttgttgccagcattatttgtatgtattaatamtttactgagaaactgtgtcagatataggtatatgcaaagttcctaatgacagtagaaaactagaaatatgggaaaagtttgagcttgaaatatgaaaattagaatgatgtacttaattaaataaaagaaatatttgcagatacgcttggaccaagactgataattaaaacacagtacaatttatttcaaaattaaaatgttgattatttattttcttagggggcaggtatac

SEQ ID NO: 614386 - DNA, 463 bp, Homo sapiens
  misc_feature 1, 2, 3, 4, 5, 6, 7, 8, 9, 10, 11, 12, 13, 14, 15, 16, 17,18, 19, 20, 21, 22, 23, 24, 25, 26, 27, 28, 29, 30, 31,32, 33, 34, 35, 36, 37: n = A,T,C or G
nnnnnnnnnnnnnnnnnnnnnnnnnnnnnnnnnnnnnaaaacatttttgagtaccctacatactcactgcatatttaattggttaagaattaaataaagaagtgaatttttatctgcaactcagtgggtcaggcccattgaactccaagtgtctccaagtcctcatcacctgcctttgagtgacatgactcactcaaaggcaggtgataagaaacaagaaaactggaactcatactttcagagattttcctgcctcggatgtgaagtctcttggctactggagtctggaagacgacttctaaactgattctgacaggattgtaactggaaaccctattatattcagtttccctcactggtctctttacccactccacastaggtggtaccagtactgagaactaattcccttctaaattctaaactctaaactgtgtccactttcatctcacttatcctgcca

SEQ ID NO: 614387 - DNA, 511 bp, Homo sapiens
atgggtttctgggccccagcagggtgaaaggcagatgtcagcaacagaatcacacaatcctgatgatactatttaattcctgaatccagaaatattctggattagaaaatatatcttacttttcatttatatgagmcagtcaattcctcttcatgtttaagttagttctttgcttaaagttttgtcctttgccaaaagaaagtaatggctttatggtttcttcagaaggcctttcctttaattccttaaaaacatatagaaatctggagaagaagccttttgtttttaatagcttgacaattatatacccaagttgttatgttttattttccttgtttgatgttctccaattttcttggatttgtggtttccagtctgttgttaacttctggaatattcttggacattacttcttcacatatgtctctcagattccaattatatctgtactagattgtttaataatatggaatagatatccctagttcttgaatgctctgttctatttttt

SEQ ID NO: 614388 - DNA, 631 bp, Homo sapiens
  misc_feature 513: n = A,T,C or G
acatttagggctggttttaaaggtctctatgattcccatttacaaatgaaacttattaatatgagttatagattcttttccattgtgtgccaagcaaggagagaatcaagcttatttgaatcatgcaggcacatagactttggaatgattaggagaccatggcaaaaattgtgagtaatacatgtagagaagtttaaacttttcctctggaaggtgtgataactgagttatccttccaaaatacattgacaatagatagattaaccggataaaaacacacacagatttgctaatatgtacatgaaaatgcgagccctataaatatgatactcaaaaaagggccagccagctgaagcttaaatagcattctttttgtaaggaagcaggggagattagtgtgcaggttattttgaggaatagtaaaatgcttttcaggaaaactgaatgggcctgggagacagaaattagttaataaattattctctttggaatttgaacaggacaagttatggnaaggtgaggggtggaattgcactgaacaaaggctgtcactatgcagataaagtctcttaggcaacctcttgcagctgccctcagaagaacagatgaraaacctgactgggcatggtga

SEQ ID NO: 614389 - DNA, 586 bp, Homo sapiens
tatattcagcattcttaaagaaaagaaattctaatcaagaatttcatatccagccaaagtaagctttataatcaaaggaggaataagatccttttcagacaaacaaatgctaagggaattcaccaccatcagactcaccttacaagagatccttaagggtgtgctaaacatgggaacagaagactgttaccagcaaccacaaacacacactgaagtacatagaccaccgacataaagcaactatgtaatccagtctgcataacaaccaactaccaacatgatgacaggatcaaatcygcacatatcaatattaaccttaaatgtaaaagggctaaaggccatacttaaaaggcacagagtggcaattgaataaagcaagacccaatgacatgcagttttcaagagacccatctcacatgcaatgacacccataggctcaaagtaaaagaataaagaaaaatctatcaagcaaatataaaacaaaaacaagcaaggttgctattctaatttcagataaaacagagtttataccaataacaaccaaaaagaagacaaagaaaggcatcacataatgataaagagttca

SEQ ID NO: 614390 - DNA, 547 bp, Homo sapiens
atgacacacaatttccccatgtatcaaacctgcatatataccccctgaacctaaaataaaagttggaagaattagaaaaaaaaaaaaggagtgcctaacttgggggttgttgtaatgttcgcttaacaaacacacagtcttttgggcatctaaatcacagcacagaggctctggggcatgggatctagtgacctcatacagtggttgagataatcagaatatagacagtatcaaacatatctaattactttacaaatttcttcttgaataatgtgagtagagcattatccagtagctatctgagaaaccccaaagacctttagatacraacaacatttaacagctttattcccataaattcataacttaaatttataaaacaaaaacaacaaaaaaaaagaagaatgggagacaggaagaaaaagaagagaagagaaaagaagaaaagaaaccaaaagaaaaggaaaaaggaagacccagaattttagagaaaactaggaattacagcaaaagttagacattagtttcggatacctattataggcga

SEQ ID NO: 614391 - DNA, 655 bp, Homo sapiens
agtttcggatacctattataggcgatgatactttaaacaaacaaagcaagaggaagtcttagaagtgagaaacctttgccataaatgattgaagatcctgaccaaaacacacaacttatatttgaagaccaaaattttgaaatgatttttataagctgttaatcttgatataattatatatatacatatacrtgtgtgtgtgtgtatgttaaacatactcaaataggtgataaatttaaactttttaactctaattttgaaataattacctttactaacatattaaataatggataaatatattatctttaacttaccaacttaataacctgcacactttttaaatcagacaacatatattcattatcaagtgtacatattctcttttccctgtacatattcgtcttgagggatgatatatccgaaatagtgcctcactgtggaaatagtttctgccttctgaaacacaacttgaggatataacagaatttccagcagggaggtatagtttgaaaagattccagaaacgattctgataccacactcactgttgctaatcaatgacaatatgtcacttccatttgagaaattaaatagtaaatgatgtttattactccctagattttaatgtaaagtttaatagttcagtttagtt

SEQ ID NO: 614392 - DNA, 564 bp, Homo sapiens
tataattatatatatacatatacatgtgtgtgtgtgtatgttaaacatactcaaataggtgataaatttaaactttttaactctaattttgaaataattacctttactaacatattaaataatggrtaaatatattatctttaacttaccaacttaataacctgcacactttttaaatcagacaacatatattcattatcaagtgtacatattctcttttccctgtacatattcgtcttgagggatgatatatccgaaatagtgcctcactgtggaaatagtttctgccttctgaaacacaacttgaggatataacagaatttccagcagggaggtatagtttgaaaagattccagaaacgattctgataccacactcactgttgctaatcaatgacaatatgtcacttccatttgagaaattaaatagtaaatgatgtttattactccctagattttaatgtaaagtttaatagttcagtttagttttatacatattttgtcctaagcagtttacagatcaatatttttaaaagtttctactttttattaatttcattaaagt

SEQ ID NO: 614393 - DNA, 635 bp, Homo sapiens
taaaatcttttattggttctgtttctcagttgaatcatgactgatacaatatgagaagcagtatattattatttataggtaaggtgtcattaattacagatgcatgggtcaggcatagtggctcatccctgtaatccaagcactttgagataccaaggtaggaggatcccttgaggccaggaatttgagaccagcctgggtaacaaagtgagactctgtctctacraaaaacaattttttaaggtgcatattataaacctagggaaccactaaaatatttttaaaagaagcataaatgataaaaaaacaaaaaatggagattaaatggaatcattaaaaataattcaaaatcagttagaaaaagaacaaagaacaaatataacaaatagaaacaagatatgagatagtacattaaaatccaactgtatcagtagctgtatttaatttaaatgacctaaacataccaactaaaacacagagatgatcaaattagataaaaaagcaagaatcaactataatctatctataataaattcacattaaatataaaagtatacaggttaaaagtaaaaggatgaaaaatataccatatatgccatgcaaacagttgctctattagtattagataacaggaa

SEQ ID NO: 614394 - DNA, 459 bp, Homo sapiens
cttgaattcagaccagtatttaaatccaatcccagaaatgaacattagctaccgagaggcaaaaatatttaaggaatcaaatgggcctagaaatatttagtgttttgccttggataactgcattatttgcaatgaaccttcaaaaatcatgtagtaggtaatcctggttaacctaaattaaattgtacccagattgatagcacctgcccattttctagataatggcagccatccactgaggagaggaactgcctaccrtgactgggaagagtgaatgagaactttattgtaaaaactcaaagtacccagtgaagtttgagataatatttgagtcattcattcattcattcattcttttaacacatatccagcgtcttgtatgcgcccaggcacacaatattctagcaagaagttttatgaaagtgagtaagatagattaaaaattcctgctctagtttt

SEQ ID NO: 614395 - DNA, 459 bp, Homo sapiens
cttgaattcagaccagtatttaaatccaatcccagaaatgaacattagctaccgagaggcaaaaatatttaaggaatcaaatgggcctagaaatatttagtgttttgccttggataactgcattatttgcaatgaaccttcaaaaatcatgtagtaggtaatcctggttaacctaaattaaattgtacccagattgatagcacctgcccattttctagataatggcagccatccactgaggagaggaactgcctaccatgactgggaagagtgaatgagaactttattgtaaaaactcaaagtacccagtgaagtttgagataatatttgagtcattcattcattcattcattcttttaacacatatccagygtcttgtatgcgcccaggcacacaatattctagcaagaagttttatgaaagtgagtaagatagattaaaaattcctgctctagtttt

SEQ ID NO: 614396 - DNA, 459 bp, Homo sapiens
cttgaattcagaccagtatttaaatccaatcccagaaatgaacattagctaccgagaggcaaaaatatttaaggaatcaaatgggcctagaaatatttagtgttttgccttggataactgcattatttgcaatgaaccttcaaaaatcatgtagtaggtaatcctggttaacctaaattaaattgtacccagattgatagcacctgcccattttctagataatggcagccatccactgaggagaggaactgcctaccatgactgggaagagtgaatgagaactttattgtaaaaactcaaagtacccagtgaagtttgagataatatttgagtcattcattcattcattcattcttttaacacatatccagcgtcttgtatgcgcccaggcacacaatattctagcaagaagttttatraaagtgagtaagatagattaaaaattcctgctctagtttt

SEQ ID NO: 614397 - DNA, 551 bp, Homo sapiens
ccttacccccggacaggccctggtgtgtgatgttcccctccctgtgtccatgtgttctcattgttcaactcccacttatgagtgagagcatggttttctgttcctctgttagtttgctgagaatgatggcttccagcttcatccatgtccctgcaaagcacatgaacccatttttttatggctgcatagtattccatggtgtatttgtgccacattttctttatccagtctatcattgatgggcatttgggttggttccaagtctttgctattgtaaatagtgctgcaataaatatacatgtgcatgtgattcttatcacatccaactaaaacagagttgagaagccaggagataaagcactcatgttacaaaatgttgctccaagaatgtaatctctgmaagcctgactactggaactgcttttgagaccagttttatccatagcttctgagataacttgctacaattctgtgactactttttcgcaccacctttgctcattattcagagcttgccagctccccaaacccttcctagtgccaatgaactt

SEQ ID NO: 614398 - DNA, 552 bp, Homo sapiens
taaaatgcaaaaaggcgcaaacctaaccaatttagaaacattctggaggatgggaagttgcatttacatactcagatgtagtttctacaaatccgaaatattttaagcagtatttttattagtttacatagcatatgtaactctgaaagggaggcaagtaggcatagatacaaaataatattcataaaatctatacaaccgacatacaatgagaacataatgagcatgcatgtaccgagtcagttttaagagtaaacattatcggccgggggcagcggctcacgtgtgttatcccagcactttgggaggccaagtctggtgaatcaccaggtcaggagttcgagaccaggctggctaagatggtgaaaccccatctctactaaaagtacaaaattagctgggtgtcatggagggtgcctgtaatcccagctacttgggaggctgaagcaggagaatcacttgaacctgggagayggaggtttcaatgggccaagattgcacctttgcactccagcctgagcgacagagcaagactcctcaaaaataaaataa

SEQ ID NO: 614399 - DNA, 512 bp, Homo sapiens
  misc_feature 381, 382: n = A,T,C or G
atttcctttactgacagtcagcaggtgacaaattttgtaactttttactccttccaagttacttttattttacccttattctcaaaakatttgtcttaaatagaattatgttctaccttagcgcatagcaggtactatttcacttttagctataaacaatttggcttcagtattgcttttgaaaagtcagtttccctgttattcttacttcgctgaaggtaatctttctcttctttctggctgcttttaaaatattcctttttctcattataaaattccactatgatattgcagtatgtggatccatttttagtaatcctgtttgggattcattgggcttcttggatatttagatgagtatcttttttagttatagaaagnntgaagagaagttgctgagaatatttcctgcctcattttcttaactcctggaatgctaatgagatttttgttagatcttctgactcttccatctctctctctctcttttttttttttttttttttttgaga

SEQ ID NO: 614400 - DNA, 512 bp, Homo sapiens
  misc_feature 381, 382: n = A,T,C or G
atttcctttactgacagtcagcaggtgacaaattttgtaactttttactccttccaagttacttttattttacccttattctcaaaagatttgtcttaaatagaattatgttctaccttagygcatagcaggtactatttcacttttagctataaacaatttggcttcagtattgcttttgaaaagtcagtttccctgttattcttacttcgctgaaggtaatctttctcttctttctggctgcttttaaaatattcctttttctcattataaaattccactatgatattgcagtatgtggatccatttttagtaatcctgtttgggattcattgggcttcttggatatttagatgagtatcttttttagttatagaaagnntgaagagaagttgctgagaatatttcctgcctcattttcttaactcctggaatgctaatgagatttttgttagatcttctgactcttccatctctctctctctcttttttttttttttttttttttgaga

SEQ ID NO: 614401 - DNA, 512 bp, Homo sapiens
  misc_feature 381, 382: n = A,T,C or G
atttcctttactgacagtcagcaggtgacaaattttgtaactttttactccttccaagttacttttattttacccttattctcaaaagatttgtcttaaatagaattatgttctaccttagcgcatagcaggtactatttcacttttarctataaacaatttggcttcagtattgcttttgaaaagtcagtttccctgttattcttacttcgctgaaggtaatctttctcttctttctggctgcttttaaaatattcctttttctcattataaaattccactatgatattgcagtatgtggatccatttttagtaatcctgtttgggattcattgggcttcttggatatttagatgagtatcttttttagttatagaaagnntgaagagaagttgctgagaatatttcctgcctcattttcttaactcctggaatgctaatgagatttttgttagatcttctgactcttccatctctctctctctcttttttttttttttttttttttgaga

SEQ ID NO: 614402 - DNA, 497 bp, Homo sapiens
tcactgcaacctccacctaccaggctcaagtgattctcctgcctcatcctcccgattagctgggattataggcgcatgccactactgcctggttatttttgtgtttttagtagagatggggtttcaccatgttggccaggctggtcttgaactcctgacttcaaatgatccacccccttcgacctcccaaagtgctgagattacaggcgtgagccactgcgccggctttttttactttcttgatagtgtcctttgaggaagaaacaatttaatttcagkgaaattcaatttttctttttttctttggggttcattcttttgtggtcaaatctgagaaactattgcctaaccaaaggttatgaagatttatttctatattttcttctaagacttttatagttttagttcttacatttagatctatgatcaattttgagataattattgtatgtggtatgaaatggaatctaacttaattattttacatgtgaatatac

SEQ ID NO: 614403 - DNA, 450 bp, Homo sapiens
  misc_feature 2, 17, 24, 54: n = A,T,C or G
tnccactgtcccaagcntgatctnatagctatcaatttgtgagagctcagtatncctccagtaattatcttatgcttaagttggcccaaatttatttttattgcttactgtcaaagaatcttaatgaacagataagaaatagagctatctgaacaaattacgagcaaccagagtgagacatttggtttcctctgtgcatcttcctgtcacttgtaagcttttagccttagaattctgagtttttcatccttcaaacgactttagcagagtataaagcctctgaacaagtctctactgaggatctcctgcatcactcattaccaytgccaaaccgttgctggctcttgaaatgagattaccatgattatcaaagaggaatcaggcaggatttgtcccagtttgtccctgagggtgaggatcccagcacatggccttatggtgagggctgta

SEQ ID NO: 614404 - DNA, 515 bp, Homo sapiens
gtgcctggcacaaaaactgctcgatcaagggcaatagttgctgctgtggttttcacggttattatttttattatcaagatgatttctggaaccgtgtatggaaagtgggagggtccaaagtcctcctcgagtaggaagcctcccctcctggccactccactcccccactcctgaggcatgcccacctttccttcctggtgacctgctgctcccagctgctcctccagcctccccagcakggctgcaggctcctgtaggggatcggggtgggtggggacagaggcgggcttttaattcttcttccgccactcagagccttgaattgaccctcagtgtgacacttaaggggccccagggatgcccggatcagcagaggggagtgggctcttgcctaatggagtccacccagggcccaggcctcctgcagcctgattagattttatgatcccaaaggagctgccctggatccctgctcaccttcaagcctcatcagcaccaggccctgtccattgtga

SEQ ID NO: 614405 - DNA, 220 bp, Homo sapiens
agttcggctatttcttaatgagttaragaccatatgttctagaaataaagtggttgtgaagctgaacaatgagaacagaaaccatttctacaatttaacacttgttaagcaatcagaggagtggtaggtgtcaggaggaagaactgggagagagaggttagaggactgacatgaagcagacattgaggaaagaggaatttatgcaataatggcccaggtt

SEQ ID NO: 614406 - DNA, 567 bp, Homo sapiens
tagctctgttttggacaagttgaccttgagatgtatactggatatctgaaggaaacattgaaaaaactgttggatacaagtttggagttccagggacttgtctggttggcaataaatctttcctcttctgatctagtctcatagctttaaayagaatataatgccacataatgccaatgactcccaaatatttatggttatggtcgattccaggcagattgtggtgatgtggccatattgccagcaaagggaggtcagggtttctagcgctgcctctttatctccgattatggaacaggcatggttttagttccagtgcttgggtctccctggatttagacatcattcctttgaattcccacccaatataatgagggtcaatatcttcgctagctttactaagtcttaattatctggtgaggtgtagacacaaatttgaatcaaggtctgaagtccttacctggggctctttcttccatgccatcatgccagtctttgtgaagacatttttcaaaggctcattcttcttacctcttttctaggaattttagtttatttctttactta

SEQ ID NO: 614407 - DNA, 565 bp, Homo sapiens
gcttgtcttctcgggcttctcgccccggccgcggccgggtcctcaggtaagcggccgtcgcccgtcgggccgggtcctcccggggcgcgggactgagcgtggtggggccgtcgccccccgatccgcggcccaagcgggcagggtcggccgtgcacgatttgcgtcccccgggtctgggccgcggcgtccctccgagctgggcctgggtgtgcggccggcactgcgggggcgggaccccctagggcgtttgcggagcttcaggtgactgggcgggttcgcctggtttcgggtccgagagagttttagsccggagtgtgtgaatcgggccccacttccccgactctggtcctggccggcgtcccttggagtaggaggaacgatggtttcctaaaacccatggtgtgttcgcctctgggatggatgcaggaccgaatacggagtggggatgagctggcgtcccctgttccgtcctctggtcgcccaggcgggagagttaagcgagcggaaggggactaccagttttctggggtcgcccctgcctgggccatttgctttttgggaagtc

SEQ ID NO: 614408 - DNA, 521 bp, Homo sapiens
taaattcaattaatttacttgtctccatcttccctagtccgagccaccatcctcactcacgtggaccatgktgatagccccctcatggtttccctgcatatattttgcctttccaatccattatgcacactgcaacccaaatgatttgtaacagctttgataagatgtaattaacataacttacagttcacccatttaaccaagtgaccttttacaaacacaaatctgagcaggttattccctgcttataattttgaaatcaagtctgaatccttattctagcttattttattaaattaatttatttatttttttgagacagagttttgctctgttgcccaggctggagtgcagtgatgtgatcttggctcactgcaacctccacctcccgggttcaagtgattctcctgcctcagcctcccgagtagctgggattacaggtgcatgccaccacgcccggctaatttttttgtatttttagtagagacagggtttcactgtgttagccagaatggtctcaa

SEQ ID NO: 614409 - DNA, 627 bp, Homo sapiens
gaccttctctttcatagcatttgttaacaatattgcaattttaattttatttgtataactgtttgattaatatttgactgtaaacttcctaaggacagggaccaggtctgctgtacttaccattgtatattcccaggcactaggagtagaccttcagcacaaatttgttgaatgaataaataacatcaattttacaaagacccccctatctagaaattggggtccagtttcacaaattggatcagagattaaccccaggctttgccagtgctgcaccataaatcattgctttcccctgtttctgggtcaagcactgtgactctctcctactggggccaatttgtcagtcccaaagtgtctcattactgtttatcaggacktcattatgcagctggaccctccagcaggaggtctaggaaagccaggatattggcagggctgggagtatgggatgggatttgccatttacatctaccccaccctcactccatttatatttagtatttatcacactgagttgtagttgttaattttcaagtgtctccttctctcccacacagtgagggcaggatctcttgcccacagaggctactctggtgtgcagcaaatgctcataagggtttcttg

SEQ ID NO: 614410 - DNA, 645 bp, Homo sapiens
gcgccaccatgcctggctaattttttctatttttagtagaaacggggtttcaccatgttagccaggttggtttcgaactcctgccctcaggtgatccgcccacctcggcctctaaaagtgctgggattacaggtgtgagccactgcccctggccagagttttgtggttttaatcttttattactagtgggttcaaatctrttttcatgtatttattgtctgtactttttgtgaataagagtcaagcttcctatttttctattatgttaactttttcttcttgacatataactttatattaagtatattgtctcatatttgcactgaagacatttttcctaatgtggctttgcttgcggtggcttttcacacatttcttaattttatgaatcaaattgatcagtttttcaatgagacttaaaattccttctggggtgggatgcaatataatagaatgaaaaaggcagaggactttcacacaattcagtccatgatcttagtacctatgtctagttatcacctagcaggatgtggtaggaagagcactggactgggagtcagatcaccttgcctctctgggtccctacttcctcatctgtagaatggagataagaacgaaaactccctccgaggcctgtaaaaaaat

SEQ ID NO: 614411 - DNA, 329 bp, Homo sapiens
aattatatagtatataatttagtatatatattactatatagtatatagtaaattatatagtatataatttagyatatatctaccatatatatatacacataaacatacttatacacacattcacacactcacaagtacatgcacatttatatcagttgtgatctgaagccagaaaaaaaaattcaaactttttttttctctttctataccccttactcttttctatgaaatatgattacaagggctaatagttacagaataagtaagctaacttttctgtagtaaatagttcacagatacttcctttatatagtagctattttcttttt

SEQ ID NO: 614412 - DNA, 591 bp, Homo sapiens
agtaaacctttgtggaatgaacaaacacatgctgaagtttctaccagatcaactgctccagtgcttttgattcttttgggtatgacattcaatcactaagataaatttaaggtggcactttgtggcataaaaaagaagtagatttttttttaactgaatgaaagytgatccattctattagggtatagcagtgcctgtgtcctaaaaaccctatccagggtttctttcatggattattgattccaacttatagcctatattaactgagtctttttgcttatgtgtattaagccattattggtaaaaggtgtattaagccattattggtaaaaggtgaaagatttatatgatctgaagagaaaccagagcattattaagccattattggagagcagggtgctaagtccgttatacatattagcatgtttaatccttgcaattgtgcaggagatatagggagacaaaagtcacgtggtacccaggggcaaggtaatgtttgtgaactttgtctcctcgtaacactgcaccagaatttgcaaaggctagcatctttgtggcattccctgcagactggtggtggggtcatatgca

SEQ ID NO: 614413 - DNA, 551 bp, Homo sapiens
agacagcctgagcctgtttctgtatggccagaggagctaagagtggttttacacttgtaaagggttgtttctttaaaaaaaaaaaaaaaaaaaaaaaagaagaggaagaagaagaagaagagaaggggaaggaraaggaagaaaaaagaagaggaaggagaagaagaaagagagggaggaaaagatgggggaaggaaagagaaaagagaaagaaaacaattaatgtgtgacaaagactatatggtccacaaagtctaaaatagttaaaatctggccatttatacaaaaattttgccgacccctgccagcctgtgctccatcctgcccacagttacttgagtcataaaccctctgttggttccttgtgtctttagaaaataaacaccaaactccccagcatggcatatagttcccttcaggatgtgtctgcaaacttcctttctagccttgtcttgtgggctctctcattctttacacattgtggccataacgacttctcactattcccaggacactcaacttcctcccacggctgctcatctgtgtgcctg

SEQ ID NO: 614414 - DNA, 551 bp, Homo sapiens
agacagcctgagcctgtttctgtatggccagaggagctaagagtggttttacacttgtaaagggttgtttctttaaaaaaaaaaaaaaaaaaaaaaaagaagaggaagaagaagaagaagagaaggggaaggagaaggaaraaaaaagaagaggaaggagaagaagaaagagagggaggaaaagatgggggaaggaaagagaaaagagaaagaaaacaattaatgtgtgacaaagactatatggtccacaaagtctaaaatagttaaaatctggccatttatacaaaaattttgccgacccctgccagcctgtgctccatcctgcccacagttacttgagtcataaaccctctgttggttccttgtgtctttagaaaataaacaccaaactccccagcatggcatatagttcccttcaggatgtgtctgcaaacttcctttctagccttgtcttgtgggctctctcattctttacacattgtggccataacgacttctcactattcccaggacactcaacttcctcccacggctgctcatctgtgtgcctg

SEQ ID NO: 614415 - DNA, 551 bp, Homo sapiens
agacagcctgagcctgtttctgtatggccagaggagctaagagtggttttacacttgtaaagggttgtttctttaaaaaaaaaaaaaaaaaaaaaaaagaagaggaagaagaagaagaagagaaggggaaggagaaggaagaaaaaagaagaggaaggaraagaagaaagagagggaggaaaagatgggggaaggaaagagaaaagagaaagaaaacaattaatgtgtgacaaagactatatggtccacaaagtctaaaatagttaaaatctggccatttatacaaaaattttgccgacccctgccagcctgtgctccatcctgcccacagttacttgagtcataaaccctctgttggttccttgtgtctttagaaaataaacaccaaactccccagcatggcatatagttcccttcaggatgtgtctgcaaacttcctttctagccttgtcttgtgggctctctcattctttacacattgtggccataacgacttctcactattcccaggacactcaacttcctcccacggctgctcatctgtgtgcctg

SEQ ID NO: 614416 - DNA, 551 bp, Homo sapiens
agacagcctgagcctgtttctgtatggccagaggagctaagagtggttttacacttgtaaagggttgtttctttaaaaaaaaaaaaaaaaaaaaaaaagaagaggaagaagaagaagaagagaaggggaaggagaaggaagaaaaaagaagaggaaggagaagaagaaagagagggaggaaaagatgggggaaggaaagagaaaagagaaagaaamcaattaatgtgtgacaaagactatatggtccacaaagtctaaaatagttaaaatctggccatttatacaaaaattttgccgacccctgccagcctgtgctccatcctgcccacagttacttgagtcataaaccctctgttggttccttgtgtctttagaaaataaacaccaaactccccagcatggcatatagttcccttcaggatgtgtctgcaaacttcctttctagccttgtcttgtgggctctctcattctttacacattgtggccataacgacttctcactattcccaggacactcaacttcctcccacggctgctcatctgtgtgcctg

SEQ ID NO: 614417 - DNA, 463 bp, Homo sapiens
aagtctcaacagccatattctttcagtgaaatgataataattaccaccagtrtttactgagcacttattctgtgccaggaactgagctaagaattcatgtggattattttatccaaacttcccaatgaccctgtgagtagggaatccccattttaccgatgagatcagtagggcttggcaaggtgaagtaacctagtaaagcaggctttagtgccacagagccttgaagcaaggattcaagccaggtgctctgactctagaccctgttcctaaccattgagcaactcttaccacatgggatctaaagtgttctccacatcccccaccttgttaaacattacatatattggcagagtaggatggcactgatatgcagcaatgtcttcaggaagaatgaagggataaatgttctcttgctaaaactctagattgctgtgcctcttgaattatttgatctgaattt

SEQ ID NO: 614418 - DNA, 437 bp, Homo sapiens
tggaataatacaatatttgtccttttctctctggcttgtttaacttagcactatgtttcatggtccatccatgttgtgacatatatcaaaatttcattccttttatggctgaataatattccattgtagggatatatcacattttgtttatccattcatctgtggatggacacttgggkttttttccgtcttttggctattggaaataatgctgctgtgagcattggtatacaaatatctgttcgagtccttgctctcaattcttttgtgcatgaggcattttaaactttattctccatacaaatctatcgtagggattattagtcccacttcataggaaaaagaggttcagagaagttaagtgacttttccagggccatgtgtctagggcttataaatactgttttcctgaggattctgcttttactaataaacat

SEQ ID NO: 614419 - DNA, 437 bp, Homo sapiens
tggaataatacaatatttgtccttttctctctggcttgtttaacttagcactatgtttcatggtccatccatgttgtgacatatatcaaaatttcattccttttatggctgaataatattccattgtagggatatatcacattttgtttatccattcatctgtggatggacacttggggttttttccgtcttttggctattggaaataatgctgctgtgagcattggtatacaaatatctgttcgagtccttgctctcaattcttttgtgcaygaggcattttaaactttattctccatacaaatctatcgtagggattattagtcccacttcataggaaaaagaggttcagagaagttaagtgacttttccagggccatgtgtctagggcttataaatactgttttcctgaggattctgcttttactaataaacat

SEQ ID NO: 614420 - DNA, 437 bp, Homo sapiens
tggaataatacaatatttgtccttttctctctggcttgtttaacttagcactatgtttcatggtccatccatgttgtgacatatatcaaaatttcattccttttatggctgaataatattccattgtagggatatatcacattttgtttatccattcatctgtggatggacacttggggttttttccgtcttttggctattggaaataatgctgctgtgagcattggtatacaaatatctgttcgagtccttgctctcaattcttttgtgcatgaggcattttaaactttattctccawacaaatctatcgtagggattattagtcccacttcataggaaaaagaggttcagagaagttaagtgacttttccagggccatgtgtctagggcttataaatactgttttcctgaggattctgcttttactaataaacat

SEQ ID NO: 614421 - DNA, 437 bp, Homo sapiens
tggaataatacaatatttgtccttttctctctggcttgtttaacttagcactatgtttcatggtccatccatgttgtgacatatatcaaaatttcattccttttatggctgaataatattccattgtagggatatatcacattttgtttatccattcatctgtggatggacacttggggttttttccgtcttttggctattggaaataatgctgctgtgagcattggtatacaaatatctgttcgagtccttgctctcaattcttttgtgcatgaggcattttaaactttattctccatacaaatctatsgtagggattattagtcccacttcataggaaaaagaggttcagagaagttaagtgacttttccagggccatgtgtctagggcttataaatactgttttcctgaggattctgcttttactaataaacat

SEQ ID NO: 614422 - DNA, 396 bp, Homo sapiens
gaattccacaatcttgtagaattcttttgccaatcattaacaaagtttactgactgaacagaagagtgcaatgcaactcctgctacagcagccgtagctgtgactgcaattaatcccataatcactgcaattaaagtaaaaatgaatcttttggatctatttaaaacaccttttaatacttcagtcaaaatatggacggatggtgaggcctcccayggtcggtccatggacacagggatccacacgccctctcttgctctcaccagcagaatacggtgttgccaattaaaagttgaatcaatgcaagtaagcaatctacaattttcacaggttatagtctgggagtctggtttaataactatatttcctacaactagcatataagggggctttacg

SEQ ID NO: 614423 - DNA, 606 bp, Homo sapiens
tataggttataacacattttcaaaaaacattttcaggaatggagtttttggtaccccaagaaaataggtgaagatgtagggcactctggggccaaggactagagacagataatgactctcaggccagtgccagctcctaagttcaaggctggctgtctcccaagcccacaaccatactactcatccaccaggagctagccaagctgtgagctgctcgctctgagcacgtgtgcctcaatccaaccaggagacactgttccattctaggagagaagtaagggaagactcagcagaccttgaaaggagccaaaaaggaagaggcaacagactctgaaatagagcagcaagcacagggaagggcccaggactgggctggtagccatactccttggcttgtgaagacactatttactatggacagttgttctgctggcctcgctcctgtctgtaagtcgggctaggtgtgagaaagcacagtctggctgacatttgggaagcatcayaatgaagtggcctcagagtcactggaatccttattacctgtttgaacaagtcatttaacatttctgatgctctgtttcttcatgtaaaaagcgagaacagtta

SEQ ID NO: 614424 - DNA, 593 bp, Homo sapiens
ttttatatccattgtaccttctaacttgtcatccttgcccttgcctggttcaggacccccagtacctcttacttaaattgttggaataattgttgttgtttgttgttgttgttgttgttgttgttgtttgagagagagtctcggtctgtcacccacgctggagtgtagtggctcaatctcagctcactgcaacctctgcctcctgggttcaaatgattcacatgcctcggcctcccaagtagctgggattacaggcacatgcgccaccacacctggctaatttttatgtatttttagtagacatgaggtttcactgactggtctccgaactcctgacctcaagtgatccattcccctcggcctcccaagtgctgggattacaggcctgagctaccgcgcccaacaggaataattgtttttaattcctcctgtccatcctactccttgctaccaagtttattttatgaatagctttgcccagtaatggcacactccctttatccctcaaaaatctcttcagtcaattctgggaaggtctcaggctggcattctggtccttcccttttatagcmttacattgattttaattatat

SEQ ID NO: 614425 - DNA, 433 bp, Homo sapiens
aagctttttattttattattttttatttctctattattattttaaaagctcaatttagatatttctcaagtttactacataagaaacttactgaagctgcattgtgaccctataaatctacaaatttagaaggattaaacacaagtctttctcactacagtttgagtgtgcgtgtgtgtgtgtatgtgtgtgtgtatctcagcaaatctgttatgattggagagtcacggtcacaagcaatggctgatccagagaaagcaaaatacccygaatgtgaatgtttagtaaagctctggattttaaaagtaaacacttatgctgggatatttaaaaagaacagggtagatctgtttaagaaaaagagcaggaaaacaaggagaaaccaagaaaaaaatactaaaggattaaaagacttattacatggaaaccccaa

SEQ ID NO: 614426 - DNA, 553 bp, Homo sapiens
gttttggttcaatactgcacagaggcaagactgcaaataccatctccacaatggactttctaatttgatttcaaatgcacaccatgccaattttgctttccattcacacaggtgcagtgcttagacttccctgcccatagacgataacaaccagaaagaacatgctaaaggtcgcatggaaaccatgatcaagcagcctaaaactcattcgttatggcttgtttgctcatcagctatggccttcaaaaatcgtatccacacggtacaaaagggtaaatcagttttcaaacagataaatgggataatgaggagtcagaaggtaccactaaaatatgtcaagggtaattgcaagtccyggtttgccctttctacacctgttgtccagacttcccttcactctcaaaaatggccaagtttagacgataaattatagttactcttaactatagttcagtcactataggaattctcaaacattaatcagagtcagggacgattcaagttgagtttgtttttggtgatggggacaggggtggaggcacagaagacagaa

SEQ ID NO: 614427 - DNA, 557 bp, Homo sapiens
atgtatataaaaccacattttctttatccatgtgtccatcagtggacacttaagtcaattccatgtcttggctactgtgaacaatgctgcaataaacatgggagtgcaaacatctctttgacaaactgacttcatttattttggatatatatccataaatgggtttctygaatcatatggtagtcccactttttattctttgaggaacctctgtattgttttccataatgacagcatccctttacatttccaacaacagtatacgagggttcctctttctccacatccttgccaacacttatcttttgtctttttgataatagccattttaacatgtgtgaggtgatgtatcactgtggttttagtttacatttcctaatgattaataatgctgaacatttttaatatactttttagccatttgaatgtcttcttttgagcaatttctattcagatcctatcccattttttaaattggcttttgttttgctattgcttgagcttcttatatacgttggatattaaccccatatcagatgtacattttgaaaatattt

SEQ ID NO: 614428 - DNA, 557 bp, Homo sapiens
atgtatataaaaccacattttctttatccatgtgtccatcagtggacacttaagtcaattccatgtcttggctactgtgaacaatgctgcaataaacatgggagtgcaaacatctctttgacaaactgacttcatttattttggatatatatccataaatgggtttctcgaatcatatggtagtcccactttttattctttgaggaacctctgtattgttttccataatgacagcatccctttacatttccaacaacagtatacgagggttcctctttctccacatccttgccaacacttatcttttgtctttttgataatagccattttaacatgtgtgaggtgatgtatcactgtggttttagtttacatttcctaatgattaataatgctgaacatttttaatatactttttagccatttgaatgtcttcttttgagcaatttctattcagatcctatcccattttttaaattggcttttgttttgctattgcttgagcttcttatatacgttggatattaaccccrtatcagatgtacattttgaaaatattt

SEQ ID NO: 614429 - DNA, 557 bp, Homo sapiens
atgtatataaaaccacattttctttatccatgtgtccatcagtggacacttaagtcaattccatgtcttggctactgtgaacaatgctgcaataaacatgggagtgcaaacatctctttgacaaactgacttcatttattttggatatatatccataaatgggtttctcgaatcatatggtagtcccactttttattctttgaggaacctctgtattgttttccataatgacagcatccctttacatttccaacaacagtatacgagggttcctctttctccacatccttgccaacacttatcttttgtctttttgataatagccattttaacatgtgtgaggtgatgtatcactgtggttttagtttacatttcctaatgattaataatgctgaacatttttaatatactttttagccatttgaatgtcttcttttgagcaatttctattcagatcctatcccattttttaaattggcttttgttttgctattgcttgagcttcttatatacgttggatattaaccccatatcagaygtacattttgaaaatattt

SEQ ID NO: 614430 - DNA, 502 bp, Homo sapiens
tttatagttttccatatgccttggtaaaatggcctaaactgcagcaatttcagagcatgggggcaaaggyttgcagaggtatacatagactacacattcgtactgataatatatttaacagtagggattataacagtgaagatttataggggcctgatggaacccactcatagttgagcctgggcaagggtaccagtggtggtgacctcaaaacagaaagcattatatgttttatcctcattttgttgccagtgagactcacagtcacctgtgaatgggtagctaaaaagtttaagatgtacaattttcttttatttcccttttgagtgttaaccttggtttagagtctctagtcccctaggtacagaaggacattgtcccaacccctagttttgtttatttttgaaaactgagaggtctgggtaagtcaatgaggtcctctaaccctagggagggacagagagaacccttatcacttatagaggctggtccatcgggattt

SEQ ID NO: 614431 - DNA, 621 bp, Homo sapiens
ctatcctagggtttcaggggaatttaaaaatatctgactcattttcccacttaatgctcttttggcatttctgacaaatgggcatatggttttgtttgtatatttcaataacaggaatattccaatcctgtgaaccactatttgtttgtaaaacaaaaattattaaagtaaaatgtctttatcctaatcattaatatgcttctctgtagaagttccagaattcagaatctaatttacaaagccctrtgaattaaatcaggtctcttttccatatgggagcttccagatctgtgaaggcagatcttagttatgcagtgttgaactatttttatagtaaactgttccatttctttagcttctcacttcatatagtttcaatacctctgttcattcttttcatccaattcagaaattcctgatgcttaagtatgatgttcagttttgaacatcataagccaggtatggtataagcagtgcagattacactgggattttccctctgttgattgaagaatcagttgatgccaaccagtatctagttttcaaaagtataggttaaaattcagtttgctgagaaaaacttcagatcccacctgagtgattcaaaccaacaactgtaga

SEQ ID NO: 614432 - DNA, 652 bp, Homo sapiens
ggtcaggatgaacggttgcatgaagataattctgttaaatagtgttagggttctctagggggacagcactaataggatagatgcatatatgaaagggagtttattaagaagtattgactcacacaatcacaaggtgaagacccacagtaggtcatctgcaagctgaggagcaaggaagccagttcgagtcccaaaacctcaaaagtagggaagccgacagtgcagctttcagtctgtggctgaaggcctgagagcccctggcaaactaatggtgcaggcccaagagtccaaaagctggagaacttggagtccgatgtttgaggtcagaaagcatccagcatgggagaaagatggaggccagaagacagtcagtctagtcattccacacccctctgcctttatcctagctatgctggcatctggttagattgtgcccacccacattgaggctgggtctgcctcttctagtctactgactcaaatgttaatctcctttggcaactccctcacagrgacacccaggaacaatactttgcatccttcaatccaatcaagctgacacaataataaccatcacccagtgccaatatacaatgagatggagtaatgtttgatatcagaatagggtgactatacttaacaaaaatgtatg

SEQ ID NO: 614433 - DNA, 642 bp, Homo sapiens
tcaatatttaataattgttaattttacatcatagtatttaagttatattaagaaaaaagtaaacatcactcaaggatttactgcctcttctgatcctttgaaaccctaaatagaacaaaaaggtaaaggaaaggcaaatttgtttttgttttgagatgggatgttcatctccttctgcctttggacactgggtgctcctgattctcaggcctttggatttggacctgggtttatactatcagtttcccttgttttcaggccttcagactcaggttaaattatgtcacaagttttcctgattctctagcttataggcagcagatcatgaagtctgtggtctccataagcatatgagccaatatttataatayatttttatagataaatagataaatatcctattggttcggagtctccaaagaatgttagataatacatctctctatttcctcaagaatatagctagaatatttaaaaatgtagcatggtagttaagagaaaagcttttgaacaagcagagacctgggttcaaattataactcagcttcttactaaatgtgtatccttggacaaaagcttaagccctattagctatagtttcctccctcttaaagcagtactgatattaatacctattgcaaa

SEQ ID NO: 614434 - DNA, 570 bp, Homo sapiens
catgtggaaccaaaacaagatcacaaatagtcaaaggaatttgaagtaaaaagacaaagctggaggcattacaacaccaaacctcaaactatactataaaactataagactataagaatctagtaaccaaagaatcatggtgctggtataaaaacagacacacagatgaatggaacagaaaaaaaaaaaactcagaaataaagcctcacacctacaaccatatgatctttgacaacactaacaaaaacaagcaacggggaaaggactccctgttaaacaaatggtgctgggataactagctagccatatgcagaacattgaaactggactcttacttttcaccacatataaaaatcaactaaagatgaattaagggtttaaaggtgagacccaaactataaaaatcccagaaaaaatctaggaaataacccttgtgatactggsctgggcaaataatttttggctaagtcaccaaaagcagtttcaacgaaaacaaaaatggacaaatgggcctaattaaactagagtttctgcacagccaaaaaataaaataaaataaaaaacactata

SEQ ID NO: 614435 - DNA, 570 bp, Homo sapiens
catgtggaaccaaaacaagatcacaaatagtcaaaggaatttgaagtaaaaagacaaagctggaggcattacaacaccaaacctcaaactatactataaaactataagactataagaatctagtaaccaaagaatcatggtgctggtataaaaacagacacacagatgaatggaacagaaaaaaaaaaaactcagaaataaagcctcacacctacaaccatatgatctttgacaacactaacaaaaacaagcaacggggaaaggactccctgttaaacaaatggtgctgggataactagctagccatatgcagaacattgaaactggactcttacttttcaccacatataaaaatcaactaaagatgaattaagggtttaaaggtgagacccaaactataaaaatcccagaaaaaatctaggaaataacccttgtgatactggcytgggcaaataatttttggctaagtcaccaaaagcagtttcaacgaaaacaaaaatggacaaatgggcctaattaaactagagtttctgcacagccaaaaaataaaataaaataaaaaacactata

SEQ ID NO: 614436 - DNA, 570 bp, Homo sapiens
catgtggaaccaaaacaagatcacaaatagtcaaaggaatttgaagtaaaaagacaaagctggaggcattacaacaccaaacctcaaactatactataaaactataagactataagaatctagtaaccaaagaatcatggtgctggtataaaaacagacacacagatgaatggaacagaaaaaaaaaaaactcagaaataaagcctcacacctacaaccatatgatctttgacaacactaacaaaaacaagcaacggggaaaggactccctgttaaacaaatggtgctgggataactagctagccatatgcagaacattgaaactggactcttacttttcaccacatataaaaatcaactaaagatgaattaagggtttaaaggtgagacccaaactataaaaatcccagaaaaaatctaggaaataacccttgtgatactggcctgggcaaataatttttggctaagtcaccaaaagcartttcaacgaaaacaaaaatggacaaatgggcctaattaaactagagtttctgcacagccaaaaaataaaataaaataaaaaacactata

SEQ ID NO: 614437 - DNA, 589 bp, Homo sapiens
catcatatacaacatgttttcaaatatgtatactttggggaacagctgaactgagctaattaacatatgtgttacttcacatatttatcaattttttgtgttgagaacacttaaaatctatctcttggcaactttcacaaatacaatacattgttattaactgcagccaccgtgttgtaggtagatctcctgaacttatttctcctaacgaaattttgtatcttttgaccaacatttcccccacagttcacttccaccccaaccccctggtagccaatattctactctgtgtttctattaggtcaattgttttagatttgacacagaagtattattaatatcacgcagtatttgtctttctgggcctagcttatttcatttaacataatgttctccaggttcatccacattgtcacaatgacrggattttcttcttttttcaaagctgaatagtattccattgtgcatacatattacattttgtttatctgtctgttgatgaacacctaggttgatttcacatcttggctgttgtgactagtgctgcagtgaacacgagagtgtagatatctcttcaacatactgattt

SEQ ID NO: 614438 - DNA, 644 bp, Homo sapiens
tctagcccagtcaatggtcatgccagaatctggaagataccgtgcattcacttgagcctgtggcatggctggtatgtgtgtgtgccacgcagttgctttcccctaaagggaacatgaggtgacaacagacttcatgggctctgccaccttttagcctgtgtcctaagcactcacaccatagtaatgaactggtctgtgaattgcagaatataagggcctgaagcaactgggtggtataattgatccactgtgaaatctatatgcacacagcatgcagattcatcgtagcatgctctgggkgtgtgtgtgtcattccacatgcgtaaaatcaattagagcatttcattgttcagccctgcctgggtctcattattagccaacattgagtcacagccttgattgaattaatcaatccaatcactgcttcagtccctacaattttatggtgtcttgagaaacttgccttctagatacttctttttgagcaaatctcatctatgggtttggaagggagacgtttaagaactaaatccagactttcaaatctgctgatggaatgaagaaatgttgctgaatagggtcagatcctagataaaagggggaatgctgattttgaatgatagtttttctctttctgcaaagtg

SEQ ID NO: 614439 - DNA, 627 bp, Homo sapiens
accttcccttatcaccaccatcttcttcagttctagttccttcttatacccagagataaccattgttaatgctttgctacatacacttccagatagttttctatgaatttatatacatataagaagatatacaaatagataaagctttttccctttgtaaatgggattttattttgtatattgttgggaaatttgattttgccatttaatattatgcactaaaaatcttttacatccctgagacaccaaaataaaagaaccagcacattgatttagacctactctgtcactttcagctatctgaccttcaagaggccatacaccttttgaatcctcaattttctcatctctgaaataggawcatagtaggcactcaaaaaaattcattatcttctcctttcttttcattttcaaactagtacttctagtttaaaagaaaacgtgatttttaaaaattcaggacttaaattttattagatgtttttatttaactaaagtcttaatacttaagcttcagtctgggcgtggtggctcacacctgtaatcccagtactttgggaggccaaggcagatggattgcttaagatcgggagttcaagaccagcctggacaacatggcaaaaccct

SEQ ID NO: 614440 - DNA, 492 bp, Homo sapiens
tatatttggaaaaacctaaagacccacaagaaaactattagaactgttaaacaaattcagcaaagttgccagatacaaaattaatgtataaaaatcagcagcatttctatatgccaaaaatgaacaatctgaaaaagatatcaagaaagtaatctcatttacaatagctacaaataaaataaaatacctaggtattaaccagagaagtgaaatatctctatgatgaaaactgtaaaacactgatgaaagaaactgaacagtacaccaaaaaatgaaaaaagattccatgttcatggattggaagaatcaatattgttaaaatgtctatactattcaaaacaatctacagattcattgcaatctctgtcaaaataccaaagacattcttcacagaaatagaaaaaacaatcytaagatgtacatggaaccacaaaagacccagaatagccaaagctatcctgagcaaaaagaacaaaactgaggaatcacatt

SEQ ID NO: 614441 - DNA, 324 bp, Homo sapiens
caatgcctgactgcatattgcacaaccaacacttcaaaagtcaatgaattgggctataagttttgcctcatctgccatactcacctgaactcttgccaactgcttaccacttcttcaagcatctcgataactttttgcagggaaaatgcctccacaaccagcaggatgcagaaaatgctttccaasagttagtcaaatcctgaagcatgaatttttatgctacaggaataaacaaacttatttctcattggccaaaatgtactgattgtaatggctcctattttggttaataaagatgtgtttgagcctagttacagtgattta

SEQ ID NO: 614442 - DNA, 586 bp, Homo sapiens
acaaatatagacgaactttggaaactatacaartacatggaaattaaatatgctcctgaatgcttactgagtcaatacataaagaaggaatttttaaaaattcttgagaaacatgaaaacggaagtacaatgtaccaaaaactatgggatacaggaagagtgatactaagatggacatttatagcaataaatgcttatatcaaaacaatataaataatctaaataaacaacctaatgatgcatctcaaggaattagaaaaaaaagaacaaactaaaccctaaattagtagcagaaaataaatactgaagatgtgagcagaaataaatgaaattgagactaaaaactaatacaaaaggtcaacaaaacgaaaagttgagtttttgaaaagataaacaacatcaacaaaccattagttaggctaacaaagaaaaaaatagagaagactcaaataattaaaatcagagatgaaaaaggaaacattacaggtgacaccatagaaatataagtgatcattagactattataaacaattatataccaataaattggaaaacctagaaatggataaactccttgacacattca

SEQ ID NO: 614443 - DNA, 621 bp, Homo sapiens
ataattttggaaatatattacctgattttattttattttattttgagtcagagtttcactcttgttgcccaggctggagtgcaatggcgcgatcttggctcagcacaacctccgccatccgggttgaagcgattctcctgcctcagcctcctgaatagctgggattacaggcatgcacgaacatacccggctaattttgtattttcagtagagacagggtttctccatcaggctggtcttgaactcccaamctcaggtgatctgccgcctcgggctcccaaagtgctgggattacaggcgagagccaccatgccccacttacctgattattcttaacaatgacaaagtattccattgtatagatatgctataatacatttaagcattttcccattaatggatgtttgggatgttgttgtttcttaaatgtcaagtgatgctgcattaagtaattctgtagatatatttttgtatatttacacatgcatttcttaggataaattcttagacatggaatttctgggatgaagtatacaaacattttaagtaataacatataatgtcaaattgttcttctaaaagactggaccttttaaaatacaaaagtacaggcaacaaaag

SEQ ID NO: 614444 - DNA, 509 bp, Homo sapiens
ttttgttcctagaaccctgttcaagtaagcaaagccacagcacacaaaaagaggatggccagcattcagggacaaagtcaaggggccaatttaatctgaccaaatattccttttgaatrtagttgcaaaattagcagcaagaatgcaatgtaacccaaaagcatgagtggcatgcccaggaagtctgagcagctgcttatggtggacatcgagacattttctttcctcatctctagctgttgcccttatttaacacactcaggttggtataggtagtacactcagaaaattgtgaaatattccagtagattcttttttcttcttcccctttttgagataggatttccctctgttgctcaggctggagtactgtggtacaatctcagctccctgcagcctcaacctcccaggctcaagcaatccttctgcctcagcttcccaattagctgggactacaggcaggcacctccatgcctggctactttttgtatcttttgtagagacagggt

SEQ ID NO: 614445 - DNA, 611 bp, Homo sapiens
acaatctcagctccctgcagcctcaacctcccaggctcaagcaatccttctgcctcagcttcccaattagctgggactacaggcaggcacctccatgcctggctastttttgtatcttttgtagagacagggtctcactatatcgcccaggctcatctcaaattcctgggctcagacgatcctcctgcctatacctcccaaagtgctgggattacaggcatgagccactgtgcctgccctccaatagattcttactaaacctgattatactgctctagaagatttaaactgcaaaatacaaattcacaaagtagtgatgtatgctattatatggatgagcctcagaaacattatactcattgaaagaagccagatacaaaagggaacaaattatatgaattcatttctgtgttcaaaataggcaactttatagagaaagaaagtcaaatggtggtaatcagttagttgcctgggttgttggtgggaattgagagtgactgcaaatggatgccaggtttctttctgaggtagtgaaaatgttctaaaattagatgatggtgataaaacgagtgaatactatcattaaatattgtacatcaatagagctgtta

SEQ ID NO: 614446 - DNA, 586 bp, Homo sapiens
ttggggaactccctcccctaaccaaggaaagccgtgaaggaccctgccatgaaggactgtgctatctggcccaaataccacgcttttcccacagtcatcacaacccgcacaccaggagattccctcgggtgcctaagccaccagggtcctggatttcaagcacaaaactgggcagccatttgggtagacactgagctagctgcaggagttttttttttcataccccagtggcacaggtgagacagaacagttcacycccctgaaaagggggctgaagccagggagccaagtggtctagctcagcggatcccaaccccacggagtccggcaagctaagatccactgacttgaaattctcactgccagcacagcagtctgaagttgacctgggatgctcaagcttggtagggggaggggcatctgccattactgaggtttgagtaggtggttttcccgtcacagtgcaaacaaagctgttgggaagtttgaactgggcagatcccactacagcttggcaaagccgcagtagccagactacctctctaaattcctcctctctgggcagggcatctctgaaagaaaggca

SEQ ID NO: 614447 - DNA, 586 bp, Homo sapiens
ttggggaactccctcccctaaccaaggaaagccgtgaaggaccctgccatgaaggactgtgctatctggcccaaataccacgcttttcccacagtcatcacaacccgcacaccaggagattccctcgggtgcctaagccaccagggtcctggatttcaagcacaaaactgggcagccatttgggtagacactgagctagctgcaggagttttttttttcataccccagtggcacaggtgagacagaacagttcactyccctgaaaagggggctgaagccagggagccaagtggtctagctcagcggatcccaaccccacggagtccggcaagctaagatccactgacttgaaattctcactgccagcacagcagtctgaagttgacctgggatgctcaagcttggtagggggaggggcatctgccattactgaggtttgagtaggtggttttcccgtcacagtgcaaacaaagctgttgggaagtttgaactgggcagatcccactacagcttggcaaagccgcagtagccagactacctctctaaattcctcctctctgggcagggcatctctgaaagaaaggca

SEQ ID NO: 614448 - DNA, 271 bp, Homo sapiens
aaccctgcatgctactgatataaaaatagatacatagatcactggaacagaatagagacctcagaaataatgcctcacaccttcccttaacrtatctttgacaaagtaggcaaaaacaatggagaaaggataccctatttaatatatggtgtttgaaaagttggatagtcataggcaaaagaataaaagtggatctctatctctcatcatatacaaaattaaactcaaaatggaataatgacttaaatgtaagatctgaaactaaaatttc

SEQ ID NO: 614449 - DNA, 585 bp, Homo sapiens
cagtagataattagttctcatctgtggttgtattcttatcagagagttatggagggacctgttatcaccaatcattatgttaatagagataatttatgtgcagctcaaatatcagtgcttggctscctaaggtaagcactctcaataggctctattagtttagtccataagatttattttttctaaccacatttcttttccatgtggtatgtggtgaaaaacagagaaacaataaaacccaagaagtcttattattatgactcccttcttaaaatgcccaaagagctcaagaatagtatcttgggaaaattactatgtgtatggaatttttccaggtgataaggacctagaaatgaaaagacacagcccacagttacgtgagaaagatagacttgaaaagatattatcataatattctgtactgatgccatattagcttgtctcaaagtataattattatacaaaggattgagaagtcaggtaacacttcaaggactatatcttgtgtgataaaacatgatacatgtgaattggggctaaaatacaggaatatactacataggaaaatcagcagagaagattctg

SEQ ID NO: 614450 - DNA, 585 bp, Homo sapiens
cagtagataattagttctcatctgtggttgtattcttatcagagagttatggagggacctgttatcaccaatcattatgttaatagagataatttatgtgcagctcaaatatcagtgcttggctccctaaggtaagcactctcaataggctctattagtttagtccataagatttattttttctaaccacatttcttttccatgtggtatgtggtgaaaaacagagaaacaataaaacccaagaagtcttattattatgactcccttcttaaaatgccyaaagagctcaagaatagtatcttgggaaaattactatgtgtatggaatttttccaggtgataaggacctagaaatgaaaagacacagcccacagttacgtgagaaagatagacttgaaaagatattatcataatattctgtactgatgccatattagcttgtctcaaagtataattattatacaaaggattgagaagtcaggtaacacttcaaggactatatcttgtgtgataaaacatgatacatgtgaattggggctaaaatacaggaatatactacataggaaaatcagcagagaagattctg

SEQ ID NO: 614451 - DNA, 585 bp, Homo sapiens
cagtagataattagttctcatctgtggttgtattcttatcagagagttatggagggacctgttatcaccaatcattatgttaatagagataatttatgtgcagctcaaatatcagtgcttggctccctaaggtaagcactctcaataggctctattagtttagtccataagatttattttttctaaccacatttcttttccatgtggtatgtggtgaaaaacagagaaacaataaaacccaagaagtcttattattatgactcccttcttaaaatgcccaaagagctcaagaatagtatcttgggaaaattactatgtgtatggaatttttccaggtgataaggacctagaaatgaaaagacacagcccacagttacgtgagaaagatagacttgaaaagatattatcataatattctgtactgatgccatattagcttgtctcaaagtataattattatacaaaggattgagaagtcaggtaacacttcaaggactatatcttgtgtgataaaacatgatayatgtgaattggggctaaaatacaggaatatactacataggaaaatcagcagagaagattctg

SEQ ID NO: 614452 - DNA, 644 bp, Homo sapiens
acccactcattttaggctggaatgctcaagtagtttatgcaacttgtttccctaagtggatagtgagcttcacaaggaaattgctacttattttacattctcctcagtgctttgccccatttggagtacacagcaggcacataataaatacttgttgacttagttgaatttcaaacctttcatataagccattwtgatttagctaaagaatgttatagcctgtagaaggactaattagagccaataatttgactgacctgtgttagctctgaagcacttagtggtaataatactgtttttgcaagatggatattgtactgttgagcttgtctggtttgagaagctcactgttttatggtctgtgtgtggtgatcatttggatgtaatgatcaaatgggggttgcccaaattgatcgttataataggattccactgtaattacatttccataaatgatactcaaattcactagggaaatcaacaaccccttggtgtgcctacttccagctctgattacaagttcaggttctgtagcattttctaaacaaaaggtaattaaaattttacaacccatagttaagccaaaataaaaaggcagctttttattctagattgaaaagtactgctctttgtagacaagagca

SEQ ID NO: 614453 - DNA, 573 bp, Homo sapiens
tgtcttctttactctgaattccatctctttctactctattatacacacttcattttttaaacagacagggtcttgctatattgcctaggccagactgagactcctgggctgaagggatcctcttgccttagcttcctgagtagctgggactataggtgcacaccaccaagtctggcttaaactgactttctgctctatcttagggccaagaaacctaactatggagtgaagaaacaggcatgaggcagcagaagtaagacagcttcggcaggaagaaaaccatctgccttaacaaagaagcatcttaatatattttctactgaagcaacttccagtccctggggaagtccaggctcaggcttgcgcgtgaaagcaggaaagtagattcagtcggggaagcagtgcatgcgagggcaggsacacgggctgatcccgacacatctttgtgaaatgggaatgaactatcagaaacagaggcagttttcctttgaaagtctgttacattcacaatgagggtgatgaaagactttgcttccttgccttttaggtaacttcaatatggccagactttga

SEQ ID NO: 614454 - DNA, 561 bp, Homo sapiens
agtgtaaaattaaaaaaaaaaaaaaaacattcgaagaacaatgaaggatcagcaaccagggttatatcctctgtggcaaaatgttgatgacctgacatttagaaataaccccggcatttactgttcatagaaagtttcttaacctccctaaagctcatctgcaaaatagaaataatttttttttcttttctatgctgtgtggcatttaatgaaataatttatgtgaaatagttgtgtaacctctctagacagcttattatcattattattattgagcaaatctaagctggttattttgtttgcttgtttttcttcttctccttcctcttctttttcttccacytttccttttccttccctttctccttctcctgacttgatatttggtgaaaaatattgttagtgtttcgtggttgttctgtatttgtgaagagttacaagcaatgaaaataccttgatctcccattagcacatagtgggttactagcaacacgcattccttagctcatgttgttcatgcaaagagcttggggtcagagcttgaaagattgagatttgaat

SEQ ID NO: 614455 - DNA, 388 bp, Homo sapiens
agaagccaccccaattccttcttcctccaggtttggttgctccacagtttatttaatttggtatttctgttaccccattttctaaagtgactttgaggtgagtttctgtcatttgcggacagaaaaatgctgacagacaacaggtcttgcatgtgccttaatagaagctacaggagtgtgactgccaaartgctgtctccatgcacttagggaaaaaaattctcttggtccccattctggtcctagcccaaccaaacccactcgtcaagttgtattacccatgaaagcaatatgatcagtatcgcttgcccaaaaagccaggaaaatgtctctcctcagttagcaatagcctattcctcaacctagagcttgtgggggaaggcactag

SEQ ID NO: 614456 - DNA, 607 bp, Homo sapiens
ccccattttctaaagtgactttgaggtgagtttctgtcatttgcggacagaaaaatgctgacagacaacaggtcttgcatgtgccttaatagaagctacaggagtgtgactgccaaaatgctgtctccatgcacttagggaaaaaaattctcttggtccccattctggtcctagcccaaccaaacccactcgtcaagttgtattacccatgaaagcaatatgatcagtatcgcttgcccaaaaagccaggaaaatgtctctcctcagttagcaatagcctattcctcaacytagagcttgtgggggaaggcactaggctccttatgaattcactctgcttcttgcagccagaatgtgtttttaagaactgcagctgagggagatgacatgaatagggcaatttggattgattggagagcagacgagcatgaggaggagactgcagcaggaaagaaatgatttcggagcaagagtagattgctgctgtttggctcttttagcccatggaacccaataataattttcctcaaattttatatttcctgccaactgagtcctataatcacatgggtagggaggtctgaattactttgcttgtcaaaggagg

SEQ ID NO: 614457 - DNA, 584 bp, Homo sapiens
cttttctcactctgcccactacatctataggaacttcctccactgaaaccttgaatgcctcaaagtcttccatgagagttggaattaacctcctttaaattcctgttagtgttgatattttgatctcttcccgtgaatcacaaatgttcttaaggacatctagaatggtgcatcctttccagaagattttcaatgtactttgctcagatccatcataaatgtcactatggcagttgtagccttatgaagtgtttttcttaaataataagacttgaaagtaaaaattactcctttatctgtgtgctrcaaaatggatgatttgtttgcaggcatgaaaacaacattaatcttcttgtatatttccgtcagagctcttgggttaccagcttcattgtcaatgagcagtaatatttagaaaggaatcttttttttgaagcagtaggtctcaacagtgggcttaaaatattcagtaaaccatagtataaacaggagcgctttcatcaggctttgttgtttcatttatagggcacaggcagagtaggtttagcataattcttaagggcccaaggactttcagactggtt

SEQ ID NO: 614458 - DNA, 574 bp, Homo sapiens
atcttcttgtatatttccgtcagagctcttgggttaccagcttcattgtcaatgagcagtaatatttagaaaggaatcttttttttgaagcagtaggtctcaacagtgggcttaaaatattcagtaaaccatagtataaacaggagygctttcatcaggctttgttgtttcatttatagggcacaggcagagtaggtttagcataattcttaagggcccaaggactttcagactggttaatgagcattggtttcaacttcaagtgaccagctgcattagccctaatgagagagtcagcctgttctttgaagctttgaagccaggtattgacttctctgtagctacgaagtcttagatggcatcttctttcagtagaaggctgttaacacatgttgtgtagtgtagccaccttcatcaattatcttagctagatcttctggatgacttgcttcagcttcttcataagcacttgcttctccacttgcacttttatgttatggagatggttgctttatttccttaaacctcataagccaacctctggtggctttaaacttttctcctgctgtttcct

SEQ ID NO: 614459 - DNA, 574 bp, Homo sapiens
atcttcttgtatatttccgtcagagctcttgggttaccagcttcattgtcaatgagcagtaatatttagaaaggaatcttttttttgaagcagtaggtctcaacagtgggcttaaaatattcagtaaaccatagtataaacaggagcsctttcatcaggctttgttgtttcatttatagggcacaggcagagtaggtttagcataattcttaagggcccaaggactttcagactggttaatgagcattggtttcaacttcaagtgaccagctgcattagccctaatgagagagtcagcctgttctttgaagctttgaagccaggtattgacttctctgtagctacgaagtcttagatggcatcttctttcagtagaaggctgttaacacatgttgtgtagtgtagccaccttcatcaattatcttagctagatcttctggatgacttgcttcagcttcttcataagcacttgcttctccacttgcacttttatgttatggagatggttgctttatttccttaaacctcataagccaacctctggtggctttaaacttttctcctgctgtttcct

SEQ ID NO: 614460 - DNA, 594 bp, Homo sapiens
agtgttgggactgtccagtctaggatcttgatattgtttgtatactctaaacattgaaaatctatttcatattaatgcttattaatctgaaggtgagttaagcatgaaggtcaggtcagctaaatttatattggcaaatgactttcctgatggctcactgaagaaattatttaaaaaatattatttcagattatctctttttaattttttttggaaacagaatcttactctgtcacccaggccagagtgcagtggcacaatctcagctcactgcaacctttgcctcccaggtttgagcaattcacctgcctaggcctcccaagtaccacagtagctgggactataggcacatgccaacacctggttaattyctttttttttttttttttcagtagagacggggtttcaccatgtatgtatgttggccaggctggtctcaagttcctggcctcaagagatctgcctgccttggcctcagattatctcttaaaactgaatgtcagagagttgatactcttaaataaggagcaggaggtgcttaacttttgactttaattaaggtcattcatgaactgatttatgttttcagaaaat

SEQ ID NO: 614461 - DNA, 594 bp, Homo sapiens
agtgttgggactgtccagtctaggatcttgatattgtttgtatactctaaacattgaaaatctatttcatattaatgcttattaatctgaaggtgagttaagcatgaaggtcaggtcagctaaatttatattggcaaatgactttcctgatggctcactgaagaaattatttaaaaaatattatttcagattatctctttttaattttttttggaaacagaatcttactctgtcacccaggccagagtgcagtggcacaatctcagctcactgcaacctttgcctcccaggtttgagcaattcacctgcctaggcctcccaagtaccacagtagctgggactataggcacatgccaacacctggttaatttctttttttttttttttttcagtagagacggggtttcaccatgtatgtatgttggccaggctggtctcaagttcctggcctcaagagatctgcctgccttggcctcagattatctcttaaaactgaatgtcagagagttgatamtcttaaataaggagcaggaggtgcttaacttttgactttaattaaggtcattcatgaactgatttatgttttcagaaaat

SEQ ID NO: 614462 - DNA, 545 bp, Homo sapiens
agagtggcagtttggggatagcaccaggagataccagctgtgatggcttggagaaacagtgtaaaccggcagtgtaaacaagcgcagggcatgtatgagtagttgggaatgatgaataggagtatgactagacakaagatagtagggatgacaagttttttggggcacagtccaagttgttctggtgtctggaatgagactggggcttagtaaaaaggagcgtccatacaggagctcaaatgggctgtaccctgtagcattccgaggacaggcctgaattctgagaagggaaagtggtaaaagtattgtccagtcctttttaagttggtggctgagcttggtgaggtgtgtttttaaaagaccattagtccgttctacctttcctgaagactaaggaccgtaagggatataaaggtttcactgaatttccaaaaccttgaaaaaatgcttggctgatttggctaataaaggccggtctgctatcggattgtatagaggtgggaaggccaaactgaggaattatttctgacagaagggaaaaaatg

SEQ ID NO: 614463 - DNA, 612 bp, Homo sapiens
tcttattctgttgaatctggggttgaaactggaagctaacagctttctctaaccttcttgcctcagttaaaattgtaatttcttctgtgccattgatgtttcagaggaactcaaattaattcacttgaaggtagaatcactgatacwctaaagagagatatttagaaaaagggcttacattacaaaagcatatcacatataacaaaatcaatccttggtgaaattgttgtatgtcactgtggtagtttgtattatttgttcaaaatattttctgcccactctaccaagtccttgtttatttccctggggcatatcctaatggaaagagtatcatccctaccatattcctgtcagactaattcatgtgactttaggctaatggcatgtgagtggaagggacatatgtcccatccaagtagaagtgttaagaggtgaggtgcattcgtaccattgttctttttgtcgtgaaaaaatctgttcatacctcagataagggttgctctttcaacgtgagactgaataaaataagccatagagtagagccaaaacttgccaacagaaggtttggaaagtgggtgagaaatgaatctgctattgtaagacactaaaatt

SEQ ID NO: 614464 - DNA, 612 bp, Homo sapiens
tcttattctgttgaatctggggttgaaactggaagctaacagctttctctaaccttcttgcctcagttaaaattgtaatttcttctgtgccattgatgtttcagaggaactcaaattaattcacttgaaggtagaatcactgatacactaaagagagatatttagaaaaagggcttacattacaaaagcatatcacatataacaaaatcaatccttggtgaaattgttgtatgtcactgtggtagtttgtattatttgttcaaaatattttctgcccactctaccaagtccttgtttatttccctggggcatatmctaatggaaagagtatcatccctaccatattcctgtcagactaattcatgtgactttaggctaatggcatgtgagtggaagggacatatgtcccatccaagtagaagtgttaagaggtgaggtgcattcgtaccattgttctttttgtcgtgaaaaaatctgttcatacctcagataagggttgctctttcaacgtgagactgaataaaataagccatagagtagagccaaaacttgccaacagaaggtttggaaagtgggtgagaaatgaatctgctattgtaagacactaaaatt

SEQ ID NO: 614465 - DNA, 408 bp, Homo sapiens
ccaaactatacaaatgcccccagtataaggctttcccttcagggtgatctcaaagtaaagwagaagaaagatagctttgctagtgggtcctccagggacctccacctgccagacaagtcaataatgccaattctcctgggatggtgatatgaaaaagatccaaatggcttctgcctactctggtggctgccactctgctggttctgcctatgtgtggctgccagtctactggtttcagtaaaatacaggctgtggtttttaaggctaccactgagctggatggagaagtatgtaaatagagtaacttaaaataccacaaaacttacgtgtttctactgagattctactgtgttttgttttgtttgtttgtttttataaatgcttcctagattgctgtaaactttggtc

SEQ ID NO: 614466 - DNA, 541 bp, Homo sapiens
ttagaattgacagtgacaggagtgtctggaaattaaagtgcaggaagtgctgtggtcccttgatgtgtaattgtagacaggagtaaaagacttgagcaggggcgggaggatttgtacacagagctttttggctgtgcaggaaattataaatgctgctgtaacgyttgtgttgtctcatcctgtttggagtaaggaaaatgttactccacattttctgtttttaatgttacaagtttcccttttcacttcttccttcagttcgttttctgcctcttttcttctttcactgctttgttagataccattaactcttctttttctgtaatctttgtttctttccctactaacctctgacataaagtattaatttttggtaatttttttttctttctttgaagtgctccttctggctacaaaaacttccaattaagttttttaaataaaagatagaagttaaaagcaactgctgcctggggttagcaggatggaaacttgtagttgcttgaagctgtacttcaaaaagagaaaaactcaattttaa

SEQ ID NO: 614467 - DNA, 623 bp, Homo sapiens
gctgggattacaggcatgagccactgcaccyggccattccttacactttaagtgaaatcttttagctcattgaaacagcaaattgaagttaccccttaaaaaaccacaaaacagttgagatcacttgctgctaatcctgatgtttggcctagaataggtgatcaattcccaatttaaaagtacaggcaaataattaataaagaaatttaaaaactacaggctgtgtaatgaatttaactacagcaagacactgacctcaagggcagtattattgtaactatttttaagaattacaacacagagctcattatgtgtcagtcacatttcaacttacaaaatagctaacaatggatttgacattaactttataataaatttaatcatcatccctacagacaaggatctaattttactgcatgtaaagggaaaatatacattgccattctcctaaagacctgatgagttatgagtcttaaatttaaatttgttttagaaaatcatgtctcattgctcccatacacttgtgccagatgaagtgaatagcaaattattccccaaaggacatggacagacaaagacagacagacagacacgcataaactcacacagacactcctttacag

SEQ ID NO: 614468 - DNA, 533 bp, Homo sapiens
caggtgtgcgccactgtgcccagctaatttttttttattttttgtagagacagggtcttgctatgttgcccaggctggtcccaaactcctgggctcaagcaatcctcccacctcagcttcccaaagtgccgggtttacaggtgtgagccactgcatctgccctgccacatttattttctacaatgaatatgtgttagatgtatagcaagcaagggaaacattttttaaaaggagaaaatagaaactacccggttaatacgcataggctttcctgttttaacaaggatatcggaagagtaagaacatattttagaagattcactctgcagttacattaaatggaaaccagcaagcaaagagaaatgggtaaccaaatgtaggytatttaaatgtcctctctattgtctgtagtttttaaactgcaaaaagtaaaagtgtgtatgaaataaattgtatgaaagtttctggatttaaaaagcccattctcttctcaggaagacccggatatccttctggaaagaaattcacgaatt

SEQ ID NO: 614469 - DNA, 594 bp, Homo sapiens
ttgtaacatgcaatattttttaattacttgtctttttttctttctaattctaccccccaagtctatttttttataaggtcattgatacataaatagtttcagggaggatgatatattatctacagactttctatgtagtgaacctgcctacatataaatgtcaattcatccaactactttgttggaataatttctgtggattgaacctgctagggcaaagtaaatgcaaaatctgcattttgaggctgggcgcagtggctcatgcctgcaatcccagcactttgggagtctgaggcgggcagatcacctgaggtgaggcgggcagatcacctgaggtcaggagttcaagaccagcctggccaacatgatgaaaccyccgtctctactaaaaatacaaaaattatccaggcatagtggcaggtgcctgtggtcccagctactcgggaggctgaggcaggaaaatcaatggaaccctggaggcggaggttgcagtgagccaatatcacaccactgcactccagcctgggtgacagagggagactctgtctcaaaaaaaaaaaaaaaatttcctataacataactcgagtgagaatt

SEQ ID NO: 614470 - DNA, 591 bp, Homo sapiens
atttcctaaaactgtacaaacatcagatatcagtatttgtaatcactgataatgtaatattacaaagaaatttatttttcttctattaatgttaagctacatcatcctggtgtagatttattagtcatttgcgttatttcattttcctctgttccttttattttcactttccttgtaatattagtctctttgttactgatttctaagagttcattcatgtttaatgatgttaacattttgtcaaacattgcaaatgagataccttgttttttcctgtttattttaccgtggtggttaattttttggttgtacagaaattatgtattgaaatataatcaagtgcggttttaaaaagaaaaaaaaggcaagaaaaggaacagaaaaaatctttttgtttttttgagacaggattttgctctgttgctcaaactggagtgcagtgcaatcaaggctcattgtagcctcaaactcctgggctcaaacaatcatctcatctcagcctcccaggtagctgggaccataggcacatrccatcaggcccagctaatttttgtgtttttcatagaaatgggatttcaccatgttacccag

SEQ ID NO: 614471 - DNA, 492 bp, Homo sapiens
caccgtagcttcccaaattgctgggattacaggcgtaagccaccactcctggcctgaaaatactttaaaaaaaaaaccgtaattcaaaaatctcccctgaaattaaaaataagaaaaaaaagacttgaatcttcatayttacagggcacaccacattcctgggaaaatcagttcagcatggccaactttgagacatattttagtaaaatgatggaactttaaagaaaaaatcctttggacattcgggcaaaaagacaaagtgactttttaagaagaaggaaatccgcttggcatcaaacttttcaacagcaaccctcaaagccagaagacacgggagtagcctatttaagatcctcaaggaaagaaaatgtccactgaagatcttatcctgaataactctcatataaattcatggactaactctatgagcacacaagacaccagataagctcttccttcttcctctttccccatgccttcctgagagaattc

SEQ ID NO: 614472 - DNA, 601 bp, Homo sapiens
gcctcccaccacctatattttcccatcacaactatcaccatcttaatttaagctagatataaatgttcttctgacatttatagttttaccatataagtttacatctctaaataatagagtttaattttgcccatttttaactttatgtaaataggattgtgttgtatatattttatttttagcttttattgtttcataatattccatcatgaatataacacaagtttattccttctgccattgttttggatattgcatttagattgtttgcagtttggggctattataaacaatgcttttatgaacatttctgtttaagtgcactggtgcatgtttatktcgttttcttgagattatatacttagaatttgaattgcaagaacatggggaatgttggtctttatcaggtaatgccaggtagtttttcaaagtagttgtttagtggtttttacttcatttattagtatgtaagagttcttgtttcatatcccttaccaacaaccgtacgtggtatcatatatttcaattctagccaatcctggtgggtatgtagttgtatttagttttaatcatttccctcattactaaatggggctgacca

SEQ ID NO: 614473 - DNA, 594 bp, Homo sapiens
agttagtgagtaaatggaaatgatttagcattttagcttattgttcttgtagaagtatcttgggtatacctccaaataatgcttttccatgttcacaattgcatttccctataaaattaaattatcctgcctcacattaagaaatcttgaagaatttcagtgagtagggatgcaagaggatgaaatctagtgacataattaacattattggggaggtaaactctttgtgactcaagctcaattataatyttcatttaaagtttaaaggaagcctccattcagggtgtaggaagaaattacacagtggtgacatgtatgaatattttatggaatagttccagttgtgtttgcacctatgtctataagtgagtaggatgcctaaataggctaaaatgaatgaaattcttataaaaaataaattcttacatttagttagcttacctggataatcattcaaatggaaaccaggttgctactgcactgggaaaagagactttatgaagaacgattatataagccacttgcctttaaaataagttgttcttaaaatcaagagattggtggaagaatagaaaaacaagtaaattgttaaca

SEQ ID NO: 614474 - DNA, 594 bp, Homo sapiens
agttagtgagtaaatggaaatgatttagcattttagcttattgttcttgtagaagtatcttgggtatacctccaaataatgcttttccatgttcacaattgcatttccctataaaattaaattatcctgcctcacattaagaaatcttgaagaatttcagtgagtagggatgcaagaggatgaaatctagtgacataattaacattattggggaggtaaactctttgtgactcaagctcaattataattttcatttaaagtttaaaggaagcctccattcagggtgtaggaagaaattacacagtggtgacatgtatgaatattttatggaatagttccagttgtgtttgcacctaygtctataagtgagtaggatgcctaaataggctaaaatgaatgaaattcttataaaaaataaattcttacatttagttagcttacctggataatcattcaaatggaaaccaggttgctactgcactgggaaaagagactttatgaagaacgattatataagccacttgcctttaaaataagttgttcttaaaatcaagagattggtggaagaatagaaaaacaagtaaattgttaaca

SEQ ID NO: 614475 - DNA, 612 bp, Homo sapiens
tctgtcattagaagattttgtctttgtgagaacatcagagagtgggcttacacaaacataggtggtagagactactccacacctaggctctgtggtataacctacggctccaaggctctaaacctgtacagcatggcactgtactgaatgctcaggcaactgtaacataatggtaagtatttatgtatctaaacatatctaaacatagcaaagttatggtaaaaatgtggtctatcattgactgaaacattgcatgtggtgcatgactgtgtacacacatgtgcctgcatgcacccgcacacatgcacatacacaccccactgtaacttcattctttctaattattaagtatcttctggggagtgcatagaggctctgtaaatattatgttactcaarcttttccttactcattttaggctgctgatcactcttgcctgaatcaattgttactgttaagcccctcacatggtgactttctaattccatcattctttctatgtgtattagatacatttctgctgtttatttatttatattagtgtattagtcccttctcacattgctatagggaaatacctgagactgggcaatttataaaggaaagaggttt

SEQ ID NO: 614476 - DNA, 630 bp, Homo sapiens
gtatcaccaagttcctctctcgatagtgggggcactaagggctggggaaggtgatagtcttgacttgaggtggttgacggctgggtcaagatttgtaccacaagttttaaagtccaagcctcagctctcttattacagcacccagttacaaaagaaattaatgtactcaatatctgattcggctctacctctttgtgtgcaaaattcctgctttgcccaacttcttatcrtgaataattatgtgttctgatggtggcctgagtcaatgaagagacaaataagtaaattatgctaaggaatgggcctaactattggcaaataaaatgatagagtaattaatcaatatattattgcaaaacactttcataaaattgctttttctctagagactgaaagtattaaaagaaacaacttttggagtttatggaaagcaattttaggataaaagtaaaaacactgagcaaaataatgaaaagaacagttactatattataataattatgtaaattacgtaatttacattatgtagctcttaaaattataggatgccttgctacaagtactatattattgaaagtgatatttagagcaatagctgtcacttactttttgagattgtgaaaagttaga

SEQ ID NO: 614477 - DNA, 593 bp, Homo sapiens
taccttttcaccttcttaatggtgttttttgaggtacacacattttactaattaatttacaactgaaacttattctataaattattactctttcatggttattggtatttgcatcctgtttaaggaatctttgcctatgcttacacattaacctgatctgttatattttctttaasagtgttcttggtttgcctttcacattgaggtcgatgatgcttctcaaattaaattttgtgtttggtattaggtaggggtaaaggttgtgaaagaaaaatagaaacttgggaccccaattcactatgccattccattctgtgagagtacacagaaaaaaataattcacaatgccaaaaggagaaaaaattaagctgaaagctgaatcaggcaagaaacgaactttccttttgttcctaagcagagagctgtggataaaaggttaaagatctccacaggtagctatgctttgttcaccttatcttatgtaaagtgctgatttactgagcaggagactaataacatgattgactattcactcccttatgtgctctttttctcttgcaacacgtggatttagtaacgtgaccattccctcc

SEQ ID NO: 614478 - DNA, 593 bp, Homo sapiens
taccttttcaccttcttaatggtgttttttgaggtacacacattttactaattaatttacaactgaaacttattctataaattattactctttcatggttattggtatttgcatcctgtttaaggaatctttgcctatgcttacacattaacctgatctgttatattttctttaagagtgttcttggtttgcctttcacattgaggtcgatgatgcttctcaaattaaattttgtgtttggtrttaggtaggggtaaaggttgtgaaagaaaaatagaaacttgggaccccaattcactatgccattccattctgtgagagtacacagaaaaaaataattcacaatgccaaaaggagaaaaaattaagctgaaagctgaatcaggcaagaaacgaactttccttttgttcctaagcagagagctgtggataaaaggttaaagatctccacaggtagctatgctttgttcaccttatcttatgtaaagtgctgatttactgagcaggagactaataacatgattgactattcactcccttatgtgctctttttctcttgcaacacgtggatttagtaacgtgaccattccctcc

SEQ ID NO: 614479 - DNA, 581 bp, Homo sapiens
gcaagtagagggcaaggtgttgaaagatcaattagctagggtccttagttgctacggtgacratggtaattatcaagattgtggtgtgactggtgtttctgtgagtcctagataatgtacacagatgaaaggaaaaattaaaagctttgtaggtccattcagggcacaagtataatatcagaaaactttaatggcagctttaaaagagctgcttaccaaccaccttgaaaaagatatgagtgaggaccagcccagcatctgagaactgcatcaacatctgttttgttatggagcagagaaaagagccaaaatttgagacataggatgggaacatttaggggaacacagacaagactaagaactttgaaccctcaaattgtttcaaaactttcctgcaaataaagaaccccatcctgcagaggggctgggagagcatgggatggaggtgacctgtgtcagggacacatgtttttcacttagctaagagtatgctgtggtgaagtatctccaggttgaatatctacctttctgcagcctgcttttgtccttagacattgacttgcatggactgcatcaaccag

SEQ ID NO: 614480 - DNA, 500 bp, Homo sapiens
tcacctttccctcctgccttatgttatatatctgggaagaagctcttctcacccaaagttctagagatgggctctcatttgcttcagctgatcaacaccccccactgcctagccatggtcattgatttagcratggctatgtggccttttctgaaatggttgacaagaaaaatatctctcctggatggtttgctttgtggatgtaaagcttgaagcagttcagccacattgacacgatggggatgacagccttaggatgaaaggcagaaaaatctgctcattgcggacaacattgagccactggatcaaccttctctgaagttcaaacaactcctgaacttatcaaatctgacctcatcattaagtagctagaaactgataacaatgttgttgtagcccagaaggtattactagcatagttaacaatgcaaattttactcccttattagaaaataagctctgaccacattatttggcacataggaaatgctcaattaaaa

SEQ ID NO: 614481 - DNA, 450 bp, Homo sapiens
aaatttgaaatctttgctttagagaacccctggctaatttatgtcagttactttctgcagggcctaggccaactctgtgtgactagtcccaccctggatcaaccaaatcttacgtctcagtccagttcttttgtgactgggtccactgtcctgagcatcagatcatattctctacagatttgccctttgtatgttttctgtcctttcctccttgagactgagagcagcatyattttcactatttctgtgaatcccccaaagttcagtaaatattatacaaataaacaactgaaggagtgaagtgaaaaatcagacaaagagaaatcctatttgctttgagttaccactgtttattcagtgaaagaccttggacacagtagcatttgataaatacagtatggctaattaagcaacacaccactgtaatggaggatcccagttttttgtgag

SEQ ID NO: 614482 - DNA, 612 bp, Homo sapiens
aacctgggaggcggaggttgcagtgagctgagattgcgccactgtactccagcctgggtgacagagcaagactccatcttgaaaaaaatatatacatatcatccatcatgatcaagtgggattcatcccagggatgcaaggatggttcaacatatgcaaatcaataaatgtgataaataatatcaacaaaatgaaggacaaaaaccataggatcatttcaattgattccaaaaaagcatttgataagattcaacatcaacatcctttatgacaaaaactcttaaaaaactgagtatagaaggaacatacctcaacatgataaaagccgtatatgacaaacccatagctartattatatttaatggggaaaaaatgaaagcctttcatctaagatctgtaacaagatgagaatgcccactttctccattcctatttaacatagtactggaagtcctagccaaagcaattagacaaaagaaagaaataaacggcctccaaattggaaaggaagaagtcaaattatccttctttgcagacgatataaaatcatatttagaaaaacctaaagactctgccagaaaacagttagaacctataaacaaattcagtaaa

SEQ ID NO: 614483 - DNA, 612 bp, Homo sapiens
aacctgggaggcggaggttgcagtgagctgagattgcgccactgtactccagcctgggtgacagagcaagactccatcttgaaaaaaatatatacatatcatccatcatgatcaagtgggattcatcccagggatgcaaggatggttcaacatatgcaaatcaataaatgtgataaataatatcaacaaaatgaaggacaaaaaccataggatcatttcaattgattccaaaaaagcatttgataagattcaacatcaacatcctttatgacaaaaactcttaaaaaactgagtatagaaggaacatacctcaacatgataaaagccgtatatgacaaacccatagctagtattatatttaatggggaaaaaatgaaagcctttcwtctaagatctgtaacaagatgagaatgcccactttctccattcctatttaacatagtactggaagtcctagccaaagcaattagacaaaagaaagaaataaacggcctccaaattggaaaggaagaagtcaaattatccttctttgcagacgatataaaatcatatttagaaaaacctaaagactctgccagaaaacagttagaacctataaacaaattcagtaaa

SEQ ID NO: 614484 - DNA, 587 bp, Homo sapiens
gcaaataaaaacaaaaaaagagcaagagttgctatacttacatcagataaaatagattttaagacaaaatccctgtaagaagagacaaagaaggtcactgtataatgataaaggggtcacttcagcaagatgatataacaattatraatatatatgcacccagcattggagcactcaaatatataaagaaaatgttattagtgctaatgagaaagataggcaccaatacaataatagctggagatgtcagcaccacactttcagcattggatagatcttccagacagaaaattaacaaagaaacatcatgcttaatctgtactatagaccaaatggatctaatagatatttacacaacatttcagctaagagctgcagaatacacatttgtttccacagcatatggatcattctcaaggatagaccatatattaaatacaaaacaagtcttaaaacattaaaacaaatcaaaataatatcaagcatcttctctgaccacaatggaatgaaactagaaattaataacaagaggaattttggaaactgcacaaatacataaaaattaaaaaatattctcctgaatgacc

SEQ ID NO: 614485 - DNA, 606 bp, Homo sapiens
gattctttgtaaatcaaaggataaatgcttaaggggatggctaccccattctctttggtgtgcttatttcacattgcatgcctgtttcaaaacatctcatgtaccctgttaatatatgcacctactatgtaggtacaaaaataataaataataataataaaataaaagtatcaaatgaaacttctagaaccaaagaatgagacaactgaaattaggaccaaaccgcttattagacrtaacaaaaaaggggatttgtgaactagaaaatacttcagttaaaatattaaaattgaacttcattgagcaaaaagaccaaaaaatgcaaaaatagcatcatgagggctatacagaacacagagaaaaagtctaacatacatataattggaggtacagagataaggagagagataataatgcagaagcaatatttgaagatacaatggctgcgattttttcaaaactgatggaagatatcagagaagtaccacaaaccccaagtgcgacaaatacaagggaaatcacaattaggttcatgattataaaatttctgcaaactataatcttaaaagcatctaaggaaaaagacacattatccttaaaggaaca

SEQ ID NO: 614486 - DNA, 605 bp, Homo sapiens
tggtcttgaactcctgatctcgtgatccacccatctcagcctcccaaagtgctgggattacaggtgtgagccatcgtgcccagctaagataaaacattctttctccctactcctgaaagctgtgactcaatcagactgagtcttgtcaatgtgactctcctacccactatttcagatattaaggttgtgatgtaaaactgcaaaaatagtgattaactacacaaaaatgctggagtgaaaaatccaatgacagcaggaaatgttcagttatggcacttccagacatacttgaaacaagtattcatctgcagtagcatcttaactagaccatttctggggcatgaactttgttgtattcacagctatctagaaacccttgggtattgcctgttttatattcctacctctgaagcattctaataatcctgtaaactactcgatatccttctataaatgttttcttgcttaagtttgtttggcagactggtagttgttattcaaaatcttttytttccttcttcccaaatatgtgaccacacagatataaaccacatttcctggtctctttgcagctatatatgaataactatgtgaaaaagtttagg

SEQ ID NO: 614487 - DNA, 430 bp, Homo sapiens
tcctgacttgtagctacatcactccaatttttgtgtctattgtcatattgctttctcctctgtctgaacttcctgtgttcatcgtataaggatsctgtgatcacacggggcccacttggaaaatctggataatctccccatcacatgattcttaatctaatcacatctgcaaagtatctttgccttataagacaacattcacaggttctgaaaattaagacatgaacatttttggagagccaatattcagccaactacattattctaaaatttaaaaaaaatggtttaagaaaaaatagaaaaatctttggaaaatctagttaggataaaaagagaacacacaattaaataccaaagaccaaggggacaggacagcagccacagagattttaagactatcagagaataatacacatgaatatgaaataat

SEQ ID NO: 614488 - DNA, 441 bp, Homo sapiens
acagcatttcctgacttgtagctacatcactccaatttttgtgtctattgtcatattgctttctcctctgtctgaacttcctgtgttcatcgtataaggatcctgtgatcacacggggcccacttggaaaatctggatartctccccatcacatgattcttaatctaatcacatctgcaaagtatctttgccttataagacaacattcacaggttctgaaaattaagacatgaacatttttggagagccaatattcagccaactacattattctaaaatttaaaaaaaatggtttaagaaaaaatagaaaaatctttggaaaatctagttaggataaaaagagaacacacaattaaataccaaagaccaaggggacaggacagcagccacagagattttaagactatcagagaataatacacatgaatatgaaataatact

SEQ ID NO: 614489 - DNA, 577 bp, Homo sapiens
atgcttctctctacagtactcatagttcactggaccatgcctcataggtaagatgtgtattctcattctcattttaacgaggactcagaggttcaaaatgattaaggaacttaccaaaggctacacagttagtaaggagcaggcaaccatcaggatcttctgacttctgtccctgaccttggataagtctctcctcacgcgcactcgcagaaagccaagtcggaggagggaagtgggtggcaggggcggggatggaagagagactgtgatttgtaccctggcccagccgcatttccaggtgagtgttgggccgggctactctgcgcacgcgcccttgctcaccgcatggggcatgctatcctttcccttggccttgcccaggtttttgttgagcgaaaagggcacgttactacttcttctctaaagaggtatgatgagttcagcttctgccttcaaatcgatctctgtggaggcctgccacccacaatcggctmggcttttccaaccctcccgcgcgtctcaagggctacagagcaggggatgagaactttcgctgggcccaggaagcttctggttg

SEQ ID NO: 614490 - DNA, 434 bp, Homo sapiens
ccaacctgacaaaattcttgctgaaactggatgatgcaagaaaggacacagaagtccaaaagtcaaggactaccttggaagaggatagtggtgacaaagagtctctccttgaccaaattttagtcaggctccaccactgtgaccctctgcccatagctgagggctgcagcatccgggaaagtaaggttcagtgagttttgagtttggtcgtgaagaaggacagaaacaagatctggcaaacagaaagaagtaacatttgtttggagatggtggtggaagggaacgatcctttattaaatcctgggcattaagtgcayctgatagggaggaggcagtaacacttaagatcctaccgaggcagaagctcctgagcaccgttttcctctgggaactttggtatttaacctttaatcagctgagcattgtggattgct

SEQ ID NO: 614491 - DNA, 619 bp, Homo sapiens
gttagggacatggtattataagctaggtttttttcttcctttgtgattctcctgatgttttgtgtgttttaagttaatttgccactggaagaatatagtggttcatggcacagtcaatatgtaaggcaattccttctggaacccacttgctcaagagatttaattccccacagatggggctggggcattggcattttaaaaatgctcctcaggtgattgcaatgtgcagccaaggttgaatacatcagttcagagtaagagcactactagaaggtggacatttggatgttgggtgttagccctgcaggtgaaatcagcacggccatgatcctaggctttcatactccatgcaacatgaccctgtgcctttgaacctggcagtgaggaatgggagccgtaggccctagggttctgttttccaactattgcctcagattgttctgctttttgtctattcttgctcccaatctttggctcttccaaatagaagtggagcatggagggattaggtcaaggaccatgagaggcagatcrccttattgggcttcttggatacaaaccgactgcagctggcaggcagcctctgctgaatggcctaacaggattgaaagggtgggac

SEQ ID NO: 614492 - DNA, 587 bp, Homo sapiens
atacaaaaagattaccctgcaaatattttgtcttttttgttttatattacaatatattgtgaatattttctcgtgattattttttaactaaatatttacaatggttgaatgatattgtttcatgtgtagactgcctttatttaattagtcttctatttgaacacttagtttgcctcacatttgcactgttatacactttggtacagcaaaatgttttatcagacactgtcacacattaccataataatttctctaggacaaattgctatagatttgtgaaatcaaatgttgtaaatactgttaagatttttgacagatattaataaattgccctatagatcaagttataatgataatactcccactaatattgtatgaaggtgacaatttccttgaatattcactaattcggtatattaaacatgtttaaaagagttaaatttacaggaagaaaacaaccccattaaaaagtgggcaaaggacatgaacagacacttctcaaaagacattcatgcaaccaacaaacwtgaaaaaaatctcatcatcactgatcattagagaaatgcaaatcaaaaccacgatgagat

SEQ ID NO: 614493 - DNA, 457 bp, Homo sapiens
cacttgaggtcaggagttcaagaccagcctggccaagatggcaaaactccgtctctactaaaaatacaaaaaaaaaaaaaaaattaggcagacataatggtgggtgcctgtaatcccagctactcwggcggctgaggcaggagaatcgcttaaacttgggaggcggaggttgcagtgagctgcgatcatgctattgcagtccagcctgggcgacagagtgagactccgtcttaataaacaaacaaacaaacaaacaaactttatattttagatcagttttaggttcacaggaaaattgagtagaaggtatggagacttcccatatatccccatccctacgcatgcatagctctcctccttactagcattgcccacaagaggcggtcatttgtcacaattgatgaatttacactgacacatcactatcacccaaagtccatggtttatgttagggttc

SEQ ID NO: 614494 - DNA, 457 bp, Homo sapiens
cacttgaggtcaggagttcaagaccagcctggccaagatggcaaaactccgtctctactaaaaatacaaaaaaaaaaaaaaaattaggcagacataatggtgggtgcctgtaatcccagctactctggcggctgaggcaggagaatcgcttaaacttgggaggcggaggttgcagtgagctgcgatcatgctattgcagtccagcctgggcgacagagtgagactccgtcttaataaacaaacaaacaaacaaacaaactttatattttagatcagttttaggttcacaggaaaattgagtagaaggtatggagacttcccatatatccccatccctacgcatgcatagctctcctccttactagcattgcccacaagaggsggtcatttgtcacaattgatgaatttacactgacacatcactatcacccaaagtccatggtttatgttagggttc

SEQ ID NO: 614495 - DNA, 494 bp, Homo sapiens
tatctcttcaacaactaaatgaagaagctcttattgttaattaaatctacaatcatagagctgaaaagaactcgaattccttgttgaaattcctttacttttgctcaaagtgttctccatgaccattagcgtcacattacatggaagcttgctggaaaggtagatctcagaccccaccccggatactgagtcagaacatgtatatcaagatcccagggtgatgtgtatgaataagaaagtttgaaaaaaaactgttccaaccatccaaaagtgagggttgtttatcctgttttttataccataccacatatattattttcttattgttttatgctaattcattcctttgtaacayatatgtatatattctcagcacctttgctttttgaaaaatagaatccctaagaagtgaacatacacttggaaatactattaaagctattagacatttgagtaaatctctgtcccattcaaaagtaatttctaacaccatt

SEQ ID NO: 614496 - DNA, 378 bp, Homo sapiens
aagaaatattcaacatagttttttcctgctattaaactagggaagaaaagaattctttcttaatatatttacagctacataccttcacctaacagcctgtttccttactatgaaatatgagaagctttaaccactgttaagcacagtgcaggcaccatygatgaggatggccaggagcctttgtgctgaagcagagttctttaaagtttcctgctgtgccaggcattgacgtttttggtgggagtctggggacttcttgaggggtgtcaggactgtagttcttcacttgcctgaaggcatgccaataaactggctgaaaattagtcctggcttttttttaagagtcaggaccaggacaaagacacctgctatacaatt

SEQ ID NO: 614497 - DNA, 589 bp, Homo sapiens
gtattattttcatttgtttttactaaaaattttatatattttaatgtcttactcatttcatgtgcttttaaaatctgcaccatgcttttctgaacgctagaggtgaatcagtctatttgcaattaggcctatttctaccactgtgctttaaccaatccagtgaagaccaccccatattaatattacttgggatgaagatggaatttcagacaacctcctagtcatttgaaggtcaccagacttatagaaagataaatggtaccttcrttcactacgtaaggccagaatgcaccttctggagcatttaacatgtattcacagagggactaatttatttatgttgtagcatgagctattattcaattagttctcatagcctcctgaggcctctgcatgcctcccagcaagtaaagcagcacaggtaaacaccaaacaggtggcatacaggcacatttccaatttgattagatttacactgtttaaaaaatgacatttgacaactgaaatgaacattttcatgattgcttatgccatactccctccattcccctaacaaataactttggagaagcattagtgtaatcctata

SEQ ID NO: 614498 - DNA, 631 bp, Homo sapiens
aaatgaagagaatggaaaaataaaccagaaaagaaagatttggaagaggttttagagttgagacaagaggttgagccaaatatgagattaccacaagagatggaaagagggcttttaaagagcatatgtcaatctcaaaatacagatactaataatatcgccaccaattacgagtactgaaatggttgtttggctttgttattggtttggtttgggagattatttaggtgagtttgaggtaaactcatgagtcctttaaatctgagtctataggttaaatacaggaagtcagaggtttcaagtatgagaagaattcagcatgttgttgcaggcttgaagacagagggaacaaggaatgtgggtggcctttagatggtgagagcaaccccagctaacacccagaaaggaaatggaacttcagtcttataatcacaaggaactgaattcagctaagcamaagatgagctgggaagcagatttttttttttctcagaacctccagactagagctcaatccagccagaacattgaattcagccttctgaaaccctgcagagaattcagctacattttgctagacttctgacgtactgaaactgtgagctaatattggggtattattttaagccac

SEQ ID NO: 614499 - DNA, 631 bp, Homo sapiens
aaatgaagagaatggaaaaataaaccagaaaagaaagatttggaagaggttttagagttgagacaagaggttgagccaaatatgagattaccacaagagatggaaagagggcttttaaagagcatatgtcaatctcaaaatacagatactaataatatcgccaccaattacgagtactgaaatggttgtttggctttgttattggtttggtttgggagattatttaggtgagtttgaggtaaactcatgagtcctttaaatctgagtctataggttaaatacaggaagtcagaggtttcaagtatgagaagaattcagcatgttgttgcaggcttgaagacagagggaacaaggaatgtgggtggcctttagatggtgagagcaaccccagctaacacccagaaaggaaatggaacttcagtcttataatcacaaggaactgaattcagctaagcacaagatgagctgggaagcagatttttttttttctcagaacctccasactagagctcaatccagccagaacattgaattcagccttctgaaaccctgcagagaattcagctacattttgctagacttctgacgtactgaaactgtgagctaatattggggtattattttaagccac

SEQ ID NO: 614500 - DNA, 314 bp, Homo sapiens
tttccatagtttgtgcattaaactcaattcagaataatatttctcagaataatgatgccagaatcagktgtgggatataggacctataaagtgaatccaagtaaccttatgtaagcatacattccagatagccaagatatatcctattcctatgcatcctaaaaaatcagtattttttgtaggtcagagctttttaaaattcttttttgatttgaattaatggtcttacaacaggtgttacattggtctactgaaaatccgcattcaaattgtgtagtcttttgaaagatcaggaaataaatgactcagcttaa

SEQ ID NO: 614501 - DNA, 572 bp, Homo sapiens
ctgaagctgtcagtggactccagccaatttatttgtaagtggatttttgcaagatggcactcttaaaattctgctactttcaagagtgagtggccaaagagaccagtgtgtggcccagatacctttgtgttgtgtatatctgaagattacaatcctaattggataccagtagctgaagttttatttctaataaatacgattctgctttttcatttcataagctacctggtaacttagttcaaaactagaagtgatttaaacatgaatggcgagtgttcaaaagaaagaatctctaagggtaacagatractaccaaatatctatatggccaataatatccagacagacatatatgtacccaaattatgaataagaccttcatgtacagtacataagaacaaaacttttgtcttaattttccttatgaacaaagcctattgtaagttatatatatttggctattgattgctaccatgacaactaaaatgtattcaattgtcaaagaggctagtggagcatttctgaaatggcaggagttttacaaatttatttatagcctatccatccctaaa

SEQ ID NO: 614502 - DNA, 580 bp, Homo sapiens
ccggttcctggcaatattacaaagatgagggtaagaattacttatgtggggaaaacccatttaaaaatatccccaggtagcaaaagagtagaggttmgtggaattgttttttccatcctaaagtctatttcttgtccctttttcccattaccttgattcatagttttcaatatttagtgttttctcttgcttatggcttttgctgattggctgaccccatccaggaagaagtctctcattcaaaatgacatatatcttatacccaattcttatatttgcagggggaaaataacccaagaccaagattacatacattcagcctcaaccttgttgctgaagtctctatttttccaatagaatgactccagattctgaaacttattccctgagaataaatagctatagctgggggatacctaagtgtactgtagtcaaactgacttccagtgaggaagcaaggatttaaaaaagggaactccccagattctgaacttcagttagactgagctctggccagacttcagtggattctgtttctttggttctccctctttctaaggacttcttattttatttatac

SEQ ID NO: 614503 - DNA, 540 bp, Homo sapiens
gaaccttgaaggcttctctgatcacacaaaacagaagtaatttctttatccaactttaattcctatatgtctctgtatctttcttatatcacttaacagattatctgcctcatgttagaattacacatatgtttgtcttctctataataatatgtttctcaaaagcagaggctatgtcttatttactattgtattgccaccaggatctggcacatttgcctacartgaaacatgtgctgaattagtcaaaagcacaaatatttttcatgagagctgattagcattttacaatagtcataaaaattcagactatacctcaagtaattcacaaacaggttaaatactgtagtctttcaaaaatctggatatggtgtttttgaaggcacactgccatctgcataattaaaaccattctaatacctatctcatgaaatagtacacaaaaaaaatagtagacaatacaaagagaatcaactgactacaggcatataatttactcagtgctttgcataaagagtggttcataatttttaaaatata

SEQ ID NO: 614504 - DNA, 503 bp, Homo sapiens
gaccttgggcatatgactatgctttctccacagtggtatcttcttctgtcaaatggggataataattctcttcttcagaggggtattgaaaggattatgtatgagttaattcactgatatgtgaaatattagaaacagtgcctgacatataaggttttatttagtaaaacgtatttatttccttctatttctctcaacagctcctttcatgtctgcctgtctttttcccatcatcacccaggggttaagttactaagaagatagaggcactcatgggctctcagcaactatgtcatcctaaagtagggagaggtttcaatgttgggagtagatctagtgagggaagcctgtgagtggcattyctcaccgggatggaatatgccaacaggcatgtttctccctcaggtagcacctttggtaagacaaagttgagtgttaggagtaataccaatgatctctcctgaggccatggggaatacagtataggacaaaatagataagac

SEQ ID NO: 614505 - DNA, 573 bp, Homo sapiens
tcttaaaagaaccagtcaagagaaggactagtttcaggctcatcagaagcattcattcacagacatacattcaatgtgccaattaaaatcacttagctccattcatcaagccttactttactctttgatattgtgtgttctttaataaaatccatttctataattcaaattggtctctcccaacccttttagaaatatttttattatatttttcagagtaaaagataattccagtagaaaggaagaaaaaaaattctcttaaaatgcaatgttctaaacactaaacacatcgaaatacacatagggattcagcatgtggcaaattctatgtttttataatcttagaatggtttggttacaaaacaattgtatatgtctgtatattaaaacttatataaatggccaaaagacaaatagaaggctggaaaaactgtaattgagattacaaaggtcttattttcctaatatatttaaatattartaagaaaaagatgaagtccaattaagaatgggtaaaggatacgaaaagacaattcacagaaaaaaagtgaaaattgctcttaaaagttgttt

SEQ ID NO: 614506 - DNA, 318 bp, Homo sapiens
gtaggagctaaaaaagttaatctcatgagggtagacagtagaataatagttaccggaggcttggaagtgggggagtcgggggaatgagacaggttggttaatgggtacaaacatacaggaacagatrggaggaataagttctgctgttggatagcagagtacggtgaccacagttaacaatgtatcgtatatttcaaaatagctaaaagagaggccttgaaatggcagtggctcacacctgtaatcccagcactttgggaggccgaggcaggtggatcacctgaggtcaggagttcaagaccagcctgaccaacatgg

SEQ ID NO: 614507 - DNA, 514 bp, Homo sapiens
gagtctcgctctgttgcccaggctggagtgcagtgatacgatttccactcactgcagcctccacctcccaggttcaagcaattctcctgcctcagcctcccgagtagctgggattacaggcacatgacaccacgcccagctaatttttctatttttttagtagagatggggtttctccatgttggccaggctggtctcgaactcctgacctcaggtgatctgcctgcctcagcctcccaaagtgatgggattacaggcatgaaccaccatgcttggctgttttgggtttgtttgtttgtttgtttgtttgtttgttttgagatggcatctcactctgtctcccaggctggagtgcagtggtgggatctcagctcactgtaacctctgcctcccgggtttaggtgactctcgtgcctcascctcccaagtagctgagattacaggcatgcaccaccacacctggctaatttttgtgtatttagtagagacgggctttctccatgttggccaggct

SEQ ID NO: 614508 - DNA, 406 bp, Homo sapiens
aaaaaaataaaataaaagtggctcactcctataatcccaacactttgggaggccaaagygggagaatcacttgagcacaggaatttgagaccagcctgggcaacacagtgggtttccatcactacaaaaaaaccaataataataataacaaattttaaaattcagccaggcatggtgttattagcttgtagttccagccactctggaggctgaggaagggggatcatttgagcccaggagggaggtcgaggctgcagtgagccatgatcatgccactgcactccagcatgggtgacagagtgagatgctacctcaataaataaacaaataaataaataaataaatagcctatattcttccatttatctctgaatcattctctgaatgtctgaatgaatatttcaga

SEQ ID NO: 614509 - DNA, 591 bp, Homo sapiens
actaaaaatacaaaattagctgggtgtggtggcacaygcctgtaatcccagctactcgggaggctgaggtaggagaatcacttgaacccaggaggtggaggttgcagtgaactgagggcagggcctgagaggtggcagttcttttttttttgaggcagggtcttgctctgtccctaagctgaagtgcagtggcatgatcacagctcactgcagccttgacttcccaggctcaagcgatcctctcacctcagcctcccaagtagctgggaccacaggtgcccatcatcacacctggctaatttttatatgttttgcagagatggggtttcgccatgttgcctaggctggcctcaaactcctgggctccagtgatcctcctgcctcagcctcccagagtgctggaattatagacgtgaactactacaaaagtttgcatttctgtcaaaacccacataatgctgatgctgctggtctgtgaaccacaatttgagaactactggtctaagacatagtccttacttttaattaatctaataatgtttttggagtgtctttgactgtgttgacactggggaaatgacagatagtaaa

SEQ ID NO: 614510 - DNA, 591 bp, Homo sapiens
actaaaaatacaaaattagctgggtgtggtggcacatgcctgtaatcccagctactcgggaggctgaggtaggagaatcacttgaacccaggaggtggaggttgcagtgaactgagggcagggcctgagaggtkgcagttcttttttttttgaggcagggtcttgctctgtccctaagctgaagtgcagtggcatgatcacagctcactgcagccttgacttcccaggctcaagcgatcctctcacctcagcctcccaagtagctgggaccacaggtgcccatcatcacacctggctaatttttatatgttttgcagagatggggtttcgccatgttgcctaggctggcctcaaactcctgggctccagtgatcctcctgcctcagcctcccagagtgctggaattatagacgtgaactactacaaaagtttgcatttctgtcaaaacccacataatgctgatgctgctggtctgtgaaccacaatttgagaactactggtctaagacatagtccttacttttaattaatctaataatgtttttggagtgtctttgactgtgttgacactggggaaatgacagatagtaaa

SEQ ID NO: 614511 - DNA, 591 bp, Homo sapiens
actaaaaatacaaaattagctgggtgtggtggcacatgcctgtaatcccagctactcgggaggctgaggtaggagaatcacttgaacccaggaggtggaggttgcagtgaactgagggcagggcctgagaggtggcagttcttttttttttgaggcagggtcttgctctgtccctaagctgaagtgcagtggcatgatcacagctcactgcagccttgacttcccaggctcaagcgatcctctcacctcagcctcccaagtagctgggaccacaggtgcccatcatcacacctggctaatttttatatgttttgcagagatggggtttcgccatgttgsctaggctggcctcaaactcctgggctccagtgatcctcctgcctcagcctcccagagtgctggaattatagacgtgaactactacaaaagtttgcatttctgtcaaaacccacataatgctgatgctgctggtctgtgaaccacaatttgagaactactggtctaagacatagtccttacttttaattaatctaataatgtttttggagtgtctttgactgtgttgacactggggaaatgacagatagtaaa

SEQ ID NO: 614512 - DNA, 591 bp, Homo sapiens
actaaaaatacaaaattagctgggtgtggtggcacatgcctgtaatcccagctactcgggaggctgaggtaggagaatcacttgaacccaggaggtggaggttgcagtgaactgagggcagggcctgagaggtggcagttcttttttttttgaggcagggtcttgctctgtccctaagctgaagtgcagtggcatgatcacagctcactgcagccttgacttcccaggctcaagcgatcctctcacctcagcctcccaagtagctgggaccacaggtgcccatcatcacacctggctaatttttatatgttttgcagagatggggtttcgccatgttgcctaggctggcctcaaactcctgggctccagtgatcctcctgcctcagcctcccagagtgctggaattatagacgtgaactactacaaaagtttgcatttctgtcaaaacccacrtaatgctgatgctgctggtctgtgaaccacaatttgagaactactggtctaagacatagtccttacttttaattaatctaataatgtttttggagtgtctttgactgtgttgacactggggaaatgacagatagtaaa

SEQ ID NO: 614513 - DNA, 581 bp, Homo sapiens
catatttcaatacagatcagttacaatcatgcaaagataaaaaacacaaacctttctttaaaaatcattcttataattaaataagctacagttatatcactttttcaaaattaccattggcaattcatatgtaattgaaggtatggcaattaatataaggtgtcctactacttttatttgttttgttctattattttcttcccagaaggcctgacatcatttatccttataaagttcggtcacggacattcaaaaaggtatgyttatccaactgtctcctcagttgagtcatttgcactagtgactacgtataattatgttttcacttaaagttgtatccatatttgtcatttaaaatgtcttcaaaaggatttgattgtgaatttatattaaagcgaaaagttactacatacacagaaaattactttgcaatgtaacatgaaacatagtaaatgtaaaagcaatagaaaagtccaaatcttttcaaataaacagtgaaattaccaaaattaagtggggtgaccaatttatgcacgatgaggcacttaatcctagtattaatatgctggctgactttcaaa

SEQ ID NO: 614514 - DNA, 407 bp, Homo sapiens
gaattctacaacaaatacatccaagagtattatcatcaaatctcaatctggattggaaattaagtgaaaccaaccaatgtctgtgtcatggaggatggtggagtctgaagaacatgcttgtgccatggactggtaacgtgatgagaactgaattataattcaaaattttaaaataaattaayacatagagtaatttttatgtttctaagtttctaaatatcccctaaatgagatacttcagtttctaaatatcccctaaaagagaataatttaggaggccaaaaattacacagtataagacaggaaatttttatcaaaatcaaggaaaaaaaaactagtagtacgttcaactccctaaggtttgtgtgtttttttcaaaaagtcttctttaaaaacagtcattctaa

SEQ ID NO: 614515 - DNA, 524 bp, Homo sapiens
cacacttatctctggttttgttttccaggactttgttggcattaggatgtcatgtgggtatatcagatgaacatgctgaagacaaggtgaaaaaaatgaagctacccaagaagtaagttgaatgactaagcaatattaaataatctgtgtagagatttagtgcaaccaaataactcttgatggacacacagatgccttgcttttactgaagctttaaaattcggattcaargctgggtgcggtggctcacaccttaatcccagcactttgggaggccaaggcaggtggatcacctgaggtcaggagttcaagaccagcctggccaacatggtgaaaccctgtctccattaaaaatacaaaaattagctgggcgtggtggcaagtgcctgtaatcccagctactcgggaggctgagacaggagaatcgcttgaacttgggaggcagaggctgcagtgagtcaagatcgtgccactgcactccagcctgggcaacagagtgagactccatctcaaaaaaaaaaaaa

SEQ ID NO: 614516 - DNA, 524 bp, Homo sapiens
cacacttatctctggttttgttttccaggactttgttggcattaggatgtcatgtgggtatatcagatgaacatgctgaagacaaggtgaaaaaaatgaagctacccaagaagtaagttgaatgactaagcaatattaaataatctgtgtagagatttagtgcaaccaaataactcttgatggacacacagatgccttgcttttactgaagctttaaaattcggattcaaggctgggtgcggtggctcacaccttaatcccagcactttgggaggccaaggcaggtggatcacctgaggtcaggagttcaagaccagcctggccaacatggtgaaaccctrtctccattaaaaatacaaaaattagctgggcgtggtggcaagtgcctgtaatcccagctactcgggaggctgagacaggagaatcgcttgaacttgggaggcagaggctgcagtgagtcaagatcgtgccactgcactccagcctgggcaacagagtgagactccatctcaaaaaaaaaaaaa

SEQ ID NO: 614517 - DNA, 491 bp, Homo sapiens
aaaggaaaaagaaaaaacaattttgttagcaaacttaggaatattttgaaaaatgtaacaaatgtacattaaaactttctaaaggtaaaagtatggacaattgtatagaataatatcaaaactgatccaataagaaagaaaatacgaatagagctataactattaaaggaattgaatcaaacacacatacacacacacacacacacacacacacacacacgtcccaaacaacttttctattgatttctaccaaatacaatctcacataaagaggaagaaacacttcacagtttattttctgatgatatgattttcatatcaaagcccagatcaagacagtatggaaaagggaagttatagtccattgctattatgagcatagatgcaaaaatgmtaaggaacatactggcaaacaactcagtagtgtattaacaaagtataatatgaccaagctgagtttatcctagtagtgaaaagataggttaacatta

SEQ ID NO: 614518 - DNA, 605 bp, Homo sapiens
agaaaattaggagttacatctattaatgcatactagaatgtaatgtaatattttatttgcaaatatcaacrtaattaaaaataaggataactacctgatcattctttcttccctgaaaataatctccaaatttttgtgtaatttatagctcatatttatctcttagattcatttagggaagattacaggcatgttttaaggaaacaatttatcggtaatctgttttttgaggaaatactaactctgagtaaaaatttgactttcctgtttgtttagtattgcagcactgagaactagtttctttctttctttctttttttaaacacagagtcttgctctgttgcccaggctagaatgtagtggcatggtatcggctcactgcatcctctgcttcccgggctcaagcagttctcctgctcagcctcccaagtagctgggattacaggcatatgccaccaggccctgatgatttttgtattttttgtagagatgggatttcaccatgttggccagactggtctcgaattcctgacctcaagtgatttgcctgcctcagcctcccacagtgttgggataacaggtgtgagccaccgcaacccgccaag

SEQ ID NO: 614519 - DNA, 605 bp, Homo sapiens
agaaaattaggagttacatctattaatgcatactagaatgtaatgtaatattttatttgcaaatatcaacgtaattaaaaataaggataactacctgatcattctttcttccctgaaaataatctccaaatttttgtgtaatttatagctcatatttatctcttagattcatttagggaagattacaggcatgttttaaggaaacaatttatcggtaatctgttttttgaggaaatactaactctgagtaaaaatttgactttcctgtttgtttagtattgcagcactgagaackagtttctttctttctttctttttttaaacacagagtcttgctctgttgcccaggctagaatgtagtggcatggtatcggctcactgcatcctctgcttcccgggctcaagcagttctcctgctcagcctcccaagtagctgggattacaggcatatgccaccaggccctgatgatttttgtattttttgtagagatgggatttcaccatgttggccagactggtctcgaattcctgacctcaagtgatttgcctgcctcagcctcccacagtgttgggataacaggtgtgagccaccgcaacccgccaag

SEQ ID NO: 614520 - DNA, 605 bp, Homo sapiens
agaaaattaggagttacatctattaatgcatactagaatgtaatgtaatattttatttgcaaatatcaacgtaattaaaaataaggataactacctgatcattctttcttccctgaaaataatctccaaatttttgtgtaatttatagctcatatttatctcttagattcatttagggaagattacaggcatgttttaaggaaacaatttatcggtaatctgttttttgaggaaatactaactctgagtaaaaatttgactttcctgtttgtttagtattgcagcactgagaactastttctttctttctttctttttttaaacacagagtcttgctctgttgcccaggctagaatgtagtggcatggtatcggctcactgcatcctctgcttcccgggctcaagcagttctcctgctcagcctcccaagtagctgggattacaggcatatgccaccaggccctgatgatttttgtattttttgtagagatgggatttcaccatgttggccagactggtctcgaattcctgacctcaagtgatttgcctgcctcagcctcccacagtgttgggataacaggtgtgagccaccgcaacccgccaag

SEQ ID NO: 614521 - DNA, 605 bp, Homo sapiens
agaaaattaggagttacatctattaatgcatactagaatgtaatgtaatattttatttgcaaatatcaacgtaattaaaaataaggataactacctgatcattctttcttccctgaaaataatctccaaatttttgtgtaatttatagctcatatttatctcttagattcatttagggaagattacaggcatgttttaaggaaacaatttatcggtaatctgttttttgaggaaatactaactctgagtaaaaatttgactttcctgtttgtttagtattgcagcactgagaactagtttctttctttctttctttttttaaacacagagtcttgctctgttgcccaggctagartgtagtggcatggtatcggctcactgcatcctctgcttcccgggctcaagcagttctcctgctcagcctcccaagtagctgggattacaggcatatgccaccaggccctgatgatttttgtattttttgtagagatgggatttcaccatgttggccagactggtctcgaattcctgacctcaagtgatttgcctgcctcagcctcccacagtgttgggataacaggtgtgagccaccgcaacccgccaag

SEQ ID NO: 614522 - DNA, 598 bp, Homo sapiens
aactcatggaattcctttcctcgggagaaaaccagattatttttgtaattaaaatagctgtatagctgtagacagaaaagaaaatraaaaagagaggcagggaaaactttccattattgattttatcatgctgctgttttagaaaaaaaaaagaagccaggatatagaactactagtttgttcctacagtatgctttgtaccctcagttgaaatattgcagcagttagattatttgatggaaatgggtggcttattcagaagtctggttttcaacatggtgtgaattaaggttagtaggtctgtaccatccccaaacccacctgcctggctttaccataacagctgaagttcctgtcaccagcatcctctgtgcaacctgctatcatgatacagacctgggagagtaacttattattgggaatctccttaattaaaaatcaacacttgtcagaggaaggaagaaatcaggactgtgaggccaacttctatagcagaggaatccaagtacaacccaattctgaaatgattcttgtgtggccttgggcaaatagcctgttttcatttccttaaaataaaaacacaaattagagatgatct

SEQ ID NO: 614523 - DNA, 598 bp, Homo sapiens
aactcatggaattcctttcctcgggagaaaaccagattatttttgtaattaaaatagctgtatagctgtagacagaaaagaaaataaaaaagagaggcagggaaaactttccattattgattttatcatgctgctgttttagaaaaaaaaaagaagccaggatatagaactrctagtttgttcctacagtatgctttgtaccctcagttgaaatattgcagcagttagattatttgatggaaatgggtggcttattcagaagtctggttttcaacatggtgtgaattaaggttagtaggtctgtaccatccccaaacccacctgcctggctttaccataacagctgaagttcctgtcaccagcatcctctgtgcaacctgctatcatgatacagacctgggagagtaacttattattgggaatctccttaattaaaaatcaacacttgtcagaggaaggaagaaatcaggactgtgaggccaacttctatagcagaggaatccaagtacaacccaattctgaaatgattcttgtgtggccttgggcaaatagcctgttttcatttccttaaaataaaaacacaaattagagatgatct

SEQ ID NO: 614524 - DNA, 598 bp, Homo sapiens
aactcatggaattcctttcctcgggagaaaaccagattatttttgtaattaaaatagctgtatagctgtagacagaaaagaaaataaaaaagagaggcagggaaaactttccattattgattttatcatgctgctgttttagaaaaaaaaaagaagccaggatatagaactactagtttgttcctacagtatgctttgtaccctcagttgaaatattgcagcagttagattatttgatggaaatgggtggcttattcagaagtctggttttcaacatrgtgtgaattaaggttagtaggtctgtaccatccccaaacccacctgcctggctttaccataacagctgaagttcctgtcaccagcatcctctgtgcaacctgctatcatgatacagacctgggagagtaacttattattgggaatctccttaattaaaaatcaacacttgtcagaggaaggaagaaatcaggactgtgaggccaacttctatagcagaggaatccaagtacaacccaattctgaaatgattcttgtgtggccttgggcaaatagcctgttttcatttccttaaaataaaaacacaaattagagatgatct

SEQ ID NO: 614525 - DNA, 393 bp, Homo sapiens
tgggatgccactgagcaatggagaaaggcacagaaaacgtttaacaaaataatgactaatcactttcccatccagatccaggaagctcaaaggatctcaagagaatcaacccagaaaagtcctttccaaggcacattataatcaaactgtcaaatatcaaagaaaaagaatcctaagagtaatgagagaatagcaccaagtcatatatrcttggatttccatttgactatcagcaagtttctcagcagaaaccttgaaggctagggaaatgagatatattcaatgtgctgaaagaacaactgtcagccaagaatactatgtctagcaaagctatccttcagaaatgaaggaaaaatagagtactccacagataagcaaaagcagaatgaattc

SEQ ID NO: 614526 - DNA, 603 bp, Homo sapiens
tataaatgaagcatgctaattttaattcctcaatccacagtcactataaaaattaacaataaaaaatcctaaattctgcagatgacattgtatgtccatatatgcacgatgtaattaatgcaagttcaacaataataatcaatgcatatgaaatgaatgttaggcctacaaaagaaagtgcagcagacttttgtgggttagtatgaaaacgtcattaatccattgtatgcaaacatgtctctaattttaaatgagttttaaagaagatagtttattaaatcaccctctaggaagctaatggcaattgggtggccattaaacagtaagtttctgattacagaygtgagctatcacacatataagatctgggtaaaaactacctttaatatacacccttaattttcaacaacaacaaaaagacaattacaagacaatcttaagagtccagcaatagccaaaagaaacctttgaccatcaataaatgacaggagcagcttaaaactcttatgtgtgcaaatgcacacacttatctacatgcatgcacacatatacacacacatacaccttcatcataacacctagtaagtcatggttactctgtac

SEQ ID NO: 614527 - DNA, 611 bp, Homo sapiens
tagggaaacctatttgtataggaaaatatagtacatttccattcaatatctacctataatgtgagagattatgccagacgcattgaaattgctgtctttaatcttcatcccaatcttataaattagcttttgttaccactgtttccttgatgaggatrccaagtccacaccaaatgacttgcctgagatatgtattcattacattttggagttgagctttgaacccagctccgtctgtgttccatactcatttcttttccctgtatcagaagatccacccacactggccaactgagaagaaaaatagcagatgggcttaaatatgggtaaatgtatgataatgtacttagtgaagaaacacctaccaaactacttatagtttatagactcttaggtgttaattttaactcatgaaagaaacctgggagtcataggtttctttcttaaatatgggtaaatatatgataatgtacttagtgaagaaacacctaccaaactacttatagtttatagactcttaggtgttaattttaactcatgaaagaaacctgggagtataggctctctcagcatgattattgtctcttccctacagtcaattcaggagggtt

SEQ ID NO: 614528 - DNA, 611 bp, Homo sapiens
tagggaaacctatttgtataggaaaatatagtacatttccattcaatatctacctataatgtgagagattatgccagacgcattgaaattgctgtctttaatcttcatcccaatcttataaattagcttttgttaccactgtttccttgatgaggatgccaagtccacaccaaatgacttgcctragatatgtattcattacattttggagttgagctttgaacccagctccgtctgtgttccatactcatttcttttccctgtatcagaagatccacccacactggccaactgagaagaaaaatagcagatgggcttaaatatgggtaaatgtatgataatgtacttagtgaagaaacacctaccaaactacttatagtttatagactcttaggtgttaattttaactcatgaaagaaacctgggagtcataggtttctttcttaaatatgggtaaatatatgataatgtacttagtgaagaaacacctaccaaactacttatagtttatagactcttaggtgttaattttaactcatgaaagaaacctgggagtataggctctctcagcatgattattgtctcttccctacagtcaattcaggagggtt

SEQ ID NO: 614529 - DNA, 453 bp, Homo sapiens
tctacttggcacataataggtattcagaaaatatttgctgaatgaatcaatctgctttgtatttgaaaaacagataaccggatttattagaattgtgtgtaaactaagtagattcttactgtggcctaggaaaacatttcatgattaagggcttaagcaccttaaagaatactgtggcatatcctttggcctctcagaggccttatgtcaacgtatgggkactgttaacaccacctttctcaacctcggtggtatggcatattggaaggaccatggaatcagagcttaccctgcacttgctgaatatagactcgatatagctactctatatggccaggtgtcctgggataggttccaaacctagtggatcagaaataacatatgaaggcaaggcacagtggctcatgcctgtaatcctagcactttgggaggccaaggtgggcagatcacttg

SEQ ID NO: 614530 - DNA, 611 bp, Homo sapiens
tttgaacttctggcctcaagcgatcctcccacctaggcctccaaaagtgctgggattacagaagttagccactgaacctggccctgaaatgcttttactttctttctttttttttaaatgaaaatactggacatggagatgtggaaagacaccttgctttattacttttgttgttattattatttctacagtagaatttatacatcacaaaattcaccatttttaagcatacatttcagtgtcttttaccatattccaaaactttcgcaaccatcgccactacctaattccagaatattttcataatgccaaaaagcatgcctgtasctgtgggcagacactctccaattccccccttcttgcgctctctgacaaccactaatctaccttctctatatattgatgtacttgttctgggcacttcctctatatggaataacaaagtgtggtattttctatctgcttcttagaatattgttctcaagtttcatcctttctagcctgcgtcagtacttcaactttttatggccagataatattccactatatggttataccacattttgtttattcatcaactcatggtggtttaagatgtttccactttttaa

SEQ ID NO: 614531 - DNA, 611 bp, Homo sapiens
tttgaacttctggcctcaagcgatcctcccacctaggcctccaaaagtgctgggattacagaagttagccactgaacctggccctgaaatgcttttactttctttctttttttttaaatgaaaatactggacatggagatgtggaaagacaccttgctttattacttttgttgttattattatttctacagtagaatttatacatcacaaaattcaccatttttaagcatacatttcagtgtcttttaccatattccaaaactttcgcaaccatcgccactacctaattccagaatattttcataatgccaaaaagcatgcctgtagctrtgggcagacactctccaattccccccttcttgcgctctctgacaaccactaatctaccttctctatatattgatgtacttgttctgggcacttcctctatatggaataacaaagtgtggtattttctatctgcttcttagaatattgttctcaagtttcatcctttctagcctgcgtcagtacttcaactttttatggccagataatattccactatatggttataccacattttgtttattcatcaactcatggtggtttaagatgtttccactttttaa

SEQ ID NO: 614532 - DNA, 602 bp, Homo sapiens
ctcctttttgttgtgtgatttgtggtgatatggactatgtgaaggagacaggtcagttgtcctgctcagtgttctacattctgcagttgtctggtgattacctcctatgaaactcaggctaagcgttttctgcaagaacatggcgttgttcatattctgcaccggcagagtcctgggtgacatgctgtctcctgccagcggctcctgactcctgttctctacaggatggaatcgagaggagcagggctaaggcctcccaatgctgtttgtccatctagctgtggtcttcytaagtactgacaccaattggaggctgaaggactgtggcttctctaaccaaaggagcctagcgggttaacaattgtcaagagcagttggtggttctgaaatacaatcctcagccaaggatccctcctgtgttaaagatggatcagctaaaacaattcaacactgaagatacaaagaatgaggttaggttcattgaaaccagggtaacacctttgaatgagctaaacacaaagatgacactgaccttgagcaggtatagaagctcagagacatgcctgcaaaatgaaatccctgaggaactttgtagctaccca

SEQ ID NO: 614533 - DNA, 602 bp, Homo sapiens
ctcctttttgttgtgtgatttgtggtgatatggactatgtgaaggagacaggtcagttgtcctgctcagtgttctacattctgcagttgtctggtgattacctcctatgaaactcaggctaagcgttttctgcaagaacatggcgttgttcatattctgcaccggcagagtcctgggtgacatgctgtctcctgccagcggctcctgactcctgttctctacaggatggaatcgagaggagcagggctaaggcctcccaatgctgtttgtccatctagctgtggtcttcctaagtactracaccaattggaggctgaaggactgtggcttctctaaccaaaggagcctagcgggttaacaattgtcaagagcagttggtggttctgaaatacaatcctcagccaaggatccctcctgtgttaaagatggatcagctaaaacaattcaacactgaagatacaaagaatgaggttaggttcattgaaaccagggtaacacctttgaatgagctaaacacaaagatgacactgaccttgagcaggtatagaagctcagagacatgcctgcaaaatgaaatccctgaggaactttgtagctaccca

SEQ ID NO: 614534 - DNA, 602 bp, Homo sapiens
ctcctttttgttgtgtgatttgtggtgatatggactatgtgaaggagacaggtcagttgtcctgctcagtgttctacattctgcagttgtctggtgattacctcctatgaaactcaggctaagcgttttctgcaagaacatggcgttgttcatattctgcaccggcagagtcctgggtgacatgctgtctcctgccagcggctcctgactcctgttctctacaggatggaatcgagaggagcagggctaaggcctcccaatgctgtttgtccatctagctgtggtcttcctaagtactgacaccaattggaggctgaaggactgtggcttctctaaccaaaggagcctagcgggttaacaattgtcaagagcagttggtggttctgaaatacaatcctcagccaaggatccctcctgtgttaaagatggatcagctaaaacaattcaacactgaagatacaaagaatgaggttaggttcattgaaaccagggtaacacctttgratgagctaaacacaaagatgacactgaccttgagcaggtatagaagctcagagacatgcctgcaaaatgaaatccctgaggaactttgtagctaccca

SEQ ID NO: 614535 - DNA, 537 bp, Homo sapiens
  misc_feature 31, 32, 33, 34, 35, 36, 37, 38, 39, 40, 41, 42, 43, 44, 45,46, 47, 48, 49, 50, 51, 52, 53, 54, 55, 56, 57, 58, 59,60, 61, 62, 63, 64, 65, 66, 67, 68, 69, 70, 71, 72, 73,74, 75, 76, 77, 78, 79, 80, 81, 82, 83, 84, 85, 86, 87,88: n = A,T,C or G
  misc_feature 89, 90, 91, 92, 93, 94, 95, 96, 97, 98, 99, 100, 101, 102,103, 104, 105, 106, 107, 108, 109, 110, 111, 112, 113, 114,115, 116, 117, 118, 119, 120, 121, 122, 123, 124, 125, 126,127, 128, 129, 130: n = A,T,C or G
tgttaacacagaattaagcatccacaattgnnnnnnnnnnnnnnnnnnnnnnnnnnnnnnnnnnnnnnnnnnnnnnnnnnnnnnnnnnnnnnnnnnnnnnnnnnnnnnnnnnnnnnnnnnnnnnnnnnnngttctcctacacacataacaatccactgtctaatcctcacacagggacttcaggctcctcagcatgagaataggacactgtgagagatcttcttcaggaggcctgaaggctgatcatgatagagattcctgggtttttgtcccagaaactgtgggtaaaattccctattctggtagaycgttatcccaagatcatttgtcccaagtttgtgcaaatggttatgccatatttttccaatcgatttaaagcaaatgcccccaaatggttgctgggagaaaaactgcaatattcagccctgtctcatcaaatactcagattcttcatggtagcgaggattttagacgctgaaattagagtgaaggatgaaatctacaagatctacaaaattgagacaaaatcagagttgt

SEQ ID NO: 614536 - DNA, 595 bp, Homo sapiens
caatatgtaacaggcacttctgtagggctggcatgagtcagtcagttcaagataacctgaaggagttgaataacatctatccagtgagtcctgcaagacttcaggccctttctcatccagcagctccctgctgagcctggaacagtgggaaaaagtaaagaataagccaggggaaatcagaaaccacacagccccagctagatttcatggctaacataaggaagagtttgaaaagaaaaaggacagatccattaatgaggtaacaaattattgtctttatgttgggatagaacagggccaggtagaaaacaatgaaagagaaagacagagagacagagacagagacagagacagagagaaagtgagctagtgaattggccaggtgacatactggtaagggagtaaaaggacactctgagttagtgccctcatgacacacagcaaactgcgatcatgaaaagagtgagctcaatagttttccataaaatatgctcaaaattcgatgcagtggccaygagagtacagcttttgaagtatggtcatcctatggtacgttagtaaatgataaggggaggaagaaatggaaacctaaaca

SEQ ID NO: 614537 - DNA, 629 bp, Homo sapiens
ctaaacatctactgcaatgaaaaccaacagcaatgacagtaggagtaattcagccttcgttgaaaacatgaaatcaaacacactctggtttccctgaatctgttgcctccaggtgttaacacagaattaagcatccacaattgctgaaagttacctggggcatggtgggttttgatcttcttccccttcttttcttccccttctccttcttttcttcgttgatcttcttccccttcttttcttccccttccccttcttttcaatttctgcaataaattcagacatggacagacacattaagctgattcccctacacacataacaatccactgtctaaycctcacacagggacctcaggctcctcagcataagaataggagactgtgagagatatatttcaggaggcctgaaggctggtcatgatagaaattcctcggtttttctcccagaaactgtgggtaaaatgtccctattctagtagatcgttatcccaatatcatttgtcccgagtttgtgcaaacagttatgccatatttttccaatcaatttaaagcaaataccctcaaatgatttctaggagaaaaactgcaatatttagccctgtctcatcaaatactcagattgttcat

SEQ ID NO: 614538 - DNA, 457 bp, Homo sapiens
aaaccagggcccggccggacacggtggctcacgcctataatcccagcactttggcaggtggatcacttgaggtcaagagttcaagaccagcctggccaacgtggtgaaaccctgtctctactaaaaawacaaaaattagccgggcatggtggtgcacgcctgtagtccctgctacttgggacgctgaggcaggcgaacagcttaaaccccggaggcagaggttgcagtgagcccagatcgtgccactgcactccagcctgggcaacagagcaagactgtcaaaaaaaaaaaaaaaaaaaaaaaaagaaaagaaaagaaaaatgagggtcctcactcagctttggaagtaacagaacccttgtattactctaagcagagaagctgaatatataaaccagacccaaatgcagctgctcagcaggcctcaaggtggagacttgcaccctgcttcctgcac

SEQ ID NO: 614539 - DNA, 228 bp, Homo sapiens
tgagtcctgcaagacttcaggctctactgcctccagcagctccctgctgagcctggaaaaggaggaaaaagtaaagaataagccaggggaaatcagacacaacagagccccaactaggtttcatgggtagcataaggaagtggttraaaaagtaaaaggagagatccattaatgaggtaacaaattattgccttcatgttgggacagaacagggccaaatggaaaaga

SEQ ID NO: 614540 - DNA, 228 bp, Homo sapiens
tgagtcctgcaagacttcaggctctactgcctccagcagctccctgctgagcctggaaaaggaggaaaaagtaaagaataagccaggggaaatcagacacaacagagccccaactaggtttcatgggtagcataaggaagtggttgaaaaagtaaaaggakagatccattaatgaggtaacaaattattgccttcatgttgggacagaacagggccaaatggaaaaga

SEQ ID NO: 614541 - DNA, 493 bp, Homo sapiens
aacaaattattgccttcatgttgggacagaacagggccaaatggaaaagaatgaaagagaaagacagatagacacacacacacacacacacacacacacacacacacacacacagagaatgagctcagtgaattgtccaggtgacacactgatgagggagtaacaggacactctgagttagtgccctcaggacacacagcatacagtgatcakgaaaggactgtgctcaataattttccataaaatgtgctcaagtttccatgcagtcgccatgagaatacagtttttgaagtctggtccacctacagtaggttagtaaatgataaggggaggaagaaatggaaacctaaatatctactgcaatgaaaaccaacagcaatgttagtaggaataattcaggctcggttgaaaagatgtaatcgataatgtcagcccgccctgttttccctgaaccaggagtctccagatgtcaacacagaagtagctgttcaca

SEQ ID NO: 614542 - DNA, 493 bp, Homo sapiens
aacaaattattgccttcatgttgggacagaacagggccaaatggaaaagaatgaaagagaaagacagatagacacacacacacacacacacacacacacacacacacacacacagagaatgagctcagtgaattgtccaggtgacacactgatgagggagtaacaggacactctgagttagtgccctcaggacacacagcatacagtgatcaggaaargactgtgctcaataattttccataaaatgtgctcaagtttccatgcagtcgccatgagaatacagtttttgaagtctggtccacctacagtaggttagtaaatgataaggggaggaagaaatggaaacctaaatatctactgcaatgaaaaccaacagcaatgttagtaggaataattcaggctcggttgaaaagatgtaatcgataatgtcagcccgccctgttttccctgaaccaggagtctccagatgtcaacacagaagtagctgttcaca

SEQ ID NO: 614543 - DNA, 493 bp, Homo sapiens
aacaaattattgccttcatgttgggacagaacagggccaaatggaaaagaatgaaagagaaagacagatagacacacacacacacacacacacacacacacacacacacacacagagaatgagctcagtgaattgtccaggtgacacactgatgagggagtaacaggacactctgagttagtgccctcaggacacacagcatacagtgatcaggaaaggactgtgctcaataattttccataaaatgtgctcaagtttccatgcagtcgccatgagaatacagtttttgaagtctggtccacctacagtaggttagtaaatgataaggggaggaagaaatggaaacctaaatatctactgcaatgaaaaccaacagcaatgttagtaggaataattcaggctyggttgaaaagatgtaatcgataatgtcagcccgccctgttttccctgaaccaggagtctccagatgtcaacacagaagtagctgttcaca

SEQ ID NO: 614544 - DNA, 493 bp, Homo sapiens
aacaaattattgccttcatgttgggacagaacagggccaaatggaaaagaatgaaagagaaagacagatagacacacacacacacacacacacacacacacacacacacacacagagaatgagctcagtgaattgtccaggtgacacactgatgagggagtaacaggacactctgagttagtgccctcaggacacacagcatacagtgatcaggaaaggactgtgctcaataattttccataaaatgtgctcaagtttccatgcagtcgccatgagaatacagtttttgaagtctggtccacctacagtaggttagtaaatgataaggggaggaagaaatggaaacctaaatatctactgcaatgaaaaccaacagcaatgttagtaggaataattcaggctcgsttgaaaagatgtaatcgataatgtcagcccgccctgttttccctgaaccaggagtctccagatgtcaacacagaagtagctgttcaca

SEQ ID NO: 614545 - DNA, 576 bp, Homo sapiens
atgtcagcccgccctgttttccctgaaccaggagtctccagatgtcaacacagaagtagctgttcacaattgctcagttacctggggcatggtgggccttggtcttcttcctcttcctggtcctttttaattcctgcaatacattcagacagggacagacaaaataagccaattcacctacacccgtaacagtccactgtctaatccccacacagggatctcaggctcctcagcaagagaacaggacaatgtgagagatatacttcaggaggcctgaaagctggtcatgatattctttggtttgcatctcagaaccaagggtgaaatatccctattctggtagatcgttatcccaaaatcatttatcccaagtttgtgcaaacagttatgccttattgttcccatcagttcaaagacaatgccccagatgatttctaggaggaaaactgcagtattcagccctgtctcatcaaatgcccagctcgttcatggatgcaagaattttagacactgaaattagaatgagggaggaaatctacaaacccttgagtmcaaatcatagttctgtgaattttt

SEQ ID NO: 614546 - DNA, 462 bp, Homo sapiens
aaaccagggcccggccggacacggtggctcacgcctataatcccagcactttggcaggtggatcacttgaggtcaagagttcaagaccagcctggccaacgtggtgaaaccctgtctctactaaaaatacaaaaattagccgggcatggtggtgcacgcctgtagtccctgctacttgggacgctgaggcaggcgaacagcttaaaccccggaggcagaggttgcagtgagcccagatcgtgccactgcactccagcctgggcaacagagcaagactgtcaaaaaaaaaaaaaaaaaaaaaaaaaraaaagaaaagaaaaatgagggtcctcactcagctttggaagtaacagaacccttgtattactctaagcagagaagctgaatatataaaccagacccaaatgcagctgctcagcaggcctcaaggtggagacttgcaccctgcttcctgcactccct

SEQ ID NO: 614547 - DNA, 484 bp, Homo sapiens
ctgttgcctcttggtcctcctttttcacttgatcccaccgatgtcctgcaaataaattcagatggggcctcttacattaagcagttcttccttgcacacagaaacattcctctgtccaatcctaacacagggacatcagtctggtcagtgtgagaacaggagactttgagagaaatattccagtaggcctgaggtcaagtcttgagaaaactggcttgggttctttcatgagccttgggcaaaattaccctgttttggaatgttatcttccctatgtgctctgtcctaggtttgtgtacacaaatgagcaactttttccccaataaattgtaggcaaatagttctaacacctcataggagagatacttcaatattaagctttctctcatcaaatacccagaatttgwtagtttatgagattgtggacacagagatttgatgaaggggtgcaatgtcccagctcttgagtcaaaatgaaacttgg

SEQ ID NO: 614548 - DNA, 637 bp, Homo sapiens
ggtgaggaaacagggacagaaaagacaagcaacttggatggagcccaggagacaggcccacggtctctgctctgtacactgcactgctatctccacacattctcgggtgcgatctttcttcctctttaggaacaagactctgtgccccaggaagcaggacttcactctcaccaagctacattctgcttcttattcttatttttatttatcattattagtattatttttttaacagtcttgccctgtcgcccaggctggagtgcaatggcaaaatcttggctcactgcaacctcagcctcctgggttcaaaggattctcctgcctcagcctcctgagcaggggtgattacagtcacctgccaccatgcccatctactttttgtatttttagtggagatggggtttctccatgttgcccaggctggtctcaaactcctgacctcgtgctctacccgcctcagcctcccaaagggctgggattacaggagtgagccaccatgcacggcccctactccctgctcttgatactgtcacttatagatagcacaggttctattaggagcagactcctcttgaagcccctcagagcrggtactggcgactatcaccaagtttccctcagagtcactagaacagag

SEQ ID NO: 614549 - DNA, 384 bp, Homo sapiens
tcattctgtgcctgtgtcagaaatcaataaatggcagtttaactctagtcccacccccacctgattgcaaacatggaaagttgctaaatattttgggacctctgtcttccaactttaacaaaatgttaaaatacccatttctgttttcctagaagtatggggaggatgacattattttagatggagagagcacttagtttctcagagagaagacaggacttcgttcatcactttcgtgatggtgagcctatagatcttactgtatttgttctgctggttggccaggaagccggccagttgagttacaaaacatttctctttgaggtttctgaactgctgtttcttctctgccagctggggrcgcaatttctcattcatttctag

SEQ ID NO: 614550 - DNA, 384 bp, Homo sapiens
tcattctgtgcctgtgtcagaaatcaataaatggcagtttaactctagtcccacccccacctgattgcaaacatggaaagttgctaaatattttgggacctctgtcttccaactttaacaaaatgttaaaatacccatttctgttttcctagaagtatggggaggatgacattattttagatggagagagcacttagtttctcagagagaagacaggacttcgttcatcactttcgtgatggtgagcctatagatcttactgtatttgttctgctggttggccaggaagccggccagttgagttacaaaacatttctctttgaggtttctgaactgctgtttcttctctgccagctgggggygcaatttctcattcatttctag

SEQ ID NO: 614551 - DNA, 610 bp, Homo sapiens
acatactttcctaatctgacacccttctatttgtctttttttggaatgctttagaaatttagcagttatcttttttatgtattttacatttgttacagctttccttggtggacagatatgagttttctacttgaaaataaacacgtttttctttaaaatatcattaaataagagtgtaattagtgatataaagcaagatgactaaaaagaatctctcattattatgtttgcacagcctgtatasaaattatttgaactagaaaggatttgctaagtaaattatttctatttccctcacttaatagtgaatattatggtgattaggggaaaaaataagctttcttttttcttttgagatggagtctcactctgtcacccaggctggagtgcagtggcgcgatgtcggctcactctgtcacccaggctggagtgcagtggcgccatctcggatcactaagccatctcggcctccccagctcaagcgattctactgcctcagactcccaagtagctggaattacaggtgtccgccaccatgcccagctaatttttgtatttttagtagagatcaccatgttggccaggctggtctcgaactcccgacctcaag

SEQ ID NO: 614552 - DNA, 610 bp, Homo sapiens
acatactttcctaatctgacacccttctatttgtctttttttggaatgctttagaaatttagcagttatcttttttatgtattttacatttgttacagctttccttggtggacagatatgagttttctacttgaaaataaacacgtttttctttaaaatatcattaaataagagtgtaattagtgatataaagcaagatgactaaaaagaatctctcattattatgtttgcacagcctgtatagaaattatttgaactagaaaggatttgctaartaaattatttctatttccctcacttaatagtgaatattatggtgattaggggaaaaaataagctttcttttttcttttgagatggagtctcactctgtcacccaggctggagtgcagtggcgcgatgtcggctcactctgtcacccaggctggagtgcagtggcgccatctcggatcactaagccatctcggcctccccagctcaagcgattctactgcctcagactcccaagtagctggaattacaggtgtccgccaccatgcccagctaatttttgtatttttagtagagatcaccatgttggccaggctggtctcgaactcccgacctcaag

SEQ ID NO: 614553 - DNA, 610 bp, Homo sapiens
acatactttcctaatctgacacccttctatttgtctttttttggaatgctttagaaatttagcagttatcttttttatgtattttacatttgttacagctttccttggtggacagatatgagttttctacttgaaaataaacacgtttttctttaaaatatcattaaataagagtgtaattagtgatataaagcaagatgactaaaaagaatctctcattattatgtttgcacagcctgtatagaaattatttgaactagaaaggatttgctaagtaaattatttctatttccctcacttaatagtgaatattatggtgattaggggaaaaaataagctttcttttttcttttgagatggagtctcactctgtcacccaggctggagtgcagtggcgcgatgtcggctcactctgtcacccaggctggagtgcagtggcgccatctcggatcactaagccatctcggcctccccagctcaagcgattctactgcctcagmctcccaagtagctggaattacaggtgtccgccaccatgcccagctaatttttgtatttttagtagagatcaccatgttggccaggctggtctcgaactcccgacctcaag

SEQ ID NO: 614554 - DNA, 610 bp, Homo sapiens
acatactttcctaatctgacacccttctatttgtctttttttggaatgctttagaaatttagcagttatcttttttatgtattttacatttgttacagctttccttggtggacagatatgagttttctacttgaaaataaacacgtttttctttaaaatatcattaaataagagtgtaattagtgatataaagcaagatgactaaaaagaatctctcattattatgtttgcacagcctgtatagaaattatttgaactagaaaggatttgctaagtaaattatttctatttccctcacttaatagtgaatattatggtgattaggggaaaaaataagctttcttttttcttttgagatggagtctcactctgtcacccaggctggagtgcagtggcgcgatgtcggctcactctgtcacccaggctggagtgcagtggcgccatctcggatcactaagccatctcggcctccccagctcaagcgattctactgcctcagactcccaagtagctggaattacaggtgtccgccaccatgcccagctaatttttgtatttttagtagagatcaccatgtyggccaggctggtctcgaactcccgacctcaag

SEQ ID NO: 614555 - DNA, 621 bp, Homo sapiens
cttcccaccatgcccccaccccagtgtgagctcagaaagcctggattttttgttcctcattgtatcttagtgctataatggtggctgtggaatggcatggctcaygctcagtaaatatttcttgtgatggtgaattaatggcatgagctcatgggaatacattcaaacagaggtgtcaatccgcctatgcatatctgagcttaaaaatatgcacacacataacacatacaggcaacctcaaacatccccagggggacacgaaggaaccccctcatatgcacagcattaagatttgtaagaggtgcacacagatgttgccctatacggcgcctgcatattaatgcccacttctggctgggtgcagtggctcatgcctgtaatcccagcactttgggaggtcaaggcgggtggatcacttgaagtcaggggttcgagaccagcctggccaacgtgatgaaatcccgtctctactaaaaatcgaaaaattagccgggtgtggtggcatgcacctgtaatcccagttactcaggaggctgaggcaggagaatcacttgaacctgggaggcagaggttgaagtgagccgagatcgcaccactgcactccaccctgggcgacagagc

SEQ ID NO: 614556 - DNA, 532 bp, Homo sapiens
taaaaaaacagttaatagacattattttttagagcagttctaggtttacagaaaacttgagtggataatacagagagttctcctaggctcccctgtcctccagcacacaattttccctactagtatgttgtattagtgtggtccattcattacaattgatgaaccactgttgatacgtcattatcaactaaagtccatagtttacattagagktcattctttgagtttcacagattatgggttttggcaattacataatgtcctaaatccccaatacagcgtcatgcgaaagagtttcactgctgaaaattccctgtgcttcaccatttcacgcgtcctcctctcctccacccctgacaaccactcaccattttactacttctatctttttgactttccaagaatgtcctagagttggagtggtacagtatgtgggtttccagactggcttctttctagcattatgtactttaagttccttcatgtcttttcatggcttgataacttgttttttaaaatcagtgaatcagat

SEQ ID NO: 614557 - DNA, 572 bp, Homo sapiens
agctctagttctgaggacagagacctgatggagtcaccatagtgggaatttatgacctggcatccagttcagatacctggagcttcttgactgaggggagattggatcccttgaggaagagtgaagccttcaatgctgccacaagtgtatgctgtaaatcttccttcaggccttccccagaaggccctgaagccatttatgtgggtgactgargaaagggaaatactcagagcttctgtggcttgttggatgctggctctgaagaatgctaaactgagggccctgcggtggccatgaaaatgcactacttgcatctccagctgcaggaggcctaacgaatcagcagcctcagctgctaccctccaaatggaggacttgatgacatttcccctggatctgcactagcccatgaggaggaaagcctcctatcaagtcctcccaacagaacacccatgatgactcatgaggatgttgaaggtgttttcctgtggcaactgtgagtgtctttcttcaaagtctgttttgttcctgcacattaactgatttatataaaataagagaataaatgccta

SEQ ID NO: 614558 - DNA, 572 bp, Homo sapiens
agctctagttctgaggacagagacctgatggagtcaccatagtgggaatttatgacctggcatccagttcagatacctggagcttcttgactgaggggagattggatcccttgaggaagagtgaagccttcaatgctgccacaagtgtatgctgtaaatcttccttcaggccttccccagaaggccctgaagccatttatgtgggtgactgaggaaagggaaatactcagagcttctgtggcttgttggatgctggctctgaagaatgctaaactgagggccctgcggtggccatgaaaatgcactacttgcatctccagctgcaggaggcctaacgaatcagcagcctcagctgctaccctccaaatggaggacttgatgacatttcccctggatctgcactagcccrtgaggaggaaagcctcctatcaagtcctcccaacagaacacccatgatgactcatgaggatgttgaaggtgttttcctgtggcaactgtgagtgtctttcttcaaagtctgttttgttcctgcacattaactgatttatataaaataagagaataaatgccta

SEQ ID NO: 614559 - DNA, 531 bp, Homo sapiens
ttttatatttatggtaagaaacaagcaacaattctttattacatcatgccaaagcagaaatggattctgaaacaatttcttccctcctcaccttgtattcccaatggcagaaattctattttagtgtgatgcccactggccaccccctgctgataactagtggacacagttcagtttgatgatgggcagatggacaagcctgctgttgtccktggccataggctgtttctgcctgttctcttagatgcatcaaacatgcatttctttctctcctcctttttcagaattgtacatacttgcttctaaaactgaacagaatgatatatttgcaatataagatgcataagcaggctctagaagacagataagcaaaaatactttgagagatacatgttatctaacacaaaagaaatggactcagtagaaaagaagccataacacattgctattattcaactgatgagggatagattttccctctttctcttccatcataatgagattgattagaagagaaataaagttgcaatg

SEQ ID NO: 614560 - DNA, 537 bp, Homo sapiens
cctattttggggtagtgtctcccaatccctgtcactmtaaaccaggggttttaggaaatctgaagatacagttcagggaatcctgaactttgatgggaaaaaaaaggatttttttgacatcctgactaaaacttaacatgtccttggattatgagcatgggcaaacaaataaataaataccactgtaatattagtagtgcctatgattttgtctcaaatgggaattatggatattttataatatattacagctgttgcagaggttgaaatatattttagattcatgttattttgaaattacaataatttttagatcacgagctatatcaaatgtgattgcagtctttttgtcaatagatgctcttgtgatgtagctgggaaactattgggtaactaactctgtgcctagtagttgttcagcagcaaaatggtaatgttgcatgtctttacaatgatgacccagaaatccctatctataattgactgttgattaacgacacaaagggagaagcatcattttcattctccgttagtatt

SEQ ID NO: 614561 - DNA, 469 bp, Homo sapiens
tgataccagccatttagcccatccctaaaaaactgagggttctgggaatttaattcagtcaatgcagactttagactattaactgaagaaaaatgggtttcttttacagattttttaagactaagaaacaaaaagaagttagaaggcgccaaatcaggactgtaaggtggatgtctaatgacttcccattgaaactcttgcaaaattgcccttgtttyttaagaggaatgagcaggtgcatttttatagtggagaaagactatggtgaagcttacctgggtgttttgtttgtttgtttgtttttgctaaagctttggcttgctttctcaaaaacattctcatgataagtagatgttattgttctttggtccaacaaagactcaacaagcaaaatgtcttgagcatccccaaaaactgttgccatgatgttctctcttgaccaggacacttttgctttgactggaccact

SEQ ID NO: 614562 - DNA, 510 bp, Homo sapiens
tcatttttctcccatcactgcattcagacattctgtcaggtctcccctcctctagccttgacagtgtctctttcagatttcttttcatgataacaattttgtcatccagtattaaaaagttcagtcttgtctaactcaaagcattaatctaatacttgatttggagcgtcccctcctrtcagctcaggaatgactcagtgtgaggggaagagaagctgtgagaagacataggggaggactctgttctggttttttatactcctttcttctctccctatcccaccctcaaccttgccctttccatttctgaatcctgggagatggcagggatcaaaaaaggagctaatttataactctcatttgactatcagatgccctctgtcatagcagccttccaaatattggatctcattaagtacatttgcagattcttgggagactctcaacaagttcctatgccctacatgtttcctacaatagacaatgagctctttatctgaccgctcagaa

SEQ ID NO: 614563 - DNA, 586 bp, Homo sapiens
ctctgtcacctcttgaacactttgccacttagaaatttcttctgccagctaccctaaattatctctctcaagttcaaagttccacagatctctagggcatgggcaaaatgcagccagtctctttgctaaagcatagaaagaatggcgtttacttcttcttcacatggtggcaaggaaggagaagtgccaagcaaaaggggaaaaagccccttataaaaccatcagatctcgtgagaactctctcactatcatgagaagagcatgcagggaccacccccttgttctaattacctcccatgatgtccctcctgcmacatgtggggattacaatttgggttgcaattcaatatgagatttgggtggggacacagagccaggccatatcaactgtccatagaaatacacaggcttccctatttctttgggccttcatttctgaaggttctcatgtcacgttaagacttattgaaatcatgagtgaactcccattcacaattgcttcaaagagaataaaatacctaggaatacaacttacaaaggatgtgaaggacctcttcaaggagaactacaaaccactgctcaatga

SEQ ID NO: 614564 - DNA, 618 bp, Homo sapiens
atacatataattaaacgatatttgcttgtttttatattctatatttatgaatttagttctacttagaaaatatccagataaccaaagactattttaatgaaatyaattagtttaacaatagtctggggtcttgaagtcagccagagattttggaaattgtttgaggttgacattaaagagaaacacaatcctttttgatcttaaaacagttcatcagacaaatatgatatttaaaatttgatataggtagtataagtaaagttactagatctatatgatttatggtattatctgaagctcacaagagcaaatctttccaaagatggttgaatgataattttataatttttaacagttaatggaagtaaaaatcagtataggaaatctagcaaatcagaattaattaagtttctcatgagaaaataatatgccaacatttttcacactgtgatgaaatcaggggaagacatgtagctatttttaaagccaaattaccaaaccaatttaatttgtccagtgattcgccttgatagaaatataacctaaacttatttgtttacaattttttctgtatttaccaaatattaaaactttccaatttttgtttaaaagtactgt

SEQ ID NO: 614565 - DNA, 571 bp, Homo sapiens
acaggaactgagaggtggaccccagaaatccagcaggcagacagaaaagaggcagacaagccaattgcctgggattgatgagaaacccacaaaggcaccctacagagtcagctattgtatttctgccacccagagggccctgcgggtagattacaactgtagctgtcacaaaagctgtgctgcatttccccaactcttaccctcctccccacagatatcagaaacaatgactagcaaattggggggatggagctagaaaaagaaaagctaatttaactcctacttacataggctggggatagaagaaatttaaatttgagttttgagtttgaaattatattcaatggagatatatcttgtgctttctaacttgcttttaatggtgttgtgtggttctcagtttgttttctcagctttgcgttcttccctttcatcttcaatactgttttacacctcatttctttaaaaattgattttatgttctcattaacttttatatcatgaagcactggctggaaattatttctttgtgaagttctgcttacttycagcatggtttttcatctgtatt

SEQ ID NO: 614566 - DNA, 559 bp, Homo sapiens
agaaaatatttttgtagatatagacacaataattataaaatgctcatgaaatggtaaaggaactataatagctagaacagttttgaaaaaaaaaaagtaggaggaatcagtctacctgattataaaacctaatttatagctatagtaattaggatatgttattagaggaggtatagacacatagatcaatggaatagaatgaagatcccagaatagactcacacaaatatgcccaattgctaaccaaggtgcaaaaaaaaaaattaagatatacagccttttcaacaaatgaacctggaaaaattggatattgataggtgaaaactatagaacttgacctcaacttcataccttatataaaaatttacttaaaatgaaatatgaactcaaatataaaacaaaaaattataaaaccattgcggaaaaaaaamcatgagaaactcttaattttctagggctaggctaggagctgttagacttgacaccaaagaacaattcatgaaaggaaaattgataaattggacatcatcaaaattaaaaaccgaacaatcttgttcaa

SEQ ID NO: 614567 - DNA, 568 bp, Homo sapiens
atcactgaaatccctgaaagggakggggagaaagcaaacaacttgaaaaacttatttcaggatattgtccaagaaaacttcccaaaccttgctagagaggacaatagtgaaattcagaagatagagaactcctacaaaattctatacaagaagatcagccccaagacatacaatcatcagattttccaaggttgaaatgaaagagtgttaaaggtagctagagagaacaggcaggtgacctacaaagggaactccaatcaggctaacagctgacctctcagctgaaaccctacaagccagaagagattagtgatctatattcaacattcttaaattaaaaaaatcttcaaccaagaatttcatattcagccaaaaaactttttaaaggagaaataagatccttttcagattagtaaatgttgagggagtttgttaccaccagacctgccttacaggagatcttgaaagaagcactatatatagaaaggaaaaactgctaccagctaatacaaaaacacacttaaatacacagaccagtgatactataaagcaaccacacaaacaagcc

SEQ ID NO: 614568 - DNA, 593 bp, Homo sapiens
ggagggggagaaagcaaacaacttgaaaaacttatttcaggatattgtccaagaaaacttcccaaaccttgctagagaggacaayagtgaaattcagaagatagagaactcctacaaaattctatacaagaagatcagccccaagacatacaatcatcagattttccaaggttgaaatgaaagagtgttaaaggtagctagagagaacaggcaggtgacctacaaagggaactccaatcaggctaacagctgacctctcagctgaaaccctacaagccagaagagattagtgatctatattcaacattcttaaattaaaaaaatcttcaaccaagaatttcatattcagccaaaaaactttttaaaggagaaataagatccttttcagattagtaaatgttgagggagtttgttaccaccagacctgccttacaggagatcttgaaagaagcactatatatagaaaggaaaaactgctaccagctaatacaaaaacacacttaaatacacagaccagtgatactataaagcaaccacacaaacaagccagaataataaccagctaataacacaatgacaggatcaaatccaca

SEQ ID NO: 614569 - DNA, 550 bp, Homo sapiens
cacaagacttgcctagaatgtatgattttacttgaagcttgtgccaagatcgcagaaaaattcactgataattgattttatatatatattatatattacatacatgtatcctacatacctacacatatataggtacacaaacaatttcaaaatattaggtagataggtaaacccatttaatttttgttattgaaccaaattaggtatgctggagctggagcactgcagaaaggaagaaagtacttgccactgaagatactgtggaaatagggagaagaaagccacctggatttcttttttcagtaatgtagaagtttattcaatgatgaccaagcccacaamgtcaaatacatcacttgtcaatttgattatattcaaatatagaacaaaaattagttcaaagaaggtttctcccctgtacttgcaaaagtatctttttgcaataactcaagagggagaattagatttgtgttgctgttgttaaaatgaggaattcagtccctaaaatagggaagatcagtaattgtattctatccagacagtttaatga

SEQ ID NO: 614570 - DNA, 591 bp, Homo sapiens
tacaaacactatgtatcaataaaaaacaataagtaaataatatyatcagctcagatatcccaaatctcatcatctaagtcatataaattaggtataaatcacgctttaggtatgttccatcctaaagcataattctcctccatctgtgtacccataacactgaaaaacaaagtgtaggattgaatacaacaatatttgtataaactttctattgcttttgcaacaaattaccaaaaatttatagacttaaaaaaacacaaatttatcttatattcctggagatcagaattctgagatctgtttcactgtgctaaagtcaaaatacttgaaacaggcatgggataatagttatgggcatttctattccaattggagaaaaaaaaaaaaaagcagaagaaataaaggggtcagcaaccccaagcaaatttgaaatccaactgagcaaactctattagacttcaaggttatctttttgggtctcaagcctccatcctctgaacgcttcttttttttcataaatggtagtatgtgcttgcagctgaataactttatcagcctgtttcctacctgtaaaattttggaattacaaca

SEQ ID NO: 614571 - DNA, 559 bp, Homo sapiens
tgtacaaatgattttgtcacccaggttgtgagcatagtacccagtattttttcaatcctcacgctctcctctcaccctccgccctcaartaggtcctggtgtcagttgttcccctctttgtgtccatgtgtactcaatgacattatgtgcttacaaaagtggaagcatattgcccaaaatgtgcaggatatgtctgcatatgtagaaattataattccttgttaaggaaagatagttacacataagtgctattcctagaacccactactatacccatatgctcttttatcagtgcagttttattaaccaagtatgtactatttttaaacttgtctgagacataatgaacaaagcagaggtcttctaattccatctgagtccaaagataacccttcaaaatttctttggcataagatgattccaggggaaaaagagaatattctgatcactgaaagaataaaagtccatcaaattgagagcaatttgattcctaagatgattgagtgtctgaacatttatcatcagttgtggtatgctatttattaaagaaagaatcttg

SEQ ID NO: 614572 - DNA, 596 bp, Homo sapiens
tcttctaattccatctgagtccaaagataacccttcaaaatttctttggcataagatgattccaggggaaaaagagaatattctgatcactgaaagaataaaagtccatcaaattgagagcaatttgattcctaagatgattgagtgtctgaacatttatcatcagttrtggtatgctatttattaaagaaagaatcttggagggtttgcacatcatcatgctaacttggaaaaatttactaagtcaaacgcttgacccaatgcagttgggcttctttcatcttctttcgtcttcttcagtatcgtgtgggaaataatacttaaaatgggaagacctgaagacaaaattttatatcttattaaatataagcctccctattaaatatggagcctactgttatgaactgacataaaggtaaaataaagttagggctcaagatctcacagctcaccctttcatagaatgggaacctacagtgtggatgagacaaccttggactaaaagttggatctggattctaatgtctggacctggctctggcattatctgtgacattatccaggccattgtcctccggtttctttacaaataatac

SEQ ID NO: 614573 - DNA, 526 bp, Homo sapiens
ggtttgaaaacacattctttagcttgtgcattattacctcttactcgaattctttttttgctttatagaaaaacctcatttcaataaaattatgacagacaattttgcctctatccaggaagaaaactggactaccttgaatttcataaagattttatatattctatatgtgcagttggcatttttatgtcctttttagcagtttagaaaaagctccaccaatattctcaagtccacctagctagtaagtgaaagaacagaaacttggactcaggtwttctgagcaagtccatccaccaagctttcctcctttactcaaaaaataataacgaccactacatttgcataacacttggaaataccgacagcatttcacttgcatgatctcatttgatcttaaaagtgtagtaagtgtgcagtaagcaggataaggtattgaggctccattttacagatgtggaaaccaagaccctaggcaatgatagtgggagggttaaatgatttacctaagatcaaacaactttca

SEQ ID NO: 614574 - DNA, 596 bp, Homo sapiens
tcttctaattccatctgagtccaaagataacccttcaaaatttctttggcataagatgattccaggggaaaaagagaatattctgatcactgaaagaataaaagtccatcaaattgagagcaatttgattcctaagatgattgagtgtctgaacatttatcatcagttgtggtatgctatttattaaagaaagaatcttggagggtttgcacatcatcatgctaacttggaaaaatttactaagtcaaacgcttgacccaatgcagttgggcttctttcatcttctttcrtcttcttcagtatcgtgtgggaaataatacttaaaatgggaagacctgaagacaaaattttatatcttattaaatataagcctccctattaaatatggagcctactgttatgaactgacataaaggtaaaataaagttagggctcaagatctcacagctcaccctttcatagaatgggaacctacagtgtggatgagacaaccttggactaaaagttggatctggattctaatgtctggacctggctctggcattatctgtgacattatccaggccattgtcctccggtttctttacaaataatac

SEQ ID NO: 614575 - DNA, 530 bp, Homo sapiens
gtctatttctatgatgagataaaagggcaaagtgtgtgagcagtaattatgcacagaaaatgcttattaggtgccctcaaatggcagaccactatccagtcttactcttcctggtcttactctaacaaattgtataggattctaattgcaagtgagtattgctcagttcatcttaacaatatatcataagcctgagctccaccaataggttcaagctgagagatgtcttgtggccccamatgtggtttcctttgaaaaccactgagctatagctgcccctgaaacacctctatgtttgcttcatcttagtgatagcttttctttattagtttattcagcaaccatgtagttgggtccttgatttcccatccaacacatctttttgtccccttctttagctcctgacaccttatttcttattcccaaactgagtatcatttccccatataaagggctctacgtaattattagtccccagtccaacccacaaaagcctaagtaatccatggtatacctaaaagttgtatttc

SEQ ID NO: 614576 - DNA, 596 bp, Homo sapiens
tcttctaattccatctgagtccaaagataacccttcaaaatttctttggcataagatgattccaggggaaaaagagaatattctgatcactgaaagaataaaagtccatcaaattgagagcaatttgattcctaagatgattgagtgtctgaacatttatcatcagttgtggtatgctatttattaaagaaagaatcttggagggtttgcacatcatcatgctaacttggaaaaatttactaagtcaaacgcttgacccaatgcagttgggcttctttcatcttctttcgtcttcttcagtatcgtgtgggaaataatacttaaaatgggaagacctgaagacaaaattttatatcttattaaatataagcctccctattaaatatggagcctactgttatgaactgacataaaggtaaaataaagttagggctcaagatctcacagctcaccctttcatagaatgggaacctacagtgtggatgagacaaccttggactaaragttggatctggattctaatgtctggacctggctctggcattatctgtgacattatccaggccattgtcctccggtttctttacaaataatac

SEQ ID NO: 614577 - DNA, 599 bp, Homo sapiens
attagctagattattgttgatgtttttctcctactgctcttctcctcctgtttctttctatcatcatcatcatcatcatcatcatcatcatcgtcatgtgtcaggtattctaccagacgttatccaatcagaaggtgatatttttctgttcaaactattataattattgtaaacatgcttactggatgctattaatagtttccatgattagtcaggacctttggtttgcaagcgaaagaaagtcagttcaaacyatcttcattcaaaaagaaagatttctttggcagttgcaaccaaataataaagaagtgagactgatctcaaaatattgtggattcacagactcaaagtttttcaggacattccttactaccactttcatctctgcttcatgtagagcataggtgccattattttctcctgcagacagctttctctgtgaggcagaaatcatgtattgacagttctgagactgaatcctatgagatccaaccaagataacaaggtatcttaccatccagctgcttctggaaaagcatatggaaaagacattaattgatgtcctgtgtcacatatccatccttgagccaattactgca

SEQ ID NO: 614578 - DNA, 623 bp, Homo sapiens
tttcattgtgcatgcatcatacatacacaaaaacatagttcctcttttggattataattctctaaactttggaggcacaatatagtagcttgatactcttcagtctctgaaaaagagtaacagttgcagtaattaatataaagactaaggagtaaatcagaaagaatccaaagggttcttgtgtttatcttgaacttaagttacaggttaaatgttttcccagtcagcaaactggagattgtgaggaaagggggtgggaggaagagctagatgacatgagattctttatagctcatggaagataagatataaatttctagattttcccctattaactccataaaaatataaggttctctaaacagctggaagttyctgatctaaattccattgcatgctttgatccctaacgatgtatcttcgcaaagttcctgcagcgctgggagaccagcaaggcacagatgtctcctaaaaagccgccatcgagtgcaggagtttgaagaggcgaagcgacggcgttgctttcacctgctctgctcgagagacttgctggccgcacaccggcagcacgttcctgcctagccttgcacacccaggctttgaccctcccaagcagacaggag

SEQ ID NO: 614579 - DNA, 494 bp, Homo sapiens
tgaattagatcctacagcagaaaaatagcattaatataaaaactggtgaagtataaattaagtcaagtttaattaatgagaatggtttaatattgsttttcaagttttaataaatatggtaaatgaaggatgttaacattagggaagactgcataagaaatatgtagacaacctgtgtgttaactttgtagttcttttctgtaaatctaaaattatttcaaaataaaatggttattaaaggaaggatgtaaagagagaggggtataaacagagacacttcaaaaagaaattactcatgatccaacaatgccacttctgggtatttacccccagagatttgaaatcagtttactgaagggatgtctgcactcccatgtcattgcagccctatttacaatagccaaattatggaatcaaactaagggcccagcaacaggtaaacggataaagaaaatgtggaatatgtaaacaatggaataccatccagactttga

SEQ ID NO: 614580 - DNA, 494 bp, Homo sapiens
tgaattagatcctacagcagaaaaatagcattaatataaaaactggtgaagtataaattaagtcaagtttaattaatgagaatggtttaatattgcttttcaagttttaataaatatggtaaatgaaggatgttaacattagggaagactgcataagaaatatgtagacaacctgtgtgttaactttgtagttctttyctgtaaatctaaaattatttcaaaataaaatggttattaaaggaaggatgtaaagagagaggggtataaacagagacacttcaaaaagaaattactcatgatccaacaatgccacttctgggtatttacccccagagatttgaaatcagtttactgaagggatgtctgcactcccatgtcattgcagccctatttacaatagccaaattatggaatcaaactaagggcccagcaacaggtaaacggataaagaaaatgtggaatatgtaaacaatggaataccatccagactttga

SEQ ID NO: 614581 - DNA, 494 bp, Homo sapiens
tgaattagatcctacagcagaaaaatagcattaatataaaaactggtgaagtataaattaagtcaagtttaattaatgagaatggtttaatattgcttttcaagttttaataaatatggtaaatgaaggatgttaacattagggaagactgcataagaaatatgtagacaacctgtgtgttaactttgtagttcttttctgtaaatctaaaattatttcaaaataaaatggttattaaargaaggatgtaaagagagaggggtataaacagagacacttcaaaaagaaattactcatgatccaacaatgccacttctgggtatttacccccagagatttgaaatcagtttactgaagggatgtctgcactcccatgtcattgcagccctatttacaatagccaaattatggaatcaaactaagggcccagcaacaggtaaacggataaagaaaatgtggaatatgtaaacaatggaataccatccagactttga

SEQ ID NO: 614582 - DNA, 608 bp, Homo sapiens
tttcagtcatcaagaaaatgtaggaggtggtcaaggagttggtcaaaccccaccaaaaccaagatgacaacaaaaatgacctctggtcakcctcattgatcattattcactgattataagacattagcaatctaaaagacactcccaccagtgccctggcagtttacaaatgccatggcaacatcaggaagttactctatatggtctaaaaaggagaggaatcctcagttccagaaattgcttacccctttcccagaaaactcatgaataatccaatccttgcttagcatataatcaagaaataacgataagtatattcagtcgagcagcccatgccactgctctgcctatggagtagccattcttttattcctttactttcttaattaacttgctgtcacttaaatatatatcctgtagatgatctccaatctccaagtattctgagaagctttacagcaaaattcgtccttgagagaagcttgtgatttttacttaaaagcactggtattagttgctctctagaaatgctagaaaaaaaaaaaaaaaagagctatgagccaaagtaggaagggaagaatcctaaaaatgccagaaaactcaggcca

SEQ ID NO: 614583 - DNA, 552 bp, Homo sapiens
gggctgatgagataaacgttgttgctactactgttgctgctgccattgctaccaccaaatactaaatatgaattgaattttatggcaactgtatctactgccagcaccttcatgaaacctgtctttcaaccaatgccaccctcaaagccaggtatttccaccaatatctgcaacagcaaaataaaagctcctcttcacagccttacccctagaatgaaatcttatatatatgtgcctcatcatcagagccatggtcacacttttagctatgagtaggactgatatttgagagtaaaatttgcattcagacatctatgtggaagagttgggatgcataatgtagtgtttaagcaaataaaggcaaatgatgatagatatccattaccttctagacagccctatatcatcacrtaagtgttttagatgcaacaagaatagcaataagatatcccatgtaacatagtgcagttattcttcaagcattaagaatcttattttcaaggagtggaaagtccaaagtataaatattactgaatctagttctaaatccag

SEQ ID NO: 614584 - DNA, 510 bp, Homo sapiens
agaaaaaaaaaaaaaaaagagctatragccaaagtaggaagggaagaatcctaaaaatgccagaaaactcaggccaagggtatttgttttacagcctcttgctaactatttctggagaagaagctgctgtccataaaagctccccaaagatgctgtccattatctgcctatagagttggaattccagaaattctaaaccaatgttcaaagcaacgaaaaacaatttgatctaatttcctgaggtttagtgacagaatatccaaagaaatagagcaaaagtgcaatatggtgcaagcatctattcgatttagcccatgtaaaaaatgtctctttcaaacatgtatacatatatatgtctcagtcacacacacacaccccccacatgtacacacacacacacagagatggagagaaatgttgctagaatacatgtctgtagtacctctgagcttctttcccttgttatataatctccctatgccctgcctcccccacacaaccaaatatctt

SEQ ID NO: 614585 - DNA, 510 bp, Homo sapiens
agaaaaaaaaaaaaaaaagagctatgagccaaagtaggaagggaagaatcctaaaaatgccagaaaactcaggccaagggtatttgttttacagyctcttgctaactatttctggagaagaagctgctgtccataaaagctccccaaagatgctgtccattatctgcctatagagttggaattccagaaattctaaaccaatgttcaaagcaacgaaaaacaatttgatctaatttcctgaggtttagtgacagaatatccaaagaaatagagcaaaagtgcaatatggtgcaagcatctattcgatttagcccatgtaaaaaatgtctctttcaaacatgtatacatatatatgtctcagtcacacacacacaccccccacatgtacacacacacacacagagatggagagaaatgttgctagaatacatgtctgtagtacctctgagcttctttcccttgttatataatctccctatgccctgcctcccccacacaaccaaatatctt

SEQ ID NO: 614586 - DNA, 482 bp, Homo sapiens
ggaagaatcctaaaaatgccagaaaactcaggccaagggtatttgttttacagcctcttgctaactatttctggagaagaagctgctgtccataaaagctccccaaagatgctgtccattatctgcctatagagttggaattccagaaattctaaaccaatgttcaaagcarcgaaaaacaatttgatctaatttcctgaggtttagtgacagaatatccaaagaaatagagcaaaagtgcaatatggtgcaagcatctattcgatttagcccatgtaaaaaatgtctctttcaaacatgtatacatatatatgtctcagtcacacacacacaccccccacatgtacacacacacacacagagatggagagaaatgttgctagaatacatgtctgtagtacctctgagcttctttcccttgttatataatctccctatgccctgcctcccccacacaaccaaatatctttttagttggatga

SEQ ID NO: 614587 - DNA, 482 bp, Homo sapiens
ggaagaatcctaaaaatgccagaaaactcaggccaagggtatttgttttacagcctcttgctaactatttctggagaagaagctgctgtccataaaagctccccaaagatgctgtccattatctgcctatagagttggaattccagaaattctaaaccaatgttcaaagcaacgaaaaacaatttgatctaatttcctgaggtttagtgacagaatatccaaagaaatagagcaaaagtgcaatatggtgcaagcatctattcgatttagcccatgtaaaaaatgtctctttcaaacatgtatacatatatatgtctcagtcacacacacacaccccccacatgtacacacacacacacagagayggagagaaatgttgctagaatacatgtctgtagtacctctgagcttctttcccttgttatataatctccctatgccctgcctcccccacacaaccaaatatctttttagttggatga

SEQ ID NO: 614588 - DNA, 482 bp, Homo sapiens
ggaagaatcctaaaaatgccagaaaactcaggccaagggtatttgttttacagcctcttgctaactatttctggagaagaagctgctgtccataaaagctccccaaagatgctgtccattatctgcctatagagttggaattccagaaattctaaaccaatgttcaaagcaacgaaaaacaatttgatctaatttcctgaggtttagtgacagaatatccaaagaaatagagcaaaagtgcaatatggtgcaagcatctattcgatttagcccatgtaaaaaatgtctctttcaaacatgtatacatatatatgtctcagtcacacacacacaccccccacatgtacacacacacacacagagatggagagaaatgttgctagaatacatgtctgtagtacctctgagcttctttcccttgttatataatctccctatgccctgcctccccsacacaaccaaatatctttttagttggatga

SEQ ID NO: 614589 - DNA, 446 bp, Homo sapiens
gttttccctaagtgatgggagtttttctaagaaaacacccagaagtaggtaaacaacaaccaaaaaaaaaaaaaaaaaaaaaaaacagacacacacacagaaaaaaacacctctctctgtagcagtcagatggatttctgcttcttcacgtctcttcaagttgctaagcaatatactatctgattaatatatttcaaaattctttgaaagaaaatactcaattaggcagaactcattagagaaacttcctaaaaggcakagttctagatccaggccacctccaagatcaccaaattcccaggtgtccagctagctgctgcgggcagtaaataagaaccattagtggctactttgctaagaagggactatgaaacacagacacctagagtgacatggagttcaaaacagtttaaagatgggctctgttttcagttggtctgaattaa

SEQ ID NO: 614590 - DNA, 617 bp, Homo sapiens
acaaagatgtccttcagcgggtaagtggataaactgtggtacatccagacaatggaacattattcagcactaaaaagaaattagctatgaagccataagaagacatggagaaaacttaaacacatattaataagtgaaagaagccagtctgaaaaggctacctactgtatgattccaaatgtatgatagtctggaaaaggctaggctatgcagatgataaaaagatgatcagtggagggatgaatagttggagcacagaagatttttagggcagtaaaactattctctatgatactctaatggtagaaacatgtcattatacatttgtcaaaattcacaggatgtacagcacctataagtgagccgttaatgtaaactatggactgtgggtgatgatgatgtgtcaatgcatgttcatcaattgtaccaagtgtaccactctggtggggatgctgataatgggggaggctgtgcatgtgtgggtgcagagaggataygggatatctctgtaccttttgctcaattttgctgtgaacctaaaacttctctaacacataaagtctactataaaaagctcaaaggccaccagtagcccttacccacataatagctgagta

SEQ ID NO: 614591 - DNA, 606 bp, Homo sapiens
tactgtatacgagaactacattaggcatagtacctattcttaaaatccatcaaggggtgcaggactcaaaagtgggtaaaatgcatagcaataacagkgctatatttgcaaaatcagtgtagaacaggacaaacaggatgactgacacttgccagggtaagttagaatgtcacctgtgagcaaggcgtattacaaggtaaaaagcacagtattatcccattttaatttcttggattgtatggctattttcctttttctcagattctcaccaccattattgttttaatttcatttgccactgttgagggtcaaatgagcttacctttggaatgagcttacattccatttgttgtaaatgaaggatttgcaagtggccttattccatattttcttaaggatttaaggtgtcactagctttcaacttgctctactaaagaattacttgccaggatcctacctgatgccaattttcattcaatctccataaatgtttattaataaaatagtgcacaaatccctctttaagtaccgaacatgccaaaggatgtatttgtttttcggcttctttatgcccatatttaaacatattacgtaaatatgtccaca

SEQ ID NO: 614592 - DNA, 624 bp, Homo sapiens
ttttgtggggcttccaaagtaagaagcgagtggtgttttggatgtgtgtttgtgtgargttgcatgtgagttcatgagtggggccaggacagagaacactgagggtcattcaaacccatgagacagacaactctgacccaggatccttcgccagcagcacagtgattcatcctctcaggcacaagtacatcaagtcctctgttttctcttagttcacatttgtcctcttcaaaccaatgagtcataagttggaaatatgtatgaaataagctagcataatatgtcactgaattatttctggtgattcaatatacacatcctaggacaccaggcatctgaaaggcaaatttttaaattcaagagatttatacaaagcagatacagttgattgtgtaagaaagaagaaaatcaggtgcaagaagaaacagatcctggtaaaacgattaactttcagtaaggggggtaaaatatttcttcctgctctcaaaaggataattttcttcagaggaaattgcataaattcttggtcacttgaattagcagagaactattcttgccaaagtttagtgctgggaaacaaatgatattttggcctcttgcaaaacgattctacctctccacagc

SEQ ID NO: 614593 - DNA, 394 bp, Homo sapiens
gtttgtgtcctcttttatttccttaggcagtggtttgtagttctccttgaagaggaccttcacatccacaagtacaggtttcttacatacatatattrtgtagtggtgaagtctgggcattcagtgtacccatcactcaaatagtgaacattgtgccgattaggtagtttttcaattttcacccccccttcccatgctctcaccgttcatagtctccaatgtctattatgagatcattttactatgacatctgaaaaaatcgaagtatacatgtagaaagaaatatgttacgattttaggcagccaaagagtggtatcctatcatagacatttgtcatttttggggggtgcctagcatctgatcttcctccttaaatttagagacattcacaac

SEQ ID NO: 614594 - DNA, 641 bp, Homo sapiens
tggaagttcataattatatatttcagatcattggtttctttatgtgacatatcttccttcaaaactctcagtttttactgtttgttgtgttttatcacttcttaaaatttataaaaacatattcttttcccaaaatgcacatgtactattataatctttgagaagatgatgagtagggatttgactccaaacctcaaaataacaagtatgattctttcagctgacatctccataatattcatgccaacaggcatgatcctactcacactgctgacatagaaaccggccccttgcaccaactgtcagaatccagaagacacacgacctcagaaaggatgctagccaaaggcaacacaggaacagcaatgaaaggaggagacttaatgctgccacaagacaaagtgragaaaaccaaaagtacataattccaggctccaattcccacatattcctcacatgattctcttttcttataataaaaagatccaccaatgagcaggatatgctcatttaccatgagtccagcctagcctgataatcctgcaagcattaccacagaggtggacattccaggaagactcaaacatgaccctgcattgttgatagtttttgtcctcccactcccttcttggcagggcacc

SEQ ID NO: 614595 - DNA, 396 bp, Homo sapiens
ctcccctaaaccccaggaacatatacccgcttacttatttgacacatacacttgaatgactaaaggtaaatgaaactttaaatgagcaaacccaaatatttgattacctcaacaccttcccactacctgctcaccccccagtcatcttcatctcagataatggtagctccattctatcagttgctcagccccaaaacttggttatccttgacttccttcttatttttagacttcacatcccaaccattcagatatcctataagctctattattaaagtatatccagaatttgctcggttcccaacrtcttcccaccaccaccctagtgcagactatcatctcttctctcagggccagtatcaataaccctttaattggcctctctgtttccatcct

SEQ ID NO: 614596 - DNA, 436 bp, Homo sapiens
tttgctcggttcccaacatcttcccaccaccaccctagtgcagactatcatctcttctctcagggccagtatcaataaccctttaattggcctctctgtttccatcctctccttcccaactttcactgaagccattcagtctccacttaacaaagttaaacctttaaggcatagatccttgctgattaaaactcttacagttttacatctcactcagaatagaatcttaagtttctaccatgaatcacaaggctttccttgatccagtcctgtttccttgctcacctccaatcctactgccctctctctctttccacttcagatacactggcttacttggkttttcttatacataccaggcatcctcctacttgaggctttttgcacattgctgttttcacttcctgaaatgctcattttcaaattacaacctaca

SEQ ID NO: 614597 - DNA, 409 bp, Homo sapiens
tctgagcaccaaatcatatagccacctacttacctaacaccttcacaagcccagaaattacatacatataaaactaagagtctctcatttcttaattgcttgaggaagaaaagtcaaccccaatcttcatatccctgtacctgtcaggtcacacgtctatagattgaatcactattaattctagttcctagatccctctcagatctgccyatttctccagactcttctgtcacaactctactttaggagaacatcatttcttgcctgggtctctgcagcagcttcctgataattacttctgccttatttcttcttggtttctatgcagaaaaatgattagagggaaaatgactgaaagaaaagaccacctattggacatttcattttattattattgttttaattgccc

SEQ ID NO: 614598 - DNA, 592 bp, Homo sapiens
ggcacctgctgctgtgctgggctaatttttgtatttttagtagagacgaggtttcgccatgttggccaggctggtctcaaactcctgacctcaggtgatccacccgcctcggcctcccaaagtactgggattacaagtgtaagccaccgtgcccagccaaaacactactgatttttgtatgttgattttgtgacctgcaactttgctgaatttgtttgccatttctaagagggttgtttttttttttttccagttttataatgtgttgttctttttaagttcaggggtacatgtgcaggatgtgcagttttgttacataggtaaacatgtgtcatggaggtttgttgtaatttcatwacccaggtattaaacctagtatccattagttctttttcctgaccgtctctctcctcccaccctccacacttcaatggccccagtgtgtgttgttcccctctatgcattggtgtgttctcattatttagctcccacttataagtgagaacatgcagtatttggttttctgttcccacattagttttctaaggataatggcctccagctccattcatgtccctgcaaaggacataat

SEQ ID NO: 614599 - DNA, 396 bp, Homo sapiens
tggtagggccccagggatgtggcaattaggagctattgggtcccagagcaggatgcactctgttgatcacccaactctcaaaaagacaaaatgctctggtggcctgggtcccagagggtggagggtaacactgtaaaktccctctcttgactaaggcagtcatgtggactccagacaactcctatacttggctcatggcctgcaaggtccgtggggctctcctattgctagggcagaaggcatctgtggtgggaatgtggaatgttctttgcttacctttcccctgtagtggggaggtccatcttagctccaagttgatcttggctgggtacttcgcttttttttctatgctgctatctcaagtctctgtgcctctgggtgtctttgtcactactt

SEQ ID NO: 614600 - DNA, 595 bp, Homo sapiens
aatcttcttctttacctggctttgcctttttacctggcaagggaaggagggcagtgctccctgataatttttttatcaaaatctcagctcagaaatttgtcagatggtcagtctgacttacaagaggtgtaatctctagtgtttttccccctcattaaaatttgtaaagaagtcaagggagaaggagtttggaatggaaattgagagtcgacctacaatatcagttacaackagggtgaagatgaataagaattcctcactgcttctaagatcctagaaaaaacaagcacagagaaatgttaagaggctcataagaaaggcaaatccacctcaaagattcacatgattattcaggatatcactgataatattaaaatatcagtaatatcaactgaaatgagagatttttcccactgaaattatttgaaaagctcccaatatttatatgttatctacccaattattgataaatatgtacgtgtgtgtattggtgtttgtatgtgtgtgtgtatgaaaagagagaaggaggagaaaaagaagaaaggaggaggaggaagaaaagaggaagagaagggggaggaagaagttatcactc

SEQ ID NO: 614601 - DNA, 502 bp, Homo sapiens
agccaaagcagcagcagtgatgagaagggaaggaaaaagttctgatgaggacctagatcgctgatttgagatattcctaaagacagctctactcctgcccttcctggtttagatagaaaagccaaaaccattgttcttttccttcaactagcttaagctatgtcacttgcaaccaagccccctgactaataggaccagataatcttcagtgcaggcagcaggcagcatcaacttcatgaatgtgatacctttacytcttaaaggcagtaatggcaacaaaatctaagagtgtattacagttttcttgtagaaagtttccctcccttttacttctagtggtttcagaaacaaaaacagtttgcaaaaaagaaaaagcattagctcaccattcttagcccaagcagtaatttaatctgccatgtgctcttcaaagcagattaactctaatcacacagacttcctctccatttaattattctatctttctgtttgtacttcactt

SEQ ID NO: 614602 - DNA, 596 bp, Homo sapiens
ccagctcatgtttgtttcttggcaggctaatctacaatcagaagaagaaaagcctttcatttgtggactccagctagaggaaggaagcttttgtatgtggattcactggagaccaaaatattaaaaagtggaagaggaaaaccatatgttgcagttctcataagcaggcagctcaaagttctggttaaagaaatgcttgagttcattttacagaaaagtaaatattttatcatgagaacagggtatactaataatattgatacctctgttacaaacattgacattttaagttgtattctgttttctctaattttttaaatcaggaaaacctaagaattagatatttcaaagaaacacaaaatgaccaaacattttagcataattcttcaaaatgtaacttaagaaggaaagaagagatccaacagaataaagatagaagataatttttataagctyatgattccttctcttctatgagtcacagcaaagttagctgatattttatagttgcagcaattgaatgcaggttataatagaagtggggaaaatcactaataattatctgcatcctatttcatagtcaattcaataacgta

SEQ ID NO: 614603 - DNA, 531 bp, Homo sapiens
agtctttcaggttaactttggagtgccctggccaagacaatggagtccattcacatggttgggaggccttagaattttatttttcatttgcaagtactttgtaaccttatgtaccagtagttcatctcattacagaatrgaattgattttttccttttatggtggggtcacataaaacaagcattagatcaagtgtatgactggtaggagcacgtgatgaaatagttgatagagtaggtactgatggggttcagaacatgccatcccaaatatgatggtaggaggccagagtatacacccctaaaatacgcctatttggatgagttcttgtcctttgcagggacaaggatgaagctggaaatcattctcagcaaactaacacaggaacagaaaaccaaacaccacgtgttctcactcataagtgggagctgaacgatgagaatgcatagacacagggaggagaacatcacacactggggcctgtcggggtgggggtagggggtaaggggagggatagcattaggagaaata

SEQ ID NO: 614604 - DNA, 531 bp, Homo sapiens
agtctttcaggttaactttggagtgccctggccaagacaatggagtccattcacatggttgggaggccttagaattttatttttcatttgcaagtactttgtaaccttatgtaccagtagttcatctcattacagaatagaattgattttttccttttatggtggggtcacataaaacaagcattagatcaagtgtatgactggtaggagcacgtgatgaaatagttgatagagtaggtactgatrgggttcagaacatgccatcccaaatatgatggtaggaggccagagtatacacccctaaaatacgcctatttggatgagttcttgtcctttgcagggacaaggatgaagctggaaatcattctcagcaaactaacacaggaacagaaaaccaaacaccacgtgttctcactcataagtgggagctgaacgatgagaatgcatagacacagggaggagaacatcacacactggggcctgtcggggtgggggtagggggtaaggggagggatagcattaggagaaata

SEQ ID NO: 614605 - DNA, 634 bp, Homo sapiens
agctcaatgaacaaaaatacagatgatcaattaacaaaaatacaatgcataaacaaaatattaraggttttggcctcaccggtaacaaaaaatatgcaattttttaaaacaataacatcttatgatgaataatcattattgacttttagattatataacatctgcctaataaaaactaataattgttgcctttaaaattagatcatgtaacactaacaaaatatacacagtgttgatgtcagcatatattaaagaaaacttttggaaaacaatttgccagtacacagttaaaaagaattatagtcattgttctacaagtaatctctctttatggtaattttattctatgtaaaaatccaatagaaagggcctatctatatttgtattgtaggagagaaaagtaatatttttctgacctgtcacaatgttcatggcagagattcctataacaaaagacagattaacaagagaaaagttaaaaaattaattagcaggtgaaatactccacacacctcccaatctgaggtggagggtatgaagtatttcgcctgctaatctaaatctaaaacaaaaaagggacaataaaaaataaattttccagtggcaagatcagagctcactatagcctcaacct

SEQ ID NO: 614606 - DNA, 623 bp, Homo sapiens
aaggtcttcaaggggagaaagggaagaggtggtcagagagtgaccttcctaagttttatggcctgcttccagaacaaagagtgggagatggtcaaagtgaccttcctgcttctgtgtttttgtttttccaaaagccaaggtgccatattttgggacagcatgtcttaagcactgtcagtataatcataaaagcattatttaaagtggcaaaaatgttaaaatttagcattcaaatctcccctcaaaaacaaacttaaaagccattttaaaaagtatgcagaccatatagcaacatttttttaaatgcttatgttactaattgagaaaaaaaatcaatctaagattgcaaccatctaaaawatatatataaatctatagaatatgactagaaagaaatgaataaaacattccaataactgcattaaagtgatggaagtattggtgattgttttctttttctttttagtgtttttcaacattattacattatgttttataatactgagtagaaacctcctactcagtattcccctagctgatagtagccaagttctctaactcatggagatggactagaagcgtgggaagatgtggagatgagagaccaagaacagccaaccctc

SEQ ID NO: 614607 - DNA, 623 bp, Homo sapiens
aaggtcttcaaggggagaaagggaagaggtggtcagagagtgaccttcctaagttttatggcctgcttccagaacaaagagtgggagatggtcaaagtgaccttcctgcttctgtgtttttgtttttccaaaagccaaggtgccatattttgggacagcatgtcttaagcactgtcagtataatcataaaagcattatttaaagtggcaaaaatgttaaaatttagcattcaaatctcccctcaaaaacaaacttaaaagccattttaaaaagtatgcagaccatatagcaacatttttttaaatgcttatgttactaattgagaaaaaaaatcaatctaagattgcaaccatctaaaatatatatataaatctatagaatatgactagaaagaaatgaataaaacattccaataactgcattaaagtgatggaagtattggtgattgttttctttttctttttagtgtttttcaacattattacattatgttttataatactgagtagaaayctcctactcagtattcccctagctgatagtagccaagttctctaactcatggagatggactagaagcgtgggaagatgtggagatgagagaccaagaacagccaaccctc

SEQ ID NO: 614608 - DNA, 316 bp, Homo sapiens
tattcctaacattaaagaacatcctggaaaaagtcatggacacgtgataaaacaaatggatcaacgcaattagagaaaatactgataaaacacattcaaacataaagctaaatggaatttctaaaatagaaaacccaatttttaattctctgagataaatctgtttaatcattcccatctgaaaaaaaagaaataaagtcaatgataaaaaaaatcaaaatatcaccattattacattattattaatgaaggcagaggatatagcttagttgtgcagctaaatagatgygctatctgaatcagtatttgacaggct

SEQ ID NO: 614609 - DNA, 592 bp, Homo sapiens
atctgtttaatcattcccatctgaaaaaaaagaaataaagtcaatgataaaaaaaatcaaaatatcaccattattacattattattaatgaaggcagaggatatagcttagttgtgcagctaaatagatgtgctatctgaatcagtatttgacaggcttaccttgcccactaggcaatgctaaatcagagtagaccatttcacctgagaagtattaatagaaggatggagtatctaaatcrtggacatggagaagcacaggtgaatgttcattacctgaggctgctcattcccatgacaaagaaaggtagagctgacctaagtaagcatccccagttcattttgcataatttattaatgataaatcactctactttctctggatagaatgaataaagaggtggacagaggccatgaattacatgaattgaacctgcattataaaaaagagggccagtgctcactctcagtgaaagatctctcaaaatgtctgtgcagtgggatgttagaattgctctactgtgcatttcccaattgttccttttccaagtgggaaagtttactgtaattatccaataccatcattgtatatt

SEQ ID NO: 614610 - DNA, 556 bp, Homo sapiens
ttcgaggtaccttttttccctctttaaaacacactcaaaacctcttggtcttcattcacctcagtgctaaacttaatatagtttctatctggtaagacagcatccacaaattcttgtgaccaggcatcttcagccttatacctcaatggatgttatctcttgctaaacaacagcttaggcatttaaaattagaagaaaaataaagccaagcttcctaattaagttttcrtcttgcctccacatttaaccaaaaaaaaaaaatcttaagagattcataatatgaagtaactaataatatttcttaaaactttagtgaagaaagtacccatgcaatgtttcaggtcctgagaatcagaatcatttctttatccaatgtctttttcactcttctgttctcagaaagattcagctgaatttgtgtgagtctgtctagcactaactacatgggtctgaaattaagaattaaagccaaaaatctcacctgcctgacagtttaagtgaaccaattgtggaagtagagaagtggccaaaaatgcttaagaagcctctaaggaac

SEQ ID NO: 614611 - DNA, 505 bp, Homo sapiens
ttctaaatcctgaaatgttcctaaatctatagaaactcacccacttgtgcatcaagcccatataagctacagttacagacaaaatcaaacgcatgtgcccaaaggcagtagcaatggaaagttagtgcaatataaacttctacaactgccaaggtcaaaaaaatctacccacacgttaaactcaaatgtacaaaaccacaacaaaggcttctgcatatgttacatatatctgcaaattctactgttatatcttgcaatgtttctgacccatacaccaaatgtttgcctttcaaagagcctcaacaaataccacccttctttcctgctaagattattacaaaatgaaaaagaagatatcagaatatagtcaagcaaaatatcacctttatgaaaaatgcaaacytagattatctaatttagtatgaaagccaaatgttctaactgaaacaagaattaagcatatttttccaggcatacgcaatattcatgaatattttgctcattt

SEQ ID NO: 614612 - DNA, 565 bp, Homo sapiens
aatgcttgagcacaggagctcaagaccagcctgggcaacatagggagatcctgtctctacaaaaaaattaaaaattagctgggcatggtggcacatgcctgcagtctcagcttctctggaggctgaggtgggaggattgcttgagcctaggaggtcaaggatgcagtcagccatgatcgtactactgcactccagcctgagcaacagagcaagaccatgcctcaaaaaaagaaaataaataaataaatagatttttaaaaagtagtattttcagagtcaaagctgggaggtacttcagcacacaattcctgcctcatccatattactactacaatatgtaaaaacagaaaagatgtgtggaaaagaaatattcattacaaaacactgaggttcttataaaactccagccaatatgaaaaccctggaagtcmgggataaagagaaaatgcctgggcagagcatcctccccaagatctttacaagtaaaggcagaaataggagaatatataagaactgtacctaaccctcaaaaaaacatgtaacttccgctcctgagtctctctga

SEQ ID NO: 614613 - DNA, 492 bp, Homo sapiens
cgcaataggcaagatttgaaagcagcctaagcttccatcaacagatgaatggaaaaggaaaatgtagtacataaacacaatgtagtactatttatccataaaaaaaaagaatgagatcctgtcatttgcaacaatatggatgaaactggaggacattatgttgtgtgaaataagccaggcacagaaagacaaacttcacatgttctcactcgtttgtgggagctaaaaattaaaacaattgaattcatggagacagagaatagaaggatgattaacagaggctgggaaggggagttaggggtaagaggagattagggacrgttaatgcgtacaaaaatagttatctagaatgagtaagatctagtatttgctagcacaatagggtgactatggtcaacaataatttattacacatttttaaataactaaaagagtataactggaatatttgtaacacaaagaaatgataaatgcttgaggtgatggataccc

SEQ ID NO: 614614 - DNA, 676 bp, Homo sapiens
aaaaaaacacacagcccttttactgccatgatcttgttccttgagctgcttctagaacaacctcagtaaaatgaacaatacacataacaaaatacctttgagacagaaacactaccctgcattagaacaactcattatccacattattaactagaatagtggttaattcttggcaacaatgtttctcctttctctctttgaggtctacagccaattcagcagacaagtgtccaccatctagacatgttaaaatatatggtcgtttctgatgccaactaaatgtgtcaactgttgtaaaacatttgtgggcacttctggccaaggtagaactgggtttcactctcacagctaggacctgagaggacacaaccagtagagaaggacaaggacttgtgctgggcacttctgcttctccaccaggaactctgccctgataacagtgactgccaagtctaaggtctatggagagccagagtcagtttttcagtgagtcatcaacccaataagaagcctggtccacagctcacctcctggatgtcccatctattagatgagytaccagagatgaccaaaaaccaaaaaagggaagaagagagaaaataagttaatatcttcagaaaggtttgcgactcatctattaatccagtggtaaagtagaagcaccagtcactcccta

SEQ ID NO: 614615 - DNA, 546 bp, Homo sapiens
acttcattgccttccctccattatgatcaatctttttctgaatcatttgagagaaaatgacatgatattctgtcattcctaaatcttcctttgtatttccctataaacaaggctacagttctgtataaccatgatataaccattcaaatctgccaaacaacaataacaacactattatcaagaccctatccatattttgccaaccatcccaacaatgtctctttttcctttctaatccagaatccaatccagaatgacaygttgcatttagtcgtgatatctctttagcttcgttcggtgtttcccatccttagcagttttaaatggtataggcttttcattttgtagcatgttcttcagtttgggtccattcagtgtttcctcatgtccggactgaggccatcctttcatggcaggaattacacaaaaaaaatgatgctgtgctcttttcagagcattgcgtcagaaagtacctgatgtcaacatgtcctaccatttataatgtcagccttgatgacttggttaagtttgcattggcccaggttc

SEQ ID NO: 614616 - DNA, 596 bp, Homo sapiens
aagctttttgtcacataatttaattcagcctaattaaccaattagtcttggaaaagatatgtgacatcctcaaatccattggacttatccatcatttgaatatggaatcgaaaaattgcttgggccaggtgcaatggctcatgcctgtaatctcagtatgttgggaggctgaggtgggaagatcactggagcccaggagtttgagaccagcctggacaacatggcaaaayctagtgtctcccagaaaaattttttttaattagctagacatggtggcatgcatctgtagtcccagttactcaggaggctgaggcaggaaaatcatttgagcccaggagatcaaggctgcagtgagccaagatgctgccactgcactccagcctgggcaacagagtgagaccctgtcccacaaaataaagaaaaaaagaaatttgcttggggatacatatataatattcccaaatcaactcccaaatagcatctcaagccaacagacagaagaaatagccagaggtcttcaacagcttgacttgaacagataaagaagaaaatctgctcttcagagaactctctagggagaaggcccaaacaatgag

SEQ ID NO: 614617 - DNA, 596 bp, Homo sapiens
aagctttttgtcacataatttaattcagcctaattaaccaattagtcttggaaaagatatgtgacatcctcaaatccattggacttatccatcatttgaatatggaatcgaaaaattgcttgggccaggtgcaatggctcatgcctgtaatctcagtatgttgggaggctgaggtgggaagatcactggagcccaggagtttgagaccagcctggacaacatggcaaaacctagtgtctcccagaaaaattttttttaattagctagacatggtggcatgcatctgtagtcccagttactcaggaggctgaggcaggaaaatcatttgagcccaggagatcaaggctgcagtgagccaagatgctgccactgcactccagcctgggcaacagagtgagaycctgtcccacaaaataaagaaaaaaagaaatttgcttggggatacatatataatattcccaaatcaactcccaaatagcatctcaagccaacagacagaagaaatagccagaggtcttcaacagcttgacttgaacagataaagaagaaaatctgctcttcagagaactctctagggagaaggcccaaacaatgag

SEQ ID NO: 614618 - DNA, 384 bp, Homo sapiens
tattctaatactgaaaattgtaccctttgccatactgaaaagaaacaaaatatggggtacccagttttgyacccctacaaaaatggatttgtggttaagagtggcatgcagcgcattaagttggaaagtcatgattatgatctgtccagttgtttaaggcactgtgaaaagtcatctggctcaaaccagcatgtcactaattttacctcattagatattcttgaagattctactagtagtacttctgatgaacttctgggttcccccatttctgataagcaggaaaatttacagtcaccaacatggcattcatccaatgtccaccatattggagattttcctgaggaatattatgtagcaaattcagcattgccattacaaagg

SEQ ID NO: 614619 - DNA, 526 bp, Homo sapiens
tttcttattcctgcccaagtggttccaataggaccagaggctcactttcccacttctagaaagcccaagactcattttggagcaagtgcaacttggagcataggaatctctttgtgatggtccatctgcctaagacacaacacctagccatcccctctttgactcctgctgcttcaccagtgccctaacacagaaagcagacacaaggtcccaatgtatctmccctggtcactttctttctttctctcctcattctcttgcatttctctcctctcattcaagtcaaaagaagctcttcttagaaattgggagattcaggtgaaactctgctccctctcataatatttgtccagaacactttgcatactctcctaaaatcttaggctttgggaagttaaaaccacaaagatcacttcttctgctctctgccttacctttctttcaagaaatgggcacaagtcagcctaaatgctagaaatggtaataaaatgggggataaaaaacagatggacataataaatcacaa

SEQ ID NO: 614620 - DNA, 583 bp, Homo sapiens
ctttctttctttctctcctcattctcttgcatttctctcctctcattcaagtcaaaagaagctcttcttagaaattgggagattcaggtgaaactctgctccctctcataatatttgtccagaacactttgcatactctcctaaaatcttaggctttgggaagttaaaaccacaaagatcacttcttctgctctctgccttwcctttctttcaagaaatgggcacaagtcagcctaaatgctagaaatggtaataaaatgggggataaaaaacagatggacataataaatcacaataattaccctacaacattttaaaataaatatatcagttaccaaatgagacaaaaacttcacaggataaaagtgaatgcagaatgttgttactgaatgctaaaagagaaaggcttgacctgagacaaaggggaaaagcagatagtttgcctcaatacttttaaagaatcccatcacctttaagagtatatccaaataactggggctagagtaactccttttatttttttactttttaaacttatttatttttaaatagagacagggtctcgctatgttgcccaggctgg

SEQ ID NO: 614621 - DNA, 626 bp, Homo sapiens
ccaccagaaaaggtgggtactattgtttccccattttgcaggtgagaaacctggaattcaaagaggccttgcccaaggtcccacagctcaaggtctggaactaaaatctaggtgtrtgtaatggcataaattagctgggctatttattagggggtgggaggctattccactaggagtaacacgtcattaacaactgctcctccaccaactctcatgttcttaaagcattagttctactttctactctggtttttaaattgttttccattttagcccaagggagagccgccttactttcttgggagctaaattatatccttaatgggatatttgttatatttggtcagtatttctaagcttttgcagtacaagggtttgaggtcatgtagtttataatattctgcctttcatgctttcatatctcatgtggctttattcttaaatattttatttttttgagacagagtctcactctgtcacccaggatggagtgcagtggcacaatctcagctcactgcaatctccacctcctgggttgaagcgattcttgtgccttagcctcctgagtggctgggactacaggcacacgccactgtgcttggctaatttttgtatttttagtggag

SEQ ID NO: 614622 - DNA, 411 bp, Homo sapiens
actctggtttcttgttctatatgctagtctaagacttcctatactagaatcaatgtttggttttacttcattcctcagatgggaattgttttttacatgtctgtattggagatcatagttcatttttgcttccattaactattttcagaaaattaatatatggtctgttccttggtgaaacattctactgatctttatagttggtttgaggtatgtacatatacatatacatatacatatacatatacatatacatatacatatacatatacagacaagttctggctctwttgctcaggctggagtgcagtggcatgatctcagctcactggaacttccacctcctgggctcaaatcatcctcccacctcagccttccaagtagctgggactacaggcatgcaccatcatg

SEQ ID NO: 614623 - DNA, 550 bp, Homo sapiens
ttgtttctttcacacagttctgaccaaattgggaattgatttattctgataaaagtcatttgcgtatataaagatgtcacaattattttaccaaaaatgctattgagtcatatttgttaacatatttcattatgatagtcatataaacaattgaattaaccagttacactgcaacatcaaaatattatttcacataattatgcaaattgtaagactctgtgttgtaaagtagtktgtcgtgctgtgtagcttaggagggtgtctctttgaaagtggagacaagataaatgttggcttaatatgataaattctttctaaaacaagagatgttctaatgcagaatattgccttatgaagttagaaatttcctatgaagtggctgagcaaatgctggtggaccttcagacaggaatatcattgagggatttccatgttgcttccagcatcaacataggatgtcctcaaaagtcccttccaaatctaacatgctaacgtttttataaggattctataacagatattttactatagttccacatttaaagttcca

SEQ ID NO: 614624 - DNA, 550 bp, Homo sapiens
ttgtttctttcacacagttctgaccaaattgggaattgatttattctgataaaagtcatttgcgtatataaagatgtcacaattattttaccaaaaatgctattgagtcatatttgttaacatatttcattatgatagtcatataaacaattgaattaaccagttacactgcaacatcaaaatattatttcacataattatgcaaattgtaagactctgtgttgtaaagtagtgwgtcgtgctgtgtagcttaggagggtgtctctttgaaagtggagacaagataaatgttggcttaatatgataaattctttctaaaacaagagatgttctaatgcagaatattgccttatgaagttagaaatttcctatgaagtggctgagcaaatgctggtggaccttcagacaggaatatcattgagggatttccatgttgcttccagcatcaacataggatgtcctcaaaagtcccttccaaatctaacatgctaacgtttttataaggattctataacagatattttactatagttccacatttaaagttcca

SEQ ID NO: 614625 - DNA, 312 bp, Homo sapiens
tgagagggcctctgcttacagaaggtctagagatgcattagctttttgagaatacctttctctaagttacctgtactcgtkagtacacaagtttgattgctgtaccaaagccctaaatataagatataaatgcatttctcttccattaaagagtgtgagtgtgtcagtaatcggcaactcgagaatgttggggaaccaggttcataccctcttattgctctgctctcccaccatgccaccctcatgttccatttagtccaagatggtttaccaccaggttcttgtctcaatcagtagatatagaaagaaatt

SEQ ID NO: 614626 - DNA, 568 bp, Homo sapiens
cataaaacctcccataaatcctttcatttcagatatttgatatttagtgcagaatatgttcttggggaagttcatctttgtgtaaattatgttgtctgggaggaaacttacagaactcaggcatcttaaaacccatgagtgagttattaaaatatacactgataagtatggtgaccctaatttccaagccctaaatcaggacacatagtcacgaaatggtttttccccctctcttctttaaaaaattattctggtaatagttttgcccatgaaaacattaaatcagaataaaatcacttaaagttmtgtctacccagaatatctgagttgtagactttctattcatagttgccactctactcatctcacaaacttctcaacactattttttcatactcactcatttaataagcatctcgttcattcattcattcattcatcccctcagccttcaatacatgactaccctatacatgggcctatgttgctacactaccacttttataccctacaaatccccaaatatttttaaaacttaattctgtatatgaatacagcagaggaaagt

SEQ ID NO: 614627 - DNA, 568 bp, Homo sapiens
cataaaacctcccataaatcctttcatttcagatatttgatatttagtgcagaatatgttcttggggaagttcatctttgtgtaaattatgttgtctgggaggaaacttacagaactcaggcatcttaaaacccatgagtgagttattaaaatatacactgataagtatggtgaccctaatttccaagccctaaatcaggacacatagtcacgaaatggtttttccccctctcttctttaaaaaattattctggtaatagttttgcccatgaaaacattaaatcagaataaaatcacttaaagttatgtctacccagaatatctgagttgtagactttctattcatagttrccactctactcatctcacaaacttctcaacactattttttcatactcactcatttaataagcatctcgttcattcattcattcattcatcccctcagccttcaatacatgactaccctatacatgggcctatgttgctacactaccacttttataccctacaaatccccaaatatttttaaaacttaattctgtatatgaatacagcagaggaaagt

SEQ ID NO: 614628 - DNA, 563 bp, Homo sapiens
catgggcctatgttgctacactaccacttttataccctacaaatccccaaatatttttaaaacttaattctgtatatgaatacagcagaggaaagttgatgagttctgcacctgtgcatatcataaattcttcttcttggaaccacccagtgggtttttcttgcccactacccagatagggcccatttatcagggcaggggaattgcaatagagaaagacttttacatatgtagagccagctaaatgcaagactggagttttattattactcaaatcagtctctctgaaaattcaaacatttgagagctagggtttttcaaagatagtttgggggaagaggagggcatagttaggcaatgtgtgcttgctcctgattggctgggggtgcaatcataggggagtgggaaatgatcctcatgcaygctgagtcacttctgggggggggccacgggagcagtgtggaggtggaaccatcggtcatcagacatgcaaaaaacctgaaaagatatattgaatggccaatcttaggttctacaatagtgatgctatctgcaggagtaac

SEQ ID NO: 614629 - DNA, 672 bp, Homo sapiens
atattatttaatatcatttaaactataaactaaatgtctcccaaagttagcttcgtccaagtccaggaataattaagagcaacttaaaggctaaagacaagatgtgggttggccagatcagatcgcccccactgtcataattttctgttataatttgggcaaaagtggtttcattctttgtggtgttccttgcacagccatccatggggatgaacaataggtagtggatagatgcagctcttcttaactgaattactctagaattcctattctacagttggaactttattttctagtccccraattagtcattgtttcccttctcccatatgaaaatagacctatgtggattggtgttcaaaatatatagattatgtcagtatttaggaatattatattaggctatctatagggttttttaatttttaattcttaatttcaatatgtttttggggaacacatggtgtttggttacacgtttaagttctttagtggtgatttctgagattttagtgcacccatcacctgagcagtgtacactgtacacagtgaatagtattttatcccccaccctgctctcacccttttccccaagttcctaaagtccattgtatcattcttatgcctttgtgttctcatagcttagctcctgcttatgagtaagaacatatg

SEQ ID NO: 614630 - DNA, 672 bp, Homo sapiens
atattatttaatatcatttaaactataaactaaatgtctcccaaagttagcttcgtccaagtccaggaataattaagagcaacttaaaggctaaagacaagatgtgggttggccagatcagatcgcccccactgtcataattttctgttataatttgggcaaaagtggtttcattctttgtggtgttccttgcacagccatccatggggatgaacaataggtagtggatagatgcagctcttcttaactgaattactctagaattcctattctacagttggaactttattttctagtccccaaattagtcattgtttcccttctcccatatgaaaatagacctatgtrgattggtgttcaaaatatatagattatgtcagtatttaggaatattatattaggctatctatagggttttttaatttttaattcttaatttcaatatgtttttggggaacacatggtgtttggttacacgtttaagttctttagtggtgatttctgagattttagtgcacccatcacctgagcagtgtacactgtacacagtgaatagtattttatcccccaccctgctctcacccttttccccaagttcctaaagtccattgtatcattcttatgcctttgtgttctcatagcttagctcctgcttatgagtaagaacatatg

SEQ ID NO: 614631 - DNA, 579 bp, Homo sapiens
ttttttcagtaacaccccaattagtccataaaagctcttggatctgtcagtcatattccatatgacccctgacattcactctcaactgcattctataaatatattgccccaaggctgatttagagcaagacatttttacaaagacctgacaatccaatatcttatcttaatttcatgcagttcatactcttcatcatatgatggcccacagtccattactgaaggatcaggtattcctagtctgtgaacaaggagawcgaaaaatatactcccagtctatctttaatttcttcttctagttctaaggtttttcttgcaccacttaacgattttccagtgccaaatgcatcatgaagtcatagtagaatctatgttatctaaattttactctcagagttctgattttttctatccaaagggtatgcaaaagcctgcccattctgccatatggagataaatcaagatttctaacatgtaatgaaggagtgaccagactcaaagcttttgcccatctgactttattctaattctggaggagaaacatgaatcttctacaaactgaacttattagcacaaaag

SEQ ID NO: 614632 - DNA, 505 bp, Homo sapiens
aaaaatgtccaagcagaaaatgaattgagcacttctctgggaacatatgtatttcttcaatctgagatgaagtataacttctggaaaacatgcagaagggagaagccaatttttaacctacattttaggcatcacgggcagctttaaaattaattcagatatgtagcaggcaaagttttgactaaatacatcatcacataaaatgagttaaayatactctttgccttcaaatatatagtttagctgtgaggggtagatactccaaatatatatatacatacacacacacacgtatatatacatgtacatatacacacatatgtgtatatatatgcactcacatatatgtgtatatatgtatgtatatatatgtgtgtgtatatataccttctaactaaaaatgtacacatgctcattcataacacatctatgaaaactgtgaatggacattttgaatatttatgatttgaagattaccaaaatacatgttcatttatgttaacat

SEQ ID NO: 614633 - DNA, 540 bp, Homo sapiens
ttaaatccaccactgacttgctgtataaccttgcctcagtttcctctatacaatagagttagtatgaaaatgaaaygagcagtgtttggcatatcatggatagtcattaaatatttataaaattcaagacagtacctttgtcagagagtttgcatcagtcagcataggtgaggtttctctgtggtaacattcaagccctaaatctcagtggctttaaagagcaaaggtttatttctctatcaaacttcatgtccactgaggtcagttgtcacttggacatggtcatgctttatgtgatcctccatctggggttcaagcccagtgggaaccaccatgtggaaatcatggcagcagaaaggaaagctctggagagatttgtaacagcaattaaatgatctgtttggaaatgacacacatttctttctgcttagaactcaccgcctggaactagtcacgtggctactcctagtcactaatgagcccatgagtaaatcttttttttttttttttttgccccaaacggggaaactgagaatattt

SEQ ID NO: 614634 - DNA, 486 bp, Homo sapiens
ggctaattacctccaaatatccatttttccttctaactttaataacagaattcctaccatcatggcttagatcaagactaaaaccttgcatattctgactaatgcaggtcctccctcacagagtagctttygacatacttaacatttaatgcctgtcaattattgccagcctctcttgcagctcagtatgatgaccatgtactaagctttgactgaagggatatgagcagaagtaacgggtacaacttctatgtcatgttgttaattaagaagctgttttccacctacttccttttctaccctgctggcttagaaaaggtgacaacttcctgaagttgtcattttggacccaaggacagaaaccacatattgaagatgactcgctgcctatctctgtactgctacatgagaaataagccaactatattaattaagccattgtattttggagtctctgtattatcacaggttagcctgtgataaata

SEQ ID NO: 614635 - DNA, 269 bp, Homo sapiens
gattccatatctttgctatttttaatagtgctatgatcaacatacaagtgcagctatctctttgatataatgatttcttttcttgtgggtagatatctagtagtggattattccatagttacatcttgcaggaatcacatttactcactaggacccacaaataaggaaagcataycttttaacaattagatgagaaaacacttttcccattagtgcaatatttaatatagttctgtcagtagcaagctagatatacactaagtacaata

SEQ ID NO: 614636 - DNA, 286 bp, Homo sapiens
ttgcatctaaatattgaaatatataattcaaaataacaaactcttaaagaaagtatgttttattctccttacttgacaaataaattttcaaagttgttgagaaggccaagttcaaatttccagttctcaaaatctttggtgctccgtgtaaaacatggtggcccagaaagaggcaccatctcatctagagcatgtagtctttgctctgcagcctctctctctctcttccaacctcgaatgtgtctcccaccaaaagggtctcaygtaggattcaaacaccctgacc

SEQ ID NO: 614637 - DNA, 490 bp, Homo sapiens
aataaaatggaagaaaacatttaatatatwatatatatatatatatatatatatatatatatatatatatatatcttgctttaatcaaaattttatttggctgactaactccaagtcccaatctcattggctagacaagcttctcctgcaactgactttgagtcagggaggtaggagcgtgttaaagttggggtaaaagggtaggtctatcttactgggaagattgccctcttaaccttatacttgattattaagaacaaagtaaatattaagtcactcatgtctatagtgctcagtaaaatgttttggaataaactgcatgttcgctaccaggattatgttgtagttgtggattacttttcaagagaggttatggaaatgctgattaataggtatgtttatctaatacattttctggcttggcggcttcaagacaaattgtagcattctatgactcaatagattgactctaataccaaactcaaagaaa

SEQ ID NO: 614638 - DNA, 623 bp, Homo sapiens
gactcctaaagcatgggtccagaacaggatccactgtttctgtatctagaggaggtattgatgatgattttcattcagttatgtatagtgattacttgttagcatgcaaagacatgtttattatttctatgaaaattatgttagaaatggagagtctacatacaagtagctaaaacattgttattatattagatgtaggaaaagtgtattaaaatgttggaagagataaaaatacaaaaaattcctacattcagcttgattgccaaatgttctttatcaaattcaagaattgaaaattacagatgattcattacggataagatttatgcaagaaaatcaatgtggaactccaattagcagacttattccaaaagatggtgctctacaataaagaacgaaaactgaatttagattatctaaaataaaatggaagaaaacatttaatatataatatatatatatatatatatatatatatatatatatatatatatcttgctttaatcaaaattttatttggctgactaactccaagtcccaatctcattggctagacaagcttctcctgcaactgactttgagtcarggaggtaggagcgtgttaaagttggggtaaaagggta

SEQ ID NO: 614639 - DNA, 598 bp, Homo sapiens
ttttcttgtagtagtttcatagtttgaggccttagatttaaatgtttacttcatttggatttgatttttatatatggtgagggatattagtctagtctcactcttttgcatatagatacccaattttcccatcaccatttattgaagagactgtcctttctccaatgtatgttcttggcacctttgtgaaaaatgagttcattgtggatgtatgaagttatctgrgttctctcttctgttccactgatctatgtgtctgtttttatgccagtaccatgctgttttgattactatagctctgtagtataatttaaagtctggtaatgagattcttccggttttgttctttttgcttaatatagctttggctatgctggttcatttgtagttccatataaattttaggatttttttttatttctgtgaagaatgtcgtcggtattttgatagggattgcattaggtatgtagattgctttgggtactatggacattttaacaatattgattcttgcaatccattaacatgaaatattcttcattttttgtgtcttctttaatttcttgcatcattgttttatagttttttattgtagaca

SEQ ID NO: 614640 - DNA, 584 bp, Homo sapiens
cttgcccttcaagtttacttagagacccagagctctttaccccaaggtggtgaggcttgctggaactcaatctccaaccactaggatgggcaagcttgccagcactcaagctcccctctgactggggctggtttaaatgctccctctgtgtgggggcatcagctgagtttgttcgggttttgctttctgctrtgatagggcagcactgagtttaatgcaatgtatgccaattcttgtgctttcctttttctaagcacaaagattttctcttcacaccacatagctagtaccaggagatggggaagggatgatgtcagcaattcaagactgtctttcctattctcttcagatcctttttcagcaatacgaagttaaatcaaggtactatgagtgcttacctgatttttggttcttatgaaaatgctttttttttgtgggggggtggtgcgcggggttggggtagggttcgatagtaattaaattggtgtccttgccatcagggatgatcagtggaggcttctatttgaccatcttgctccacccctctactggttgcactttaattgtggaatctgtataacttc

SEQ ID NO: 614641 - DNA, 326 bp, Homo sapiens
gtgtctactttccccatgtctttagagattatctaaygaatataagatgcttctttgacttctcagactaatataaatgagttttagttcccagacaattctagggcattagatgactttatctctatgttctggttatttctgcaatgtaacaagctaccctaaaatctagtagcattaagcaatagtgaacttgttatgttcgtggattctgttaggaattttgaaaaggcacaatggggatggcttaattctactccatgttgtctggggcttcagctgggataacttgaacggctggggataacccaaacagatggcatctt

SEQ ID NO: 614642 - DNA, 571 bp, Homo sapiens
gcttttccctctgtttactttccttgaaacaatatagaggcaaaaaggacagcttagcttaaaagaccaatacagtgtgagattgtgaatggagagacttcatgatgtccttgtttctttcctcgtggttgtaattcataaaaagaatcaaacctgtgctaatttatagaaattccccaccagtgcaatttgtattgcatccattccctctgtccacaggccarctctcttggttctttctctcttattttatcatcaggttatcatttggtggcatttagagcaggagtgcaaatgcattttctgagatcagattagatcaggcgtgttcagggtggtatggctgtagacaaatgcattttctgtacataagttttaagagtttggggcctctgcacaatgaaagaaaaaaaattgaggaagatccttataatgagattcatggaatcttatcacccaggcataatggcctcccatttcttctgctcccttcagtgaaatcacctgcaatgagggagagcagaggctggattccactgtcagactccagctaaatagaagtgagtggtac

SEQ ID NO: 614643 - DNA, 571 bp, Homo sapiens
gcttttccctctgtttactttccttgaaacaatatagaggcaaaaaggacagcttagcttaaaagaccaatacagtgtgagattgtgaatggagagacttcatgatgtccttgtttctttcctcgtggttgtaattcataaaaagaatcaaacctgtgctaatttatagaaattccccaccagtgcaatttgtattgcatccattccctctgtccacaggccaactctcttggttctttctctcttattttatcatcaggttatcatttggtggcatttagagcaggagtgcaaatgcattttctgagatcagattagatcaggcgtgttcagggtggtatggctgtagacaaatgcattttcygtacataagttttaagagtttggggcctctgcacaatgaaagaaaaaaaattgaggaagatccttataatgagattcatggaatcttatcacccaggcataatggcctcccatttcttctgctcccttcagtgaaatcacctgcaatgagggagagcagaggctggattccactgtcagactccagctaaatagaagtgagtggtac

SEQ ID NO: 614644 - DNA, 571 bp, Homo sapiens
gcttttccctctgtttactttccttgaaacaatatagaggcaaaaaggacagcttagcttaaaagaccaatacagtgtgagattgtgaatggagagacttcatgatgtccttgtttctttcctcgtggttgtaattcataaaaagaatcaaacctgtgctaatttatagaaattccccaccagtgcaatttgtattgcatccattccctctgtccacaggccaactctcttggttctttctctcttattttatcatcaggttatcatttggtggcatttagagcaggagtgcaaatgcattttctgagatcagattagatcaggcgtgttcagggtggtatggctgtagacaaatgcattttctgtacrtaagttttaagagtttggggcctctgcacaatgaaagaaaaaaaattgaggaagatccttataatgagattcatggaatcttatcacccaggcataatggcctcccatttcttctgctcccttcagtgaaatcacctgcaatgagggagagcagaggctggattccactgtcagactccagctaaatagaagtgagtggtac

SEQ ID NO: 614645 - DNA, 606 bp, Homo sapiens
gatgccagtctgcttataaattccttttttttttttttgagatggarttttactcttgtcacccaggctggggtgcaatgaggcgatcttggctcactgcaacctctacctcccaggttcaatcgattctcatgcctcagcctccagagtatctgggattacaggtacctgccaccatgcccggctaatttttgtatttttagtagagacggggttacgccatgttggccaggctggtctcgaactcctgacctcaagtgattcacccgccttggcctcccaaagtgctgggattacaggcatgagccatcacacccagcctataacttctcatttgaagcgagaccaacctgactctcacattatgcttttactcccctgcccctgccatgtagacccctgcccatgccccagcctgttttcccttgcaatacccagaagtctgccctttgtataagtgagggaccaaatcaaagccagcaaatggaatgtgtaggttatttacggattgttgctgagcaaatgtaatcaccagcctgctgtacctctatcatcatttcccttgacgagaacatcacagacttaaattttgcaaaggagggagaa

SEQ ID NO: 614646 - DNA, 606 bp, Homo sapiens
gatgccagtctgcttataaattccttttttttttttttgagatggaattttactcttgtcacccaggctggggtgcaatgaggcgatcttggctcactgcaacctctacctcccaggttcaatcgattctcatgcctcagcctccagagtatctgggattacaggtacctgccaccatgcccggctaatttttgtatttttagtagagacggggttacgccatgttggccaggctggtctcgaactcctgacctcaagtgattcacccgccttggcctcccaaagtgctgggattacaggcatgagccatcacacccagcctataamttctcatttgaagcgagaccaacctgactctcacattatgcttttactcccctgcccctgccatgtagacccctgcccatgccccagcctgttttcccttgcaatacccagaagtctgccctttgtataagtgagggaccaaatcaaagccagcaaatggaatgtgtaggttatttacggattgttgctgagcaaatgtaatcaccagcctgctgtacctctatcatcatttcccttgacgagaacatcacagacttaaattttgcaaaggagggagaa

SEQ ID NO: 614647 - DNA, 473 bp, Homo sapiens
caatcgatgttaaatgacaagtggtcctacctgttaaatacctttcaaatccatccatttcccaccatcttgattgccagaattcagccctggtcatcaccaattgttttacctggattgcagtaatagacatttttctttatctccccctcttaaaagacctcaaaaccattttttctccaccctgcagaaagattktctatgaataataaattttgctgaaaagactttcctttgcctttaggataaagtttgaacttcacagcatattttacaaattattcaagagccctgttgcttgtcaccctctttagccttacctagtagcaacctaccttgctcagtgtaccctctggcctttctgagctctttcagctctttcattactgtcttttatgttgtatcttagtactttctgttacctctgacactgtcaccctctctccccttgccccaatacacatttttcagat

SEQ ID NO: 614648 - DNA, 473 bp, Homo sapiens
caatcgatgttaaatgacaagtggtcctacctgttaaatacctttcaaatccatccatttcccaccatcttgattgccagaattcagccctggtcatcaccaattgttttacctggattgcagtaatagacatttttctttatctccccctcttaaaagacctcaaaaccattttttctccaccctgcagaaagattgtctatgaataataaattttgctgaaaagactttcctttgcctttaggataaagtttgaacttcacagcatattttacaaattattcaagarccctgttgcttgtcaccctctttagccttacctagtagcaacctaccttgctcagtgtaccctctggcctttctgagctctttcagctctttcattactgtcttttatgttgtatcttagtactttctgttacctctgacactgtcaccctctctccccttgccccaatacacatttttcagat

SEQ ID NO: 614649 - DNA, 474 bp, Homo sapiens
gcaatcgatgttaaatgacaagtggtcctacctgttaaatacctttcaaatccatccatttcccaccatcttgattgccagaattcagccctggtcatcaccaattgttttacctggattgcagtaatagacatttttctttatctccccctcttaaaagacctcaaaaccattttttctccaccctgcagaaagattgtctatgaataataaattttgctgaaaagactttcctttgcctttaggataaagtttgaacttcacagcatattttacaaattattcaagagccctgttgcttgtcaccctctttagccttacctagtagcaacctaccttgctcagtgtaccctctggcctttctgagctctttcagctctttcrttactgtcttttatgttgtatcttagtactttctgttacctctgacactgtcaccctctctccccttgccccaatacacatttttcagat

SEQ ID NO: 614650 - DNA, 473 bp, Homo sapiens
caatcgatgttaaatgacaagtggtcctacctgttaaatacctttcaaatccatccatttcccaccatcttgattgccagaattcagccctggtcatcaccaattgttttacctggattgcagtaatagacatttttctttatctccccctcttaaaagacctcaaaaccattttttctccaccctgcagaaagattgtctatgaataataaattttgctgaaaagactttcctttgcctttaggataaagtttgaacttcacagcatattttacaaattattcaagagccctgttgcttgtcaccctctttagccttacctagtagcaacctaccttgctcagtgtaccctctggcctttctgagctctttcagctctttcattactgtcttttatgytgtatcttagtactttctgttacctctgacactgtcaccctctctccccttgccccaatacacatttttcagat

SEQ ID NO: 614651 - DNA, 499 bp, Homo sapiens
cccgtggaactttaaacttgagagagattatttagggtatctggtggaagaaatttcaaagtggcaaactgttccacaggaatcagaacataaaaatttggagaatatgcagcctaatgatgcaatagaaaagaaaaactcattctctgaggagaaattcaagcctgctgcagaaatttgcatgactaatgatgggcccaatgttaatcaccaagacatggtgaaaatgtmtccaaggcatatcagagacctttgtggcagtccctcttatcacaggcctgagggcctaggaagaaaaaatggtttcatggactgagcccagggtcccctgctctatggagcctctgaacgtggtgccctgaatcccacctgtttcagctccagctgcaactacaaagggccaatgtatagcttaggcaattgcttcagacggtgcaaaccccatgtggtgttgggcctgtgggtgcacagaagtcaagaattgatgtttgggaacctc

SEQ ID NO: 614652 - DNA, 499 bp, Homo sapiens
cccgtggaactttaaacttgagagagattatttagggtatctggtggaagaaatttcaaagtggcaaactgttccacaggaatcagaacataaaaatttggagaatatgcagcctaatgatgcaatagaaaagaaaaactcattctctgaggagaaattcaagcctgctgcagaaatttgcatgactaatgatgggcccaatgttaatcaccaagacatggtgaaaatgtctccaaggcatatcagagacctttgtggcagtccctcttatcacaggcctgagggcctaggaagaaaaaatggtttcatggactgagcccagggtcccctgctctatggagcctctgaacgtggtgccctgaatcccacctgtttcagctccagcygcaactacaaagggccaatgtatagcttaggcaattgcttcagacggtgcaaaccccatgtggtgttgggcctgtgggtgcacagaagtcaagaattgatgtttgggaacctc

SEQ ID NO: 614653 - DNA, 595 bp, Homo sapiens
tttcattttgaatatctctatcttttttgtttccaagtcgctttatcctttcaagacactttggtttctgttcattrtgttttatgatttttatcagtctttacactgttctataaatgctgtgaaatgaatacaatacagtacaataatgactaaagtctcctcactcttcagtctgaaatcaagtgtttacctccattccccagagataatcatagttaccagttatttattttacatggatttgcatatattagggattctggacttttggtttccagtccaacttacaaggagctgagaagtaaccactggatcctaaaaaataaattgaaaaaatcaaaccctgcctcaaaaattggaaagatggacaggcagatacagacaattacaattgactggaaaagagtcccatgagcagaaacctctaagggaaccacagttggtgtaggaaaacctgaatagcaattataaattgctggaggctggatgtggacaagtctgagagttaaactcaaggggagtgatccagtcacagcaggaccctcacacttgtgagttttacctttaagggtgtggccaagttctgaccatg

SEQ ID NO: 614654 - DNA, 571 bp, Homo sapiens
gaagtcataataaaacagttgcaatagttctgatcgagcaaataaataatatgttaagaaagatgaatgaaaatgaagagggaatgatgaatcaaagtattttcaccattacaatgtattgtagttaatcacgggttaggtgtggaggaagagaaagagatggaagttaagaaaggcacttagacttattgctgaaataatagtgtggactgtaacactgattaaaatatttaagaaaaagtaccttcaaaggaaagacagatgtttcattttgaatatctctatcttttttgtttccaagtcgctttatcctttcaagacactttggtttctgttcattgtgttttatgatttttatcagtctttacactgttctataaatgctgtgaaatgaatacaatacagtacaataatgactaaagtctcctyactcttcagtctgaaatcaagtgtttacctccattccccagagataatcatagttaccagttatttattttacatggatttgcatatattagggattctggacttttggtttccagtccaacttacaaggagctgagaagta

SEQ ID NO: 614655 - DNA, 595 bp, Homo sapiens
tttcattttgaatatctctatcttttttgtttccaagtcgctttatcctttcaagacactttggtttctgttcattgtgttttatgatttttatcagtctttacactgttctataaatgctgtgaaatgaatacaatacagtacaataatgactaaagtctcctcactcttcagtctgaaatcaagtgtttacctccattccccagagataatcatagttaccagttatttattttacatggatttgcatatattagggattctggacttttggtttccagtccaacttacaaggagctgagaagtaaccactggatcctaaaaaataaattgaaaaaatcaaaccctgcctcaaaaattggaaagayggacaggcagatacagacaattacaattgactggaaaagagtcccatgagcagaaacctctaagggaaccacagttggtgtaggaaaacctgaatagcaattataaattgctggaggctggatgtggacaagtctgagagttaaactcaaggggagtgatccagtcacagcaggaccctcacacttgtgagttttacctttaagggtgtggccaagttctgaccatg

SEQ ID NO: 614656 - DNA, 519 bp, Homo sapiens
catgaaaccatttttagctcctaggcctctgggcctatgataggtggggctgctgtgaatgtctcttacatgctctggagacattttccctgttgtcttggtgattaacattccactccttgttacttmcacaaatttctgcagcaggcttgaatttctccccagaaaatgggttttttcttttctattgcatcatcaggctgcaaatttttcaaacttttatgctctgctttctcttgaatgctttgctgcttagaaatttcttctaccagataccttaaatcatcactctcaagttcaaagttccacagatttctatggcagggacaaaatgccaccagtctctttgcatagcaagagtaaccttactccaattcccaaaaaagttcctcatctctgagtcaccttggcctgggatttattgtccctgtcactatcagcattttggacaaaaccattcaagaagtttctaggacattccaaactttcccacatctttctgtcttctgagtgctgcaa

SEQ ID NO: 614657 - DNA, 573 bp, Homo sapiens
ctcattctatgcatcccagtaagtgttcccaaacataggttgtttaccaaggaaccgagaaaattgaatcaaagaccctggccactggccacttcagaatgagagagagctgcacgcaaaaaaaaaaaaaaaaaaaaaaaaaccaaaaaaaaaaaaaaaaaaacaaacattaagtgaaattcaggttatgggatggtaggacttccaaccccctggaacacgattaaaattctaraatcctggcacccaaatgtatacactccaagcatgagataggtggatcctgctatgaagacactggataaacctagtaggaaagattcatatatgctcttatttagaagtccctcaagtaaatagatgggtctgccatctgcctatttgatctttctgcatagaaagccaccagttgacaatcttctttccccaaccaacacagagcttctatcagtatattagtgtcctgtacttacatatgaaatgtaacataaaatgcaacattcatgtccatgtgtatgtggtggggaaggaagatttgtgggtatccagcattttgaaagacggagacaaaaa

SEQ ID NO: 614658 - DNA, 573 bp, Homo sapiens
ctcattctatgcatcccagtaagtgttcccaaacataggttgtttaccaaggaaccgagaaaattgaatcaaagaccctggccactggccacttcagaatgagagagagctgcacgcaaaaaaaaaaaaaaaaaaaaaaaaaccaaaaaaaaaaaaaaaaaaacaaacattaagtgaaattcaggttatgggatggtaggacttccaaccccctggaacacgattaaaattctagaatcctggcacccaaatgtatacactccaagcatgarataggtggatcctgctatgaagacactggataaacctagtaggaaagattcatatatgctcttatttagaagtccctcaagtaaatagatgggtctgccatctgcctatttgatctttctgcatagaaagccaccagttgacaatcttctttccccaaccaacacagagcttctatcagtatattagtgtcctgtacttacatatgaaatgtaacataaaatgcaacattcatgtccatgtgtatgtggtggggaaggaagatttgtgggtatccagcattttgaaagacggagacaaaaa

SEQ ID NO: 614659 - DNA, 573 bp, Homo sapiens
ctcattctatgcatcccagtaagtgttcccaaacataggttgtttaccaaggaaccgagaaaattgaatcaaagaccctggccactggccacttcagaatgagagagagctgcacgcaaaaaaaaaaaaaaaaaaaaaaaaaccaaaaaaaaaaaaaaaaaaacaaacattaagtgaaattcaggttatgggatggtaggacttccaaccccctggaacacgattaaaattctagaatcctggcacccaaatgtatacactccaagcatgagataggtggatcctgctatgaagacactggataaacctagtaggaaagattcatatatgctcttatttaraagtccctcaagtaaatagatgggtctgccatctgcctatttgatctttctgcatagaaagccaccagttgacaatcttctttccccaaccaacacagagcttctatcagtatattagtgtcctgtacttacatatgaaatgtaacataaaatgcaacattcatgtccatgtgtatgtggtggggaaggaagatttgtgggtatccagcattttgaaagacggagacaaaaa

SEQ ID NO: 614660 - DNA, 573 bp, Homo sapiens
ctcattctatgcatcccagtaagtgttcccaaacataggttgtttaccaaggaaccgagaaaattgaatcaaagaccctggccactggccacttcagaatgagagagagctgcacgcaaaaaaaaaaaaaaaaaaaaaaaaaccaaaaaaaaaaaaaaaaaaacaaacattaagtgaaattcaggttatgggatggtaggacttccaaccccctggaacacgattaaaattctagaatcctggcacccaaatgtatacactccaagcatgagataggtggatcctgctatgaagacactggataaacctagtaggaaagattcatatatgctcttatttagaagtccctcaagtaaatagatgggtctgccatctgcctatttgatctttctgcataraaagccaccagttgacaatcttctttccccaaccaacacagagcttctatcagtatattagtgtcctgtacttacatatgaaatgtaacataaaatgcaacattcatgtccatgtgtatgtggtggggaaggaagatttgtgggtatccagcattttgaaagacggagacaaaaa

SEQ ID NO: 614661 - DNA, 562 bp, Homo sapiens
ctgcatctccatttctagactggactccatgacccagtgctctaggactccctggcctaatgactgggagccagccttcatattctgctgcttttcttctctgggttgttctccaaaggcaaaccatgtcacaatagtggtagttacttgctgatggtggaggtactgtgtgcaaggagcttgagtaggttgtactgaatcacgatggtatgcctagggggaatacctaggcatacatgtgctgtgccctagatgaattcaagataggaagagagaaatggatttggctaagaatctggagctagttgtttattctcttagctcaggcactgcaatttaacgttagccatggggcctgtatttmctgctaataaacctcatgtaactgaatgtgtgacccacggcaaatcttttaagctccatggacctcagtgctttcatctgtaaaaatgaagagcttgaacttgatctcagaagatgcttcaagcactaacattttattatttttttcaattctgttgatgctttatcttttgtacccccataacatatagctatttgc

SEQ ID NO: 614662 - DNA, 594 bp, Homo sapiens
agtgaatccctacatattttccacttttgaaaaaaattactgaatatcttatgactggagactagaaaagaaaacaaaaaaggtcaaaaattaaatatcacagaaaaaaaactgtagttgagtatggcccatgaggcatcaaaaattatgaaaggaatgaaaagacatttcactttaccttgaagactgaaaaattctccttcaaacagtacatgtttagtgttacagtattktcatttacttttctgtagatataagcacactgattatcatgcattttttatttatatgatccattaaaattgtcttacaaactcagtgtctgaatgaaatatttccaacaacctggatttatgtataaatgttataactgctccgaaattaattgttaattctgtctgttcagttatagcaaatcaattaatcctgcaacagtgaaatccccctctccacagcactttcacaaaaagaataaaaggcttaacattccttttgtggagaactgatctgtcagcatttttacaatataagtatttcagtcaaatcagatgagataaaagaagcaatttcttttcaattcagtgaaaagaaaaa

SEQ ID NO: 614663 - DNA, 578 bp, Homo sapiens
agtggctcactcctataatcccttcactttgggaggctgagacaggaggactgctggagctcaggagtttaagaccagcctgggcaccatggcgaaaccccttctccacacacacacacacacacccccacayacaaaatacaaaaattagctgggcatggtggcgtatgcctgtagtcccagctactcaggaggctgaggtagcaggatgccttcagccctggagttggaggtcgcagtgagccatgattgtgccactgcactccagcctgggtgacagagtgagaacctgtttcaaatatatatatataaactgtatcaaatagatatcttcatatcagctctataaagtaagtactgttactattagttatctgtgtatcatagagcataaagtaagtgacaaagctttatgcattttatgacagttttaacatcatgagttagacttaaatacctacgaccatcttgtttaagcagctgaacaaccttagatttcattatcagcctttggaattcttcctatctcagagatatagatagcatccaaaaattttttaagcttgtttttttctggt

SEQ ID NO: 614664 - DNA, 458 bp, Homo sapiens
ttttgagttaatttttgtgcatagtgtgaaatatggacctaagtttattcatgtattttgcatgtagatatcaattgctccagctactgaattgcctttacacatttttgtcaaaatcaattgaccatgattgattccacacatttcartgtgggaatgttcttggagtctgttctattttctttcactgatgtatttgttggtcttcacgccaattccgtagtgccttgatgactgtcccactgtaataaatgttaaagtcatgtagtgttagtcctcctgttgacattttacaaaattgtttggctatttcaggtcctttgaatttccacatgaatttaaatgtaagtgtataactaatttttaaaataataaagattatgcataatatgcatctaatagtgcaggtacacacaaagtaaaaactagactgtaaacactagtggcataatttcaaa

SEQ ID NO: 614665 - DNA, 399 bp, Homo sapiens
catttgtagtttattaacttcataaaaggccattgctttatttacgaaatgattgaaggattctatgagaaaaaatatcataaaagtaagcaaccactttaatactatctctctatgctactaacattggtaaaagaaatgtaatgttcatgtcagccaccaaacattcttactcattaacccaatagtgacagatactgtccaagatccagagccactcttctgtagctatgcccttttctgctaatcccctccaaatgacctttagatagtcctgttacagtgcttcccagattattctccagtgtatgatwtttagggtgtacttgtcacatcactgagaagtttgctagtaagaaatatgtttttcagaacagcaagtacagtacaaataagaag

SEQ ID NO: 614666 - DNA, 602 bp, Homo sapiens
ctcttctgtagctatgcccttttctgctaatcccctccaaatgacctttagatagtcctgttacagtgcttcccagattattctccagtgtatgatatttagggtgtamttgtcacatcactgagaagtttgctagtaagaaatatgtttttcagaacagcaagtacagtacaaataagaaggtagcagaacaacaacacttccatctctagaagttcacatttttgttaacctgaggaaaatattgttttgccaaaattttattatggtataaatcttgctatgtggtaattgatgtgatgtaacagaagactaaaaaaattacgtaataataatgtggtaatataggttgagtattaccttatgtaaaatgcttgaaaccaaaaatgttttgggtttgggattttcccacatttttaatatttgcatatacctaatgagatatcttgcggatgagagccaagtctaaatgtgaaattcatttatgttatatatacaccttattatacacataggctgaaggtacttttttttttaacaacatttaagtaatattgtacataaaacaagtttgtgtaagttacttatgtacggaatttttc

SEQ ID NO: 614667 - DNA, 618 bp, Homo sapiens
caaagcaaacattcagttgtaaatgattatggaaattcgccaggaaatgctaattggctatattttaaaaatttcaaatttcaaagcatacatctttattgcatgtaaccagaaagctgtcaatgycattcggcatatcaagattttgacatcaaacagagctctgtttgtattcccacgtttgtcacttattaaaagagtatgtttttatgctataagttttctaaatttattttggccatgtattatattttattgtattgcattgtgttgtgttttaacttagtcttgtcatgagaaatggaaaatataaaaacttggggtaattatgaggattaaactatacaacaagattaaataatacaacaaaaataatacaaatacagaaactaatatatattatatatatgtatatatgtatataaacattagtttcttaatttctaccttgttatcccatttttatctctgatacctgccttacaaataccaaagtatctattcctagaaattaatatgtgaatataaaatagaaaatggagcatagagatcttccaaccaaataatttatctagaaagccaatccaaggaacacaatgagtaaaaagagagtgtaag

SEQ ID NO: 614668 - DNA, 591 bp, Homo sapiens
ggaggagttcttctttttctattgtttggaatagtttcagaagttatggtagcagctcttctttgtacttctggtagaatttggctgtgaatccgtctggtcctgggcatttgtagatactcttatcaacttgaggaagttctttattcttattttgctaagatttttgtattgagaaggttttaaattttgtaaaaggatttttctgtgtcagttggttataatgacataatcttcttgtatascctgttgatatggtggattctatttattcatttttgaatgtgaaaccagttttgcacacctggaagaaagcccaattgttcatggtgtattcttcttttttacattgttagatttgatttgttaatgttgtcttaaagatttttaaatttaagtctctgggagtttttttttttatttttcattttctggactgtctttcactggttttacatttagggtagcagtaagccctcatcatgtgagttggggagtgtttcttagtgtcttttctgaaaaagattttgtaaaattggttttaatttatcattaaatgcttgtgtgcattcttcagtgaatgcatatggg

SEQ ID NO: 614669 - DNA, 582 bp, Homo sapiens
ttttacttcatgtgttttgagaccctgtttttaactgtatgtatattgataattcttatagcttcttgatgaattgacttttttctttataatgtccttttgtgtctctagtaaaatttctgtcttaaattttattttttctgagatatattatattcattccaggtcccttgtggttatgtcttgcctagaatatcttttatcattctttcattttcaatctatttgtgtctttaaattttgaatctcttataagcaacacatagttggataatgttctttttattttacttttaatttatcctgtcaatgtctgccttttaattagagatattattctacttacacttaacataattacttacagggaaggacttattcctattattttgctatttgttattgtttatcttatttcttrttcttcaaattttccattattttcctcttttgtactagatatattttaattttcttttcattgtttttattatgattttattttcataaactacatctttatacattgtgtgcccatcaacatatatttgtaattattgatatatgcaattatctgttaaa

SEQ ID NO: 614670 - DNA, 582 bp, Homo sapiens
ttttacttcatgtgttttgagaccctgtttttaactgtatgtatattgataattcttatagcttcttgatgaattgacttttttctttataatgtccttttgtgtctctagtaaaatttctgtcttaaattttattttttctgagatatattatattcattccaggtcccttgtggttatgtcttgcctagaatatcttttatcattctttcattttcaatctatttgtgtctttaaattttgaatctcttataagcaacacatagttggataatgttctttttattttacttttaatttatcctgtcaatgtctgccttttaattagagatattattctacttacacttaacataattacttacagggaaggacttattcctattattttgctatttgttattgtttatcttatttcttgttcttcaaatkttccattattttcctcttttgtactagatatattttaattttcttttcattgtttttattatgattttattttcataaactacatctttatacattgtgtgcccatcaacatatatttgtaattattgatatatgcaattatctgttaaa

SEQ ID NO: 614671 - DNA, 582 bp, Homo sapiens
ttttacttcatgtgttttgagaccctgtttttaactgtatgtatattgataattcttatagcttcttgatgaattgacttttttctttataatgtccttttgtgtctctagtaaaatttctgtcttaaattttattttttctgagatatattatattcattccaggtcccttgtggttatgtcttgcctagaatatcttttatcattctttcattttcaatctatttgtgtctttaaattttgaatctcttataagcaacacatagttggataatgttctttttattttacttttaatttatcctgtcaatgtctgccttttaattagagatattattctacttacacttaacataattacttacagggaaggacttattcctattattttgctatttgttattgtttatcttatttcttgttcttcaaattttccattattttcctcttttgtactagatatattttaattttcttttcattgtttttattatgattttattttcataaactacatctttatacattgtgtrcccatcaacatatatttgtaattattgatatatgcaattatctgttaaa

SEQ ID NO: 614672 - DNA, 538 bp, Homo sapiens
taacattttaattatatcatcccactgcctctggacaccatagtttctggtaaaaatcagctattgaagatgttttgtacctgagttacttctcttttacagctttcaatattctgtctttgcctttggcttttgacagtttrattatgatgcgtctccccctccttggggtttgtttttactgttttctgcagtcattgttatttgtttgctggcttttctgaactaattctggaaaatctgtgttactgttatgtgtggccactgaagccaatgtttaattatctaatgatcagccaatgaaaataggcaaagattttcttaaatgcctagacccaaaataactctatctttttctataggctgtgtgtgtgtgtgtgtgtgcacgctgaattacaccctcaacactcagctaggcaatttacaactttgccttagccttcagctcctgattgcagaaattctcaaggtctgccaaagatgacatctagggctttctcagttctttcctgagcacgcaggaaggacagaacctcaa

SEQ ID NO: 614673 - DNA, 538 bp, Homo sapiens
taacattttaattatatcatcccactgcctctggacaccatagtttctggtaaaaatcagctattgaagatgttttgtacctgagttacttctcttttacagctttcaatattctgtctttgcctttggcttttgacagtttgattatgatgcgtctccccctccttggggtttgtttttactgttttctgcagtcattgttatttgtttgctggcttttctgaactaattctggaaaatctgtgttactgttatgtgtggccactgaagccaatgtttaattatctaatgatcagccaatgaaaataggcaaagattttcttaaatgcctagacccaaaataactctatctttttctataggctgtgtgtgtgtgtgtgtgtgcacgctgaattacaccctcaacactcagctaggcaatttacaactttgccttagccttcagctcctgattgcagaaattctcaaggtctgccaaagatgacatctagggctttctcagttctttcctragcacgcaggaaggacagaacctcaa

SEQ ID NO: 614674 - DNA, 419 bp, Homo sapiens
gcttttagttaattttcagagttttgcactattggtttatctgggttactggcttctccagtggcaaatataggctatgtgagacaaaaaagaaaactcaagaaactgactactgtgttattatttgaattctgaagttcctagcctgtttgacttytgattgacttttgacttttctccaattttcaagttttcttaaaaatatttaatatataatacataatatatttgatactaaatattaatatgtaatatagctatgcttagtggtagaaatagagaaaagtatgctcaacccatctttatggagggaaaagtctttttaaatgttattttaggatctttttttttttagaaattatatacacacaaacatccacacacatacataaatacaattcagcctttaaaaatgacaa

SEQ ID NO: 614675 - DNA, 419 bp, Homo sapiens
gcttttagttaattttcagagttttgcactattggtttatctgggttactggcttctccagtggcaaatataggctatgtgagacaaaaaagaaaactcaagaaactgactactgtgttattatttgaattctgaagttcctagcctgtttgacttctgattgacttttgacttttctccaaytttcaagttttcttaaaaatatttaatatataatacataatatatttgatactaaatattaatatgtaatatagctatgcttagtggtagaaatagagaaaagtatgctcaacccatctttatggagggaaaagtctttttaaatgttattttaggatctttttttttttagaaattatatacacacaaacatccacacacatacataaatacaattcagcctttaaaaatgacaa

SEQ ID NO: 614676 - DNA, 598 bp, Homo sapiens
gtctttattctgtaatattgatttctgaatctgtacctctaccaatatcacaattttgattagtgagctatgtatacatcttgtaattgtttaggggttccttatactttattctttctttccagaatattttmaattatttcttgtgcctttctatataaattttgaaataatgtcttttatttttacaaaaaaaatatgctgggaagtggggactatgttaagcctgtctatcaatttggagacaatgggtatcatcactagttgagtaccacaaaccatgaacacattatgtctttctctttattttctttttttgcctgatttcactggatataaattttaacagtatgttgaataagtttggtgagaaaggacaaccttgtttagttctcaatctggagggaaagcattcgatctttcatcattaagtataatgttagcagtaggtttttgatagatgctttttatccacttaaggtaatttccttcaaattcaagttttgagagtgttattatgaatgggtgttaattttgtcaaacgctttattttcagtgtttgatataatcatatgattttgttctttagcatgctaat

SEQ ID NO: 614677 - DNA, 598 bp, Homo sapiens
gtctttattctgtaatattgatttctgaatctgtacctctaccaatatcacaattttgattagtgagctatgtatacatcttgtaattgtttaggggttccttatactttattctttctttccagaatattttaaattatttcttgtgcctttctatatawattttgaaataatgtcttttatttttacaaaaaaaatatgctgggaagtggggactatgttaagcctgtctatcaatttggagacaatgggtatcatcactagttgagtaccacaaaccatgaacacattatgtctttctctttattttctttttttgcctgatttcactggatataaattttaacagtatgttgaataagtttggtgagaaaggacaaccttgtttagttctcaatctggagggaaagcattcgatctttcatcattaagtataatgttagcagtaggtttttgatagatgctttttatccacttaaggtaatttccttcaaattcaagttttgagagtgttattatgaatgggtgttaattttgtcaaacgctttattttcagtgtttgatataatcatatgattttgttctttagcatgctaat

SEQ ID NO: 614678 - DNA, 586 bp, Homo sapiens
tactaaccctccttaaaaaagcacattatattatcttctttttgccttgaattttaacaaatctatttgtgataattttttgatttatatattcaaggctgatcacagttcagcttaaatatacatttttttcctgacagatacctattgtgaccttcacagtaagtaaatatactcaacaatgctgctccatgcagckatccatctactagtgctgtaactttcataatctggtgatttgtgcttatgcatctggagctacacttgtgtgtcctgtataattgccagttttcagaagagcagaaggtagccaagaacaatgcatgagatgattgttgttgcctcttttaagtaataaagtacatctgacatcagtaaaagattcaacttaaatgttaagaattgtaggctgatgaacttacttaaatatctacagcacagtcatgaataaatttatatttcaatatactctgaaaggagaaatcatttagaattttaccttttctttaataaagttgtctatctgatggcactgttttttttaaccaacacatttctgagaacccgagggagctccaactctgca

SEQ ID NO: 614679 - DNA, 586 bp, Homo sapiens
tactaaccctccttaaaaaagcacattatattatcttctttttgccttgaattttaacaaatctatttgtgataattttttgatttatatattcaaggctgatcacagttcagcttaaatatacatttttttcctgacagatacctattgtgaccttcacagtaagtaaatatactcaacaatgctgctccatgcagcgatccatctactagtgctgtaactttcataatctggtgatttgtgcttatgcatctggagctacacttgtgtgtcctgtataattgccagttttcagaagagcagaaggtagccaagaacaatgcatgagatgattgttgttgcctcttttaagtaataaagtacatctgacatcagtaaaagattcaacttaaatgttaagaattgtaggctgatgaacttacttaaatatctacagcacagtcatgaataaatttatatttcaatatactctgraaggagaaatcatttagaattttaccttttctttaataaagttgtctatctgatggcactgttttttttaaccaacacatttctgagaacccgagggagctccaactctgca

SEQ ID NO: 614680 - DNA, 636 bp, Homo sapiens
caaagtcttaactcattccagcattaacccaaaagtccaaagtctcatctgagacaaggcaagtcccttccacctaggagcctgtaaaatcaaaagcaagttagttacttccaaaatacaatagggttacaggcattagacaaatgttcccattccgaatgagagaagttggccgaaacaaagaggctacaagccccatgcaagtccaaaatccagcagggtagtcattaaatcttaaagcaccaaaataatcttctttaactccatgtctcacatccagggcatgctgacgcaaagagtgggctcccacggccttgagcagctccattcctgtggctttgcaggattcaggccctactgccacaatcatgggctggcattgagtacctgaggctttttcagttacacagtgcaagctgttggtggatctacattctggggactggaggatggtggccctcttctcayagctcctctaggtagtgtcccactgcctaatggagtagtgagaaggggactctgtgtgaagggtccaaacccacatttttcctctgcattgcgctagcaaggttctccatgatggctctgcccctgtggcagacttctgcttggatatccaggcatttttatacatcc

SEQ ID NO: 614681 - DNA, 574 bp, Homo sapiens
taaaaaccaaaatgttaattaaaaattaattttaacttaatgtaaaaatttaaaattgattaaaaattagcttaatgaatgaaatggtgaaataaattgtctgtataaagtaacaaatgtacaaagtaaaacaagtttaccatagttccaagatccaartgacaactagaaataagtatcaataagtatattgaatctgcatgcagaaagaaataaaatcattgaaatatcaaaaactagaaacaaattgaagacttaaaatgttttgatgagcaaaagttaccagatacatttcctttaaataatacctgaaaataggcaaaaataatccctggtgataagtgagaaataatttgttttgggtggttgtggaggtggccttgaattaactgaaactgagctagagggatattcctgggtaacagatgtgttctgtatcttgactgggatggtggctgcaaaggttcaattatcagagcacatcaagttgaatatttaggagttgtgcatatcataatatgtgaattatttctcaattaaaaacttaatgattaataataaaatgttccttgaa

SEQ ID NO: 614682 - DNA, 547 bp, Homo sapiens
aaatgtaacttcaactcatgtcactcctctgcttaaaatcatgcaatagtatctctttgtacttagaataaaagcaaacctccttcccgtgacccacaaggtcctataggatctggctgctgcccacccccagcctaatttcctgccactttccttcacttgcacgtactccagtcacactttcctgcctcagggccyttgcacatattcttccctctgcctggaatatccttcccctcctctcctcatgcctggcttctcatccatttgcatttggctaaaatgtcccttcctttgagagatggctccttattaccctctctcagtagatgcctccttctctccatcctctgtcagggtaccccattcatttccctcatgacacttggcacagtttttgaataagtatttctttgttaatttttgttctccctttagactataaatttcatgagggcagaaactatgcctgctttatccatcattgtatctcacagcctagcacagctcttggcacatagtaagcctttagcatatatttgctgaa

SEQ ID NO: 614683 - DNA, 547 bp, Homo sapiens
aaatgtaacttcaactcatgtcactcctctgcttaaaatcatgcaatagtatctctttgtacttagaataaaagcaaacctccttcccgtgacccacaaggtcctataggatctggctgctgcccacccccagcctaatttcctgccactttccttcacttgcacgtactccagtcacactttcctgcctcagggcctttgcacatattcttccctctgcctggaatatccttcccctcctctcctcatgcctggcttctcatccatttgcatttggctaaaatgtcccttcctttgagagatggctccttattaccctctctcagtagatgcctccttctctccatcctctgtcagggtaccccattcatttccctcatgacacttggcacagtttttgaataagtatttctttgttaatttttgttctccctttagactataaatttcatgagggcagaaactatgcctgctttatccatcattgtatctcacagcctagcacagctcttggyacatagtaagcctttagcatatatttgctgaa

SEQ ID NO: 614684 - DNA, 611 bp, Homo sapiens
gacaatttttaaagcctctgttttttttgttatagrccctttcttgtttttcccacttttccccttgattagatagtttgcttcttttattgatgtaattgttattaacatcttaaattctgtgggaaagaaatggttacattttttattattttttcaaatgaaattaaacctggatcaagcactccatctgccagatacactagggtcagtgtctctgtcttgaagtaccacccctctctaaaatgaccaacaactctggtgggttttctaatagaaagctgggagagccagcattctgcagcccttgcttcctgctgccacttgagtgtgctgtggacactggtccgactggttactgctgctaatctaggttcccggttgcacttcctagcatcctcaagcccctcctgtagatctagaacttctgttggctttttcttttcagatatccacatccccacaggtcagagagggttcctcttagagctctactcccaaatggtcctgttattccattttgctacgtaatagagctacacgtttatcctccttcttaaagcagctacttgattgcttgaggccgtgggggaggtctacttgcttctcct

SEQ ID NO: 614685 - DNA, 423 bp, Homo sapiens
tgggtttgagtcccagctccgtgcctagaaagttgtgtgatttggggcaagtttctattcttcttgggacttcagtttccccagctgtccaatgagggctggtgagttggtgtgtggcagcctggttctgatggtctgagctcagcctctctcagacatgaggagtgggcctgagagtgtcagcactcactctgcctgctggacagagggctccctttgcagaccttggggccaggaggtgaaggtrgagtgcatcctcagtgttcttgtctccttcttttattaccattctctgattgtgatgcccttgcttcctggatatgtccagttctgccatgcttctctttcccgtgtgtcctaatcgcttgctttttgccaggctttatatccagcatggatacacagagaggccccaacacagtc

SEQ ID NO: 614686 - DNA, 561 bp, Homo sapiens
gggctgagttgactcaaaggctgagcttagctgagactgttgactagatgacctgaccacagcctttccacatggttttggcttctccagcatgatggccgggttttgagacagaatcccacgacagccaggaagcagctgcacagactttatgaaaccttgtcttagaggttccatagtgtcactctcaccatactcaatattgatcagagccatcacagyctgctcaggtccaggaggagggggcacagaacccaccactcaaggggaggaatgtttaagagttttggtgccatgttttaaaactgccacactgaataaggcaaggaactccatttattgagcacctagtttgggccagacattttacatacattatctctacttcttcacaactacctgggaggtattgttattatttccattttgcagatgaggaaactggaggcttagagaggttaaggagcttgcctaaagtcacacagctataactcaccgtgacccttccactaggacatacttctttcatttgtgaagggtcctggggaagacaaggataaa

SEQ ID NO: 614687 - DNA, 347 bp, Homo sapiens
atttagagccatgtttggctttcttttttgagtgactcacaaaaatagcccaattctccaacaatattagtggggatccttatgcctcacattaaggggacagctttgaccagaaaagctactcgactagtcagcaacaactgagtgtcctagaaccscagcagagagaggagggagacaggataagcccaaggtaaggcctttccagagagggaagtgtcttcatttcccattgctgctgtgaaaatctgaacagcttcaagcaacacaaatttatcttactgtctggaagccagatgtcctacatggatcttgacaggccaacatcaaggtgtcagtgcggccaa

SEQ ID NO: 614688 - DNA, 554 bp, Homo sapiens
atgccattgagtggacctagacagatgcatgggtggcaggagattccagacaacccagaggtcagggtcaggctcagggtcgagcttgaccttccttgcaagagtccatgctccacaggcaaggaaggctggctggagggcgtggtccctcatcttcctcacctctgctgtcctgcactcttaaatgcacaccagcaatttcagtggctcaggattgcatttgccatttatatcctttcacttcaacatctgcatgacttttctcagttagctgttgctgcagattgagtgctgagctccagcagctcasacccagtggggtttgcatcctcaactgggaggcggtagataggagcgaggagtcaagcactcaggctctgggaccacacccacccggggcaaggccagtgccaccacctcctatttgtgtgacctggcatcttaggttgaagtccctacaaacagagcctgagatgcttgggaaagtaatttattgtggaagtactcaggagaaggggagggaagcaggatgaggcaggaggagctctgtcttg

SEQ ID NO: 614689 - DNA, 596 bp, Homo sapiens
aatgctaaaaatttttaacgaacaagcagaaagatcttggagcatgcctggaagcaagtccacagaacggaagcagcttagaactttttatagcattgcagacgtggtgatgacaaaggcttgccttccttccactgctctgttaacgatcttttaaagtcctttcagagccagtgttttttttcccctcttctttccattcttgcttgcaaacgaaagatgattttagaatccaggccttctttattttgctaaagtacatgatgagtaaaatggcctctcagtcagcactttccaattttgaaagatgctaaaaactgatctttaaaagcatatttttctactttatgcatcaaagggccatgaggcctgctggaggggatggatgaactgcaggaaggtggcaccacctgcaaggctgggcctcactgtggagggcaggaagcggctgggatggggagcaggtgtttgggccagggcctggctggtctcctggtggcygccccacccgttctctttcagcctgttcttctccatgggacaggacccagctggatcccaatgccccagaaagcaacaaagaccccatttacctg

SEQ ID NO: 614690 - DNA, 439 bp, Homo sapiens
atttttttttaaattgtgtcatggctacatgtatacagctagtaagaaccaaaggggttcatggggctgaaccgtgtgaactcaggatggcccactctcatgcaatagtacccgtttgtcagtcataggtcctaagaccacmtttctaccagatgcagagaaaatggaggtgtggtggctcatgcctgtgatcccaacactttgggaggccaaggctggaagatagcctaagcccaagagttagaccagcctgggcagcatggcaagacctcatctctacaaaaaatttaaaaattagctgggcgtggtgtcatctgcctgtattctcagctactcaggaggctgaggtgggaggattgctggagcccagaagttcgaggctgcagtgacccatggtcatgccacagcattccagcctgagtgacagagacagaccctg

SEQ ID NO: 614691 - DNA, 514 bp, Homo sapiens
agcagcaaattcagagtgaggcagaggaacttgatgatagtgaaaaatgacagtgtagaactgacagctagaaaggagacaaaaagccatgaaaagtggatccaaagtctaagtacaactgtctggggccatctggtgtttgggrcagtcttctctaagcccaagaacatagcccagaacagtgacttatgttcagaatgaaactatgggttaccaagaggagaagagaatgagaaggggcagctaaaatgtttctgaacatagtgtttgccatgcatgatacacaaattatctcatttaattcttaaaccagtacagtgaggcaggctttgctttcctctgtctgtccatgggaaaagtggggctccaggagttgtgtgcatgagttacctggcaggcatgtggcagaaaatctgctgtttgactgtattattgttttccccaaaaagtcagaagctaggttagaaaaagttttgtcttcatcaaaattgactaatgttctaaataaaatgta

SEQ ID NO: 614692 - DNA, 514 bp, Homo sapiens
agcagcaaattcagagtgaggcagaggaacttgatgatagtgaaaaatgacagtgtagaactgacagctagaaaggagacaaaaagccatgaaaagtggatccaaagtctaagtacaactgtctggggccatctggtgtttggggcagtcttctctaagcccaagaacatagcccagaacagtgacttatgttcagaatgaaactatgggttaccaagaggagaagagaatgagaaggggcagctaaaatgtttctgaacatagtgtttgccatgcatgatacacaaattatctcatttaattcttaaaccagtacagtgaggcaggctttgctttcctctgtctgtccatgggaaaagtggggctccaggagttgtgtgcatgagttacctggcaggcatgtggcagaaaatctgctgtttgactgtattattkttttccccaaaaagtcagaagctaggttagaaaaagttttgtcttcatcaaaattgactaatgttctaaataaaatgta

SEQ ID NO: 614693 - DNA, 378 bp, Homo sapiens
gggaggttgcagcgagccgagatcacggcagtacagcccaggctccgcaagagagggagaccgtagaaagagggagacggagagcgagagcgagacggagagcgagagcgagagggcgagggagagggagagctctgtttctaaactttatctttttcttttccattgtttttcaccaaaacatcttaatttctgtagctttataataagtcttgataactactcatataggttctccatcttagttcktcaaaactatcttggctattcttgtctctttgcatttctatatacatttttaaaacagattgccagtttatacacacatacatacatactttctctggtttttattgggattttactgaatctgtagat

SEQ ID NO: 614694 - DNA, 378 bp, Homo sapiens
gggaggttgcagcgagccgagatcacggcagtacagcccaggctccgcaagagagggagaccgtagaaagagggagacggagagcgagagcgagacggagagcgagagcgagagggcgagggagagggagagctctgtttctaaactttatctttttcttttccattgtttttcaccaaaacatcttaatttctgtagctttataataagtcttgataactactcatataggttctccatcttagttcttcaaaactrtcttggctattcttgtctctttgcatttctatatacatttttaaaacagattgccagtttatacacacatacatacatactttctctggtttttattgggattttactgaatctgtagat

SEQ ID NO: 614695 - DNA, 494 bp, Homo sapiens
catttttaacaagcttcccaagtgatttacaaacggcagcacrggaaccagcaaactaaatattctctcgtgtacttccaaatgagactctgtgattcaaacctcccacagggatgccagcgagaaagtctgccagtttcacctctgtggggatcagttgcagatgtggaagaggatgtatccttctcctgccctctcttctgtccatgaggctcccctctcccaggaagaaggactcagctcatttctgttgggatgacagactcataaggtttagtcacattgtaggttagcaagcttgtgtgggctagccttgggacctaaccactatttataacatagtgtctgtgggaaaatatgttccaagttccaacaaatgcctttaaaaaatattctggaggccaacctatcagtaattgggactatctgcataagttattttctcagaaacttttagcatctcacgataaacttgacctcggaggatggtaatt

SEQ ID NO: 614696 - DNA, 631 bp, Homo sapiens
gtaaagtttatatagggacttttgttgacctcaaggccaaatccaatagacaatatgatcttgatccccttagtgtcccacaaaacaaaacaaaactatatcaaggaagtttaaaattacactcagttaccacccagtgagaccacactgggaatgttcacctcaagtctggacctcccacttttaaaggatcatagaaaccttgaaggctgctccagtgtcgtgttctggtcagggaggtgttgtagaaatgtcrtctgaatgtagtcattaggtcgaacaagggaattcaaaaatggacaccaccaaccctcgaatgccattgcgtgcattggagaaagctcataggagcaaaatccaaaagagaagtcaaaggggcctcatttctgtgatgcttaacgcaattaattaaagaaacacgcatccaagtactgtttaaatccttttaaaatggtcagtagttaacaaccagaaatagacacaaatcacattttaaaaaatcaaagaaaatacagccaagtagtaaaagatggaaaaataacaaggagacactaaaacaaaacattaaatgatgtgacatcaccatagcaagatggtataggaaattcacctaacataattaggaaattca

SEQ ID NO: 614697 - DNA, 537 bp, Homo sapiens
tcaacgctcttaatatttggatgtcttaaaatgtctctgttttcctctcacttttgaatactgctttagcagagttcagaattccaggcatgcagttacttcyctgcagaatttgtcttttgggtctcttgttactgaagagatgtctgctgtccatccagttattgactccttagaaactgtctttttctggtaactcttgaggcctatgcctggaacaggcttcctctcgcttttatcatattcttttggccacatcaagtcacaaggccagcccagattcaaaaggtagaaagtagactccacccttttttttttttttcttcccctgagacagtgtcttgctccgtcaccaaggctggagtgcagtggtacaatcatggctcactgtaacctcaatctactgggctcacgcgattcttgtgcctcagcctcctgattagctgggactacaggtgtgtaccaccatgcctggctaaattttaaaaatgtttatagagattgggtctcattatgttgcccaggctggtctcgaac

SEQ ID NO: 614698 - DNA, 537 bp, Homo sapiens
tcaacgctcttaatatttggatgtcttaaaatgtctctgttttcctctcacttttgaatactgctttagcagagttcagaattccaggcatgcagttacttctctgcagaatttgtcttttgggtctcttgttactgaagagatgtctgctgtccatccagttattgactccttagaaactgtctttttctggtaactcttgaggcctatgcctggaacaggcttcctctcgcttttatcatattcttttggccacatcaagtcacaaggccagcccagattcaaaaggtagaaagtagactccacccttttttttttttttcttcccctgagacagtgtcttgctccgtcaccaaggctggagtgcagtggtacaatcatggctcactgtaacckcaatctactgggctcacgcgattcttgtgcctcagcctcctgattagctgggactacaggtgtgtaccaccatgcctggctaaattttaaaaatgtttatagagattgggtctcattatgttgcccaggctggtctcgaac

SEQ ID NO: 614699 - DNA, 413 bp, Homo sapiens
gcacaaatgtgacaatgtggccaaggttattccaagagattggaaataatccaaatgtccatcagtagaggactggctgtacaaactacagtacatccatacaaagcagggctgtgcatctgtgaaaaaaaaaataaggaatgcctttctacagtgataatacagtgaaatctgggaaaattaagtaaaaaaaaaagcaaggtgcagaagagtgtagactgtatgctccctttgcataaaaagaagaaatgaggaacaaacacacacacacacacacactcacacacacacacttgctcatattttcaataagaaaaactggaaggataaattaaaaactaataacaatggtcacattatataaggatggcrtggaacagaatggagagagcttagattggagccaagaattc

SEQ ID NO: 614700 - DNA, 520 bp, Homo sapiens
agcgtgtgcctcacttggtccgaagctgagggaccccagaaaacagcccgccctgggttttataccttggggtaacatatattgctgggctaaagtgctgaaggatatcctctttgtagcagggacaggagcaggacctagttgttctggccagtccawccttatatcagaatgttacattcccagtatcttcttttgttttttattttttcatttttgagatagtgtcttgctctgtcacccaggttggagtgcagtggcatgatcttggcttactgcagcctctgtctccaaggttcaagcaattttcctgcctcagcctcctgagtagctgtggctgccactatgcccagctaatttttgtgtttttagtagagatggggtttcgctatgttggccaagctggtctcgaactctcaacctcaggtgatccacccacctcagcctcccgaagtgctgggattacaggcatgagccaccacgcccagcccattcccagtatcttctgcagttattcttg

SEQ ID NO: 614701 - DNA, 562 bp, Homo sapiens
  misc_feature 1, 2, 3, 4, 5, 6, 7, 8, 9: n = A,T,C or G
nnnnnnnnnagtaatgaaaaaatgcaaattaaaatagcaatcgccaaaaatcagaaaagaakaatacacaatactggcagggaatgctcccgtatactgctatgaaactctaaattggcatgatctttctggaggacaatttggcaatatgtacaaaaggttcaaaaatgtgcatatgctatttctaggaattaacttcagaaaataatcagagatgttcccacaaaagtacaagtatgagtttactgcattatttataatcagtaaaaattggcaactacctccatgttcaataacggcagccttcttgagtaactgatggcatacgcacagggtagaatagtttaaacaggaattggataaagatggtgagagcaaacacacatctacctcctgtcccatctccgaatccttgaaatggccggccaaaaaaatgttaagaaaaaaaaaaatcccaacagttttggaaaaaagaagaagaccgttcatggacagggtatttgcagaattgttggaatataggaagaaagggaacagactgtaggataaatatgactggagg

SEQ ID NO: 614702 - DNA, 463 bp, Homo sapiens
gaatgctcccgtatactgctatgaaactctaaattggcatgatctttctggaggacaatttggcaataygtacaaaaggttcaaaaatgtgcatatgctatttctaggaattaacttcagaaaataatcagagatgttcccacaaaagtacaagtatgagtttactgcattatttataatcagtaaaaattggcaactacctccatgttcaataacggcagccttcttgagtaactgatggcatacgcacagggtagaatagtttaaacaggaattggataaagatggtgagagcaaacacacatctacctcctgtcccatctccgaatccttgaaatggccggccaaaaaaatgttaagaaaaaaaaaaatcccaacagttttggaaaaaagaagaagaccgttcatggacagggtatttgcagaattgttggaatataggaagaaagggaacagactgtag

SEQ ID NO: 614703 - DNA, 609 bp, Homo sapiens
tccactgtgagctccctactttaaggtcagctgattagcaaccttaattttatcttcaatctaattccccattgccatctaacctcatgcaagttctgggaattaggatgtgggcatccttggggggccattattctgcctactacagtaagcattcaataaataatttttattaatgccattattctctcctttctcttaggaaacaggagggcaggaacacaagaaagggcttggggagggggatgttaaaggttcccaaagtagccaamtgtgtctcccttttcgcatgcagcacgtgcagtcagtaggtaagtcctgtgtgtagactttcgtaccaggcagcctgtcacagaaggattagattttacttggactcactgcagaggctgggaacctggagcacttgggcacaggaggaagttttcagttcgatatcagatgaaagtttttaagggttgcagctcttcaaagttgggatgggttgcccttgaaaggaaggccctccctgtccttggaagtttgtaagaagaggccgggtgagctaactgtttccaaacgttcctcccctcaagaattccttggctctactatagacccaccaaacca

SEQ ID NO: 614704 - DNA, 463 bp, Homo sapiens
gaatgctcccgtatactgctatgaaactctaaattggcatgatctttctggaggacaatttggcaatatgtacaaaaggttcaaaaatgtgcatatgctatttctaggaattaacttcagaaaataatcagagatgttcccacaaaagtacaagtatgagtttactgcattatttataatcagtaaaaattggcaactacctccatgttcaataacggcagccttcttgagtaactgatggcatacgcacagggtagaatagtttaaacaggaattggataaagatggtgagagcaaacacacatctacctcctgtcccatcyccgaatccttgaaatggccggccaaaaaaatgttaagaaaaaaaaaaatcccaacagttttggaaaaaagaagaagaccgttcatggacagggtatttgcagaattgttggaatataggaagaaagggaacagactgtag

SEQ ID NO: 614705 - DNA, 545 bp, Homo sapiens
atccatggattcaaccaaccatgaattgaggatattttttttcaggggggcaccgggggaacagagtctcactctgttgccaggctgaaggacagtagtgccatctcagctcactgcaacctccacctctcaggttcaagtgattctcctgcctcagcctcccaagtagctggrattacaggcgcccgctaccatgcccagttaattttttttgtatttttagtagagacagggtttcaccatgttggccaggctggtctcgaactcctgacctcaggtgatctgcccacctcagtctcccagagtgctgggattacaggcatgagccaccacactcagcccggatggaggatattttaaaaataaataaataaataaataacaacagagcaacaaaaaataacacaaaaaaaaacccaatgcagtataacaactatttacctagcatttacactgtattaggtattaaaggtaatctagagataatttaaagaatatgggaggatgggcataggctatatgcaaaccactacaccatttttata

SEQ ID NO: 614706 - DNA, 531 bp, Homo sapiens
ttggttttcatagtaatgattggaataaaacagagacacttttcagtgatagaattaagacctctcttcagagtaaatccttctttactttgcctctttcaagtgcatgaaaagagctgctagataagtttatttaatcacttggaatacgtcatgttaactcaaggaagaagcaaagtgcctgaaaagccagaataaactgtgcataacttttttttttcccctcacaaaatctggttccaataaaaaccatctttactgcctgaggctaatgtgtaagttagtgagagattacggtctggtttttatagcattttatgtagtatttgacaatccatagggaccttgcctgttagccctttacaaatataaaatgtaattttaaatttcacttcatcatggtaataggctatataagctttctttctaaagcctacagaccatcctgtcacctcagggagcctcmaacaacctgacttaatcacctcttggtgactcattgcactctgctcactcttttaaaaatatata

SEQ ID NO: 614707 - DNA, 556 bp, Homo sapiens
tttatcaaattttacaggatttatataactcagtgaaccaatatcttttaaatgatcaattataatgtatataattatgcatggctaaaagatccatccaatatgtgagatatatcaattagttatgtataatatgaaaatttattaatattaytttagggtaccctttaatactaacattttagaaactacttgaattttggtgtagtttaaaataattaccttaaaaggctattgaaattctcttcttttaccaaatatatacttatgggaagtgatatatttatcatatgtaacaacccaaacaacatattacaataaattaaaaatagaagtagatatgaaaatccatgtatcttctgctaagatggatattaagtagatttgcaataatttaaaacaatgccattcttctaagatttgtgttttggaagatctaattatatttcacagaagaatgttatgttaacatgtaaaaggtttattgtattttaaaataaattaataaatattttgaaataactcgttttaaatttttcatagagtaaatattgat

SEQ ID NO: 614708 - DNA, 556 bp, Homo sapiens
tttatcaaattttacaggatttatataactcagtgaaccaatatcttttaaatgatcaattataatgtatataattatgcatggctaaaagatccatccaatatgtgagatatatcaattagttatgtataatatgaaaatttattaatattackttagggtaccctttaatactaacattttagaaactacttgaattttggtgtagtttaaaataattaccttaaaaggctattgaaattctcttcttttaccaaatatatacttatgggaagtgatatatttatcatatgtaacaacccaaacaacatattacaataaattaaaaatagaagtagatatgaaaatccatgtatcttctgctaagatggatattaagtagatttgcaataatttaaaacaatgccattcttctaagatttgtgttttggaagatctaattatatttcacagaagaatgttatgttaacatgtaaaaggtttattgtattttaaaataaattaataaatattttgaaataactcgttttaaatttttcatagagtaaatattgat

SEQ ID NO: 614709 - DNA, 556 bp, Homo sapiens
tttatcaaattttacaggatttatataactcagtgaaccaatatcttttaaatgatcaattataatgtatataattatgcatggctaaaagatccatccaatatgtgagatatatcaattagttatgtataatatgaaaatttattaatattactttagggtaccctttaatactaacattttagaaactacttgaattttggtgtagtttaaaataattaccttaaaaggctattgaaattctcttcttttaccaaatatatacttatgggaagtgatatatttatcatatrtaacaacccaaacaacatattacaataaattaaaaatagaagtagatatgaaaatccatgtatcttctgctaagatggatattaagtagatttgcaataatttaaaacaatgccattcttctaagatttgtgttttggaagatctaattatatttcacagaagaatgttatgttaacatgtaaaaggtttattgtattttaaaataaattaataaatattttgaaataactcgttttaaatttttcatagagtaaatattgat

SEQ ID NO: 614710 - DNA, 604 bp, Homo sapiens
gtataaagtctgtggtaaattaagagagatttcagcctactaacaattcctaaaccattctaaatgggtcaggaattcaactgggatatctatgatttttttgtttcttcttatttcctgataatgccatatgttttataatttagcatcttattaaggaggtgagagccttaaaacttttaaagtcaattcctgtttttaactattaaaaataatttttagtggagagtttgcttattattattttgacacaatgcctgcattcattttaagatttaggggattactgagctattcttttacatatctccagcatatcatgcagcatctggaacagagaagacattttcatttatgtttattaaataaccaaaacatacatatgaattaacaaataaactatatataaaggcaatagttagggctttcttttagcatttccttttgtctttaaactagtctcttttatagaaactactcattacggccgggtgcagtggctcatgcctgtaaccccagcaatatrggaggctctgaggtcaggagttcaagaccagcctgcccaacatggtgaaaccccatctctactaaaaatacaaaaaaa

SEQ ID NO: 614711 - DNA, 548 bp, Homo sapiens
tactatgtgtctaatcagcagccatatattcatttaagtacaaaatttgtcgaacacatcctatatgctaggaactgtgctattcttctggggtccagaactgagggtgacacggtctttgctgtcatttccggtctagtgaaggagatagaggagagtgacagttctatgtgacagacagcaggagagggataactaaaacaggctcaggagggagagggcatgacagcacatccagagaaggtgatgacaaggaattaaccaggcagagaagagaggtccaaagacaggattttggtggcttgagtgaggagtatttgccagtttcatgtaacaaccataaattcatattgctttatatttaacttatcagtttaagtcagtgggcaccttttatacatttaagatgatattaggawagtaggggcttagaatattcctacgtggcaacatctcattaattaaatttcctgggatgtatgtgtgacagtgtcccaacatagcatagtaaagaggttgaatgaataacttttagtattgcttctaac

SEQ ID NO: 614712 - DNA, 567 bp, Homo sapiens
ctgggctgagatcactccactgcactccagcctgggtgatagagtgaaactctctctcaaaaaaaaaaaaaagaaaaaaaaaaaaaacaggaggagaagtgcccttcttcctgcaatgtccctccagtaccctccatggacatagtagaagagaaatgcttaragtccagtttactatcacagagcaggtactaagaggtgaatttggagctgagctataataaatctgaccagcacagttgcccaaactaaactccttcctactcactcctcatagttagttgccaaatcttgctaacaacttagcagataaatgtctctagaattgaacccatctgcttcgtcacccctaccacctctgagttagttcatcctcttctttgctctcacatggactttggccacagcctcatgactggttgtcctgccaccagtacattctcattccagccccatacctgcatgactactaggtagcttcctaaaataacaaaattatctttattatgcccttgattgaaaacctctggtacctgatcagctagtgcgagatgttaataccaggca

SEQ ID NO: 614713 - DNA, 434 bp, Homo sapiens
agcagtttgagagacccagacaggaggatcctttgaggccaaggatctgagatcagcctggacaacatactgagaccgcatctctacaaaaaagaaaaaaaaattagttgggcatggtggtgcatgcctgtaatcctagctactcaggaggcttgggtgggaggattgcttgagcccaaggaagtcaggactgtagtgagttaaggtcatgmcattgcactccagtctcaaaacaaacaaaacttgctgaaaatttaattactatatgctgggttcatgccataaactaatgagctagtcacttcacatttctgagagagaacaggaaatgtttatagttaagaaatttgtggtgcgtcacttaagcaaaggtgcagatacaaaaatgagccagatttgttggggtggctccaagcagactggaggtaaataat

SEQ ID NO: 614714 - DNA, 626 bp, Homo sapiens
ggccgttttttcctgttctagtcttgggaaatctgggttactgtactttgttatcatgatcatctcatcagcctccaaytcgtgaacccctcattatcctcctcatctccaggctctcccccatgtggtgagtggtggtgaactgttccccccactttgctgtggatgacatgcaggaactgggtctgcagggccctcgctttgcagtggggagcaagaggcaggtcttctcaccccagaactgaagctccacctatcccctccgttggctggagcacagtgaagaggcacttggcacctataatgtcgatgctcacaattggctgggaaggcgtgggttcaggaggagaatgtgggagctggtgattccagagtgttagagggcatttccagttgtaactcagatgtccccttctctgtgctccccaaacacctcgccgctctttctctcctatctctcctttcaatgggctataattttctggaccagggaccatagcttgttcatcactgtgtcccctggcacgtggtaagtgcttaatgtgggtttgacagaggaggagtgggtttggagcttctttcccaggggacatgagcaagtactttagggcaaggtttgtgaaagt

SEQ ID NO: 614715 - DNA, 626 bp, Homo sapiens
ggccgttttttcctgttctagtcttgggaaatctgggttactgtactttgttatcatgatcatctcatcagcctccaattcgtgaacccctcattatcctcctcatctccaggctctcccccatgtggtgagtggtggtgaactgttccccccactttgctgtggatgacatgcaggaactgggtctgcagggccctcgctttgcagtggggagcaagaggcaggtcttctcaccccagaactgaagctccacctatcccctccgttggctggagcacagtgaagaggcacttggcacctataatgtcgatgctcacamttggctgggaaggcgtgggttcaggaggagaatgtgggagctggtgattccagagtgttagagggcatttccagttgtaactcagatgtccccttctctgtgctccccaaacacctcgccgctctttctctcctatctctcctttcaatgggctataattttctggaccagggaccatagcttgttcatcactgtgtcccctggcacgtggtaagtgcttaatgtgggtttgacagaggaggagtgggtttggagcttctttcccaggggacatgagcaagtactttagggcaaggtttgtgaaagt

SEQ ID NO: 614716 - DNA, 559 bp, Homo sapiens
aggcgtagtggctcacgcctgtaatcccagcattttgggaggccaaagcgggaggatcacttgaggccaggagtttgagaccagcctgggcaatatagtgagagccccatctcttaaaaaaacaaaatagaaatcggagtcttagtgaggtggacttgatcaagttcacagaagaccaagggcatggccagcacaggccacctgtggcccagcgtgcaaggcagcatggtctaatggtgaagagtaacagcatctttcttgttatttaggggattaaatgagatcaggaccttgaacccttcagggcagtgcctgactrctgtcggtttttaatattataatgaggctctgcaggggcttgaacttaggtccctgtaagggagctactgttccctggtataacccactctagctgagctgtgcagagactgagatggtcacctcaaagagcaggggaccccgtgtccagactctggggcatgctggcaacctgaggagtctgcgggagtggcctgatctgtgctgcttgaggctttttgtcccagatcacactgtactt

SEQ ID NO: 614717 - DNA, 559 bp, Homo sapiens
aggcgtagtggctcacgcctgtaatcccagcattttgggaggccaaagcgggaggatcacttgaggccaggagtttgagaccagcctgggcaatatagtgagagccccatctcttaaaaaaacaaaatagaaatcggagtcttagtgaggtggacttgatcaagttcacagaagaccaagggcatggccagcacaggccacctgtggcccagcgtgcaaggcagcatggtctaatggtgaagagtaacagcatctttcttgttatttaggggattaaatgagatcaggaccttgaacccttcagggcagtgcctgactactgtcggtttttaatattataatgaggctctgcaggggcttgaacttaggtccctgtaagggagctactgttccctggtatracccactctagctgagctgtgcagagactgagatggtcacctcaaagagcaggggaccccgtgtccagactctggggcatgctggcaacctgaggagtctgcgggagtggcctgatctgtgctgcttgaggctttttgtcccagatcacactgtactt

SEQ ID NO: 614718 - DNA, 637 bp, Homo sapiens
ccagagctgcttgcccttgggtggtctgcaacagaatcaaggttcagttccagagacctgggaaggcacacaggagaaggctgggccctgcatcctggtggctgcatctcacttgagttagaagtccttccttcccaccttcacaggtgacatggtgcctctggggcctgacccgctgcttagactcatcttagatgaacatttcacagatcaggtaacttacaggctttggtttaacagctgctcatcccagccccgcagcacagagtttcagtgatcattatgggtgtggcaggccggccccttcagcaaaagatgccgtcccatggtggctacatggtgaattgagaagagcatgggccttagatggatttgattccagttcctacttagcttcttactagcaggggaccacaggcatgtttcttaaactcagcctcagttttgttatctgtgaaataagaatgacatacatagtatgtaagagaaggtatgtgaaagtacccagcacaggctgttattaataggtcaggaccccttggggagagtacagcgggagcagacaggccagggaacgatgccaygatggaaagaggatgtcagaagctgggtgcggtggctcacacctgtaatgcca

SEQ ID NO: 614719 - DNA, 626 bp, Homo sapiens
gttcaagaattcaagaccagcctaggcaacacagccagaccctgtctcttaaaaaaaaaaaaaatagcctggcatggtggtgtgcagcatccctgtagtgccagctacttgggaggctgmggtaggaagatcccttaagcccaggagttcaaggctgcaacaagctatgattgtactacagtactccagcctgggtgagagagtgagaccctgtctaaaaaaaaaaaaaaaaaaaaaaaagtaagcctggggtgggaaatagcagagctggttgcccggaacccaatagaagcaagccagagggagtgggaatgaggatgcagaaaccacatgctttcacgcctaccgactggaaaaactgaccctttccaaagtacagacatgcgagtgccgagcagcctggtgggcgtgcatcaaggggaggaatgctcagctgtcatcctcaggcccctcagcagtgcccatgctttatgagggtctgtccagccagcacatttcccccgcttccaacagctccacacctcctctggatcacatgggctctggaagtctcagcagctgacaaggggcctcagaattttctgggcacaagaatgaaatggcaacagtctgtggagttttccctg

SEQ ID NO: 614720 - DNA, 626 bp, Homo sapiens
gttcaagaattcaagaccagcctaggcaacacagccagaccctgtctcttaaaaaaaaaaaaaatagcctggcatggtggtgtgcagcatccctgtagtgccagctacttgggaggctgaggtaggaagatcccttaagcccaggagttcaaggctgcaacaagctatgattgtactacagtactccagcctgggtgagagagtgagaccctgtctaaaaaaaaaaaaaaaaaaaaaaaagtaagcctggggtgggaaatagcagagctggttgcccggaacccaatagaagcaagccagagggagtgggaatgaggatgcaraaaccacatgctttcacgcctaccgactggaaaaactgaccctttccaaagtacagacatgcgagtgccgagcagcctggtgggcgtgcatcaaggggaggaatgctcagctgtcatcctcaggcccctcagcagtgcccatgctttatgagggtctgtccagccagcacatttcccccgcttccaacagctccacacctcctctggatcacatgggctctggaagtctcagcagctgacaaggggcctcagaattttctgggcacaagaatgaaatggcaacagtctgtggagttttccctg

SEQ ID NO: 614721 - DNA, 597 bp, Homo sapiens
taattccccactctgctattcctagattccatttgctgttaccttcctcggatgtttgccttgttacttcacagttctcttgctccaactcgtgcccgacagaggcatcctctcaaggagccgttttcagctccctatgcctctgctcaaacccacagtatgagtgtgctacacaacatccagaggtccctgtcccaccaccctcaatgcccactgggggctgactgggccagcttctgaggcatgagggggccaaggctgggctggacagggcctggccagggttgcttcctaccttgttgcgggccttgtacacactggcagtggccccctgccccagcaggtcatctgtgtgccacaggtaattggctgtgctctgcatctcctgccctgagctggctggtcaccttctgcctagagaaagagcatgctgggggcccaggattccattcctggcacagggtggccgctggtggcctgacctgtaactgtgccccaaggctaccctaagaagggctccatgtgkccattccacaagcaagggagcgggggaagtgtgaagcacagaaaggttaagtaacttccccaaaaggacgc

SEQ ID NO: 614722 - DNA, 543 bp, Homo sapiens
ccacagttcactggagcagggaagttcagggctcttcccagagtcaacagagcaggttgggcaagttaactaagtggaaagctgcctgggaagtccatgctcccacacccaggaaccccaaggaagtgtgggagctatgccgatccagtcctagaagttggatctgagtcaccttcccaggaggcctgcagaggtccgagagcaagcgcggggacccagctgatgccttccagtgtgacctgagcacacagcatgcagcccctcccagccagctcactcacccgcagagtaacagctactctgtgggttgattggatgacatggatatatttggaattgtttgggagcttggaaagcattttacagaaaggcattgaaggcatggaggcccacacacttcagtaatttacccatgctcttcagagactgctggggctggcacccaggtgccaacttcccagccaggactcgatgccccrcatcaaatgtcctaggaggctggaggggtctgtcctgctctggtcagctcagagatggcagttg

SEQ ID NO: 614723 - DNA, 547 bp, Homo sapiens
gggcttggcagcttctgggagtcagagtgagagaacacctgtgagtactgttttggggcaagagaacaatatttctgcccttttgtgacagactgatcttttctcaccaccccacacccatagggtcacatccgcttctgctcaggtatctagtctcagaaaaatgaatggcctgaccctcttaaagcaacaccacctccttatgggcccctcccccaccctgggcttagcatgggmggatgtgaattagccccagtttgtcccttaggagcctgtacagctggtgaagcattagtaatccaccatccccaaagaaatccattaacgagctcctgggctgggcacgtggtgtgaggtaaccgatcacttctgtcgtctgaaactttggagacattgattttcagactcacaggcgcgactgagaagtgaggctcggggcaggctcttccctgcagcctgtttggtgggggcatttttatcttatcaagctaaaagccccaggaatagaaagttttccactgggggaggtggaggggaaaggacctca

SEQ ID NO: 614724 - DNA, 543 bp, Homo sapiens
tgtgcccctcacttctagagcccaaatcctttgtcagctacccagggtcctccgtctgtcttctcaggggcccagggatgggtgagagggcccagagcccagggctgggagacctctgctgctttgtctctcttacacccagagcaaagtgacacatgcctagacgaggggcccctcctgagcaggcctggggccgagagggtatctggcagctccacactggctttggatatcatgggcttgttgctatttgttgagttcccttaaacccaactgcctacagtgttttaaattattttttttttcttaaggtgcctggcaataggatttcttttttcccgtggtgatgatcaaaccagtatatatctttactgagctttctctctctctctcgaatcctttcatacacttcttcctgtcacacacagtcttggttgtgactgcctgwactttgtaacagtgagctatgggaggccctcagtcagcacatggtgagtgaatgcaggccacacatgcacaaatgaacaactggttaggagctgg

SEQ ID NO: 614725 - DNA, 576 bp, Homo sapiens
gagtagttttttaaagattatatatctgatggcagagaaatttatgataaaaatgtgctttgggtagtgttcagatttgtattttaattctcacttgcaagaagccaaattaaaaataaaatttaaaataagttaattctaaatctttggcccttgggtccataataatttttctgtggtatttcttctgtgaagaagaaatatttaaatttctcttcctkgttgcactatttgaggcatttccttttgctttatcatcactcaagttatctattgctgtataacaaatcactcctaaatttattggcttaaaatatctttatttttgtgctgtgtgttgactggggacattcttgctcagggtctctcttgaggctgcagtcatctggacatccaaggtgaccactcacatggctggcagttggtgctggcttcagctggagctcagctggactatttgttggagaacctgtacatgcttctccgtgtgtgttaggctctggcttccaagaacaagcatcccaagagtgagtgtcatgaaaaacctaggtgaatgctgcaaggtttcttatgatg

SEQ ID NO: 614726 - DNA, 576 bp, Homo sapiens
gagtagttttttaaagattatatatctgatggcagagaaatttatgataaaaatgtgctttgggtagtgttcagatttgtattttaattctcacttgcaagaagccaaattaaaaataaaatttaaaataagttaattctaaatctttggcccttgggtccataataatttttctgtggtatttcttctgtgaagaagaaatatttaaatttctcttccttgttgcactatttgaggcatttccttttgctttatcatcactcaagttatctattgctgtataacaaatcactcctaaatttattggcttaaaatatctttatttttgtgctgtgtgttgactggggasattcttgctcagggtctctcttgaggctgcagtcatctggacatccaaggtgaccactcacatggctggcagttggtgctggcttcagctggagctcagctggactatttgttggagaacctgtacatgcttctccgtgtgtgttaggctctggcttccaagaacaagcatcccaagagtgagtgtcatgaaaaacctaggtgaatgctgcaaggtttcttatgatg

SEQ ID NO: 614727 - DNA, 505 bp, Homo sapiens
cttctgccttagcctcttgagtagctgggattacaggcatgcaccagcacgaccggctaattttgtatttttagtggagacggggtttctccatgttggacaggctggtctcaaactcctgacctcaggtgatccaccctcctccgcctcccaaagtgctggaattacaggcgtgagccaccacgcccggacttctgacactattttttatgtgaatccaagttttggacctatataatctgccttttccctaaataacttattttaacatttcttgcaaggcagtcccagcaacaaattccctccatttttgtttgtctgataaattaattctttttcacttctgcaggtaagttcagtgattatagaattttagsttggtggttcttttttttttttctttcaacattttaaatatttcaccttgcttttttcttgcttgcatggcttcagaagggaagtctgtaattcttattctgtagttttgatttttttaaagaattct

SEQ ID NO: 614728 - DNA, 598 bp, Homo sapiens
tattttctatcattttatgtttccttgtttttgatatttttctatacaaacttgatttatttttacattttcaaatgatttggcagttactaacattgcttttaattattctcatggttttatttaaaaaattttaaaagttttccttatatgtccctagttattaaaataagaagaaaattaaaaagtatctcctgagctccactcagataaaatgaagcatttttgaaacttttagtttcacttttcattctagtcccagattttgtatatagaagtttggatatgaggagtagattactgctattagatgatcatataatcatgttacaaatatcctgcttgtagaattatttgcattcaattcacatttagtaagattcaattctatttcacatttaactggattcaataaaagtttgacatttttaattgtttattattacgtrtcatttttgggtcatcacttggttaactgtaggttgtataaaatataatttttttgcaagaaaggtaaaagttggcatatctaaacactgacatatctggaaaaattgctttcgcatgtaaataacaaattagatagcaataaaagttt

SEQ ID NO: 614729 - DNA, 558 bp, Homo sapiens
gctttcgcatgtaaataacaaattagatagcaataaaagtttaaatttataaccttttccttttaggatacatgattattaacatattgttaggtaatatttgagactgtaaaataagttygatgataaacccttacaaattttaaaatttttatgtattttttctctcagtatgtttgagattttttttattattcttgtattttgtatttttccaaagtatgttacatacagattttcttttattttaagccttcttttggtgaaacttcttgttttcctttattcttcactttataaaagtattttaattatactattgctttgttttttttacaaaattgctttttcttaagtattaagttttaaattgactctttcttctctcttaattcagcccacttcaattttattgaattatattcaaccactatctactgagcatcattacatactgagctttgctgagcatcgatgacagatacagcccttgccttgtagagttgaaagtctagctgacaaaagcaaatattaaaagataaattatatttgggatgt

SEQ ID NO: 614730 - DNA, 575 bp, Homo sapiens
  misc_feature 228: n = A,T,C or G
gcatgacaggggaaaaaaagagattcacatagtaaaagaggcttagatgcacagccaggaaaacaagtcagacaggaagaaagacaaagacacaaaggtatactgactaagagacagcaagagaataagaatggagaggatagggaggaatagagacaatgacaaaaagaacagagaagaaggcatagacagagccagagaaaacagagccagagtagcagagaaagncagagatacagagagagacagagagaaagggagtgagaagtggaacaaatgatatcaagagatagaagaaggagagagagagagagagaaagagwgagagagagaaaaaaaaaaagaaacccaaagatggaaagacagtcatggcatggggggatacagacagaaagagaatcgtgtgtttgtgtgtgtatatacgatatacataatatatgtatatgtatgtattttatggtgaatgtggagccaccttctgaatatattctgcataaaaccttcctggtttttggtcagttttgttctaactatttttggagttgtatgaaggccagaggcaatgcttctgttca

SEQ ID NO: 614731 - DNA, 571 bp, Homo sapiens
tattgttaaaatgtccatgcaacccaaagcaatctacagatttaatgtaatcccttttcaaaatataaatgacattcttcacaggaatagaaaaaaatcataaaatktatatggaaccacaaaagatccagaataggcaaagctatcccaaacaaaaagggaaaaactggaggaatcaaatgacctgacttcgaattatattacagagctataataaccaaagcagcacggtgctggcaaaaaaacagacacatagactttattagtttgttctaacactgttaagaaagagatatccaagactgggtaatttataaagaaaagaggtttaattgactcacacagttcagcatggctggcaaggaatagggaaacttaaatcatggtgaaggaaaagcaaacatgtccttcttcacatggtggcagcaaggagaagtgctgagcaaaagaaggcaaagctccttataaaaccatcaggactcatgagaactcactatcacaagaacagcatgaaggtaactgcccccatgattaaattacctcccaccagtttcctcccatgacacatggg

SEQ ID NO: 614732 - DNA, 571 bp, Homo sapiens
tattgttaaaatgtccatgcaacccaaagcaatctacagatttaatgtaatcccttttcaaaatataaatgacattcttcacaggaatagaaaaaaatcataaaatttatatggaaccacaaaagatccagaataggcaaagctatcccaaacaaaaagggaaaaactggaggaatcaaatgacctgacttcgaattatattacagagctataataaccaaagcagcacggtgctggcaaaaaaacagacacatagactttattagtttgttctaacactgttaagaaagasatatccaagactgggtaatttataaagaaaagaggtttaattgactcacacagttcagcatggctggcaaggaatagggaaacttaaatcatggtgaaggaaaagcaaacatgtccttcttcacatggtggcagcaaggagaagtgctgagcaaaagaaggcaaagctccttataaaaccatcaggactcatgagaactcactatcacaagaacagcatgaaggtaactgcccccatgattaaattacctcccaccagtttcctcccatgacacatggg

SEQ ID NO: 614733 - DNA, 599 bp, Homo sapiens
tcctttaatttgcacataagcacaggtacacattttgtgcaaatatgcactctgctgttgccctaccagctagtcctgggtccagtcctaaaatgtagccctgtttttcttatatggggctatatcattctagacatacaaaaaataggaaaatggccaacacaaagtccgattttaaaataatttaagtgtttgttctttttcacctctgctactaacatctatcttcttgtaatccctctgttacaccacaaaaatgtaatgccttcacactgccctttggcttttgaaatttttctcagtgcgagtccccttgggcttgcctaacctctaatgtcacatgttccacagttacatcactttttctcttttctgmaaagctccccacttctcatgtggatcataaataggggcttaggaaagcaatctgattgggctgaaacacctaagcaaagactttttgatgagtcacttcccccttgcccagtccgcataaccttcccaggcacatttatgttttaatcaatgtgtttacagaaatcgtaggtgtaagatatttacgaacaggcttctttttaagtaataatttttaagtactt

SEQ ID NO: 614734 - DNA, 491 bp, Homo sapiens
ataggggcttaggaaagcaatctgattgggctgaaacacctaagcaaagactttttgatgagtcacttcccccttgcccagtccgcataaccttcccaggcacatttatgttttaatcaatgtgtttacagaaatcgtaggtgtaagatatttacgaacaggcttctttttaagtaataatttttaagtacttttcagcccaagaaaatgttttaaacaaaatttacacagatrccaaatgtacaaaacatgtgaaaacagaagttattgttgaagtaatgcgagtggaaccaaaaaccagcactcttaactcctctctcatacagaatagccccagacacacatcctcagagtcctcattcctcagagcaagatttgaatgccactgcagattctcacatgtttcagctttctctgagctttagttagggagaagaaaaagaagcaggtcttccaccactcattcaattgcgtaaaaaaaaaaaaaaaaa

SEQ ID NO: 614735 - DNA, 580 bp, Homo sapiens
ccaataataataataatatactacacttactataagcaaagttaagatcatttcatacattcttattcattcaactcattacagctctatgttttagttattgttattatccccaacttatrgatgagcaactgaggttcaaaaacaagtaacttattcatggtcaaacacatagtaagttgtagagcagaaatttgaacctatgcaatggggctttgggatgtctgctgctaactgctatatgatactgactcatgtaaaacacatgctaccatgtgtgctcacatcattgtcactggtgtatgataatgcatcaaggtgcaagaagattcctgtttatctcctgcctgaatagctccctttaaagtcagacatataaccaacgtggatgtttactagccatatcaaatttaacatatcaaaaataaaaaattctaatttacccaacccaacccctcacaaagatgctcctaatgcagtcttcctcatctcagtaaatatgatctctaacagtccagttatggaggctgaaactctggcatggtggatataggctaaaactcaggtattctgatgtggc

SEQ ID NO: 614736 - DNA, 580 bp, Homo sapiens
ccaataataataataatatactacacttactataagcaaagttaagatcatttcatacattcttattcattcaactcattacagctctatgttttagttattgttattatccccaacttatggatgagcaactgaggttcaaaaacaagtaacttattcatggtcaaacacatagtaagtkgtagagcagaaatttgaacctatgcaatggggctttgggatgtctgctgctaactgctatatgatactgactcatgtaaaacacatgctaccatgtgtgctcacatcattgtcactggtgtatgataatgcatcaaggtgcaagaagattcctgtttatctcctgcctgaatagctccctttaaagtcagacatataaccaacgtggatgtttactagccatatcaaatttaacatatcaaaaataaaaaattctaatttacccaacccaacccctcacaaagatgctcctaatgcagtcttcctcatctcagtaaatatgatctctaacagtccagttatggaggctgaaactctggcatggtggatataggctaaaactcaggtattctgatgtggc

SEQ ID NO: 614737 - DNA, 580 bp, Homo sapiens
ccaataataataataatatactacacttactataagcaaagttaagatcatttcatacattcttattcattcaactcattacagctctatgttttagttattgttattatccccaacttatggatgagcaactgaggttcaaaaacaagtaacttattcatggtcaaacacatagtaagttgtagagcagaaatttgaacctatgcartggggctttgggatgtctgctgctaactgctatatgatactgactcatgtaaaacacatgctaccatgtgtgctcacatcattgtcactggtgtatgataatgcatcaaggtgcaagaagattcctgtttatctcctgcctgaatagctccctttaaagtcagacatataaccaacgtggatgtttactagccatatcaaatttaacatatcaaaaataaaaaattctaatttacccaacccaacccctcacaaagatgctcctaatgcagtcttcctcatctcagtaaatatgatctctaacagtccagttatggaggctgaaactctggcatggtggatataggctaaaactcaggtattctgatgtggc

SEQ ID NO: 614738 - DNA, 308 bp, Homo sapiens
atttacggtgggcacctcatactatacctgatagtttatgctaacaaatgactaaaggtgggaactggtcatgctagaaagaccaaccatgtggttaacagattaggctttcagcagtgtgatatcagccggatttctggaaggggaaaaagaggagaactgaagattgaatccaaccatgtggccaatgagtcaatcaacatcatgactcaatgyagcctgaataaaaactctggacaccaaagctaaggtgagcttccctggttagcaatactctttgaacattgtcacacttcaaagctgggagg

SEQ ID NO: 614739 - DNA, 308 bp, Homo sapiens
atttacggtgggcacctcatactatacctgatagtttatgctaacaaatgactaaaggtgggaactggtcatgctagaaagaccaaccatgtggttaacagattaggctttcagcagtgtgatatcagccggatttctggaaggggaaaaagaggagaactgaagattgaatccaaccatgtggccaatgagtcaatcaacatcatgactcaatgcrgcctgaataaaaactctggacaccaaagctaaggtgagcttccctggttagcaatactctttgaacattgtcacacttcaaagctgggagg

SEQ ID NO: 614740 - DNA, 308 bp, Homo sapiens
atttacggtgggcacctcatactatacctgatagtttatgctaacaaatgactaaaggtgggaactggtcatgctagaaagaccaaccatgtggttaacagattaggctttcagcagtgtgatatcagccggatttctggaaggggaaaaagaggagaactgaagattgaatccaaccatgtggccaatgagtcaatcaacatcatgactcaatgcagcctgaataaaaactctggacaccaaagctaaggtgagcttccctrgttagcaatactctttgaacattgtcacacttcaaagctgggagg

SEQ ID NO: 614741 - DNA, 644 bp, Homo sapiens
tattatgcttatttgcaatgttgcccaaaaatgattgtgtargtattagtgacatagttgtgacaagaagccaagccaggaatgagggccatacccctagggactgtcttcctgggtccaaaggaaagaccaagtttgctgaaattttaacaggaaattcttacaagataatgcccttctgaaattgccctgatcttcaggaatatgaaggaagcatatataagtacaacaaaaatacattttagtcaaaggctgaatggcagagtatttaagtcaaaatttaaccacgactgaagctaaatatcaccttcacagaataaaatttctgagataagagtatatcttaagtccaaaacttgtgaaataataatatttaactattttcaatactacactattacaggaaaattaactgcttttaaaaataatagtcaaattttataagtttgccattaaaggaaaagaaaaaatgcttctgaattgtaactagctaattgcagctgcagctcccaaactgcacatttgcaacactgttttgaagttcacttccaacccaggtcaatggaagacataaagtatattttgatcagttttgtttctattgtttcttacagctgatgttaccaccaaggtcttacagtatt

SEQ ID NO: 614742 - DNA, 644 bp, Homo sapiens
tattatgcttatttgcaatgttgcccaaaaatgattgtgtaagtattagtgacatagttgtgrcaagaagccaagccaggaatgagggccatacccctagggactgtcttcctgggtccaaaggaaagaccaagtttgctgaaattttaacaggaaattcttacaagataatgcccttctgaaattgccctgatcttcaggaatatgaaggaagcatatataagtacaacaaaaatacattttagtcaaaggctgaatggcagagtatttaagtcaaaatttaaccacgactgaagctaaatatcaccttcacagaataaaatttctgagataagagtatatcttaagtccaaaacttgtgaaataataatatttaactattttcaatactacactattacaggaaaattaactgcttttaaaaataatagtcaaattttataagtttgccattaaaggaaaagaaaaaatgcttctgaattgtaactagctaattgcagctgcagctcccaaactgcacatttgcaacactgttttgaagttcacttccaacccaggtcaatggaagacataaagtatattttgatcagttttgtttctattgtttcttacagctgatgttaccaccaaggtcttacagtatt

SEQ ID NO: 614743 - DNA, 480 bp, Homo sapiens
cttatccagtgtagttcatctacagtaaattataaccccatttctgcttagtctgaaattcagggtatactggaagttccccttcctgaagtcttcagatctttgcttcaggagcaacccaatcataatttccrtttcggaatctctgaaaataataaggaatgagaaacattccttaggccacaaatcaggaaggtcctcaatgttttctgcttcaaggttttttttaattgacatttgacaaaatgaggcaatactacccactctcaattcaagaggaggctcactcagattagaagccagtcctgtcgttgatatcaatgtccttttgatataataataacctgtatataggtgctcaaagaaaccctggaaatagtcaagatccttctttttacaagtgcagaaactgatgcccagagaagttagcagccttgtccaacattaaacaggtgcagatgccactaagaatcagaactc

SEQ ID NO: 614744 - DNA, 480 bp, Homo sapiens
cttatccagtgtagttcatctacagtaaattataaccccatttctgcttagtctgaaattcagggtatactggaagttccccttcctgaagtcttcagatctttgcttcaggagcaacccaatcataatttccgtttcggaatctctgaaaataataaggaatgagaaacattccttaggccacaaatcaggaaggtcctcaatgttttctgcttcaaggttttttttaattgacatttgacaaaatgaggcaatactacccactctcaattcaagaggaggctcactcagattagaagccagtcctgtcrttgatatcaatgtccttttgatataataataacctgtatataggtgctcaaagaaaccctggaaatagtcaagatccttctttttacaagtgcagaaactgatgcccagagaagttagcagccttgtccaacattaaacaggtgcagatgccactaagaatcagaactc

SEQ ID NO: 614745 - DNA, 580 bp, Homo sapiens
gcagatcacctgaggtcaagagttcgagaacagcctggccaacatggtgaaacccccatctttactaaaaatacaaagttagctgggtgtggtggtacgcacctgttgtcccagctattcgggaagctgagacaggagaatcgcttgaacccaggtggtggaggttgcagtgagccgagatcacaccactgtactccagctcgggcggcagagtgagactccatctcaaaaacaaaaaaacacaaaaaaaamcaaaaaaaaaaacaggcacgtttatacctatgtaacaaaactgcacattctgcacatgtaacccagaacttaaagtataatttaaaaaaaaaaaagaattaaagccttaaagcctccattttacaaatagcaaaagggcaataatggtactgtttctatcacattaaaaagtgagactggtgtgctattgttcttaagggagagctaatgttctccagttggttctgataccctctctccttctgccgccagtcaattaactgttaactggtttgagaaaattagcctttacataggtttaatcatgaatagttaaaaaaaaaataag

SEQ ID NO: 614746 - DNA, 580 bp, Homo sapiens
gcagatcacctgaggtcaagagttcgagaacagcctggccaacatggtgaaacccccatctttactaaaaatacaaagttagctgggtgtggtggtacgcacctgttgtcccagctattcgggaagctgagacaggagaatcgcttgaacccaggtggtggaggttgcagtgagccgagatcacaccactgtactccagctcgggcggcagagtgagactccatctcaaaaacaaaaaaacacaaaaaaaaacaaaaaaaaaaacaggcacgtttatacctatgtaacaaaactgcacattctgcacatgtaacccagaacttaaagtataattwaaaaaaaaaaaagaattaaagccttaaagcctccattttacaaatagcaaaagggcaataatggtactgtttctatcacattaaaaagtgagactggtgtgctattgttcttaagggagagctaatgttctccagttggttctgataccctctctccttctgccgccagtcaattaactgttaactggtttgagaaaattagcctttacataggtttaatcatgaatagttaaaaaaaaaataag

SEQ ID NO: 614747 - DNA, 659 bp, Homo sapiens
gcatgaaacagtcaccatctacttacttttttaaatagaaatcagttggcattttctccttatttcatctgaaaaaaatgacagtatttagactccaaaccattatcattttttcttagttactggcacagaacatccaggccaggctttttatcccatagcacctgtaaagactgcaattccacgtgacataattaactttagggacatcactcagtttagggctctaatcacacatatcacattaaactagctataaattaatcatagataatgattataatgtayaattgtaatttaatatgatttatggaattactagaaatcaatttctactaaaaataacatggtattctaagtgaccctaataacatggtgttctaaatgacttaataaattttatttctttgtatatttttagtaaatgattaacaacttcatgatcaaaccactcaatgagaaaactgtttaaaacaacatatgtaatctttgactaaatactgacccctaaaaatatctatcaaagcacatttagtcaaaatttatgccatagcttattagtggtgtttaaaatgacaaattttagaacatttatcttttgactgaacatttcccttttgacagtaagggatatactgaagcaaaagttacttgcagcc

SEQ ID NO: 614748 - DNA, 569 bp, Homo sapiens
gattcccaacaaagtgatatattgtcagtacaattttgaatttaaaccagggcatcaaatggtattaaaaaatcccagaataaacacatccataaattttccattatactatttaataggaatatcacaaaactacttttacatgaatacgactagtgagattctacaaaatcacaacttaagttgaagatttctgcattcttttttcactgccaagactggtgaagtaggggcaacaattattctcaccacatctaaattccataaagcatttccatcttcttatgtttaaaggtcgtttttctgaagtgcccttaaattttgttgtttaatctgctgcccttgtttggcttagttattcaacttgyagaacttctgtggttctgttccttacctgcttgattctgtgatctgggtgagcaatttatatgcatatgttttgtgttttcattcatgtttctatttatttttctgaaatttattcaatttttgatttgagaaagtttgagctgacagagatttaaatgtttatttgtgtatgtgtcatggcatcttaatacctctcaaag

SEQ ID NO: 614749 - DNA, 526 bp, Homo sapiens
agctttacagaagagtttagagtggtataaaaaggacgcacttcagaaccaagctagctctagctttagggctctctatagacctttgagcaagctgcctaatctctagagtttcagtttcttcatcagtaaaataggaatcatgaaactacttgctgagtgttagtaaagacaagcagaatttaaaattgtcagctgtaaggctttggatggattaaaaaagtgaaagaaatatggcaaaacattaaaataagtctatcgataggtacattggtatatgatatattattttctgtaccatactrtgtgcttaaaatattttattttacatatatgagtaattagcatagtttattataatattagcaatatcttaataatttagcatagttatctcaattgttataatttttttcaaaatttacaggtaacaaatctgtaagtcttttcaatcataagacaggtcacatggcatctgtcagatctgtattttaactcttacttaaccaccaatatgctaggtaat

SEQ ID NO: 614750 - DNA, 555 bp, Homo sapiens
ttacttaagataaaaataagtccagaaaaatttaaatgataaattaattcaataaaaatatcaatttatcaaatggcttagttgaatttcccagttaataaagtactaaacatatagatggagatgtgggctattttaaccagttacttaaattttctcttaaatgtgaagawtatgttcctgccttattaagtagtagataagagcagttcctttgtttgtttatttagcgtctcataggatcatagcacttatttcattttttttctttgagacaaggtctcgctctgtcacccaggctggagttcagtggcatgatcatagctctctgcagccttgacctcccagggtcaagcagtcctctcatctcagcctcccaagtagctcggactacaggcacacactgctacacccagctaatttttgtatattttgtagagacagggtttcgccatgttgcccaggctgagggctcatatttttatgcacataattcaatggaacattaacacaagtcattcttgtttcacagatgacaaaactaaagttcacaga

SEQ ID NO: 614751 - DNA, 555 bp, Homo sapiens
ttacttaagataaaaataagtccagaaaaatttaaatgataaattaattcaataaaaatatcaatttatcaaatggcttagttgaatttcccagttaataaagtactaaacatatagatggagatgtgggctattttaaccagttacttaaattttctcttaaatgtgaagaatatgttcstgccttattaagtagtagataagagcagttcctttgtttgtttatttagcgtctcataggatcatagcacttatttcattttttttctttgagacaaggtctcgctctgtcacccaggctggagttcagtggcatgatcatagctctctgcagccttgacctcccagggtcaagcagtcctctcatctcagcctcccaagtagctcggactacaggcacacactgctacacccagctaatttttgtatattttgtagagacagggtttcgccatgttgcccaggctgagggctcatatttttatgcacataattcaatggaacattaacacaagtcattcttgtttcacagatgacaaaactaaagttcacaga

SEQ ID NO: 614752 - DNA, 569 bp, Homo sapiens
aacagagtaaacatcactcaatgggaatatagtcaacacagcttaaaaaccatctggtcattcacattagatttagagaggaggagagagagcttcaaatgggttgaatgattagtccaaggtcacactggtagtttccagcatagcacagattggcccctggcctgcagtccttcycctgtaccattcagccttccttagttttcccaggattacagaaaccaagcctgtgatttcctggaggaattatttgctttagcatgagcacttatttcatgttgggataattgcacaaggccttgcctacctaattggattcttatttcaacctaaactgcaatttaagctaacactgattttcagtgagctcatctaaaaatgtcttcataaatgcctacaaacaaaaatcacatccataatacacgttttccagattaaaacacatactgcaatgtgtattaacctaagaaaccaggatgcattatcaattaaatgaagtacaacatgcacagctttccaccattgtgtgtttctttaatgtgacttgagcaaacagcaggtattaaata

SEQ ID NO: 614753 - DNA, 569 bp, Homo sapiens
aacagagtaaacatcactcaatgggaatatagtcaacacagcttaaaaaccatctggtcattcacattagatttagagaggaggagagagagcttcaaatgggttgaatgattagtccaaggtcacactggtagtttccagcatagcacagattggcccctggcctgcagtccttctcctgtaccattcagccttccttagttttcccaggattacagaaaccaagcctgtgatttcctggagraattatttgctttagcatgagcacttatttcatgttgggataattgcacaaggccttgcctacctaattggattcttatttcaacctaaactgcaatttaagctaacactgattttcagtgagctcatctaaaaatgtcttcataaatgcctacaaacaaaaatcacatccataatacacgttttccagattaaaacacatactgcaatgtgtattaacctaagaaaccaggatgcattatcaattaaatgaagtacaacatgcacagctttccaccattgtgtgtttctttaatgtgacttgagcaaacagcaggtattaaata

SEQ ID NO: 614754 - DNA, 569 bp, Homo sapiens
aacagagtaaacatcactcaatgggaatatagtcaacacagcttaaaaaccatctggtcattcacattagatttagagaggaggagagagagcttcaaatgggttgaatgattagtccaaggtcacactggtagtttccagcatagcacagattggcccctggcctgcagtccttctcctgtaccattcagccttccttagttttcccaggattacagaaaccaagcctgtgatttcctggaggrattatttgctttagcatgagcacttatttcatgttgggataattgcacaaggccttgcctacctaattggattcttatttcaacctaaactgcaatttaagctaacactgattttcagtgagctcatctaaaaatgtcttcataaatgcctacaaacaaaaatcacatccataatacacgttttccagattaaaacacatactgcaatgtgtattaacctaagaaaccaggatgcattatcaattaaatgaagtacaacatgcacagctttccaccattgtgtgtttctttaatgtgacttgagcaaacagcaggtattaaata

SEQ ID NO: 614755 - DNA, 569 bp, Homo sapiens
aacagagtaaacatcactcaatgggaatatagtcaacacagcttaaaaaccatctggtcattcacattagatttagagaggaggagagagagcttcaaatgggttgaatgattagtccaaggtcacactggtagtttccagcatagcacagattggcccctggcctgcagtccttctcctgtaccattcagccttccttagttttcccaggattacagaaaccaagcctgtgatttcctggaggaattatttgctttagcatgagcacttatttcatgttgggataattgcacaaggccttgcctacctaattggwttcttatttcaacctaaactgcaatttaagctaacactgattttcagtgagctcatctaaaaatgtcttcataaatgcctacaaacaaaaatcacatccataatacacgttttccagattaaaacacatactgcaatgtgtattaacctaagaaaccaggatgcattatcaattaaatgaagtacaacatgcacagctttccaccattgtgtgtttctttaatgtgacttgagcaaacagcaggtattaaata

SEQ ID NO: 614756 - DNA, 635 bp, Homo sapiens
gattaaaacacatactgcaatgtgtattaacctaagaaaccaggatgcattatcaattaaatgaagtacaacatgcacagctttccaccattgtgtgtttctttaatktgacttgagcaaacagcaggtattaaataaccttccaaaagactgtaagttcagcattatctgcatatttgcttgaacagcagtaagtaaaaggaaaagcaatgagtgtctttggggctgccttgatctaaggaaaacatcttcaaagagtcatgtactgtgatattcttcttccaatgaggggtgaagtaatgtaacacttcagaaggagtcactgataagttatattcatcttccgtgatagacagttagaccttgaaataacaacagaaaaggaagattttcatcaaacctgaattgaagaaggaacaagtagcaaaaagagcaatggaccttggggtttgttcagatacaaactgctatttactagctgtgtgtctttaagcaagttacttgacttctctgtgcctcagttgtcttcaccagtaaaaaatgcagagaaaaaaacccacttgttgaggtatgagaattcaatgagaaaatagataaagatcatgcatcacagtgcttggcactgagtaggcatt

SEQ ID NO: 614757 - DNA, 635 bp, Homo sapiens
gattaaaacacatactgcaatgtgtattaacctaagaaaccaggatgcattatcaattaaatgaagtacaacatgcacagctttccaccattgtgtgtttctttaatgtgacttgagcaaacagcaggtattaaataaccttccaaaagactgtaagttcagcattatctgcatatttgcttgaacagcagtaagtaaaaggaaaagcaatgagtgtctttggggctgccttgatctaaggaaaacatcttcaaagagtcatgtactgtgatattctycttccaatgaggggtgaagtaatgtaacacttcagaaggagtcactgataagttatattcatcttccgtgatagacagttagaccttgaaataacaacagaaaaggaagattttcatcaaacctgaattgaagaaggaacaagtagcaaaaagagcaatggaccttggggtttgttcagatacaaactgctatttactagctgtgtgtctttaagcaagttacttgacttctctgtgcctcagttgtcttcaccagtaaaaaatgcagagaaaaaaacccacttgttgaggtatgagaattcaatgagaaaatagataaagatcatgcatcacagtgcttggcactgagtaggcatt

SEQ ID NO: 614758 - DNA, 635 bp, Homo sapiens
gattaaaacacatactgcaatgtgtattaacctaagaaaccaggatgcattatcaattaaatgaagtacaacatgcacagctttccaccattgtgtgtttctttaatgtgacttgagcaaacagcaggtattaaataaccttccaaaagactgtaagttcagcattatctgcatatttgcttgaacagcagtaagtaaaaggaaaagcaatgagtgtctttggggctgccttgatctaaggaaaacatcttcaaagagtcatgtactgtgatattcttcttccaatgaggggtgaagtaatgtaacacttcagaaggagtcactgataagttatattcatcttccgtgatagrcagttagaccttgaaataacaacagaaaaggaagattttcatcaaacctgaattgaagaaggaacaagtagcaaaaagagcaatggaccttggggtttgttcagatacaaactgctatttactagctgtgtgtctttaagcaagttacttgacttctctgtgcctcagttgtcttcaccagtaaaaaatgcagagaaaaaaacccacttgttgaggtatgagaattcaatgagaaaatagataaagatcatgcatcacagtgcttggcactgagtaggcatt

SEQ ID NO: 614759 - DNA, 583 bp, Homo sapiens
ttcatcaaacctgaattgaagaaggaacaagtagcaaaaagagcaatggaccttggggtttgttcagatacaaactgctatttactagctgtgtgtctttaagcaagttacttgacttctctgtgcctcagttgtcttcaccagtaaaaaatgcagagaaaaaaacccacttgttgaggtatgagaattcaatgagaaaatrgataaagatcatgcatcacagtgcttggcactgagtaggcattgggggaagatgtatatataattatatgatcatctgctgtcatttttaaacaagtctgtctcagactcctcctactctctgggagaatctaattgtatttgcttggctgattagcaggcaagcatttgcccagtctgaaaaactgttaaggtatgtctagtgggttgaatagtatcccctacaaactcatgctcacatggcaccttaaatttgacttatttggaagtagggctcttgcagatgtaattaggaacttgagataaagtcatcctggacttgagtactaaattcaacaactagtctctttataagaagagaagaggacacagcaacacagag

SEQ ID NO: 614760 - DNA, 583 bp, Homo sapiens
ttcatcaaacctgaattgaagaaggaacaagtagcaaaaagagcaatggaccttggggtttgttcagatacaaactgctatttactagctgtgtgtctttaagcaagttacttgacttctctgtgcctcagttgtcttcaccagtaaaaaatgcagagaaaaaaacccacttgttgaggtatgagaattcaatgagaaaatagataaagatcatgcatcacagtrcttggcactgagtaggcattgggggaagatgtatatataattatatgatcatctgctgtcatttttaaacaagtctgtctcagactcctcctactctctgggagaatctaattgtatttgcttggctgattagcaggcaagcatttgcccagtctgaaaaactgttaaggtatgtctagtgggttgaatagtatcccctacaaactcatgctcacatggcaccttaaatttgacttatttggaagtagggctcttgcagatgtaattaggaacttgagataaagtcatcctggacttgagtactaaattcaacaactagtctctttataagaagagaagaggacacagcaacacagag

SEQ ID NO: 614761 - DNA, 529 bp, Homo sapiens
caccagtaaaaaatgcagagaaaaaaacccacttgttgaggtatgagaattcaatgagaaaatagataaagatcatgcatcacagtgcttggcactgagtaggcattgggggaagatgtatatataattatatgatcatctgctgtcatttttaaacaagtctgtctcagactcctcctactctctgggagaatctaattgtatttgcttggctgattagcaggcaagcatttgcccagtctgaaaaactgttaaggtatgtctagtgrgttgaatagtatcccctacaaactcatgctcacatggcaccttaaatttgacttatttggaagtagggctcttgcagatgtaattaggaacttgagataaagtcatcctggacttgagtactaaattcaacaactagtctctttataagaagagaagaggacacagcaacacagagggaagaaggctgtgtgaaaacggaggcagagactgaagtgatgcagctacaagccaaagaacaccaaggacttctgggagctac

SEQ ID NO: 614762 - DNA, 621 bp, Homo sapiens
ccactgaaagccaccaagcttgtagtaatttgttatggcagctctaagaaatgaacaccatatgattattttctgtctagtaaagaagaaagccccaacaattactttttcccctatatgacatgaaccacttttatttctaatttgttaatcttgtctgagcattctcttttattctactgaccaaaaaagagtttcycctattctctttggtaatcattctatcacactactagttccctcgttaatgcattaaataaaatttgacatatgcttagattctgtatgagagttgtacttttaacattttaagaattatactttggggccagcacggtgcctaacacctgtaatcctggcactttgggaggctgaggcgggtggattgcttgagctcaggagtttgagatcaacctgggcaacatggcaaaacccgtctctaccacaaatacaaaaagtagctgggcatggtggcatggacctgtggtcccagctactcgggaggttgaggtgggaggatggctggagccaaggaggtcgaggctgcagtgagctgtgatcatgtactgcaccccagcctgggttacagcacaagatcctgtcaaaaaaaaaaaaaaaaaa

SEQ ID NO: 614763 - DNA, 621 bp, Homo sapiens
ccactgaaagccaccaagcttgtagtaatttgttatggcagctctaagaaatgaacaccatatgattattttctgtctagtaaagaagaaagccccaacaattactttttcccctatatgacatgaaccacttttatttctaatttgttaatcttgtctgagcattctcttttattctactgaccaaaaaagagtttcccctattctctttggtaatcattctatcacactactagttccctcgttaatgcattaaataaaatttgacatatgcttagattctgtatgagagttgtacttttaacattttaagaattatactttggggccrgcacggtgcctaacacctgtaatcctggcactttgggaggctgaggcgggtggattgcttgagctcaggagtttgagatcaacctgggcaacatggcaaaacccgtctctaccacaaatacaaaaagtagctgggcatggtggcatggacctgtggtcccagctactcgggaggttgaggtgggaggatggctggagccaaggaggtcgaggctgcagtgagctgtgatcatgtactgcaccccagcctgggttacagcacaagatcctgtcaaaaaaaaaaaaaaaaaa

SEQ ID NO: 614764 - DNA, 621 bp, Homo sapiens
ccactgaaagccaccaagcttgtagtaatttgttatggcagctctaagaaatgaacaccatatgattattttctgtctagtaaagaagaaagccccaacaattactttttcccctatatgacatgaaccacttttatttctaatttgttaatcttgtctgagcattctcttttattctactgaccaaaaaagagtttcccctattctctttggtaatcattctatcacactactagttccctcgttaatgcattaaataaaatttgacatatgcttagattctgtatgagagttgtacttttaacattttaagaattatactttggggccagcacggtgcctaacacctgtaatcctggcactttgggaggctgaggcrggtggattgcttgagctcaggagtttgagatcaacctgggcaacatggcaaaacccgtctctaccacaaatacaaaaagtagctgggcatggtggcatggacctgtggtcccagctactcgggaggttgaggtgggaggatggctggagccaaggaggtcgaggctgcagtgagctgtgatcatgtactgcaccccagcctgggttacagcacaagatcctgtcaaaaaaaaaaaaaaaaaa

SEQ ID NO: 614765 - DNA, 621 bp, Homo sapiens
ccactgaaagccaccaagcttgtagtaatttgttatggcagctctaagaaatgaacaccatatgattattttctgtctagtaaagaagaaagccccaacaattactttttcccctatatgacatgaaccacttttatttctaatttgttaatcttgtctgagcattctcttttattctactgaccaaaaaagagtttcccctattctctttggtaatcattctatcacactactagttccctcgttaatgcattaaataaaatttgacatatgcttagattctgtatgagagttgtacttttaacattttaagaattatactttggggccagcacggtgcctaacacctgtaatcctggcactttgggaggctgaggcgggtggattgcttgagctcaggagtttgagatcaacctgggcaacatggcaaaacccgtctctaccacaaatacaaaaagtagctgggcatggtggcatggacctgtggtcccagctactcgggaggttgaggtgggaggatggctggagccaaggaggtcgaggctgcagtgagctgtgatcatgyactgcaccccagcctgggttacagcacaagatcctgtcaaaaaaaaaaaaaaaaaa

SEQ ID NO: 614766 - DNA, 579 bp, Homo sapiens
ttctttgaatgttacaacttgatcacttatggaagtactaaagggagagaacataatagacactctatcctcaaagaatcaaaaaaaagcctttgaccaccatgataggtatttgagaaacaatcaggtccccacctggatttacagatcaccttggtctttatatccaactcagtgacttaaaattctgcttcaaaaggcatgtttctctatatataattccaccttttaaatgctttataaatgatggcgaacttgttatctctcaatacctcacccctgcctttattcccaagctggattttcaggtcctcaattggatatcagttgatggctaaaatgatgtacagttaattaattgtaatatccaaasaacattctttgactgtatcccaaagtgtgatccaccagtctttcggtagatatatgatctcaaaaactgaggtgaagattcctgggtaaactcaccagatcattttatttgggaaacaacaaaatcaaatagattccttcactgtgagccttctgaaggttgttaatatgctaatatgcaatgctaatacgaagagtgaatattgt

SEQ ID NO: 614767 - DNA, 624 bp, Homo sapiens
tattctgattaatcattatacaatgtatacatgtatcaaaatatcacacagtactcataaatatgtataattatccattaaaataaaacacaaagtattatatagtacacaaataaaattataaatatgtatatgtataaatatattaaatatgtatataagaatatagattctataaatgtgtttattttatagaatatagatattccataaatacgtttctactgtcagacattttcccayaatctaactcactactttttttccagattatttcctcatgcacattccattgctatggacatttgaaattaaagaaaacaaaactttccactcatttttgttgtttaacttttcctttgaaagctctatatatctaacatagggagctcagacagtttttcaaccaataaaccatcagcttcagcaaacatgaacatctaagccagtcttctccacgctagttttactatcttgccctctctcttcgtgacttcaaagtctgaccaacgggaagagtatgacaattggccaacacttctagacatcagcatgcattctccatgccccatcatcaaagatattaagaactcagaaaaatcaaagggaaattcctaacgtgag

SEQ ID NO: 614768 - DNA, 499 bp, Homo sapiens
tgatttccacaggcaaatcaagcaaattaacatatccatcaactcacatagttgcctctgtgtgtgtgtgtgtgtgtgtgtgtgtgtgtgtgtgtgtgtgtggtaaaascacgtaaaatccattctcttagcaaatttccagtacaccacacaatattattaactatagtctcatgttgtacattagatctctagacttatccatcttacataactgtaactttgttccctttgacttccatcttcccatttctccaccccaacacctggtaaccactgcacagttctactctgtatgtattaaaagttcaaaggtttttaaattacacatataaatgagattacacagtatttatctttttgtgtctggcataatgtcctctaggttcatctatgttttccttcttttctccttcttttctgaggctgaataacattcccttaccacaaattatttatccattcatttgttggccaatactttagttgtttcatatct

SEQ ID NO: 614769 - DNA, 499 bp, Homo sapiens
tgatttccacaggcaaatcaagcaaattaacatatccatcaactcacatagttgcctctgtgtgtgtgtgtgtgtgtgtgtgtgtgtgtgtgtgtgtgtgtggtaaaagcacstaaaatccattctcttagcaaatttccagtacaccacacaatattattaactatagtctcatgttgtacattagatctctagacttatccatcttacataactgtaactttgttccctttgacttccatcttcccatttctccaccccaacacctggtaaccactgcacagttctactctgtatgtattaaaagttcaaaggtttttaaattacacatataaatgagattacacagtatttatctttttgtgtctggcataatgtcctctaggttcatctatgttttccttcttttctccttcttttctgaggctgaataacattcccttaccacaaattatttatccattcatttgttggccaatactttagttgtttcatatct

SEQ ID NO: 614770 - DNA, 499 bp, Homo sapiens
tgatttccacaggcaaatcaagcaaattaacatatccatcaactcacatagttgcctctgtgtgtgtgtgtgtgtgtgtgtgtgtgtgtgtgtgtgtgtgtggtaaaagcacgtaaaatccattctcttagcaaatttccagtacaccacacaatattattaactatagtctcatgttgtacattagatctctagacttatccatcttacataactgtaactttgttccctttgacttccatcttcccatttctccaccccaacacctggtaaccactgcacagttctactctgtatgtattaaaagttcaaaggtttttaaattacacatataaatgagattacacagtatttatctttttgtgtctggcataatgtcctctaggttcatctatgttttccttcttttctccttcttttctgaggctgaataacattcccttaccacaarttatttatccattcatttgttggccaatactttagttgtttcatatct

SEQ ID NO: 614771 - DNA, 578 bp, Homo sapiens
gtgtctgagcctagatttgatgcggactcccttaataaagactgttcatcatgtactccctggtacttttatgaataattccattatcaacttcacatataccaaaccatgacccaatttgttgcatatgtaagttggactttggcaataaaagaaagagcatattacaaagtaataatgtcttagacattgtctagaataatgttctagaattcatcataaacctttatgtgtttgcattacaaagacattctgtgatagctttaamaatggttattactttttaaatgtttgaagaaaaatagatgggtctggggaaatttagagaaaaaaaaaaaaaccatagactcttagtaaacaatcggaactaaaattttacctagtacctaaatcatttctgtataatcagtatttgactaattttaacccccacaagcctcccagatcattaattgtcagacagttgtaatgcttagcaaggtcttgtcttactatttgagaaattctcttcatgagtcatgaaatcatcagtagaaaataatttttctttctcatggagaagcagtcaatgattgcta

SEQ ID NO: 614772 - DNA, 571 bp, Homo sapiens
ctttccttttccaagttaagcattcctaatttcttcaactgattttcatacgacatagtttccacagccctcatcttcctrattgccctcctattttggtcatctctactttgagttcttgaccagcacttgtaaatatgtgaattttatgatcatgttgatattctgagaagaaaggatgcagtattcaaagtggtcaaactgaataaaggaagcttaaaaggatcagtcaacctgagaaagtttagaaaccaccactttagttcttcattattaccttcaagggtcatgcttagtgatacaattttagcaatggtctgaccactagcgaatactactgttctgttgcatgttttgatatgaacaaaaatataacatttctatgaaaagagcctaagattgcattattgtgacaaaatattggactacagtgagtttatgggcaactaaaacacccaagggtgtgccacttgaactgctgtcaagataagcatcacgaatcttgaacttatgcaaattctgagggtttgttttagttatttctcttagatctcttctcatttttacttgc

SEQ ID NO: 614773 - DNA, 606 bp, Homo sapiens
gaattctttttctcagcaaggaacatccctgggaaagagaatacgcgcctgggggtataggcctataaacggcccccctaggtgtgcccgtcttctatgggcgaggctgtaggggtgaaatagaccccagtctcccatagtgctcccaggcttattaggaagaggaaattcccrcctaacaaatttttggtcagaccggttattctcaaaaccctgtctcctgataagatgttatcaatgacaatggtgcccgaaacttcattagcaattttaattttgccccggtcctgtggtcctgtgatctcgccctgcctccatttgccttgtgatattctattaccttgtaaagtacttgatgtctgtgacccacacctattcacacactccctccccttttgaaaatccctaataaaaacttgctggtttttgcggcttgtggggcatcacggaacctaccgatatgtgatgtctcccctggacgcccagttttaaaatttctctcttttgtactctgttcctttatttctcaagccggccgatgcttaaggaaaatagaaaagaaccttcgtgactatcggggcaggttccccgatactcaatgataac

SEQ ID NO: 614774 - DNA, 392 bp, Homo sapiens
tcaatgacaatggtgcccgaaacttcattagcaattttaattttgccccggtcctgtggtcctgtgatctcgccctgcctccatttgccttgtgatattctattaccttgtaaagtacttgatgtctgtgacccacacctattcrcacactccctccccttttgaaaatccctaataaaaacttgctggtttttgcggcttgtggggcatcacggaacctaccgatatgtgatgtctcccctggacgcccagttttaaaatttctctcttttgtactctgttcctttatttctcaagccggccgatgcttaaggaaaatagaaaagaaccttcgtgactatcggggcaggttccccgatactcaatgataaccttcagtctgaattgaattc

SEQ ID NO: 614775 - DNA, 392 bp, Homo sapiens
tcaatgacaatggtgcccgaaacttcattagcaattttaattttgccccggtcctgtggtcctgtgatctcgccctgcctccatttgccttgtgatattctattaccttgtaaagtacttgatgtctgtgacccacacctattcacacactccctccccttttgaaaatccctaataaaaacttgctggtttttgcggcttgtggggcatcacggaacctaccgatrtgtgatgtctcccctggacgcccagttttaaaatttctctcttttgtactctgttcctttatttctcaagccggccgatgcttaaggaaaatagaaaagaaccttcgtgactatcggggcaggttccccgatactcaatgataaccttcagtctgaattgaattc

SEQ ID NO: 614776 - DNA, 392 bp, Homo sapiens
tcaatgacaatggtgcccgaaacttcattagcaattttaattttgccccggtcctgtggtcctgtgatctcgccctgcctccatttgccttgtgatattctattaccttgtaaagtacttgatgtctgtgacccacacctattcacacactccctccccttttgaaaatccctaataaaaacttgctggtttttgcggcttgtggggcatcacggaacctaccgatatgtgatgtctcccctggaygcccagttttaaaatttctctcttttgtactctgttcctttatttctcaagccggccgatgcttaaggaaaatagaaaagaaccttcgtgactatcggggcaggttccccgatactcaatgataaccttcagtctgaattgaattc

SEQ ID NO: 614777 - DNA, 606 bp, Homo sapiens
gaattctttttctcagcaaggaacatccctgggaaagagaatacgcgcctgggggtataggcctataaacggcccccctaggtgtgcccgtcttctatgggcgaggctgtaggggtgaaatagaccccagtctcccatagtgctcccaggcttattaggaagaggaaattcccacctaacaaatttttggtcagaccggttattctcaaaaccctgtctcctgataagatgttatcaatgacaatggtgcccgaaacttcattagcaattttaattttgccccggtcctgtggtcctgtgatctcgccctgcctccatttgccttgtgatattctattaccttgtaaagtacttgatgtctgtgacccacacctattcacacactccctccccttttgaaaatccctaataaaaacttgctggtttttgcggcttgtggggcatcacggaacctaccgatatgtgatgtctcccctggacgcccagttttaaaatttctctcttttgtactctgttcctttatttctcaagccggccgatgcttaaggaaaatagaaaagaaccttcgtgactatyggggcaggttccccgatactcaatgataac

SEQ ID NO: 614778 - DNA, 392 bp, Homo sapiens
tcaatgacaatggtgcccgaaacttcattagcaattttaattttgccccggtcctgtggtcctgtgatctcgccctgcctccatttgccttgtgatattctattaccttgtaaagtacttgatgtctgtgacccacacctattcacacactccctccccttttgaaaatccctaataaaaacttgctggtttttgcggcttgtggggcatcacggaacctaccgatatgtgatgtctcccctggacgcccagttttaaaatttctctcttttgtactctgttcctttatttctcaagccggccgatgcttaaggaaaatagaaaagaaccttcgtgactatcggggcaggttcccygatactcaatgataaccttcagtctgaattgaattc

SEQ ID NO: 614779 - DNA, 625 bp, Homo sapiens
agtattgtttcctggtaatgatcctctgtggcttttggctccatcactggtctcttagttttaccctttgagtcatcrtttttttttttgtataaaaattaagctgtgtttgcagctgagtcgttttctcagcctgattcctgtccacagcagtttgaaggtacaaagacatcttttttttttttttgtattatccgtgatccttttggcttgagtggacagtgcttatacccatatacattttgtggattctatgactttatgaaagttcactccatctgacaaaaaccacagccacaattttcttcaagtcaggcccttctctatcttgggatccctatgaagctactgaggggcaatacccttaagagtcctaaattccttattgtttaacaggaagagtttttcaggaacatccgtaagctccttagaaggtctttatctagttgaatcatgagacacttgtgatcagcttctgaggtcttattaacaaggatccaacaacccaacctggatttgatctttgcatcgaggacatttcctgctttgagaatcttttgctctctagattgaggatctgggattgagaatcagttttattattgactcagcaaatcctacttcc

SEQ ID NO: 614780 - DNA, 559 bp, Homo sapiens
gagtgactcactgtctaaaccatgcaaaccatgtggtttgtgctaaacatctgctttcctctgggagtctggaaatttcagtacatgctaagcagtgggtacttggatgaccagctgcaataaataccttgggcaccaagtctctgatgagctttcttggtagacaacatttcacacatattgtcacagtaattgctggggaatttggcattccactaggagaggacccttggaagcttgcacctggtttcctctggactttgccctttggacattttctcttttctgattttgctttgtgtcctctctaataaatcatagccataagtatggccatttaattaattgcatattttagttagtaaaatctgaaaatttggccttattgagttctgactcaacttacttggttattgagtacatggttattgtgcartagatgtgacctaggaattgattcagctactctttgatgtatgttaagatagaaatggaagtttaaaacttcagcaatgcaaatttcatcccaatgagtttatactcttatttttaaacaagt

SEQ ID NO: 614781 - DNA, 559 bp, Homo sapiens
gagtgactcactgtctaaaccatgcaaaccatgtggtttgtgctaaacatctgctttcctctgggagtctggaaatttcagtacatgctaagcagtgggtacttggatgaccagctgcaataaataccttgggcaccaagtctctgatgagctttcttggtagacaacatttcacacatattgtcacagtaattgctggggaatttggcattccactaggagaggacccttggaagcttgcacctggtttcctctggactttgccctttggacattttctcttttctgattttgctttgtgtcctctctaataaatcatagccataagtatggccatttaattaattgcatattttagttagtaaaatctgaaaatttggccttattgagttctgactcaacttacttggttattgagtacatggttattgtgcagtagatgtgacctaggaattgattcagctactctttgatgtatgttaagataraaatggaagtttaaaacttcagcaatgcaaatttcatcccaatgagtttatactcttatttttaaacaagt

SEQ ID NO: 614782 - DNA, 597 bp, Homo sapiens
tgcagctactaccactactactaatgctaataaaatgataataataataataacaaacagattaaacactaactatatgccaggcatcattctaagtgctttgcaagatttaactagtttaatattacatgaggaaggtactgttattatcacaccattttacacatgtaggaactaaagtcagagaaagaaagtcacttgcccaaggtcatttagcttgtgagtttgaggatagtattagtacatagtatttctcaaccttatttgactataaccttacttcatttctttttttttttttttttaacctgtagcatgttatgagattaatgttccatgaaaaacagttttgaaaatgttggagtagagagaataaaatgtaagagaattgagaaaggcattgaagaatgatttgtgatttttagtcataggagatcagcattctagtaacccccaaagataggggaatccatcctcatctcagtgatcagatatactatgttcatggccaggatttcgaattttaaaatccrtgattttcatcccaggtggtctttccatgtcttccatgaaaagtcttactaccagacttccatg

SEQ ID NO: 614783 - DNA, 625 bp, Homo sapiens
agtattgtttcctggtaatgatcctctgtggcttttggctccatcactggtctcttagttttaccctttgagtcatcgtttttttttttgtataaaaattaagctgtgtttgcagctgagtcgttttctcagcctgattcctgtccacagcagtttgaaggtacaaagacatcttttttttttttttgtattatccgtgatccttttggcttgagtggacagtgcttatacccatatacattttgtggattctatgactttatgaaagttcactccatctgacaaaaaccacagccacaattttcttcaagtcaggcccttctctatcttgggatcccwatgaagctactgaggggcaatacccttaagagtcctaaattccttattgtttaacaggaagagtttttcaggaacatccgtaagctccttagaaggtctttatctagttgaatcatgagacacttgtgatcagcttctgaggtcttattaacaaggatccaacaacccaacctggatttgatctttgcatcgaggacatttcctgctttgagaatcttttgctctctagattgaggatctgggattgagaatcagttttattattgactcagcaaatcctacttcc

SEQ ID NO: 614784 - DNA, 580 bp, Homo sapiens
tatatgaacattgatatggtttggatttgtgtccccacccaaatctcacatcgaattgtaatccccagtgttggaggaagggcctgatgggaggtgactggatcatggggatggacttcccccttgctgttcttgtgattctcaagagacctggttgtttaaaagtatgtagcacctcccctgtgctcttcctcctgctccagccatgtaggatgtgcctccttccttttgaccttccaccatgagtggaagtttcctgagacctccccagccatgcttcctgtacagcytgcagaaccatgagccaattaaacctcttttctttttaaatttcccagtctcaggtagttcttcatagcaatgtgagaatggactaatgcaaacaataactctgctctctccctgctgatttcttgaaactgaagcccatgaattaccagagtaagttttgtcctaaacagtccattaaactgttgagtggcagccatgtgctttgcaggcatacgtaagactcaattattggtctggcaataattgagatttccagatttggcaagacctaccacacacagtgtcacca

SEQ ID NO: 614785 - DNA, 586 bp, Homo sapiens
gaatcagagtcatgcaggggtagaaaaaggcctgtggtcatcaaaccwttgaaacatctacttattattaaaagtaccataaacaactagaaacattatctggaaatcaactccaagataatggaaagaccaagaacagaagcaaactatgggttaaaaaaaagctttggaagaaaagttcaaaaatttttttcaagtgaaatgctggcagaataaattcagcaccagttattggtaatagaaactcttaacaaagtatgtagacaagaagaattcctttatatggcaaaggtatctaataaacgcctgcagcaaactgaataataacctagtagcagtgttcactttgaagtcagtaaaaagataagaagcctgctatcatgctttattaagtacaaatggagtatttaataaggtaaagcagaaaaaatacttatgagtacttaataaggtacttaataaggtaaagcagaaaaaaaaaggaagggaaagaggagaagagaagaaaggaaggcagataggaaaggaagaggagtgaagggcgaggtaaagaggaatgaaagaaggaaagaaagagtatagacat

SEQ ID NO: 614786 - DNA, 586 bp, Homo sapiens
gaatcagagtcatgcaggggtagaaaaaggcctgtggtcatcaaacctttgaaacatctacttattattaaaagtaccataaacaactagaaacattatctggaaatcaactccaagataatggaaagaccaagaacagaagcaaactatgggytaaaaaaaagctttggaagaaaagttcaaaaatttttttcaagtgaaatgctggcagaataaattcagcaccagttattggtaatagaaactcttaacaaagtatgtagacaagaagaattcctttatatggcaaaggtatctaataaacgcctgcagcaaactgaataataacctagtagcagtgttcactttgaagtcagtaaaaagataagaagcctgctatcatgctttattaagtacaaatggagtatttaataaggtaaagcagaaaaaatacttatgagtacttaataaggtacttaataaggtaaagcagaaaaaaaaaggaagggaaagaggagaagagaagaaaggaaggcagataggaaaggaagaggagtgaagggcgaggtaaagaggaatgaaagaaggaaagaaagagtatagacat

SEQ ID NO: 614787 - DNA, 586 bp, Homo sapiens
gaatcagagtcatgcaggggtagaaaaaggcctgtggtcatcaaacctttgaaacatctacttattattaaaagtaccataaacaactagaaacattatctggaaatcaactccaagataatggaaagaccaagaacagaagcaaactatgggttaaaaaaaagctttggaagaaaagttcaaaaatttttttcaagtgaaatgctggcagaataaattcagcaccagttattggtaatagaaactcttarcaaagtatgtagacaagaagaattcctttatatggcaaaggtatctaataaacgcctgcagcaaactgaataataacctagtagcagtgttcactttgaagtcagtaaaaagataagaagcctgctatcatgctttattaagtacaaatggagtatttaataaggtaaagcagaaaaaatacttatgagtacttaataaggtacttaataaggtaaagcagaaaaaaaaaggaagggaaagaggagaagagaagaaaggaaggcagataggaaaggaagaggagtgaagggcgaggtaaagaggaatgaaagaaggaaagaaagagtatagacat

SEQ ID NO: 614788 - DNA, 564 bp, Homo sapiens
gtgtagtggtgcatgcctgtagtcccaactacgtgggaggctgaggcaggagaatcacytgaacccaggagatggaggctgtagtgagccgagattgcaccactccaatctgggtaacagagcgagactctgtcaaaaaaaaaaatggcctaccaacaaaaactaccagggattcactgacggccaaaaaaatattaggcttatttagcttactgcagcatagaagaggcatatgagaggaattattaggtattttggtaagaaggagttagtggggcataggtcttgtagaatttgtgcttgtactggctaattttaaggagggattaagggaagtggagtctagttctggataagctgctgtcaggaagtaaaagagcatcatggtaaattttatctgaaggtggagagattcgagtggattcactattcattggtaaagaaagagtagtcacttgtgtgagccagcacaaaaagaagttcagatatttttgtatttgtggagcatccttgttgctgtttggtttcagacccaatcagttatctctgtcttgtgttatatcc

SEQ ID NO: 614789 - DNA, 564 bp, Homo sapiens
gtgtagtggtgcatgcctgtagtcccaactacgtgggaggctgaggcaggagaatcacctgaacccaggagatggaggctgtagtgagccgagattgcaccactccaatctgggtaacagagcgagactctgtcaaaaaaaaaaatggcctaccaacaaaaactaccagggattcactgacggccaaaaaaatattaggcttatttagcttactgcagcatagaagaggcatatgagaggaattattaggtattttggtaagaaggagttagtggggcataggtcttgtagaatttgtgcttgtactggctaattttaaggagggattawgggaagtggagtctagttctggataagctgctgtcaggaagtaaaagagcatcatggtaaattttatctgaaggtggagagattcgagtggattcactattcattggtaaagaaagagtagtcacttgtgtgagccagcacaaaaagaagttcagatatttttgtatttgtggagcatccttgttgctgtttggtttcagacccaatcagttatctctgtcttgtgttatatcc

SEQ ID NO: 614790 - DNA, 634 bp, Homo sapiens
tgtcctcaactacttggatggctttaccgatttttcaagagacatctatgtctccataaaagccaatgcagtgactaatcgctctcaagtgtctagagagttcctcactcactactgatgttactgctattatttaggattcgtgattcaccaaaccacagcctagagacttcagagggagcatgactctgccaatatcttgattctgaacttatagtcttcataactgtgagagattaaatgtctgtgttttaagccatatggttcatagtgctatgttattgcaggcctaggaaagtaattcacctctctcctgtttcactcatgaaagtataccttgcattaagtatacttaatgcaagcaaataagagagacgatattataggaacaactttgaattcactcttaaaatacaaaaccatttcccaaacytatattaaatgtaatctgtaacaaattgcttccaaaacacttcccaaccaatcacaatatactcaagcaacccactatcagggctaggaactgttcatctcacccaacactttcattttcctggagaaatggagacccaaaaaggccaaacagctcaccaaaggtgacatagcaacttgactgtgcgtttctcctcgtagc

SEQ ID NO: 614791 - DNA, 552 bp, Homo sapiens
gaaactatggttgaatggaatggttcagagcacaggtggacttggattcataccatcttatagagatgttgtgagaattaaatgacataagttctaaataaatgccagctatcatcatcttgggtctctatagccaaagggaatgcaagtgttttaagaaaattttttacttaatatcagaagagaacttcatttcaggtccttaattaaatattagtcttttctgtaaattagcactctagggtggacatcagtaaaaagagttttaaaatattattgttaggaattatacataaactaaactgcttttycagttcttgaattgtgaggtttctgtctttgaattctttctaaaggccaaacttattcccatttttttctccctttacctccagtcttggctttgtttgcataacctggtcactgcttccttggggacagggatgacctgactccgttttatgtgacatcagctacaactttccattctttatttggtgcaccaaacgcaggctttctctctttcttaacagaatatcacaaggaagaaaa

SEQ ID NO: 614792 - DNA, 664 bp, Homo sapiens
cttgcaacaatcagccctcattttagtgaaaggtgccttgagttaatggcgcagtccaagtccctggaaacaggattttatttatacagatgtttaggattactgtgtagactgagattcacccaatctgtcccagcttgataaatgacaatacgtttctcttaattgttcgggttaaaaacctggaagttatcctcgactcctctttttgtttaactctacattaagcccctcagcaaatcctgccagctacttttcaraatatatctaggatctcaccactgccaccctagtgtaacctatcattagcacttgcttgaattgttctggtatctttattgctttcccggactccatcttgtatgctgttaggactgttttacacaccatatccagagggattcttttaataagcagttaaactatttcatccttgtgtcctaaacacgcgcgcgcacacacacacacacacacacacagtttaactcccacagccaccccacatagttcaccatgcacgtgggtgctgtgaccacctaatctgatactctgatgagagcaagaacaagcatgctttctctgcatggctttttgcaggaaaaagtgtcagtaaagatttggaggccgtcatttcaacttttagtcactagatggtactctggga

SEQ ID NO: 614793 - DNA, 654 bp, Homo sapiens
tttacattatgctcaccagagggcattgttgattactgtcccatctatattcaatttggatgtgagccttctatacttctatagtgtgtattatctgcagaatgctatgttaaatatccttgaattaacagaggaagataaagttgaggccctgccttcattagacagtcaacaaatatgtatcaagcaccatttttgtgcccagcactaagataggcactgggggtaaaatggtagacaatgcagaatttgctctttcttttatggtaacagtggcaagacagttattaaacagcaatgtgtactgtgaggaatcttgtgaagaaagtgtccagagagcctttaagcatcttatgttctgtgaaagagcaagarcatgtaaagcaggattataattgttaattgaaaggctgatttttgccagaaggtatgcattgttgagtctatggtgtttgctcatacagggttttaaatttgatttagttgttaatggctttttaaaatgcaaaaataatgtaatattcgatatttatagttttttaataactggaatttctagcagtgttgagcctcctttcccacatgtcactaaacaattgttagagctgaatagtgtcctgctgtggtttggctctgtgtctgcacccaaatctc

SEQ ID NO: 614794 - DNA, 654 bp, Homo sapiens
tttacattatgctcaccagagggcattgttgattactgtcccatctatattcaatttggatgtgagccttctatacttctatagtgtgtattatctgcagaatgctatgttaaatatccttgaattaacagaggaagataaagttgaggccctgccttcattagacagtcaacaaatatgtatcaagcaccatttttgtgcccagcactaagataggcactgggggtaaaatggtagacaatgcagaatttgctctttcttttatggtaacagtggcaagacagttattaaacagcaatgtgtactgtgaggaatcttgtgaagaaagtgtccagagagcctttaagcatcttatgttctgtgaaagagcaagaacatgtaaagcaggattataattgttaattgaaaggctgatttttgccagaaggtatgcattgttgagtctatggtgtttgcycatacagggttttaaatttgatttagttgttaatggctttttaaaatgcaaaaataatgtaatattcgatatttatagttttttaataactggaatttctagcagtgttgagcctcctttcccacatgtcactaaacaattgttagagctgaatagtgtcctgctgtggtttggctctgtgtctgcacccaaatctc

SEQ ID NO: 614795 - DNA, 544 bp, Homo sapiens
aggaaatcaagctgatgatgagttttaagcacgtctctcaatacaatatactgtaggaaaagttttagtatcagtaaaatgagaatcaatcagtattttgttctctggtaagaaagacagaaaacagaattcccagtccttattagaccccctccacataccattttgtatataaatcttaggtgtttctgatgaaattactttgatttttatgaaaagagtttttaaaaattgaaattctgtgttatgatttatgtgacttatatagaaaaggctggatgaaatcccttcactacttcccatagttggaagtacttccttatagcttttggaattctggaaagtgtagtccagaagttctgtgtagtcaacagcacttcctcmtcaggggagtgggtgtggtccttgtcatcctgggatggtaaaagtaatagctcccagatgtgcccggcactgttctgcctgctttacatttaattctcagaagaaacccaagtatgagacttaagtgtcccctccatttcatagatgatgaaacagatta

SEQ ID NO: 614796 - DNA, 592 bp, Homo sapiens
caatattttgttactgtgtagtgtcgcctttcatctctagtaatacttattaaagtctactttgtctgataatacagattttccaactttcttcttggtagcttggggatggaatatacrttttcatcctttattttcaacttttcttgttttaggcaaatctatctcagaccacatgtattagggttttgttctttgttatctaatttttcattttatgttttacttggattattaagttgatttgtatgtaaaatgattactgatatgttagaatttaaatataccactctactgctttgtttagattgttcttgtcctttattttcctttttcctttgttttgaagtcagtgttttttcattatttcattttccctttaacatttgggaggttttatacttttttattctagtcttagtgattacactatatgtcataatgtaaattcttagcttatcaaaggctattattaattcatgattttactttcttcccaaatgttctaaggaacattttatcttcccagatgatctaaggaacatctgatcattttaacacaatttacttattttagcattttttataatgt

SEQ ID NO: 614797 - DNA, 592 bp, Homo sapiens
caatattttgttactgtgtagtgtcgcctttcatctctagtaatacttattaaagtctactttgtctgataatacagattttccaactttcttcttggtagcttggggatggaatatacattttcatcctttattttcaacttttcttgttttaggcaaatctatctcagaccacatgtattagggttttgttctttgttatctaatttttcattttatgttttacttggattattaagttgatttgtatgtaaaatgattactgatatgttagaatttaaatataccactctactgctttgtttagattgttcttgtcctttattttcctttttcctttgttttgaagtcagtgttttttcattatttcattttccctttaacatttgggaggttttatacttttttattctagtcttagtgattacactatatgtcataatgtaaattcttagcttatcaaaggctattattaattcatgattttactttcttcccaaatgttctaaggaacattttatcttcccagatgatctaaggaacatctgatcattttaacrcaatttacttattttagcattttttataatgt

SEQ ID NO: 614798 - DNA, 536 bp, Homo sapiens
gggtagggtctgtttctttgctgttgacacttcttagaggttgctcatattccttggctcatagctcctgtttttccgtcttcaaagccarcaatgtagcatttctctgaccttacttccagggtcatatctctgtccctctcttctgagttcctgttctactcttaaggactcacccacataatccaggattatttaatgtaaactcactagtaatcttaattccatctccaaccttaattgccctttgccatgtaacctaactaacatttacagattctgggtgttaagacattgtcatatttggggaaagagggtctgattttacctactacacttggtataatggttttagtaatagacaacattcattgaacatttaccattttcactgtgctcagtattatatatgatttatgcaaaaaacagcactaagaaataagtactctgattatttttgttttaccgatgtggaaattgtgacacagagaggactaactgacttgtccaaggtcacatagtaactgacagggaca

SEQ ID NO: 614799 - DNA, 419 bp, Homo sapiens
caacctggtgcactgctcaaggttttgcccaccgggaagatatcccttcaccactgtccttaagggatgccccagaaaggggttacagtacttttgcttatggttgatacctgcatattgggcagaaccatctccatgccaggcccaagtttttttttttttttttttttgtcagctgatcatagggaactccrtatgcagccatagatgcaggcagggagagataaggcagtgtagcaggagtggggactgtgggcatttgggccacttcttcatgtagctgatttgtgatttcattgcatgcccagcctaatcatattacttccatctgacaatggagtgctgtcgtgcatgcccaatgccacggcttggtgggtcttaaaatacccagtccatgatgggcggctcaggtagtgtgg

SEQ ID NO: 614800 - DNA, 665 bp, Homo sapiens
caagactctgtctgtacacaaattttatatatatatatatatatatatatatttttattttttttttttttcttaaaaaaagaagacagagtcttgaactcctgggctcaagcgattctctgacctcagcttcccaaaatgctgggattacaggcatgagccactgcaaccagcccacaaataattttaagaagtagatccacacataaatcgacaataggtttttggtaagggcacaaggcaaggcagcrgagataagatggcctttacaacagatgttgctggaataactggatattgattaggaataaaaaaagaatttgaatacttcacaatatacaaaaattaactcaaaattgattctagatctaataaatcctaaaactataaaacttctagaagaagcaaaggagaaaacccttggtgacgttgggttaggcatttcttaggtacaacaccaaaagtggaatccataaaataataacatcaaaggaaaacttggacttcatcaaaattaaaacttctgctctacaaaagacactgctgaaagaacagaaagacaagccacaagctggggaagtgttttgcaaagcatctacctgataaaggatttgtatccatcataaataaatatctcgcaaaacttgacaataagaaaacaaaca

SEQ ID NO: 614801 - DNA, 665 bp, Homo sapiens
caagactctgtctgtacacaaattttatatatatatatatatatatatatatttttattttttttttttttcttaaaaaaagaagacagagtcttgaactcctgggctcaagcgattctctgacctcagcttcccaaaatgctgggattacaggcatgagccactgcaaccagcccacaaataattttaagaagtagatccacacataaatcgacaataggtttttggtaagggcacaaggcaaggcagcagagataagatggcctttacaacagatgttgctggaataactggatattgattaggaataaaaaaagaatttgaatacttcacaatatacaaaaattaactcaaaattgattctagatctaataaatcctaaaactataaaacttctagaagaagcaaaggagaaaacccttggtgackttgggttaggcatttcttaggtacaacaccaaaagtggaatccataaaataataacatcaaaggaaaacttggacttcatcaaaattaaaacttctgctctacaaaagacactgctgaaagaacagaaagacaagccacaagctggggaagtgttttgcaaagcatctacctgataaaggatttgtatccatcataaataaatatctcgcaaaacttgacaataagaaaacaaaca

SEQ ID NO: 614802 - DNA, 580 bp, Homo sapiens
cagtctctttcatatcactcaagttgtttcccattttaaaaatatatatgtatatgtatatgtgtgtgtgtgtatatayatatagatttagaacagacacaaaatatcacacattgtatgactccatttatatgaaatgttcagattaggcaaatctataaagacagaaagtagagtagtgttgcatagggctggtgaaggatggggaaagtggagaattgggaagaagtaatagctaaaaggtacagggtttcttttggtggtgatgaaaatgttttaaaattgattgtggtgatggttgcgcaattctaagaatacactaactattgaattgtatacttaaaagagtaaattttatggcatgtacattataactcaataatgccattatattaaaaaacccctgtggccctgaatcttaacagtaattaacaatgtgaaccaatgatgtattttgtcattaaaaccttttattatctccacactgaaaatgcctaaaatcaatgaccaacctaatagtaaagtctactcttagtacccagaccgtggtttctgtcattctcattaaaaggaaccttgt

SEQ ID NO: 614803 - DNA, 580 bp, Homo sapiens
cagtctctttcatatcactcaagttgtttcccattttaaaaatatatatgtatatgtatatgtgtgtgtgtgtatatacatatagatttagaacagacacaaaatatcacacattgtatgactccatttatatgaaatgttcagattaggcaaatctataaagacagaaagtagastagtgttgcatagggctggtgaaggatggggaaagtggagaattgggaagaagtaatagctaaaaggtacagggtttcttttggtggtgatgaaaatgttttaaaattgattgtggtgatggttgcgcaattctaagaatacactaactattgaattgtatacttaaaagagtaaattttatggcatgtacattataactcaataatgccattatattaaaaaacccctgtggccctgaatcttaacagtaattaacaatgtgaaccaatgatgtattttgtcattaaaaccttttattatctccacactgaaaatgcctaaaatcaatgaccaacctaatagtaaagtctactcttagtacccagaccgtggtttctgtcattctcattaaaaggaaccttgt

SEQ ID NO: 614804 - DNA, 580 bp, Homo sapiens
cagtctctttcatatcactcaagttgtttcccattttaaaaatatatatgtatatgtatatgtgtgtgtgtgtatatacatatagatttagaacagacacaaaatatcacacattgtatgactccatttatatgaaatgttcagattaggcaaatctataaagacagaaagtagagtagtgttgcatagggctggtgaaggatggggaaagtggagaattgggaagaagtaatagctaaaaggtacagggtttcttttggtggtgatgaaaatgttttaaaattgattgtggtgatggttgcrcaattctaagaatacactaactattgaattgtatacttaaaagagtaaattttatggcatgtacattataactcaataatgccattatattaaaaaacccctgtggccctgaatcttaacagtaattaacaatgtgaaccaatgatgtattttgtcattaaaaccttttattatctccacactgaaaatgcctaaaatcaatgaccaacctaatagtaaagtctactcttagtacccagaccgtggtttctgtcattctcattaaaaggaaccttgt

SEQ ID NO: 614805 - DNA, 580 bp, Homo sapiens
cagtctctttcatatcactcaagttgtttcccattttaaaaatatatatgtatatgtatatgtgtgtgtgtgtatatacatatagatttagaacagacacaaaatatcacacattgtatgactccatttatatgaaatgttcagattaggcaaatctataaagacagaaagtagagtagtgttgcatagggctggtgaaggatggggaaagtggagaattgggaagaagtaatagctaaaaggtacagggtttcttttggtggtgatgaaaatgttttaaaattgattgtggtgatggttgcgcaattctaagaatacactaactattgaattgtatacttaaaagagtaaattttatggcatgtacattataactcaataatgccattatattaaaaaacccctgtggccctgaatcttaacagtaattaacaatgtgaaccartgatgtattttgtcattaaaaccttttattatctccacactgaaaatgcctaaaatcaatgaccaacctaatagtaaagtctactcttagtacccagaccgtggtttctgtcattctcattaaaaggaaccttgt

SEQ ID NO: 614806 - DNA, 521 bp, Homo sapiens
gaggccttacaatcatgacagaaggtgaaaagcatgtcttacatggcagcaggcaagaaagaatgagaaacaagcgaaagggatttccccttataaaaccgtaagmtcttgtgagacttattcactaccactaggacagtatgggggaaaccatccccatgattcagttatctcccaccagctccctcccacaacacgtgaggattatgggagctacaattcaagatgagatttgggtgggggagacagccaagtcacatcaagctgaaatagttcttaggattatctggtttaatatcatggttttatcagtgaggaaaccaagatcctcagctggcaaacgaattgtccatttcagtacaattagctaatggcaaaattggtgttagaatctagttctctggtgatctggttaagtatcctttccattactgctaccttattgttgctatcatatcactcacttttactgataagcccagtgagtaaatagactcacccagagagctatatgctgcttt

SEQ ID NO: 614807 - DNA, 560 bp, Homo sapiens
aacagggtagggttgtataatcctcctgcagagaggggcactgaaataaaagaaaatactaagtaaactctaatataatctttcacaagagacawagaattggaagggagatgtactgggcaagtactaaggctgtatatagcctcctaacctgaggccaggggcatagcagccattattcactactttcctgtctctcctaaccttgagtgtgattaaattaattggttaaggaaagctgggatgtatttcatgtgattaatgccttggaaaacaattgcagtagattgcattgattcatttcattttacatacttgaaattagaggcttatgaagtctacatgcaaatttatgcaaagtgggatgcaaattcatattgtgaaccatgagtcctggcattcccccctccctttagaaaaagaactgcaccactgaatatgcatgtgcacatatggtgctgctcgtttcaaatagcaactcaaagctggcagccaaataaatcccagtgacatcgactgagcaacaaacaaaagtttaaactcatttacaaacaaaaatt

SEQ ID NO: 614808 - DNA, 569 bp, Homo sapiens
actgtcttacacaatggctgaactagtttacattcctaccaacagtgtaaaagcattcctatttctccagcctctccagcatctgttgtttctcgacattttaataatcgccattctgactggcatgagatgatatctcattgtgtttttgatttgaatttctttaatgatcagtgatgttgagctcatgtggccaggcttcyttaaacaaccagcaagaactcacttattactcagaagagggtatcaaaccattcatgagggatttgcccccatgacccaaacacctcctaccaggctcacctttaacattggggatcacatttcaacatgagatttggaggggacaaacatctaaaccccatcaaaagtaaagtagcgtaggaggattgggaaagctgggtaggacttcatttttacaaccatggaggtcagagtgggcctcattaagaatgtaactttgagcaaacatttgaaggaagtggggaggtgggccatgcaaatacaggtgtcagagggaaaacatttcaaacagaaaaagtcatgtgaagctgtaagtcaggagtgtt

SEQ ID NO: 614809 - DNA, 301 bp, Homo sapiens
tgggaatgctgctgactgctttttatatgtaatcccgtttccaacgaaatcctcaaagctagacaaatatccacttgcagattccacaaaacgagtgtttcaaaactgctctctcaaatgaaggttcaactctgttagctgagtagatacatcatgaaaaagtttctgacattgcttctatctagcttttattggaagatatttyctttttcaccgcagtcctgagagcgctccaaatgtccacttccagatactacaaaaagagtgtttcaaacctgctctatgaaagggactgttcaac

SEQ ID NO: 614810 - DNA, 403 bp, Homo sapiens
caactctgttagctgagtagatacatcatgaaaaagtttctgacattgcttctatctagcttttattggaagatatttcctttttcaccgyagtcctgagagcgctccaaatgtccacttccagatactacaaaaagagtgtttcaaacctgctctatgaaagggactgttcaacactgtgacttcaattgaaacatcccaatgaagcttctgagaatgcttctgtctagagtttatatgaagacaatcccgtttccaacgaaatcctcaaagctatccaaatatcctcttgcagattttacaaaaagagtgtttcaaaactgctctatcaaaagaaagcttcaacactgttagttgagggcgcacatcacaaataagattctgagaatgcttctgtctagtt

SEQ ID NO: 614811 - DNA, 461 bp, Homo sapiens
agatacatcatgaaaaagtttctgacattgcttctatctagcttttattggaagatatttcctttttcaccgcagtcctgagagcgctccaaatgtccacttccagatactacaaaaagagtgtttcaaacctgctctatgaaagggactgttcaacactgtgacttyaattgaaacatcccaatgaagcttctgagaatgcttctgtctagagtttatatgaagacaatcccgtttccaacgaaatcctcaaagctatccaaatatcctcttgcagattttacaaaaagagtgtttcaaaactgctctatcaaaagaaagcttcaacactgttagttgagggcgcacatcacaaataagattctgagaatgcttctgtctagttttcaggggaagatatttcctttttcaccataggcctgaaagcgctccaaatgtccacatccagatactacaaaaag

SEQ ID NO: 614812 - DNA, 461 bp, Homo sapiens
agatacatcatgaaaaagtttctgacattgcttctatctagcttttattggaagatatttcctttttcaccgcagtcctgagagcgctccaaatgtccacttccagatactacaaaaagagtgtttcaaacctgctctatgaaagggactgttcaacactgtgacttcaattgaaacatcccaatgaagcttctgagaatgcttctgtctagagtttatatgaagacaatcccgtttccaacgaaatcctcaaagctatcmaaatatcctcttgcagattttacaaaaagagtgtttcaaaactgctctatcaaaagaaagcttcaacactgttagttgagggcgcacatcacaaataagattctgagaatgcttctgtctagttttcaggggaagatatttcctttttcaccataggcctgaaagcgctccaaatgtccacatccagatactacaaaaag

SEQ ID NO: 614813 - DNA, 461 bp, Homo sapiens
agatacatcatgaaaaagtttctgacattgcttctatctagcttttattggaagatatttcctttttcaccgcagtcctgagagcgctccaaatgtccacttccagatactacaaaaagagtgtttcaaacctgctctatgaaagggactgttcaacactgtgacttcaattgaaacatcccaatgaagcttctgagaatgcttctgtctagagtttatatgaagacaatcccgtttccaacgaaatcctcaaagctatccaaatatcctcttgcagattttacraaaagagtgtttcaaaactgctctatcaaaagaaagcttcaacactgttagttgagggcgcacatcacaaataagattctgagaatgcttctgtctagttttcaggggaagatatttcctttttcaccataggcctgaaagcgctccaaatgtccacatccagatactacaaaaag

SEQ ID NO: 614814 - DNA, 461 bp, Homo sapiens
agatacatcatgaaaaagtttctgacattgcttctatctagcttttattggaagatatttcctttttcaccgcagtcctgagagcgctccaaatgtccacttccagatactacaaaaagagtgtttcaaacctgctctatgaaagggactgttcaacactgtgacttcaattgaaacatcccaatgaagcttctgagaatgcttctgtctagagtttatatgaagacaatcccgtttccaacgaaatcctcaaagctatccaaatatcctcttgcagattttacaaaaagwgtgtttcaaaactgctctatcaaaagaaagcttcaacactgttagttgagggcgcacatcacaaataagattctgagaatgcttctgtctagttttcaggggaagatatttcctttttcaccataggcctgaaagcgctccaaatgtccacatccagatactacaaaaag

SEQ ID NO: 614815 - DNA, 564 bp, Homo sapiens
tgagtttattatacttttaatcagtgattttaaattaaaaaagtcaaagccatggatgaatctaattactttaacattgtattcaagtaaaccatttgttacgtaccttgaaatcatcaaatactgctttatctctcrataaaattaagagaattagcatctgaatgttaaaaaggtctatatttaaaaatgtaatttaaatcatattataatgataaatattactattaatataattatatttaattataatccaagcacaatgatataacttggttcatttacattattaagaaaaaataattatttgaccagacattttagtaaggcttaaatagcccttgaaatatccctaggttcaaatagaggcaactgtaaatctgaatgttaacattatcctcagttcatgtaatttctaattagaatttgtttcaatgacaatgaaaattttcatatttaggatctaggtcagtaggaccattgcatagagtttttgtgatgatatggtgtttccatttttactgaactatattttacttattttcactcaaaatgaatattgat

SEQ ID NO: 614816 - DNA, 564 bp, Homo sapiens
tgagtttattatacttttaatcagtgattttaaattaaaaaagtcaaagccatggatgaatctaattactttaacattgtattcaagtaaaccatttgttacgtaccttgaaatcatcaaatactgctttatctctcaataaaattaagagaattagcatctgaatgttaaaaaggtctatatttaaaaatgtaatttaaatcatattataatgataaatattactattaatataattatatttaattataatccaagcacaatgatataacttggttcatttacattattaagaaaaaataattatttgaccagacattttagtaaggcttaaatagcccttgaaatatccctaggttcaaatagaggcaactgtaaatstgaatgttaacattatcctcagttcatgtaatttctaattagaatttgtttcaatgacaatgaaaattttcatatttaggatctaggtcagtaggaccattgcatagagtttttgtgatgatatggtgtttccatttttactgaactatattttacttattttcactcaaaatgaatattgat

SEQ ID NO: 614817 - DNA, 567 bp, Homo sapiens
ggctgcctgtgactggctgaaatttgtcttttatactcctaaatttggttttggtttatttctgtactaagttaggttgcagttggttatctaggaactcaaagtacaaagaagacttcagggtaatggcctcttggttatttactttgacaattcccttttctggtcagcctctcaatcttgagagrttgatgcaaaccttgggcattgatgctaaggtttgtcaccatcatagtggatatatttggtctcagtatggaactcacaaggtacagtatcgagtcagctgaatgatttgttctctttgtgtttttgttgttcaaaccaaagtgagaccatttgatacacagtgaatggctacgcacaagcatttaagacccttgagagaatacagtgtaccaggcagactactatgatgactatcagaaggataataccaagacactgaaggatgaaagggtgggttgcccctgcacacctgtgggtgtttctcgtcaggtggaaggagacacttgagaaaagaaagagacacagagacaaagtatagagaaagaaaagtgggcccag

SEQ ID NO: 614818 - DNA, 578 bp, Homo sapiens
taatcccagcactttgggaggccaagaygggcagatcacctgaggtcaggagttcaagaccagcctgatcaacatggagaaaccctgaatctactaaaaataatacaaaattaggcatggtagcccatgcctataatcccagctatttgggaggctgaggcaggggaatcacttgaacccaggaggcagaggttgtggtgagccaagattatgccattgcactaccgcctgggcaacaagaatgaaatgtcgtctcaaaaaaaaaaaaaaatctgcaggtataaatctcactggcaatagtaaacacatcagaaaacacagaatattataatactgtatttgtggggtgtaaattactcttcagtagaaagactaaatgatgaagcagtcaaaaataataactacaacaacatttcaagacatagtgcaataagacataaagagaaacaaaaaaaagttaaaaagtgaaagaagataggaaggaaggaaagaaagaagggaagaccacaaaacaccagaaaacaaatcacaaaatagcagaagtcagtccttacttattaataataacattaaatgta

SEQ ID NO: 614819 - DNA, 584 bp, Homo sapiens
caaaatactaacaaactggattcagcaacacattttaaaacatcattcatcatgaccaagtgagacttgtcccaaggattcaaggatagttcaacatatgcaaatcaatcaatatgatacatcatattaacagaatggaggacaaaaatcatatgatcatttcaattagtgcygaaaaagcatgaataaaattaataaaattcaacatcccttcatgttaaaaaaaaaaacctcagaaaactgggtacagaaggaatatatctcaacataataaaagccatgtatgacagacccatagctagtatcatactcaatggggaaaaactgaaagtctttcctctaagatctggagcacaacaaggatgtccactgtcaccactgttattcaacatagtactggaagtcctggctagagcggtcagacaagagaaagaaataaaaggcatccaaattagaaagggagaagtcaaattatccttgtttgcagatatgattttatatatggaaaaatgtaaagacttcaccaaaaaactattagaactgataaaaaaaaattccgtaaagttgcaggatacaaaatcagt

SEQ ID NO: 614820 - DNA, 594 bp, Homo sapiens
gactggaggtggtctccttttagtcatggcaaataaggacaggcaattgtgaaaaagccagggatctaattccagcgatagccaaccaatcctacaaacyctgagttatcttttggtaccagggagaggcatagtgagtaaaaaaaaaaaaaaaaaaaaaatcacttctaatggatacatacactaatacaagatgttaataataagggaactgtgaagtggggagagatatatggaagttccctgtccctgctgctcaatttttccgtaaacctaaaaataaaatctaatttacacacacacacacacacgcccctaaaaagggatctctgctggaacttgcaaggttttctgttttggggggttttttgttttcctacaggctcataatttcaaattagtggtgcttcctttttttttttttaataaaggctggaagaaaacttatcgaacctttataattctaagaactgagtaattattctacaaaccaacaaatatttattaacagcgtcctataaccaactcatgtaatcttcacacaatcctatgaaatactactgttcacgtcttacaaaagaagaaacagttcaa

SEQ ID NO: 614821 - DNA, 545 bp, Homo sapiens
agccaactgattttggacgaacatgccaagaacatacgctggggaaaggacagcctcttcaaatgaatgacactgtgaaaactaaatatccatatggagaagaatgatattagcttcctatgtaacaccatataacaacataaactcagaatcgattgaagactgaaatgtaaggcccaaaattatcaaactactctaagtaaatatagggaaaatgcttgaggacattagtctgcacaaagatttttatgggtaagacatcagaagcataggcaaacaacaaatcatagacaaatgacactacattaagctaaagagcttctgtccagcaaacaactgagtgaagaaaaaacctgtagaataggagaaaatattgtcaagctattcacctaataagggactaatatacaaaatatacaaaaaaactcaaacaacttcacagtaawaaaaatctgagttcaaatttgggcaaaatatataactatacttttttttagaaaaagaaatacaaataaccaataaataaattttaaaatgctcagtat

SEQ ID NO: 614822 - DNA, 597 bp, Homo sapiens
tgtttatcttcaaacttggacttcccctgctcattccattcttrtctacttctattgggttcaccagctaattccattctcattctatccacaggctcactcccatatgtattattaaaacacacaccaataggacataaaaagaagcaagagtactgggctttaccatgagttcaaatctcatttctgccaattcctatgtctaaaaaaaaaagcttcctaatctctttgagcctcacattctctatctagagaatcacttgaccagaatgttcaacgcagataaaaatactagaaggtattttaattcattctaagattccttaaaattctgtaattctatgtcctcttgattctgtctatagaaaaacttggaatacataggcagcagagtttgaaaaaaataatagaacaaaagaaacaccaagaaaaacagagaagaaagttttaaaaaatgaagacaaggttatataaaagtcatggaaaaagcaacaagagtaaaaaatgtattatggaagtaagcagaaatacttgcctaaatggaaaaccaaactgggaagtcaaataatttgtctctaagacttgcctaaacttgct

SEQ ID NO: 614823 - DNA, 532 bp, Homo sapiens
attgggttcaccagctaattccattctcattctatccacaggctcactcccatatgtattattaaaacacacaccaataggacataaaaagaagcaagagtactgggctttaccatgagttcaaatctcatttctgccaattcctatgtctaaaaaaaaaagcttcctaatctctttgagcctcacattctctatctagagaatcacttgaccagaatgttcaaygcagataaaaatactagaaggtattttaattcattctaagattccttaaaattctgtaattctatgtcctcttgattctgtctatagaaaaacttggaatacataggcagcagagtttgaaaaaaataatagaacaaaagaaacaccaagaaaaacagagaagaaagttttaaaaaatgaagacaaggttatataaaagtcatggaaaaagcaacaagagtaaaaaatgtattatggaagtaagcagaaatacttgcctaaatggaaaaccaaactgggaagtcaaataatttgtctctaagacttg

SEQ ID NO: 614824 - DNA, 621 bp, Homo sapiens
ctatccacaggctcactcccatatgtattattaaaacacacaccaataggacataaaaagaagcaagagtactgggctttaccatgagttcaaatctcatttctgccaattcctatgtctaaaaaaaaaagcttcctaatctctttgagcctcacattctctatctagagaatcacttgaccagaatgttcaacgcagataaaaatactagaaggtattttaattcattcyaagattccttaaaattctgtaattctatgtcctcttgattctgtctatagaaaaacttggaatacataggcagcagagtttgaaaaaaataatagaacaaaagaaacaccaagaaaaacagagaagaaagttttaaaaaatgaagacaaggttatataaaagtcatggaaaaagcaacaagagtaaaaaatgtattatggaagtaagcagaaatacttgcctaaatggaaaaccaaactgggaagtcaaataatttgtctctaagacttgcctaaacttgctttggtaaaacttacagtcctatggccaaagctaagtcagatctgccctagagcctttgaaggtaaaaataagatactggttaccactgaaatcgtcaaatttattagg

SEQ ID NO: 614825 - DNA, 532 bp, Homo sapiens
attgggttcaccagctaattccattctcattctatccacaggctcactcccatatgtattattaaaacacacaccaataggacataaaaagaagcaagagtactgggctttaccatgagttcaaatctcatttctgccaattcctatgtctaaaaaaaaaagcttcctaatctctttgagcctcacattctctatctagagaatcacttgaccagaatgttcaacgcagataaaaatactagaaggtattttaattcattctaagattccttaaaattctgtaattctatgtcctcttgattctgtctatagaaaaacttggaatacataggcagcagagtttgaaaaaaataatagaacaaaagaaacaccaagaaaaacagagaagaaagttttaaaaaatgaagacaaggttatataaaagtcatggaaaaagcaacaagastaaaaaatgtattatggaagtaagcagaaatacttgcctaaatggaaaaccaaactgggaagtcaaataatttgtctctaagacttg

SEQ ID NO: 614826 - DNA, 268 bp, Homo sapiens
ttcattatgtgtaatatataattaatgcccttaataagtgtatgtttacacaagttatgttttcctgtgaaatctagtcccagaagtggagttgttgagttaaagggatgtcaggttatttgaaattttgatacacagcactaagttacccttcagaaataatttaccaatttcatataccaacagtgtatgagaatgcctttttcctcacatttgccaatggtagtaattactktttcaataccagcatgactttacaaaatatatc

SEQ ID NO: 614827 - DNA, 264 bp, Homo sapiens
gttctggaatgctatgtgagggacaaacactcagagccttgtagcagtgttctggratcctatgtgagtgagagtgcctggagcctaccctacctgacgcccccaaagccctcacagggtctgacctcccagcatgcacctgcctctccctgaaccgcaactgcccaccctgcctattccctggcctcctccatcctgtgcagcccatagactgtgaccatctctccagccactctggcccttcctttatctttgtcctgtcag

SEQ ID NO: 614828 - DNA, 264 bp, Homo sapiens
gttctggaatgctatgtgagggacaaacactcagagccttgtagcagtgttctgggatcctatgtgagtgagagtgcctggagcctacccwacctgacgcccccaaagccctcacagggtctgacctcccagcatgcacctgcctctccctgaaccgcaactgcccaccctgcctattccctggcctcctccatcctgtgcagcccatagactgtgaccatctctccagccactctggcccttcctttatctttgtcctgtcag

SEQ ID NO: 614829 - DNA, 538 bp, Homo sapiens
tttataggtggaaaacatacggtacagttatctactttagccccattatctactgaaaatgggagtcaaactaacaaagacatatgaaatgtttcatcgagagctcttgaggtggcattctctagcatttcatggcaccaaataacatgatacaattccatattgctgaattacataaattaccaaataaatttatcgaattagtcagatatattaaaagtgtaagttgagcaaagcaatttaacgcctcagagggtggaaaaaggcctcatctgcttttactttgaagaagaaaatctytagattttgtctatctttaggacacaatgtacagaactcaactttctactaaagaatcaaaggataaatttttatctaagaaattatgcttcttacatgataaaaatcacacatgccaaaacttatgatactttattaaacaacataatgtaaggactgattcaacagaaatattggagtggtgattttttaaaatatgtggaagtatatatttgttttcaaaatattggaaataacc

SEQ ID NO: 614830 - DNA, 264 bp, Homo sapiens
gttctggaatgctatgtgagggacaaacactcagagccttgtagcagtgttctgggatcctatgtgagtgagagtgcctggagcctaccctacctgacgcccccaaagccctcacagggtctgacctcccagcatgcacctgcctctccctgaaccgcaactgcccaccctgcctattccctggccycctccatcctgtgcagcccatagactgtgaccatctctccagccactctggcccttcctttatctttgtcctgtcag

SEQ ID NO: 614831 - DNA, 368 bp, Homo sapiens
ctttctactaaagaatcaaaggataaatttttatctaagaaattatgcttcttacatgataaaaatcacacatgccaaaacttatgatactttattaaacaacataatgtaaggactgattcaacagaaatattggagtggtgattttttaaaatatgtrgaagtatatatttgttttcaaaatattggaaataaccatgatggaactataagttcaaacagtttgagctaagcagatgaacttgcatgcatgaaaatacattaaacagactcatttggctgggaatattcatagcaactctcaaggctagacgtgtttttgtggctcgtctcagtcattgctttcctcccattgtattcccaatcta

SEQ ID NO: 614832 - DNA, 368 bp, Homo sapiens
ctttctactaaagaatcaaaggataaatttttatctaagaaattatgcttcttacatgataaaaatcacacatgccaaaacttatgatactttattaaacaacataatgtaaggactgattcaacagaaatattggagtggtgattttttaaaatatgtggaagtatatatttgttttcaaaatattggaaataaccatgatggaactataagttcaaacagtttgagctaagcagatraacttgcatgcatgaaaatacattaaacagactcatttggctgggaatattcatagcaactctcaaggctagacgtgtttttgtggctcgtctcagtcattgctttcctcccattgtattcccaatcta

SEQ ID NO: 614833 - DNA, 368 bp, Homo sapiens
ctttctactaaagaatcaaaggataaatttttatctaagaaattatgcttcttacatgataaaaatcacacatgccaaaacttatgatactttattaaacaacataatgtaaggactgattcaacagaaatattggagtggtgattttttaaaatatgtggaagtatatatttgttttcaaaatattggaaataaccatgatggaactataagttcaaacagtttgagctaagcagatgaacttgcatgcatgaaaatacattaaacagactcatttggctgggaatattcatwgcaactctcaaggctagacgtgtttttgtggctcgtctcagtcattgctttcctcccattgtattcccaatcta

SEQ ID NO: 614834 - DNA, 580 bp, Homo sapiens
tttcaggaagccccttgccctcctaaaagccaccctacttctctctaaggagaatggcccagtcctctcccgagttcacacaggctaggtgatagcattgcttttgtgtaaattacgtaatgcaaaattttttaaatctttgccttaatacttttaaattttgttttattttgaatgactagccttcatggccccccttttttgtaccccarcttggagtgtatgaagggttttggtctccctgagagtggctcgaggcagccagggcttacctgtactctgacttgagaaaagttggataaaagtgcacaccttaaaaaaaattgaatgacgaagcactaacaaaaacagtattccagtacagtggacagcttagcattttgacaattgggaaaaaaatgctcatttctgaactgtacaatgtaagacacaaaaatgaaacactggaaatggaaattcaattatgtcattatagactggctactgctctacatgactgtgaccaaagtcagatagttgaaagagatttctttccagagaacaagacatgaacaggtttatttacagaaaacaatgaatt

SEQ ID NO: 614835 - DNA, 580 bp, Homo sapiens
tttcaggaagccccttgccctcctaaaagccaccctacttctctctaaggagaatggcccagtcctctcccgagttcacacaggctaggtgatagcattgcttttgtgtaaattacgtaatgcaaaattttttaaatctttgccttaatacttttaaattttgttttattttgaatgactagccttcatggccccccttttttgtaccccagcttggagtgtatgaagggttttggtctccctgagagtggctcgaggcagccagggcttacctgtactctgacttgagaaaagttggataaaagtgcacaccttaaaaaaaattgaatgacgaagcactaacaaaaacagtattccagtacagtggacagcttagcattttgacaattgggaawaaaatgctcatttctgaactgtacaatgtaagacacaaaaatgaaacactggaaatggaaattcaattatgtcattatagactggctactgctctacatgactgtgaccaaagtcagatagttgaaagagatttctttccagagaacaagacatgaacaggtttatttacagaaaacaatgaatt

SEQ ID NO: 614836 - DNA, 207 bp, Homo sapiens
ccttgctaccctcagaatatcaagggarcaaagaccttaagtgccatatcaacacctccaataagctgtggttgacccaatgaacaagccagtccatctcccacgggtaccacacaccccccactgctcatcaccagagagggaacactggcttggcctcacaacacagaccctccatcctgggctgattacgctaagtgattgcta

SEQ ID NO: 614837 - DNA, 207 bp, Homo sapiens
ccttgctaccctcagaatatcaagggaacaaagaccttaagtgccatatyaacacctccaataagctgtggttgacccaatgaacaagccagtccatctcccacgggtaccacacaccccccactgctcatcaccagagagggaacactggcttggcctcacaacacagaccctccatcctgggctgattacgctaagtgattgcta

SEQ ID NO: 614838 - DNA, 207 bp, Homo sapiens
ccttgctaccctcagaatatcaagggaacaaagaccttaagtgccatatcracacctccaataagctgtggttgacccaatgaacaagccagtccatctcccacgggtaccacacaccccccactgctcatcaccagagagggaacactggcttggcctcacaacacagaccctccatcctgggctgattacgctaagtgattgcta

SEQ ID NO: 614839 - DNA, 433 bp, Homo sapiens
ggagccaacttggaaaacatacttcagaatatcattcatgagaatrtccccaacctatccagacagaccaacattccaattcaggaaatccagagaatctcagtaagataagccacgagaagatcatccccaagacatataatcatcagattctccaaggtcaaaatgaaagaaacaatgttaaaggcagctagggagaaaggcaatgtcacctgcaaagggaattccatcagacttagcagaattctcagctgaaaccctacaagccagaaaagatattcaacttcttaaagaaaagaaatttcacgtagtatggcagagacagatataccatataataacatggtgttattataaatggtttaaaaaaaaaaagaaaataaatttcaacccagaatttcatgtccagcaaaattaagcatcataagtgaag

SEQ ID NO: 614840 - DNA, 433 bp, Homo sapiens
ggagccaacttggaaaacatacttcagaatatcattcatgagaatatccccaacctatccagacagaccaacattccaattcaggaaatccagagaatctcagtaagataagccacgagaagatcatccccaagacatataatcatcagattctccaaggtcaaaatgaaagaaacaatgttaaaggcagctagggagaaaggcartgtcacctgcaaagggaattccatcagacttagcagaattctcagctgaaaccctacaagccagaaaagatattcaacttcttaaagaaaagaaatttcacgtagtatggcagagacagatataccatataataacatggtgttattataaatggtttaaaaaaaaaaagaaaataaatttcaacccagaatttcatgtccagcaaaattaagcatcataagtgaag

SEQ ID NO: 614841 - DNA, 552 bp, Homo sapiens
gcactgaatttaacttggatgtgaagtagacctcatattagctgcagttaatcagtagaccaggcgtcctagcagaattaaatttgatgctcctgtgttatctttaaatgacacagcttttctgaaaacccttactcatagtgcgtgattatccattaagaaaaggtgatggaatatgtgaatacagctgaggagacaccacaaggcaaatgctcagtggttcccattaatattgggaaaatcaacactataaaacagaaagccatagacattatttaatatttggttttgggaggtatttttagtgacactgcatacagttgtacctaataattgctaaattagagacgtaaaagtaaaacaaaggcacattgtgtttgagtaggaaatctatagacatctagctggttttcccatccagccacaaaattctaaatataatcatggtacctgyactcaaatttatgttaaataccaacctcaatgaaatcactctttcttctcattccctttcttatttatatgttgctttccttaagggaagaatacaaa

SEQ ID NO: 614842 - DNA, 432 bp, Homo sapiens
ttctatgcttctttcccttctttgctctctttctactctaataactgcgattcacacaggtaatgaagagtgtaattccttgatagaaacacagctccaagattaatcctttctttaactatgaagttcgcrtgtccaaaatctatggtagttgctgtctgatttttgatcactgatggtgatacagatatttatcatcaactcacaacttcccaaatctttgaaaagtcttactattgatggttcaactagtagaaacatgatgtaaaatatctgaaaataaagtttttatttattagaatgtaaataataatacaaattgtaataaggtgtaaaagttctttcttcactgaagcagtaccatgttgtcctctaccccacaaatgcactactcccccgtggtccaatgtattttaaaagtcttgtaattgc

SEQ ID NO: 614843 - DNA, 432 bp, Homo sapiens
ttctatgcttctttcccttctttgctctctttctactctaataactgcgattcacacaggtaatgaagagtgtaattccttgatagaaacacagctccaagattaatcctttctttaactatgaagttcgcatgtccaaaatctrtggtagttgctgtctgatttttgatcactgatggtgatacagatatttatcatcaactcacaacttcccaaatctttgaaaagtcttactattgatggttcaactagtagaaacatgatgtaaaatatctgaaaataaagtttttatttattagaatgtaaataataatacaaattgtaataaggtgtaaaagttctttcttcactgaagcagtaccatgttgtcctctaccccacaaatgcactactcccccgtggtccaatgtattttaaaagtcttgtaattgc

SEQ ID NO: 614844 - DNA, 584 bp, Homo sapiens
actctttaaaagtcagaactatggtagcatgaagccaaacgaggtaatctagaataaaattttctatgcttctttcccttctttgctctctttctactctaataactgcgattcacacaggtaatgaagagtgtaattccttgatagaaacacagctccaagattaatcctttctttaactatgaagttcgcatgtccaaaatctatggtagttgctgtctgatttttgatcactgatggtgatacagatatttatcatcaactcacaacttcccaaatctttgaaaagtcttactattgatggttcaactagtagaaacatgatgtaaaatatctgaaaataaagtttttatttattagaatgtaaataataatacaaattgtaataaggtgtaaaagttctttcttcactgaagcagtaccatgttgtcctctaccccacaaatgcactactcccccgtggtccaatgtattttaaaagtcttgtaattgctattaactcagamaagtttacttaacttgttctaagcttctggtatttactacagtttactttcaatcactcaaccatctctgttatatat

SEQ ID NO: 614845 - DNA, 531 bp, Homo sapiens
gctgaggcaggagaattgcttgaacctgagaggcagaggtggtaatgagccaagactgagccactgcactccagccttggtgacagagcaagactctgtctcaaaaacaaaaacaaacaaacaaaaaacctaattgttcccatataagtctatgttcatacaagatctgaagagtacacaacaccgtgagacaggacagacatatattttaaaagttatattcctgrtttctgtaaaaataaaatagttgaatttaagctttcaagacaagtcaacgaaacgagcaaaaaatgcaaaagtgaaactcgaaaggtcatttccccatcaagggctcatgatcactggacattcacaaactatactgttcaaaacattagatctgaattttgatccgagtatccctttagtagcagtttcattcaaggatgtccaagaggtaaaataagacaatatcatttgctattttcagttttcttttctgagaacagcccagcattcttcttcagagaaatgaattgtcctaacttcata

SEQ ID NO: 614846 - DNA, 531 bp, Homo sapiens
gctgaggcaggagaattgcttgaacctgagaggcagaggtggtaatgagccaagactgagccactgcactccagccttggtgacagagcaagactctgtctcaaaaacaaaaacaaacaaacaaaaaacctaattgttcccatataagtctatgttcatacaagatctgaagagtacacaacaccgtgagacaggacagacatatattttaaaagttatattcctgatttctgtaaaaataaaatagttgaatttaagctttcaagacaagtcaacgaaamgagcaaaaaatgcaaaagtgaaactcgaaaggtcatttccccatcaagggctcatgatcactggacattcacaaactatactgttcaaaacattagatctgaattttgatccgagtatccctttagtagcagtttcattcaaggatgtccaagaggtaaaataagacaatatcatttgctattttcagttttcttttctgagaacagcccagcattcttcttcagagaaatgaattgtcctaacttcata

SEQ ID NO: 614847 - DNA, 531 bp, Homo sapiens
gctgaggcaggagaattgcttgaacctgagaggcagaggtggtaatgagccaagactgagccactgcactccagccttggtgacagagcaagactctgtctcaaaaacaaaaacaaacaaacaaaaaacctaattgttcccatataagtctatgttcatacaagatctgaagagtacacaacaccgtgagacaggacagacatatattttaaaagttatattcctgatttctgtaaaaataaaatagttgaatttaagctttcaagacaagtcaacgaaacgagcaaaaaatgcaaaagtgaaactcgaaaggtcatttccccatcaagggctcatgatcactggacattcacaaactatactgttcaaaacattagatctgaattttgatccgagtatccctttagtagcagtttcattcaaggatgtccaagaggtaaaataagacaatatcatttgctattttcagttttcttttctgagaacagcycagcattcttcttcagagaaatgaattgtcctaacttcata

SEQ ID NO: 614848 - DNA, 382 bp, Homo sapiens
ctagcagcaagcctctgaagttaaaacagaaactgacactttaatargtaaagctttcctctaggtaaagatcagaactccaactagcacttaactcactggaaatatcctaagagtctcaaaattcactgctttgaatccctgacaagtataaaaattttatactgaaaacttcatgctattcaaaacattaaaacagaaacatctgacttaaagcttacatttttaaaatcttttttatgcttctaaatttgtttttattcaaatatggataccaacaataacatttatgtcaatgccttctgttcaatattgaacaaatagaattaggaataagaataatatgagtacatccaatcattgactgtactttatttccagt

SEQ ID NO: 614849 - DNA, 439 bp, Homo sapiens
acactagcagcaagcctctgaagttaaaacagaaactgacactttaataggtaaagctttcctctaggtaaagatcagaactccaactagcacttaactcactggaaatatcctaagagtctcaaaattcactgctttgaatccctgacaagtataaaaattttatactgaaaacttcatgctattcaaaacattaaaacagaaacatctgacttaaagcttacatttttaaaatcttttttatgcttctaaatttgtttttattcaaatatggataccaacaataacatttatgtcaatgccttctgttcaatattgaacaaatagaattaggaataagaataatatgagtacatccaatcattgamtgtactttatttccagtattccatcaaatgtacctgctctcaatgtctgtactttctttctttgtactgct

SEQ ID NO: 614850 - DNA, 588 bp, Homo sapiens
cctctgaagttaaaacagaaactgacactttaataggtaaagctttcctctaggtaaagatcagaactccaactagcacttaactcactggaaatatcctaagagtctcaaaattcactgctttgaatccctgacaagtataaaaattttatactgaaaacttcatgctattcaaaacattaaaacagaaacatctgacttaaagcttacatttttaaaatcttttttatgcttctaaatttgtttttattcaaatatggataccaacaataacatttatgtcaatgccttctgttcaatattgaacaaatagaattaggaataagaataatatgagtacatccaatcattgactgtactttatttccagtattccatyaaatgtacctgctctcaatgtctgtactttctttctttgtactgctcctttcacagcaggatcttccacttcagtgctaggctgaatgggttttaaaagaaaacgattcataaatcatatatattttatacaacatggagttagtgattcaaaaatatacataattaattatcttcaaggaaggatgttttgcagaaggccctacaaag

SEQ ID NO: 614851 - DNA, 588 bp, Homo sapiens
cctctgaagttaaaacagaaactgacactttaataggtaaagctttcctctaggtaaagatcagaactccaactagcacttaactcactggaaatatcctaagagtctcaaaattcactgctttgaatccctgacaagtataaaaattttatactgaaaacttcatgctattcaaaacattaaaacagaaacatctgacttaaagcttacatttttaaaatcttttttatgcttctaaatttgtttttattcaaatatggataccaacaataacatttatgtcaatgccttctgttcaatattgaacaaatagaattaggaataagaataatatgagtacatccaatcattgactgtactttatttccagtattccatcaaatgtacctgctctcaatgtctgtacwttctttctttgtactgctcctttcacagcaggatcttccacttcagtgctaggctgaatgggttttaaaagaaaacgattcataaatcatatatattttatacaacatggagttagtgattcaaaaatatacataattaattatcttcaaggaaggatgttttgcagaaggccctacaaag

SEQ ID NO: 614852 - DNA, 192 bp, Homo sapiens
tcatatatattttatacaacatggagttagtgattcaaaaatatacataattaattatcttcaaggaaggatgttttgcagraggccctacaaagcaaaggggatatgtcatcaattatatgtaagtatgacaggaccaaccaaacattcatgcagtgttactgtcgagctgaattctcaggcctggctata

SEQ ID NO: 614853 - DNA, 192 bp, Homo sapiens
tcatatatattttatacaacatggagttagtgattcaaaaatatacataattaattatcttcaaggaaggatgttttgcagaaggccctacaaagcaaaggggatatgtcatcaattatatgtaagtatgacaggrccaaccaaacattcatgcagtgttactgtcgagctgaattctcaggcctggctata

SEQ ID NO: 614854 - DNA, 602 bp, Homo sapiens
aatgtacagagtattttaactccacacaccagaggcattgctgccagcacagcacaaataaattccccttgtcttgtcactgaggaaatactcagttgggatgacagttcaggtgaatgtgggattcacctctcatcaaagaaagggttctacattgatcagctaggatacacacttatgaaataacagctaatcaaagtactcatttttcccatgatcacatgggctactgcagcacctacatttctcctatcccctcatttggccttgaattagagctccttgatccactcatgcaaggtggtccataaaacacatcaaataaaccatgtcgaataagcttctgatatcaaawtatttatcaaaaaagaaaacattgaatgaccacagacttgctggatattaatacatatttatatttcaaaatcagtgcagtatttattgaaaatgataattttggttttcatggaatgaattttatgattacttctaaaattaactaagtttggtatattatcttacactgtaaaggacttttataaaacagctatcatatcaaagaactggctgtctcaaaaaaatttcgccaaagcatctatatg

SEQ ID NO: 614855 - DNA, 352 bp, Homo sapiens
tcatatcaaagaactggctgtctcaaaaaaatttcgccaaagcatctatatgcaacttaatcatatcttattcactcatgtcagtgaaacttctctccctgaggcctgacagttatcaagtgaaatgagctgctgtggtttaccccaactctagcactccctcctgtctccagtactctccacagcaataacctcttttgtgagactgggcatatgctgaagcaactggaagtgagttgtctcaagtttacttggctttaactcccaagaccccagcaaatgtctttctttcctccttttgtgtccwttcaccatccctcttcctttgaaaaaatgattatcagaactgtca

SEQ ID NO: 614856 - DNA, 517 bp, Homo sapiens
ttactgtaattatatgacacattttggtactggaagctcactttatcttccttcctatttctaacaccctgttcttccttcttctacagawcaatttgactttactaccctccattacatacatccacttttttttatttattccatgtacactctgccctcctcattctttctttctcttttattcatttcttcttccctctctcctgacttgcctcaggtcttagagtatgttaaaatggaactcataactcagctcctttagtggtacttccaatagaatcaactgctgacccttggttagagacaccacttatcaccatttcatttctcttttacttatgatacagttaataggacattttctttagctattaaactctattagtgctcatattttaaaagaaacattccatcaatgactttttttttttttgagatggagtctcactctgtcacccaggctggagtgcagtggcacgatctccgctcactgcaagctccacctcccaggttc

SEQ ID NO: 614857 - DNA, 517 bp, Homo sapiens
ttactgtaattatatgacacattttggtactggaagctcactttatcttccttcctatttctaacaccctgttcttccttcttctacagatcaatttgactttactaccctccattacatacatccactyttttttatttattccatgtacactctgccctcctcattctttctttctcttttattcatttcttcttccctctctcctgacttgcctcaggtcttagagtatgttaaaatggaactcataactcagctcctttagtggtacttccaatagaatcaactgctgacccttggttagagacaccacttatcaccatttcatttctcttttacttatgatacagttaataggacattttctttagctattaaactctattagtgctcatattttaaaagaaacattccatcaatgactttttttttttttgagatggagtctcactctgtcacccaggctggagtgcagtggcacgatctccgctcactgcaagctccacctcccaggttc

SEQ ID NO: 614858 - DNA, 517 bp, Homo sapiens
ttactgtaattatatgacacattttggtactggaagctcactttatcttccttcctatttctaacaccctgttcttccttcttctacagatcaatttgactttactaccctccattacatacatccacttttttttatttattccatgtacactctkccctcctcattctttctttctcttttattcatttcttcttccctctctcctgacttgcctcaggtcttagagtatgttaaaatggaactcataactcagctcctttagtggtacttccaatagaatcaactgctgacccttggttagagacaccacttatcaccatttcatttctcttttacttatgatacagttaataggacattttctttagctattaaactctattagtgctcatattttaaaagaaacattccatcaatgactttttttttttttgagatggagtctcactctgtcacccaggctggagtgcagtggcacgatctccgctcactgcaagctccacctcccaggttc

SEQ ID NO: 614859 - DNA, 517 bp, Homo sapiens
ttactgtaattatatgacacattttggtactggaagctcactttatcttccttcctatttctaacaccctgttcttccttcttctacagatcaatttgactttactaccctccattacatacatccacttttttttatttattccatgtacactctgccctcctcattctttctttctcttttattcatttcytcttccctctctcctgacttgcctcaggtcttagagtatgttaaaatggaactcataactcagctcctttagtggtacttccaatagaatcaactgctgacccttggttagagacaccacttatcaccatttcatttctcttttacttatgatacagttaataggacattttctttagctattaaactctattagtgctcatattttaaaagaaacattccatcaatgactttttttttttttgagatggagtctcactctgtcacccaggctggagtgcagtggcacgatctccgctcactgcaagctccacctcccaggttc

SEQ ID NO: 614860 - DNA, 586 bp, Homo sapiens
taacatgtcaaaacttatacacccttaaatattaaaaaataatacaatgtaagcaatattttaaatacaatatttaatgattagatacattaggtttattatattacttataacattccattatataaaaattcatttgtttatttattcagattaaacaactattaaggctgaatgtctcatgtctgtaaccccagcactttgagaggctgaggcgagcagaacacttgagcccaacagttaaagaagagcctgggcaacaaggcaaaaccctatctctacaaaactcagcccagcatggtgacacaggtctatggtgacatagctctattgtttcaactacttggatggctgaggtgtgaggatcacctgagcctaggaaatggagatyggagtgagccaagatctcaccagtgccctccagcctgggtgacagagtgaaaccccatctcaaaaaacaacaagtaaaatgcttcttacatggaagactgtattctaggtactccaggatacacacaaatatgtttactgacctccagtagcttatggtatgcaggagcttccaatgaatgatcatttaaaaaac

SEQ ID NO: 614861 - DNA, 501 bp, Homo sapiens
taaaatgcttcttacatggaagactgtattctaggtactccaggatacacacaaatatgtttactgacctccagtagcttatggtatgcaggagcttccaatgaatgatcatttaaaaaactaaatagaaaaccttctgacattcaaactttcagaatatgatataagtmctttgactggttattttattttattttattttattttttaagatgtagtcttgctctgtcacccagcctacagtgcaatggtgcgatcttggctcactgcaatctttgcctcctgggttcaagcgattctcctgccttggcctcctgagcaactgggattacaggcatgcactatcatgcctggataatttttgtgctttttttttttttttttttttttttagagacagggtctcaccatgttggccaggctgatcttgaactcctgacctcaggtgatctacccacctcggcctccaaaagtgctgggattacaggtgtgagccaccac

SEQ ID NO: 614862 - DNA, 501 bp, Homo sapiens
taaaatgcttcttacatggaagactgtattctaggtactccaggatacacacaaatatgtttactgacctccagtagcttatggtatgcaggagcttccaatgaatgatcatttaaaaaactaaatagaaaaccttctgacattcaaactttcagaatatgatataagtcctttgastggttattttattttattttattttattttttaagatgtagtcttgctctgtcacccagcctacagtgcaatggtgcgatcttggctcactgcaatctttgcctcctgggttcaagcgattctcctgccttggcctcctgagcaactgggattacaggcatgcactatcatgcctggataatttttgtgctttttttttttttttttttttttttagagacagggtctcaccatgttggccaggctgatcttgaactcctgacctcaggtgatctacccacctcggcctccaaaagtgctgggattacaggtgtgagccaccac

SEQ ID NO: 614863 - DNA, 544 bp, Homo sapiens
ttttaatcaactagccatgtgtatgtttttctctgaccagctttccattaccaccataaaacaatgayaggtaaaccactgctaaatttgaaaagtaaatactatgcaaaactacactcagagtgagaagattaattttacaagagaccactttaccttagtagcaacactcaagtcttcatcatccaatgtaggcaatgaatccacacacagttcatgcaaaatgcttgagagcaaaaatacacaatgaaaatgagcaagttgatttctttacaatttttttaactgccagtttatatccagcttccccctcaaaaaaaggaaaacataatctggggaaaggtcagtgatctatatattaaattatgattcttgatataattaaaatatgtcctctgttctaaaaatagattttagttacctatttctgcctccacctgtctaaatctataaaatattcaatgaaaactaaccttgaggtttataacaaatagtgacagtcaatatattggcagagcctgacaataatgtgccctcacaaatt

SEQ ID NO: 614864 - DNA, 539 bp, Homo sapiens
ttagttacctatttctgcctccacctgtctaaatctataaaatattcaatgaaaactaaccttgaggtttataacaaatagtgacagtcaatatattggcagagcctgacaataatgtgccctcacaaattatctgtcctgaagctgaacttaaaattcaattaatggatgacataaattttgttccctaaactggaataaaactgatgacctaaaacaaggtagaaagatccactgtctcttttccrtgatttgtctctggataaaagactaatctacatcacttcaaaatggtagtcttgattcctcagcatggatccaacttaggaaggtcctattgctttcctttaccctaaattggtacaggaaagcccccacaatatttgaaatgtatgaaagctaaatgtacagaagtcaaatagcaaaggtgtatgttcttattgagaatacttttcccagaaagattaaaatattaacaattataaaatcccattattttcactctataggtcctaccttattcaggtccacataaacta

SEQ ID NO: 614865 - DNA, 539 bp, Homo sapiens
ttagttacctatttctgcctccacctgtctaaatctataaaatattcaatgaaaactaaccttgaggtttataacaaatagtgacagtcaatatattggcagagcctgacaataatgtgccctcacaaattatctgtcctgaagctgaacttaaaattcaattaatggatgacataaattttgttccctaaactggaataaaactgatgacctaaaacaaggtagaaagatccactgtctcttttccgtgatytgtctctggataaaagactaatctacatcacttcaaaatggtagtcttgattcctcagcatggatccaacttaggaaggtcctattgctttcctttaccctaaattggtacaggaaagcccccacaatatttgaaatgtatgaaagctaaatgtacagaagtcaaatagcaaaggtgtatgttcttattgagaatacttttcccagaaagattaaaatattaacaattataaaatcccattattttcactctataggtcctaccttattcaggtccacataaacta

SEQ ID NO: 614866 - DNA, 319 bp, Homo sapiens
ggaaacatcaagatggcctccaatatttgcattgaaaaaagctcagtgctaatagccaagagaatgggggaaacgcctagaagtcatttcataacttcacagcattaattttctgtatctacataaagaaaagaggtctaattgackcacagttcttcaggctgtaaagaaagcgtagtggtttctgcttgtaggaggactcaggaagccccccaattataccaaaaggccaagcggcaatgaaatgtttcatatggcaggagtagaagcaagacagagagaggaaagaggtgagacatcctgttatacaactagatct

SEQ ID NO: 614867 - DNA, 624 bp, Homo sapiens
catgttctttgctacagcaaaacaaaagtaaccttggctcctgttcccagtaatttcctcattttcatctgagaccttgtaagcctggccttcactgtccatccttctgccagacttttaatcacaactattcaacaagtgcctacgatggtccaaaatttctttcatcttcctgtcttctttcaagctctccaaactctccaacctctggctgttacccacttctgaatctgctttacattttcagctatctttgttgcagcctgacaaygtataagaaaaagaagtccattttcagggggaaacttcaagacggcttcagatatttgcattaaaaagaagtccagtgctaatagccaagacgatggggaaatgtcactgaagatatttcatagctccacttcgcagtattttattttctgtatgatcataatgaaaaggggtttaattggctcatggttctgcaggctgtaaagaaagcatagtggcttctgcttctgcttctgggaggactcaggaagcctcccaatcacaccagtaggaaaacagcaatgaaatgtttcatacggcaggagtaggagcaaggctgagagaggaaagaggtgccacaccgttatataacca

SEQ ID NO: 614868 - DNA, 624 bp, Homo sapiens
catgttctttgctacagcaaaacaaaagtaaccttggctcctgttcccagtaatttcctcattttcatctgagaccttgtaagcctggccttcactgtccatccttctgccagacttttaatcacaactattcaacaagtgcctacgatggtccaaaatttctttcatcttcctgtcttctttcaagctctccaaactctccaacctctggctgttacccacttctgaatctgctttacattttcagctatctttgttgcagcctgacaatgtataagaaaaagaagtccattttcagggggaaacttcaagacggcttcagatatttgcattaaaaagaagtccagtgctaatagccaagacgatggggaaatgtcactgaagatatttcatagctccacttcgcagtaytttattttctgtatgatcataatgaaaaggggtttaattggctcatggttctgcaggctgtaaagaaagcatagtggcttctgcttctgcttctgggaggactcaggaagcctcccaatcacaccagtaggaaaacagcaatgaaatgtttcatacggcaggagtaggagcaaggctgagagaggaaagaggtgccacaccgttatataacca

SEQ ID NO: 614869 - DNA, 520 bp, Homo sapiens
gtctgccacgtctgagtgaatgaggctagatgaacagaaactgagaaggcagaaaggatagcatgagcaagacaagtgctgaaatctgcccaattaactctgaggataaagtccaatggcagggaaataaaaacccgtgtccacataataacctgtaagtgaatgttcgcagcagcattgttcataatagctaaaaagtggaarctaacttaaaggtccatcaactgatgaatgaatggaaaaccagtatagccatggaatagtacatcatttaactataagaagaaataaactactcatgtgtgctaaaacatgcatgaattctgaaagcattatgctaagtgaaaaagccagtcacaaaggactacatattgtataacgctatgtatacgaaatatacagaacaggtaaatatatggagacaaaagtagatagatggtggttgcctacaacaggggtaggtggagggacatggaggaaggctgcagtcatgcctaggagatgtggggttgcttttcag

SEQ ID NO: 614870 - DNA, 529 bp, Homo sapiens
caacatgcagacccttgcaacagtgttctggaatactaggtgagggagaaatattcacacccttgtagcagtgttctggaattctatgtgactgacaaacattcagactccagcagcagtgttctgtaatcctatgtgagggacaaacattcagaccgcaagagcagtgttctgaaatcctatgttaagggaaacattgagaccccagcatgaatgttctggaatcctatgtgagggacaaacattcagaccacggcaggagtgttctggaatcctatgtgaggaacaaacwttcagaccacagcaggagtattctggaatcccatatgagggataagcattcagaccctcgtagcagtgttctggaatcctatgtgagggagaagcattcagagcacagcaggagtgctctggaatcctatgttagggacaaacattcagaacctcgtaacattgtgctggaaacctatgtgagggacagacatttagaccctcgcagcagtgttctgaaatcccatatgagggtcaa

SEQ ID NO: 614871 - DNA, 520 bp, Homo sapiens
gtctgccacgtctgagtgaatgaggctagatgaacagaaactgagaaggcagaaaggatagcatgagcaagacaagtgctgaaatctgcccaattaactctgaggataaagtccaatggcagggaaataaaaacccgtgtccacataataacctgtaagtgaatgttcgcagcagcattgttcataatagctaaaaagtggaaactaacttaaaggtccatcaactgatgaatgaatggaaaaccagtatagccatggaatagtacatcatttaactataagaagaaataaactactcatgtgtgctaaaacatgcatgaattctgaaagcattatgctaagtgaaaaagccagtcacaaaggactacatattgtataacgctatgtatacgaaatatacagaacaggtaaatatatggagacaaaagtagatagatggtggttgcctacaacasgggtaggtggagggacatggaggaaggctgcagtcatgcctaggagatgtggggttgcttttcag

SEQ ID NO: 614872 - DNA, 434 bp, Homo sapiens
ctggtgaggagcttccccttaagcctgagtttctgagaggggagagggagaagctgggtgaggctcgcatggaccttggcgagttcgkgctgggggaccgttcataagaagagccacacaagaccctactgttcttaggtgcagacatgattaggaaacctgcagctcccaggggcccctactaatgtactaactcgcagaaggaaggagtgtgtgtgcgtgtgtgtgcgtgtgtgtgtgtgtgcgcgtgtgtgtgtttgtgtgtgtgcggtgtgaggtatgtgccccttaagaaaatggaaatcaaccaaccaatgagacagacagacagacagacagacagacagagattcacttgcccaagtgttctgtcctgtcctctgaatccgcttccaagtcgcaagacgctgtgagctccaagtccacgcagagtc

SEQ ID NO: 614873 - DNA, 284 bp, Homo sapiens
agatctgagtacaggccagccagggtgggtttaaatwgcctcgggcgcagcctagcagcggaaagggcggagcttcactcctcctttccatcagtcacccccaactttcccaggctacacctcgtaggaaactgttctcctgctttgatttcatgcgccacctttgggacaatctaagaacttacaagttttcttggccagaaatattaggaattgtatgcactgaaacactgaaaacccactagtggttctgtggttcccacgttgtggttttgacaccagca

SEQ ID NO: 614874 - DNA, 284 bp, Homo sapiens
agatctgagtacaggccagccagggtgggtttaaatagcctcgggcgcagcctagcagcggaaagggyggagcttcactcctcctttccatcagtcacccccaactttcccaggctacacctcgtaggaaactgttctcctgctttgatttcatgcgccacctttgggacaatctaagaacttacaagttttcttggccagaaatattaggaattgtatgcactgaaacactgaaaacccactagtggttctgtggttcccacgttgtggttttgacaccagca

SEQ ID NO: 614875 - DNA, 263 bp, Homo sapiens
ggtgggtttaaatagcctcgggcgcagcctagcagcggaaagggcggagcttcactcctcctttccatcagtcacccccaactttcccaggctacacctcgtaggaaactgttctcctgctttgatttcatgcgccwcctttgggacaatctaagaacttacaagttttcttggccagaaatattaggaattgtatgcactgaaacactgaaaacccactagtggttctgtggttcccacgttgtggttttgacaccagcagc

SEQ ID NO: 614876 - DNA, 275 bp, Homo sapiens
ggtgggtttaaatagcctcgggcgcagcctagcagcggaaagggcggagcttcactcctcctttccatcagtcacccccaactttcccaggctacacctcgtaggaaactgttctcctgctttgatttcatgcgccacctttgggacaatctaagaacttacaagttttcttrgccagaaatattaggaattgtatgcactgaaacactgaaaacccactagtggttctgtggttcccacgttgtggttttgacaccagcagcatccttgccaca

SEQ ID NO: 614877 - DNA, 284 bp, Homo sapiens
agatctgagtacaggccagccagggtgggtttaaatagcctcgggcgcagcctagcagcggaaagggcggagcttcactcctcctttccatcagtcacccccaactttcccaggctacacctcgtaggaaactgttctcctgctttgatttcatgcgccacctttgggacaatctaagaacttacaagttttcttggccagawatattaggaattgtatgcactgaaacactgaaaacccactagtggttctgtggttcccacgttgtggttttgacaccagca

SEQ ID NO: 614878 - DNA, 275 bp, Homo sapiens
ggtgggtttaaatagcctcgggcgcagcctagcagcggaaagggcggagcttcactcctcctttccatcagtcacccccaactttcccaggctacacctcgtaggaaactgttctcctgctttgatttcatgcgccacctttgggacaatctaagaacttacaagttttcttggccagaaatrttaggaattgtatgcactgaaacactgaaaacccactagtggttctgtggttcccacgttgtggttttgacaccagcagcatccttgccaca

SEQ ID NO: 614879 - DNA, 572 bp, Homo sapiens
tttgtgtacaggctacatcactggtcttcttttatttgtggctaaataaatgttgtgttagaagagtaaagagttcccagttacatgggatctatagttctacaaaatgaatgtatacataatccatgtaaatccttcacttattttaaaacaactttttaatttttaaattaaatttaatttgtgcatgtgtgtgagaccagagtgagaacagagatggcggcggtgaggggcagtggtctcaccatgttgcccaggcwagtcttgaactccccttcaagtgccaccctcctcacctggcctccctcaccttgcctcttcccctctcactcctatgccagctcctgccattccccaccccctctgtagactgcaagactcaacaagtgacttgctgagcaaactctgctaagagatctgtttagggacacaggaggccaagtacacaaaaaagcaaaagaactagcatgcctttttcaatggatgtctattttacagggctggcttcagattattatagctttaaataaaaggaccgttttgtcatctcggcccatggcctacattatttc

SEQ ID NO: 614880 - DNA, 436 bp, Homo sapiens
atcacttaattaaattttaatttgaaaatactcatttcaggtgtaaacatttccatttatacctacattatggtcttaacatgtggcaacataaagtcattaaaattatttcagcagtacagaactatctaycttaaaatatgactctgtgcctaataaaatttcataggtgacacaatgtcttttctcaaagtaaatcatctctcatctctaccttttatttcctagaaatgaggcatgtttctaagctgatatagtaaacacatttttcctttttttattaaaacagctttgttgaaatataatttacatactatagaatgtatctgttttaacttaaagttaaaagatttttagtccatttactgagttgtgcagccatctctacaatccaactttacagcatttccatcactgcaagatccctcatgcccat

SEQ ID NO: 614881 - DNA, 436 bp, Homo sapiens
atcacttaattaaattttaatttgaaaatactcatttcaggtgtaaacatttccatttatacctacattatggtcttaacatgtggcaacataaagtcattaaaattatttcagcagtacagaactatctatcttaaaatatgactctgtgcctaataaaatttcataggtgacacaatgtcttttctcaaagtaaatcatctctcayctctaccttttatttcctagaaatgaggcatgtttctaagctgatatagtaaacacatttttcctttttttattaaaacagctttgttgaaatataatttacatactatagaatgtatctgttttaacttaaagttaaaagatttttagtccatttactgagttgtgcagccatctctacaatccaactttacagcatttccatcactgcaagatccctcatgcccat

SEQ ID NO: 614882 - DNA, 436 bp, Homo sapiens
atcacttaattaaattttaatttgaaaatactcatttcaggtgtaaacatttccatttatacctacattatggtcttaacatgtggcaacataaagtcattaaaattatttcagcagtacagaactatctatcttaaaatatgactctgtgcctaataaaatttcataggtgacacaatgtcttttctcaaagtaaatcatctctcatctctaccttttatttcctagaaatgaggcatgtttctaagctgatatagtaaacacatttttcctttttttattaaaacagctttgttgaaatatartttacatactatagaatgtatctgttttaacttaaagttaaaagatttttagtccatttactgagttgtgcagccatctctacaatccaactttacagcatttccatcactgcaagatccctcatgcccat

SEQ ID NO: 614883 - DNA, 436 bp, Homo sapiens
atcacttaattaaattttaatttgaaaatactcatttcaggtgtaaacatttccatttatacctacattatggtcttaacatgtggcaacataaagtcattaaaattatttcagcagtacagaactatctatcttaaaatatgactctgtgcctaataaaatttcataggtgacacaatgtcttttctcaaagtaaatcatctctcatctctaccttttatttcctagaaatgaggcatgtttctaagctgatatagtaaacacatttttcctttttttattaaaacagctttgttgaaatataatttacatactatagaatgtatctgttttaacttaaagttaaaagatttttagtccatttactgagttgtgcagccatctctacaatccarctttacagcatttccatcactgcaagatccctcatgcccat

SEQ ID NO: 614884 - DNA, 354 bp, Homo sapiens
atgtttataatatcactttacctgccatatatgmcataaaattgttcttcatattatttatctaagattataatttcatatagaatgcttttaaactatgttcagttgaaactgaaaggaacatagtttatagatttgtttccttgatatgccataacatatatttaaacaattattaaatatttactcttaaaaatacttgacttactaattctgtacatttctgcagatataaacgcctcctggaaatgacaataaatatgtgaaatgtatttggaaatgaagacgttggttgccatggagacttaaaaacagatcaactgaaaatggatattctgattaagaagctaaaac

SEQ ID NO: 614885 - DNA, 354 bp, Homo sapiens
atgtttataatatcactttacctgccatatatgacataaaattgttcttcatattatttatctaagattataatttcatatagaatgctttyaaactatgttcagttgaaactgaaaggaacatagtttatagatttgtttccttgatatgccataacatatatttaaacaattattaaatatttactcttaaaaatacttgacttactaattctgtacatttctgcagatataaacgcctcctggaaatgacaataaatatgtgaaatgtatttggaaatgaagacgttggttgccatggagacttaaaaacagatcaactgaaaatggatattctgattaagaagctaaaac

SEQ ID NO: 614886 - DNA, 354 bp, Homo sapiens
atgtttataatatcactttacctgccatatatgacataaaattgttcttcatattatttatctaagattataatttcatatagaatgcttttaaactatgttcagttgaaactgaaaggaacatagtttatagatttgtttcyttgatatgccataacatatatttaaacaattattaaatatttactcttaaaaatacttgacttactaattctgtacatttctgcagatataaacgcctcctggaaatgacaataaatatgtgaaatgtatttggaaatgaagacgttggttgccatggagacttaaaaacagatcaactgaaaatggatattctgattaagaagctaaaac

SEQ ID NO: 614887 - DNA, 354 bp, Homo sapiens
atgtttataatatcactttacctgccatatatgacataaaattgttcttcatattatttatctaagattataatttcatatagaatgcttttaaactatgttcagttgaaactgaaaggaacatagtttatagatttgtttccttgatatgccataacatatatttaaacaattattaaatatttactcttaaaaatacttgacttactaattctgtacatttctgcagatataaacgcctcctggaaatgacaataaatatgtkaaatgtatttggaaatgaagacgttggttgccatggagacttaaaaacagatcaactgaaaatggatattctgattaagaagctaaaac

SEQ ID NO: 614888 - DNA, 520 bp, Homo sapiens
tgtgcgggtttgttatataggtaaacatgtgccatggtggtttgctgcacctatcaatccatcacctagatattaagccctgaaggcattagttattgatgttgatgctctccctcctgaccccaacaggccccagtgtttkttgttcccctccccgagtccatgtgttcttatagttcagctcccacttataagtgagaagatgcagtgtttggttttttcttcctgcagtagtttgctgaagatatcagcttcgggttcatccatatccttgcaaagagcacgatctcattcatttttatggctccatagtattccatgctgtatatataccacattttctttatcccattatcactgataatgtccacctgggttgattccatgtctttactattgtgaatagtgctgcagtgaacatacaaatgcatgtatctttataatagaataatttatattcccatgtatggtaattttaaatcagttttggtattaaaaatcatgcattttggaaaatatt

SEQ ID NO: 614889 - DNA, 520 bp, Homo sapiens
tgtgcgggtttgttatataggtaaacatgtgccatggtggtttgctgcacctatcaatccatcacctagatattaagccctgaaggcattagttattgatgttgatgctctccctcctgaccccaacaggccccagtgttttttgttcycctccccgagtccatgtgttcttatagttcagctcccacttataagtgagaagatgcagtgtttggttttttcttcctgcagtagtttgctgaagatatcagcttcgggttcatccatatccttgcaaagagcacgatctcattcatttttatggctccatagtattccatgctgtatatataccacattttctttatcccattatcactgataatgtccacctgggttgattccatgtctttactattgtgaatagtgctgcagtgaacatacaaatgcatgtatctttataatagaataatttatattcccatgtatggtaattttaaatcagttttggtattaaaaatcatgcattttggaaaatatt

SEQ ID NO: 614890 - DNA, 520 bp, Homo sapiens
tgtgcgggtttgttatataggtaaacatgtgccatggtggtttgctgcacctatcaatccatcacctagatattaagccctgaaggcattagttattgatgttgatgctctccctcctgaccccaacaggccccagtgttttttgttcccctccccgagtccatgtgttcttatagttcagctcccacttataagtgagaagatgcagtgtttggttttttcttcctgcagtagtttgctgaagatatcagcttcgggttcatccatatccytgcaaagagcacgatctcattcatttttatggctccatagtattccatgctgtatatataccacattttctttatcccattatcactgataatgtccacctgggttgattccatgtctttactattgtgaatagtgctgcagtgaacatacaaatgcatgtatctttataatagaataatttatattcccatgtatggtaattttaaatcagttttggtattaaaaatcatgcattttggaaaatatt

SEQ ID NO: 614891 - DNA, 506 bp, Homo sapiens
cagtgtttggttttttcttcctgcagtagtttgctgaagatatcagcttcgggttcatccatatccttgcaaagagcacgatctcattcatttttatggctccatagtattccatgytgtatatataccacattttctttatcccattatcactgataatgtccacctgggttgattccatgtctttactattgtgaatagtgctgcagtgaacatacaaatgcatgtatctttataatagaataatttatattcccatgtatggtaattttaaatcagttttggtattaaaaatcatgcattttggaaaatattgataatggaaaaacccaaattctgccaaaatatgttgagaaaatagagggtaaatatatcttttcaaactttaaatgcctcaggctcttagttaatcttccccagatctgggaagacctagaaggggagagattgggctaccttaatgagggccatttcaatctcttgtcctgcagcagccatttcaaaat

SEQ ID NO: 614892 - DNA, 506 bp, Homo sapiens
cagtgtttggttttttcttcctgcagtagtttgctgaagatatcagcttcgggttcatccatatccttgcaaagagcacgatctcattcatttttatggctccatagtattccatgctgtatatataccacattttctttatcccattatcactgataatgtccacctgggttgattccatgtctttactattgtgaatagtgctgcagtgaacatacaaatgcatgtatctttataatagaataatttatattccmatgtatggtaattttaaatcagttttggtattaaaaatcatgcattttggaaaatattgataatggaaaaacccaaattctgccaaaatatgttgagaaaatagagggtaaatatatcttttcaaactttaaatgcctcaggctcttagttaatcttccccagatctgggaagacctagaaggggagagattgggctaccttaatgagggccatttcaatctcttgtcctgcagcagccatttcaaaat

SEQ ID NO: 614893 - DNA, 506 bp, Homo sapiens
cagtgtttggttttttcttcctgcagtagtttgctgaagatatcagcttcgggttcatccatatccttgcaaagagcacgatctcattcatttttatggctccatagtattccatgctgtatatataccacattttctttatcccattatcactgataatgtccacctgggttgattccatgtctttactattgtgaatagtgctgcagtgaacatacaaatgcatgtatctttataatagaataatttatattcccatgtatggtaattttaaatcagttttkgtattaaaaatcatgcattttggaaaatattgataatggaaaaacccaaattctgccaaaatatgttgagaaaatagagggtaaatatatcttttcaaactttaaatgcctcaggctcttagttaatcttccccagatctgggaagacctagaaggggagagattgggctaccttaatgagggccatttcaatctcttgtcctgcagcagccatttcaaaat

SEQ ID NO: 614894 - DNA, 490 bp, Homo sapiens
tcttattcctctatataaatctgtcagtgctttaagcagtgaaagaaagatttttcatttaattttacagacttgawactaatgaaaaggatagcttgtaaaatataaatctctttttctataaaaaggacatgttgttgattctcttagaccttgaaccctggccagtgatttgaaaccaagcagtacctatctccggatctctagtaccaaattaattcggggtgggggggtaacaggtttattgagaaataatgaacacaccatgcaattcattcatttaaagtatacaattcattaactttagtattttcagagttatgccgtcatcattacaattaattttagaacattttcatcaccctaaaaacaaaccccacatcatttagccatcttcactagttttcccttcctccctcagccctagggaaccacccagcttctttgtatagatttgcctataagcctctgaaataaaaagcaagtggtc

SEQ ID NO: 614895 - DNA, 580 bp, Homo sapiens
ttcatttaattttacagacttgaaactaatgaaaaggatagcttgtaaaatataaatctctttttctataaaaaggacatgttgttgattctcttagaccttgaaccctggccagtgatttgaaaccaagcagtacctatctccggatctctagtaccaaattaattcgrggtgggggggtaacaggtttattgagaaataatgaacacaccatgcaattcattcatttaaagtatacaattcattaactttagtattttcagagttatgccgtcatcattacaattaattttagaacattttcatcaccctaaaaacaaaccccacatcatttagccatcttcactagttttcccttcctccctcagccctagggaaccacccagcttctttgtatagatttgcctataagcctctgaaataaaaagcaagtggtctgctgggactggcttatttcacttagcataatttttcatgctgcatctgtgctgtagcaggtatggatgccgggtttttgctccttagttcagctacatctgggttcttctctcgtgaccaggaaaaattaagcatgcagaca

SEQ ID NO: 614896 - DNA, 585 bp, Homo sapiens
cttattcctctatataaatctgtcagtgctttaagcagtgaaagaaagatttttcatttaattttacagacttgaaactaatgaaaaggatagcttgtaaaatataaatctctttttctataaaaaggacatgttgttgattctcttagaccttgaaccctggccagtgatttgaaaccaagcagtacctatctccggatctctagtaccaaattaattcggggtgggggggtaacaggtttattgagaaataatgaacacaccatgcaattcaytcatttaaagtatacaattcattaactttagtattttcagagttatgccgtcatcattacaattaattttagaacattttcatcaccctaaaaacaaaccccacatcatttagccatcttcactagttttcccttcctccctcagccctagggaaccacccagcttctttgtatagatttgcctataagcctctgaaataaaaagcaagtggtctgctgggactggcttatttcacttagcataatttttcatgctgcatctgtgctgtagcaggtatggatgccgggtttttgctccttagttcagcta

SEQ ID NO: 614897 - DNA, 468 bp, Homo sapiens
tatacaattcattaactttagtattttcagagttatgccgtcatcattacaattaattttagaacattttcatcaccctaaaaacaaaccccacrtcatttagccatcttcactagttttcccttcctccctcagccctagggaaccacccagcttctttgtatagatttgcctataagcctctgaaataaaaagcaagtggtctgctgggactggcttatttcacttagcataatttttcatgctgcatctgtgctgtagcaggtatggatgccgggtttttgctccttagttcagctacatctgggttcttctctcgtgaccaggaaaaattaagcatgcagacacattgaggagggcagaatttattatgtgaaaggacagctctcagcaaagagaggggtcctgcaaacaggtttccacctcacaattgaataccaggagcacatgagctgaagcggccaggct

SEQ ID NO: 614898 - DNA, 468 bp, Homo sapiens
tatacaattcattaactttagtattttcagagttatgccgtcatcattacaattaattttagaacattttcatcaccctaaaaacaaaccccacatcatttagccatcttcactagytttcccttcctccctcagccctagggaaccacccagcttctttgtatagatttgcctataagcctctgaaataaaaagcaagtggtctgctgggactggcttatttcacttagcataatttttcatgctgcatctgtgctgtagcaggtatggatgccgggtttttgctccttagttcagctacatctgggttcttctctcgtgaccaggaaaaattaagcatgcagacacattgaggagggcagaatttattatgtgaaaggacagctctcagcaaagagaggggtcctgcaaacaggtttccacctcacaattgaataccaggagcacatgagctgaagcggccaggct

SEQ ID NO: 614899 - DNA, 446 bp, Homo sapiens
tacaattaattttagaacattttcatcaccctaaaaacaaaccccacatcatttagccatcttcactagttttcccttcctccctcagccctagggaaccacccascttctttgtatagatttgcctataagcctctgaaataaaaagcaagtggtctgctgggactggcttatttcacttagcataatttttcatgctgcatctgtgctgtagcaggtatggatgccgggtttttgctccttagttcagctacatctgggttcttctctcgtgaccaggaaaaattaagcatgcagacacattgaggagggcagaatttattatgtgaaaggacagctctcagcaaagagaggggtcctgcaaacaggtttccacctcacaattgaataccaggagcacatgagctgaagcggccaggctcctcctctgcataaggcgtgaattc

SEQ ID NO: 614900 - DNA, 446 bp, Homo sapiens
tacaattaattttagaacattttcatcaccctaaaaacaaaccccacatcatttagccatcttcactagttttcccttcctccctcagccctagggaaccacccagcttctttgtatagatttgcctataagcctctgaaataaaaagcaagtggtctgctgggactggcttatttcacttagcataatttttcatgctgcatctgtgctgtagcaggtatkgatgccgggtttttgctccttagttcagctacatctgggttcttctctcgtgaccaggaaaaattaagcatgcagacacattgaggagggcagaatttattatgtgaaaggacagctctcagcaaagagaggggtcctgcaaacaggtttccacctcacaattgaataccaggagcacatgagctgaagcggccaggctcctcctctgcataaggcgtgaattc

SEQ ID NO: 614901 - DNA, 587 bp, Homo sapiens
ataatgaacacaccatgcaattcattcatttaaagtatacaattcattaactttagtattttcagagttatgccgtcatcattacaattaattttagaacattttcatcaccctaaaaacaaaccccacatcatttagccatcttcactagttttcccttcctccctcagccctagggaaccacccagcttctttgtatagatttgcctataagcctctgaaataaaaagcaagtggtctgctgggactggcttatttcacttagcataatttttcatgctgcatctgtgctgtagcaggtatggatgycgggtttttgctccttagttcagctacatctgggttcttctctcgtgaccaggaaaaattaagcatgcagacacattgaggagggcagaatttattatgtgaaaggacagctctcagcaaagagaggggtcctgcaaacaggtttccacctcacaattgaataccaggagcacatgagctgaagcggccaggctcctcctctgcataaggcgtgaattcctggtgactccaccccatccccccactgcatgtgggcctccggtctgctgcgggcatgt

SEQ ID NO: 614902 - DNA, 443 bp, Homo sapiens
tacaattaattttagaacattttcatcaccctaaaaacaaaccccacatcatttagccatcttcactagttttcccttcctccctcagccctagggaaccacccagcttctttgtatagatttgcctataagcctctgaaataaaaagcaagtggtctgctgggactggcttatttcacttagcataatttttcatgctgcatctgtgctgtagcaggtatggatgccgggtttttgctccttagttcagctacatctgggttcttctctcgtgaccaggaaaaattaagcatgcagacacattgaggagggcagaatttattatgtgaaaggacagctctcagcaaagagaggggtcctgcaaasaggtttccacctcacaattgaataccaggagcacatgagctgaagcggccaggctcctcctctgcataaggcgtgaa

SEQ ID NO: 614903 - DNA, 653 bp, Homo sapiens
ggcattttgctgtctcctcctaatacggtatctgtacttaatttcttcttattgctgagtaataatccattgtatggatacatcaaacattttatttatcyattcgccaggtgatgggacctttgggttctctcccacccaaaggtgacagacgttctggttctttccaccttttgactactattaataatgctgctgtaaacatttatgtatgagtttttgtgcttgtgtatgtttttatttttctggagtatatacttatgactggaatttctgtgtcatatggtaactttatgcttaaccctttaaggagctgccagtttgttttccaaagtggctgcatcactttacattcccagcagcattagataagggttttaatttctttacatttttttctaaccctcttttttcttgaacaaagattttatcctgtggtgtgaagtgataccacatgtggttttgatttacattttcctaatgactaattacattaagcatctattaatgtgcttatccatctttatatctgctttgcagatatatctattcaaaatcttttaccattttttaaaattggcttatcttgttatttattaattgcaagagttatttatatttcctatatatgtaagtcccttatcagatacacg

SEQ ID NO: 614904 - DNA, 563 bp, Homo sapiens
atgggacctttgggttctctcccacccaaaggtgacagacgttctggttctttccaccttttgactactattaataatgctgctgtaaacatttatgtatgagtttttgtgcttgygtatgtttttatttttctggagtatatacttatgactggaatttctgtgtcatatggtaactttatgcttaaccctttaaggagctgccagtttgttttccaaagtggctgcatcactttacattcccagcagcattagataagggttttaatttctttacatttttttctaaccctcttttttcttgaacaaagattttatcctgtggtgtgaagtgataccacatgtggttttgatttacattttcctaatgactaattacattaagcatctattaatgtgcttatccatctttatatctgctttgcagatatatctattcaaaatcttttaccattttttaaaattggcttatcttgttatttattaattgcaagagttatttatatttcctatatatgtaagtcccttatcagatacacgcttttcaaatactttcttctact

SEQ ID NO: 614905 - DNA, 645 bp, Homo sapiens
gatacatcaaacattttatttatccattcgccaggtgatgggacctttgggttctctcccacccaaaggtgacagacgttctggttctttccaccttttgactactattaataatgctgctgtaaacatttatgtatgagtttttgtgcttgtgtatgtttttatttttctggagtatatacttatgactggaatttctgtgtcatatggtaacwttatgcttaaccctttaaggagctgccagtttgttttccaaagtggctgcatcactttacattcccagcagcattagataagggttttaatttctttacatttttttctaaccctcttttttcttgaacaaagattttatcctgtggtgtgaagtgataccacatgtggttttgatttacattttcctaatgactaattacattaagcatctattaatgtgcttatccatctttatatctgctttgcagatatatctattcaaaatcttttaccattttttaaaattggcttatcttgttatttattaattgcaagagttatttatatttcctatatatgtaagtcccttatcagatacacgcttttcaaatactttcttctacttggcgtcttaccttttcacttcttcatactgtcttctgaggcaca

SEQ ID NO: 614906 - DNA, 607 bp, Homo sapiens
taactttatgcttaaccctttaaggagctgccagtttgttttccaaagtggctgcatcactttacattcccagcagcattagwtaagggttttaatttctttacatttttttctaaccctcttttttcttgaacaaagattttatcctgtggtgtgaagtgataccacatgtggttttgatttacattttcctaatgactaattacattaagcatctattaatgtgcttatccatctttatatctgctttgcagatatatctattcaaaatcttttaccattttttaaaattggcttatcttgttatttattaattgcaagagttatttatatttcctatatatgtaagtcccttatcagatacacgcttttcaaatactttcttctacttggcgtcttaccttttcacttcttcatactgtcttctgaggcacagtagttttcaattttgaagtccattgaatccatttttcctttggagtcatagctaagaaaacactggcaaatgctgtcacaaagatttatgccagtgttttcttctgagggttttatagttttagcttttacagttaactattttattttgagttaatttttaaataagata

SEQ ID NO: 614907 - DNA, 607 bp, Homo sapiens
taactttatgcttaaccctttaaggagctgccagtttgttttccaaagtggctgcatcactttacattcccagcagcattagataagggttttaatttctttacatttttttctaaccctcttttttcttgaacaaagattttatcctgtggtgtgaagtgataccacatgtggttttgatttacattttcctaatgactaattacattaagcatctattaatgtgcttatccatctttatatctgctttgcagatatatctattcaaaatctttkaccattttttaaaattggcttatcttgttatttattaattgcaagagttatttatatttcctatatatgtaagtcccttatcagatacacgcttttcaaatactttcttctacttggcgtcttaccttttcacttcttcatactgtcttctgaggcacagtagttttcaattttgaagtccattgaatccatttttcctttggagtcatagctaagaaaacactggcaaatgctgtcacaaagatttatgccagtgttttcttctgagggttttatagttttagcttttacagttaactattttattttgagttaatttttaaataagata

SEQ ID NO: 614908 - DNA, 567 bp, Homo sapiens
gactaattacattaagcatctattaatgtgcttatccatctttatatctgctttgcagatatatctattcaaaatcttttaccattttttaaaattggcttatcttgttatttattaattgcaagagttatttatatttcctatatatgtaagtcccttatcagatacacgcttttcaaatactttcttctacttggcgtcttaccttttcacttcttcatactgtcttctgaggcacagyagttttcaattttgaagtccattgaatccatttttcctttggagtcatagctaagaaaacactggcaaatgctgtcacaaagatttatgccagtgttttcttctgagggttttatagttttagcttttacagttaactattttattttgagttaatttttaaataagatatttggtcgaactttatttactttttcttatggatacccagttgtcccagcaccatttgttgaaaagactattcttttcccattgtattctttcgttaagtttgtataaaatcaattgactgtaaaagtgcaagcttatttttagattgtcaattct

SEQ ID NO: 614909 - DNA, 462 bp, Homo sapiens
  misc_feature 273: n = A,T,C or G
tgaaccaccagctttcctcagtggaaatcaagtgaagtcatcatcttgcagtttacagaccctctttcctcctggtagctggttctcttgggtagyactgtagctaatccttttcttagtgcagatcttgcattctcagagaccacagttccctgtattgacctccctttactgaaacagagatgcacagctctgctttctagctcagtagaggattcttggaatacatcgttaactcatccaagaaaaagtcttaggagtgcagcacttcanaatcaggtaatgtcaggccaatttatcagagacacatagtaggttagtattttgacttcagaaatttcggagacaaggtgtgtgctatagagaagcattgtggcattacataaagatgggatggtcttatcttctccatacaaacaagcttggagtaaggtaaaggagaaattgcatttgatgtcttaa

SEQ ID NO: 614910 - DNA, 462 bp, Homo sapiens
  misc_feature 273: n = A,T,C or G
tgaaccaccagctttcctcagtggaaatcaagtgaagtcatcatcttgcagtttacagaccctctttcctcctggtagctggttctcttgggtagtactgtrgctaatccttttcttagtgcagatcttgcattctcagagaccacagttccctgtattgacctccctttactgaaacagagatgcacagctctgctttctagctcagtagaggattcttggaatacatcgttaactcatccaagaaaaagtcttaggagtgcagcacttcanaatcaggtaatgtcaggccaatttatcagagacacatagtaggttagtattttgacttcagaaatttcggagacaaggtgtgtgctatagagaagcattgtggcattacataaagatgggatggtcttatcttctccatacaaacaagcttggagtaaggtaaaggagaaattgcatttgatgtcttaa

SEQ ID NO: 614911 - DNA, 639 bp, Homo sapiens
tgtgtgctatagagaagcattgtggcattacataaagatgggatggtcttatcttctccatacaaacaagcttggagtaaggtaaaggagaaattgcatttgatgtcttaacactcaaaacacactatgcttattttacttctgtcaagactaaaaatcattccatartctccttatttgctcatttagaaaagaaaatgaaaattgaatactaggttgattaataaacactcaaagcttcttcttttagaattttagttaattgaaatcaggtaaatgtctgattttgcctatgtcaccaagtatttctagttgtttttcaaatcatacatcttcttgcttcccagtcttatttcctaacttgaggggaaattgtaaggagacatccttgccttgttatcagagttcataattgaaggagttttaggaaaattcctcctcagcagcttatgtctctctcctggttatctgctgcttctcaataatgtttgacatcaataaataaatctcaacatttattagatcctactttaaaggagacttttctgctgcataagttatgtttcctgttgtctctttttaaaagttatttttctaacaattacccagagtcttgtggcttgaaagaaaaacatttat

SEQ ID NO: 614912 - DNA, 639 bp, Homo sapiens
tgtgtgctatagagaagcattgtggcattacataaagatgggatggtcttatcttctccatacaaacaagcttggagtaaggtaaaggagaaattgcatttgatgtcttaacactcaaaacacactatgcttattttacttctgtcaagactaaaaatcattccataatctccttatttgctcatttagaaaagaaaatgaaaattgaatactaggttgattaataaacactcaaagcttcttcttttagaattttagttaattgaaatcaggtaaatgtctgattttgcctatgtcrccaagtatttctagttgtttttcaaatcatacatcttcttgcttcccagtcttatttcctaacttgaggggaaattgtaaggagacatccttgccttgttatcagagttcataattgaaggagttttaggaaaattcctcctcagcagcttatgtctctctcctggttatctgctgcttctcaataatgtttgacatcaataaataaatctcaacatttattagatcctactttaaaggagacttttctgctgcataagttatgtttcctgttgtctctttttaaaagttatttttctaacaattacccagagtcttgtggcttgaaagaaaaacatttat

SEQ ID NO: 614913 - DNA, 505 bp, Homo sapiens
ttagtattttgacttcagaaatttcggagacaaggtgtgtgctatagagaagcattgtggcattacataaagatgggatggtcttatcttctccatacaaacaagcttggagtaaggtaaaggagaaattgcatttgatgtcttaacactcaaaacacactatgcttattttacttctgtcaagactaaaaatcattccataatctccttatttgctcatttagaaaagaaaatgaaaattgaatactaggttgattaataaacactcaaagcttcttcttttagaattttagttaattgaaatcaggtaaatgtctgattttgcctatgtcaccaagtatytctagttgtttttcaaatcatacatcttcttgcttcccagtcttatttcctaacttgaggggaaattgtaaggagacatccttgccttgttatcagagttcataattgaaggagttttaggaaaattcctcctcagcagcttatgtctctctcctggttatct

SEQ ID NO: 614914 - DNA, 639 bp, Homo sapiens
tgtgtgctatagagaagcattgtggcattacataaagatgggatggtcttatcttctccatacaaacaagcttggagtaaggtaaaggagaaattgcatttgatgtcttaacactcaaaacacactatgcttattttacttctgtcaagactaaaaatcattccataatctccttatttgctcatttagaaaagaaaatgaaaattgaatactaggttgattaataaacactcaaagcttcttcttttagaattttagttaattgaaatcaggtaaatgtctgattttgcctatgtcaccaagtatttctagttgtttttcaaatcatacatcttcttgcttcccagtcttatttcctaacttgagggraaattgtaaggagacatccttgccttgttatcagagttcataattgaaggagttttaggaaaattcctcctcagcagcttatgtctctctcctggttatctgctgcttctcaataatgtttgacatcaataaataaatctcaacatttattagatcctactttaaaggagacttttctgctgcataagttatgtttcctgttgtctctttttaaaagttatttttctaacaattacccagagtcttgtggcttgaaagaaaaacatttat

SEQ ID NO: 614915 - DNA, 498 bp, Homo sapiens
ctgtgctgtcaggcgagagatgatttatttctttacctcctgtttttagactaattggtattttaatgagctctctttactacctgattggccagatgtgagctgagttacaaaagtcctgtgtttaaaggtaggtgcagtcaccttccccacctaagcttaraaattgttagtcggcctaggaaatccagctagtcctgtctctcagtaccccctctcaacaggaaaacccaagtgctgttggggaggttggccgtcgactgctccaactgcttcctgcttaattggggcatagtaggggttgtgcatttgagatttcctcgggaggagtgccttcgatgtcattaacatcggagcatgggctagcaggctggtccagggatccgcggtagatcttagtcatggactgcatctggggctccatttgaagaacgatgtgttgttttacagctttgattctggaagagacaaacttaacaaggaggttaaagatacagg

SEQ ID NO: 614916 - DNA, 588 bp, Homo sapiens
acttcactcctgcctgggcgacagagcaagactctgtctaaaacaaacaaacaaacaaacaaaaaaaactactgtggataagtgtgtccaaagcaaaaatcaaaatgatcagaacttttaaatttccagtcagcctctaggaaaattattctgtagttttttttttaaggaaataaccggtctattttctttctttctttttttttttaagttctagggtacatgtgcacaacgtgcaggtttgttrcatatgtatacatgtgtcatgttggtttgctgcaccctattctgtagttttacaaactacaatagaactagtacaaaagaaaaaagaaacatcattacttaataaaaacaataaggtaataaaattattactttatatgatcatcaagagagtagattttcttttcataatttaactcatgaaatgagattaagatcaggttggtaataagggggtcgtatttgtattaaacctattgtgtcgctgggcgcggtggctctcccctgtaattccagaacttcgggaggccgagatgggtggatcacctgaggtcaggagtttgagaccagcctggccaacat

SEQ ID NO: 614917 - DNA, 404 bp, Homo sapiens
gaggctgcagtgaactgtgatcatgcctctgcactgcagatgggtgacagaagaaaacccagtctcaaaataataatattaatttaaaaaccattcaaaaataaatgtagctcaagtgctaaattttattattaaaatattttgctttttaacaaaagaaaaacttctccagacgctcctcccctcacttaggtgcatgcacacacatgaacataccgcccccccsctccccacacacacacacagtggatttcccattagttttgtcatccggaattggatcacatgaccacctatagttgcaaaggaagctgcgaaagtgggaaacaggttgcttatgattgtcttacatcaaacatgacccatcatttggactagatattactactctgaacaaaattagg

SEQ ID NO: 614918 - DNA, 404 bp, Homo sapiens
gaggctgcagtgaactgtgatcatgcctctgcactgcagatgggtgacagaagaaaacccagtctcaaaataataatattaatttaaaaaccattcaaaaataaatgtagctcaagtgctaaattttattattaaaatattttgctttttaacaaaagaaaaacttctccagacgctcctcccctcacttaggtgcatgcacacacatgaacataccgcccccccgcyccccacacacacacacagtggatttcccattagttttgtcatccggaattggatcacatgaccacctatagttgcaaaggaagctgcgaaagtgggaaacaggttgcttatgattgtcttacatcaaacatgacccatcatttggactagatattactactctgaacaaaattagg

SEQ ID NO: 614919 - DNA, 398 bp, Homo sapiens
aacatactttattttatatatctaaactatttttattttcctcctcattcaagaaaaatagttcatatatacatatatgtgtrtatatatatatatatatatatatatatatatatatatatatatatataaaattggaaggggatgttaatacagtacctcaaagtttgtactcctttgtgttctgcgtatattgttgcaaatgagaaacttattgttagatagtctgtcattccttggtaaataaactgtccattctgctcaattttttttctttatattttgatggtctgaagttttactacaatatgtttagaaagtgaatttatttctagttatcttgcatagcatttggtattcactttaaatctggggactcttgtttaaggctaaaaagt

SEQ ID NO: 614920 - DNA, 575 bp, Homo sapiens
ggttggtgacaaaatgaagtgtgctcagacaaaagttgctagggacagctaactctttccagtttcaggtagttctgggagatgtatttgataatctatcactgctggccgcttggtataccaatcagttatactgtgatcagtggcaaggcctgcaagatacatgaagttaccaactcacagtcaaccaggagactgtgaatgacaawtgtaataaattatagttcaggtacacgtgaaataagtggaggaaataaagacagagtcatcccacctgtggagcaaaaagagaacagtttaaacagttttcgtattgttttgtcatttattgtacagtgtaaaattacaactatttacttattttttttgacaaagcttttcaattttgccatacatacttctagcaacaataagctgaaagaaaaaaagtagatgtgtgtgatatggcttgactatatttaggttggtgcaaaagtaattacgatttttgctattggaagtaatggcaaagaccacattcacttttgtaccaacataatatgcccccatccaaatttcatgttgaatcgtaatcc

SEQ ID NO: 614921 - DNA, 571 bp, Homo sapiens
ccgccacccttccaggagtgagccaaaagatggagagaggccacaagtgttgcattaatgcataccctttacgtaagaggaaacaccaggagcaggaaatatgcatttcccccaaatgggggaattctcacgggatgagatatgggtcacagataaatatatattgcgtcaaatggaacctcttcaaatgaaccatccttgatttagctgactttggtggaagtagcaaaaaggttcagagccaagttaagatatacaaatgaatatttccttgtttataaaataaatttatcattattttactcacattcagttggcccaccaaactaataaaagacaaaaatgaataatatctgagattcaattaggtcactggaatattcattctccaatttaagtctgcttatcgatactgaaatcaataagcataacttgcttcaagctaggaaggaaactcaataccatctaatttttgcagaatatcatattataayaggcaaagtcatcaccaaatctttacaagtaaagctatcatcaatgcaacttttctaaaaggaggttgagtagatag

SEQ ID NO: 614922 - DNA, 535 bp, Homo sapiens
taaaatattttacatatttatggagcacatgtgagtatttattacatgcatagaatgtgtaatgatcaagtcagagtatttgggacatctatcactttgagtatttatctctatgtgttggtaaaatttcaagtcctctcttctagctgctttggaatatacactatattkctgctaacttagtcaccctactctgctatcaaatattggtgttctttttcttctatctaaccactaatcaatgtctctttgtcctcccatctccacccacacacccttcccagtctctggtacctattatatctattctctacctccatgagatcaacttttttagttcccacatacgagtgagaacatgcaatatttgactttctgtgcctaggttatttcacttaatataatgactttcagttctatccatgttgcttcaaatgacataacttcatttttttatggctaatggtattctattgtgtatatataccattttatttatccatgcatctgacagtgaacacttaggttgttttca

SEQ ID NO: 614923 - DNA, 535 bp, Homo sapiens
taaaatattttacatatttatggagcacatgtgagtatttattacatgcatagaatgtgtaatgatcaagtcagagtatttgggacatctatcactttgagtatttatctctatgtgttggtaaaatttcaagtcctctcttctagctgctttggaatatacactatatttctgctaacttagtcaccctactctgctatcaaatattggtgttctttttcttctatctaaccactaatcaatgtctctttgtcctcccatctccacccacacacccttcccagtctctggtacctattatatctattctctacctccatgagatcaacttttttagttcccacatacgagtgagaacatgcaatatttgactttctgtgcctaggttatttcacttaatataatgactttcagttctatccatgttgcttcaaatgacataayttcatttttttatggctaatggtattctattgtgtatatataccattttatttatccatgcatctgacagtgaacacttaggttgttttca

SEQ ID NO: 614924 - DNA, 563 bp, Homo sapiens
aaatacctcccaccaggctgtatgtccaacactggaaattacaattcaacatgagatttgggtgggaacaaatatccaaaccatattattccaccccagccccacccaaatcccatgttcttctcacattgcaaaatataattatgccttcccaatagtcccccaaagcctcccccygcccaaagtcttaattcattccagcattaactcaaaagtcccaagtcccaagttcaaagtctcatctagaactgagctgagttccttaacatctatagagcctgtaaaataaagaaacaagttatttactcccaagatacaatgggagtatagtcattgtaaacatccccttccaaaaggtagaaattggccagaagaaaggagctacaggcctcatacaagtttaaaatgccgaagggcagtaattaaatcttaaatctccaaaataatcttctttgactccatatcccacattcagggcacactggtgcaaggggccggcgtccaaagccttagatatttccacctctggctttgaaggtttcagaactccaggctgctcttac

SEQ ID NO: 614925 - DNA, 552 bp, Homo sapiens
aatagtcccccaaagcctccccctgcccaaagtcttaattcattccagcattaactcaaaagtcccaagtcccaagttcaaagtctcatctagaactgagctgagttccttaacatctatagagcctgtaaaataaagaaacaagttatttactcccaagatacaatgggagtatagtcattgtaaacatccccttccaaaaggtagaaattggccagaagaaaggagctacaggcctcatacaagtttaaaatgccgaagggcagtaattaaatcttaaatctccaaaataatcttctttgactccrtatcccacattcagggcacactggtgcaaggggccggcgtccaaagccttagatatttccacctctggctttgaaggtttcagaactccaggctgctcttacaggttgttgagtgcctgtggcttttccaggtgctgggtgcaaactgctggtggatctaccattctagggtatggagggccatggcccctttctcacagacgcactaggcagggctctagtggggattttgtgtgggagctcc

SEQ ID NO: 614926 - DNA, 566 bp, Homo sapiens
tgcagcctcaacctcctgggctcaggtaattctcccacctcagtctcttgagcagctgggactataggcatacaccaccacacccaggtaatttttgtatttttttgtggagaaggggttttgccatgttgcccgggctggtcttgaactcctgggctcaagtgatcctcctacctcggcctcccaaagtgctaggataacaggtgtgagccaccatgcccagcccagcaagagttattaactgggctaaaatggctgacttaaatgtaaaacctaaaactaagaaaactctggaaggtaayctcagaattaccattctggagataggtcctggcaaagatttcatgacaaagatgccaaaagcaattgcaacaaaaacaaaatttgacaaataggacctaactaaactaaagatcctttgcacagcaaaacactatgaacagagtaaacagacaacctacagaatggaagaaaatatttgcaaactatgcatccaacaaagatctaatatccagaatctataaggaatttaaagaaatcaacaagaaaaaaaatcaaataacccc

SEQ ID NO: 614927 - DNA, 592 bp, Homo sapiens
atatctaacctttttttttaaatagaagacaaaaagttaaatttagaataattgcacctggggaacaaaaattgggaagtagaagtgtggggaatagatggccgtttttataaacattatagaggttttattttattaaaaaagtaaacagtcttttataaaaaataaaaataaaattctggacaaattcagtgtcttcatatcatgtaagaaatggatgattatttttctttctaattacaaagtttctataacttacatgaatacatttttaagaggaaaaataacatacttcaaycttttaagcgactgtattttacttatctgggcaaaaagtatatctttaaactgttcactaaacaaactaatttaaagtattaataatgggacataccacatgctaatgaatataagaacataatatatataaggtgaaaactcctatttttaaaccattgaaacaacatgaatatggaaatgaactattcacagttagccaaacacagtgcttttacatctttttttttaaattattatacttgaagttctagggtacaagtgcacaacgtgcaggtttgatacataggtatac

SEQ ID NO: 614928 - DNA, 436 bp, Homo sapiens
ttggctgagtgagcactgacaatgccaagaagcagaggactgataataatattgcctttgttttcacacacctctttttctggtgttaaaatactaatttagtcratagagtaaaacagggacttgtctactgtcataagagcaattaatcccattagatgtcagtccttggattcagccttgcccagagctatacattttgaaatgtcaggtactttctcatagaagctggcaagtcttccagcttgctctttgatgttgcaatcaggtagttgatgttttagatcagtagatactcaaatctttatcctacagggagtgctgacattggcatgaagcttgttaaatgtggcactccgctgcacatttggcctgctaaacaagtattatacagagaagatgcagcatatcttaagattatagagttgtagagctg

SEQ ID NO: 614929 - DNA, 518 bp, Homo sapiens
ccctgagctactgtggcaggaagagcaaacagctttgcagtaacgggcctgaaaaatgtctgcacttgtgttctgggtatttgcatgtataataaatgtgtttctcaaacatttctgtaagaaaagaatattgtactgttagttggtgtttgtgagaagcatgcattttctttcttatcttgagcattccatttgctggctcaaggaaccaattgcctttgggaatgaactgcttatgtactggatcatttacaagcaggaacaaaatatactgatcacacacatagttactaatagttaattcmcatgacatgctttctttatgtcttcattttgaaactcaattagataaatgtgcacatgtttataaaaagcagaaggcaaaagcactggatgaaagagttgggcttaggggaatgaagccagggaggaggcaaactgcaattggaaagtaaagatttttttttttttaattctcattttgagctacttctagtggctgaaaacaggcagttgaa

SEQ ID NO: 614930 - DNA, 518 bp, Homo sapiens
ccctgagctactgtggcaggaagagcaaacagctttgcagtaacgggcctgaaaaatgtctgcacttgtgttctgggtatttgcatgtataataaatgtgtttctcaaacatttctgtaagaaaagaatattgtactgttagttggtgtttgtgagaagcatgcattttctttcttatcttgagcattccatttgctggctcaaggaaccaattgcctttgggaatgaactgcttatgtactggatcatttacaagcaggaacaaaatatactgatcacacacatagttactaatagttaattcccatgacatgctttctttatgtcttcattttgaaactcaattagataaatgtgcacatgtttataaaaagcagaaggcaaaagcactggatgaaagagttgggcttaggggaatgaagccagggaggaggcaaactgcaattggaaagtaaagatttttttttttttaattctcattttgagctacttctartggctgaaaacaggcagttgaa

SEQ ID NO: 614931 - DNA, 618 bp, Homo sapiens
tgctgtagccaatttaagctgtatgggaagttaatttctacacatctggaaaagagcacgcttcccactgctcctcagtagggttcactggagtgggtatgttgattgcctgaattaacctagaggtcagtgccrtctaggatggtgactcagaaccattgagtgaaagccttggtctaagtaacctcaataacagcagctccctaaaaatagcaaaatatggtgtttatgagactgctttaaggaccaacaggttttattttttgctactcttttagcttccaagtgttgaatatgtttctgaatgtcaggatttatttggatacagttcccttttttgttgttgttgaaacaaagtacttatagtttatatcagaagaacaaagtgggaacatccctcataaaaatcaaaactgtggctctgactgtataacaaagccttcggaataagttttttgcattgaactacgtagattcatcgtctggatctccatataatgtcccatccttacccctatatgctatttcttcatatggcaaatctgacacaaattaaaaccctgctgaacagtgaaaatattgcaggtttatctattcacatattctaaagtaagttta

SEQ ID NO: 614932 - DNA, 567 bp, Homo sapiens
tctgtgagacatcatgtggctgtgagctggtgagaggggaagttgggtgctttaatacattcaaaggaaggaatttgtgagtgtgtgtttaggcratgattaactttcttttgcaatacttactctggtccgtaaagcaaaaataaattgttactgaacacaatgtaaaatcctccttccttttccagagggcagggacttgagattggttcatgattaccagcagagagttagtgagccagtgctggataatctatcacggaccagtgggtttcagaatcggatgcagtgcgtatgctggaaggggagaaggtgctgtaggcatgtgtaggcatcttcctcacttaatgatttgaaaaccctcttctcagtgacttgcaagccttaacatctttttctgattgtatttccatacagatagttaagggtgatggcaatagcagtggcctttacttttgttatacccaatcagcctgagtacatttttgtggtgggtttgttttggtattttcttgccatgtgaattgatatttaggacctgcgctttgcagagctccttcattatag

SEQ ID NO: 614933 - DNA, 600 bp, Homo sapiens
attctgtctttcctccctgacattcgtgtgactctagaaatctttgtctttttgtctaaataaattatcccaacaattacagcaattttagtgcaaagggcactcaataactttctctaccagtaccagttcatgtttgtttcatttttcttgatacagcattgcactgctagtcctgtttttgatctgtggtcatctgtgatgtgtacatagtcttctgcatttttccttttccctttatcatgtatttgcttggattttttttcaattctgagagtttttactgctattgaatttcatcctaattctrggaacatccttccaagatcagattcatttaaactttattcccaatttctagcatttgtaattctaccctgttcattctctaaaggaaagtagaggaacctgttacaataagatttgtagttagatcagggaaaaacaactatttttgttaatactgtcagtaaagatagggaagtttttagatttcaagacagattgccatagtctgtcattctgtatctccagttgattccaagtctttattactttgttgtttacttacttaatgggcatgaagccaataataggcta

SEQ ID NO: 614934 - DNA, 246 bp, Homo sapiens
gaattcttctgacccaagtcaaatgacttttgtagagtattatcaaatatagtaatgtggcaaagcatgactaaatccagagagcatagtccccgacatgctcccttcatgctgccctagcagaggttctccattargggctctgcccctgcagcagagcccctgcttggacatcaaggcatttccatacatgctctgaaatctaggcagaggcccctaagcctcaactcttgccctctgcccaag

SEQ ID NO: 614935 - DNA, 622 bp, Homo sapiens
aacatctgagtcatgcatcactcatttctcaagggtttcttacaacctgttcccatgtctagtcaggtttrcattttcaacttttttttaattttcagaagtttggctctattctctgtgaacattgaccctggccttatcaagacgagagagagctttcaactccaccctgccctgaaatactcataaagcctcctacatgactttaactgtgaaggtaaccatgttctttcctcctctcttcatcttccaggaatgggcaataagaggatttctttggcagagcaaacatcccttcacttatttatgaattcacacatcccctcatccattcactcactcactcagcaaacattcatggagttgtcctaaatggaagtcatttgccaggagctgcatcatcaacttagcttagagatatgaatcatgctttgaatcttcctttcaaagacacttttctcttgccctcttcctgtcacaaaaacccacataactgtttgttatcttatttcctttgctggtctttgtcttttgtttcggaacaatttttgattaaaaagaaaaatttaaccagacaacaatggcctgggatttggatccctttacattagttaagccacat

SEQ ID NO: 614936 - DNA, 386 bp, Homo sapiens
gaattctctcacaacaatgatctttggaaacagaatgaaaaactacttattatgcagatgatattcacaaaatcaagaccaactagagttcttagacattatccagaaacctggctttacagatgaggaactcaaggtgcacgtggcttaactgaktatcctaaggtgttatccctgaaggaatcatcttgaatccagctctagagtttaacccaggattccacactgctgtgcagagcaggatctcatggtaattaattgatgtagtacagggttcatgctgctgactgaacccataggataattttttatgcaccaagagtggagttctactggtttaattaactgtagagacgtttagggacaaggttcacatcctctcagta

SEQ ID NO: 614937 - DNA, 506 bp, Homo sapiens
gaacccataggataattttttatgcaccaagagtggagttctactggtttaattaactgtagagacgtttagggacaaggttcacatcctctcagtaagatgtcgttgggaggaagaaaggaattcaatttggaccctcaatcccataattgcttttaattaaatctgatgtcatagaagagtgatggctttgaggctagacaatctgggattcaagttttcttactgaatctctgtggttttgaaagtctattgacttctctgttctcattttcctcatccggaaacccaaagtagtaacgtctaacttctagggctgttttcaggattagcacaattcctagcacattgtaactgctcaaaaaatacttgytgtaattattattatttaaaggtttttgacttattagccatatgtcagaaagacctcgtgcaatgggaagaaagcaaagcttatacaatggtgagaaaccctcaccgttgggatctattcttggtcaagacgg

SEQ ID NO: 614938 - DNA, 577 bp, Homo sapiens
gctaatagtggttaaaacgggagagaatttggtaaggatgggatggagacaatgaggaaggatgacatattttattttacatatttctgttttgtctgaattgtttgcaattcattacctttgaaatttaaagatggctcctaaagataataagtaaataaatcatcagttagcatctaaaatacaaaagtgaattgctttaaatgacagcataatgatttttttttttttttagacagagtcttccttagttgcccaggctggaatgcagtggcgcaatctcggctcactgcaacctctgcctcccaggttcaagygattctcccgcctcagcctcctaagtagctgggattacaggtgcgcacaaccacagcccagctaatttttgtatttttagtagagaccgggtttcaccatattggtcaggctggtcttgaactcccgacctcaggtgatgcacctgccttgggcttcccaaagtgctgggagtacaggcgtgagccactgcacccagtgattttttttataatgataaattaactgccttgatctcactatgatgtgtttataaaagctt

SEQ ID NO: 614939 - DNA, 577 bp, Homo sapiens
gctaatagtggttaaaacgggagagaatttggtaaggatgggatggagacaatgaggaaggatgacatattttattttacatatttctgttttgtctgaattgtttgcaattcattacctttgaaatttaaagatggctcctaaagataataagtaaataaatcatcagttagcatctaaaatacaaaagtgaattgctttaaatgacagcataatgatttttttttttttttagacagagtcttccttagttgcccaggctggaatgcagtggcgcaatctcggctcactgcaacctctgcctcccaggttcaagtgattctcccgcctcagcctcctaagtagctgggattacaggtgcgcacaaccacagcccagctaatttttgtatttttagtagagaccgggtttcaccatattggtcaggctggtcttgaactcccgacctcaggtgatgcacctgccttgggcttcccaaagtgctgggagtacaggcgtgagccactgcacccagtgattttttttatmatgataaattaactgccttgatctcactatgatgtgtttataaaagctt

SEQ ID NO: 614940 - DNA, 555 bp, Homo sapiens
actccacataccactggccttcttttgaaaaatctcattagaatgctgattttgttcagatgttgaatgaaggtttcttgatctcaggaaagatacacttcatgtgggagagggrctcttgccaatgaaacatgagaaatttccagccatgatgagatcattggtacctaactatactctcatggttaaaaacaaaacaaaataaaatttattgtgactgtttttagacattttcaataggtattccaaaactgtgatccctgagagaagggaaataaatacagtgagacccataaacaccctggatttctgcacagacacacattctgcatattggtgtgaggataggtggcccagacagagcacagcagtctcaaggaggtgaggagaaagaggccataattcaagaaccctgagatgcccagaattttcctggaagaagagagtggtgttgaaaagaagatccagaaatctgcatagtaggccagacactgaactggtcatgcacagggttactgcacctgcccaggaaagaactattaccagggaaagaat

SEQ ID NO: 614941 - DNA, 387 bp, Homo sapiens
gttacatcatagtaaaagggaaaagagggaaaccttaaaagtaaccagagaataaagtaggattatctatgatgaaaaatataatggccccctcaccaacaagtatcttcctgactccacataccactggccttcttttgaaaaatctcattagaatgctgattttgttcagatgttgaatgaaggtttcttgatctcaggaaagatacacttcatgtgggagaggggctcttgccaatgaaacatgaraaatttccagccatgatgagatcattggtacctaactatactctcatggttaaaaacaaaacaaaataaaatttattgtgactgtttttagacattttcaataggtattccaaaactgtgatccctgagagaagggaa

SEQ ID NO: 614942 - DNA, 555 bp, Homo sapiens
actccacataccactggccttcttttgaaaaatctcattagaatgctgattttgttcagatgttgaatgaaggtttcttgatctcaggaaagatacacttcatgtgggagaggggctcttgccaatgaaacatgagaaatttccagccatgatgagatcattggtacctaactatactctcatggttaaaaacaaaacaaaataaaatttattgtgactgtttttagacattttcaataggtattccaaaactgtgatccctgagagaagggaaataaatacagtgagacccataaacacccyggatttctgcacagacacacattctgcatattggtgtgaggataggtggcccagacagagcacagcagtctcaaggaggtgaggagaaagaggccataattcaagaaccctgagatgcccagaattttcctggaagaagagagtggtgttgaaaagaagatccagaaatctgcatagtaggccagacactgaactggtcatgcacagggttactgcacctgcccaggaaagaactattaccagggaaagaat

SEQ ID NO: 614943 - DNA, 379 bp, Homo sapiens
tacgcaacagtttattcttctgctctctcaggatgtaaacactgttgtcaacaaccaatcagatgcactaaagctacaaatagcatgtttagtttatatgtatatgcaatcagctaaacaaaattttgaacatcaatgggacccatttctaatcactttgttcttgttcaggtccatcacactgcataacttcagggggcaccaatcacattttagtcaatatataactaattgtagataatrtgaatggtgcccctgagttgtacagtagtttccctcctacagttcataaacattacacaacttttaaaaatcagtaaatctcaagtcactgaagtctttctctcacttttagctaaatcaaactttcaaaggccat

SEQ ID NO: 614944 - DNA, 569 bp, Homo sapiens
attcattcagcatttatctaatgtcaagctttcaggagactatgataaatacaaactagttatttctctcaaggagcttaagatatgatggtaggaaataaaaacagttaaatagcaatgaaaatgaaatatgacagatgttataataagaatattctagaagacaaagkattgagaccctaaccaagcctgcaggcattcccagcactttctagagcatgagcagataaactgaagtctaaaacaagcaataattgtttaaggaaaatgagttggaaaagtaggtgcagaaatcaatattttagagtaaatatcgtctttgaatttagtttgatatatttatatacatatatcaaatgtctggctttgtctcatgctgagagaagagaaatagcagtcacaaaatttaagaaaactgcttaagagtcaggagatatacctaatgctaaatgacgagttggtgggtgcagcacaccagcacggcacatgtatacatatgtaactaacctgcacattgtgcacatgtaccctaaaacttaaagtaacataataataataataataataaa

SEQ ID NO: 614945 - DNA, 569 bp, Homo sapiens
attcattcagcatttatctaatgtcaagctttcaggagactatgataaatacaaactagttatttctctcaaggagcttaagatatgatggtaggaaataaaaacagttaaatagcaatgaaaatgaaatatgacagatgttataataagaatattctagaagacaaaggattgagaccctaaccaagcctgcaggcattcccagcactttctagagcatgagcagataaactgaagtctaaaacaagcaataattgtttaaggaaaatgagttggaaaagtaggtgcagaaatcaatattttagagtaaatatcgtctttgaatttagtttgatatatttatatacatatatcaaatgtctggctttgtctcatgctgagagaagagaaatagcagtcacaaaatttaagaaaactgcttaagagtcaggagatatacctaatgctaaatgacgagttggtgggtgcagcacaccagcayggcacatgtatacatatgtaactaacctgcacattgtgcacatgtaccctaaaacttaaagtaacataataataataataataataaa

SEQ ID NO: 614946 - DNA, 569 bp, Homo sapiens
attcattcagcatttatctaatgtcaagctttcaggagactatgataaatacaaactagttatttctctcaaggagcttaagatatgatggtaggaaataaaaacagttaaatagcaatgaaaatgaaatatgacagatgttataataagaatattctagaagacaaaggattgagaccctaaccaagcctgcaggcattcccagcactttctagagcatgagcagataaactgaagtctaaaacaagcaataattgtttaaggaaaatgagttggaaaagtaggtgcagaaatcaatattttagagtaaatatcgtctttgaatttagtttgatatatttatatacatatatcaaatgtctggctttgtctcatgctgagagaagagaaatagcagtcacaaaatttaagaaaactgcttaagagtcaggagatatacctaatgctaaatgacgagttggtgggtgcagcacaccagcacggcacatgtatacatatgtaactaacctgcacattgtgcacatgtaccctaaaacttaaagtawcataataataataataataataaa

SEQ ID NO: 614947 - DNA, 621 bp, Homo sapiens
ccaagtgccctaccacaaggtattttagcttctgtgaatgttgatcaaacctcattagctcaatctaggtaccctattcctcatggaacctagtaaaatggtggcttgtgtgtttatatccaaaagaaattaaaagtttgaatttatcccttctcagaaattccccagaatattttaacagtttcatatgactctagatcmctcatgaagacagaaagatgtcatcttcattcctaattgtctttttctttacagcagctatagttagggaaaagagggagtgagtcatcagggtacataaaagaagaatcagtttcatgtcattaagcaagtctcatttactttatttctcaatcagttcagcagctactttcaggtcaacaaaaacttttttttactgtattcaatcttctcaaagtcagccagtggcaagattatcattactgatatcatctattttagctttggagaccccttgactccacagtcacagtcatactgttttctgcatgaaactgtagggtttgtaccctttaactaactcaggagtcttgcacagtagtgacatttcttagggaatctactttaaatggaagcatatttttgcctcattgtaatgaa

SEQ ID NO: 614948 - DNA, 459 bp, Homo sapiens
  misc_feature 1, 2, 3, 4, 5, 6, 7, 8, 9, 10, 11, 12, 13, 14, 15, 16, 17,18, 19, 20, 21, 22, 23, 24, 25, 26: n = A,T,C or G
nnnnnnnnnnnnnnnnnnnnnnnnnnccatttgtttttatttcagagtagagtcttgaaatataagccawagctttattactcttcttctgtctttcttttttctgttgttcttttattctttccatgtatatctcttaaaataagtaatcaatgttaatttagaaaaaaagaaaataaaataaagataaaagtaaactaaacaagcaagccaatatgtatgtcatctacaatatgaatatacttgcattaacattgttaatatcttggggcacatctgttcacacataatttacatacctatttattgaaaactaataatgggattttatgttaaaagtgcatatttttcagtacatacttgtgtaatttaacaatatattattgacatattttttatatcattcacattttaaacaagtacaacgagcccctactatatgtcaggaatatcctcagc

SEQ ID NO: 614949 - DNA, 512 bp, Homo sapiens
aggctgcatttctttctggaggctccaggggaaagtaatttccttgccttttccggcttctagaggtcactcacattccttgagtcatggccccttcttccatgcttaaagtcagcaacgttgcatctatctgaccattcctccaaataacatcttctgactttcttttcttcttcttccacttttacagactctttagaatatgtgaggcccacctggataattcrggattatctgtctgctgattggcaaccttaattccatctgcttccttaattcctctttgccatttaacataacatgtttacagattctgaaattaagacatggatatcttggggggcattattctgcctacctcacctgacgtgtggcaatttactgtaatcaaatttcttgactaagcaggttttcctggaagaatagagcccagttccaaggagtgtatatatgaacacctttaaatgatctctatctgcctcttacttgcagatttacctgtaatagccttc

SEQ ID NO: 614950 - DNA, 507 bp, Homo sapiens
aacaagttttttatttggaaaatccccccacttgcttctggggtgtgtagtcaaatagcaatgttggtgcacccaacatcaatagtttccctggaaacgtatatctttgtacactttyggatgtggcatgtcagagctgatgttgaggattttgcttccttgaagtttattgatacttttcttgcatttggtatccatagtactctggccatcaccaagtcaacaggattctaatattcctttccctgatccaaccaaagctctttgtaaattggactcagcaggagtaagtccagtgacctcataaatagtggaaatgattgcaaatcagaattcatatatgttcccaactcagtgggtatccttctccccgacaaaggaagcaatcattgctttcaaatttctgtttgcccttttactcagctatgttggaagaaaatatatagagagattttgctctataagcctgaaaggtccacttcctctaacttgaaaaaataaaagttc

SEQ ID NO: 614951 - DNA, 507 bp, Homo sapiens
aacaagttttttatttggaaaatccccccacttgcttctggggtgtgtagtcaaatagcaatgttggtgcacccaacatcaatagtttccctggaaacgtatatctttgtacacttttggatgtggcatgtcagagctgatgttgaggattttgcttccttgaagtttattgatacttttcttgcatttggtatccatagtactctggccatcaccaagtcaacaggattctaatattcctttccctgatccaaccaaagctctttgtaaattggactcagcaggagtaagtccagtgacctcataaatagtggaaatgattgcaaatcagaattcatatatgttcccaactcagtgggtatccttctccccsacaaaggaagcaatcattgctttcaaatttctgtttgcccttttactcagctatgttggaagaaaatatatagagagattttgctctataagcctgaaaggtccacttcctctaacttgaaaaaataaaagttc

SEQ ID NO: 614952 - DNA, 180 bp, Homo sapiens
catggtagggagctagaaatgcaacatattagtgacagtctctgacttcatggagtttagtttattatatgcaagyaagaaattatagtgaagtgggagggttgttgtggtagaggaagtccaaagtgctttggatgtccacagcagagacagcgtttaaagccttacaatgttgggttt

SEQ ID NO: 614953 - DNA, 439 bp, Homo sapiens
tacagctgtgtgatctgtggcaaattacttcatctctgctatcctcagtttcctcacctgtaaaatgggatacttattttttccctcacaggttttctgtggggattaattgagatacaaataagggcttatcatagcatctggcacatagcgagcggttggrgctggctgctaagggcttcattctctgtttttcaccaccagctccccactttccccgagatgagaagggaggaaacacaagtacagttggtcatctttcatataggcccctggatgcactacccctttaacactgcctaacaaggtcctacggagctggttcctttgcttcttcctctgacctcctgttaatgtctctctcggttctcattgtgcagagtcctgtatggttctcagtggatctctccagatctttttctaggaaattcccatcccc

SEQ ID NO: 614954 - DNA, 580 bp, Homo sapiens
tttggcacatctaattctgattggcatttgttcctcagaggacccagactaatgcaccttctcaaaacagtgttctagaggggatcggtagatgttccttgaggcatctttttacctagaaaccatcagtgccatctgggtgggtgcagcagtggaggggtgccaagccaggccatggggcatggtgtcacacacacacctggttcaaagcttggctcttccacctacagctgtgtgatctgtggcaaattacttcatctctgctatcctcagtttcctcacctgtaaaatgggatacttattttttccctcacaggttttctgtggggattaattgagatacaaataagggcttatcatagcatctggcacatagcgagcggttggagctggctgctaagggcttcattctctgtttttcaccaccagctccccactttccccgagatgagaagggaggaaacacaagtacagttggtcatctttcatataggcccctggatgcactacccctttaacactgcctaacarggtcctacggagctggttcctttgcttcttcctctgacctcctgttaat

SEQ ID NO: 614955 - DNA, 592 bp, Homo sapiens
atgggtgttgccaggagaattactgtccttaaaatgaagcgacgttgccactcaccctactccgccctgggctccccccaacatcctgcccctttgctcccctgctccaccaagcagcctatttaaaaatgcaaacattgaagaggtcagtgaggccacagcctggatcctctttggctgtagatgtatagagggcttgattctttctcaaggtctttcacatatatttttccattgactcattattaagctgtacaatccatgagggcagatatttgttttgtgtttcctacacaagctggcccaggctgggttttttttktttgtttgttttttgtttttgagacggagtctcgctccatcgcccaggctggagtgcagtggcatgatcttggctcactgcaagctctgccttctgggttcatgccattctcctgcctcagcctcccgagtagctgggactacaggtgccccccaccatgcccggctaattttttgtatttttagtggagatggggtttcaccgtgttagccaggatggtctcgatctcctgaccttgtgatccacccacctcagcctcccaaagtgctg

SEQ ID NO: 614956 - DNA, 537 bp, Homo sapiens
aacatcttaagtgccaggtactgagccaggcatggtatatgcattttctatggctgctgtaacaaatcattacaaattgagtggcttaaaacagcacagagttattctcttcctgttctagaggtcagaagtccaaaataggtcttatttgtctaaaatcaaagtgttggcagaamcacattccttttggaggctctttggaaagaacccatttctttgcctttccagcttctagaggttgcctgtcttccttggtttgtggccccttccttcatcttcaaagccagcagtgttgaatcttcaaatctccctatttgactcttgccctcctgcctccctcttgtaagaatccttgtgattacattagattacaataacccagataatccagggctgtcttccaatcccaagatccataactaaatcacacctgcaaagtgcttttggccatggaagataacatatccccaaattcctggatacaggattaagatgtgggtatctttggggaaccattattttgcctaccacaatacc

SEQ ID NO: 614957 - DNA, 537 bp, Homo sapiens
aacatcttaagtgccaggtactgagccaggcatggtatatgcattttctatggctgctgtaacaaatcattacaaattgagtggcttaaaacagcacagagttattctcttcctgttctagaggtcagaagtccaaaataggtcttatttgtctaaaatcaaagtgttggcagaaccacattccttttggaggctctttggaaagaacccatttctttgcctttccagcttctagaggttgcctgtcttccttggtttgtggccccttccttcatcttcaaagccagcagtgttgaatcttcaaatctccctatttgactcttgccctcctgcctccctcttgtaagaatccytgtgattacattagattacaataacccagataatccagggctgtcttccaatcccaagatccataactaaatcacacctgcaaagtgcttttggccatggaagataacatatccccaaattcctggatacaggattaagatgtgggtatctttggggaaccattattttgcctaccacaatacc

SEQ ID NO: 614958 - DNA, 609 bp, Homo sapiens
acacctaaactgacagtggcccaaattctatcagtgaatgagatatcctatcctattcccctgggctgacattgacgtttctcccaaycctgctggctgtgattgtttagaaggatatggcttatccatgcagagtacaaggaagagttcaagctatggaacccataagacctaggtctaaatcctggttttgatatgggaagggggcagaaaagtgctgggtagagaaggatggggtccctggcgagggctccaccctcaggcctatgcccatggacctaagtgagaacaggcactcctgcttttgcacccaaatgttgcattttccaagaccaccctcacctgccatgcaccccatcctgtgcccatataaacccgagaccctagcaagcacagacacaagcagagaatgttgaacaggcacagacaccagctgaccggcagaccagcaacagcggaatgacatggcagagaaacagagaagaggaaggacatctggacaccaaggggagttcagtcaggttggggctaggggcagtaggagaagagtccagctgccgggtggcccaactccaggggaagaccaccttcccactccatcccccactt

SEQ ID NO: 614959 - DNA, 609 bp, Homo sapiens
acacctaaactgacagtggcccaaattctatcagtgaatgagatatcctatcctattcccctgggctgacattgacgtttctcccaaccctgctggctgtgattgtttagaaggatatggcttatccatgcagagtacaaggaagagttcaagctatggaacccataagacctargtctaaatcctggttttgatatgggaagggggcagaaaagtgctgggtagagaaggatggggtccctggcgagggctccaccctcaggcctatgcccatggacctaagtgagaacaggcactcctgcttttgcacccaaatgttgcattttccaagaccaccctcacctgccatgcaccccatcctgtgcccatataaacccgagaccctagcaagcacagacacaagcagagaatgttgaacaggcacagacaccagctgaccggcagaccagcaacagcggaatgacatggcagagaaacagagaagaggaaggacatctggacaccaaggggagttcagtcaggttggggctaggggcagtaggagaagagtccagctgccgggtggcccaactccaggggaagaccaccttcccactccatcccccactt

SEQ ID NO: 614960 - DNA, 609 bp, Homo sapiens
acacctaaactgacagtggcccaaattctatcagtgaatgagatatcctatcctattcccctgggctgacattgacgtttctcccaaccctgctggctgtgattgtttagaaggatatggcttatccatgcagagtacaaggaagagttcaagctatggaacccataagacctaggtctaaatcctggttttgatatgggaagggggcagaaaagtgctgggtagagaaggatggggtccctggcgagggctccaccctcaggcctatgcccatggacctaagtgagaacaggcactcctgcttttgcacccaaatgttgcattttccaagaccaccctcacctgccatgcaccccatcctgtgcccatataaacccgagaccctagcaagcacagacacaagcagagaatgttgarcaggcacagacaccagctgaccggcagaccagcaacagcggaatgacatggcagagaaacagagaagaggaaggacatctggacaccaaggggagttcagtcaggttggggctaggggcagtaggagaagagtccagctgccgggtggcccaactccaggggaagaccaccttcccactccatcccccactt

SEQ ID NO: 614961 - DNA, 609 bp, Homo sapiens
acacctaaactgacagtggcccaaattctatcagtgaatgagatatcctatcctattcccctgggctgacattgacgtttctcccaaccctgctggctgtgattgtttagaaggatatggcttatccatgcagagtacaaggaagagttcaagctatggaacccataagacctaggtctaaatcctggttttgatatgggaagggggcagaaaagtgctgggtagagaaggatggggtccctggcgagggctccaccctcaggcctatgcccatggacctaagtgagaacaggcactcctgcttttgcacccaaatgttgcattttccaagaccaccctcacctgccatgcaccccatcctgtgcccatataaacccgagaccctagcaagcacagacacaagcagagaatgttgaacaggcacagacaccagctgaccggcagaccagcaacagcggaatgacatggcagagaaacagagaagargaaggacatctggacaccaaggggagttcagtcaggttggggctaggggcagtaggagaagagtccagctgccgggtggcccaactccaggggaagaccaccttcccactccatcccccactt

SEQ ID NO: 614962 - DNA, 670 bp, Homo sapiens
accaataggatagatagatgatagatagataattagatagatagattgatagatagatagacatatgaggagatttattataggaattgcctcacatgattgtggaggcagaggtctcacaatatgccatcagcaagctggagcaccaggaaaaccagtaatataattcagtcctagtctaacaacctgagaaccagggagcctctggtgtaagccttgaaggctgaagacccaagaaccaggagctctcatgtctgaaggcaggagaagatagatgtctagcttaagaagagagggaattttactttctttgccttttttgttctatttgggccataaacagattgaatgatgttcacacaccttgatgagggtgatctttgcycagtgtactgattcaaaagctaatctcttctgaaaacaccctcacagacacacccataaatagtgtttaagcagatatctgggcatcccttagccagttaagttgacacattaaattaaccatcactctacctcaaaacctcgtggcttaagaaagcaatttatgatttctcattagtccgtgggttggctggagagttctgtcgatctgggacagacatggctgatcttggctgggcttgcccatgtgtctgtggtcacctagtaggtcagctagggtctgagt

SEQ ID NO: 614963 - DNA, 622 bp, Homo sapiens
aggtctaggttttatggcttgctttggggcagaggggttctacttccttgaaaccaccttggggaagaagaattccagtttctattacttgcttcatgggagaagagaggtaagaggggtaagagagcggaaaggaggagaaggtcagggagaacttgcttctgaggccttccaatctcctttagttcaaagtactcggcatgccaaagcaccacagtttagggtgtaattttttgagccctaacattgggaaagggaagaggccaaaacttggcagtttttcaggttattgagcacttattaccatttccttccatttataagcagatgattatcattcaagataaatatgaaaacagcacttaaggatagcatgggacttgaattaagaggacctggatccatatactagttcttcattttattagctgtgaggatttggacaaattcctttacctctctgagttgtgattttttatctgtaaaatggagataatagtamctacttcacaagtctgttacacgagctgaatcaatggatataggttaaaaaaaagctttgtaagcagtaaagcactaggcaaatattagttataatcagtgctttccttttgccatttgc

SEQ ID NO: 614964 - DNA, 657 bp, Homo sapiens
gaggctctgctgggggtcgatgaaccgatgcctaggctattaacgctggggccacttagagagaaccttttcgaaaagccccaactcccttgtcagtaaggtttacttgtgttatttctatacatcctagcacctgaaagatggtaggaaatgccaagaaaactgcatttattaagcaatattggatttcttcctcataatactctcctcaccaaagacatagrtgattggagttttgagtagataggtcactatgaccacatggatctgaaggctggagaagaaggaggcaggggccagatcacgaaagcctttgtgatttttttttataaagagagtttcagttttatccttttggatgtaggaagcagggcaggagttgtttttatttttgttttttaaatcacctttactgaggtatgttacacacagtaaaatgcacccatgcatcagctttcgtttttttgtcttttgttttgagatggagtcttgctctgtcgcccaggctggagttcagtggtgtgatcttggctcactgcaagctctgcctcccagtttcacaccattctcctgcctcagcctccccagtagctgggaccgcaggtgcccgccaccacatctagctaatttttttgtatttttagtagaggtggggtt

SEQ ID NO: 614965 - DNA, 557 bp, Homo sapiens
tgtttttatttttgttttttaaatcacctttactgaggtatgttacacacagtaaaatgcacccatgcatcagctttcgtttttttgtcttttgttttgagatggagtcttgctctgtcgcccaggctggagttcagtggtgtgatcttggctcactgcaagctctgcctcccagtttcacaccattctcctgcctcagcctccccagtagctgggaccgcaggtgcccgccaccacatctagctawtttttttgtatttttagtagaggtggggtttcaccgtgttggccaggacagtctcgatctactgatcttgtgatccacccatctcggcctcccaaattgctgggattccaggtgtgagccactacacctggcccatcagttttaaggatacagtttgatgaattctaacaaatgtattcatttgcataaatactgccacaattaagatgtggaacacccttgtcactcccctagatttccctcgtgtccttttatgttttctctctattccctcccatctctgacctagacagccactggtctgattcat

SEQ ID NO: 614966 - DNA, 588 bp, Homo sapiens
tttgtctaaacttctttgagttgggtcttctgtttctcatacccaaaagcaccctaattgatatgtactgtggaaaaagcactgatcttggagttcaaacagatacaagtttaaattccagttctgcagtgtgatcttaggcaagaagcatcacctctctgggccttgcctttttcatcttttgctatctggaagtggaattaaactcatttacatgacaaatatttttggataagaataatttgaaagcaataaagatgaatggcatgattccttccctggggtgggagctcagtttggtgagagaattctgatgcttgcacagataattatatttcctttagaatatgatggcattgattattatttaatagctacattattattttttgtactactgaataaaaaatgygccaggtaaagtggctcacgcctgtaacctcaacactttgggaggccaaggcaggtaaatcgcttgagtccaggagttcaagaccaggctgggcaacatggtaaaaccctgtctccacaggcatgtgcctgtgttcctagctactcaggaggctgaggcaggaggatcacctgagc

SEQ ID NO: 614967 - DNA, 552 bp, Homo sapiens
gaccagcctaggcaacatggtgaagctctgtctctacaaaaaatacaaaaattagctgggtgtagtggtatatgcctgtagtaccagctacttgggagactgaggtgggaggatcgcgtgagcctgggaggcagaggttgcagtgagctgtgatcacaccaatgcactccagcctgagtgacagagtgagaccctgtcacaaaaaaaaaaaaaaaaaaaaagagtcatgagggaagcacagaatcttgagtcatacaaactctagaggcttaagttcttgctctgccacttcctgcccatgttcctgagcacatctcatcatctccctggaccttattttcttcatctgtaaaatggggttaaaagcaatacttcctccagagagtgattgtaaagattaaatgagacaagttatacagaaagccaagcacacaataaaccctccagtaaacgttggctcctcttatcagtgtrcacatttgcagtgacaaaactgcacagaagtggcgacctattttataaccctatctccaggcttagtctctggagctc

SEQ ID NO: 614968 - DNA, 461 bp, Homo sapiens
gtccctggccttggggggatttccagcaagggaaatactggcttcatgtgtgatagttagatagaggaggtggttggggacataagatttggattgcttggtttgcatatgaaaratgtactctcaggcaagtttttgctaccactaggaattagctagccctggaaggggcagtcttctctaggattcacaacgcccccaagatggcaaagcagcataaaatacagaaaataaaaaacatgataaatgtgataatcaagagtgtaattccagctgggcgcggtggcgcacacctgtaaccctagcaccttggaaggccagggcggatggatcacttaaggccaggagttggagaccagcctggacaacatcgcgaaaccccgtctctactaaaaatgcaaaaattagccaggtgtggtggcgcatgcctgtaatcccagctactcgggaggctgaggcac

SEQ ID NO: 614969 - DNA, 531 bp, Homo sapiens
tttccctccccttgaatctgggtggacctgggggcaccttcacagattctgaacatgatttgcagytctgctcaccaccattacttttccctctcacctggggttctaaggtagcctggtattagaaatgccaagagcccggcccaccacaccctgccaacctacttcagttattagaaagcctttctaactgatacagagaggggaactgggggccaggagccacagtttctagcccaggggttgtcgcccactggctgtgtgactatgggtagatcatgtaacatgtctgagcttcgatcttacctgtaaagtaggaattgatggcattacctacctcacaggctggttgtgagaattaaacaagataaggtatatgacagtattttgacttttttacctgatattttttttctttcccactcctcttggatctacaatgaggaagtttgtctaaatattcctgtcttcttgcctggcttttttccctcctcaccctgacaggtgagtttaggagaagaactgctgcac

SEQ ID NO: 614970 - DNA, 561 bp, Homo sapiens
gaattccattcgatccccagctttgtgtggctttccctacttccctatcaactcaaaatttggggtgcttggcaaaggaggtcctgtgtggaaccagctgggtcacacactcacggaggatgaatgcataccctttacaaaacacaaatgcattttgtctcttctgcagacctttctggggaaaacctagctgtgcttccttctgatttctcctakcaagtggagaaatgaactcctccgcaccacgcccccttgcctgcccctggaggaacatatgtggccagaagctgccagcaagcctctatgtgtcctctcataaccctgacaactcgagtcgctaacaatatttccgttggagaaacttttataaaatattacaatcaattcaattgcattaacacgtttgaacctctaagttcaacacagtggaaaacacaatacttctctattacatcaagtgtctggtcagatatatatcacacaaaactgaaaccagaggcactgaggggaccctgtttatcccaacttagcaaaaggaattatctgacagttggaaatgaa

SEQ ID NO: 614971 - DNA, 561 bp, Homo sapiens
gaattccattcgatccccagctttgtgtggctttccctacttccctatcaactcaaaatttggggtgcttggcaaaggaggtcctgtgtggaaccagctgggtcacacactcacggaggatgaatgcataccctttacaaaacacaaatgcattttgtctcttctgcagacctttctggggaaaacctagctgtgcttccttctgatttctcctagcaagtggagaaatgaactcctccrcaccacgcccccttgcctgcccctggaggaacatatgtggccagaagctgccagcaagcctctatgtgtcctctcataaccctgacaactcgagtcgctaacaatatttccgttggagaaacttttataaaatattacaatcaattcaattgcattaacacgtttgaacctctaagttcaacacagtggaaaacacaatacttctctattacatcaagtgtctggtcagatatatatcacacaaaactgaaaccagaggcactgaggggaccctgtttatcccaacttagcaaaaggaattatctgacagttggaaatgaa

SEQ ID NO: 614972 - DNA, 563 bp, Homo sapiens
tagatctatccatcatccttgctagactgtaaaccccaagaggccggagcccatgtctgtcttgttcttccctgtattgtattcctaactccaaagaatcaggaatattttattttaaagaagcctaaaagacttaggaattaagaatattttattttaaaayaagcctaattaagacacttatgaatgtctcattcacaagagaggtcagtaaatacttgacgaagaaagaaggaaaagaaggagaggaggagtgaagggggaggtctttgtcctgtaagagctgtcaaccctttccctactgagccaatgtgaaaactgccttcagtaaccctaaggaggaatggcatttacagagcagtccacatgccaggcactttccagcaactcattcaatcctcacaactacgttgtcaggtagagcccacctttagccccatttgaggaatctgagagtcagagggctgaagtaatatgtccatcttcacacagctagtaagtgacaatgacgggatttgcattccggtctgagttcagaggctggacttttaaccaatacagta

SEQ ID NO: 614973 - DNA, 429 bp, Homo sapiens
agatctatggtgttcttatagaagcactaatcccatttgaccagggctccaccctcatgaccttatwtaactctaattacctcccaaaggccccatttccaaatatcatcacactgggggttagggctccaacatattaatttgggagagacacaaacatgcaggccataacaatgaaacgctactcagccataaaaaggattctgcagcaatgtggattaacagagtatgattccttttatagaaagttctagaataggtcaaactaatctgtggcaggggaaaaaatcagaagtctggttgctgggggtggaggaatggaaattgaactgggaagaagcacaacagaactttctggaatcatagtaatagtttatgtcctgataggagtttgggttacacaagtatattaatttgtcaaaactcata

SEQ ID NO: 614974 - DNA, 581 bp, Homo sapiens
ttgacttttttacctgatattttttttctttcccactcctcttggatctacaatgaggaagtttgtctaaatattcctgtcttcttgcctggcttttttccctcctcaccctgacaggtgagtttaggagaagaactgctgcacgcatccccgtctctccctctcttcctcatcagcatctgccagcacagggaacacacattctgctttgctgtctgccataccagggacccacagtgctctaggttaggcacaggagccagctgatgggtccctggacatcgagaaagggtagaaaagggtgaacagtatatttgaggggcaaacagtaaagatctggtacatccccagcaggagactgggcaaatagaccataagatcctcatacaattgaataacattctgccattaaaaatcatgctaagaaaaaatatttaatgacatgaattgcttctttcaaagaaagggtagcaataaaacatacaacatawtacaactttgctttaaaatatatagacacacagaaacagcttaagaaggttatttctgggtggcacaacactaggtaatttttattttct

SEQ ID NO: 614975 - DNA, 644 bp, Homo sapiens
ctgcttcattcttaacagtaaaatactagaagcatttccattaaaatcgaaataagtcagagatacctaccatcaccaatatcatttaatgtcattctgaaaataccagcaagatttcaaactcaaatgcctttagggactatgcagtaaggtaaaaaaaaaaaaaaaaaaaaaaaaaaaaagtaaagaaatttgggttttaaaaaataaggactggttaaactctacagtctagagctcatgagctccagtgtattctctcctgcaggaatactactccagcattgtcaaatcagctaaaattgcaagatacgctaggatttcagctttagtatatgtgttaaaactcaattcttttctttcctacttttctgctgaaatcaattttttaaaaaagatttttaattgttttgaaaatactgaaaatacacctggcccaagagcaattcattttcagtctccatactagcaaatagataagaagaacaaggaaaaaaagaaaggttaaactcaagataatcaactgaaattctattagaaaatctaaccgtttcagtaaratgactgattatacatttaatatataaaaattaataggtttcttatatataaattataagccattagaaaatgtataggcagtt

SEQ ID NO: 614976 - DNA, 404 bp, Homo sapiens
tctgcgtgtcactcagccaagagccactgcacagggtaagagcagctgattggctgagcatcaccacatgtccatgcatacgagtacctgaccccattccatttctgtatgagaggcagagctttcactcctacctactccccacataaraagagtatttggatactaggcaatcccgggagacaaatatctgctgtgcacctgtttggcctctattacttcattcaactttcacaagaaccctaggatggtagcagagcagcagttattccccgtcttacccatgaggaagttgaggctcagtgagagtaactgactgcccaaaccaatgtcggggaaaagaggtagacatgagccctttctgcctctcagaagaactgttcatggtctaatcctgtgaattc

SEQ ID NO: 614977 - DNA, 546 bp, Homo sapiens
atatgtgcaggtttgctatatgggtaaacatgtgccattgtgatttgccacacagatmaacccatcacctaggtattaagcccaacatccattagctattcttcctgatgctctccgtccccctcccccctgacaggccctagcatgtgttgttcccccacatgtgtccatgtgttctcatccttcagctcccatttataagtgggagaacatcctgcccagttcccttgagtttagtgagtttagtgaaactgagtggtcatcccttgagtttagtgaaactgagtggtcagaaataaagtgtggatcctagatgtctgtggttcgcattattttataacaaaataactgtatataattatatattcttactcatatgtatatctgtgtagaaaaaaatctaggctataacctacagtattgtcatctctaggagtaataggataataaaggacattctacaaaatgtataatttttgtaaggtttgaatttttttcaataagcaaatatttattttgtcttcaggaaaaacgaagataaatgac

SEQ ID NO: 614978 - DNA, 546 bp, Homo sapiens
atatgtgcaggtttgctatatgggtaaacatgtgccattgtgatttgccacacagatcaacccatcacctaggtattaagcccaacatccattagctattcttcctgatgctctccgtccccctccccsctgacaggccctagcatgtgttgttcccccacatgtgtccatgtgttctcatccttcagctcccatttataagtgggagaacatcctgcccagttcccttgagtttagtgagtttagtgaaactgagtggtcatcccttgagtttagtgaaactgagtggtcagaaataaagtgtggatcctagatgtctgtggttcgcattattttataacaaaataactgtatataattatatattcttactcatatgtatatctgtgtagaaaaaaatctaggctataacctacagtattgtcatctctaggagtaataggataataaaggacattctacaaaatgtataatttttgtaaggtttgaatttttttcaataagcaaatatttattttgtcttcaggaaaaacgaagataaatgac

SEQ ID NO: 614979 - DNA, 546 bp, Homo sapiens
atatgtgcaggtttgctatatgggtaaacatgtgccattgtgatttgccacacagatcaacccatcacctaggtattaagcccaacatccattagctattcttcctgatgctctccgtccccctcccccctgacaggccctagcatgtgttgttcccccacatgtgtccatgtgttctcatccttcagctcccatttataagtgggagaacatcctgcccagttcccttgagtttagtgagtttagtgaaactgagtggtcatcccttgagtttagtgaaactgagtggtcagaaataaagtgtggatcctagatgtctgtggttcgcattattttataacaaaataactgtatataattatatattcttactcatatgtatatctgtgtagaaaaaaatctaggctataacctacagtattgtcatctctaggagtaataggataataaaggacattcyacaaaatgtataatttttgtaaggtttgaatttttttcaataagcaaatatttattttgtcttcaggaaaaacgaagataaatgac

SEQ ID NO: 614980 - DNA, 568 bp, Homo sapiens
agactctgggaagtgacattaggccagagcctgcggaatggggaagaatcgagtgttgcaagcctaaggaatggcatgcgtctaggccctgggctggaaaagccctgcagacaatcagggagtggaaaggaaagcagcatgattgcagagctgtgagcaagggcaagagccacgcaggcggggccagggaggctgcacagacagcaggcggcaagggcctgtgctttggagcgaccagacttggtttcaaatcctggctccaccacttactgtctgatcttcggtgagtgacttgacctctcagagcctatctcttcaaacacacaaaagaagaaatagtaggccgggcgcagaggcccatgcctgtaatcccagcactttgggaggyggaggcgggtggatcacctgaggtcatgagttcaagaccagcctggccaacatggtgaaaccctgtctctactaaaaatacaaaaattagccgggcatggtggcaggcacctgtatcctcagctactcaggaggccgaggcaggagaattgctggaaccctggaggcagagaatgcagtg

SEQ ID NO: 614981 - DNA, 400 bp, Homo sapiens
ccatttttatataacattgcatgggaggtcctggccagtaaaataagaaaaaataaaaaaggagcagaaataaaaggcataaagattagaaaggaagttacatggggtttttttgcaaacaatgaaattgcaggaaattctaaggaatctgtcaaaaaaattaatasaacaaataagaaaatttagcaaaatcacagaataaagatcaatatagagaaacccactgtacttctggatcctaacaacaaacaataggaaaataaaaaatgttaagtgataggatttgcaacagtatcaaattagaaaacaaaatgctcagaatacatttaaggaaagattgcagtatctctaacctgaacactacacatattactgggagaaattgagcatgatctaaata

SEQ ID NO: 614982 - DNA, 575 bp, Homo sapiens
gcactctgtaccccacaggagggagttaagccaaaccttaagccacctaagtgataatgtacagtcaccctctccaaaagacactgggtggagaggaaagctacactaagagtcaggaggcctggtttctcacctcctgtcttagttcgggctgccatacactggatggcttagacaacagacacttatttatcacggttctaagggctgggaagtacaagatcaaggtgctggtagattcaatgcttggtgagggccyatctcctggcttgtagacagccaccttctcaccgaatgttcacgtggcctttcctccgtgtgtgcttatggagacagtgagagaaagatatatcctgtctcttcctcttcttataagggcacaaatctcatcgtgagggtatcacccccatgccctcatctaaatctaattacttccctaaggacctacctcctattaccatcccactggagattagggtttccacatatgaattttgggggacacaaacatttaccccataacaccaccactccaacaatagccagcagtgtgaccttaggctggccactcatac

SEQ ID NO: 614983 - DNA, 575 bp, Homo sapiens
gcactctgtaccccacaggagggagttaagccaaaccttaagccacctaagtgataatgtacagtcaccctctccaaaagacactgggtggagaggaaagctacactaagagtcaggaggcctggtttctcacctcctgtcttagttcgggctgccatacactggatggcttagacaacagacacttatttatcacggttctaagggctgggaagtacaagatcaaggtgctggtagattcaatgcttggtgagggcctatctcctggcttgtagacagccaccttctcaccgaatgttcacgtggcctttcctcsgtgtgtgcttatggagacagtgagagaaagatatatcctgtctcttcctcttcttataagggcacaaatctcatcgtgagggtatcacccccatgccctcatctaaatctaattacttccctaaggacctacctcctattaccatcccactggagattagggtttccacatatgaattttgggggacacaaacatttaccccataacaccaccactccaacaatagccagcagtgtgaccttaggctggccactcatac

SEQ ID NO: 614984 - DNA, 575 bp, Homo sapiens
gcactctgtaccccacaggagggagttaagccaaaccttaagccacctaagtgataatgtacagtcaccctctccaaaagacactgggtggagaggaaagctacactaagagtcaggaggcctggtttctcacctcctgtcttagttcgggctgccatacactggatggcttagacaacagacacttatttatcacggttctaagggctgggaagtacaagatcaaggtgctggtagattcaatgcttggtgagggcctatctcctggcttgtagacagccaccttctcaccgaatgttcacgtggcctttcctccgtgtgtgcttatggagacagtgagagaaagatatatcctgtctcttcctcttcttataagggcacaaatctcatcrtgagggtatcacccccatgccctcatctaaatctaattacttccctaaggacctacctcctattaccatcccactggagattagggtttccacatatgaattttgggggacacaaacatttaccccataacaccaccactccaacaatagccagcagtgtgaccttaggctggccactcatac

SEQ ID NO: 614985 - DNA, 599 bp, Homo sapiens
ttattacatgagtataataaagcaatcatggaaaaaatgaacaggaaaatgcaattcttagaaataacatcaatcatggaccattttgtgattatctttccaagcctacagaagaaacaccactccccaagggtaggaatggaatttacctgtaagggaataaatgttctgtcaattattcaataaagttgttaacccaagagaaagaaatgatccagggttgtggatcattgctttctggtgatgcatgaggatttctccagcacggacagcctggagaagagtgggctgccctggtcatgccaagytgggccagagaaagcagtgtagccagcctccatgttttatcatcagcttcagggattgcagcagtacaggtacccccagtgcaggaagagagccacattcagagaagtcaacatctgaggcaacaggggcacagccctattatcaatggtgcaagcaaatagcagtgactctttggacacatggacactagggccatgccatgagaagagctgtagccttgcagaaggatattttccagcaggaagataggtgatagctactaagtctatagaaaattgatccatgtgagg

SEQ ID NO: 614986 - DNA, 527 bp, Homo sapiens
agctgtgctagtgcctgttaagctcacttcagctccagcttctcccccttttcttccatacaccccttggagcatgtcaggacacctggaagatgagtagtgcaaggaaattttcaccctgcctcaactacccaccacagcaaatggccatccatcagcagggatgtggatacgtgtgcgcacatgccccaggcgtacttcgtggttgctgtgcctatacatgcgtgtggtatgtgtcttgactgtgtggatggtgtttgggtgcctgtgtacatgttatgtagagcgtacactgcatgtttgtggaatagtgtgtgtggatgactcacatgtatttgacgtgtggctcgcttgcatgtatggtgttttgggagcctgkgtacacatgtatgtggagcatatactgcatgtgtgtggaaaccaatggctcatctgtgcatggtgtgggtctctgccatataatacattcgctgtttgagcttgtgtgctgtgtatgctgtgtctgtctttggggaggtggcatgcat

SEQ ID NO: 614987 - DNA, 527 bp, Homo sapiens
agctgtgctagtgcctgttaagctcacttcagctccagcttctcccccttttcttccatacaccccttggagcatgtcaggacacctggaagatgagtagtgcaaggaaattttcaccctgcctcaactacccaccacagcaaatggccatccatcagcagggatgtggatacgtgtgcgcacatgccccaggcgtacttcgtggttgctgtgcctatacatgcgtgtggtatgtgtcttgactgtgtggatggtgtttgggtgcctgtgtacatgttatgtagagcgtacactgcatgtttgtggaatagtgtgtgtggatgactcacatgtatttgacgtgtggctcgcttgcatgtatggtgttttgggagcctgggtacacaygtatgtggagcatatactgcatgtgtgtggaaaccaatggctcatctgtgcatggtgtgggtctctgccatataatacattcgctgtttgagcttgtgtgctgtgtatgctgtgtctgtctttggggaggtggcatgcat

SEQ ID NO: 614988 - DNA, 612 bp, Homo sapiens
cctcggcttctgcagaacaccccatactatcagaggaaacaataacagacacaagtttcagagggtttttatggggtcccagctcatgcctctgggttccagcttgtccttgctctccctcactttccatccatctttccttcacaatcttctgccttccggatctcaactccaatatcaggcatgatggcacaatgaccacagccttacagagactccacaaggtgtaaagtcaaatcctggtaataaatccctcatatgtggatatacattctcccaggagaaacatcagagacaaagtatagccatcagggttcaggcaaacccccagtaggagaatcctatggtagctttgctgcttctgagtggtggttgcacttctctgattgaatcctcattgatatcccttgactcagactcagattctgcttctgaaagaacctaaagcaagccagccatgaactctcaggatctacttggatgaatcagctggagctggagctccctcaggttgaccccctccycaccactggtgaggcccatatgcttcacaatcaagcttgatactcacaccccacactccctcctgtgctaagaaaacaacattggcgt

SEQ ID NO: 614989 - DNA, 541 bp, Homo sapiens
aaagaaccataagcaaaaaacaggctgactaattctaattcccagagctcacacagaactgggaatagacatcctaatacctggagcattgggtagaagccacagaagggaattgccttagtattggtgcttaattatgcctagactaaaagttgctttggacctaccataacaaacgtaaaagggttgaaaagatccaattcatttcaagtaaccaagcaccagaaaaaaaaaaccaacactatttaattaagtaaaaataaaaccagcaatcaacaaacaatatctttgtttgatcttcttggaatcccattagaagatcaaataataatacctagcattgaataaaaaattaccaggtatgcaaaaaaaaaaagaaaattttttctccataaccaraagaaaaatcaatcaatagaaacagacccacaaatggtgaaactagcagacaaggaaagtaaaacagctattacaaatatactacgtttttcagttaggtagagaaaaatatgaccatgataagaagaaaaatagaagatag

SEQ ID NO: 614990 - DNA, 612 bp, Homo sapiens
aaccctttccctactgagccaatgtgaaaactgccttcagtaaccctaaggaggaatggcatttacagagcagtccacatgccaggcactttccagcaactcattcaatcctcacaactacgttgtcaggtagagcccacctttagccccatttgaggaatctgagagtcagagggctgaagtaatatgtccatcttcacacagctagtaagtgacaatgacgggatttgcattccggtctgagttcagaggctggacttttaaccaatacagtacagtgcttcctgggaagatctaaaatggtcatatattggccgtaaggatcttccatgtgcaagatcragtttgctgtgaaataaaataagcatgaagttgcatctccaaagagaattatatggaggaggaaaagtttaatcttgaaacctttaaaatatattttcataaagccccaatcagtcactcttaaagaagctgagcctcacatatcacctgatatctgagccactgaaggaaagtaaaatcttcccttgacaagtgtgtaaactgggaagataaggaaggtaagagacaagtgtgactttcaagactgccaagaagagtaaggggagaatg

SEQ ID NO: 614991 - DNA, 561 bp, Homo sapiens
ctaatataaaatgtaccctttaattaattaattaattgttcattaataatcacttatttgttatctactatctctaaagccttgctctagacaaagtcgtaaacacaaaatgcaaaactctctaatttcctgaagtttaccttctattagaggagttaaaaataacatatttagactgttaatggagaaaaaattaactactcaataggtagcttttcaacccatgtccccctccttccctctccactccagtagtacagattatctattgtccccatgtttatacacacgtgtgctcaatgtttagcttccacttataagtgagaacacatggtatttgatttctgtttctgtgttatttgcttaggattatatsccagactttataaataaattctgtgtggtggtgtgggcaggtggtaataaagagatcaaactaggaacactccagaggtctggattctttcctcactattggtcccaaaaacatacgtttgttgtttccaaagtttcaacgaattatggttcttatggtctggggaacagaggctacctagaaaa

SEQ ID NO: 614992 - DNA, 551 bp, Homo sapiens
ttaagagtatcttggggcagggaagggcagatctccttgggagggagatattgaaactcctgtgtttgaagttaaatactttagtgtaattgaggatggctctatggatttgagatgattttccttttatttaagttgaagagtcatgagcttttatgatttaattttaattttataagccmatcctacatcttcatgatgttgtgctaaagcatggatttcagagtgaatgacattttggcaatggatatgatataatagcctcataattctgcatagaacccactaataaagctggtaactaagcagagcatccaggtcatttaggattatctagcattaggcctgattaattcttccagatgttttctaagtggtgcctataattagtgactaattcatttctttgttgtttacagttttgacaatttaaccagtctattttttatgggaagtctctaaggatggaatctaagttttttttttctagtcttctcagttctgtgataggccttagtgtatttttatttaagtaagtctgttgattctta

SEQ ID NO: 614993 - DNA, 551 bp, Homo sapiens
ttaagagtatcttggggcagggaagggcagatctccttgggagggagatattgaaactcctgtgtttgaagttaaatactttagtgtaattgaggatggctctatggatttgagatgattttccttttatttaagttgaagagtcatgagcttttatgatttaattttaattttataagcccatcctacatcttcatgatgttgtgctaaagcatggatttcagagtgaatgacattttggcaatggatatgatataatagcctcataattctgcatagaacccactaataaagctggtaactaagcagagcatccaggtcatttaggattatctagcattaggcctgattaattcttccagatgttttctaagtggtgcctataattagtgactaattcatttctttgttgtttacagttttgacaatttaaccagtctattttttatgggaagtctctaaggatggaatctaagttttttttttctagtcttctcagttytgtgataggccttagtgtatttttatttaagtaagtctgttgattctta

SEQ ID NO: 614994 - DNA, 596 bp, Homo sapiens
aaaataattggtatagtaaggctaaaaaaaaaagaatcaaatacatatgtagagaaacacggccttgtgtttttactttttgaatcctgaactactagatgacatgtaaaacccatatattcatgcaattaaatattaaaagcatattatattttttgaccagcatctcccttaaacagcatttctccagttaytgtagttgctgttttttaagatctatgagctgagccccaataagagaaacagttaaagagagtgaaggagactaaaagagtaacatccgtactcggatggaagagtctatggataaattaggaagctcccctttgagggctacttatttcaccaaaaacaaacccatgcttgcttaattttctgtagataattttgagagaaagacaagagggaaaaatctaactcataaaaatagatgtagtcatagggcaagaacaattctgaaaggttaaactttacttacaaatctttagtatttagccctccagtaaaaacctaaagttatagttaaaatgttcaaataaatttattggagactcaaggaggactacctatatcattttggggagaaacttccctta

SEQ ID NO: 614995 - DNA, 522 bp, Homo sapiens
ctcttttataaaacagctaaggttagccataagattcagtgaagctatttgaacttcaatgaaaatgctcaayccaaatatctgtgtcataacataatacatggcacgtgtctggagtttctaataatcctgaagaaataaaaaccccatatgttaatatgaaaacatttggagcaaagcgtaaaagtttttcttagtaatatattctgattttatgatttctggtagtgctggttagatgaaaggggtgaaaacgaattatatgttctgaaatgaagtgaaaaaatggttttatttttgtttgtttcatattttggagtttttacaatatcagtaagaatggtggctttccccccctagatttttaaattttttactaatttatttttaataagcaaataattgttgtatatatttatggggtaccatgtgatgtttgatctacatatacattttagaaagattccatcaagcaaattaacatatccaccaacttatttttttcatgatgagcagcattaa

SEQ ID NO: 614996 - DNA, 522 bp, Homo sapiens
ctcttttataaaacagctaaggttagccataagattcagtgaagctatttgaacttcaatgaaaatgctcaatccaaatatctgtgtcataacataatacatggcacgtgtctggagtttctaataatcctgaagaaataaaaaccccatatgttaatatgaaaacatttggagcaaagcgtaaaagtttttctyagtaatatattctgattttatgatttctggtagtgctggttagatgaaaggggtgaaaacgaattatatgttctgaaatgaagtgaaaaaatggttttatttttgtttgtttcatattttggagtttttacaatatcagtaagaatggtggctttccccccctagatttttaaattttttactaatttatttttaataagcaaataattgttgtatatatttatggggtaccatgtgatgtttgatctacatatacattttagaaagattccatcaagcaaattaacatatccaccaacttatttttttcatgatgagcagcattaa

SEQ ID NO: 614997 - DNA, 522 bp, Homo sapiens
ctcttttataaaacagctaaggttagccataagattcagtgaagctatttgaacttcaatgaaaatgctcaatccaaatatctgtgtcataacataatacatggcacgtgtctggagtttctaataatcctgaagaaataaaaaccccatatgttaatatgaaaacatttggagcaaagcgtaaaagtttttcttagtaatatattctgattttatgatttctggtagtgctggttagatgaaaggggtgaaaaygaattatatgttctgaaatgaagtgaaaaaatggttttatttttgtttgtttcatattttggagtttttacaatatcagtaagaatggtggctttccccccctagatttttaaattttttactaatttatttttaataagcaaataattgttgtatatatttatggggtaccatgtgatgtttgatctacatatacattttagaaagattccatcaagcaaattaacatatccaccaacttatttttttcatgatgagcagcattaa

SEQ ID NO: 614998 - DNA, 592 bp, Homo sapiens
aaaatctccaaactgctttccacaggggctgaactaatttacattcccaccaacagtctataagtgtttccttttctctgcgtccatgccaacatgtgttagtttttgactttttaataatagccattctgactggtgtcagatggcatctcatggtggctttaatttgcatttctctgatgattagtaatgttaggcattttttyatgtttcttggccacttgtatgtcttcttttaagaagtgtctcttcatgtgctttgcctactttttaatggggttattttcttgttggtggtgatttaagttaagatattaatcttttgttggatgcataattttttaacatttttccacattctgtaggttgtctgtttactctgttgatagtttcttttgctgtgtagaagctctttagtttgattaagtcccacttgttaatttttgtttttgttccatttgcctttgaggtcttaatcataaattatttgcctaggtcaattccagaagagtttttaaccaggtcttctcgtagggcttttatagtttaaggtcttacacttgtctttaacccatcttgaattaagttttgt

SEQ ID NO: 614999 - DNA, 573 bp, Homo sapiens
tgtgtgtctgaaatagggtagccagactttctacatgcttaagggctcccaaagcataaaagcagaacctgtccaaacttcctaaggcttaggttcaactgaagcgtctcctcagccacattctactggttacgacaagttcattttatttttcaagcaccctataaactaagtacagaaaaaggaaatgaaatgtaagttgttctgagattggtgatctcaagtaaattatgtatgctgtgcctcagtttccttatctgtaaaaagaagataataataacagcccatagaatttttatgaggacgaaataagtcaacctaaagggtttagaacagtgtttggcacttaatgatatggttgggctgtgtccccacccaaatctcatcttaattgtagctcccataatttccacttgctgtgggagagacccagtgggagataattgaatgatggtggcagttttctccataccrttcttgtggtagtgaataagtctcatgagagctgatggttttataaggggaaacccctttttctttgttctcattctctcttgtctgctgccatgtaag

SEQ ID NO: 615000 - DNA, 541 bp, Homo sapiens
atgctcttcagtgcttgagaacagttatgtcatatattttgttccattttgtagattttatttgccagtagagaaagtctatataagttgttctgtcatgcccatatctacttttgcattgcttccaaaatgatcwgaatgaaacaaaaatctatgatatcattgctcactttaacacttactattgtcatccattgcctatataatgacattcaaactcctaaatatgagactcaagatcccttaatttataacttttctggaatcactttccatactcttttcctgtagtctctgcctgttcaaccctaatggttttcaatgtaatgtgcatgaggatcatatagtaacatacgtttaaaatgaatatttccctttctactttactctcatttaaattggtacatctagggtattctaggaatctaaatttttaacaaacaacctaggaattttgatgtaaacaatctaggtctacatattgtggattactgttcaagcgtggcaactcaaattatggtcacatgatcagtagcatcca

SEQ ID NO: 615001 - DNA, 514 bp, Homo sapiens
atgtacagatttttttctgaaaaatctaacatatttttggtacatgttagattttcacaataaaatttttaaaatgtcaaaggaataattttagtatttactaataaatatatttaataaatacaaaaacattgttctaaagaattcagacagaattatatcttcaaagggaggaaaatttttctcactactcatattgttaaactgcaaaatatcactggcttttgagttatctcccttcctctggaccccgcacacattctcttccttttttattaacattagatgtgactacatgaattctagaaataggttaacagctgtgattaaaatcaagatttttaaaaatctcaacaaattttaatgctttttatcacattttaaaggaagcactttgttcttgttaaacaagtcaatgcatccatcagtgataaatgggaacaaaaaawtttttttattatactttaagttctagggtacatgtgcacaacgtgcaggtctgttacatatgtat

SEQ ID NO: 615002 - DNA, 458 bp, Homo sapiens
aattgttaagtttcccaacccaggacgcgcttaaaatgagctactttatcattataattttgacaacgctggtataaggtttgtgatcagaagaattttctctatcattcaatgtatttaaatgatgactagcaagtactgggctgggttctaagaatttagagtatttaacaaatagttcttgcccacaatcaggtyttaacaaaacactcagccaattaattcgaattttaaaacgattctgtattggtgatttcagcatgtacctaaactgtgcaaccttagatggggggctgagagagctggatcttggggagagcagaggctgcagaagccaggagtgaagagtcacctggcaggtaatcggaggggtagagggttgtgataaattaccacagcatccgctatctactgggaggccagagcacctaaggacagaatgctcagtgcaatccata

SEQ ID NO: 615003 - DNA, 490 bp, Homo sapiens
ggttcacgccattctcctgcctsagcctcccgagtagctgggactgcaggcacctgccaccacacccagctaattttttgtatttttagtagagacagggtttcaccatgttagccaggatggtctcgatctcctgacctcgtgattcgcccacctcggcctcccaagtgctgggaatacaggcgtgagccaccacgcccagccatcaacaacagaaatttatttcttacagttttggagactggaaagtccaagatcagtgtaccagcatgctcaaggtttgatgaggccctgcttccaggctcatagttggctgtcttcttgctgtgtcctcacatagtagaaggggcaaggaagctttgtggggtctcttttataagggcactaatctcttattgtccttataaaacataagtaaagcaatgaaatagaaacagataatttagtcaaaactgaaactggagggagaagaatagctttcgtggaggag

SEQ ID NO: 615004 - DNA, 573 bp, Homo sapiens
ttcacaattgcaacaacaaaaaattaaatatctaggagtatagctaaccacagaagtgaatgatttctacaagaagaagtaaaaaacactgctcaaagaaatcaaagatgacacaaacaaatggaaaaacattccttgctcgtgaagagaatcaatattgtgaaaatggccatactgcccaaagcgatttatagatgcaatgctattaccatcaaaatgctattgacattcttcacagaattagaaaaaaactattttaaaactcatatggaaccaaaaaagagcccaaatagctaaggcagtcctaagcaaaaaaaacaaaactggagacatcatgctacatggcttcaactatgctacagggctacagtaaccaaaacagcagcatgatactggtactagaacagatgcagagaccaaggaacataatagagaacccagaaataagactgcaagcctacaactatctaatcttcaataaacctagcraaaacaagcaattgggaaaggatttcctattcaataatggtgctgggataactggctagccatatacagaaaattaaaactaga

SEQ ID NO: 615005 - DNA, 463 bp, Homo sapiens
taaatagcaacaaccaaaacagactaaaagctctgctctcaaggggcttacattctaatagaatgagacagacaataaataagtaaaatatataacagtaatttgtcacatagtratatcaaggaagtatagagcaaacagacacactagaagagggatggggtgctggggtggagagtaggtgctgttattttaaacagggagagtatggaagccttactgataaagtgaattttgagcaaaactctaaaggaggtaaggctatggggacacaatactacaggcagagaaataaagaccaaaagtcctgatgtgaagcatgcttgtgtctaagaaacatcatcaaggctggtgtgtttagagtaaactgaatgagaagaaaaacaggagagcatcacagaattatttaggtcactggtggtgaaaataaggacctgggcttctactgagtgtaacgggaagc

SEQ ID NO: 615006 - DNA, 619 bp, Homo sapiens
tttctttttttttttttttttgtatttttcttcagtttctttaatcartgttctatagttttcattgtagagatctttcacttctttggttaagtgaattcctaggtatttacttttatttgtaatcattgtacatgggattactttcttgattttttttttttttttttagattatttgctgttggcatatagaaatgctacggaattttgtatgttaatttttttttttaagttctgggatacacgtgcagaatatgcaggtttgttacataggtatacatgtctccctccccttgccccccactccccaacaggcccctgtgtgtgatgttccccttcctgtgtccacgtgttctcattgttcaactcccgcttatgagtgagaatgtgtggtgtttggttttctgtttctgttttagtttgctgaggatgatagcttccagcttcatccatgtccctgcaaaggacatgaactcattcttttttgtggcttcatagtattctatggtgtatatgtgccacattttctatatccagtgtatcattgatgtgcatttaggttggttccaagtctttgctattgtaaataatgctacaataaacatacatgtgcatgt

SEQ ID NO: 615007 - DNA, 501 bp, Homo sapiens
ttgtttgatttgcctttgcttttcacctttwtccaggagaacagcctatttccactatagtctgatgctccagtttggttcttagaacagagaaaagcaaatgtaatgtgaagaagccatagatctttgtttttggaaggtgtcaggtttttttttttttcctgcagaattatgtaaagcagctgctcgaaaccctctgttagtgtttcctgtcaaacctggtctttaaagggatagtcctaatttaatcacatggcctactcaactcctgagacagcatcactgcaatggtttgaatatttgtcccatccaaagttcatgttgaaatttagtcctcagtgtgggacattgggctctgccttcatgaatgaattaatccaattctcatgaatgaattaatccactcaggtattaatgggttattatgggaatgcgactgttggccttataagacgaagagagacctgagctagtatgctcagcttctttgccatgtgatgt

SEQ ID NO: 615008 - DNA, 535 bp, Homo sapiens
tgatttgatttttgagtatggtgagaaatgagggtctagtttcattcttctgcatatgtatatccagttttcccagtaccatttattgaagagactstcctttccccaatgtatattcttggtgtctttgttgacaatgagttcactgtagatgtatgcctatatttctgagttctgtattctgttccattggtctatgtgtctgtttttatgctagtgccatgttttggttactatagctttgtagtataatttgaaatcaggtaatatgatccatccagtttagttctttttgctcaggatatctttggctattttgggtctttggtggttccatataaagtttagaattgtttttttctatttttgtgaagaatatccttggtattttgatagggattgcattgaatctgtagatggctttgggtagtatggacattttaataatattgattcgtccaatccaagaacatggaatgtcttttctttctttttttttttttttttgtatttttcttcagtttctttaatcagt

SEQ ID NO: 615009 - DNA, 615 bp, Homo sapiens
gcgtgcctacttgtactgtgctgctgctctcataactgggtttagggtagaaaagaaaaaascaaaccctggacacaagagctaacctggctagggaaagttgaagctatgatgagtgacggtcttctcttcactgcatagtcattttttcaatgaatatttaaccactttctaatctcgggtgcattatttacactaaccaatatttacccaatcagtacaaattaatccctctgaggtaaataatagaacatattattaaagaattcacatatttcaaatatttgagaatctcatggacactgataagtgctgacaaagaaaactacataccttctatcctaatgaccaaggtacaggcatgatgctagggtatggtcaggatcgaggaccaatttactggccactagtgccaaggatgtggtataccctactcttgggtgtcacatcttgggaccttcttccacaaatataaggctttaggccgattcattcatggaagaaggctctatcttaatttatctcctctcatctaacttctgccttgcttcataaaatagagcactggtcaggcacgttggctcacatccgtaatcccagcactttgggagaccg

SEQ ID NO: 615010 - DNA, 615 bp, Homo sapiens
gcgtgcctacttgtactgtgctgctgctctcataactgggtttagggtagaaaagaaaaaagcaaaccctggacacaagagctaacctggctagggaaagttgaagctatgatgagtgacggtcttctcttcactgcatagtcattttttcaatgaatatttaaccactttctaatctcgggtgcattatttacactaaccaatatttacccaatcagtacaaattaatccctctgaggtaaataatagaacatattattaaagaattcacatatttcaaatatttgagaatctcatggacactgataagtgctgacaaagaaaactacataccttctatcctaatgaccaaggtacaggcatgatgctagggtatggtsaggatcgaggaccaatttactggccactagtgccaaggatgtggtataccctactcttgggtgtcacatcttgggaccttcttccacaaatataaggctttaggccgattcattcatggaagaaggctctatcttaatttatctcctctcatctaacttctgccttgcttcataaaatagagcactggtcaggcacgttggctcacatccgtaatcccagcactttgggagaccg

SEQ ID NO: 615011 - DNA, 615 bp, Homo sapiens
gcgtgcctacttgtactgtgctgctgctctcataactgggtttagggtagaaaagaaaaaagcaaaccctggacacaagagctaacctggctagggaaagttgaagctatgatgagtgacggtcttctcttcactgcatagtcattttttcaatgaatatttaaccactttctaatctcgggtgcattatttacactaaccaatatttacccaatcagtacaaattaatccctctgaggtaaataatagaacatattattaaagaattcacatatttcaaatatttgagaatctcatggacactgataagtgctgacaaagaaaactacataccttctatcctaatgaccaaggtacaggcatgatgctagggtatggtcaggawcgaggaccaatttactggccactagtgccaaggatgtggtataccctactcttgggtgtcacatcttgggaccttcttccacaaatataaggctttaggccgattcattcatggaagaaggctctatcttaatttatctcctctcatctaacttctgccttgcttcataaaatagagcactggtcaggcacgttggctcacatccgtaatcccagcactttgggagaccg

SEQ ID NO: 615012 - DNA, 302 bp, Homo sapiens
tattgattggctccctacagtttcaacagatgacgagatcagaggtgtaacacctggtcgactacgccctagtctggatgaaaacagtgcagggtatttgattacccatctggcagttggaatcctggctctgcagttgcttcctcccgcctgatcatrggcaagccatgtcagcaatctaagcctcagcctctccatttagtgaaaggaggtgataataccgacctcatgaaattgttgtaaggatcaaatgaaataatgcatgtgaaaaatgtaaggtgtgtgagctattaacatgaatt

SEQ ID NO: 615013 - DNA, 302 bp, Homo sapiens
tattgattggctccctacagtttcaacagatgacgagatcagaggtgtaacacctggtcgactacgccctagtctggatgaaaacagtgcagggtatttgattacccatctggcagttggaatcctggctctgcagttgcttcctcccgcctgatcataggcaagccatgtcagcamtctaagcctcagcctctccatttagtgaaaggaggtgataataccgacctcatgaaattgttgtaaggatcaaatgaaataatgcatgtgaaaaatgtaaggtgtgtgagctattaacatgaatt

SEQ ID NO: 615014 - DNA, 503 bp, Homo sapiens
acctctctccaaccccatagaaattacattagtctttatcttttacctgtgttacaggatcccagtgtccttcaagaccaccttggatgtttcttcagtctgtcctcaggaagaagggaggagagccttctaaaatgcaaatttaatcacatgactccccagcttaaaactctcagcyggctatttcttccccggccccacccccaagatctcctcacactgggtaacactggatatggaattccttttagttgcttaaacaaatcaatctagttctgtctcacgagctctctctagaatatcctctcacctgttcacttaattccttactcatcccccatcatagcaccagaaagccctccaggcaggaacagttactcctgctctctgctcccattgcccacaggcattcctccaccctctgtcattccttgtttttcattgttttccccactagactgaaagctctgtaggttctgtgttactctgtgtatgttgggtga

SEQ ID NO: 615015 - DNA, 507 bp, Homo sapiens
gtactgtaaaagaaataacaataaagccttggtgacattaaataggaaacatttattgctcatacgtctggagcctattggaagttggttaggtgactctgctaatcttggtttggctcgctcacatgtccaagggtaagctgtctgttagctgatctaggatgctttatatgagctagcagatgaatcatttctgctccacctgtttctcaaccttcarcataattgtcctgagatgttctcatgttgatggcagagataaaacagcaaggacaaatccaattacttaagcacttgtcaagtctctgcttgtattatgtttgctaacaactcatgagcccaagcaaatcacatggcgaggcacagattcaaggggttcaataaagagtcaggacacaaaatatatcactgtgttgggtaaagcttcctcctttcttccttccttccttcctttattccttccctcctttcccaaagtttctttctttttttttcaacttttatttt

SEQ ID NO: 615016 - DNA, 602 bp, Homo sapiens
tctcagtaggacattcacataacacttaaccttgagcaattaacccttttttggtgcgtccttcaaggttaactgattgttgcatatatgcatcagcaatggaagaattaacttgccacatatggttaatcagatgcagtcaaatgttagaggatttctgtcaaaaccagtgacttttgttacagaacaggtgagctacgtctcttttgtaagtctataattatatctataattagataaggagaacaataatcttttaaggctatttctaattcaggacagtaatgccatttaaaaattgttaattgtggtaaaatacatgtaacacaaaatttacaatcttaagcatctttaagtgtatagtttaggagtattaagtacattcacattgttgtgcaatcatcaccctctccagaactytccatcttgcaaaactgaaactctgtgcccattcagcaataactctcaattcccatttctcctacccccggcaactatttttctactttttgtctccgtgaacttgaccataaatacctcatataagttgaagtacctcatataagtggaatcatgcagcttttgtctttttgtgactgtct

SEQ ID NO: 615017 - DNA, 386 bp, Homo sapiens
agatctctacaaggcaaactacaaaacactgatgaaaaaatcatagatgacacaaacaaatggagaaatatcccatgctcatggaccagaagaatcaatattgttaaaatgaccatattgcccaaagaatctacagattcaaggcaatcmgtatcaaaataccaaccttattcttctcagattagaaaaacaatactttttaaaaaaaaaaatttttttttagacacggttttcactttgtcacccaggctggcattcagtggcgtgatcttggctcactgcaacctctgcctcccagattaaagtgattctcccgcctcagacttccgagtagctgggattacaggtgcccatcaccacccctgtctaatttttgtatttttagt

SEQ ID NO: 615018 - DNA, 531 bp, Homo sapiens
ctaaactgatggcattccaccattgtgatttgttcctgccccaccctaactgatatgatatattctcccctgcccttaggaaggtactttgtaatattctccccgcccttgggaatgtactttgtaygcctatcccaaacctataagaactaatgataatcccaccaccttttgctgactctcttttcagactcagcccgcctgcacccaggtgattaaaaagctttattgctcacataagcctgtttggtggtctcttcacacggacgtgcgtgacaatatagatgttcactgacagggggtcttatccaagaaccgtccatcccttgggtggcctccaatctcctccagggggatgggaggcactgtagcctgaacagggccaatagatgtggatttttttaggggtggaggaaaggagggcaatggcttttctattgggggaggaaaaagctccggtctgtcctcatcatcactagaaagtgtcctccttatgccctacggaagggaatgaagtagggagaggagccc

SEQ ID NO: 615019 - DNA, 559 bp, Homo sapiens
aatatttttatcttttcagtcaactgaattgattttcttcattttgtcttcttgccactcttgatgcacacacgagaggacctaagataatttttttttttttttttttttgkgagaagcagtttcactcttgttgcccaggctagagtgcaatggcatgatcttggctcactgccacctccgcctctgaggttcaagtgattcttatgcctcagcctcccaagtagctgggattacatgcatgcgctaccgtgcctggataatttttgtatttagtagagatggggtttcactatgttggtaaggctggtcttgaactcctgacctcaggtgatccacctgcctcagtctgtcaaagtgctgggattacaggcatgtaccactatgtctggccagacttaagataattacttttttctttttttgttgttttttttgagatggagtctcactctgtcgcccaggctggagtgcagtggcacaatctcagttcactacaacctttgccacctgggttcaagtgattctcgtgcctcagccccctgagtagctgggacta

SEQ ID NO: 615020 - DNA, 559 bp, Homo sapiens
aatatttttatcttttcagtcaactgaattgattttcttcattttgtcttcttgccactcttgatgcacacacgagaggacctaagataatttttttttttttttttttttgtgagaagcagtttcactcttgttgcccaggctagagtgcaatggcatgatcttggctcactgccacctccgcctctgaggttcaagtgattcttatgcctcagcctcccaagtagctgggattacatgcatgcgctaccgtgcctggmtaatttttgtatttagtagagatggggtttcactatgttggtaaggctggtcttgaactcctgacctcaggtgatccacctgcctcagtctgtcaaagtgctgggattacaggcatgtaccactatgtctggccagacttaagataattacttttttctttttttgttgttttttttgagatggagtctcactctgtcgcccaggctggagtgcagtggcacaatctcagttcactacaacctttgccacctgggttcaagtgattctcgtgcctcagccccctgagtagctgggacta

SEQ ID NO: 615021 - DNA, 584 bp, Homo sapiens
atctctaattgatttccccttcctcataccgtgtatatagtaagccacttttctcatttggcataatcatttccatattttgataaattttgaatttataaatgtttaaattttatctataacaacatagagaaatatawttaaatttaaaaatatattaagtataactaataaatataagtacatatttaaattgtatacattatatattttaatttttatagttaaaaaacgtatctataaaattttatcagcacattgggaggccaaggtgggcagatcattggaggtcaggagttcgacaccagcctggccaagatggtgaaaccccgtctctactaaaaatacaaaaattagccaggcctggtggcaggcgcctgtagtcccagctacttgggaggctgaggcacgagaatctcttgaacccaggaggcagaggttgcagtgagccaaaatcacgccactgcactccagccagggagacaagaatgacactccgtctcaaaaagaaaaaaaaaattattacagataaaaaatatttaaattttgtaaatatatttaaatatgtatatatggtttacatt

SEQ ID NO: 615022 - DNA, 439 bp, Homo sapiens
gtatttctttatagcaatgcagaagagactaatacacgggattagatactaaaggtgttataccaaggatgataaacataagactaaataccaatggtgctataccaagaaggagacatataagaatcaaaaggattaytttattaatataaaagggctttctagaaattgaaattttaccatttcggctcaaacctagaaaatagttttaataagctgctagagagaaaatcaatctggagtccatcatggcctacagttaatgagcttaaaatatcacttctcctggcacacaataaaggaagacttgatggctcaaaaggatgagaatgttggaatagatctaccctgtagaactttcttagccaccatctaaaagtactgtctaaagagcttttcacagatttattaaccaatgcattgatgagaggaatgcaac

SEQ ID NO: 615023 - DNA, 551 bp, Homo sapiens
gctggcatatccatcttctgtcattcattggtcatcagacctccaggttctctagctttggactctaagacttgcagaagccccgtggattctagggctttcacccttacactgagagttataccatcagctttcctggttctgaggctttcagacttggaccaggccagactacccaccttcctagttctccagcttggagatggcctattgtgagacttctcagcttctataattgcataagccaattcccctaataaatcccttctcatgtgtctatctattgttattagttctctctggagaatcctaatacacatactattagtgataatattggtattgttaatatgacaaccatacaaatatatattacrtatataaaatgatacagcaagtgagttaaaaggaaaaaacacacacacattttttgggccaggcgcagtgactcacacctgtaatcccagcactttgaggggccaaggcaggcggatcacctgaggtcaggagttcgagaccagcctggccaacatcgtgaaaccctgtctcta

SEQ ID NO: 615024 - DNA, 452 bp, Homo sapiens
aatggaaaagcaaagctatttaaacacacacagtcataagtcaaggacatccattgtgatggagggggtggggctggttggggcaatgcaaaaaggatgggcaggtgggtgggttcaggctgacatctgttacatttgtgcagttttttggcttaagtacagttactcacattcattgacagtaattcttgaaatacttcattcattgctagcaattctgagataatttrtttcaaagatttatttctaagacagaaatattgatatttctatgcagatcatgaacttgtaataacttctatttgtttgatttattttactcagcctcctgcattcctttggtagctttttgtattgacacgattggtgtgagcaactaagtatgtgtaagtaaatttaaatatatgtttgatcaaaaccctgaaggtattttttttttctagattaaagga

SEQ ID NO: 615025 - DNA, 429 bp, Homo sapiens
tttcattggcccatataaatggaaaagcaaagctatttaaacacacacagtcataagtcaaggacatccattgtgatggagggggtggggctggttggggcaatgcaaaaaggatgggcaggtgggtgggttcaggctgacatctgttacatttgtgcagttttttggcttaagtacagttactcacattcattgacagtaattcttgaaatacttcattcattgctagcaattctgagataatttgtttcaaagatttatttctaagacagaaatattgatatttctatgcagatcatgaacttgtaataacttctatttgtttgatttattttactcagcctcctgcattcctwtggtagctttttgtattgacacgattggtgtgagcaactaagtatgtgtaagtaaatttaaatatatgtttga

SEQ ID NO: 615026 - DNA, 600 bp, Homo sapiens
gctactataaacattcatgttcaaaagagataaaatgggagcctctaaggagtccataaaaattctgaaatccagccaggcaaattggaaagtactctattagctctcaaagtctgggaagaattcactgtggctccctgctcctctcttcgggctcttatttccacccccataattttatttttacaaacaggcagcacatgcstgtagctgagcagttctctcagtcttcttcttgctggtaaaactctgggggttcaatggcctctcctaactccatactattatttttctcctcaggcccagctggcaatgatgctggaaatgtaacccttctgagaattttgctggacttttccatatattcgttagacaaacttacaccacaagtctctttaagagtaccccttctctaccttgggctcctgctagacagctgagggacagtgcccttaagcttcacagaaatccttttgtttgatttatagaagctgcatggcagacaatctatttttattttatttatacaaagttccaaagaatcaaaactcagctatcgtatttagagattcccacttaaatatcataactgcacggaaa

SEQ ID NO: 615027 - DNA, 586 bp, Homo sapiens
  misc_feature 375, 376, 377, 378, 379, 380, 381, 382, 383, 384, 385, 386,387, 388, 389, 390, 391, 392, 393, 394, 395, 396, 397, 398,399, 400, 401, 402, 403, 404, 405, 406, 407, 408, 409, 410,411, 412, 413, 414, 415, 416, 417, 418, 419, 420, 421: n = A,T,C or G
  misc_feature 422, 423, 424, 425, 426, 427, 428, 429, 430, 431, 432, 433,434, 435, 436, 437, 438, 439, 440, 441, 442, 443, 444, 445,446, 447, 448, 449, 450, 451, 452, 453, 454, 455, 456, 457,458, 459, 460, 461, 462, 463, 464, 465, 466, 467, 468: n = A,T,C or G
  misc_feature 469, 470, 471, 472, 473, 474: n = A,T,C or G
cacatcaatgttgcatcttcaaatctawgaacatggtagatctttacatttatttaagtcttctgtaatgtttctctacaagaaattttaaaaagttttagtgtgaaagatttttaaaggtttcacttaaattattcttaactatttttataccattaaaattttacttttaaatgtattctcaattgtttatttctagtatttagaaattccattaattttccatattgtattttgtgtattgaccttgcattctacacattctgcaccattattgaatttgattcttattattcacagctttttaaataaatatattaggattttcttcatatacaatatacatatatatgttctgtgaataaaaaatttttnnnnnnnnnnnnnnnnnnnnnnnnnnnnnnnnnnnnnnnnnnnnnnnnnnnnnnnnnnnnnnnnnnnnnnnnnnnnnnnnnnnnnnnnnnnnnnnnnnnncctttgactccatgtctcacatcctgatcatgcagatgcaagaggtgggttcccatggtattgggcagctctgcccctgtggctttgcgggatatagcctgccttctggctg

SEQ ID NO: 615028 - DNA, 503 bp, Homo sapiens
  misc_feature 212, 213, 214, 215, 216, 217, 218, 219, 220, 221, 222, 223,224, 225, 226, 227, 228, 229, 230, 231, 232, 233, 234, 235,236, 237, 238, 239, 240, 241, 242, 243, 244, 245, 246, 247,248, 249, 250, 251, 252, 253, 254, 255, 256, 257, 258: n = A,T,C or G
  misc_feature 259, 260, 261, 262, 263, 264, 265, 266, 267, 268, 269, 270,271, 272, 273, 274, 275, 276, 277, 278, 279, 280, 281, 282,283, 284, 285, 286, 287, 288, 289, 290, 291, 292, 293, 294,295, 296, 297, 298, 299, 300, 301, 302, 303, 304, 305: n = A,T,C or G
  misc_feature 306, 307, 308, 309, 310, 311: n = A,T,C or G
ttacttttaaatgtattctcaattgtttatttctagtatttagaaattccattaattttmcatattgtattttgtgtattgaccttgcattctacacattctgcaccattattgaatttgattcttattattcacagctttttaaataaatatattaggattttcttcatatacaatatacatatatatgttctgtgaataaaaaatttttnnnnnnnnnnnnnnnnnnnnnnnnnnnnnnnnnnnnnnnnnnnnnnnnnnnnnnnnnnnnnnnnnnnnnnnnnnnnnnnnnnnnnnnnnnnnnnnnnnnncctttgactccatgtctcacatcctgatcatgcagatgcaagaggtgggttcccatggtattgggcagctctgcccctgtggctttgcgggatatagcctgccttctggctgcttttgtgggctggtgttgagtgtctgtggctttcccaggcacatggtgttgttggtggatctaacattctgaggtctgg

SEQ ID NO: 615029 - DNA, 503 bp, Homo sapiens
  misc_feature 212, 213, 214, 215, 216, 217, 218, 219, 220, 221, 222, 223,224, 225, 226, 227, 228, 229, 230, 231, 232, 233, 234, 235,236, 237, 238, 239, 240, 241, 242, 243, 244, 245, 246, 247,248, 249, 250, 251, 252, 253, 254, 255, 256, 257, 258: n = A,T,C or G
  misc_feature 259, 260, 261, 262, 263, 264, 265, 266, 267, 268, 269, 270,271, 272, 273, 274, 275, 276, 277, 278, 279, 280, 281, 282,283, 284, 285, 286, 287, 288, 289, 290, 291, 292, 293, 294,295, 296, 297, 298, 299, 300, 301, 302, 303, 304, 305: n = A,T,C or G
  misc_feature 306, 307, 308, 309, 310, 311: n = A,T,C or G
ttacttttaaatgtattctcaattgtttatttctagtatttagaaattccattaattttccatattgtattttgtgtattgaccttgcattctacacattctgcaccattattgaatttgattcttattattcacagctttttaaataaatatattaggattttcttcatayacaatatacatatatatgttctgtgaataaaaaatttttnnnnnnnnnnnnnnnnnnnnnnnnnnnnnnnnnnnnnnnnnnnnnnnnnnnnnnnnnnnnnnnnnnnnnnnnnnnnnnnnnnnnnnnnnnnnnnnnnnnncctttgactccatgtctcacatcctgatcatgcagatgcaagaggtgggttcccatggtattgggcagctctgcccctgtggctttgcgggatatagcctgccttctggctgcttttgtgggctggtgttgagtgtctgtggctttcccaggcacatggtgttgttggtggatctaacattctgaggtctgg

SEQ ID NO: 615030 - DNA, 503 bp, Homo sapiens
  misc_feature 212, 213, 214, 215, 216, 217, 218, 219, 220, 221, 222, 223,224, 225, 226, 227, 228, 229, 230, 231, 232, 233, 234, 235,236, 237, 238, 239, 240, 241, 242, 243, 244, 245, 246, 247,248, 249, 250, 251, 252, 253, 254, 255, 256, 257, 258: n = A,T,C or G
  misc_feature 259, 260, 261, 262, 263, 264, 265, 266, 267, 268, 269, 270,271, 272, 273, 274, 275, 276, 277, 278, 279, 280, 281, 282,283, 284, 285, 286, 287, 288, 289, 290, 291, 292, 293, 294,295, 296, 297, 298, 299, 300, 301, 302, 303, 304, 305: n = A,T,C or G
  misc_feature 306, 307, 308, 309, 310, 311: n = A,T,C or G
ttacttttaaatgtattctcaattgtttatttctagtatttagaaattccattaattttccatattgtattttgtgtattgaccttgcattctacacattctgcaccattattgaatttgattcttattattcacagctttttaaataaatatattaggattttcttcatatacaatatacatayatatgttctgtgaataaaaaatttttnnnnnnnnnnnnnnnnnnnnnnnnnnnnnnnnnnnnnnnnnnnnnnnnnnnnnnnnnnnnnnnnnnnnnnnnnnnnnnnnnnnnnnnnnnnnnnnnnnnncctttgactccatgtctcacatcctgatcatgcagatgcaagaggtgggttcccatggtattgggcagctctgcccctgtggctttgcgggatatagcctgccttctggctgcttttgtgggctggtgttgagtgtctgtggctttcccaggcacatggtgttgttggtggatctaacattctgaggtctgg

SEQ ID NO: 615031 - DNA, 503 bp, Homo sapiens
  misc_feature 212, 213, 214, 215, 216, 217, 218, 219, 220, 221, 222, 223,224, 225, 226, 227, 228, 229, 230, 231, 232, 233, 234, 235,236, 237, 238, 239, 240, 241, 242, 243, 244, 245, 246, 247,248, 249, 250, 251, 252, 253, 254, 255, 256, 257, 258: n = A,T,C or G
  misc_feature 259, 260, 261, 262, 263, 264, 265, 266, 267, 268, 269, 270,271, 272, 273, 274, 275, 276, 277, 278, 279, 280, 281, 282,283, 284, 285, 286, 287, 288, 289, 290, 291, 292, 293, 294,295, 296, 297, 298, 299, 300, 301, 302, 303, 304, 305: n = A,T,C or G
  misc_feature 306, 307, 308, 309, 310, 311: n = A,T,C or G
ttacttttaaatgtattctcaattgtttatttctagtatttagaaattccattaattttccatattgtattttgtgtattgaccttgcattctacacattctgcaccattattgaatttgattcttattattcacagctttttaaataaatatattaggattttcttcatatacaatatacatatatawgttctgtgaataaaaaatttttnnnnnnnnnnnnnnnnnnnnnnnnnnnnnnnnnnnnnnnnnnnnnnnnnnnnnnnnnnnnnnnnnnnnnnnnnnnnnnnnnnnnnnnnnnnnnnnnnnnncctttgactccatgtctcacatcctgatcatgcagatgcaagaggtgggttcccatggtattgggcagctctgcccctgtggctttgcgggatatagcctgccttctggctgcttttgtgggctggtgttgagtgtctgtggctttcccaggcacatggtgttgttggtggatctaacattctgaggtctgg

SEQ ID NO: 615032 - DNA, 505 bp, Homo sapiens
catagaagaatgaaaagcactggaaatggtatcaacatggttaaatatataagatccttttatttctgtttgaattcaattgattgtttaaacaaggggtcagcaagctatagcttcatgggtggactgcctgtttatgtgaacaaatttttactgagayacattcatgctcatttgtttatgtattatcaatgggtgctatagaattacaaaagcagaattaagtagttgtaacagagcctaatggcacacaagcctaaaatatttagcttttaaggaaagcatgtccggttctggtggctcatgcctgtaatcccagcattttgggaggccgagatgggcggatcacgaggtcaggaaattaagaccatcctgggcaacatgatgaaaccccgtatctactaaaaatacaaacattagctgggtgtggtggcatgtgcctgtaatcccagctactcgggaggctgaggcaggacaatcgcttgaacccaggaggcagaggttg

SEQ ID NO: 615033 - DNA, 505 bp, Homo sapiens
catagaagaatgaaaagcactggaaatggtatcaacatggttaaatatataagatccttttatttctgtttgaattcaattgattgtttaaacaaggggtcagcaagctatagcttcatgggtggactgcctgtttatgtgaacaaatttttactgagacacattcatgctcatttgtttatgtattatcaatgggtgctatagaattacaaaagcagaattaagtagttgtaacagagcctaatggcacacaagcctaaaatatttagcttttaaggaaagcatgtccggttctggtggctcatgcctgtaatcccagcattttgggaggccgagatgkgcggatcacgaggtcaggaaattaagaccatcctgggcaacatgatgaaaccccgtatctactaaaaatacaaacattagctgggtgtggtggcatgtgcctgtaatcccagctactcgggaggctgaggcaggacaatcgcttgaacccaggaggcagaggttg

SEQ ID NO: 615034 - DNA, 505 bp, Homo sapiens
catagaagaatgaaaagcactggaaatggtatcaacatggttaaatatataagatccttttatttctgtttgaattcaattgattgtttaaacaaggggtcagcaagctatagcttcatgggtggactgcctgtttatgtgaacaaatttttactgagacacattcatgctcatttgtttatgtattatcaatgggtgctatagaattacaaaagcagaattaagtagttgtaacagagcctaatggcacacaagcctaaaatatttagcttttaaggaaagcatgtccggttctggtggctcatgcctgtaatcccagcattttgggaggccgagatgggcggatcacgaggtcaggaaattragaccatcctgggcaacatgatgaaaccccgtatctactaaaaatacaaacattagctgggtgtggtggcatgtgcctgtaatcccagctactcgggaggctgaggcaggacaatcgcttgaacccaggaggcagaggttg

SEQ ID NO: 615035 - DNA, 505 bp, Homo sapiens
catagaagaatgaaaagcactggaaatggtatcaacatggttaaatatataagatccttttatttctgtttgaattcaattgattgtttaaacaaggggtcagcaagctatagcttcatgggtggactgcctgtttatgtgaacaaatttttactgagacacattcatgctcatttgtttatgtattatcaatgggtgctatagaattacaaaagcagaattaagtagttgtaacagagcctaatggcacacaagcctaaaatatttagcttttaaggaaagcatgtccggttctggtggctcatgcctgtaatcccagcattttgggaggccgagatgggcggatcacgaggtcaggaaattaagaccatcctgggcaacatgatgaaaccccgtrtctactaaaaatacaaacattagctgggtgtggtggcatgtgcctgtaatcccagctactcgggaggctgaggcaggacaatcgcttgaacccaggaggcagaggttg

SEQ ID NO: 615036 - DNA, 605 bp, Homo sapiens
tggtggcatgtgcctgtaatcccagctactcgggaggctgaggcaggacaatcgcttgaacccaggaggcagaggttgcagtgagctgagatggcactactgcactgcagcctggtacaaagctagactctgtctcaaaaaaaaaaaaaaaaaagagagagaagaaaacaacattattaacctctaatttaaacaagaataataacaatttataatgagtttacaacatatataaaaataaattaatgacaataacagaacaacagttaggayaaaataatgaaaatgttgttacttcatgatactgtatgtaaagtagtatattataatttgaaggtagaatgtgatgagttaaacatgtatactacaaactcaaaagcaaccattaaaatttacaaatatagagttttaattctcaagtaaaaaaggagataagatgaaaccataaaatatatttgattcatagaaaagaaggcaaacaagagggaaaataagcaaaaaacagatgggatggtaggggaagcaaaattttattaccatcttcttagttttttttttttcctctgctaagcctgagaattaaattgatataagacagatcaaca

SEQ ID NO: 615037 - DNA, 605 bp, Homo sapiens
tggtggcatgtgcctgtaatcccagctactcgggaggctgaggcaggacaatcgcttgaacccaggaggcagaggttgcagtgagctgagatggcactactgcactgcagcctggtacaaagctagactctgtctcaaaaaaaaaaaaaaaaaagagagagaagaaaacaacattattaacctctaatttaaacaagaataataacaatttataatgagtttacaacatatataaaaataaattaatgacaataacagaacaacagttaggataaaataatgaaaatgttgttacttcatgatactgtatgtaaagtagtatattataatttgaaggtagaatgtgatgagttaaacatgtatactacaaactcaaaagcaaccattaaaatttacaaatatagagttttaattctcaagtaaaaaaggagataagatgaaaccataaaatatatttrattcatagaaaagaaggcaaacaagagggaaaataagcaaaaaacagatgggatggtaggggaagcaaaattttattaccatcttcttagttttttttttttcctctgctaagcctgagaattaaattgatataagacagatcaaca

SEQ ID NO: 615038 - DNA, 411 bp, Homo sapiens
ttaaacatgtatactacaaactcaaaagcaaccattaaaatttacaaatatagagttttaattctcaagtaaaaaaggagataagatgaaaccataaaatatatttgattcatagaaaagaaggcaaacaagagggaaaataagcaaaaaacagatgggatggtaggggaagcaaaattttattaccatcttcttagttttttttttttcctctgctaagcctgagaattaaattgatataagacagatcaacaggaaaatgcatacaaatttatttaatrcatgtattatgtggcatgcgagattctttaaggaaggaagactccatgacataatcacttatgttctgaagtagacacagagtagtaaattgtgaaatatgacaagacaaaggagctggaactagtgtag

SEQ ID NO: 615039 - DNA, 556 bp, Homo sapiens
cttcaacaaattctgctggaacaattagatactcatatgcaaaaagtagaactttaacacgtaactcatgatacaaaaattaatttagtacagatcatatgcctaaatgtaaaatgtaaaaacaaagtgaaaaaaaaggaagaaaaattatgtataggagaaaatatagaaaagtatttgacctcaggctagtaaatactacttagacatgacacaaacaccgtttcatcaaagtagaaattgacaacttgagttcatcaaaatgtaaaacatatgttcctcaggaaacactgtaaaacaaatagaaatataagacactactgagracaatatttgcaaaatatatgtctggcaaaaaagttgtgtccagaaaacataagaactctcaaaacttgataataaatctaacaactctaataaaagtaggcaaatgacttaaatgaatacttcttctctaaagaacatatgtagatagaaagtaaacacatggaaagatcctcaatatcattagtcattagggaattaatctgtgtctgtcaaaaatgagttgggtaca

SEQ ID NO: 615040 - DNA, 577 bp, Homo sapiens
tgcactccagcctgcgtgacagagcaagaacccatctcaaaaaagaaaaaaagaggccaggcgcagtggctcacacctgtaatcgcagcactctgggaggtcaaggtgggtggatcacctgaggtcaagagatcgagaccagcctgaccaacatgctgaaaccccatctctactaaaaatacaaaaattagctgggcatggtgatgcgcgcctatatcccagctacttgggaggctgaggcaggagaactgtttgaactcgggaggtgtagattgcagtgagccgagatcgcgccattgaactccagcctgggcaacaagagtgaaacttcgtctcaaaaaaaaaaagaagaaaaaagaatggctaaagttaaaaaggctggycatgccaagtgttggcaatactatagaggacaaccaacatacatgcactgctaatggtaatggaaattagtacaatgactctggaaaaaggcttgtcagtttttaaaatattttgacgtatgcacctatcatatgactgccaatcaatttgtagggaaatgaaagtatatgtaaataaaaaacttgtaccaaaa

SEQ ID NO: 615041 - DNA, 577 bp, Homo sapiens
tgcactccagcctgcgtgacagagcaagaacccatctcaaaaaagaaaaaaagaggccaggcgcagtggctcacacctgtaatcgcagcactctgggaggtcaaggtgggtggatcacctgaggtcaagagatcgagaccagcctgaccaacatgctgaaaccccatctctactaaaaatacaaaaattagctgggcatggtgatgcgcgcctatatcccagctacttgggaggctgaggcaggagaactgtttgaactcgggaggtgtagattgcagtgagccgagatcgcgccattgaactccagcctgggcaacaagagtgaaacttcgtctcaaaaaaaaaaagaagaaaaaagaatggctaaagttaaaaaggctggtcatgccaagtgttggcaatactatagaggacaaccaacatacatgcactgctaatggtaatggaaattagtacaatgactctggaaaaaggcttgtcagtttttaaaatattttgacgtatgcacctatcatatgactgccaatcaatttgtagggaaatgaaagtatatgtamataaaaaacttgtaccaaaa

SEQ ID NO: 615042 - DNA, 368 bp, Homo sapiens
ggcaccaccttacatgactgatgcccaagtaaaagccctggagaccaaaacttaaatgagcttctctgattgacaacacttcaatatgctgtcaaatattgttgctgggagaattacgtgtgttcttatgggattccactgggagaggacacctgaaagcttgtacctgatatcttctacatttctccccatgggctttttttctttgttgattttaatctgtatcttttcattgtagtaaactgtaactatgaatgtaacgtgttttctaagacctgtgaatcattatagttaatctttgagcctaagggtggtcataaggagccccaacacaytaataaattactttcataaagaatatataaaag

SEQ ID NO: 615043 - DNA, 508 bp, Homo sapiens
tgatgtccacctgaagtttgatgtttacctggggcctgatacctacctggtgcccaagtattctcatgtgcctaacatccactagttggcctggtgttcatctgagggcttggtgtcaaccagtggctttatgtacacctggattctagtgtcctcctggggccttatgcctaccaggagtctggtgtacccctggggtctagtatccacctggagtctgggcgtccacctggagcctaatgttgaggttagactgagtgtcagcctgaggcctgatgtctactagggcataggtattcacctggggcttgttgtttacctggggactaatgtcaaccttgagcctaggtatccacctggggaatagtgtccagttgcagccagatgtccacctatggcctgaagcatggttgttatcctaaggccttgtattagtccattttcacagttataaaaaactacctgatattrggcaacttatgaggaaaagaggtttaactgacccaca

SEQ ID NO: 615044 - DNA, 644 bp, Homo sapiens
gctctctatggtgccttcaataggggctactaatcccactcatgtggtccctgccttcatgatctaatcattccccaaggccctacctccaaatatcatcacatagggaattagatttcaacacttgaatttgagagggacaataacatttggtctatagcatcaggttacccagagccttatgcattcggaggaaatccaaaatcttctataagtatttgctggtcccctctgggcttagggaaatctttaattgcagctcttgattcagcttggtccaagccgaaattctacgtttgcctgagtaacttgttcatgggacagaggcaactgaccatttggagttttaggaaattgatggaagagggcttggcatctggatgagaagtggagggagaatagaacaaaggcacaggagagagyacaatgagaaaggggaagagggacatctggacataagggccaactggagggcagggaaggtaattttccttgcattttaaactcagaccacatatcacatcagaatcacctgagggagacgttttcaatgcatattcctgggtttcttctcttggaaatttttattaaatcttgagttgtgctgatttatccatatttatcataagaattttggataattc

SEQ ID NO: 615045 - DNA, 644 bp, Homo sapiens
gctctctatggtgccttcaataggggctactaatcccactcatgtggtccctgccttcatgatctaatcattccccaaggccctacctccaaatatcatcacatagggaattagatttcaacacttgaatttgagagggacaataacatttggtctatagcatcaggttacccagagccttatgcattcggaggaaatccaaaatcttctataagtatttgctggtcccctctgggcttagggaaatctttaattgcagctcttgattcagcttggtccaagccgaaattctacgtttgcctgagtaacttgttcatgggacagaggcaactgaccatttggagttttaggaaattgatggaagagggcttggcatctggatgagaagtggagggagaatagaacaaaggcacaggagagagcacaatgagaaaggggaagagggacatctggacataagggccaactggagggcagggaaggtaattttccttgcattttaaactcagaccacatatcacatcagaatcacctragggagacgttttcaatgcatattcctgggtttcttctcttggaaatttttattaaatcttgagttgtgctgatttatccatatttatcataagaattttggataattc

SEQ ID NO: 615046 - DNA, 644 bp, Homo sapiens
gctctctatggtgccttcaataggggctactaatcccactcatgtggtccctgccttcatgatctaatcattccccaaggccctacctccaaatatcatcacatagggaattagatttcaacacttgaatttgagagggacaataacatttggtctatagcatcaggttacccagagccttatgcattcggaggaaatccaaaatcttctataagtatttgctggtcccctctgggcttagggaaatctttaattgcagctcttgattcagcttggtccaagccgaaattctacgtttgcctgagtaacttgttcatgggacagaggcaactgaccatttggagttttaggaaattgatggaagagggcttggcatctggatgagaagtggagggagaatagaacaaaggcacaggagagagcacaatgagaaaggggaagagggacatctggacataagggccaactggagggcagggaaggtaattttccttgcattttaaactcagaccacatatcacatcagaatcacctgagggagacrttttcaatgcatattcctgggtttcttctcttggaaatttttattaaatcttgagttgtgctgatttatccatatttatcataagaattttggataattc

SEQ ID NO: 615047 - DNA, 433 bp, Homo sapiens
ttatgtaaaataactgcaaaacaaactgaaggggaattattttaaaatgcttgaatataattatataattcwactcttcttatgtatgtagtttgaccacatatttgatgtctgctatactaagattggaaatgtgtagaagtttttttaaaaaatcaggtagaagcacagaaaaaaggagttggagagaaaagaaaactagctattgtctggtaacaagagaagagaggggaaacgaagtagcatatttttgttcattgatggcatctaaattatgatcccaaatatttttttcctaagaaatccaataatacaagtattcagagtggagtaccaacactgatttactgggaaagagaagtgtactctgttttgctacacaatgttgagggagaaggaaaggaaaattatttgagtaaacaagtaagagact

SEQ ID NO: 615048 - DNA, 433 bp, Homo sapiens
ttatgtaaaataactgcaaaacaaactgaaggggaattattttaaaatgcttgaatataattatataattcaactcttcttatgtatgtagtttgaccacatatttgatgtctgctatactaagattggaaatgtgtagaagtttttttaaaaaatcaggtagaagcacagaaaaaaggrgttggagagaaaagaaaactagctattgtctggtaacaagagaagagaggggaaacgaagtagcatatttttgttcattgatggcatctaaattatgatcccaaatatttttttcctaagaaatccaataatacaagtattcagagtggagtaccaacactgatttactgggaaagagaagtgtactctgttttgctacacaatgttgagggagaaggaaaggaaaattatttgagtaaacaagtaagagact

SEQ ID NO: 615049 - DNA, 433 bp, Homo sapiens
ttatgtaaaataactgcaaaacaaactgaaggggaattattttaaaatgcttgaatataattatataattcaactcttcttatgtatgtagtttgaccacatatttgatgtctgctatactaagattggaaatgtgtagaagtttttttaaaaaatcaggtagaagcacagaaaaaaggagttggagagaaaagaaaactagctattgtctggtaacaagagaagagargggaaacgaagtagcatatttttgttcattgatggcatctaaattatgatcccaaatatttttttcctaagaaatccaataatacaagtattcagagtggagtaccaacactgatttactgggaaagagaagtgtactctgttttgctacacaatgttgagggagaaggaaaggaaaattatttgagtaaacaagtaagagact

SEQ ID NO: 615050 - DNA, 433 bp, Homo sapiens
ttatgtaaaataactgcaaaacaaactgaaggggaattattttaaaatgcttgaatataattatataattcaactcttcttatgtatgtagtttgaccacatatttgatgtctgctatactaagattggaaatgtgtagaagtttttttaaaaaatcaggtagaagcacagaaaaaaggagttggagagaaaagaaaactagctattgtctggtaacaagagaagagaggggaaacgaagtagcatrtttttgttcattgatggcatctaaattatgatcccaaatatttttttcctaagaaatccaataatacaagtattcagagtggagtaccaacactgatttactgggaaagagaagtgtactctgttttgctacacaatgttgagggagaaggaaaggaaaattatttgagtaaacaagtaagagact

SEQ ID NO: 615051 - DNA, 372 bp, Homo sapiens
tatatacataatatataatatakgcatatgtattatatacatatatacataatatataatatatgcatgtgtataatatacatatatatctgtctaatatatatacatatatacatatattaaatatatatacatatatacatatattaaatatatatacatatatacatatattaaatatatatacacatatatgttagaagttgtactgctgaaaacaagagctaccaataaaaaaatttcaggaaacctagtgtgattatttttaatagaaatggatattttaatacagtctcttgctttttcttgtggaaataaatgacaagatggaatttctgggtgtttggtatctgaatatttaagtatagcagg

SEQ ID NO: 615052 - DNA, 372 bp, Homo sapiens
tatatacataatatataatataggcatatgtattatatacatatatacataatatataatatatgcatrtgtataatatacatatatatctgtctaatatatatacatatatacatatattaaatatatatacatatatacatatattaaatatatatacatatatacatatattaaatatatatacacatatatgttagaagttgtactgctgaaaacaagagctaccaataaaaaaatttcaggaaacctagtgtgattatttttaatagaaatggatattttaatacagtctcttgctttttcttgtggaaataaatgacaagatggaatttctgggtgtttggtatctgaatatttaagtatagcagg

SEQ ID NO: 615053 - DNA, 538 bp, Homo sapiens
gaattccagaacacttaacttactttccccccaccacgtttttgaaaattacccctagtccttttttgcaggtttcatctttactatttttcaaatgttagaggaccattaggctcaggactttcacttcttatctttcttatctttgctttcttactaatttttgtgtcattaatttcctgatatttcatattacacctaaacactggacactacacccaacactccctgacttatccacgtggatrtcagttaggaatctcaaaattaatatgtctgtatggagccactgaaactccccaaatttgctcttccccattctgtttaatggcaactcccattttatagtttctcagctcaatattcttggtgtccccttttaattctgtctctatatctctgtcactctcttcctgtatctgtctgattctctccccctctctcctctctcttgctcactctcactcttgctctctctccctgcttcacacacacacaaatacgcacagacagacagacacacacacacacacacaca

SEQ ID NO: 615054 - DNA, 538 bp, Homo sapiens
gaattccagaacacttaacttactttccccccaccacgtttttgaaaattacccctagtccttttttgcaggtttcatctttactatttttcaaatgttagaggaccattaggctcaggactttcacttcttatctttcttatctttgctttcttactaatttttgtgtcattaatttcctgatatttcatattacacctaaacactggacactacacccaacactccctgacttatccacgtggatatcagttaggaatctcaaaattaatatgtctgtatggagccactgaaactccccaaatttgctcttccccattctgtttaatggcaactcccattttatagtttctcagctcaatattcttggtgtccccttttaattctgtctctrtatctctgtcactctcttcctgtatctgtctgattctctccccctctctcctctctcttgctcactctcactcttgctctctctccctgcttcacacacacacaaatacgcacagacagacagacacacacacacacacacaca

SEQ ID NO: 615055 - DNA, 500 bp, Homo sapiens
tggaattcctgccagctttacctttaaagtgtagtaattccaaatgttgttgaaaattcaccttcccacccccaccacttggtaactatagcrcttccctcacaaggccaagtgcagagatttcttggggaaataatgagaactattatacattcttatttcaaggacccttaaaattataagattgccatatttgatactaatttaagcttctgtcattgcccttttttcaatccagtctccacacagctaccacagtgtgcaagtagaagtctcagccatatcaccacactcctgctttaatgtccctactccattgcttcttttctccttcagaagagtttaagcttaatgaagctgggcaactttacatatttttccacgagctggagatcacttggtgtaaggtaaaaatgatcagtaaatattttcaaataacagaatccatgaataatagttttgtttctttgagagcacattgacttttaaaaatcaagaaa

SEQ ID NO: 615056 - DNA, 500 bp, Homo sapiens
ggaattcctgccagctttacctttaaagtgtagtaattccaaatgttgttgaaaattcaccttcccacccccaccacttggtaactatagcacttccctcacaaggccaagtgcagagatttcttggggaaataatgagaactattatacaytcttatttcaaggacccttaaaattataagattgccatatttgatactaatttaagcttctgtcattgcccttttttcaatccagtctccacacagctaccacagtgtgcaagtagaagtctcagccatatcaccacactcctgctttaatgtccctactccattgcttcttttctccttcagaagagtttaagcttaatgaagctgggcaactttacatatttttccacgagctggagatcacttggtgtaaggtaaaaatgatcagtaaatattttcaaataacagaatccatgaataatagttttgtttctttgagagcacattgacttttaaaaatcaagaaaa

SEQ ID NO: 615057 - DNA, 500 bp, Homo sapiens
ggaattcctgccagctttacctttaaagtgtagtaattccaaatgttgttgaaaattcaccttcccacccccaccacttggtaactatagcacttccctcacaaggccaagtgcagagatttcttggggaaataatgagaactattatacattcttatttcaaggacccttaaaattatargattgccatatttgatactaatttaagcttctgtcattgcccttttttcaatccagtctccacacagctaccacagtgtgcaagtagaagtctcagccatatcaccacactcctgctttaatgtccctactccattgcttcttttctccttcagaagagtttaagcttaatgaagctgggcaactttacatatttttccacgagctggagatcacttggtgtaaggtaaaaatgatcagtaaatattttcaaataacagaatccatgaataatagttttgtttctttgagagcacattgacttttaaaaatcaagaaaa

SEQ ID NO: 615058 - DNA, 440 bp, Homo sapiens
ccttcccacccccaccacttggtaactatagcacttccctcacaaggccaagtgcagagatttcttggggaaataatgagaactattatacattcttatttcaaggacccttaaaattataagattrccatatttgatactaatttaagcttctgtcattgcccttttttcaatccagtctccacacagctaccacagtgtgcaagtagaagtctcagccatatcaccacactcctgctttaatgtccctactccattgcttcttttctccttcagaagagtttaagcttaatgaagctgggcaactttacatatttttccacgagctggagatcacttggtgtaaggtaaaaatgatcagtaaatattttcaaataacagaatccatgaataatagttttgtttctttgagagcacattgacttttaaaaatcaagaaa

SEQ ID NO: 615059 - DNA, 440 bp, Homo sapiens
ccttcccacccccaccacttggtaactatagcacttccctcacaaggccaagtgcagagatttcttggggaaataatgagaactattatacattcttatttcaaggacccttaaaattataagattgccatatttgatactaatttaagcttctgtcattgcccttttttmaatccagtctccacacagctaccacagtgtgcaagtagaagtctcagccatatcaccacactcctgctttaatgtccctactccattgcttcttttctccttcagaagagtttaagcttaatgaagctgggcaactttacatatttttccacgagctggagatcacttggtgtaaggtaaaaatgatcagtaaatattttcaaataacagaatccatgaataatagttttgtttctttgagagcacattgacttttaaaaatcaagaaa

SEQ ID NO: 615060 - DNA, 500 bp, Homo sapiens
ggaattcctgccagctttacctttaaagtgtagtaattccaaatgttgttgaaaattcaccttcccacccccaccacttggtaactatagcacttccctcacaaggccaagtgcagagatttcttggggaaataatgagaactattatacattcttatttcaaggacccttaaaattataagattgccatatttgatactaatttaagcttctgtcattgcccttttttcaatccagtctccacacagctaccacagtgtgcaagtagaagtctcagccatatcaccamactcctgctttaatgtccctactccattgcttcttttctccttcagaagagtttaagcttaatgaagctgggcaactttacatatttttccacgagctggagatcacttggtgtaaggtaaaaatgatcagtaaatattttcaaataacagaatccatgaataatagttttgtttctttgagagcacattgacttttaaaaatcaagaaaa

SEQ ID NO: 615061 - DNA, 440 bp, Homo sapiens
ccttcccacccccaccacttggtaactatagcacttccctcacaaggccaagtgcagagatttcttggggaaataatgagaactattatacattcttatttcaaggacccttaaaattataagattgccatatttgatactaatttaagcttctgtcattgcccttttttcaatccagtctccacacagctaccacagtgtgcaagtagaagtctcagccatatcaccacactcctgctttaatgtccctactccattgctkcttttctccttcagaagagtttaagcttaatgaagctgggcaactttacatatttttccacgagctggagatcacttggtgtaaggtaaaaatgatcagtaaatattttcaaataacagaatccatgaataatagttttgtttctttgagagcacattgacttttaaaaatcaagaaa

SEQ ID NO: 615062 - DNA, 500 bp, Homo sapiens
ggaattcctgccagctttacctttaaagtgtagtaattccaaatgttgttgaaaattcaccttcccacccccaccacttggtaactatagcacttccctcacaaggccaagtgcagagatttcttggggaaataatgagaactattatacattcttatttcaaggacccttaaaattataagattgccatatttgatactaatttaagcttctgtcattgcccttttttcaatccagtctccacacagctaccacagtgtgcaagtagaagtctcagccatatcaccacactcctgctttaatgtccctactccattgcttcttttctccttcagaagagtttaagcttaatgaagctgggcaactttacatatttttccacgagctggagatcacttggtgtaaggtaaaaatgatcagtaaatattttcaaataacagaatccatgaataatagttttgtttctttgagagyacattgacttttaaaaatcaagaaaa

SEQ ID NO: 615063 - DNA, 599 bp, Homo sapiens
aaagaaatttggttacattgaaaggaaatttggctaatgtaagttagatacatttctaattaaaacaataatttaagataaataatgctcaaagaacagtggtcactgcatttattccagagagaggacatttatcctgatctgactgtaataacgtagtaggtagaactgctggcgtcgacacccaagcaaggaagggaagctggtgtctcaaggggtcccgctgagatggaaagggttcagggcccagactgttgatgtcrcctggacccaaccaccatgtctcagaagaagaaatgacactcccctcctggtgccaccccaaacaaggagcttagcagtgttgcacacaagatagtccttgcaggagacatgtttgacaagttgctgaggtgcctgatggggccaggctttttttcatgaaatgagtttgcatcgtgaggaagcctttttattggaaacctggcaggggtccaatttcccctttgccttaaccccgtaggagcacagtagacagggaggaggtcacccaggtggctgttcctgcttggcccccacttcccagaccattccaggcagggagagccgctgagatcact

SEQ ID NO: 615064 - DNA, 599 bp, Homo sapiens
aaagaaatttggttacattgaaaggaaatttggctaatgtaagttagatacatttctaattaaaacaataatttaagataaataatgctcaaagaacagtggtcactgcatttattccagagagaggacatttatcctgatctgactgtaataacgtagtaggtagaactgctggcgtcgacacccaagcaaggaagggaagctggtgtctcaaggggtcccgctgagatggaaagggttcagggcccagactgttgatgtcacctggacccaaccaccatgtctcagaagaagaaatgacactcccctcctggtgccaccccaaacaaggagcttagcagtgttgcacacargatagtccttgcaggagacatgtttgacaagttgctgaggtgcctgatggggccaggctttttttcatgaaatgagtttgcatcgtgaggaagcctttttattggaaacctggcaggggtccaatttcccctttgccttaaccccgtaggagcacagtagacagggaggaggtcacccaggtggctgttcctgcttggcccccacttcccagaccattccaggcagggagagccgctgagatcact

SEQ ID NO: 615065 - DNA, 599 bp, Homo sapiens
aaagaaatttggttacattgaaaggaaatttggctaatgtaagttagatacatttctaattaaaacaataatttaagataaataatgctcaaagaacagtggtcactgcatttattccagagagaggacatttatcctgatctgactgtaataacgtagtaggtagaactgctggcgtcgacacccaagcaaggaagggaagctggtgtctcaaggggtcccgctgagatggaaagggttcagggcccagactgttgatgtcacctggacccaaccaccatgtctcagaagaagaaatgacactcccctcctggtgccaccccaaacaaggagcttagcagtgttgcacacaagayagtccttgcaggagacatgtttgacaagttgctgaggtgcctgatggggccaggctttttttcatgaaatgagtttgcatcgtgaggaagcctttttattggaaacctggcaggggtccaatttcccctttgccttaaccccgtaggagcacagtagacagggaggaggtcacccaggtggctgttcctgcttggcccccacttcccagaccattccaggcagggagagccgctgagatcact

SEQ ID NO: 615066 - DNA, 599 bp, Homo sapiens
aaagaaatttggttacattgaaaggaaatttggctaatgtaagttagatacatttctaattaaaacaataatttaagataaataatgctcaaagaacagtggtcactgcatttattccagagagaggacatttatcctgatctgactgtaataacgtagtaggtagaactgctggcgtcgacacccaagcaaggaagggaagctggtgtctcaaggggtcccgctgagatggaaagggttcagggcccagactgttgatgtcacctggacccaaccaccatgtctcagaagaagaaatgacactcccctcctggtgccaccccaaacaaggagcttagcagtgttgcacacaagatagtccttgcaggagacaygtttgacaagttgctgaggtgcctgatggggccaggctttttttcatgaaatgagtttgcatcgtgaggaagcctttttattggaaacctggcaggggtccaatttcccctttgccttaaccccgtaggagcacagtagacagggaggaggtcacccaggtggctgttcctgcttggcccccacttcccagaccattccaggcagggagagccgctgagatcact

SEQ ID NO: 615067 - DNA, 570 bp, Homo sapiens
tcacctgatggaagggaggaaggcctcagggtctggggtcccctgccactgcccagctcttccagctgatggctccacatcttgggagtgggctctgatgcatgatgggtcaggggcttctcaggtttctacagcccaaatactgcccagctccggaggctyctatcccaccaggagtaggtataacacaaatccttcccaaagatcatgcggtacctgctgagtggatgacaccctcaactctttcccagaggcccagggtcccatggggcagggaaacagaggaagatggagctcctcaagggcctgacaaggagctgagtcccagccagggcctcacccaagatgaggattctccatgggtttggagttgggtttccttttcctgccctggaggaggaggcagaggtactaggatgggggctgagctccagctgagcagggttaagggaagtgtgtccaccaggcatctgtgcatgggggagttgttgggaaagcactggccactgcccagtgttctgccccagggcagctcagggggccctgagcacctagggtccaggaagtgcc

SEQ ID NO: 615068 - DNA, 570 bp, Homo sapiens
tcacctgatggaagggaggaaggcctcagggtctggggtcccctgccactgcccagctcttccagctgatggctccacatcttgggagtgggctctgatgcatgatgggtcaggggcttctcaggtttctacagcccaaatactgcccagctccggaggctcctatcccaccaggagtaggtataacacaaatccttcccaaagatcatgcggtacctgctgagtggatgacaccctcaactctttcccagaggcccagggtcccatggggcagggaaacagrggaagatggagctcctcaagggcctgacaaggagctgagtcccagccagggcctcacccaagatgaggattctccatgggtttggagttgggtttccttttcctgccctggaggaggaggcagaggtactaggatgggggctgagctccagctgagcagggttaagggaagtgtgtccaccaggcatctgtgcatgggggagttgttgggaaagcactggccactgcccagtgttctgccccagggcagctcagggggccctgagcacctagggtccaggaagtgcc

SEQ ID NO: 615069 - DNA, 570 bp, Homo sapiens
tcacctgatggaagggaggaaggcctcagggtctggggtcccctgccactgcccagctcttccagctgatggctccacatcttgggagtgggctctgatgcatgatgggtcaggggcttctcaggtttctacagcccaaatactgcccagctccggaggctcctatcccaccaggagtaggtataacacaaatccttcccaaagatcatgcggtacctgctgagtggatgacaccctcaactctttcccagaggcccagggtcccatggggcagggaaacagaggaagatggagctcctcaagggcctgacaaggagctgagtcccagccarggcctcacccaagatgaggattctccatgggtttggagttgggtttccttttcctgccctggaggaggaggcagaggtactaggatgggggctgagctccagctgagcagggttaagggaagtgtgtccaccaggcatctgtgcatgggggagttgttgggaaagcactggccactgcccagtgttctgccccagggcagctcagggggccctgagcacctagggtccaggaagtgcc

SEQ ID NO: 615070 - DNA, 442 bp, Homo sapiens
aaagtttctgcatggcacagaagccaggccctcctcaagagggggcatcacactgcaggtgtcaggactcagggcccgctgctatttccacattattmattttataaggtgatatggtttggctgcgttgccacccaaatctcatcttgaactgtaatttccataatcctcatgtgtcctgggagggacccagtgagaggtaactgaatcatggcggcagtttccccatgctgttctcatgatagtaagtgagttctcatgtgatctgatggttttataagcagctggcatttcccttgcttgaggtgatgaatgccccatttaccctgatgtgattattacacattgcatgcctgtgtcaaactatctcatgtaccccataaatatatacacctaccatgtactcatataaattaaaaataaaaataaattttttaaaaaa

SEQ ID NO: 615071 - DNA, 442 bp, Homo sapiens
aaagtttctgcatggcacagaagccaggccctcctcaagagggggcatcacactgcaggtgtcaggactcagggcccgctgctatttccacattattaattttataaggtgatatggtttggctgcgttgccacccaaatctcatcttgaactgtaatttccataatcctcatgtgtcctgggagggacccagtgagaggtaactgaatcatggcggcagtttccccatgctgttctcatgatagtaagtgagttctcatgtgatctgatggttttataagcagctggcatttcccttgcttgaggtgatgaatgccccatttaccctgatgtgwttattacacattgcatgcctgtgtcaaactatctcatgtaccccataaatatatacacctaccatgtactcatataaattaaaaataaaaataaattttttaaaaaa

SEQ ID NO: 615072 - DNA, 431 bp, Homo sapiens
tggggttcaatgaagaattatgtattttaattaagacttatgtattttaattaataattatatattttaatttcacattttaaatttctgcagttttcttccatcacttttcaccatgctttctacacttggaattactttttttgrcttcttgatcttctttacttgtatgttattgattttctacaagttttaacatatatgattaaagagtatttcttaatgttttaataattatcctagaataaaatatatttactttgatgtatgcattggatattacagtgtattgtgtacattttcaaacactttgtgttataccagaagcattattcaacagtgatcatttttttacctgaactatgttcagaaaatctttccaccacagtacaaaaagatcgacttcattttgttaacagatggatgtgcca

SEQ ID NO: 615073 - DNA, 431 bp, Homo sapiens
tggggttcaatgaagaattatgtattttaattaagacttatgtattttaattaataattatatattttaatttcacattttaaatttctgcagttttcttccatcacttttcaccatgctttctacacttggaattactttttttggcttcttgatcttctttacttgtatgttattgattttctacaagttttaacatatatgattaaagagtatttcttaatgttttaataattatcctagaataaaatatatttactttgatgtatgcattggatattacagtgtattgtgtacattttcaaacactttgtgttataccagaagcattattcaacagtgrtcatttttttacctgaactatgttcagaaaatctttccaccacagtacaaaaagatcgacttcattttgttaacagatggatgtgcca

SEQ ID NO: 615074 - DNA, 533 bp, Homo sapiens
tcctgtgaattcctatttttcttcttgaattgaagtcacaaagtttatctttatgcttatttttctacttccaagtggctgaggcacattgaaagcccctaatccatcattctaggaaaaaaggatggtttaaataaaggaatgttcatataaaatatatattaattagtgcaaacatattttatttgacatgagttaggtgaatctttgatacattaattaattttaaaattgttaaataaaattagaaatatcttcgaatttgccaaggtatgtttctctcctgggattactggtcagttttattttttccttggatagacattttaagccataaatcttgacatagacctgatgtagacctccatacctttcccagatgtgggacagagcaactgggacaggtccatcctagcactaagggatgattaaacctaacttgtagtcgttgtacaactataaacatggttgatgctttaagagaaagatcttgatggaaagggttaaatgtraaaattgatcatatgaattgg

SEQ ID NO: 615075 - DNA, 584 bp, Homo sapiens
tgcaaagatttctgaaatgccttcaaggcctttttttaattgtcttggctatcagcacctagctctttttcagttatgcaaatgtctctaataagtggttgctccacagcctgtttagattcttcccctgaaaatgctttatcttcctttgccaaatgggcaggctgcaaattttctatacttgtatggtctgcttcccattkaattgtaaattccaactttaagtcatttttttgctcctgcatctgagtgttcaaacttcctcagatccctagtacatgaacagactgcagccaagttctttgcaaaggcataacaggcatgacctttattccaagtcccagtaagttcctcattttcatctgagaccgcatcagccgtccatatcactatcagcattttggtcacaaccatttaactagcctctaagaaattcagaactttccttcatcttcctgtattaggagccctccaaactcttccaactcctgcccattacctagttccaaaatcacttccacattttcaagtacctttatagcaatgccccatgtctcagtaccaattttctgtattaggccatt

SEQ ID NO: 615076 - DNA, 584 bp, Homo sapiens
tgcaaagatttctgaaatgccttcaaggcctttttttaattgtcttggctatcagcacctagctctttttcagttatgcaaatgtctctaataagtggttgctccacagcctgtttagattcttcccctgaaaatgctttatcttcctttgccaaatgggcaggctgcaaattttctatacttgtatggtctgcttcccattgaattgtaaattccaactttaagtcatttttttgctcctgcatctgagtgttcaaacttcctcagatccctagtacatgaacagactgcagccaagttctttgcaaaggcataacaggcatgacctttattccaagtcccagtaagttcctcattttcatctgagaccgcatcagccgtccatatcactatcagcattttggtcacaaccatttaactagyctctaagaaattcagaactttccttcatcttcctgtattaggagccctccaaactcttccaactcctgcccattacctagttccaaaatcacttccacattttcaagtacctttatagcaatgccccatgtctcagtaccaattttctgtattaggccatt

SEQ ID NO: 615077 - DNA, 584 bp, Homo sapiens
tgcaaagatttctgaaatgccttcaaggcctttttttaattgtcttggctatcagcacctagctctttttcagttatgcaaatgtctctaataagtggttgctccacagcctgtttagattcttcccctgaaaatgctttatcttcctttgccaaatgggcaggctgcaaattttctatacttgtatggtctgcttcccattgaattgtaaattccaactttaagtcatttttttgctcctgcatctgagtgttcaaacttcctcagatccctagtacatgaacagactgcagccaagttctttgcaaaggcataacaggcatgacctttattccaagtcccagtaagttcctcattttcatctgagaccgcatcagccgtccatatcactatcagcattttggtcacaaccatttaactagcctctaagaaattcagaactttccttcatcttcctgtattaggagccctccaaactcttccarctcctgcccattacctagttccaaaatcacttccacattttcaagtacctttatagcaatgccccatgtctcagtaccaattttctgtattaggccatt

SEQ ID NO: 615078 - DNA, 584 bp, Homo sapiens
tgcaaagatttctgaaatgccttcaaggcctttttttaattgtcttggctatcagcacctagctctttttcagttatgcaaatgtctctaataagtggttgctccacagcctgtttagattcttcccctgaaaatgctttatcttcctttgccaaatgggcaggctgcaaattttctatacttgtatggtctgcttcccattgaattgtaaattccaactttaagtcatttttttgctcctgcatctgagtgttcaaacttcctcagatccctagtacatgaacagactgcagccaagttctttgcaaaggcataacaggcatgacctttattccaagtcccagtaagttcctcattttcatctgagaccgcatcagccgtccatatcactatcagcattttggtcacaaccatttaactagcctctaagaaattcagaactttccttcatcttcctgtattaggagccctccaaactcttccaactcctgcccattacctagttccaaaatcacttccacattttcaagtayctttatagcaatgccccatgtctcagtaccaattttctgtattaggccatt

SEQ ID NO: 615079 - DNA, 400 bp, Homo sapiens
aattttatatctttttggtaagattagtggcttctattgtatatatttacaatggatatcaatgttgatattgagttatccaatctaatattcttaatagctctagcttgaactatgaatggtagatgactrtgttctgtacgtataccaatatgagtatttttctatgttaaagattttactagaatccttaaataaaccataatcatctaatatgattttctgctggaatttatataatttattatcataaaaagatattgaattgctcagataaaaattttaacttctataaatcttaatatataaaaatatggtcttcttcaacaaattgacattgcaaattggtttagaatatccttaaataattatagctttactttcaaataagctacttttg

SEQ ID NO: 615080 - DNA, 400 bp, Homo sapiens
aattttatatctttttggtaagattagtggcttctattgtatatatttacaatggatatcaatgttgatattgagttatccaatctaatattcttaatagctctagcttgaactatgaatggtagatgactatgttctgtacgtataccaatatgagtatttttctatgttaaagattttactagaatccttaaataaaccataatcatctaatatgattttctgctggaatttatataatttattatcataaaaagatattgaattgctcagataaaaattttaayttctataaatcttaatatataaaaatatggtcttcttcaacaaattgacattgcaaattggtttagaatatccttaaataattatagctttactttcaaataagctacttttg

SEQ ID NO: 615081 - DNA, 400 bp, Homo sapiens
aattttatatctttttggtaagattagtggcttctattgtatatatttacaatggatatcaatgttgatattgagttatccaatctaatattcttaatagctctagcttgaactatgaatggtagatgactatgttctgtacgtataccaatatgagtatttttctatgttaaagattttactagaatccttaaataaaccataatcatctaatatgattttctgctggaatttatataatttattatcataaaaagatattgaattgctcagataaaaattttaacttctataaatcttaatatataaaaatatggtcttcttcaacaaattgacattscaaattggtttagaatatccttaaataattatagctttactttcaaataagctacttttg

SEQ ID NO: 615082 - DNA, 495 bp, Homo sapiens
ataaagttgtctattcgaagatagggacttttttcttttttaaaaattaaatgagaaagcaacaattggtaaattcaaattcctttcttatcaaaacacgtattttgaatttttattgtttaaaacaatatagaatttgaattaatagctatcttagtaaggaaatatctttcctcaagactgcaatgtgctatcttgcatacaaaattaccaaataaacacagtgactgctgataaatttytacctaattatttaatatggttcccttgaaaaatgaatgattaaatgaattaaacaacagttaaacaattagattcagtatgatattatgtgcatactgtacatacttttgtattttcaaggtcaatcattgcatagaaagaaattaatttttttaagaagttaaaaatatagtacttaatcttgaataaatttgttaataactagggcacattaaaatatgcctcaaacgtagtaaaattacattttaacat

SEQ ID NO: 615083 - DNA, 546 bp, Homo sapiens
atgtatatgaaattatattttgggctgggcgcagtggttcgtgcctgtaatcccaacactttgggaggccaaggtgggcggatcaacagaggtgaggagttcaagaycagcctggacaacgtggggaaaccccgtctctactaaaaatacaaaaattagctgggcatggtggtgcgtgcctgtaatcccagctacttgagaggctgaggcaggagaatagcttgaatccaggaggtggatgttgcaatgagctgggatcatgccactgcactccagcctgagtgacagagtgagactccctctcaaaaaaaaaaaaaaaaattgtattttgttgttttatagttttaatttgaattaataataagctttggtaccatttcatatattttaacttttttattatttaaaaagtctgcttatgtattttcctattttaatttttatgtctttttctaaatccttaacagaaattaattgtatcatgaattttaatagattgttatgtacttgcaaatgttgccatgctgtttatgatgatttttcatt

SEQ ID NO: 615084 - DNA, 546 bp, Homo sapiens
atgtatatgaaattatattttgggctgggcgcagtggttcgtgcctgtaatcccaacactttgggaggccaaggtgggcggatcaacagaggtgaggagttcaagaccagcctggacaacrtggggaaaccccgtctctactaaaaatacaaaaattagctgggcatggtggtgcgtgcctgtaatcccagctacttgagaggctgaggcaggagaatagcttgaatccaggaggtggatgttgcaatgagctgggatcatgccactgcactccagcctgagtgacagagtgagactccctctcaaaaaaaaaaaaaaaaattgtattttgttgttttatagttttaatttgaattaataataagctttggtaccatttcatatattttaacttttttattatttaaaaagtctgcttatgtattttcctattttaatttttatgtctttttctaaatccttaacagaaattaattgtatcatgaattttaatagattgttatgtacttgcaaatgttgccatgctgtttatgatgatttttcatt

SEQ ID NO: 615085 - DNA, 546 bp, Homo sapiens
atgtatatgaaattatattttgggctgggcgcagtggttcgtgcctgtaatcccaacactttgggaggccaaggtgggcggatcaacagaggtgaggagttcaagaccagcctggacaacgtggggaaaccccgtctctactaaaaatacaaaaattagctgggcatggtggtgygtgcctgtaatcccagctacttgagaggctgaggcaggagaatagcttgaatccaggaggtggatgttgcaatgagctgggatcatgccactgcactccagcctgagtgacagagtgagactccctctcaaaaaaaaaaaaaaaaattgtattttgttgttttatagttttaatttgaattaataataagctttggtaccatttcatatattttaacttttttattatttaaaaagtctgcttatgtattttcctattttaatttttatgtctttttctaaatccttaacagaaattaattgtatcatgaattttaatagattgttatgtacttgcaaatgttgccatgctgtttatgatgatttttcatt

SEQ ID NO: 615086 - DNA, 612 bp, Homo sapiens
aactgaaaaaaaattgttatctaaaagtccacacaaaagatgaagccaagagtttttttaataaacaatactgatagatcattagctagattagcaaagaaaaagagaagatccaaataagtataatcagaaattataaagattatattaaaattgatcccatgaaaatacaaaagatatgcagagactattatgagcacctctctgcacacaaatctagaggaaatgaataaattcctggaaacacacaatctcccaagattgaatcaggaagaaagtgaaaacctgaacggaccaatargaagtttggaaatggaattagtaataaaaacctacgaaaaaaaataaaataaaagccctgtaacagatggattcacagctgagttctatcagaggggcaagggagaaatgataccaatcctactgaaatgtctccaaaaaatcaaggaggaggggcttctatctaactcatactacaaagccagcattaccctgttaccaaatctggcatagaccacggaaaaagaaaaaagaaaactacagatcaatatctctgatgaaaatacaagcaaaaattgtcaaaccaaatccagcagcacatcaaaaagttca

SEQ ID NO: 615087 - DNA, 583 bp, Homo sapiens
ttagcaccaccttcttccctttggccttytttctttttcgcaccttgggtagctggagaagagaataataagatcttgagagaaaaataagttgaagccagaggtaaaactgaatattggtaatatctttttgttttagggttgctttccattttagaaagtaattcagagtgttattttttaaaaatcatatatcagagttctctaataaatttcaaacttaaaagaacatttaacttcataagagaagagaaatgtttcatgaacatattttaaagatagggaaactagaatacaatttggagtaaaactaatattttaagtaacctggagataggactcatatcttttaatagaacatgcattctaacaagccagtgatttttcaaagttttctaaaacacttttctcaaaccacatttaacctagaagtagaaacaaataaaagacacaaaattagagttaattttattgtaactgggttggctccagagattatagttaggaagtgattacattaagctctacatatgcagcattctagcaaatttcaatgcagtagacaaaatctataaataatgtg

SEQ ID NO: 615088 - DNA, 610 bp, Homo sapiens
actatatgtgctcatttttttttttaacaaatacctattaagcagacactatgaacaaaaactgtgcaaacattggaaatacataagtaagcaaggcagaagggcctcttgtattaaaaataaacgaaggaggacactagttaaagtggtaaggacagattttaatcagtaataatgattgcaacagggaaaagagtgcagcatgagttgaattcaacttcaatttgtatattggcaactgattgttttattttattttagattctaggggtacatctgaacgtttgtcacatgggtatactgtgtgatgctgaatattggacttctaatgatctcatcacccatgtggtgracataagacccaatagatagtttttcaacagttggccagctccctctctcttcccttttggaatctccagtgtttatggttcccatctttgtgttttggggtaccaaatgtttacctcctacttataagtgaaaacgtggtatttagtttgctgtttttgcattaattcgacaagcattttggataagcagttcttaaccggtaaaatgtgttgttgcatactaataatgaatcactaaaacataataataaattcta

SEQ ID NO: 615089 - DNA, 610 bp, Homo sapiens
actatatgtgctcatttttttttttaacaaatacctattaagcagacactatgaacaaaaactgtgcaaacattggaaatacataagtaagcaaggcagaagggcctcttgtattaaaaataaacgaaggaggacactagttaaagtggtaaggacagattttaatcagtaataatgattgcaacagggaaaagagtgcagcatgagttgaattcaacttcaatttgtatattggcaactgattgttttattttattttagattctaggggtacatctgaacgtttgtcacatgggtatactgtgtgatgctgaatattggacttctaatgatctcatcacccatgtggtggacataagacccaatagatagtttttcaacagttggccagctccctctctcttcccttttggaatstccagtgtttatggttcccatctttgtgttttggggtaccaaatgtttacctcctacttataagtgaaaacgtggtatttagtttgctgtttttgcattaattcgacaagcattttggataagcagttcttaaccggtaaaatgtgttgttgcatactaataatgaatcactaaaacataataataaattcta

SEQ ID NO: 615090 - DNA, 610 bp, Homo sapiens
actatatgtgctcatttttttttttaacaaatacctattaagcagacactatgaacaaaaactgtgcaaacattggaaatacataagtaagcaaggcagaagggcctcttgtattaaaaataaacgaaggaggacactagttaaagtggtaaggacagattttaatcagtaataatgattgcaacagggaaaagagtgcagcatgagttgaattcaacttcaatttgtatattggcaactgattgttttattttattttagattctaggggtacatctgaacgtttgtcacatgggtatactgtgtgatgctgaatattggacttctaatgatctcatcacccatgtggtggacataagacccaatagatagtttttcaacagttggccagctccctctctcttcccttttggaatctccagtgtttatggttcccatctttgtgttttkgggtaccaaatgtttacctcctacttataagtgaaaacgtggtatttagtttgctgtttttgcattaattcgacaagcattttggataagcagttcttaaccggtaaaatgtgttgttgcatactaataatgaatcactaaaacataataataaattcta

SEQ ID NO: 615091 - DNA, 602 bp, Homo sapiens
ttatttttaatacatacaaatgacttagaagatcttaataagtagtactattcagtaataaaatgtctaacagcctctccccaaatargcatgggtcttgaatatcttacaaaggaagatatgcaatgtcacatgaacaggcactggacatcattattcattaggaatatgcaaatatacatgacaatgacagccattgcacattcactagaaattatttaaagaaattttaaaatactgacaataccaaaaattatagatatgtagcaactggaagtctttttgtttcttaagagtgtaaaatggggcaaacactccagagaacagttaattattttcttataaagtttaaaatatatttttctttgacccagtaagttttttctctgttacgtatacaaaagaaataataactgatgccacgataaagatttattcaaaacttattagaacagttttattcttaaaactaaaccttgaaacaacccaaacaaccttcaataaaggaatggatacacgaattgtatatattcatacagtggacactacagtactcagaattaacaacaacaacaacaaatcagatattgacgtgtaacaaa

SEQ ID NO: 615092 - DNA, 446 bp, Homo sapiens
aacttatgccagtgaaagaaaataaaattaattttcacaaaagttgatacacatgactgaggataaatctatattgatattgttgagattaaaatacaacgcaattttaataaacatttaaaacayggacatggtgtccctaacaatttgttgataggggagaggataatataaaaattaattttatgaatcccacataagtacttgttaaaaacatatgcctctgttctttttatttaggaatcactcacagaaagcacacattctttgcttctgcactaactctggaattcaatattagaaggctcaactgccatgaatataaatcaaattcatctgcatcccctatatcagactaaatgtgtttgtttctcagtattctgctatgttccttgtattaattttaatagaatcaaaactgagatatggaagaggatgttatatat

SEQ ID NO: 615093 - DNA, 446 bp, Homo sapiens
aacttatgccagtgaaagaaaataaaattaattttcacaaaagttgatacacatgactgaggataaatctatattgatattgttgagattaaaatacaacgcaattttaataaacatttaaaacacggacatggtgtccctaacaatttgttgataggggagaggataatataaaaattaattttatgaatcccacataagtacttgttaaaaacatatgcctctgttctttttatttaggaatcactcacagaaagcacacattctttgyttctgcactaactctggaattcaatattagaaggctcaactgccatgaatataaatcaaattcatctgcatcccctatatcagactaaatgtgtttgtttctcagtattctgctatgttccttgtattaattttaatagaatcaaaactgagatatggaagaggatgttatatat

SEQ ID NO: 615094 - DNA, 636 bp, Homo sapiens
ggttggttttccatgcagtttgtgcctacttccaggaggaagacacctacacacatttactcttctctgctttctttacaaatttgaatatgaaaaagagagccaggaaytgccaaaagctggttactccaagaccctaggcattctgtcaaaatctaacttggatgatcatgtaaaatacttatcattttattaatatcagtatgttcattcaaatggtaacaagattttcacttgatttctaaatcactgatcttaagtgaaaaatatcaaaatagaggacttcacaaatattatcatttagaacatcctcactttaaacaacctaaagttatttttaatgttgaatcaatcatactctgaccttctccataggaaaggaaaatgtaaatatcccagacagcagagagcaaactgtcataaaaataaaactgtactttcaaatagctgtagtccacagcacagctctaacccaaattgtcatttcaactgcttcacattattagaaaatacttaccttctagctttgaacatgaaagaaaagtactcttagtctatcagtttccctaactaggagattcatgtatttgttggggtcatataaagaaactgatagtgcaatttaataaggataat

SEQ ID NO: 615095 - DNA, 342 bp, Homo sapiens
tatcaacagaataatagttcgtaaaacaaaattaacaaaatttaacatttgtgtctatgaataaagttgataatattgtaaccacagccatttgtttgcatwttgtctactttcttgttacaacagggtttagcagttgtgacagaaacttctacaatgttcccaaagcctaaaatatttactgtcttaccctttatagaaataaatactttgctgacactgtgactcataataatgtttgcaactactttttgaataagctcaaaagtttacagacacacactcctaaaatatttgttatattgctctttatagaaataatttgcttatccctgtgaatta

SEQ ID NO: 615096 - DNA, 342 bp, Homo sapiens
tatcaacagaataatagttcgtaaaacaaaattaacaaaatttaacatttgtgtctatgaataaagttgataatattgtaaccacagccatttgtttgcattttgtctactttcttgttacaacagggtttagcagttgtgacagaracttctacaatgttcccaaagcctaaaatatttactgtcttaccctttatagaaataaatactttgctgacactgtgactcataataatgtttgcaactactttttgaataagctcaaaagtttacagacacacactcctaaaatatttgttatattgctctttatagaaataatttgcttatccctgtgaatta

SEQ ID NO: 615097 - DNA, 550 bp, Homo sapiens
aagagaatgaggctcgaaatcaagataattaaactgcaaactttaagaaggcaggaaagatatcctttacttagtttgtcttgtccaactaatggttagttgaatgccatgcacataacrcatccctctgagtacttattgaataaatgtagaatgtcattctggaataaattgaggcaagaaactagaggaatagcagtgtgaaaagtgagattaatttatttggtatagagtcagtaaatttaagtgggccatttgaaacaacaagcttaaaagaaaaccaaataagcattttcaatgcatagaaatgcaaccatttttctccttctgtactttatccattcaaacattgcttgaaaaaaaatataactttcagtcttgcttttttatctccaccaaactcagataattttggtcgttgatgacctttctaagctaattcctattttagaatgctatggacgaatgaatctcaaaacttcttttaaccaatttattttattccatttcctaaggaatagaaactttttacctccaacccaggggagct

SEQ ID NO: 615098 - DNA, 613 bp, Homo sapiens
  misc_feature 406, 524: n = A,T,C or G
agcatgtgttagcttaatatatcataacttaaatgatttaaattaggtataygtttataccaataagttttaaattcttaattcttacctcatcaagtaccaacaaagaatgcccttccatattaatacactttgggaattaagataaagtatatgtaattaaatcatcaaactccttttgctgtttagcaggtagtttgatataataagagaaattgtgttctcattatatatttgtcacaatgaatgaatgtaaaaccttaatcaggctatctgacttcttttagtgacattaccctttttgcaaccaacacatcaaattagtaatatttatcctacaaaaataatgtgaagataaatgagataagatatataatagtcacaaatacttattgaataaagctgnttttatttatatatttctatgtacttactagatatgttcttattaaatattttattatggtatatgtcaagtcttttacttctttttttatacttagtgtattatagaactcaccatncaataaaattgtaatacaattttcttgatttactaatcctaggtgaaaaaaaaaaatatatatatatatatgttgttttctgtttgaat

SEQ ID NO: 615099 - DNA, 613 bp, Homo sapiens
  misc_feature 406, 524: n = A,T,C or G
agcatgtgttagcttaatatatcataacttaaatgatttaaattaggtatatgtttataccaataagttttaaattcttaattctwacctcatcaagtaccaacaaagaatgcccttccatattaatacactttgggaattaagataaagtatatgtaattaaatcatcaaactccttttgctgtttagcaggtagtttgatataataagagaaattgtgttctcattatatatttgtcacaatgaatgaatgtaaaaccttaatcaggctatctgacttcttttagtgacattaccctttttgcaaccaacacatcaaattagtaatatttatcctacaaaaataatgtgaagataaatgagataagatatataatagtcacaaatacttattgaataaagctgnttttatttatatatttctatgtacttactagatatgttcttattaaatattttattatggtatatgtcaagtcttttacttctttttttatacttagtgtattatagaactcaccatncaataaaattgtaatacaattttcttgatttactaatcctaggtgaaaaaaaaaaatatatatatatatatgttgttttctgtttgaat

SEQ ID NO: 615100 - DNA, 613 bp, Homo sapiens
  misc_feature 406, 524: n = A,T,C or G
agcatgtgttagcttaatatatcataacttaaatgatttaaattaggtatatgtttataccaataagttttaaattcttaattcttacctcatcaartaccaacaaagaatgcccttccatattaatacactttgggaattaagataaagtatatgtaattaaatcatcaaactccttttgctgtttagcaggtagtttgatataataagagaaattgtgttctcattatatatttgtcacaatgaatgaatgtaaaaccttaatcaggctatctgacttcttttagtgacattaccctttttgcaaccaacacatcaaattagtaatatttatcctacaaaaataatgtgaagataaatgagataagatatataatagtcacaaatacttattgaataaagctgnttttatttatatatttctatgtacttactagatatgttcttattaaatattttattatggtatatgtcaagtcttttacttctttttttatacttagtgtattatagaactcaccatncaataaaattgtaatacaattttcttgatttactaatcctaggtgaaaaaaaaaaatatatatatatatatgttgttttctgtttgaat

SEQ ID NO: 615101 - DNA, 403 bp, Homo sapiens
  misc_feature 130, 248: n = A,T,C or G
acttcttttagtgacattaccctttttgcaaccaacacatcaaattagtaatatttatcctacaaaaataatgtgaagataaatgagataagatatataatagtcacaaatacttattgaataaagctgnttttatttatatatttctatgtacttactagatatgttcttattaaatattttattatggtatatgtcaagtcttttacttctttttttatacttagtgtattatagaactcaccatncaataaaattgtaatacaattttcttgatttactaatcctaggtgaaaaaaaaaaatatatatatatatatgttgtyttctgtttgaattatgcttagttgatggcattttcaataatctctctgattcttccttttcctgtttaaactactctc

SEQ ID NO: 615102 - DNA, 571 bp, Homo sapiens
tccatctcaaaaaaaaaaaaaatatatatatatatatatatatatatatatacacattcacacacaaacgtgcgtctaggtctatttatatatctacacattcttttcaatttctatctaaygtagaaaaaaagtaaacttaagtatatattgatagttttgattctgattgaacaccataagtgttattctagtctccactccccctcatttctaaattctttttctaaaacggaatcagttttgttttagttaatatacttaatataattatttgctttttatttttttttttaatttcaacttttagatttgaggatatatgtgagtgtttgttacagagtatactgcatgatgctgaggtttgggtatgactgaacccatcatccaggtagtgagcatagaacccaagaggtattttctatggcactttacacattctagaaaactggttgttaattaacacaagcacctataatagtgcctgatatatttagtactcaaaatatatgttaaattaaaaacaaatgtataaattaatggttgaatatcataataattactcaaaatg

SEQ ID NO: 615103 - DNA, 516 bp, Homo sapiens
ctcattaaatttaccagcaacataaaagctatttctgcctcttaactttttgatgtgttgcctttttctaatcctcttctcaggacctatttaaaagacaataaaaattttgtttttgtgtgttgaaagatttctccattatcaagagagtagtccttaactttagaatgactgcatatatagatatgaaaaataaggaaacaattattargaaaactaatcaaatattttactaacatttagtaattttaacaaaattattgtgcattgtattttgtagcatttatgcagaggatatactaacctgtttaaatttttagacaaaaatagtagaaaatagaacatcgtcattttcaggagcaaggaagtaacctgtgaaaaagtgaatgcctttcttcaaataatatgctaatgaaaggctgagatattaatgtctaaatattataaaactttcattttaatataatgttttactttatatttatattatattgtataacaaagaaatgtgagtct

SEQ ID NO: 615104 - DNA, 516 bp, Homo sapiens
ctcattaaatttaccagcaacataaaagctatttctgcctcttaactttttgatgtgttgcctttttctaatcctcttctcaggacctatttaaaagacaataaaaattttgtttttgtgtgttgaaagatttctccattatcaagagagtagtccttaactttagaatgactgcatatatagatatgaaaaataaggaaacaattattaggaaaactaatcraatattttactaacatttagtaattttaacaaaattattgtgcattgtattttgtagcatttatgcagaggatatactaacctgtttaaatttttagacaaaaatagtagaaaatagaacatcgtcattttcaggagcaaggaagtaacctgtgaaaaagtgaatgcctttcttcaaataatatgctaatgaaaggctgagatattaatgtctaaatattataaaactttcattttaatataatgttttactttatatttatattatattgtataacaaagaaatgtgagtct

SEQ ID NO: 615105 - DNA, 516 bp, Homo sapiens
ctcattaaatttaccagcaacataaaagctatttctgcctcttaactttttgatgtgttgcctttttctaatcctcttctcaggacctatttaaaagacaataaaaattttgtttttgtgtgttgaaagatttctccattatcaagagagtagtccttaactttagaatgactgcatatatagatatgaaaaataaggaaacaattattaggaaaactaatcaaatwttttactaacatttagtaattttaacaaaattattgtgcattgtattttgtagcatttatgcagaggatatactaacctgtttaaatttttagacaaaaatagtagaaaatagaacatcgtcattttcaggagcaaggaagtaacctgtgaaaaagtgaatgcctttcttcaaataatatgctaatgaaaggctgagatattaatgtctaaatattataaaactttcattttaatataatgttttactttatatttatattatattgtataacaaagaaatgtgagtct

SEQ ID NO: 615106 - DNA, 516 bp, Homo sapiens
ctcattaaatttaccagcaacataaaagctatttctgcctcttaactttttgatgtgttgcctttttctaatcctcttctcaggacctatttaaaagacaataaaaattttgtttttgtgtgttgaaagatttctccattatcaagagagtagtccttaactttagaatgactgcatatatagatatgaaaaataaggaaacaattattaggaaaactaatcaaatattttactaayatttagtaattttaacaaaattattgtgcattgtattttgtagcatttatgcagaggatatactaacctgtttaaatttttagacaaaaatagtagaaaatagaacatcgtcattttcaggagcaaggaagtaacctgtgaaaaagtgaatgcctttcttcaaataatatgctaatgaaaggctgagatattaatgtctaaatattataaaactttcattttaatataatgttttactttatatttatattatattgtataacaaagaaatgtgagtct

SEQ ID NO: 615107 - DNA, 429 bp, Homo sapiens
ggccacccgaaaaagataagatatatgaggtgatcaaagtgaataattatataaacaagaggaattagaatatgaataagccaggaaaaataggaataggccaaraaaacacacacacccatttcttatttaaacctaaagggagacaaattcattcaatctatacatatttattttgctacctcaatagagataaatatcttctctaagaaaaatcccactttacttaatatgtatcacatttacctaataaataacatattactaaaacagagagcaaccagtgttttactctttttttttcagagattttttgctcttgttgcccaagttggagtgcaatggcatgatcccaactcactgcaacctccacctcccaggttcaagcaattctcctgcctcagcctgccaagcagctgggcttacagg

SEQ ID NO: 615108 - DNA, 429 bp, Homo sapiens
ggccacccgaaaaagataagatatatgaggtgatcaaagtgaataattatataaacaagaggaattagaatatgaataagccaggaaaaataggaataggccaagaaaacacacacacccatttcttatttaaacctaaagggagacaaattcattcaatctatacatatttattttgctacctcaatagagataaatatcytctctaagaaaaatcccactttacttaatatgtatcacatttacctaataaataacatattactaaaacagagagcaaccagtgttttactctttttttttcagagattttttgctcttgttgcccaagttggagtgcaatggcatgatcccaactcactgcaacctccacctcccaggttcaagcaattctcctgcctcagcctgccaagcagctgggcttacagg

SEQ ID NO: 615109 - DNA, 429 bp, Homo sapiens
ggccacccgaaaaagataagatatatgaggtgatcaaagtgaataattatataaacaagaggaattagaatatgaataagccaggaaaaataggaataggccaagaaaacacacacacccatttcttatttaaacctaaagggagacaaattcattcaatctatacatatttattttgctacctcaatagagataaatatcttctctaagaaaaatcccrctttacttaatatgtatcacatttacctaataaataacatattactaaaacagagagcaaccagtgttttactctttttttttcagagattttttgctcttgttgcccaagttggagtgcaatggcatgatcccaactcactgcaacctccacctcccaggttcaagcaattctcctgcctcagcctgccaagcagctgggcttacagg

SEQ ID NO: 615110 - DNA, 578 bp, Homo sapiens
cttaactcaccattaaatggcgtacttttagattggctaatggagcagaatccaatctattctgtgtgcaagaaacatattgaacaaggcaattcagaatggtttaatgtaaaaggaagagcaaagatagatcttgtatgatagcaagatcctgaaatagttgtcagaattttgctattgagacaagatagaatttaagacaaaataaatttaacaggataaggaagggaaatttattctacagaaggattcatgcttcattctacattaaaaataaaatatatattaataacatacacaaaattacaattttcataaagcagaaataacagaagttgaaagaagaaatagacattaaaactggagattttaacatagcttattaattggtaagtccttgaagaatgcaaataagcctcacttttastaattaaaaaaaattaacacaaatactgacaaagactctctccttcaccaaactttagtcagatttttgagctctcctctcaactagatcttcacctaggccccttgcctagtctccatagctcacttttaacaagaatccttaagtccat

SEQ ID NO: 615111 - DNA, 578 bp, Homo sapiens
cttaactcaccattaaatggcgtacttttagattggctaatggagcagaatccaatctattctgtgtgcaagaaacatattgaacaaggcaattcagaatggtttaatgtaaaaggaagagcaaagatagatcttgtatgatagcaagatcctgaaatagttgtcagaattttgctattgagacaagatagaatttaagacaaaataaatttaacaggataaggaagggaaatttattctacagaaggattcatgcttcattctacattaaaaataaaatatatattaataacatacacaaaattacaattttcataaagcagaaataacagaagttgaaagaagaaatagacattaaaactggagattttaacatagcttattaattggtaagtccttgaagaatgcaaataagcctcacttttagtaattaaaaaaaattaacacaaatactgacaaagactctctccttcaycaaactttagtcagatttttgagctctcctctcaactagatcttcacctaggccccttgcctagtctccatagctcacttttaacaagaatccttaagtccat

SEQ ID NO: 615112 - DNA, 533 bp, Homo sapiens
gctatatgctggttacttccaaccctgtaaaagttattatttaattacctacatataaaaggtgaccatgaataggcataagatgaaagtatgtcattaatcaaaatgatgattaattcaattctctataattgagattcaattaaaaagattattcatcacattcacagagtaaatgagaaaaatcacatmatttcagtagatgcagatacataagatctgtatcctaacagatattgatacaaagaagtatttgataaaattcatcattaatttactgtatatatatatgctcttattaaactaggatttaaaaggcacttcattaagttgataaagtgtatcttttgaaatcctataaacaatatcttatgacataataatgtgggaatgttagaagacttgcttttaaacctgggaacaagaagagattctctgttattttcctatgctgctgtaacaaattgccacaaaatgggtagcttaaagcaacacagactttttctcttatagttctgaaggccaaaaattca

SEQ ID NO: 615113 - DNA, 533 bp, Homo sapiens
gctatatgctggttacttccaaccctgtaaaagttattatttaattacctacatataaaaggtgaccatgaataggcataagatgaaagtatgtcattaatcaaaatgatgattaattcaattctctataattgagattcaattaaaaagattattcatcacattcacagagtaaatgagaaaaatcacataatttcagtagatgcagatacataagatctgtatcctaacagatattgatacaaagaagtatttgataaaattcatcattaatttactrtatatatatatgctcttattaaactaggatttaaaaggcacttcattaagttgataaagtgtatcttttgaaatcctataaacaatatcttatgacataataatgtgggaatgttagaagacttgcttttaaacctgggaacaagaagagattctctgttattttcctatgctgctgtaacaaattgccacaaaatgggtagcttaaagcaacacagactttttctcttatagttctgaaggccaaaaattca

SEQ ID NO: 615114 - DNA, 533 bp, Homo sapiens
gctatatgctggttacttccaaccctgtaaaagttattatttaattacctacatataaaaggtgaccatgaataggcataagatgaaagtatgtcattaatcaaaatgatgattaattcaattctctataattgagattcaattaaaaagattattcatcacattcacagagtaaatgagaaaaatcacataatttcagtagatgcagatacataagatctgtatcctaacagatattgatacaaagaagtatttgataaaattcatcattaatttactgtayatatatatgctcttattaaactaggatttaaaaggcacttcattaagttgataaagtgtatcttttgaaatcctataaacaatatcttatgacataataatgtgggaatgttagaagacttgcttttaaacctgggaacaagaagagattctctgttattttcctatgctgctgtaacaaattgccacaaaatgggtagcttaaagcaacacagactttttctcttatagttctgaaggccaaaaattca

SEQ ID NO: 615115 - DNA, 533 bp, Homo sapiens
gctatatgctggttacttccaaccctgtaaaagttattatttaattacctacatataaaaggtgaccatgaataggcataagatgaaagtatgtcattaatcaaaatgatgattaattcaattctctataattgagattcaattaaaaagattattcatcacattcacagagtaaatgagaaaaatcacataatttcagtagatgcagatacataagatctgtatcctaacagatattgatacaaagaagtatttgataaaattcatcattaatttactgtatatatatatgctcttattaaactaggatttaaaaggcacttcattaagttgataaagtgtatcttttgaaatcctataaacaatatcttatgacataataatgtgggaatgttagaagacttgcttttmaacctgggaacaagaagagattctctgttattttcctatgctgctgtaacaaattgccacaaaatgggtagcttaaagcaacacagactttttctcttatagttctgaaggccaaaaattca

SEQ ID NO: 615116 - DNA, 604 bp, Homo sapiens
acatttctcgtctcaaagtccccttcttctatcttcaaagatagcagcrtataattttcaaatatttctccactttcatgatcacacaacctagattctatgtcaaatctccctctccatcactcttataaggacacttaagattgcatttagagcccaccaagataattcatgataatcttccatcacaaaattcttcacttactcacatctgcaagtctctttgacataaaggttacatttacaggtactaaggattaagacctgacatctcttgagaccattattcagcctaacacagatgtcctctcttgctgcttgttttacacattgtacttttctgaatacttttgagaaagtttgctctaaagaagaaaaaaaaagtagttctatatttgtgagacatgtagactgaggagaatgactatttttctaatgtgataaataaaagcacatttatgtgacaatagcaataatagagaagataaatgaaagttatgcagaagggagaagatttgacaatagcaagcatgaaagccctgcaggagaaaagtttggatgggatactgaataaaattgtaatattactttttgatgcatacgt

SEQ ID NO: 615117 - DNA, 604 bp, Homo sapiens
acatttctcgtctcaaagtccccttcttctatcttcaaagatagcagcatataattttcaaatatttctccacttycatgatcacacaacctagattctatgtcaaatctccctctccatcactcttataaggacacttaagattgcatttagagcccaccaagataattcatgataatcttccatcacaaaattcttcacttactcacatctgcaagtctctttgacataaaggttacatttacaggtactaaggattaagacctgacatctcttgagaccattattcagcctaacacagatgtcctctcttgctgcttgttttacacattgtacttttctgaatacttttgagaaagtttgctctaaagaagaaaaaaaaagtagttctatatttgtgagacatgtagactgaggagaatgactatttttctaatgtgataaataaaagcacatttatgtgacaatagcaataatagagaagataaatgaaagttatgcagaagggagaagatttgacaatagcaagcatgaaagccctgcaggagaaaagtttggatgggatactgaataaaattgtaatattactttttgatgcatacgt

SEQ ID NO: 615118 - DNA, 604 bp, Homo sapiens
acatttctcgtctcaaagtccccttcttctatcttcaaagatagcagcatataattttcaaatatttctccactttcatgatcacacaacctagattctatgtcaaatctccctctccatcactcttataaggacacttaagattgcatttagagcccaccaagataattcatgataatcttccatcacaaaattcttcacttactcacatctgcaagtctctttgmcataaaggttacatttacaggtactaaggattaagacctgacatctcttgagaccattattcagcctaacacagatgtcctctcttgctgcttgttttacacattgtacttttctgaatacttttgagaaagtttgctctaaagaagaaaaaaaaagtagttctatatttgtgagacatgtagactgaggagaatgactatttttctaatgtgataaataaaagcacatttatgtgacaatagcaataatagagaagataaatgaaagttatgcagaagggagaagatttgacaatagcaagcatgaaagccctgcaggagaaaagtttggatgggatactgaataaaattgtaatattactttttgatgcatacgt

SEQ ID NO: 615119 - DNA, 591 bp, Homo sapiens
atcaccacagtcatttgttcttgactatttgcaaatcatttcaggaagacatggtgaaacatcctacaytgtgagtggcagaaccccatgtgcactgcaatctcatttcctaccctccggaggagtatataaacttttcctacataaataatggccatatttttgtatcaatacattgtaagttctaagatgtgtgtgtttttttaagaggaattaaaatagaaaagcatatacctaaaagatgttcctcgggatatatctgcatatattctctactcttgtcattttaagtaaaaatacagtggtcccttgatatcctcaagagacagggtccaggaccccagaggataccaaaatcagcacatattcaagtaatcctgtggaaccagagtatacaaaaagtcagtcctccatatctgcgggtttttcatcctgtggctactgtattttgatccacatttcaatgcagatgctgatttttttaattaaaataatctctatataagggatgcacacagctcaagctcatgttgttcaagtgtcaaccgtacttttttatttctgtccaatataatttaaataacataattc

SEQ ID NO: 615120 - DNA, 591 bp, Homo sapiens
atcaccacagtcatttgttcttgactatttgcaaatcatttcaggaagacatggtgaaacatcctacactgtgagtggcagaaccccatgtgcactgcaatctcatttcctaccctccggaggagtatataaacttttcctacataaataatggccatatttttktatcaatacattgtaagttctaagatgtgtgtgtttttttaagaggaattaaaatagaaaagcatatacctaaaagatgttcctcgggatatatctgcatatattctctactcttgtcattttaagtaaaaatacagtggtcccttgatatcctcaagagacagggtccaggaccccagaggataccaaaatcagcacatattcaagtaatcctgtggaaccagagtatacaaaaagtcagtcctccatatctgcgggtttttcatcctgtggctactgtattttgatccacatttcaatgcagatgctgatttttttaattaaaataatctctatataagggatgcacacagctcaagctcatgttgttcaagtgtcaaccgtacttttttatttctgtccaatataatttaaataacataattc

SEQ ID NO: 615121 - DNA, 523 bp, Homo sapiens
aagattaaaaattgtttgtaaaactatctagaaaaaatttattatcattacagccacagttagattacaaaagggttcatcagaaatctctgaggtatataatggggaaagaatattttgactaccactttaacaggtctgttatttaataatattagtttctttttaattgatgtttcgtggacatccagaatactagctataaaatcatatatgctgcataatgcaagcaaaacaaaagcacctgtaaatattacagaagactatacatgtatgtatatcaytgccataaaatacctatatacatacacgtatatacacacataattgttttcacaaccatgatattacttacaaaagcatgcaaatttagggagatggctaaataagttatggctttttcataaattgtaagcctattcattataaaatattattgaggatcaactttcatttgttccccaacaaattattgagcatctactatgtatattctaggcccatttgtagggactggggaaaa

SEQ ID NO: 615122 - DNA, 442 bp, Homo sapiens
tgagagagaaagagatgagctgatttgactactccaggctagaggatatgtagctgagagtctatggctgagtggaggaaaaaaaaaaaatcacaagccctgtccaggataacagagagagaaagctgtttctgttgagatttgatggccctcatcacaccaaatttgggcttctagctagcctcagttcttcagataactgaccttccttctttcctccctcttgtaatagtctttgtgtaytagaagtaccttgaaatactgggtcagaaaatgtggcacaaaagagaaaagctggctcactccacatcttgacctgatcatttcctgaacatgattgaggtagatgactctttgctcctctttggctgacctgcaggaataacattgggaataagcaaatctcctttggactccagagggtggtggtcaggaagtgggc

SEQ ID NO: 615123 - DNA, 410 bp, Homo sapiens
tgtattatattcatttcaattttaatttcaagacctaattttgctgtcttaaagatcatggataactccatcttatctcagtgttcaatctataattcattaaaacagttttcaaaagaattttcaaaatactttattatgattacaaccatacttaatcttcaattaggacatactatgtgataaatactatggtgaagtacttctcaataatccatattcttaaacacaacaagttctaggatcaaactgcttamatttatatatttgctcaatcacttgcaacataaatattttacagatgaagaaactaaaacacttttttttttctccgaaactgtttcagggctaacttactcatgagcttggtaaaaataaaaattattagataccttgtggatccgttgcat

SEQ ID NO: 615124 - DNA, 410 bp, Homo sapiens
tgtattatattcatttcaattttaatttcaagacctaattttgctgtcttaaagatcatggataactccatcttatctcagtgttcaatctataattcattaaaacagttttcaaaagaattttcaaaatactttattatgattacaaccatacttaatcttcaattaggacatactatgtgataaatactatggtgaagtacttctcaataatccatattcttaaacacaacaagttctaggatcaaactgcttacatttatatatttgctcaatcayttgcaacataaatattttacagatgaagaaactaaaacacttttttttttctccgaaactgtttcagggctaacttactcatgagcttggtaaaaataaaaattattagataccttgtggatccgttgcat

SEQ ID NO: 615125 - DNA, 504 bp, Homo sapiens
gaatcaccacactgttttccacaatggctgaattaatttacattccctttaacagtgtatagtgttcctttttctctgcaaccttaccagcacctgctattttttgactttttaatamtagccattctgactggtgtgcttactggttcttaatctcacccacatcttagaataatgtggaacatttcaaactaccgacacctctttctaaaaactgaagttctgttttaattggactttagtagagccaagaaatgagtattatttaaaatcttgccatgtgattctactaggaagccagggttcagagccatggattacatttttaatataaatacacattattagttgaagcagttttaagttaggatagctgtaacgttgattgaaaggggaatacttaaaacagaaccctgccttgggtcgtcaagacttaaaaaattcttctgtttttattctattaaatataatcatgcattcacttactttagcatttataattct

SEQ ID NO: 615126 - DNA, 504 bp, Homo sapiens
gaatcaccacactgttttccacaatggctgaattaatttacattccctttaacagtgtatagtgttcctttttctctgcaaccttaccagcacctgctattttttgactttttaataatagccattctgactggtgtgcttactggttcttaatctcacccacatcttagaataatgtggaacatttcaaactaccgacacctctttctaaaaactgaagttctgttttaattggactttagtagagccaagaaatgagtattayttaaaatcttgccatgtgattctactaggaagccagggttcagagccatggattacatttttaatataaatacacattattagttgaagcagttttaagttaggatagctgtaacgttgattgaaaggggaatacttaaaacagaaccctgccttgggtcgtcaagacttaaaaaattcttctgtttttattctattaaatataatcatgcattcacttactttagcatttataattct

SEQ ID NO: 615127 - DNA, 504 bp, Homo sapiens
gaatcaccacactgttttccacaatggctgaattaatttacattccctttaacagtgtatagtgttcctttttctctgcaaccttaccagcacctgctattttttgactttttaataatagccattctgactggtgtgcttactggttcttaatctcacccacatcttagaataatgtggaacatttcaaactaccgacacctctttctaaaaactgaagttctgttttaattggactttagtagagccaagaaatgagtattatttaaaatcttgccatgtgattctactaggaagccagggttcakagccatggattacatttttaatataaatacacattattagttgaagcagttttaagttaggatagctgtaacgttgattgaaaggggaatacttaaaacagaaccctgccttgggtcgtcaagacttaaaaaattcttctgtttttattctattaaatataatcatgcattcacttactttagcatttataattct

SEQ ID NO: 615128 - DNA, 504 bp, Homo sapiens
gaatcaccacactgttttccacaatggctgaattaatttacattccctttaacagtgtatagtgttcctttttctctgcaaccttaccagcacctgctattttttgactttttaataatagccattctgactggtgtgcttactggttcttaatctcacccacatcttagaataatgtggaacatttcaaactaccgacacctctttctaaaaactgaagttctgttttaattggactttagtagagccaagaaatgagtattatttaaaatcttgccatgtgattctactaggaagccagggttcagagccatggattacatttttaatataaatacacattattagttgaagcagttttaagttaggatagctgtaacgttgattgaaaggggaatacttaaaacagaaccctgccttgggtcgtcaagacttaaaaaattcttctgtttttattctattaaatataatcatgcattcayttactttagcatttataattct

SEQ ID NO: 615129 - DNA, 547 bp, Homo sapiens
aagccaaaattctgtaaagcagcctgaaaataaggcttattaccattaaataacaacatttcagtctatagaaacttacatcctaggagagggaatactttaaataaaaaagtaatggatgaaaagagaaaaattccatcaagtgggataactgttatccataaagaagtagcaggtgaratggggagtaaaaaaacaaacatatataaatcctcttattttatatattatagctcaattttattcccatctttgataatccaaaaattatacactgatcaatatatctgttctaaatgttaagattccaacaggtagatcatgtctctcaaaatgtgttgcacattgcctcaactggaggttcatgatgcatattaaaataagaaaggcttagagaattcttacagcaaggaaaacaatgtaagtttatttaatttagtgttttagctatatatttaataattattttaggtaggcagttgtttaaagacaatagaaattacttggaatttaaagcaagcaaaaatgaatgcgttggaaaagcaca

SEQ ID NO: 615130 - DNA, 547 bp, Homo sapiens
aagccaaaattctgtaaagcagcctgaaaataaggcttattaccattaaataacaacatttcagtctatagaaacttacatcctaggagagggaatactttaaataaaaaagtaatggatgaaaagagaaaaattccatcaagtgggataactgttatccataaagaagtagcaggtgaaatggggagtaaaaaaacaaacatatataaatcctcttattttatatattatagctcaattttattcccatctttgataatccaaaaattatacactgatcaatatatctgttctaaatgttaagattccaacaggtagatcatgtctctcaaaatgtgttgcacattgcctcaactggaggttcatgatgcatattaaaataagaaaggcttagagaattcttacagcaaggaaaacaatgtaagtttatttaatttagtgttttagctatatatttaataattattttrggtaggcagttgtttaaagacaatagaaattacttggaatttaaagcaagcaaaaatgaatgcgttggaaaagcaca

SEQ ID NO: 615131 - DNA, 522 bp, Homo sapiens
agaaccagtatcagaaaaaggaagttctgcttttcatgtggctattgtcctgtcagtcatgaccgctggccactgccagcaaagcatgcacaggcattttctggaatgctgctgggctctgctttagcttgtcacttcccactttaccattggattcaaaaaatctatccatctgacaggaataatttcagactctctgcctacttcttaccttgcaaggttaaaaatgcaaggaatgagtggytattcttgggtctctggtttacattttagcctccagttggtgggaagagaaaaatctactcacaaacagcttcaaaacggaaaggtcctatattggcattcctacataaaagaaagtactggggggcttgacaaatggacatttgtcttcaaagaacacattttctcctttagacaaagtttgcacttatatagcacaattaacctacttcttatcaatcaataaaatgaagagacaattacagaacaggataaggtgtttgcaaactatgtattcaa

SEQ ID NO: 615132 - DNA, 582 bp, Homo sapiens
tatcaatcaataaaatgaagagacaattacagaacaggataaggtgtttgcaaactatgtattcaacaaggtttgatatccagaatatataaggaactcaaaaaactcaatagcaaaagaaaaagttgactaaaaaatggacaaaagaagacatacaaatggccaaaaaatatataaagaaatgctcaacatcattaagcctcagaaaaatgcaaaacaaaaccgcaatgagctatyaccttatcccagtttaaatgatggatattatcaagaagacaaaatataacaaatggaaacgataatgtggagaaagaggaatgttatacactgttggtgggaatttaaaatagtatagctgttatgaaaagcagtatggagtttccacaaaaaataaaaaagagaactactatattacccagcaatcccactactgggtacgtaatcaaaaaaaatgaaattagtatgtcaaagagacatctgcacccagggatattgaagcatcattcaaaatagccgtgatatggaatctgcctaaatgctcatctaacaacaaatggataaagaaaatgtggtgtataaatg

SEQ ID NO: 615133 - DNA, 619 bp, Homo sapiens
acttcactaccatttttaaatctacagcatttatataaattaataactgctgtagagcatactactcatggctgaaaaaagtgacctgatgattcgagctatctaagacccacctgatgtctgacagcactaaggatcaagctatcacctctcccttaacacatctttcacaccagtgtgctagagcagatagctgaaaagttttccctaagccagagatcattctgacaaggcatgtggaacaatggagatgtcarcatgctttcaagacaagtaacagtaatcctggctcttaacttgctttaataataatgaattcttttatcaagtcctgaggaatgagggcttccaggtgccgtatttccaggtgcttatcagaatttttctttgctgataagaacaattgttgcagcatgctttgctaatcatatacagaaagacaagaaatttatattctaataatagaacacaagtccatctcttgcatctgatttagccagattaagtcacctttccaccaatatcaatctggaagtgatatcatgaactaaatggtgtcaacctggggtttgtattatatctcgacaaaggaaaagaagttgccatcattggcaaggta

SEQ ID NO: 615134 - DNA, 619 bp, Homo sapiens
acttcactaccatttttaaatctacagcatttatataaattaataactgctgtagagcatactactcatggctgaaaaaagtgacctgatgattcgagctatctaagacccacctgatgtctgacagcactaaggatcaagctatcacctctcccttaacacatctttcacaccagtgtgctagagcagatagctgaaaagttttccctaagccagagatcattctgacaaggcatgtggaacaatggagatgtcagcatgctttcaagacaagtaacagtaatcctggctcttaacttgctttaataataatgaattcttttatcaagtcctgaggaatgagggcttccaggtgccgtatttccaggtgcttatcagaatttttctttgctgataagaacaattgttgcagcatgctttgctaatcayatacagaaagacaagaaatttatattctaataatagaacacaagtccatctcttgcatctgatttagccagattaagtcacctttccaccaatatcaatctggaagtgatatcatgaactaaatggtgtcaacctggggtttgtattatatctcgacaaaggaaaagaagttgccatcattggcaaggta

SEQ ID NO: 615135 - DNA, 517 bp, Homo sapiens
gctttgctaatcatatacagaaagacaagaaatttatattctaataatagaacacaagtccatctcttgcatctgatttagccagattaagtcacstttccaccaatatcaatctggaagtgatatcatgaactaaatggtgtcaacctggggtttgtattatatctcgacaaaggaaaagaagttgccatcattggcaaggtacatacaggatacatctctgtttcggcagatgggatgagatttccctgattctcctacactgcagagggtagagggaggtatttatataatacacagaattttaattgaagaagcaaagaggaatggattaatgggattaatagtgtttatccaatacaagatgaaaaacaacatattattgtttgtatcgtgatggttctagaataaaacacatcatttctctaattttagttagatctttgctgaaagaaaaagataaataaaataccctacagtttatccatatccatgttcttctacactaaatattcat

SEQ ID NO: 615136 - DNA, 517 bp, Homo sapiens
gctttgctaatcatatacagaaagacaagaaatttatattctaataatagaacacaagtccatctcttgcatctgatttagccagattaagtcacctttccaccaatatcaatctggaagtgatatcatgaactaaatggtgtcaacctggggtttgtattatatctcgacaaargaaaagaagttgccatcattggcaaggtacatacaggatacatctctgtttcggcagatgggatgagatttccctgattctcctacactgcagagggtagagggaggtatttatataatacacagaattttaattgaagaagcaaagaggaatggattaatgggattaatagtgtttatccaatacaagatgaaaaacaacatattattgtttgtatcgtgatggttctagaataaaacacatcatttctctaattttagttagatctttgctgaaagaaaaagataaataaaataccctacagtttatccatatccatgttcttctacactaaatattcat

SEQ ID NO: 615137 - DNA, 610 bp, Homo sapiens
ttttaattaaaattataatagtaaaagctaaaaatgacaagacaattgttagaaatcatatcacaacagcataatcatgtatccataagtgattgatacaataacatgaactgacattttgctgcaatattaatcagttaatacaggtttttaggtttcagttaactggttaatcataaaatattatataaaawattatcaaattgtgtaagtcatctcactgtattctaaaatttatgttattttatatttctaatctatgttttgcagagatcatgaaaattttactgggtaactgaagaagaattgtcccaaggacttgaataaatgttaatgttcataacagtatgttctaaaaagaaatttaagtaaaaaaggaaaaaacatatttcattttaaaaatatctacccatgcacatcattcatctaaaaaacccatttaatataatcatctagttatgtaaagatatacccaatagctacttaaaatagaaatattctatttcattattagaaattattattttaaaaggttgttaaaacatcaaaaatatgcttatttctagtaaccagagaacacagcagggttatgaaactttggattcctgtt

SEQ ID NO: 615138 - DNA, 610 bp, Homo sapiens
ttttaattaaaattataatagtaaaagctaaaaatgacaagacaattgttagaaatcatatcacaacagcataatcatgtatccataagtgattgatacaataacatgaactgacattttgctgcaatattaatcagttaatacaggtttttaggtttcagttaactggttaatcataaaatattatataaaaaattatcaaattgtgtaagtcatctcactgtattctaaaatttatgttattttatatttctaatctatgttttgcagagatcatgaaaattttactgggtaactgaagaagaattgtcccaaggacttgrataaatgttaatgttcataacagtatgttctaaaaagaaatttaagtaaaaaaggaaaaaacatatttcattttaaaaatatctacccatgcacatcattcatctaaaaaacccatttaatataatcatctagttatgtaaagatatacccaatagctacttaaaatagaaatattctatttcattattagaaattattattttaaaaggttgttaaaacatcaaaaatatgcttatttctagtaaccagagaacacagcagggttatgaaactttggattcctgtt

SEQ ID NO: 615139 - DNA, 518 bp, Homo sapiens
atgatagaaagggaatgttcaggttaagataaaagactgtggagaccaaggttcttttgaagtcttacagtggctgcccttagagacaataaatgacaagtgtttcctattcagatctttaaaaggtactagacttttagttaatctctttagaactgcgagggccattttttcatattataatttatctccttyatgtctgtaacaaagataggaatcgctataaagtgtcttcccagtttctgcctaaccacatccctggatttcctggctcctggcttggcatatgtttggggttagccttctcccactgctaatttgtatgccataagatggttgttttgttcctcagtacatttatgtcagatataattgttactgtagtaaacaactattgtgtaaaaaaatgataagtgagtgtgaaagtaaaaaaacaaatcagaaaatgaagcagaatgtaaataattgataaagacaagttctgaaaaaatatcaaattggatttaggagtcagacac

SEQ ID NO: 615140 - DNA, 518 bp, Homo sapiens
atgatagaaagggaatgttcaggttaagataaaagactgtggagaccaaggttcttttgaagtcttacagtggctgcccttagagacaataaatgacaagtgtttcctattcagatctttaaaaggtactagacttttagttaatctctttagaactgcgagggccattttttcatattataatttatctccttcatgtctgtaacaaagataggaatcgctataaagtgtcttcccagtttctgcctaaccacatccctggatttcctggcycctggcttggcatatgtttggggttagccttctcccactgctaatttgtatgccataagatggttgttttgttcctcagtacatttatgtcagatataattgttactgtagtaaacaactattgtgtaaaaaaatgataagtgagtgtgaaagtaaaaaaacaaatcagaaaatgaagcagaatgtaaataattgataaagacaagttctgaaaaaatatcaaattggatttaggagtcagacac

SEQ ID NO: 615141 - DNA, 518 bp, Homo sapiens
atgatagaaagggaatgttcaggttaagataaaagactgtggagaccaaggttcttttgaagtcttacagtggctgcccttagagacaataaatgacaagtgtttcctattcagatctttaaaaggtactagacttttagttaatctctttagaactgcgagggccattttttcatattataatttatctccttcatgtctgtaacaaagataggaatcgctataaagtgtcttcccagtttctgcctaaccacatccctggatttcctggctcctggcttggcatatgtttggggttagccttctcccaytgctaatttgtatgccataagatggttgttttgttcctcagtacatttatgtcagatataattgttactgtagtaaacaactattgtgtaaaaaaatgataagtgagtgtgaaagtaaaaaaacaaatcagaaaatgaagcagaatgtaaataattgataaagacaagttctgaaaaaatatcaaattggatttaggagtcagacac

SEQ ID NO: 615142 - DNA, 563 bp, Homo sapiens
aagcaatacatctctttctatcatatactgatatcttgaaaacttttataacgtttctagtcacattcagtattttaaaaataggattgattctaagttttgagtttatggtgtatttgaatattagagatattatctcttatacatttcaaagctttgctgcattctaaactcagycctgccttagccttagtaacggcaatgaagtgcggggatagaatgttcactatttttttatgtgctgttaaaatttcatacctcctgttctatcttgaagtcttacagttttggaatggtgagtgggggaaacaagcataaaactattacataattcatgcagttttcactgggcaacagtatctatcctctgaatggtgaaatggctacttttcatttatttatttttttctctcctggggtaaagcgcttgaaaactgcaccactgggaaattgcagctatagtccatgtttcaacatagtccatgcttctttgagttggccacttactgtttactctcatctccttaggtttagcagtaaagacctgtaagatttcttctgtt
